United States Patent Application Publication US 2011/0296543 A1 - sequence listing, part 18

SEQ ID NO: 74809 - DNA, 846 bp, Unknown
  Obtained from environmental sample
  misc_feature (1)..(846): n is a, c, g, or t
gtggtcgtacaggggctgaccgcaagggaaggcagcttccacggcgcgcggatgatcgaatacggcaccagggtcgttgccggcgtaacgcccggcagggggggacagaccgtgctcgatgtgccggtgttcaacaccgtgcgctcggcggtggcggcgaccggcgccgatgcgagcgtcatcttcgcgcccccggccatctcggcggacgctgcctgcgaagccgccgatgccggcatcaagctcgtggtgctgatcaccgaacacatccccgtactggacatggtgcgcgccaaagccttcctgaacgcgcgcggcacactgctcgtcgggccgaattgtcccggcgtcatcagtcccggcaagtgcaaaatcggcatccagcctggctatatccacaaagccgggaatatcggcatcatcagccgttccggcaccctgacctacgaggccgtgcatcagttgagcgccaggggcctcgggcagagcacctgcatcggcatcggcggggaccccgtgcccggtatgaactttcttgacctgctacgcatgttccgggacgatccgcagaccgaagcggtctgcatgctgggggaaatcggcggggacaacgaggagaaagccgcacgctacgtgagggaatcgcgctatcccaagccggtcttcggcttcatcgccgggctgacggcgccgtcgggcaagcgcatgggccacgcgggcgcgatcatcagtggttccaaaggccgcggagaagacaaactcgcggccatggaagctgccggcatcctcgtcatcaaggaactcggccgcttcggtgaaacggtcgcccgacatatgaacgggtga

SEQ ID NO: 74810 - protein, 281 aa, Unknown
  Obtained from environmental sample
  DOMAIN (1)...(90): CoA binding domain
  misc_feature (1)..(281): Xaa is any amino acid
MVVQGLTAREGSFHGARMIEYGTRVVAGVTPGRGGQTVLDVPVFNTVRSAVAATGADASVIFAPPAISADAACEAADAGIKLVVLITEHIPVLDMVRAKAFLNARGTLLVGPNCPGVISPGKCKIGIQPGYIHKAGNIGIISRSGTLTYEAVHQLSARGLGQSTCIGIGGDPVPGMNFLDLLRMFRDDPQTEAVCMLGEIGGDNEEKAARYVRESRYPKPVFGFIAGLTAPSGKRMGHAGAIISGSKGRGEDKLAAMEAAGILVIKELGRFGETVARHMNG

SEQ ID NO: 74811 - DNA, 702 bp, Unknown
  Obtained from environmental sample
  misc_feature (1)..(702): n is a, c, g, or t
atgtcagtcgtcgcgagttaccggttctgctgtcgtacatcagagatattgaccatacagcatttgtttcggtgctcgatgcacacgatgtacttggcgacggattcaaaccattatcagaacattgaactatataatccgtacctgttttgggatagctcacaggatattttcgccggcgcggaaagatattttgccggcaaaaaaaaatattttgccggcaaaataagttatcgcgccggcaaaataagttatttcgcaggcgcgggaagatattttgccggcgcaagatatattttgcaggcgtgggaacattgttttgccggcgcgaaatgttattttgccggcgcaagatatattttgccggcgcgagaacattattttgccggcgcaggaagatgttttgccggcgcaaaatgttattttgccggcgcgaaatgttattttgccggcgcgaaatattatttagcaggcgcaggaagttgtttcgccggcgcgggaagatgtttagcaggcgcaggaagttgtttagcaggcgcaggaagatgtttcgccggcgcaggaagttatttagcaggcgcaggaagttatttagcgctgtataattcttccagagcctttccggcaatgttcaggttatatttttcgattactgcttttttgccgttttttcccatttcgatgccagtttcagggttatga

SEQ ID NO: 74812 - protein, 233 aa, Unknown
  Obtained from environmental sample
  misc_feature (1)..(233): Xaa is any amino acid
MSVVASYRFCCRTSEILTIQHLFRCSMHTMYLATDSNHYQNIELYNPYLFWDSSQDIFAGAERYFAGKKKYFAGKISYRAGKISYFAGAGRYFAGARYILQAWEHCFAGAKCYFAGARYILPAREHYFAGAGRCFAGAKCYFAGAKCYFAGAKYYLAGAGSCFAGAGRCLAGAGSCLAGAGRCFAGAGSYLAGAGSYLALYNSSRAFPAMFRLYFSITAFLPFFPISMPVSGL

SEQ ID NO: 74813 - DNA, 681 bp, Unknown
  Obtained from environmental sample
  misc_feature (1)..(681): n is a, c, g, or t
atggcgcgctgggaaacacattatcacggactcgaagctacacttaatccgtataatctcctatttgggatgtctatcttttttcttgtccgcgttctggcattactctattttctcaacaacataaacaacaaacacattgcagtacgttccaaaatacgcctttcacgcaatttcacatcattcatcgcgttctttgccgtattcattgtatatttaatgataaacgacggattcaattacgaccccgaaacaaaaatcgtgaacatggaaacaaacaaatatatgaataacctgctcgaaatgccagtaatactgacaacactgattattggcgtgctgttaatactctttggcgttatccgctcgttagtgcgcggacatttcaatcgggggatatggtacgcaggctcaggaacaatactcacagtaacatcactgttgcttatatccggacttaaccacacctgctttttcccttcactgaaagccggatatttacaagactcgcttacaatagagaacagttcggcaagccattacacgctaaaaatgatgagtaacgcatcattattcattccattagttgcaatctgcatattctgggcgtggaaaacagttaaccgtaatcgcatctcaactgaagaattgaacgaagaaataaatctattaaataaataa

SEQ ID NO: 74814 - protein, 226 aa, Unknown
  Obtained from environmental sample
  misc_feature (1)..(226): Xaa is any amino acid
MARWETHYHGLEATLNPYNLLFGMSIFFLVRVLALLYFLNNINNKHIAVRSKIRLSRNFTSFIAFFAVFIVYLMINDGFNYDPETKIVNMETNKYMNNLLEMPVILTTLIIGVLLILFGVIRSLVRGHFNRGIWYAGSGTILTVTSLLLISGLNHTCFFPSLKAGYLQDSLTIENSSASHYTLKMMSNASLFIPLVAICIFWAWKTVNRNRISTEELNEEINLLNK

SEQ ID NO: 74815 - DNA, 732 bp, Unknown
  Obtained from environmental sample
  misc_feature (1)..(732): n is a, c, g, or t
atgtctcatttgcattttacatctacggaagaataccgccggcgtgtcattcaaatgggcgaagatcctgaaacggtatataatgtcggggctttggggtgtgataatatcaggcaagtctctttaatgaaaaaagaagaactggaggaatcgttgaatttttcgctggatcggaataccatccttgtaacgttccatccggtaaccatggaaaacaataccgctgaaactcaatttaacgagcttcttttggctgttgataattttgataatttacgggtgatttttactatgcctaattcggatacgggcagccggactattatggatttaattaaaaattatgccgctaaaaattcaaaaaaagcggtatggtttacatctttaggcatgatgcgttatctggcactgttacaatatattggcgctgttgtaggaaattcttcaagcggtattcttgaagttccatgttttcatattccgacattgaatattggcgacaggcaaaaaggccgtattgcggcaaggagtgttattaattgtctgcctataaaagatgacattgaaaaaaaattggcgatcatcactaaatctggttatattgagagtttacaggatgttgtaaatccttatgataaacccgacacggcgcaggaactagtaagaatcatcaaagaaaaatcaaatattccggtgaagaagaaattttataacatagccataaacgcatga

SEQ ID NO: 74816 - protein, 243 aa, Unknown
  Obtained from environmental sample
  DOMAIN (1)...(225): UDP-N-acetylglucosamine 2-epimerase
  misc_feature (1)..(243): Xaa is any amino acid
MSHLHFTSTEEYRRRVIQMGEDPETVYNVGALGCDNIRQVSLMKKEELEESLNFSLDRNTILVTFHPVTMENNTAETQFNELLLAVDNFDNLRVIFTMPNSDTGSRTIMDLIKNYAAKNSKKAVWFTSLGMMRYLALLQYIGAVVGNSSSGILEVPCFHIPTLNIGDRQKGRIAARSVINCLPIKDDIEKKLAIITKSGYIESLQDVVNPYDKPDTAQELVRIIKEKSNIPVKKKFYNIAINA

SEQ ID NO: 74817 - DNA, 390 bp, Unknown
  Obtained from environmental sample
  misc_feature (1)..(390): n is a, c, g, or t
gtgcaggaatttatggtcgtgccggatgcggtggccaaagtggtggtcaatcagcgcacgggcaccgtggtgatcggcgagaacgtgcgtctggcgccggtagctatttcgcacggcgatgtggatatccggattgagagcgaagagccgacagccaatgaaacctcggccgacacctatctggctctgaataacaatcaagaatccggcggcgccaatacaacgaccaagacgacaaccattaaattagtgcagctcaaagaaggagctacattgagcagtttagttaaagcgttaaattcggtcggcacttcgccgcaggatttgattgctattctgcaggcgttgaaaaccgccggggctttgtcggcggaaatagaggttatctaa

SEQ ID NO: 74818 - protein, 129 aa, Unknown
  Obtained from environmental sample
  DOMAIN (1)...(129): Flagellar P-ring protein
  misc_feature (1)..(129): Xaa is any amino acid
MQEFMVVPDAVAKVVVNQRTGTVVIGENVRLAPVAISHGDVDIRIESEEPTANETSADTYLALNNNQESGGANTTTKTTTIKLVQLKEGATLSSLVKALNSVGTSPQDLIAILQALKTAGALSAEIEVI

SEQ ID NO: 74819 - DNA, 495 bp, Unknown
  Obtained from environmental sample
  misc_feature (1)..(495): n is a, c, g, or t
atgaaaaaaataataatattgtgcgggctattaagcggatttgttttggccgccagcggagcgggcttggaaaacgcgctggacatcagcgcttccggagccacagcccagcgtattaaagcgcaaatcatcgcggaaaatatcgccaatatggatacgaccaagaccgcggacggcttgccttaccgccgcaagatcgtggtgatgcgtccggaggaggatttttctaattccggacggacggcacggatgatgctcaaaggcgtgcgggtagtagcggtggaagccgagcccaaagccgagcataaatttcagcgcgtgtttaaacccgatcatccggacgcagacgcccggggttttgtaaattatccgaacattgatctggccggcgagctggtggaattatccgaggtcggcagcgcctttgaaaacaatgtggtggtttttaataataccaaagcgatgatgcaggccagtctggagctggctcaataa

SEQ ID NO: 74820 - protein, 164 aa, Unknown
  Obtained from environmental sample
  SIGNAL (1)...(17)
  DOMAIN (27)...(58): Flagella basal body rod protein
  misc_feature (1)..(164): Xaa is any amino acid
MKKIIILCGLLSGFVLAASGAGLENALDISASGATAQRIKAQIIAENIANMDTTKTADGLPYRRKIVVMRPEEDFSNSGRTARMMLKGVRVVAVEAEPKAEHKFQRVFKPDHPDADARGFVNYPNIDLAGELVELSEVGSAFENNVVVFNNTKAMMQASLELAQ

SEQ ID NO: 74821 - DNA, 708 bp, Unknown
  Obtained from environmental sample
  misc_feature (1)..(708): n is a, c, g, or t
gtgagcgttcggtcgtggatagcgcgcgagcttgtaagcaatattttagtccaccgcgagtatttgagtgcgtatcctgcgaagatcatcatcgagcgcgaccgcattgcgacagaaaactggtgtttgccaaaaactcccggtcgaataaacccaaacacgttcaccccgtacccaaaaaacccactgcttgctggcttcttcatcaacataggacgcgccgacatcctcggttcgggtgtgaggaatttgtacaagtacaccaaaatttactccggcggcgaacccgaactcgttgaggccgatgttttcaggacagttgtgcctctcttttcttacgatggtctagcgagctataaacatgtgagcgataaagtgagcgataaccaagaaatgagcgataaagtgagcgataaccaagaaatgagcgataaagtgagcgataaccaagaaatgagcgataaagtgagcgataaagtgagcgataaaacgagcgataacgaacagatgagcgataaaagcgtgcgcgacgctttgctggcgcatttgcgagacaatggcgaaataaccgctgtggaagcggcaaaggtcatcagccgctccacaccgaccgctcgccgtatgctttccggtcttgtcgccgaagggctggtcgtagcgacaggcgcaaatcggaatcgaaaatatagagcagcagagcgacaataa

SEQ ID NO: 74822 - protein, 235 aa, Unknown
  Obtained from environmental sample
  misc_feature (1)..(235): Xaa is any amino acid
MSVRSWIARELVSNILVHREYLSAYPAKIIIERDRIATENWCLPKTPGRINPNTFTPYPKNPLLAGFFINIGRADILGSGVRNLYKYTKIYSGGEPELVEADVFRTVVPLFSYDGLASYKHVSDKVSDNQEMSDKVSDNQEMSDKVSDNQEMSDKVSDKVSDKTSDNEQMSDKSVRDALLAHLRDNGEITAVEAAKVISRSTPTARRMLSGLVAEGLVVATGANRNRKYRAAERQ

SEQ ID NO: 74823 - DNA, 882 bp, Unknown
  Obtained from environmental sample
  misc_feature (1)..(882): n is a, c, g, or t
gtggagaacaattccgccatccggggtggggaaggccatgacaagatcacggtttccgtctccgccggcagcagcgcccaggccgtcggcctggacagggacagcgttattgacggcggcacgggcaacgacagcatcacgatcggcgttgttgccacaggcagcggcgatgcttacggcatgaacaaaaacagcgtcattgacggcggggccggcgacgacaacatcacgatagccgtgaccgcaggcagcggcaacgccttcggcgtgtacgacggtatcatcgacaccggcgcgggcgacgacaagatcagcatcagcgtgaccggggatcacggctacgcctgcgccatgtaccgctccaccatcactaccggtacgggcaacgaccgtgtcgagatctacggcgatatcagagacagcaacagcatcgatctgggcgaaggcgacgatgtcctgatgctccggggtgacgcccatggttcgacgctggacggcgggacgaacggcggggtcgtgcaggccgccggcgacggcagcatggcccacctgggcgacatcctggggctgggcggcgatttcctcggcgtcctcgacggagccgccggcaataccatcagaggcttcgagagcctgctggtggatctccagacctccgacagcctcgaccatctcctgtcgggtgtcgaccaactgcgccttgggggggcgaatgatgtgcaagccctcatcatcacgggcagcggccctttggatccggcgggcggcttctccgggagcgaccactacaccgacgtgcggattgaaaatgtgcagggcaccttcgaccactatgtgatccaggatcacacctcgtgccgctcgtgccgctcggccatctga

SEQ ID NO: 74824 - protein, 293 aa, Unknown
  Obtained from environmental sample
  misc_feature (1)..(293): Xaa is any amino acid
MENNSAIRGGEGHDKITVSVSAGSSAQAVGLDRDSVIDGGTGNDSITIGVVATGSGDAYGMNKNSVIDGGAGDDNITIAVTAGSGNAFGVYDGIIDTGAGDDKISISVTGDHGYACAMYRSTITTGTGNDRVEIYGDIRDSNSIDLGEGDDVLMLRGDAHGSTLDGGTNGGVVQAAGDGSMAHLGDILGLGGDFLGVLDGAAGNTIRGFESLLVDLQTSDSLDHLLSGVDQLRLGGANDVQALIITGSGPLDPAGGFSGSDHYTDVRIENVQGTFDHYVIQDHTSCRSCRSAI

SEQ ID NO: 74825 - DNA, 873 bp, Unknown
  Obtained from environmental sample
  misc_feature (1)..(873): n is a, c, g, or t
atggcgagggttaccatgaggcttcagaggaactcgcccgctttttattctattgagacagtagggaaatttaattttcatgtaaatccggaatttgccctcgtgcgggatatttcccgttcaactgctgttattgactggtttgctgatgaggataatccggcaaaaaaggccgcggcttttcgcgaaattaaaaattatgcaaatatgctgagtgatgccaatgtgtatttcggcattaataaatcattaaatcaatactcagtaaacagcgaaattacttttgcggattttcttccttttgacagggttaatccgtctgatatttacgacgactggtattttaactgcatcaggtcaacacatgaatatatctttaatattgatgttgataagaataccaaaataccgcgctttgggattaattataaagttatggaaggcaataatctggtaggcgtaatttgttccagacttacctttgatgaaatgattgattatttgtttttccaatataacaacaaaaacataatagggtatgttattgacaaaaaaggatatgtccaaatggacagcgttccatctgattcccgttttgataaaagagaaaaacccgaaaataatatccgtgcgatttgtcctgatactgtgtttgtttccgcaatagataaatatttgaataatattaaagattactttaacatatcttcacagtcggaagtcatcaaacttgaaaaaaattattatatgtatgtatcaatcgcgcccattcccggtacggattggtcgattgttactttttttaacaatcattcattatatagtatcagaaaattatttccgctgctgattaccatgctgtccgcattttaa

SEQ ID NO: 74826 - protein, 290 aa, Unknown
  Obtained from environmental sample
  misc_feature (1)..(290): Xaa is any amino acid
MARVTMRLQRNSPAFYSIETVGKFNFHVNPEFALVRDISRSTAVIDWFADEDNPAKKAAAFREIKNYANMLSDANVYFGINKSLNQYSVNSEITFADFLPFDRVNPSDIYDDWYFNCIRSTHEYIFNIDVDKNTKIPRFGINYKVMEGNNLVGVICSRLTFDEMIDYLFFQYNNKNIIGYVIDKKGYVQMDSVPSDSRFDKREKPENNIRAICPDTVFVSAIDKYLNNIKDYFNISSQSEVIKLEKNYYMYVSIAPIPGTDWSIVTFFNNHSLYSIRKLFPLLITMLSAF

SEQ ID NO: 74827 - DNA, 900 bp, Unknown
  Obtained from environmental sample
  misc_feature (1)..(900): n is a, c, g, or t
gtgcttaacggcagcttcgggacatccctttcgaaaactggatcggcctccggcgcagggaacgaaaccgctgctttaaccgttgccatccggcaagagcgcggcgcaggccggacaatcaaggttaatgacacggcattggagcgcgcctcggaattactcggacaggtaaacagcgtgctttttttgccgtccgatttggaagtcattcacggccagcctttgcagcggcgcaaatatctcgatatggttatttcgcaggccgaaccggaatattgtcgcgcgctgcaaaaatatgtgcgcgcgctgaaacagcgcaacgaactattaaaaaatctgcgcgcggcgggcggcgggcacggccgggacaacggagcggaattagccggctgggactcgcaactggccgagtgcgccgcgcagattgtggtcaaacgccgggagtatctggaatttttcgcgcaagaaaccgcaccgctctataacgcaatggggtttgccgggaaactgactttgcaatataaaacagaaactctgtcagatcggcaaaaaaatctggagatgctgcaggaacaacgcgcggcagacattcgttttggccatacgcatttcggcccgcataccgacgattttgaattttatctggatgccaacaaagcggcagaattttgctctcagggacaaaaacgcttgatttccattgccgttaagtgtgcggaaacacgtatcaagatgcaaaaactaaacgatccgccaatagtgttaattgatgatgtactattagaattggatttggaacggctgcataagattatctccctgcttgcgcccggcagccagaagatttttacggtaacggatacagggncggttttctgcggatattttgcgcgaaaatga

SEQ ID NO: 74828 - protein, 299 aa, Unknown
  Obtained from environmental sample
  SIGNAL (1)...(18)
  misc_feature (1)..(299): Xaa is any amino acid
MLNGSFGTSLSKTGSASGAGNETAALTVAIRQERGAGRTIKVNDTALERASELLGQVNSVLFLPSDLEVIHGQPLQRRKYLDMVISQAEPEYCRALQKYVRALKQRNELLKNLRAAGGGHGRDNGAELAGWDSQLAECAAQIVVKRREYLEFFAQETAPLYNAMGFAGKLTLQYKTETLSDRQKNLEMLQEQRAADIRFGHTHFGPHTDDFEFYLDANKAAEFCSQGQKRLISIAVKCAETRIKMQKLNDPPIVLIDDVLLELDLERLHKIISLLAPGSQKIFTVTDTGXVFCGYFARK

SEQ ID NO: 74829 - DNA, 711 bp, Unknown
  Obtained from environmental sample
  misc_feature (1)..(711): n is a, c, g, or t
gtgttcatcaatatggacgaagctctggcggcaggtaaagtaatctccatcgtccccgccagagacggcaaggtatacgagatacgcgaaaccgagacggggcgttacattacaccggttgtcggctgtgaaatgctatctgagatacaggccggatttatccctgcccttccccgcatcccttcggatctgatgatgggagttattgccttcttccgccacttcatgcggcatggcgatgttaccgaggcgttggtcaacatctattgggataaggataacagggagttcattgcggatgttcctgagcagtcggtaactaaagtatcggttgacagtcagataagcgggaagtttgcggatgaccggtatattcattacatggatatacattcacacaattccatgcgggcgttcttctcatcagcagacgaccatgatgaaaaagcgacacgcctgtacaccgtaatcggcaagttggacgagtatgtccccgaaataaagacccgcatctctaacggaggcacgtttctggagatagatcccgctgaagtctttgaacctttaagcgtgtcattcccggaggattggaaaagcagggttagttttcgcaccgcgcataatgaaatcaaatacaacgccttataccggctcttaatggcaaagcgtaaaatactgcacagggttgattatgcggtttgcgctggataa

SEQ ID NO: 74830 - protein, 236 aa, Unknown
  Obtained from environmental sample
  misc_feature (1)..(236): Xaa is any amino acid
MFINMDEALAAGKVISIVPARDGKVYEIRETETGRYITPVVGCEMLSEIQAGFIPALPRIPSDLMMGVIAFFRHFMRHGDVTEALVNIYWDKDNREFIADVPEQSVTKVSVDSQISGKFADDRYIHYMDIHSHNSMRAFFSSADDHDEKATRLYTVIGKLDEYVPEIKTRISNGGTFLEIDPAEVFEPLSVSFPEDWKSRVSFRTAHNEIKYNALYRLLMAKRKILHRVDYAVCAG

SEQ ID NO: 74831 - DNA, 432 bp, Unknown
  Obtained from environmental sample
  misc_feature (1)..(432): n is a, c, g, or t
atggcggctttggcgctccacatcttgggatttcttgtagcgattgtggcgctgcagggaaaacttgaaaggataccgttcgatattcctgaagcggaaactgaaatcgtggcgggaacttttaccgagtacagcggccgtctgctggccatcttaaggttagccatcgacattgaaacagtcgtcggcgcggcgctgatttcggcggtttttctcccgttcggcattgagtggggcggcgttttgggatgccttgttttcatcgtaaaaatcgcttttgtgatattcattctggcggttttcaaaacatcggtggcgcggctgcgcattgagcagatggtaaatttctgctggaaatacgtagctcccgcggctgtcctgcaactgttgataagcatggttctgggcgcgtttttcggcggtggggagtaa

SEQ ID NO: 74832 - protein, 143 aa, Unknown
  Obtained from environmental sample
  misc_feature (1)..(143): Xaa is any amino acid
MAALALHILGFLVAIVALQGKLERIPFDIPEAETEIVAGTFTEYSGRLLAILRLAIDIETVVGAALISAVFLPFGIEWGGVLGCLVFIVKIAFVIFILAVFKTSVARLRIEQMVNFCWKYVAPAAVLQLLISMVLGAFFGGGE

SEQ ID NO: 74833 - DNA, 432 bp, Unknown
  Obtained from environmental sample
  misc_feature (1)..(432): n is a, c, g, or t
atgaaaaaacctggtaaaatgctggccgagctgtttaaaaatgtaatgaaaactccggcgaccacgcagtatccgtttattaaaattgaggctccggcggattatcgcggccggattgtttttgtttccgaaaactgcatcggctgcaaaatctgtatgcgcgactgcccggctgacgcgatcaaaataaacaagcccggcgaagaaaaaatattcgaggcggtttttgacctggacgtgtgtatttactgctcgcagtgcgtgctttcctgtccgaaaaaggcgctttcgacatcgccggattttgagcttgcgcaaataagccgcgatagcctcaaagttttgtatccggccaaacccaagccgcctgcgccggagaaaaaggttgataagcccgctgaaggaaacgctgctccggcagcttccgcgtga

SEQ ID NO: 74834 - protein, 143 aa, Unknown
  Obtained from environmental sample
  DOMAIN (74)...(97): 4Fe-4S binding domain
  misc_feature (1)..(143): Xaa is any amino acid
MKKPGKMLAELFKNVMKTPATTQYPFIKIEAPADYRGRIVFVSENCIGCKICMRDCPADAIKINKPGEEKIFEAVFDLDVCIYCSQCVLSCPKKALSTSPDFELAQISRDSLKVLYPAKPKPPAPEKKVDKPAEGNAAPAASA

SEQ ID NO: 74835 - DNA, 915 bp, Unknown
  Obtained from environmental sample
  misc_feature (1)..(915): n is a, c, g, or t
ttgcctgtatcgccgggcgtttatatttataggaacgcgagtggatcaatcatntacgtcggcaaagccgtttccctgcgttcgcgcgtccgatcatattttcaggagagccgcgatctcgacctgaaaacgcagcatctggttgccgaaatcgacgatatggagtgcatcgttaccgacagcgaagtagaagcgctgattctcgaatcaaatctggtgaaaaaaaatcaaccccggtacaacatcaagctgaaggacgacaaaagtttcccgtatctcaaactgacggtgaacgaatcgtatccgcgtattttcatcacacggcgcatacgcagggacggcgcgctttattacgggccgtttctgccggcaaactacgcgcgccggacgataaagttagtaaaccgttattttaaactgcgtacctgcagccttgaaatcgacggttcgctgccgcgtccctgccttgattatcagatgaatcgctgtcttggtccctgcgccgccggtctgtgtacgccgggagattacgagcgcgcggtggaggacgcgaaactcctgctttccgggaaaaccgacgaactcgcgcgcctgcttgaaaagcgtatggcggacgccgccgaagccctgaattacgaggcagccgccgtatatcgagactggattacgacgatgcgcgaaatttcggaacggcagaaaatgacgctggaaggacaggacgattgcgatatttttggataccatcaggaaggcgcgcatctggcgcttgaggttttcgccatgcgcggcgggcgcgtaatcggtcggcgcgagttttactgggaggatattatttcattcaacccggaagaatttttttccgaggcattgcttcaatactatttgtcggacaatttcattcctaaggagatatag

SEQ ID NO: 74836 - protein, 304 aa, Unknown
  Obtained from environmental sample
  DOMAIN (193)...(228): UvrB/uvrC motif
  misc_feature (1)..(304): Xaa is any amino acid
MPVSPGVYIYRNASGSIXYVGKAVSLRSRVRSYFQESRDLDLKTQHLVAEIDDMECIVTDSEVEALILESNLVKKNQPRYNIKLKDDKSFPYLKLTVNESYPRIFITRRIRRDGALYYGPFLPANYARRTIKLVNRYFKLRTCSLEIDGSLPRPCLDYQMNRCLGPCAAGLCTPGDYERAVEDAKLLLSGKTDELARLLEKRMADAAEALNYEAAAVYRDWITTMREISERQKMTLEGQDDCDIFGYHQEGAHLALEVFAMRGGRVIGRREFYWEDIISFNPEEFFSEALLQYYLSDNFIPKEI

SEQ ID NO: 74837 - DNA, 906 bp, Unknown
  Obtained from environmental sample
  misc_feature (1)..(906): n is a, c, g, or t
atgtcgggcgattttgaccccgatgaggtaattcgcattattgataagcactttggcagcttgcctgtcaaccgcgatattcctgctgtgaaggcaggtgaggaaacggctattgctgcgcccattaaaaaagaggtgttgggcaacgaccccgaaagcttttggttggcatggcgagtgcccggggcaaaggagcaggagtcggagctctgcgcgctgatggactacattttgaacaacggtaaagccggcttgatagacttgaacatcattcaaaagcagcgcacgctttcggcgaatagcggctactatgacttggttgactatggaatgttttacatgacggctcgccccaagcaaggtcagacgttggagcaggcaaaagccattttgcttgagcaaattgatttgttgaaaaagggcgaatttgaggattggctgcttgaggcaaccatcaacaattttaagttacacaaaataaacgagttggaaaacaatatggctcgtgcaagtatgtttgttgatgcatttacaacaggtgcagagtggaaagattacgttggcagcttggacagaatgagcaaaattaccaagcagcagcttgtagattttgccaacaagtattttaccaacggctatacggaagtttacaagcgcataggcaaagaccccaacgagaagaaaatagacaagcccaccatcacgcccattcaaaccaaccgcaatgcggaaagcgcatttttggctgaaatcaagagctctaaggttgagccgattaagcctgtgttcttggacttttcgaaagacctaagtcagttcgaggcaaagcaaaacattcctgttctttacaagaaaaatatcgagaatgagctctttgagttgaactacgtattgaaatggaactaa

SEQ ID NO: 74838 - protein, 301 aa, Unknown
  Obtained from environmental sample
  DOMAIN (2)...(155): Peptidase M16 inactive domain
  misc_feature (1)..(301): Xaa is any amino acid
MSGDFDPDEVIRIIDKHFGSLPVNRDIPAVKAGEETAIAAPIKKEVLGNDPESFWLAWRVPGAKEQESELCALMDYILNNGKAGLIDLNIIQKQRTLSANSGYYDLVDYGMFYMTARPKQGQTLEQAKAILLEQIDLLKKGEFEDWLLEATINNFKLHKINELENNMARASMFVDAFTTGAEWKDYVGSLDRMSKITKQQLVDFANKYFTNGYTEVYKRIGKDPNEKKIDKPTITPIQTNRNAESAFLAEIKSSKVEPIKPVFLDFSKDLSQFEAKQNIPVLYKKNIENELFELNYVLKWN

SEQ ID NO: 74839 - DNA, 543 bp, Unknown
  Obtained from environmental sample
  misc_feature (1)..(543): n is a, c, g, or t
ttgcgggctgacatgtaccctttagtataccttgcctgtcgcgccatagagtcctttgtggcgacgggggagtgcgacgtgccggaggctttgatgggggccattcccccagggagggcaggcgcgtttgtatccatacatagcgcggacggcgacctgtgcgggtgcatcgggaccattgagctgacctgcgccacacttgcggaagagattgtgaggaacgcccggtggtcttgctcgcgcgaccacaggttcagcccggtaagggaggatgaacttcctgggctgaagatcaaggtggacgtgctttccacgcccgaagaggtggaatcagccgctgaccttgtccctggcaaatatgggtccatagtctcggcttccagcggatggagggggctgctgctccccacgcttgagggcgtggagatcggcggagcagcaaataggcatttgccgccagaaggggggcataggttcaatcgaaccggtgacgatccagcgcttcacggtggagaggcacgggtgaacgcgcccgcgttttga

SEQ ID NO: 74840 - protein, 180 aa, Unknown
  Obtained from environmental sample
  DOMAIN (3)...(166): AMMECR1
  misc_feature (1)..(180): Xaa is any amino acid
MRADMYPLVYLACRAIESFVATGECDVPEALMGAIPPGRAGAFVSIHSADGDLCGCIGTIELTCATLAEEIVRNARWSCSRDHRFSPVREDELPGLKIKVDVLSTPEEVESAADLVPGKYGSIVSASSGWRGLLLPTLEGVEIGGAANRHLPPEGGHRFNRTGDDPALHGGEARVNAPAF

SEQ ID NO: 74841 - DNA, 885 bp, Unknown
  Obtained from environmental sample
  misc_feature (1)..(885): n is a, c, g, or t
atgcaaagaacggtgaggaatcattatcgtccttactttaaatccaccctgctttgccagattactgaggaatcccttcaagcctttgtggtttacttaaaaacccaaaaacacctagcggcttcaacaattaactcaattagaaacgcctctatgaaagccctccggtacgccaaaagtaagaaaatgataaaatactttgattttgacgccgttatacgggcgagcggggaatctgtcccgcgcggcgttttagagaatgaagaggccgaccgattgtttaaggcggaatggagaagtgaaaagtcccgtataatagcgtttatctgttatcatacgggggttcgaatttccgaggccagatcacttaaagtttcggacatacaccctgatcgaataagcgtaaggaatagttgggcgagattaagtaaattgaaaagtacgaaaaacaaagaaactcgggacattccaatccttccggcggtttatgaggaaatattcgcatatataaaagagatggggttaaataatcttgattcttttctcgtgccgggaaagaaaccggaaatcccgttagacagccatcaaatccgggacgatttttataaagctctcagtaaagagttaggaatagatgaagaacttcgcaaggaaaggaatgtaaccatgcatagttttcgtcaccttcttgccaaaaacatcgttgaaaaaggggcgagcaaagccatcggcatgaagattctagggcagaaaaccagccggatatttgaccattacgccgaccatgttgataaagagacgtttaaggagatggcaaaagctatagaaattgtgtacaaaaaggacacgctaaaagagccgataccgtttaggggggtgggatga

SEQ ID NO: 74842 - protein, 294 aa, Unknown
  Obtained from environmental sample
  DOMAIN (73)...(270): Phage integrase family
  misc_feature (1)..(294): Xaa is any amino acid
MQRTVRNHYRPYFKSTLLCQITEESLQAFVVYLKTQKHLAASTINSIRNASMKALRYAKSKKMIKYFDFDAVIRASGESVPRGVLENEEADRLFKAEWRSEKSRIIAFICYHTGVRISEARSLKVSDIHPDRISVRNSWARLSKLKSTKNKETRDIPILPAVYEEIFAYIKEMGLNNLDSFLVPGKKPEIPLDSHQIRDDFYKALSKELGIDEELRKERNVTMHSFRHLLAKNIVEKGASKAIGMKILGQKTSRIFDHYADHVDKETFKEMAKAIEIVYKKDTLKEPIPFRGVG

SEQ ID NO: 74843 - DNA, 348 bp, Unknown
  Obtained from environmental sample
  misc_feature (1)..(348): n is a, c, g, or t
gtggcatggttttttcaaaggataaagattgaccacgaccaaatcgataaaagtaatgccgtgcttttggcaggtggcgacatgttcgggattgtcgcgcagggccagcaaaccgccgtggattttggggtgcagagtcttcacgcggccgtccagcatttcgggaaactgcgtaatatcggaaatatcaccggtcttaataccgttttctttcagagttttggaagtgccgccggtggagataatctcaaagcccaaagcggccaagccctgacagaattccactatgccggttttgtcggaaacggaaacgagcgcgcgcatattgacctcccagacttggagtga

SEQ ID NO: 74844 - protein, 115 aa, Unknown
  Obtained from environmental sample
  misc_feature (1)..(115): Xaa is any amino acid
MAWFFQRIKIDHDQIDKSNAVLLAGGDMFGIVAQGQQTAVDFGVQSLHAAVQHFGKLRNIGNITGLNTVFFQSFGSAAGGDNLKAQSGQALTEFHYAGFVGNGNERAHIDLPDLE

SEQ ID NO: 74845 - DNA, 660 bp, Unknown
  Obtained from environmental sample
  misc_feature (1)..(660): n is a, c, g, or t
atgattgactacgagattaggcagatcccgtcgaaagacgcaaaaatctacatacggaaaaaccactactcgcacgggtgcataaatgccccggtgaagtcctacggccttttcgagaggcagggcgccccgcccggcgacgggttccagttcgaggaggcggccgaccccatcggggtctgcatgttcgccgtcccgtgcagcgaggctgtcagggcttccgtgttcgggaagggctacgaggcgcacgtgatagaactccaccgcctacacatactcgaccgaacgccgaagaacaccgagagttggttcatttcgcggtgccttaaactgctgaagcggaacatgccgcagatatgggcggtgataagtttttccgaccttaccgaggggcacacgggggtcatctacaaggcggcgaacgcataccgcctgggtcgcacgggccgggcgactttctacttcgacggcttcgggaggctcaggcacccaaggcagtgcgggaggagcataaccctcgaaaaggccaaggagatggggtgggtccccgtggtcagggaggcgaagtgccggttcctatggctcctgccggaagacaggcgcgacaaaaagaggctcctgcaactggccaaggtggatctgtcgggcgccggggactag

SEQ ID NO: 74846 - protein, 219 aa, Unknown
  Obtained from environmental sample
  misc_feature (1)..(219): Xaa is any amino acid
MIDYEIRQIPSKDAKIYIRKNHYSHGCINAPVKSYGLFERQGAPPGDGFQFEEAADPIGVCMFAVPCSEAVRASVFGKGYEAHVIELHRLHILDRTPKNTESWFISRCLKLLKRNMPQIWAVISFSDLTEGHTGVIYKAANAYRLGRTGRATFYFDGFGRLRHPRQCGRSITLEKAKEMGWVPVVREAKCRFLWLLPEDRRDKKRLLQLAKVDLSGAGD

SEQ ID NO: 74847 - DNA, 660 bp, Unknown
  Obtained from environmental sample
  misc_feature (1)..(660): n is a, c, g, or t
gtggattacaaaccaaataaaacaatgctgtttcaaattttttcaatcggcataccggcaggattgagcaatcttataatgagcatttccaacatactgagtaaccgcatcgcggcaagttacggagattttgtggttgccggtatcggcgttcaaatgcggattgccagcctgtatttcatgctggttttcgcgctgattatggggtatcagccctttgccggatttaattacggcgcgaaaaattacgagcgccttcgtaaagggttcaaattcgccatcatttgcgcgacttcgctttgcgttttgggaagccttatactccgtctttttggagctgtgtttatcaggtttttcatcaacgatccaaaaaccattgaagctggaacaataatgatgagtacctttgtttggggattgccgtttattggttcccagataacattaatggtatcgtttcaatcttttggaaaagctcttcaggctatggttattactatgggacggcagcttctgtttttcatgcccctgctttacctgctaaattattttttgggttttaacggttttatttgggcgcaaccaggggccgatattcttacaacaggtatcgctgttgttttaagccgtcctcttttccgccttatgcggggaaaataa

SEQ ID NO: 74848 - protein, 219 aa, Unknown
  Obtained from environmental sample
  DOMAIN (19)...(180): MatE
  misc_feature (1)..(219): Xaa is any amino acid
MDYKPNKTMLFQIFSIGIPAGLSNLIMSISNILSNRIAASYGDFVVAGIGVQMRIASLYFMLVFALIMGYQPFAGFNYGAKNYERLRKGFKFAIICATSLCVLGSLILRLFGAVFIRFFINDPKTIEAGTIMMSTFVWGLPFIGSQITLMVSFQSFGKALQAMVITMGRQLLFFMPLLYLLNYFLGFNGFIWAQPGADILTTGIAVVLSRPLFRLMRGK

SEQ ID NO: 74849 - DNA, 582 bp, Unknown
  Obtained from environmental sample
  misc_feature (1)..(582): n is a, c, g, or t
atgggtcagcattcggcacgagatgtatccgcaacgggaccgcgatcctgctatgacgaatcaaagcgttttggcgaaaccatgtgcatgctttttgcgcagcagtatggtatgccaataggtgttgcgcgtccttttaacaactatggtccgggtatgcggttaaaagataaaagggtcccggctgattttgcgcttgcgatttatgaagggcgtgatattgagattttatcaaatggatctcccacaagaaccttttgttatgtcgctgatgcagtcagcggttatcttaaaatacttttgtatggaaaatatgattattttaatatcgggatagaaaaaccggaaattagtattggtgagtttgccgatatttgcgttaaggccggaaaagatatatttggctatgcaggacaggtaaaatattccatttctgatgacagtcattatttaacaaataacccacagcggcgctgtcctgatatatccaaagcaaggcgtattctgggctataaccctaatatcgcagttgaagaaggcgtaacgaggtttcttgaatttattaaggaaaccaaaaaataa

SEQ ID NO: 74850 - protein, 193 aa, Unknown
  Obtained from environmental sample
  DOMAIN (2)...(111): NAD dependent epimerase/dehydratase family
  misc_feature (1)..(193): Xaa is any amino acid
MGQHSARDVSATGPRSCYDESKRFGETMCMLFAQQYGMPIGVARPFNNYGPGMRLKDKRVPADFALAIYEGRDIEILSNGSPTRTFCYVADAVSGYLKILLYGKYDYFNIGIEKPEISIGEFADICVKAGKDIFGYAGQVKYSISDDSHYLTNNPQRRCPDISKARRILGYNPNIAVEEGVTRFLEFIKETKK

SEQ ID NO: 74851 - DNA, 312 bp, Unknown
  Obtained from environmental sample
  misc_feature (1)..(312): n is a, c, g, or t
ttggaagggaccgccctccccggggccccgaaaaaaaccccaaagtccggtttgccctcttataaaattacttttttctcccaaaaaaaaaatttttccccccccgggaaacccccttggtttaaaaaaacgccccccccaaaaaaaaaaaccccccttaaaccctttttttcggcgggccaacacggcccccccaaaaaaaaaaaaaaaatctctccccctggtgtgggccccccccccccccacaaaaaacccccggaaaaaaggaagggcgccgccccccccccccaaaaaaaagaaggggttttataa

SEQ ID NO: 74852 - protein, 103 aa, Unknown
  Obtained from environmental sample
  misc_feature (1)..(103): Xaa is any amino acid
MEGTALPGAPKKTPKSGLPSYKITFFSQKKNFSPPGKPPWFKKTPPPKKKTPLKPFFSAGQHGPPKKKKKISPPGVGPPPPHKKPPEKRKGAAPPPQKKEGVL

SEQ ID NO: 74853 - DNA, 756 bp, Unknown
  Obtained from environmental sample
  misc_feature (1)..(756): n is a, c, g, or t
atgatcagatcggccgagccattgcagattatctgcggcgcgaagcgaaacgtcatggaaagcaacgcgcttcatattgatacgctgcccggcccctgggatgaaataagaaggatcttttcgctcaaggccgccgatacaacggcggtatgtgagcatggtgccagtccttatatgctgaataaattatccgctaccctttccaaagtttcattaaggtcggaaattatgtccccgatgcgcggcgtgcggttcaaatatcacaactacagcgctatggaagaccttttccttccgctccgcgaaatcgaaaacagtatcgttgtcggagatctgggcagttatacgatggatccggggcggacgattatggcggctctatgttacggtacatctgtcgcggcggctatgggatttgcggatgctctgccggattacaacattttcgccgtgaccggcgacgccgcctatctgcattccggccaatcatgcctttgggaagccttgaaacgcggagtgaagctttctatctttgtcttcgataacggcggggctcaaggtacaggcggccagcgtatccccggagatctgcgatcccacccggacggcgtccgtctttgtgagttcgactacgggcaaatgaccgccgttgatttcagaaaagtaatcaaagacaatctgctgtacaagggaataactttgaacattatacacataaacgaggatagtcatgcaaaacccaacaatccatcttga

SEQ ID NO: 74854 - protein, 251 aa, Unknown
  Obtained from environmental sample
  DOMAIN (111)...(239): Thiamine pyrophosphate enzyme, C-terminal TPP binding domain
  misc_feature (1)..(251): Xaa is any amino acid
MIRSAEPLQIICGAKRNVMESNALHIDTLPGPWDEIRRIFSLKAADTTAVCEHGASPYMLNKLSATLSKVSLRSEIMSPMRGVRFKYHNYSAMEDLFLPLREIENSIVVGDLGSYTMDPGRTIMAALCYGTSVAAAMGFADALPDYNIFAVTGDAAYLHSGQSCLWEALKRGVKLSIFVFDNGGAQGTGGQRIPGDLRSHPDGVRLCEFDYGQMTAVDFRKVIKDNLLYKGITLNIIHINEDSHAKPNNPS

SEQ ID NO: 74855 - DNA, 333 bp, Unknown
  Obtained from environmental sample
  misc_feature (1)..(333): n is a, c, g, or t
atgccgtcttccgcggatgtatatgaggtaaggctgagatacagcccgcctgagccgctgccaaagccgccgccgttaccgcccggcgatcctacggcggtaaaaccgccgggctgctgcaagaagccgcccgatccgccgccggcgcccggcccgacaacgccgcccgcccccccggcgccgcccggggtcaaaagggactgccctgaagccccgccccctcccccggcgcaaaggaaaaaccctttagcggagtacaggaaggtgcctgaaccgccgcccccgccgcctgagccgcccggggccggcgtccccgcgcggatggtgacgtaa

SEQ ID NO: 74856 - protein, 110 aa, Unknown
  Obtained from environmental sample
  misc_feature (1)..(110): Xaa is any amino acid
MPSSADVYEVRLRYSPPEPLPKPPPLPPGDPTAVKPPGCCKKPPDPPPAPGPTTPPAPPAPPGVKRDCPEAPPPPPAQRKNPLAEYRKVPEPPPPPPEPPGAGVPARMVT

SEQ ID NO: 74857 - DNA, 438 bp, Unknown
  Obtained from environmental sample
  misc_feature (1)..(438): n is a, c, g, or t
atgccaaagcaacgcgttattgcctacgtcgatggcttcaatcttttttacagttcgcttaaaggaaccagtttcaaatggctgnatttagtttccttgtgcgaatccatgctgaagccggaacaagagcttgtatctgttaaatacttctcggcgcttgtcggttcatttcaaggggataccagccgcacagataggcaacgtttctatctggaagccctgagtacgaatccgaaggtagaaatcaagctcggatatttctcaacgcatcggattaaaatgccgatggcagacgatttctacaacggcaagattacgcttgtcgatgtaatcaaaacagaggaaaagggaaccgacgtcaatcttgccgtgcagatggctgttgacgcagtaagggatgaattcgactatgccatgttgttttcaaacgatagntga

SEQ ID NO: 74858 - protein, 145 aa, Unknown
  Obtained from environmental sample
  misc_feature (1)..(145): Xaa is any amino acid
MPKQRVIAYVDGFNLFYSSLKGTSFKWLXLVSLCESMLKPEQELVSVKYFSALVGSFQGDTSRTDRQRFYLEALSTNPKVEIKLGYFSTHRIKMPMADDFYNGKITLVDVIKTEEKGTDVNLAVQMAVDAVRDEFDYAMLFSNDX

SEQ ID NO: 74859 - DNA, 384 bp, Unknown
  Obtained from environmental sample
  misc_feature (1)..(384): n is a, c, g, or t
atgtgcatgaaaaacaggaagcctcatcggagcggggcggaattctcccacgaccgggtcatgttcaacccggtggtggatatatgggaaacggacgagggcatgcagctggcggccgatctgcccggcgtggccccggaggatctggaggttgatctttccggcggcaccttgaccatcagcggccgggtcaccccgccgccggccggtcgcaaagccctcttgaccgagttcgaggtcggccactactaccgccagttcaccctgtccgaggggctggaccagaacggcataaccgccgccttgaaggagggggtgctcaggctgaccctgccgcgcctggccccggcccagccccgcaagatagagataagccgcgaatga

SEQ ID NO: 74860 - protein, 127 aa, Unknown
  Obtained from environmental sample
  DOMAIN (27)...(125): Hsp20/alpha crystallin family
  misc_feature (1)..(127): Xaa is any amino acid
MCMKNRKPHRSGAEFSHDRVMFNPVVDIWETDEGMQLAADLPGVAPEDLEVDLSGGTLTISGRVTPPPAGRKALLTEFEVGHYYRQFTLSEGLDQNGITAALKEGVLRLTLPRLAPAQPRKIEISRE

SEQ ID NO: 74861 - DNA, 588 bp, Unknown
  Obtained from environmental sample
  misc_feature (1)..(588): n is a, c, g, or t
gtgggcctggtctccgtgggcctggccacggccatcgggcttttcctgggcgccctggccgggttttacggcgggctcgtggacggcctcatcatgcgcttctgcgacctgatgctctgcttcccgaccatgttcctggtcctggccgtcatctcacttctggagccatccatctggaacgtcatggtcgtcatcggcctgaccggctggatgggggtggcccgcctggtccgggccgaattcataagccttaaaaaccgcgatttcgtcctggccgcccgggccctcggggcttccgacgcccggctgatcttaaggcatctcctccccaacgccctggccccggtcctggtcagcgccaccctgggggtggccggggccattctcctggagagcggcctctccttcctgggcctgggggtccagccgcccacggccacctggggggtcatgctggccgacggcaaggactacctcagccgggcctggtggctcagcttttacccgggcctggccatcctggtcactgtcctgagctacaacctggcgggcgagggccttcgggacgccttcgacccccgccggtaa

SEQ ID NO: 74862 - protein, 195 aa, Unknown
  Obtained from environmental sample
  SIGNAL (1)...(20)
  DOMAIN (1)...(195): Binding-protein-dependent transport system inner membrane component
  misc_feature (1)..(195): Xaa is any amino acid
MGLVSVGLATAIGLFLGALAGFYGGLVDGLIMRFCDLMLCFPTMFLVLAVISLLEPSIWNVMVVIGLTGWMGVARLVRAEFISLKNRDFVLAARALGASDARLILRHLLPNALAPVLVSATLGVAGAILLESGLSFLGLGVQPPTATWGVMLADGKDYLSRAWWLSFYPGLAILVTVLSYNLAGEGLRDAFDPRR

SEQ ID NO: 74863 - DNA, 462 bp, Unknown
  Obtained from environmental sample
  misc_feature (1)..(462): n is a, c, g, or t
atgaacatactcgaattcatcaagctggcctttttcgccatcacgcgcaacaagatgagggccttcctcaccatgctgggcatcattattggcgttggcgcggtaatatccatgatcggcatcggtgagggttccaagcaggcttctttggccatcattcagaacatgggtgtcaacatgctcaccatcaggtcaaccgccaggggaggcatggggggaggtggtggcggggccgctgcggcggctggcacagcagagcttctcaaggaagaggacgcccttgcgatagtcgaggaatgtccctccacagtgatagccgcaagcccatacgttactaccggcgcccagatcgtttggcaaaattataatacccggactacgatttttggctctaacgaagattttgagacgattcggggctggaaggtagaagatgggcgttttttcacgaaacatgagtga

SEQ ID NO: 74864 - protein, 153 aa, Unknown
  Obtained from environmental sample
  misc_feature (1)..(153): Xaa is any amino acid
MNILEFIKLAFFAITRNKMRAFLTMLGIIIGVGAVISMIGIGEGSKQASLAIIQNMGVNMLTIRSTARGGMGGGGGGAAAAAGTAELLKEEDALAIVEECPSTVIAASPYVTTGAQIVWQNYNTRTTIFGSNEDFETIRGWKVEDGRFFTKHE

SEQ ID NO: 74865 - DNA, 651 bp, Unknown
  Obtained from environmental sample
  misc_feature (1)..(651): n is a, c, g, or t
ttggcgcaacgattgggaaaacgggtattatcagagttactggggtgttcaaatcagcaaataaatgcaatagtgccaaggattcaactcttgccagaatatgtctattttgtttgcatatcagattttttccaagaccagattcataacaattcttcggcaacgacactaccaataatcaataaaggaaattttgaaaaattaatgtttcctcttccccccctcgccgagcagaagcgcatagttgagtccatagaggcggcgtttaagctcattgatgaaattgaagaaagcaaggccgaactgagggccgcagtaagtgcggccagggccaaggtgctgtcgctggccatctgcggaaagctggcgccccaggaaccaaaagacgagccagcgtccgttctgctggagcgcatacgccccgagaggggaaagaacgccgcctgcgcccgaccctggaaaaaggaaccgggggaatccagtaaaagtgacagctctgattttacagaaccccccccaaaaatggtttgccggggccctttgaccagtttgttttcctattggccggggggggaactccctccaactgaaaaaaccgcctttttggggaataaagaaacccccggggttttcccgagggccaaaatttaa

SEQ ID NO: 74866 - protein, 216 aa, Unknown
  Obtained from environmental sample
  misc_feature (1)..(216): Xaa is any amino acid
MAQRLGKRVLSELLGCSNQQINAIVPRIQLLPEYVYFVCISDFFQDQIHNNSSATTLPIINKGNFEKLMFPLPPLAEQKRIVESIEAAFKLIDEIEESKAELRAAVSAARAKVLSLAICGKLAPQEPKDEPASVLLERIRPERGKNAACARPWKKEPGESSKSDSSDFTEPPPKMVCRGPLTSLFSYWPGGELPPTEKTAFLGNKETPGVFPRAKI

SEQ ID NO: 74867 - DNA, 453 bp, Unknown
  Obtained from environmental sample
  misc_feature (1)..(453): n is a, c, g, or t
gtggccggaggcatcggcctggcccccctggccctggtccgggactggctgcgggactccgggcaacggagccggcttttctacggcgaacgctccgggcgtcaccaggtggacccggcctggctggccgcctgggccgatgattacacggccacggtggacgacggctccggctatggccgcccgggtctggtgaccgagcccctggccgaagccctggcccgggaaccccgcccgatcctggcctgcggccccccccctctcctggccgcggtcaccggcctggccgaacggttcggggtcgtgccctgggtctggctggaagccggcatggcctgcggcctgggggtctgcctctcctgcagcctgccccttaaagcgggcgggcgcttcaaggtctgccgcgaagggccggtggccgacggccggaccctggactgggaggccgcgtga

SEQ ID NO: 74868 - protein, 150 aa, Unknown
  Obtained from environmental sample
  DOMAIN (1)...(94): Oxidoreductase NAD-binding domain
  misc_feature (1)..(150): Xaa is any amino acid
MAGGIGLAPLALVRDWLRDSGQRSRLFYGERSGRHQVDPAWLAAWADDYTATVDDGSGYGRPGLVTEPLAEALAREPRPILACGPPPLLAAVTGLAERFGVVPWVWLEAGMACGLGVCLSCSLPLKAGGRFKVCREGPVADGRTLDWEAA

SEQ ID NO: 74869 - DNA, 444 bp, Unknown
  Obtained from environmental sample
  misc_feature (1)..(444): n is a, c, g, or t
atgaataagatacttatggtttcgccaaataaatgcacagactgcagaacctgcgaatctgtctgttacaatgacgcggtaaatgtaatcagcgttgaagacgataacaggacattatccgtatcagtcatgtgtatgcagtgcgaagacgccgcttgtctggaaatatgcccgacgggcgccctttcgagggataattccgatacggtcgttgttaaccccgataaatgcgtcggatgcaagatgtgcgtcggcgcttgtccgtttggtaatattcaatacaacaacagaaaaaagaaaatcatgaaatgtgatttgtgcggcggcagtcccgattgtgttaaatattgtccgacacaggcgatagaatttgtagaaagcacggaatccaatctgaaaaagaaaaagattgtcgcgtcaaagtttaaagggctgtttgaataa

SEQ ID NO: 74870 - protein, 147 aa, Unknown
  Obtained from environmental sample
  DOMAIN (5)...(28): 4Fe-4S binding domain
  misc_feature (1)..(147): Xaa is any amino acid
MNKILMVSPNKCTDCRTCESVCYNDAVNVISVEDDNRTLSVSVMCMQCEDAACLEICPTGALSRDNSDTVVVNPDKCVGCKMCVGACPFGNIQYNNRKKKIMKCDLCGGSPDCVKYCPTQAIEFVESTESNLKKKKIVASKFKGLFE

SEQ ID NO: 74871 - DNA, 777 bp, Unknown
  Obtained from environmental sample
  misc_feature (1)..(777): n is a, c, g, or t
atggttactaaaagtgaaaacttgaaattaaccactaatgatcttatgaacaagaaatatgtgaatacggttgccaccgacgaattaaaggacttgggattaaaacaatgttttgattttgcaaaacctattttgttattaaaatcgatatgcgaattatccacaaacaaaggcgacattatcctcgacttttttgcgggtagcggcacaaccgctcacgccgtaatgaagctcaacgccgaaggcaacggcaaccgcagtttcattctctgccaaatagacgaacagatagaggatggcaagcctgcccacgctttttgcgtggagaacaatttgcctccggttatttcgtcaatcacgatagaacgcctaaaacgcgccggcgagcagataacggaacaacatggatcgccaaacggcgcggatttaggattcaaggtatttgacactgtggacgccccaaagttagaaataggagaaaacgggcaaagtgttttcccaaagatctacaacgacccgctttcacgtatctataatatgattttctctataggaaaagataacccagcgtcattgccggaatgtattgtggaaaattgtacgtacaaaataaacgacaattactatataaccgatgccgatatattggataaagaagagaataagcgcgttcttgtagacgcgatagaaaaaggcaacgttttcatagacggctggacggcatctataaatactacgttgcggaattacaacaaagacgtgaagattgtgatttag

SEQ ID NO: 74872 - protein, 258 aa, Unknown
  Obtained from environmental sample
  misc_feature (1)..(258): Xaa is any amino acid
MVTKSENLKLTTNDLMNKKYVNTVATDELKDLGLKQCFDFAKPILLLKSICELSTNKGDIILDFFAGSGTTAHAVMKLNAEGNGNRSFILCQIDEQIEDGKPAHAFCVENNLPPVISSITIERLKRAGEQITEQHGSPNGADLGFKVFDTVDAPKLEIGENGQSVFPKIYNDPLSRIYNMIFSIGKDNPASLPECIVENCTYKINDNYYITDADILDKEENKRVLVDAIEKGNVFIDGWTASINTTLRNYNKDVKIVI

SEQ ID NO: 74873 - DNA, 426 bp, Unknown
  Obtained from environmental sample
  misc_feature (1)..(426): n is a, c, g, or t
ttggttattgcaaacgatgttattgaacacatggagcaaccgtggcattttttgaaatccattaaaacaaagatgactgctaaagcgtcgttggttttatcaattcccaatgttcgttattatgataatttaaaaaaattgctgcttcataaagattggaaatatgaggattcaggaattttagatataacgcatttgagatttttcacgaaaaaaagcataattcgtatgttgaatgaaaatggttatcaaatagaaaaaatacaaggaataaatcctataagggttagaaaaaagcatttgcttttttatttacttgcgaaatttatttttggagccgatataaaatttttgcaatttggagtaaaggttataaaccataatcctctcatttttgtcaagcccaaagaagaaggcactgaatag

SEQ ID NO: 74874 - protein, 141 aa, Unknown
  Obtained from environmental sample
  misc_feature (1)..(141): Xaa is any amino acid
MVIANDVIEHMEQPWHFLKSIKTKMTAKASLVLSIPNVRYYDNLKKLLLHKDWKYEDSGILDITHLRFFTKKSIIRMLNENGYQIEKIQGINPIRVRKKHLLFYLLAKFIFGADIKFLQFGVKVINHNPLIFVKPKEEGTE

SEQ ID NO: 74875 - DNA, 408 bp, Unknown
  Obtained from environmental sample
  misc_feature (1)..(408): n is a, c, g, or t
atgaaaatcactcacattgagcatatcggcattgccgtaaagagccttgaggaggcaattccctactacgagcgcgtgcttgggcttaagtgctacaacatcgaagaagtagccgaccaaaaggtgaaaaccgccttttttcaggtggggcaaaccaaagtagagctgcttgaaagcacctcgccggagggtactattgccaagtttattgaaaagcgcggagagggcgttcaccaccttgctttcgccgtagagggcggactcaacgctgcgctggctgaggtagagggcaagggcgttcagctgctcgacaagcaggggcgcaagggcgctgaagggctcaacattggctttctgcaccccaagtcaacaggcggtgtgcttacagaactttgtgaaaaggcataa

SEQ ID NO: 74876 - protein, 135 aa, Unknown
  Obtained from environmental sample
  DOMAIN (5)...(131): Glyoxalase/Bleomycin resistance protein/Dioxygenase superfamily
  misc_feature (1)..(135): Xaa is any amino acid
MKITHIEHIGIAVKSLEEAIPYYERVLGLKCYNIEEVADQKVKTAFFQVGQTKVELLESTSPEGTIAKFIEKRGEGVHHLAFAVEGGLNAALAEVEGKGVQLLDKQGRKGAEGLNIGFLHPKSTGGVLTELCEKA

SEQ ID NO: 74877 - DNA, 819 bp, Unknown
  Obtained from environmental sample
  misc_feature (1)..(819): n is a, c, g, or t
gtgccgcaacggcatccagtcctggacatcgcactcgacgatcacacgcgcgctgaagaacagatccaccgcctggccatcaaagcgcaactggaagaaggctggcgtcgcgagagcgacgcggatgagctgaatggcgggcaggaggtcacccacaaactggtgatcgacacgcccataattggagcactgcccgacataaatgcgcggtttgaacatatctcgctgttggaaatgagcggcgaagggaccacctcaaacgtcgaaggcttgctccaaggattccccaaactgaaagttctttcgctgcacagatacacgatgggcgacattcccgccgctattctgaatcaaccccacttgatcacgctgagcctcacagagtgcgcaatccgcctgacgccccacagcgccaatgcgctttccgggatgcgcaccttggagtacctggacttgagtgaaaacccactgggcatcacgccgacggtcagcaacctgcacaacctgaacacgttgcacctggaaaacactggaatcaaccagcccccagccggcgttttctccctgccaaacttgcgaaccgtggacctgagcgagaacctgatagaagagatcccttcgcacattctggaagtgagccccacttgggactatgactccgaccttggcggcaacccgctctcggacgccagtttaaatgtgctcagacaatattatcttcagacggngaatgacctgggcgttgaagcggcctccctcgacgccggcggacagccgctggtaccgccaccaccaacccccgtaccgatggaggagtaa

SEQ ID NO: 74878 - protein, 272 aa, Unknown
  Obtained from environmental sample
  misc_feature (1)..(272): Xaa is any amino acid
MPQRHPVLDIALDDHTRAEEQIHRLAIKAQLEEGWRRESDADELNGGQEVTHKLVIDTPIIGALPDINARFEHISLLEMSGEGTTSNVEGLLQGFPKLKVLSLHRYTMGDIPAAILNQPHLITLSLTECAIRLTPHSANALSGMRTLEYLDLSENPLGITPTVSNLHNLNTLHLENTGINQPPAGVFSLPNLRTVDLSENLIEEIPSHILEVSPTWDYDSDLGGNPLSDASLNVLRQYYLQTXNDLGVEAASLDAGGQPLVPPPPTPVPMEE

SEQ ID NO: 74879 - DNA, 303 bp, Unknown
  Obtained from environmental sample
  misc_feature (1)..(303): n is a, c, g, or t
atgaaaaaaccgaattacacaattttagtatgcaactcgtaccgcgtggcgggcgatgcgcagggattttgcaacaagcagggagcaacctcgtttgtacagtacatttccgaagaatgtgccgacagaggacttgacgcgcttgtaaccactactgcctgccttagcgtttgcagtcaaggacctgttgttgccgttatgccaaacaatttttggtacggtggcgttacgaaggataaaattgacgaaatacttgatgcacttgaagagggaaaagcggtggaagagtatttaattgcgtaa

SEQ ID NO: 74880 - protein, 100 aa, Unknown
  Obtained from environmental sample
  misc_feature (1)..(100): Xaa is any amino acid
MKKPNYTILVCNSYRVAGDAQGFCNKQGATSFVQYISEECADRGLDALVTTTACLSVCSQGPVVAVMPNNFWYGGVTKDKIDEILDALEEGKAVEEYLIA

SEQ ID NO: 74881 - DNA, 723 bp, Unknown
  Obtained from environmental sample
  misc_feature (1)..(723): n is a, c, g, or t
atgatcgaaagactcaaccatccacaaacgtcaacaccgcggcgtgcaccggatgtctccagcgatgtgaccctaaaactcgcaacatcgaaaagaaccagtaaagccgcgaccaaacaaaccgcaaagtataatgcagctccaacctcgtcaacgtataaagcaagagggaaagatagaagatccgatacgcctccgatgaataattccgactggaccgtgccggtcaatctcgggaaaatgataaacacggttgcagatgaacaatatccggtttgggtcaatgatgacgctttcgttttttcttccaatgggcatgtgggttacggcggctttgacttctacttggctgttgccgacagtaacggagaatttacggacgtaaaacatgttcaagcgccggtcaacagttcgtttgatgactattccttggcgattgaccccgaaattgggcactttttctttgccagcagtcgatatttgggatttggacataccgatgaaatctattcgtatccgaaaacagcttctacgatcgaacttaatttcaaagtaacagatgcaaaaaccgaattgcctttggctaattctaccataaccgtatgtggaaatgacaattgccttgttctttccaccgactcatcgggaagagcgacctatgccaaacccaaaatggctgaagattataacatgacttttcaaaaacagaattacacccagtga

SEQ ID NO: 74882 - protein, 240 aa, Unknown
  Obtained from environmental sample
  misc_feature (1)..(240): Xaa is any amino acid
MIERLNHPQTSTPRRAPDVSSDVTLKLATSKRTSKAATKQTAKYNAAPTSSTYKARGKDRRSDTPPMNNSDWTVPVNLGKMINTVADEQYPVWVNDDAFVFSSNGHVGYGGFDFYLAVADSNGEFTDVKHVQAPVNSSFDDYSLAIDPEIGHFFFASSRYLGFGHTDEIYSYPKTASTIELNFKVTDAKTELPLANSTITVCGNDNCLVLSTDSSGRATYAKPKMAEDYNMTFQKQNYTQ

SEQ ID NO: 74883 - DNA, 753 bp, Unknown
  Obtained from environmental sample
  misc_feature (1)..(753): n is a, c, g, or t
ttggttattagctcaaactcaaatacgctaggtttttacggtcaaatcacaagagtatccgcaacacctacctactatgttacttacattagctctttgagaggagcaactggagcaacaggtgcgcaaggccctacgggagcagctggtgcaactggagcaacaggtgcgcaaggccctacaggagcaactggtgcgactggtgcgactggagcaacgggtgctgaagggcttaacatttattctacatcaacaactttagcgacaagtggcactactagcaacattgctataacagctatttctgggcgaacaataaaagtaggtgatttagttgtatcagctgctggtgtagtgcaccgtttaacaacagttagcggaacaaattacacgggaacttatgcactcacgctttcaacgggtggcggtaattcaataccagcacccaccactggttatcaagtgttccagagtaggtattcggctggttccatgatagcaactggttgggataaattaccactaaactctcatacagaaggcattttagacatttatcatggcggaactggagccgaaactggagcggtagtaaatgccattaccacgtatcaaggctcaggtgctaatttcaataacataagagagtcgggtgtttacaaagtttacgcatcaactagttattcaagtagttcaacaaatgctcctgcatctcctggaagctcatctgtaactggtgggtggaccttttag

SEQ ID NO: 74884 - protein, 250 aa, Unknown
  Obtained from environmental sample
  DOMAIN (33)...(91): Collagen triple helix repeat (20 copies)
  misc_feature (1)..(250): Xaa is any amino acid
MVISSNSNTLGFYGQITRVSATPTYYVTYISSLRGATGATGAQGPTGAAGATGATGAQGPTGATGATGATGATGAEGLNIYSTSTTLATSGTTSNIAITAISGRTIKVGDLVVSAAGVVHRLTTVSGTNYTGTYALTLSTGGGNSIPAPTTGYQVFQSRYSAGSMIATGWDKLPLNSHTEGILDIYHGGTGAETGAVVNAITTYQGSGANFNNIRESGVYKVYASTSYSSSSTNAPASPGSSSVTGGWTF

SEQ ID NO: 74885 - DNA, 438 bp, Unknown
  Obtained from environmental sample
  misc_feature (1)..(438): n is a, c, g, or t
ttggcagagggtccggttcttgcgattaggcaaagcgatgagattttgaatgcgatggataaatggaataagaaccatcattttaaaagcggtttgatagaaagagtaaaaaattctccgtataatttagcgacctcagaggagatgaccctcaattttataaaaggctacaccgaaaaatacaaaaacttgatatgcggaaattccattgggcaagaccgccgcttcttggttaagtatatgccaaaaattgatgaatggctaaactacagaagcatagatgtaagctccgtaaaagagcttgcctataggtggtatccaaaactgcctaagttccagaaaaaagaaaaccatcgtgctcttgatgatattagggaaagcattgaagaattaaaatattacagaaataaaatttttgtccaggaattgttgagttga

SEQ ID NO: 74886 - protein, 145 aa, Unknown
  Obtained from environmental sample
  DOMAIN (2)...(131): Exonuclease
  misc_feature (1)..(145): Xaa is any amino acid
MAEGPVLAIRQSDEILNAMDKWNKNHHFKSGLIERVKNSPYNLATSEEMTLNFIKGYTEKYKNLICGNSIGQDRRFLVKYMPKIDEWLNYRSIDVSSVKELAYRWYPKLPKFQKKENHRALDDIRESIEELKYYRNKIFVQELLS

SEQ ID NO: 74887 - DNA, 426 bp, Unknown
  Obtained from environmental sample
  misc_feature (1)..(426): n is a, c, g, or t
atggcctgcggcctacgggcgctgaacagggacttggcggtggccgcctgcctgatgcacgacataggcaagactgcggaactgagctacgaccgctcttacggctacacagacgagggcaacctgctgggccacatatccatggagttcgcctgggtcaacgacgccatagctggcttggcgggcttccccgaagagaccaggcggcaactgctgcacatactcctgagccaccacgggaagctggagttcggctcgccagtggtgcccaagacgccggaggccatactagtccactacctagacgacctggacggcaagctggaatcaatattcgcaagcatcagggaagacacaggcactggcaactggacgccctacaacaaatcactggagcggatgatatacaaggtgcggatggagtag

SEQ ID NO: 74888 - protein, 141 aa, Unknown
  Obtained from environmental sample
  DOMAIN (5)...(107): HD domain
  misc_feature (1)..(141): Xaa is any amino acid
MACGLRALNRDLAVAACLMHDIGKTAELSYDRSYGYTDEGNLLGHISMEFAWVNDAIAGLAGFPEETRRQLLHILLSHHGKLEFGSPVVPKTPEAILVHYLDDLDGKLESIFASIREDTGTGNWTPYNKSLERMIYKVRME

SEQ ID NO: 74889 - DNA, 411 bp, Unknown
  Obtained from environmental sample
  misc_feature (1)..(411): n is a, c, g, or t
gtggtgacggatgatgatttcaaggatgtgcaggattcgatcaaagaggatggcatcaaagacctactcaacaaggcttatgggcttttcaagaaacccgatccgcagtttagggcagacgcagttgaaaaactgtgggatgcttttgagaggctgaaaacatactatggcgacaaaaaacaatcctctaatcaaattatcaatgatatggctatgggtgatgtcgcatttggaaagatgttctacgatgagtttatgaagctctcggaaatcggcaacaatttcaggatacgccaccacgagacggacaaaacagatattgacgacacacgccactacgactatttcttcaaccgctgcatgtcgctggtgaaatgcgccacacaatttttaagggacgagggcgactga

SEQ ID NO: 74890 - protein, 136 aa, Unknown
  Obtained from environmental sample
  misc_feature (1)..(136): Xaa is any amino acid
MVTDDDFKDVQDSIKEDGIKDLLNKAYGLFKKPDPQFRADAVEKLWDAFERLKTYYGDKKQSSNQIINDMAMGDVAFGKMFYDEFMKLSEIGNNFRIRHHETDKTDIDDTRHYDYFFNRCMSLVKCATQFLRDEGD

SEQ ID NO: 74891 - DNA, 339 bp, Unknown
  Obtained from environmental sample
  misc_feature (1)..(339): n is a, c, g, or t
gtgacggcggttcaatccaacgccggtcagaaaaccaagtatgcggattggtttgccgcgttgtccgatatgcaggaacaaatagccgggaaagattttgagattgccattataggctgcggggcgtatggttttcctctggcggcttttgtcaaaggtctgggtaaaaaagccgtacatttggccggagcgacgcaaattttattcggaatcaaaggccgccgttgggaaaaaggttacggatacgaccaaaaattttataatgaatactgggtgcgtcctttgccggaagaaaccccggagacatttcaaaatgtggaagacggatgttactggtaa

SEQ ID NO: 74892 - protein, 112 aa, Unknown
  Obtained from environmental sample
  misc_feature (1)..(112): Xaa is any amino acid
MTAVQSNAGQKTKYADWFAALSDMQEQIAGKDFEIAIIGCGAYGFPLAAFVKGLGKKAVHLAGATQILFGIKGRRWEKGYGYDQKFYNEYWVRPLPEETPETFQNVEDGCYW

SEQ ID NO: 74893 - DNA, 339 bp, Unknown
  Obtained from environmental sample
  misc_feature (1)..(339): n is a, c, g, or t
atggatttctttgttgccgaatcgtgcggatggtgcaccccgtgttcggttggaaccacaatactgacaaacaagctaaaaaaaataatacgcggcaacggaactcaaagcgatttgacggaaattgaaagctggtgcaaaaccgtcaaaaatctgagcagatgcggacttggaacatcatccgcgaatccgatactctcaacgctgaaaaatttcagacacctctatgaaaacaggcttaaaaaagatattgattactgcagcgagtttgatctcgcctcttcggtaaaagaatcctgcctcgttgtgggaagaaaacctgaaacaggggagcattga

SEQ ID NO: 74894 - protein, 112 aa, Unknown
  Obtained from environmental sample
  misc_feature (1)..(112): Xaa is any amino acid
MDFFVAESCGWCTPCSVGTTILTNKLKKIIRGNGTQSDLTEIESWCKTVKNLSRCGLGTSSANPILSTLKNFRHLYENRLKKDIDYCSEFDLASSVKESCLVVGRKPETGEH

SEQ ID NO: 74895 - DNA, 516 bp, Unknown
  Obtained from environmental sample
  misc_feature (1)..(516): n is a, c, g, or t
atggacacctttgctgcggctgcgctggcatcgctgccgcccagccgtgatgtaatgagataccaaccacgacgacccaactccgacatcatcacgcccttcatgcggaggcgtattgtgggcgcaggggtggcgtttgctgtgctgctcttgggtatgctctaccacttcacacaaggtgacggcagcatttcgcgctacgacctatcgtacttcttcaccacgtttgtcatgctgcaattttggaatttattcaacgccaaaacctacgcttcgggcaaatcagcgtttgaaaagctgcaccgcagcgtgggcttgctggtggtagcgctgctcattattgtgggacaatacctcattgtaacctttggcggcgatgtcttccgcactacaccgctgacaacgcgcgattggattactattattttgggaacatcggtaacgctatgggtgggagaagtgttgaggttaataaaaagacttcgcaggttaaaccaatcaaacaagaaatcgtga

SEQ ID NO: 74896 - protein, 171 aa, Unknown
  Obtained from environmental sample
  DOMAIN (21)...(162): Cation transporting ATPase, C-terminus
  misc_feature (1)..(171): Xaa is any amino acid
MDTFAAAALASLPPSRDVMRYQPRRPNSDIITPFMRRRIVGAGVAFAVLLLGMLYHFTQGDGSISRYDLSYFFTTFVMLQFWNLFNAKTYASGKSAFEKLHRSVGLLVVALLIIVGQYLIVTFGGDVFRTTPLTTRDWITIILGTSVTLWVGEVLRLIKRLRRLNQSNKKS

SEQ ID NO: 74897 - DNA, 771 bp, Unknown
  Obtained from environmental sample
  misc_feature (1)..(771): n is a, c, g, or t
gtgggcgccgaccccctgcaaggcgacggcgcgggcatcctgattcagattcccgacgcgctgtaccgcgaagacatggccagacagggtatcaccctgccgccgccgggtgaatacggcgtcgcaatggtcttcctgccgcaggagcctgccacgcggctggcctgcgaagaggaactcgaacgcgccgtgcgcgacgaaggccagatcgtgctcggttggcgggatgttcccattgaccgcgagatgcccatgtcgccgacggtcaaggccaccgaaccggtcatccgccagttgttcgtgcggcgcagcccggacgtgatggtcacggaggcactggaacgcaagctctatatcgcgcgccgccgttcggccaacgccattcacgcgctgggactcaagcacggaaattcatattacatgccctccttttcagcgcgtacggtgctgtacaaaggactactgctggcaccgcaggtggggaggtactaccgcgacctggccgatccacgcgccatttccgctctggcgctggtgcatcaacgcttttccaccaacacctttccgcgctggaatcttgcccagcctttccgttacattgcccacaacggcgaaatcaacaccgtacgcggcaactataactggatgctcgcgcgcgaaaagggcgtttcctcgccgcttttgggcgacgacctgcaaaaaatctggccgttgatttatcccggccaatccgattccgcctgcttcgacaacgcgctgaacttctggtga

SEQ ID NO: 74898 - protein, 256 aa, Unknown
  Obtained from environmental sample
  DOMAIN (1)...(256): Glutamine amidotransferases class-II
  misc_feature (1)..(256): Xaa is any amino acid
MGADPLQGDGAGILIQIPDALYREDMARQGITLPPPGEYGVAMVFLPQEPATRLACEEELERAVRDEGQIVLGWRDVPIDREMPMSPTVKATEPVIRQLFVRRSPDVMVTEALERKLYIARRRSANAIHALGLKHGNSYYMPSFSARTVLYKGLLLAPQVGRYYRDLADPRAISALALVHQRFSTNTFPRWNLAQPFRYIAHNGEINTVRGNYNWMLAREKGVSSPLLGDDLQKIWPLIYPGQSDSACFDNALNFW

SEQ ID NO: 74899 - DNA, 840 bp, Unknown
  Obtained from environmental sample
  misc_feature (1)..(840): n is a, c, g, or t
gtggacgaggcgcggatgcgggcttggctcgattccctaacgccgtggtccaagaagaagctgtccgccaaagacagcttagacctggcgcgcggcgcggcgctgctcatagcggcgcggcctgccgaggctgatatgtttttggacaggttcgagagcggctacgccgaaaacctgcagctgcagtacgatttggcccgtggctacgccatagccggcagcaaggccctctccttccgcgtagcccgcaggctcagttggcggatccccatggaaagccgtgcgggcaggcctatccaagtgctgtccgtgctctacccgcccttttataccgcggagataagcaagtacgccgcccgcttcggcgtggatcccctccttgtgatctccgtaatgcggcaggagagcatattcgactacaagatagtctcccccgccggagccatagggcttatgcaggtaatgcctacaacaggagaggggatagccaaagagctcaaagagaccttcgccgaggagtccctctacaactacgagaccaacatccgctacggtactttctacctccgcaagcgctccgcgcagttcgacggcgacaaggtcctggtactatgcagctacaacgccggcgcccacaacgcaatcaaatggcgggacaggaacaaacgcttagaacccgacctattcgtagaggacataggtttcttcgagacgcgcggatacgtaaaaaaagtaatgggcaactactggacataccaagccctatccaaaacccccggctacgactacgaacaacccgaacccgagaccgtctactggggccgcaaagaagaaaagtaa

SEQ ID NO: 74900 - protein, 279 aa, Unknown
  Obtained from environmental sample
  DOMAIN (112)...(230): Transglycosylase SLT domain
  misc_feature (1)..(279): Xaa is any amino acid
MDEARMRAWLDSLTPWSKKKLSAKDSLDLARGAALLIAARPAEADMFLDRFESGYAENLQLQYDLARGYAIAGSKALSFRVARRLSWRIPMESRAGRPIQVLSVLYPPFYTAEISKYAARFGVDPLLVISVMRQESIFDYKIVSPAGAIGLMQVMPTTGEGIAKELKETFAEESLYNYETNIRYGTFYLRKRSAQFDGDKVLVLCSYNAGAHNAIKWRDRNKRLEPDLFVEDIGFFETRGYVKKVMGNYWTYQALSKTPGYDYEQPEPETVYWGRKEEK

SEQ ID NO: 74901 - DNA, 375 bp, Unknown
  Obtained from environmental sample
  misc_feature (1)..(375): n is a, c, g, or t
ttggaacaaaccctgcacggttatggttgtgccgcgcggagagggcgcgtcctcaacttcctgcgctgttccgttgtccaccaagagcgcatggccgccgccgccgtcgttcgtgacgatgcgcatacgcgcgacactggctatcgcgaaaagcgcttcgccgcgaaatcccaggctcacgcaggtttcgagatcctcaagcgaggatatcttggaggtggcgtgctttatgatcgcgagcgggagatccaccgcgctcatgccgcagccgtcatcctggacgcggatctgcgcaatcccgcccgactgaagctccacctggatggaatgcgcccccgcgtcgagcgcgttatccaccaattcgcggactactga

SEQ ID NO: 74902 - protein, 124 aa, Unknown
  Obtained from environmental sample
  misc_feature (1)..(124): Xaa is any amino acid
MEQTLHGYGCAARRGRVLNFLRCSVVHQERMAAAAVVRDDAHTRDTGYREKRFAAKSQAHAGFEILKRGYLGGGVLYDREREIHRAHAAAVILDADLRNPARLKLHLDGMRPRVERVIHQFADY

SEQ ID NO: 74903 - DNA, 510 bp, Unknown
  Obtained from environmental sample
  misc_feature (1)..(510): n is a, c, g, or t
atggttcgcgcgccgctgaagcgaatactcctggtgggttcgggcgggatagcgcttgtcaagcttcccgccctgatccggatgctgcgcgcgcagggctatgagctccggcttgtgctgaccgaaaacgcggcgcgcttcatcactccgctgacttttgaaaccctgctccaatcccccgtatatatcgatccctttgcgcggcgcgataatcttgcgcatattgaactgcgcaagtgggcggagatggcggtgctggcgccgggaacggccaatatgatcgccaaggccgcgcacgggatcgccgacgatctcgcatccacggtgcttctcgggacaggcgctattccgcgtattgtctgtcccgcgatgaacgacgcgatgtgggcggcgcccgcgactcagcgcaatatcgcgcagcttgcgagggatggctggcggttcgtcggtcccgtaaccggtgagctcgcgtgcggcgacgcgcgccgggctcggccaatctgtacatga

SEQ ID NO: 74904 - protein, 169 aa, Unknown
  Obtained from environmental sample
  DOMAIN (7)...(123): Flavoprotein
  misc_feature (1)..(169): Xaa is any amino acid
MVRAPLKRILLVGSGGIALVKLPALIRMLRAQGYELRLVLTENAARFITPLTFETLLQSPVYIDPFARRDNLAHIELRKWAEMAVLAPGTANMIAKAAHGIADDLASTVLLGTGAIPRIVCPAMNDAMWAAPATQRNIAQLARDGWRFVGPVTGELACGDARRARPICT

SEQ ID NO: 74905 - DNA, 375 bp, Unknown
  Obtained from environmental sample
  misc_feature (1)..(375): n is a, c, g, or t
atggaggagcaggcagcggttttgcgggaggccggtttttcgctcgctccctttgggaagcgaaactggatcatcgacgaatatcctgccggagtgaaggatgtgctggcggcattgcgttccctgctggccgcgctggcggcaagtccgcacgcgaatcttgccgaggtgcgggataaacgcgccgagagcgtgtttgcgactctcgcctgccacgccgctgtacggcagggggatactatcaccgaagcggctttccgggagatactcgcgggcgtaaccgcgctggaaaagccgcatacctgtccacatggccgtccagcgatagtgcggctggagaaagaggagattgaaaaatggttcgcgcgccgctga

SEQ ID NO: 74906 - protein, 124 aa, Unknown
  Obtained from environmental sample
  misc_feature (1)..(124): Xaa is any amino acid
MEEQAAVLREAGFSLAPFGKRNWIIDEYPAGVKDVLAALRSLLAALAASPHANLAEVRDKRAESVFATLACHAAVRQGDTITEAAFREILAGVTALEKPHTCPHGRPAIVRLEKEEIEKWFARR

SEQ ID NO: 74907 - DNA, 783 bp, Unknown
  Obtained from environmental sample
  misc_feature (1)..(783): n is a, c, g, or t
ttgttggcgacgtcgtcggttttgcgggcggcttgttttatgcgcggtatagattatgtgcagattccgaccacgcttttggccatggtcgattcgagcgtgggcggcaagaccgctgtcgaccatccgctgggcaagaacctgataggggcgtttcaccagccggccgcggtttgggctgacgtcaactttttggagacgctgccgcgccggcagtttatcgcgggttacgcggaggcgttcaagtacgcttttttgggcgggcgcgccatgtttgatttcatggagtgcaataaggcggcggttttggggggaggttccgatttgctgttggagtgcatcgagcggtgcgtacgcataaaggccggcatcgtcgcccgggacgagcgggaggcgggcgtgcgggcgcttttgaacttcggccacaccttcgcccacgcgctggagcggttctacggctttgaggggctgctgcacggcgaggccgtattgtgggggattgcgtgcgcggtggcgcttgccaaggagaccggggcgctgccgcgtaattattggggcgattttgatgaaatacttcaaggtatgccgctgccgccgttgccgtcggcgccgtggatagacgagatatacgctgctatgtttaccgataagaaggcggaatcgggacagttgcgcttcgtaatgccggtcgcgccgggcgaggcggaggcctcttacgcggtaggcgaagaaaacatccgtcaggttcttaaagaaaaatttgcgcattggtttcccgaataa

SEQ ID NO: 74908 - protein, 260 aa, Unknown
  Obtained from environmental sample
  DOMAIN (1)...(220): 3-dehydroquinate synthase
  misc_feature (1)..(260): Xaa is any amino acid
MLATSSVLRAACFMRGIDYVQIPTTLLAMVDSSVGGKTAVDHPLGKNLIGAFHQPAAVWADVNFLETLPRRQFIAGYAEAFKYAFLGGRAMFDFMECNKAAVLGGGSDLLLECIERCVRIKAGIVARDEREAGVRALLNFGHTFAHALERFYGFEGLLHGEAVLWGIACAVALAKETGALPRNYWGDFDEILQGMPLPPLPSAPWIDEIYAAMFTDKKAESGQLRFVMPVAPGEAEASYAVGEENIRQVLKEKFAHWFPE

SEQ ID NO: 74909 - DNA, 303 bp, Unknown
  Obtained from environmental sample
  misc_feature (1)..(303): n is a, c, g, or t
gtgcttgaccatgtccccggatcggccgaggttctgccgcgcatcgcggcggcggtcaaggggcgcatcgccctgatcgccgacggaggcgtgcgctccggcgttgatgtgctcaaaatgctggcgctgggcgcggattgcgtcatgatcggccggccgttcgccgtggctgccatcggcggcggcgccgaaggcgtcaaggcatacgccgcgatgtaccgggagcagctcgagcaggccatgatcatgacagggtgccgcgaggcggcccatgccggccaacatctgctctatgcccggtga

SEQ ID NO: 74910 - protein, 100 aa, Unknown
  Obtained from environmental sample
  misc_feature (1)..(100): Xaa is any amino acid
MLDHVPGSAEVLPRIAAAVKGRIALIADGGVRSGVDVLKMLALGADCVMIGRPFAVAAIGGGAEGVKAYAAMYREQLEQAMIMTGCREAAHAGQHLLYAR

SEQ ID NO: 74911 - DNA, 612 bp, Unknown
  Obtained from environmental sample
  misc_feature (1)..(612): n is a, c, g, or t
gtgcaaacggcgcagttctacccgcatctggttgcgcaggccggcatccaggttggacaagggttcatcgaacagaaagacggaaggctcccggacgatggcccggcccatggccacacgctgccgctgcccgccggaaagctgccggggcatgcgatccaggtagtcggccagcccgagcatcccggccgcggcagcgagccggcgttcccgttcttccggggaaacgccgcgcaccttgaggccgtaacagatattttcccgcacgctcatgtgcgggtacagggcatagttctgaaaaaccatggccacgtcccgatcttttggctcaagccgggccacgtcgcggtcgccgatgaatatttctccgcccgtcagttcttccagaccggcgatgaggcgcaagaccgtggacttgccgcagccggaagggccgacgatgaccaggaagacgccgtcctgcgccacctggctgattcctttgattatctgcgtcttgccgaaggctttgaccacatttctcagttcgatccgggccatgccgcgtccttgttctgttttacatcaacagggcgttctgtccgccgcgcagccgaacgtcaccgggcatag

SEQ ID NO: 74912 - protein, 203 aa, Unknown
  Obtained from environmental sample
  misc_feature (1)..(203): Xaa is any amino acid
MQTAQFYPHLVAQAGIQVGQGFIEQKDGRLPDDGPAHGHTLPLPAGKLPGHAIQVVGQPEHPGRGSEPAFPFFRGNAAHLEAVTDIFPHAHVRVQGIVLKNHGHVPIFWLKPGHVAVADEYFSARQFFQTGDEAQDRGLAAAGRADDDQEDAVLRHLADSFDYLRLAEGFDHISQFDPGHAASLFCFTSTGRSVRRAAERHRA

SEQ ID NO: 74913 - DNA, 600 bp, Unknown
  Obtained from environmental sample
  misc_feature (1)..(600): n is a, c, g, or t
atgccgttgagaaaatattttatgaaaatctttcccgagagtatgaagatatacttaagatatctgtttagaaggaataattttacggaaaaatacagaaaagcgaataatttaatatatcaacatagagaatcggtgaaagaattcaaaaaagcgttgtgtcaattttcatgtggtgtgtacagcgttgctgattccgccgaaatttttataaaatcatatttaaataagtcggtaaaaccggttaaagttttggagtctgtcttgaaagacaatgatcttgtcttactctgtataacaagagataatctacacaccgttaaaactcaggtggagtatcatagaacgataggcgtcaggcatttcgcatatttggataatatgtcgaaagacggtacgtttgaatatcttaaggaacaacccgacgtgtccttattcgtaacaggcgaggtatttcatgatcaattaaaggacgcgtggaaaaggcagataacggattttcttggatatgacagatggtatttggcgcttgatcctgatgaattgtttatttatcctggtatagagaaaaaaaacataaatatgtatattaacttttag

SEQ ID NO: 74914 - protein, 199 aa, Unknown
  Obtained from environmental sample
  misc_feature (1)..(199): Xaa is any amino acid
MPLRKYFMKIFPESMKIYLRYLFRRNNFTEKYRKANNLIYQHRESVKEFKKALCQFSCGVYSVADSAEIFIKSYLNKSVKPVKVLESVLKDNDLVLLCITRDNLHTVKTQVEYHRTIGVRHFAYLDNMSKDGTFEYLKEQPDVSLFVTGEVFHDQLKDAWKRQITDFLGYDRWYLALDPDELFIYPGIEKKNINMYINF

SEQ ID NO: 74915 - DNA, 789 bp, Unknown
  Obtained from environmental sample
  misc_feature (1)..(789): n is a, c, g, or t
atggggaaagaaattgcgaggatacttagtgaacgtgctcccgaggagcatatgaagtgggagaagaatgaacgagagaagcgagaagcgaaagagaggagagaacgggaggagttggagaagtggaagctggaacaccntgaagagtgggcagagcaagagagaaaacgaaaggagagggaagcgaaggagaggaaagagcgagaggagcgggaagcaagggagaagaaagaacgagaggcgagggaggtgagggagagggaagaacgagaggagatggaacggaaggatagggaagagaaaaaaaaatggcttgaagagtataaggtgaagagaaatcatgatatggcgtatgccaaaaaatgtattaggatgcgtaagagttggattgtttttagtacgctgttaggtggtataatcttcggcggtgttgggagtgtcggagtattatcagaggagatacctatttgggtgttggtggcgggtctgtctccttgtatattgatgccgataatgtcctccataattaaatggcgcgccaaagggatggggagcggctgtgggtggggttgtgcgtcgggtttgggggcgtaccttgccgttatgggtgttttgaccgcgcctagtgattataaggattggattttgtttgttgtcggagggttgtttggtgttgcgcttggttggactgccggcagaatgatatgcgattgcaataaagcattgaattttgagaaggtcaaagaatataaagaatatttagtatatgaaagcaagagggtattatag

SEQ ID NO: 74916 - protein, 262 aa, Unknown
  Obtained from environmental sample
  misc_feature (1)..(262): Xaa is any amino acid
MGKEIARILSERAPEEHMKWEKNEREKREAKERREREELEKWKLEHXEEWAEQERKRKEREAKERKEREEREAREKKEREAREVREREEREEMERKDREEKKKWLEEYKVKRNHDMAYAKKCIRMRKSWIVFSTLLGGIIFGGVGSVGVLSEEIPIWVLVAGLSPCILMPIMSSIIKWRAKGMGSGCGWGCASGLGAYLAVMGVLTAPSDYKDWILFVVGGLFGVALGWTAGRMICDCNKALNFEKVKEYKEYLVYESKRVL

SEQ ID NO: 74917 - DNA, 411 bp, Unknown
  Obtained from environmental sample
  misc_feature (1)..(411): n is a, c, g, or t
gtgcttaaactcggtggtgctaggctgctggaacttacactgcctacagaactactgctaaccgttgcaacaacagagctactgctggcaccgccgcctacgctggaactactaccgtcactaccgactacactggaactgctaccgtcactaccgactacgctggaactgctaccatcaccgactacgctggaactgctaccgtcactaccgactacgctggaactgctaacgtcaccgcctgcgctggaacttctgccgcctccactggaacttctaccgccgccgcctgcgctggaactgctggcaataacagcatcagagctactgctaaattcatcaacatcagaactgctgctaaattcatcaacatcggaactgctgctaaattcacgttgcatttccccttaa

SEQ ID NO: 74918 - protein, 136 aa, Unknown
  Obtained from environmental sample
  misc_feature (1)..(136): Xaa is any amino acid
MLKLGGARLLELTLPTELLLTVATTELLLAPPPTLELLPSLPTTLELLPSLPTTLELLPSPTTLELLPSLPTTLELLTSPPALELLPPPLELLPPPPALELLAITASELLLNSSTSELLLNSSTSELLLNSRCISP

SEQ ID NO: 74919 - DNA, 423 bp, Unknown
  Obtained from environmental sample
  misc_feature (1)..(423): n is a, c, g, or t
atggataaacaattggaatatgaaggaattgtcgcgtctatttgcggcaatatgatgacagtacgtattgcggtcgcttcttcgtgcgctgggtgtgcggcgcatggtcactgtgtgtcgtcgggaaacagagacagagatgtggttattgagaacttttcgggagattttgtttcaggcgagcatgtgaaacttattatgaagcaatcaacgggcttccgtgcattgtgtattggctacatgattccacttgccgtaattcttacaacgctgcttgctgtgtaccaaatcacaggcgaggagcttgtaagcggaatcatggcgttgattgcaattgttccatactatttaatgataaaaatatntaacagaaaaataacaggaaccttcgggtttacagttcaaaaaattaaatgtgcatga

SEQ ID NO: 74920 - protein, 140 aa, Unknown
  Obtained from environmental sample
  misc_feature (1)..(140): Xaa is any amino acid
MDKQLEYEGIVASICGNMMTVRIAVASSCAGCAAHGHCVSSGNRDRDVVIENFSGDFVSGEHVKLIMKQSTGFRALCIGYMIPLAVILTTLLAVYQITGEELVSGIMALIAIVPYYLMIKIXNRKITGTFGFTVQKIKCA

SEQ ID NO: 74921 - DNA, 942 bp, Unknown
  Obtained from environmental sample
  misc_feature (1)..(942): n is a, c, g, or t
atgctaaagacatttcccaaaggtggcattcatccacccgaaaacaagttcagcgccggaacaccgattgaagtactgtcgccttctgcaatngtaaccattccgttgtctcagaacatcggagctacgcctgtaacaaaggttaaaaccggcgaccatgtaaaaaccggacaattaattgccgagggttcaggttttgtatctgcaaatatacattcatccgtgtcaggtactgtcaaaaagatagatgcgttccttgatgcgtcaggctataaacgccctgcaatacagattgccgttgagggcgacgacgagtgggaagacggaattgatacgtccgaagttttgaaaactgaaatagcagacagcgccgaagaaatagtaaagaaaatcactgcagccggtgttgtggggcttggcggagcaacatttcctactcatgttaaactgtccgtaccgcagggtaaaaatgcagaggttattgttgtcaacggcgtggaatgtgaaccctacctgacgtgcgaccaccggctaatgcttgagaaaggcgccgaaataatcgtcggaatccgtatcttgatgaaagcgctaaaagtaaacagggctatcgttggagtggaaaacaacaaacccgacgttattgccagtctgcaaacaatagccgccgaacaccagggaatagaaatatgtccattgaaggtaaaatatccgcaaggcggcgagaaacaacttatcaaagctgttactggacgcgaagtaccgtccggaaaaattcccgtagatgttggcgcagttccattcaatgctgcaacggtttttgccgtgtacgaagcagtacagaagaataaaccgcttatcgaaagaatagttactgttactgggaaatgtctgttaaaaccgtcgaattcaaagtgcgagtggggacgtctcggccgattctga

SEQ ID NO: 74922 - protein, 313 aa, Unknown
  Obtained from environmental sample
  DOMAIN (107)...(313): Respiratory-chain NADH dehydrogenase 51 Kd subunit
  misc_feature (1)..(313): Xaa is any amino acid
MLKTFPKGGIHPPENKFSAGTPIEVLSPSAXVTIPLSQNIGATPVTKVKTGDHVKTGQLIAEGSGFVSANIHSSVSGTVKKIDAFLDASGYKRPAIQIAVEGDDEWEDGIDTSEVLKTEIADSAEEIVKKITAAGVVGLGGATFPTHVKLSVPQGKNAEVIVVNGVECEPYLTCDHRLMLEKGAEIIVGIRILMKALKVNRAIVGVENNKPDVIASLQTIAAEHQGIEICPLKVKYPQGGEKQLIKAVTGREVPSGKIPVDVGAVPFNAATVFAVYEAVQKNKPLIERIVTVTGKCLLKPSNSKCEWGRLGRF

SEQ ID NO: 74923 - DNA, 897 bp, Unknown
  Obtained from environmental sample
  misc_feature (1)..(897): n is a, c, g, or t
atggggccgtaccaacggttttcgcaccnggtcgaaatagacggaaggcttttggtcgatggcggcgtgatcaataattttcctgttttggaaatgcgcaaacgaggtatggatatcattattggcgtggatgttggctatcaatataaagacaaggacgaattacaaaatttcgcacaaatccttgaacaggtgatattcatgagtatccaaaaactcaacaaagagaatgcagaggcttgcgatattctcatcattcccaatttggaaaaaatatcggcgatggattttacacgtgccaacaccattttgcaaaggggttacgatgccgcacagaaggcttatcccgaattgaaccacctgtcaacactgttatccgaaaaatacgacattcaaccgtttgtcgaagaaccgtatcttcccaatacattgataaccgtagataccattatacttcatggaaataagaagtattcgcgacaatatattctcggacatcttcagttgaaaacacgcaaaatgattcatgtctcgaaaatcgaagaagttgttcaacgactgtttggaacattgctattcaccaaagtgacgtattatttcacaaaatccccacaaaatccccgacacgtagcacttcatatcaatatttccgaaacgccgttaaatcaaatgagaattggagctcgttatgataatattcgcggaccggcctttttggcagggtttacagccaaacagctattgctgccgaattcgagatttgacgttaatttggatttgtctgtgtttccaactttggatgtgcaatatcgtttttcgcacttgttcgtgccaggaaggaacgtttttcgatttggagacctacgctatttgcctcgtatatgttgtgcaatttaa

SEQ ID NO: 74924 - protein, 298 aa, Unknown
  Obtained from environmental sample
  DOMAIN (145)...(219): Surface antigen variable number repeat
  misc_feature (1)..(298): Xaa is any amino acid
MGPYQRFSHXVEIDGRLLVDGGVINNFPVLEMRKRGMDIIIGVDVGYQYKDKDELQNFAQILEQVIFMSIQKLNKENAEACDILIIPNLEKISAMDFTRANTILQRGYDAAQKAYPELNHLSTLLSEKYDIQPFVEEPYLPNTLITVDTIILHGNKKYSRQYILGHLQLKTRKMIHVSKIEEVVQRLFGTLLFTKVTYYFTKSPQNPRHVALHINISETPLNQMRIGARYDNIRGPAFLAGFTAKQLLLPNSRFDVNLDLSVFPTLDVQYRFSHLFVPGRNVFRFGDLRYLPRICCAI

SEQ ID NO: 74925 - DNA, 633 bp, Unknown
  Obtained from environmental sample
  misc_feature (1)..(633): n is a, c, g, or t
gtgacgcaacccggcaaatattgggaaaacggccaatggattgaaaccaaaccgcacgaaattcatcaacctatcacttaccccaatattggacccaaagagtcctatttaatttatcatgaagaattggaatcgctggtaaaaaattatccaaccttgaaacgcgcacgtttttggatgacatttggtcaagaatatctaactcaccttcgtgtcattcagaatatcggaatggcaggcatagagccgattatgtatgagggtaaggaaattgtgcctattcaatttttgaaagccgtgttgcccaatccaggcgatttaggccaaaattacaaaggttggacctccatcggttgccgtatcaaaggtttggataaacagggcaaagcgaaaacgtactacatttacaacaattgcagtcacgaaacggcttacaaggaaaccggtactcagggcgtaagctacacaaccggcgttccggccatgattggctcaatgatgtatttgaaaggcctttggaaaaatgcaggcgtatgcaatgttgaagaatttgaccccgacccattcatggaacaactcaacaaacaagggttgccgtggattgaattgcatgatgtggatttggaattataa

SEQ ID NO: 74926 - protein, 210 aa, Unknown
  Obtained from environmental sample
  DOMAIN (1)...(201): Saccharopine dehydrogenase
  misc_feature (1)..(210): Xaa is any amino acid
MTQPGKYWENGQWIETKPHEIHQPITYPNIGPKESYLIYHEELESLVKNYPTLKRARFWMTFGQEYLTHLRVIQNIGMAGIEPIMYEGKEIVPIQFLKAVLPNPGDLGQNYKGWTSIGCRIKGLDKQGKAKTYYIYNNCSHETAYKETGTQGVSYTTGVPAMIGSMMYLKGLWKNAGVCNVEEFDPDPFMEQLNKQGLPWIELHDVDLEL

SEQ ID NO: 74927 - DNA, 621 bp, Unknown
  Obtained from environmental sample
  misc_feature (1)..(621): n is a, c, g, or t
atgtatcagatcggccgaggcccaggagcaggtattgttcgtttttgtgccgatcatggaatccagggtgttgaccgccttgaagccccaggccagcaccggcccgcccagggccaggtagaacaggggggccaccaggccgtcggacaggttttcggccaaggtttcaatgagagcccggcggaccccggcctcggacaacccggccgtgtcgcggcccaccaccagagccaagccggcccgggcctcgggcagacagcctcggcggagggatttttccacccgccaggtttgtttatacaggtcgcgcaggcagataaggctgtaaaccaggtagatgaccgccagggcgtggaccagggaaccggcccgggcggcgaggtggagaaccagggccgcgccgcccatgaccgccgccgtcacccccaaggccagggccgccccggccgccaagaggcgggccggcccggcccaggctctggcccaggcttccccccgggcgataagccggccgatgagacgcaccgggtgaggccaggagggcggatcccccaaaagccaatcggccaggaaggccaggagggtcaggccggcggatatgctcaacctccggggctataa

SEQ ID NO: 74928 - protein, 206 aa, Unknown
  Obtained from environmental sample
  misc_feature (1)..(206): Xaa is any amino acid
MYQIGRGPGAGIVRFCADHGIQGVDRLEAPGQHRPAQGQVEQGGHQAVGQVFGQGFNESPADPGLGQPGRVAAHHQSQAGPGLGQTASAEGFFHPPGLFIQVAQADKAVNQVDDRQGVDQGTGPGGEVENQGRAAHDRRRHPQGQGRPGRQEAGRPGPGSGPGFPPGDKPADETHRVRPGGRIPQKPIGQEGQEGQAGGYAQPPGL

SEQ ID NO: 74929 - DNA, 375 bp, Unknown
  Obtained from environmental sample
  misc_feature (1)..(375): n is a, c, g, or t
atgcgcccgaaggagaagaccttctgcaaaacgtggtggaagaggtttacgacagtttcctggccgacctggcctccgggccggcccaagttcaagcccgaggaagtgcgccgcttggccgatggccgcatcttcagcggggccgaggcccagagactgggcctggtggacgaattgggcggctttgaggatgcggcccgactggcggcggccatgggcggcttcaagctgggcccggaagagcggcccaagctgaacatacgggacgggcgtccgggctggtgggagattctgcgcggccggctggatttgtccctgccctcgggcttaaagcccgggtttagcttgaaatatatttatagccccggaggttga

SEQ ID NO: 74930 - protein, 124 aa, Unknown
  Obtained from environmental sample
  misc_feature (1)..(124): Xaa is any amino acid
MRPKEKTFCKTWWKRFTTVSWPTWPPGRPKFKPEEVRRLADGRIFSGAEAQRLGLVDELGGFEDAARLAAAMGGFKLGPEERPKLNIRDGRPGWWEILRGRLDLSLPSGLKPGFSLKYIYSPGG

SEQ ID NO: 74931 - DNA, 780 bp, Unknown
  Obtained from environmental sample
  misc_feature (1)..(780): n is a, c, g, or t
atgggggggctcggcggcgcggcagtcggtacggcggggggattcgcggcggcgggcgcgacgacggcggcggtcatggcgctaggcaccgcttcgactggggcagctatttccggcttgtccggcatcgccgcgacgaacgcgacgcttgccgcgataggaggcggcgcgattgcggcgggcggcggcggaatggcgcttggaacaacgatactcggcgcatcgacacttggagtcggtcttttggtcggcggaattatcttcaacattgtcgggtcagtgctctccaataaagcggacgaagcgttgcgtcagatggagaaggctgaaaaggagataaacaagatatgcgcctacttagagagactggacgccacggcaaagaaataccgcgaggcgcttatggtagtgcaggagatttacacccgccatctaaacaaactttactccatcgtcgaaaccgacaagaaaacggattgggatactttttctgacgatgaaaagctcgttacggaaaatacggttttgctcgtgggactgcttttcggtatgtgtaaggtgcaactcgtgttgtcgtcgggtaatagtgacgaaccgaatcgggtaaatatgctggaggtcaataagtcggtagcgaacaccaacattgctttgggtgggagcggtttgtacgacgacgcgctggctcggttggtttttaaggcgaccccgatatcgtcgtttgatgatctttgtaagataggctgtatcctcgtctatccccctgaacggttattatga

SEQ ID NO: 74932 - protein, 259 aa, Unknown
  Obtained from environmental sample
  SIGNAL (1)...(23)
  misc_feature (1)..(259): Xaa is any amino acid
MGGLGGAAVGTAGGFAAAGATTAAVMALGTASTGAAISGLSGIAATNATLAAIGGGAIAAGGGGMALGTTILGASTLGVGLLVGGIIFNIVGSVLSNKADEALRQMEKAEKEINKICAYLERLDATAKKYREALMVVQEIYTRHLNKLYSIVETDKKTDWDTFSDDEKLVTENTVLLVGLLFGMCKVQLVLSSGNSDEPNRVNMLEVNKSVANTNIALGGSGLYDDALARLVFKATPISSFDDLCKIGCILVYPPERLL

SEQ ID NO: 74933 - DNA, 762 bp, Unknown
  Obtained from environmental sample
  misc_feature (1)..(762): n is a, c, g, or t
ttggaggatggcgagatcgccagcagcctgtccgtcagggcggcggaaaatgtccgggagatggtttctgtgatcggcgaatacaaccgcgaaaaagacaatctgcgcgtttcggatatttacgacgggatgatggtcaggacggggtacttaaaagccttggaagcgcagaacaacacagaggcggacaacagaatcgaaaacctgctcgaattcaaatccgtcatttatgattacgaaaaggatgatccgcggttatcgctggctgaatttatggaaaagatcgcgctgatggcggatattgataaccatgacgcgaatgaggacgctgtcgtgcttatgactatgcacagcgccaaggggcttgagtttccaaccgtatttttaccaggcatggaagacggcctttttccgggctggcgcgcgcgggatacagagggcggcctggaagaggaaaggcgcctgtgctatgttgggatgacccgggcgatggagcgcctgtatatgacaagcgccgcgacgcgcacactctacgggaggacggacaacacaagggagtcagtcttcctgcgcgaagtggatcaatccctgctggagggggaagctattcgcgggcgcgatgaanacagccggatgaaggcaaagtggacggatggatacagcagccccgagccgtttcaacctttcgatncactgaagtatgccnagcaggaaactcacaaaccaagcaaaaacgcggtggagtacgcgccggggcgatag

SEQ ID NO: 74934 - protein, 253 aa, Unknown
  Obtained from environmental sample
  misc_feature (1)..(253): Xaa is any amino acid
MEDGEIASSLSVRAAENVREMVSVIGEYNREKDNLRVSDIYDGMMVRTGYLKALEAQNNTEADNRIENLLEFKSVIYDYEKDDPRLSLAEFMEKIALMADIDNHDANEDAVVLMTMHSAKGLEFPTVFLPGMEDGLFPGWRARDTEGGLEEERRLCYVGMTRAMERLYMTSAATRTLYGRTDNTRESVFLREVDQSLLEGEAIRGRDEXSRMKAKWTDGYSSPEPFQPFDXLKYAXQETHKPSKNAVEYAPGR

SEQ ID NO: 74935 - DNA, 378 bp, Unknown
  Obtained from environmental sample
  misc_feature (1)..(378): n is a, c, g, or t
ttggcgttcgcgccggcgcgcccatccgcgttcatattcgcgccgatacttgcgcttacattctcgcctgcgcttgcgtcggcattggcgttcgcgccggcatttacattctcgcctgcgcttgcgtcggcattggcgttcgcgccggcatttacattctcgcctgcgttggtacctgcgttcgcgctggcacccgcgttcgcgtcagcgcgcccatccgcgttcatgttcgcgctgatacttgcgctcacattctcgcctgcgcttgcattggcattggtgccggcatttacattcgcgcttgcgttcgcgtttgcgtcagcgcccgcgttcgcgccttcgcccgccccagtttttttcacaagcgaaaacgcgtag

SEQ ID NO: 74936 - protein, 125 aa, Unknown
  Obtained from environmental sample
  SIGNAL (1)...(26)
  misc_feature (1)..(125): Xaa is any amino acid
MAFAPARPSAFIFAPILALTFSPALASALAFAPAFTFSPALASALAFAPAFTFSPALVPAFALAPAFASARPSAFMFALILALTFSPALALALVPAFTFALAFAFASAPAFAPSPAPVFFTSENA

SEQ ID NO: 74937 - DNA, 891 bp, Unknown
  Obtained from environmental sample
  misc_feature (1)..(891): n is a, c, g, or t
gtgggcctgatcggtgaatcagggtccgggaagtcgctttcggcgctcgcggtaatgggactgctaccggacaatctcacagcggcgggcgaggtacggctcgctggcaggcaagtcctcggcctcaacgaccgcgctatggcaccgctgcgcgggcaagtcgcgtcgatgatctttcaggagccgatgaccgcccttgacccgacgttgcgagtcggcaagcagatcgccgaggtgctgagactgcatggtcgaagcaccaatccggatgccgaagcaatcgcgtcgctcgcggaggtcgggctgcccgatccggtcggggccgcgcgcgcgtatccgcatcagctttccggcgggcaacggcagcgcgtgctgatcgcgatggcgttggcaaacaacccggcgctcctgatcgccgacgagccgaccaccgcgctggacgtgactgtgcagcagcaagtgcttgcgcttatgacggatttggtgtcaaaacgggggactggcctgctgtttatcacccacgatctgggcgttgtgcagcgagtttgccagcgggtattggtgctgaaagacggcctgatcgtcgaatccggttcggtcagcgacgtgctgacaaacccgcaacagccctacacgcaagccttattagctgcgtccatcctgccgcccagaatgcaggtggcagcggtccaagcaatctcccgcgatccggagcctgtgctgccttcgcttaccacctcgtcatcctgcggcccgcaacgcgggaacgcaggatcgcgggaggcgcctggtgtcgtcgttgcgcataccccggccgttccgccaatcgtctccctgcgggatgtctataaaacttacccgcccgctcgtgccgatctgatacttggntga

SEQ ID NO: 74938 - protein, 296 aa, Unknown
  Obtained from environmental sample
  DOMAIN (195)...(250): Oligopeptide/dipeptide transporter, C-terminal region
  misc_feature (1)..(296): Xaa is any amino acid
MGLIGESGSGKSLSALAVMGLLPDNLTAAGEVRLAGRQVLGLNDRAMAPLRGQVASMIFQEPMTALDPTLRVGKQIAEVLRLHGRSTNPDAEAIASLAEVGLPDPVGAARAYPHQLSGGQRQRVLIAMALANNPALLIADEPTTALDVTVQQQVLALMTDLVSKRGTGLLFITHDLGVVQRVCQRVLVLKDGLIVESGSVSDVLTNPQQPYTQALLAASILPPRMQVAAVQAISRDPEPVLPSLTTSSSCGPQRGNAGSREAPGVVVAHTPAVPPIVSLRDVYKTYPPARADLILG

SEQ ID NO: 74939 - DNA, 396 bp, Unknown
  Obtained from environmental sample
  misc_feature (1)..(396): n is a, c, g, or t
ttgctgctgcacagtcacgtccagcgcggtggtcggctcgtcggcgatcaggagcgccgggttgtttgccaacgccatcgcgatcagcacgcgctgccgttgcccgccggaaagctgatgcggatacgcgcgcgcggccccgaccggatcgggcagcccgacctccgcgagcgacgcgattgcttcggcatccggattggtgcttcgaccatgcagtctcagcacctcggcgatctgcttgccgactcgcaacgtcgggtcaagggcggtcatcggctcctgaaagatcatcgacgcgacttgcccgcgcagcggtgccatagcgcggtcgttgaggccgaggacttgcctgccagcgagccgtacctcgcccgccgctgtgagattgtccggtag

SEQ ID NO: 74940 - protein, 131 aa, Unknown
  Obtained from environmental sample
  misc_feature (1)..(131): Xaa is any amino acid
MLLHSHVQRGGRLVGDQERRVVCQRHRDQHALPLPAGKLMRIRARGPDRIGQPDLRERRDCFGIRIGASTMQSQHLGDLLADSQRRVKGGHRLLKDHRRDLPAQRCHSAVVEAEDLPASEPYLARRCEIVR

SEQ ID NO: 74941 - DNA, 864 bp, Unknown
  Obtained from environmental sample
  misc_feature (1)..(864): n is a, c, g, or t
gtgcgggcgcagacctttcaggactgggaaatcatcttctgggacaatggttccgttgatgcaagccccggcatcgcccaagccttcggcccgcaactgcgctatttccgctccgggcataccgtagcgctcggcgcggcgcgcaatctggcgttgcgggaagccaagggccgatatctcgcctttctggattgcgacgatctgtggctggaagacaagctggcccgacagcttgcgctctttgagggcaacccgcgcctgggactcgcgtgtacggacacggaaattttttccggcgccggcgccctgagccgcgtttttgcgcgggccgcaccggcccgaggcagggtgttccgggaactgatgcagcggcaatggatttccatgtcctcggccatggtacgcgcccaagcattgtatgatctggatcattggtttgacgagcgcttgagcctgtgcgaggaggcggaccttttctaccgcatcgcccatgactgggaactggattatgtggacgcgccgctgacccgctggcgtgtgcatggcgccaacacgacctttacgaagttcgggcagttcgcgcaggaaaccctgtacattctggacaagcaccgccgcatctatcccgcctatgaggaagaatacggcgagcttgtggaattgctgactcaacgcgcggcgttccagcggggcgttgccctgtggcgcgagggccggggagcggatgcgcgcgcggccgtcgcgccgtatgcgggcggatcgctgaaattccgcctgttccaggcggcaagctatttgccgggcggcttgttcgagctgttggcgcgtctgtacttcgtcctgccgagccggctgcggcgctga

SEQ ID NO: 74942 - protein, 287 aa, Unknown
  Obtained from environmental sample
  misc_feature (1)..(287): Xaa is any amino acid
MRAQTFQDWEIIFWDNGSVDASPGIAQAFGPQLRYFRSGHTVALGAARNLALREAKGRYLAFLDCDDLWLEDKLARQLALFEGNPRLGLACTDTEIFSGAGALSRVFARAAPARGRVFRELMQRQWISMSSAMVRAQALYDLDHWFDERLSLCEEADLFYRIAHDWELDYVDAPLTRWRVHGANTTFTKFGQFAQETLYILDKHRRIYPAYEEEYGELVELLTQRAAFQRGVALWREGRGADARAAVAPYAGGSLKFRLFQAASYLPGGLFELLARLYFVLPSRLRR

SEQ ID NO: 74943 - DNA, 789 bp, Unknown
  Obtained from environmental sample
  misc_feature (1)..(789): n is a, c, g, or t
atgagtttcacgatgacgaacatcgaccgcgacgcactccttggcgtcgaaaccgaaccacagatctcagccacgaacttcgccgcgcccgtgattgaggtgcgcgacctccgcaaaacttattcctccaaagcgggcaccaagaaggccgttgatggactcgacttgacgatcttccccggcgagtgcttcgccatcctcggccctaacggcgccggaaaatccacgaccgtcgaaatcctggagggcttccgaaagcgcgacgctggacaggtcatggtgttgggcgaggactcggcgaacgcgagccgggaatggcgcgcccgcatcggcgtcgtactgcaagaccccggcgacatgggcgacctgaccgtgacggaggttgtgtccgcgacggccgcctattacccgaatccgcgcaacgtggctgacgtgatcgaggcggtcggcctggatgacaaacgcgacgccaaactgagttcgctctcaggcggtcagcgtcggcgtgtggacgtggcgctcggcattatcgggaacccagaactgctgttcctggacgaaccgactaccggcttcgaccccgaggtccgccgcgaattttgggacctaatccgctcgctcaaggctgggggcaccaccgtcgtgctgaccactcattacatggacgaggcatccgcgctggccgaccgcatcggcgtcgtcattaacggccgcatcgccgcgttggatacccccgacgggctttccgccgggcactcctcgcggaagagctatctgactccgcgataa

SEQ ID NO: 74944 - protein, 262 aa, Unknown
  Obtained from environmental sample
  DOMAIN (61)...(237): ABC transporter
  misc_feature (1)..(262): Xaa is any amino acid
MSFTMTNIDRDALLGVETEPQISATNFAAPVIEVRDLRKTYSSKAGTKKAVDGLDLTIFPGECFAILGPNGAGKSTTVEILEGFRKRDAGQVMVLGEDSANASREWRARIGVVLQDPGDMGDLTVTEVVSATAAYYPNPRNVADVIEAVGLDDKRDAKLSSLSGGQRRRVDVALGIIGNPELLFLDEPTTGFDPEVRREFWDLIRSLKAGGTTVVLTTHYMDEASALADRIGVVINGRIAALDTPDGLSAGHSSRKSYLTPR

SEQ ID NO: 74945 - DNA, 537 bp, Unknown
  Obtained from environmental sample
  misc_feature (1)..(537): n is a, c, g, or t
gtgtcgcgttcgcaaaatatcaatttggaaagtaacctagctaatttggaaacgcaacacttgaggtatcgcatgaggcacacagttacgcttgaggagatgctagggctggtggtcaagtggtgcggtctgctgggtctcgacatagaggccaagttcgagccgtccggggacgacaggctcttccccaaccgcctgtccctgtctggcaaggatgtggcactgctgctgtctggcaagtcccagccgctggacgcgctgcaatacctgctgcacgaggcgcagggcgaaagggacgacgacaggctggtctatctcgatgcgcagggcaccagactcttccgtatgaaggaactggtggcgatggccaagatggccgcccagaaggccaggcagaccggcagctttggcttcagctcactgacaccgaaagagcgccgctggatacacctgacgctggacgacgagcctgacatagagacccgcagcgaggggctgggagcccatcagagcctncaggtcgtccgncagtcgtag

SEQ ID NO: 74946 - protein, 178 aa, Unknown
  Obtained from environmental sample
  misc_feature (1)..(178): Xaa is any amino acid
MSRSQNINLESNLANLETQHLRYRMRHTVTLEEMLGLVVKWCGLLGLDIEAKFEPSGDDRLFPNRLSLSGKDVALLLSGKSQPLDALQYLLHEAQGERDDDRLVYLDAQGTRLFRMKELVAMAKMAAQKARQTGSFGFSSLTPKERRWIHLTLDDEPDIETRSEGLGAHQSLQVVRQS

SEQ ID NO: 74947 - DNA, 633 bp, Unknown
  Obtained from environmental sample
  misc_feature (1)..(633): n is a, c, g, or t
gtggttcaggaggaccgcgcaatagtcactgatcagcccggcaccacgcgggatgtcttggatgtcgtctgcgagtgggctggtctgcccctgcacttcttcgacacggctggtctgagggacacccgggatcccatagagggcatcggcgtagcgcgtgttggtgccgtgctggacagggccgacttggtaattcaccttgtgccagtcacggacgctgggcctgactccgaagtgaccaagagactggcgccctacgccgacaaagtaatggaagtccgcaatcagtcggacctctgctgcaacggcatcgcagtgcccgcagacggaatccgcatatccgcgctcaagggcgacttgggtcagctcgaatccgcgctgaaggagagattcttgggcgaccaatcaccggatgcatgtctgggcgcgctggccactgagcgacagcgcggtctgttgactgagactctggggcaactggaggcactcgtccgactgccagaaggctgcccggtcgagcttcccgccagcctcctccagggggctttggcattgttggcccgcatgactggggaggacagagccgaccttacactggatgcgatgttttcgaatttctgcttggggaagtga

SEQ ID NO: 74948 - protein, 210 aa, Unknown
  Obtained from environmental sample
  DOMAIN (1)...(98): GTPase of unknown function
  misc_feature (1)..(210): Xaa is any amino acid
MVQEDRAIVTDQPGTTRDVLDVVCEWAGLPLHFFDTAGLRDTRDPIEGIGVARVGAVLDRADLVIHLVPVTDAGPDSEVTKRLAPYADKVMEVRNQSDLCCNGIAVPADGIRISALKGDLGQLESALKERFLGDQSPDACLGALATERQRGLLTETLGQLEALVRLPEGCPVELPASLLQGALALLARMTGEDRADLTLDAMFSNFCLGK

SEQ ID NO: 74949 - DNA, 438 bp, Unknown
  Obtained from environmental sample
  misc_feature (1)..(438): n is a, c, g, or t
ttggccgaggtttgtggcgcctgcgcccaggtggaaggactgtttttccctggatatggcagcgccgatgcggcttgcgatctgggagacagcgccatcaccgaaactgcgggagtaggcggtttcgctatggccgccgctccggccatcgtcaaatttgtaggcggcacaccggcggatgccttggcgtataccgaagaaatggcgcatatcacccttggccggaatgaaggctttaccctgcccatgctgaatttcatcggcactccggcggggattgactgccgcaaggtcgtggataccggcatacgcccggttatcaacaccggtatcgcgcacaagtccgccggcgtggggcagataggcgcgggggtcaccagagcgccgctcacgtgctttacccgggcgcttgtcgcgcttgccgcatcgctgacatga

SEQ ID NO: 74950 - protein, 145 aa, Unknown
  Obtained from environmental sample
  DOMAIN (1)...(143): Protein of unknown function (DUF1116)
  misc_feature (1)..(145): Xaa is any amino acid
MAEVCGACAQVEGLFFPGYGSADAACDLGDSAITETAGVGGFAMAAAPAIVKFVGGTPADALAYTEEMAHITLGRNEGFTLPMLNFIGTPAGIDCRKVVDTGIRPVINTGIAHKSAGVGQIGAGVTRAPLTCFTRALVALAASLT

SEQ ID NO: 74951 - DNA, 435 bp, Unknown
  Obtained from environmental sample
  misc_feature (1)..(435): n is a, c, g, or t
atgaacaggaaacgggcgtccttacatgcttcttccccaagcgaagggaagcgtgaaaaaaaacgccgtctgggcgtacacatcgtcgaagtgctgaaaaaacgcattctgcggtgggagtatcctccgggttttcccttgggggaagaatccctcagccgggagttctccgtcagccgcagtcccgtgcgtgaagcccttcattctttggaagcggcaggctttgtgtaccgcatgcctaatcgcagttataccgtaaggcaggtgttcccggcagaggttgacgaactgtacgatctgcggctggccctggaactgcacgctctggacggcctgaacatccatcccgggactgaggaacagttgcgtgcgctctttgcagaatggcagaaaaagccgcgggaaaaccggggacgcaacagctttgcgagatga

SEQ ID NO: 74952 - protein, 144 aa, Unknown
  Obtained from environmental sample
  DOMAIN (24)...(86): Bacterial regulatory proteins, gntR family
  misc_feature (1)..(144): Xaa is any amino acid
MNRKRASLHASSPSEGKREKKRRLGVHIVEVLKKRILRWEYPPGFPLGEESLSREFSVSRSPVREALHSLEAAGFVYRMPNRSYTVRQVFPAEVDELYDLRLALELHALDGLNIHPGTEEQLRALFAEWQKKPRENRGRNSFAR

SEQ ID NO: 74953 - DNA, 867 bp, Unknown
  Obtained from environmental sample
  misc_feature (1)..(867): n is a, c, g, or t
gtgcaacgcaggggctgcggcacgaccactgcttgtgcctcggtagaaattacagtatcttcgccatcttctccntgcggtgcatatattgcacntggggtatggagagaatttatgtgccacaacttgggcgcaaacacttgtttagacccttttacccccgcggcaggactgcacggcgcaaagtataaatggggcgtggctacgcctgcattaacacaagacgaagaccaaaaccctgcgtatgatggcggttggaacatgagcgaatgggcaagtatgggcggcacaccaccagccatgctaaattgggatatgaccactgctaacccctgccctacaggtttccgcgtgccttcttatacggagtggaagggcgtagaagataacaactcccctacatttgtaggtacatggacgaacggttcttacaattctggcgtgatgataggaacgcaactcttcctgcccgcagcaggcgaccgaggaaataactatggttatttgcaataccgagggcgtcaaggccactattggatgagtacaacaattagtaacgatatcacgtctactttcatagtgtacatcgattctagttttttcacggcttcattcggttactcggggtataatggtgccggtatgagtgttcgttgtatagaagatgacgcctccatccccgacaacagcatcgctctcagctccgccgcggggacggacagccaaacgctgtgcgcgaatacgcccctcaccactatcacatacgctaccaccggcgcaacaggtgccactgtaagcggcttgcccgcgggcgtgacgggcgtttggagcagcgatgtggttacgattagcggtacacctagctaa

SEQ ID NO: 74954 - protein, 288 aa, Unknown
  Obtained from environmental sample
  SIGNAL (1)...(28)
  misc_feature (1)..(288): Xaa is any amino acid
MQRRGCGTTTACASVEITVSSPSSPCGAYIAXGVWREFMCHNLGANTCLDPFTPAAGLHGAKYKWGVATPALTQDEDQNPAYDGGWNMSEWASMGGTPPAMLNWDMTTANPCPTGFRVPSYTEWKGVEDNNSPTFVGTWTNGSYNSGVMIGTQLFLPAAGDRGNNYGYLQYRGRQGHYWMSTTISNDITSTFIVYIDSSFFTASFGYSGYNGAGMSVRCIEDDASIPDNSIALSSAAGTDSQTLCANTPLTTITYATTGATGATVSGLPAGVTGVWSSDVVTISGTPS

SEQ ID NO: 74955 - DNA, 564 bp, Unknown
  Obtained from environmental sample
  misc_feature (1)..(564): n is a, c, g, or t
gtggcaggtacagcggttgtagtcaacaagaacctggctgacagactcggcattgattttacaaaaccgtataactgggaagatcttatcacctggggccagaaagtgcgcgccgctgatccgacctgctatctcttgtccatcaatcaggagcatggcatgcctttctttgtacgcgcttattcccgccagcttaacggcgccccaatcattgacgacgcggccaagaagcttaatatgaccgaagcgcagtttacccagtgctttgatcttatagaccgcatatataagacagggactgccgcgcctgccgcttacaaagcaccgttcggaaaccgcgatcaggatgatcccaactggattgccggcaagtatgtcgctcatattgggtatacgtccagcgccgaagtggaacaagctgccaatccttctgttcagtattatcccgggaaccttccgcttttgccaaaccgcaaaaatgacggctggttttccaatccaccccagtacatgggtattttcgcgagaaccaagtaccctgaggaatgcgccaggttcttttga

SEQ ID NO: 74956 - protein, 187 aa, Unknown
  Obtained from environmental sample
  misc_feature (1)..(187): Xaa is any amino acid
MAGTAVVVNKNLADRLGIDFTKPYNWEDLITWGQKVRAADPTCYLLSINQEHGMPFFVRAYSRQLNGAPIIDDAAKKLNMTEAQFTQCFDLIDRIYKTGTAAPAAYKAPFGNRDQDDPNWIAGKYVAHIGYTSSAEVEQAANPSVQYYPGNLPLLPNRKNDGWFSNPPQYMGIFARTKYPEECARFF

SEQ ID NO: 74957 - DNA, 558 bp, Unknown
  Obtained from environmental sample
  misc_feature (1)..(558): n is a, c, g, or t
gtgctgagactggtcggcctcgaaagcgatgcacgtcggccagtgcgtgtgtattccctaggcatgaaacaacgcctcggcatggcactggccctgatgggagagccgtcattgctaatcctagacgagcctctcaatgggctggatccatcaggcattttggaaatgcgagaactcataaagggcctgccaaaggcggacggtgccaccgtatttttgtccagccacatattggcagaagtggagcaagtagcgtcagatttggtggttatacacaaggggaaactgcgctaccaaggaccaatagaagatcttgcgagctttgatccgcctttggtttcaataaaaaccaatgacccgcaaaaggccgcagatgcgctggtaaatttgggctataaggcagcagtggagtctgggcggatattgctcgaagcacggtatgaagatataccaaaggccaatggtgcgctggtggcgagcggggctgccgtctatgaaatcactccgctgcaaaaaaaattagagtcgcgctttctctcgctactggaggacaagtga

SEQ ID NO: 74958 - protein, 185 aa, Unknown
  Obtained from environmental sample
  DOMAIN (1)...(94): ABC transporter
  misc_feature (1)..(185): Xaa is any amino acid
MLRLVGLESDARRPVRVYSLGMKQRLGMALALMGEPSLLILDEPLNGLDPSGILEMRELIKGLPKADGATVFLSSHILAEVEQVASDLVVIHKGKLRYQGPIEDLASFDPPLVSIKTNDPQKAADALVNLGYKAAVESGRILLEARYEDIPKANGALVASGAAVYEITPLQKKLESRFLSLLEDK

SEQ ID NO: 74959 - DNA, 828 bp, Unknown
  Obtained from environmental sample
  misc_feature (1)..(828): n is a, c, g, or t
gtgcaaacggccgaggactctattcctaaaccgataaaaccccggcttgaacagttaggcgcggacaacggcatgattgacgttatcatcgaagatggggatgaactttcactcaccgatgaacgcatcgagcaggccatcttgaaattcaaggcaaagctggtggttctcgaccctgttcaagcctatttcggcggcgcgaacatgaataacgcgaacagtgtcaggccgataatgaagcatcttggaatggtcgccgaacgcaataactgcgcgattctgcttgtggggcatttgcataaaaaaggcggccaaagccaataccggggtttgggtagtattgacatatacgccgccgcccggagcgttctgactgtcggacgcacaaatatgggcgatgatataagggcgattgtccatagcaaatcgaatctcgctccgcccggagtgtcacaagccttcgggcttgaccctgtcagcagtttttgctggatgggcgaatatgaaatcacgattgacgaactgctcggcagcgcagcgaaaactccgaaagaccagttctcacgagcgtgtactctcataaaagcaacactcgcatacggcccggtcgcggcggttgagattatgctgaaagcggagcaacagggcatatcggagaaaacgctcaaacgcgcgaaatcggcgttgggcgtcgtttccataaagcacggcagtcaatggtattgggatatgccgattgatgttgagtttagagaaggggggcaggaagaaggtcaagaaggtcaagcgcccatgacctccttgaccttcttgccggaggtgatatag

SEQ ID NO: 74960 - protein, 275 aa, Unknown
  Obtained from environmental sample
  misc_feature (1)..(275): Xaa is any amino acid
MQTAEDSIPKPIKPRLEQLGADNGMIDVIIEDGDELSLTDERIEQAILKFKAKLVVLDPVQAYFGGANMNNANSVRPIMKHLGMVAERNNCAILLVGHLHKKGGQSQYRGLGSIDIYAAARSVLTVGRTNMGDDIRAIVHSKSNLAPPGVSQAFGLDPVSSFCWMGEYEITIDELLGSAAKTPKDQFSRACTLIKATLAYGPVAAVEIMLKAEQQGISEKTLKRAKSALGVVSIKHGSQWYWDMPIDVEFREGGQEEGQEGQAPMTSLTFLPEVI

SEQ ID NO: 74961 - DNA, 357 bp, Unknown
  Obtained from environmental sample
  misc_feature (1)..(357): n is a, c, g, or t
atgtactattacgcaatacaagtaagagcacggtctgaaagcaaatacttaaatctttttaaaagccgttatcctgaaaataatttttctttatattttccgcaaagaaaattagatacatttaaaacaggcaaatcaaggcaatctttatattcaatctttccgggatatgtttttgtagaagcggaatataaggaagacgttttatcaaagcaatggtgttttaaaaacattgaaggcttttttcgtttcttaaaatcaaatcaggatataaccccgctttcggggcattgccttgatattgtactacatttcataataaagatcggtcaaatcgcgggcagttcaagaatttaa

SEQ ID NO: 74962 - protein, 118 aa, Unknown
  Obtained from environmental sample
  DOMAIN (1)...(97): Transcription termination factor nusG
  misc_feature (1)..(118): Xaa is any amino acid
MYYYAIQVRARSESKYLNLFKSRYPENNFSLYFPQRKLDTFKTGKSRQSLYSIFPGYVFVEAEYKEDVLSKQWCFKNIEGFFRFLKSNQDITPLSGHCLDIVLHFIIKIGQIAGSSRI

SEQ ID NO: 74963 - DNA, 483 bp, Unknown
  Obtained from environmental sample
  misc_feature (1)..(483): n is a, c, g, or t
ttgttaagggttgcaaaacatcaaattatttggggcataaattattttaaatttactaacataggcgttggcagaataatttgggataagcaaaaaacatacggctattctttttcagaaggtgaaatcgcatattgttctttaattaactctgtaagggttttcaggtttcgatgggatggaatgcttcaggggaatatgaaaaataaagaacagcgtattcatccttgtcacaaaccaatagcactttacaaatggttattgtctaaatacgcaaaacagggatggaaaattcttgacacccatctcggctcgggttcacacgctgtagcctgttacgacatgcgctttccgctcactgcttgcgaaatagacgaagattactttaacttggtagtggagcggctgcggttattcgccgcgcagggaacgctgtttccgtccctgtcaaaaactcagactgtcggtctggaacagagttaa

SEQ ID NO: 74964 - protein, 160 aa, Unknown
  Obtained from environmental sample
  misc_feature (1)..(160): Xaa is any amino acid
MLRVAKHQIIWGINYFKFTNIGVGRIIWDKQKTYGYSFSEGEIAYCSLINSVRVFRFRWDGMLQGNMKNKEQRIHPCHKPIALYKWLLSKYAKQGWKILDTHLGSGSHAVACYDMRFPLTACEIDEDYFNLVVERLRLFAAQGTLFPSLSKTQTVGLEQS

SEQ ID NO: 74965 - DNA, 756 bp, Unknown
  Obtained from environmental sample
  misc_feature (1)..(756): n is a, c, g, or t
atgagcgttctctgggagccgttcccgcggcaggcttacgcgatgaagtgcgacgccgatcagatattttacggcggggccgcaggcggggggaagactgactattccctggcgctgaacatgcgcggggtattggactggggtagtaactggcgggggatcattttccggaaaaccttcccgcagctcagggaagtaataaggagggggcgtgctctttttggccctatgggcgccaaatacaaccagacggagcatatctttaaattccctaacggggcggaggttgaattatcaaaccttgaaaatgataaagacgtggaaaaataccaggggcagcaatataccttgattgtgtttgacgagcttggaaactgggcgactgacttttgttgggtttatatgaccagccggtgcaggagcccatccggagtgccgtgtcagatggtagggaccggaaaccctggcgggcccggccatgtgtggattaaaaatatgttcgttgacggctttaagcctaacgtgaagtataacatccctgtggcatacgacaaagcaaacaaaaagtgggaatatatcagccgctgctttattccatcacgcctgcaagataatcctgcattgtttgagaaaaatcctaaatacagaatcgcattgctgagcctgccggagcacttgcggcgggctttgtatgaaggggactgggacgtgatcgccggtcaggtgtttaacgaatggcggcgcaaaagcacgtaa

SEQ ID NO: 74966 - protein, 251 aa, Unknown
  Obtained from environmental sample
  misc_feature (1)..(251): Xaa is any amino acid
MSVLWEPFPRQAYAMKCDADQIFYGGAAGGGKTDYSLALNMRGVLDWGSNWRGIIFRKTFPQLREVIRRGRALFGPMGAKYNQTEHIFKFPNGAEVELSNLENDKDVEKYQGQQYTLIVFDELGNWATDFCWVYMTSRCRSPSGVPCQMVGTGNPGGPGHVWIKNMFVDGFKPNVKYNIPVAYDKANKKWEYISRCFIPSRLQDNPALFEKNPKYRIALLSLPEHLRRALYEGDWDVIAGQVFNEWRRKST

SEQ ID NO: 74967 - DNA, 900 bp, Unknown
  Obtained from environmental sample
  misc_feature (1)..(900): n is a, c, g, or t
gtggtgacggggacgccgacgtccgggtccgtcaacacctcaatgcaatcgcagttgcagtcatacggctacaacctaccgtacggcaacaactaccagcagcaggacgtaggtgtgaagattcagatcaccccaagggtgcaccacaacggcgacatcacgctggacctgaagtcagaggtgacgagcctcaacgccagcagcaaccccgacaggccgaacatagggcagcgcaagctggacaccgaagtgaggatgcagaatggcgaaaccatcatcttcggcggcctgcttagggaagacgagaccaagtccaaaaagggcgtgtggggccttgccgacatcccattgataggcaagctgctcagcaacaaccagaaaaacgtctccaaaacggacgtgctgctgaccgtcaggtgcgtcatcgtgaggaagcccgacctgcgcgaagacgacttccgcccattcgaccccgacttcaccgcgctgcaagaggagctagaggccgagaggagggccaacaggctaaaggacgcaaggaaagccatagaaaaggagaaggagcaggccgccgaagccgccaaggtcgccccgcagccgcaagagcaatccaagcagagatcaacgcccaaaccgagcgagtccaaggaaaaggcccaacccaaggcagagccaagcaagcctacggcaccaagcgaagcaaaacccgcaggcaacacggataggcctgtggaaaaagcagcggaaaaaccaccggaaccagcactggcgcaatccgagctgtaccttttcctgatgcccatcaccagccagttgcctaaagcagagaagcagcgcatcaacatgatggtcagcggcggaagaagcgtgactttcggtgagttcatcattcgggtttga

SEQ ID NO: 74968 - protein, 299 aa, Unknown
  Obtained from environmental sample
  DOMAIN (1)...(144): Bacterial type II and III secretion system protein
  misc_feature (1)..(299): Xaa is any amino acid
MVTGTPTSGSVNTSMQSQLQSYGYNLPYGNNYQQQDVGVKIQITPRVHHNGDITLDLKSEVTSLNASSNPDRPNIGQRKLDTEVRMQNGETIIFGGLLREDETKSKKGVWGLADIPLIGKLLSNNQKNVSKTDVLLTVRCVIVRKPDLREDDFRPFDPDFTALQEELEAERRANRLKDARKAIEKEKEQAAEAAKVAPQPQEQSKQRSTPKPSESKEKAQPKAEPSKPTAPSEAKPAGNTDRPVEKAAEKPPEPALAQSELYLFLMPITSQLPKAEKQRINMMVSGGRSVTFGEFIIRV

SEQ ID NO: 74969 - DNA, 516 bp, Unknown
  Obtained from environmental sample
  misc_feature (1)..(516): n is a, c, g, or t
gtggccgtggaattccgcagctattccaaatccgccggtttcaccggcctgcgttgcagctatgtggcagtgcccaaaagcgtgaaggctctggccccggacggcggacgcgtgccgctgaacggcctgtggaaccgccgccagagcaccaagtataacggctgcccctatatcgtgcagcgcgccgccgaggcgacgcacagccccgaagccaaggcccaactccggccgatcattgacggctacctgagcaacgcgcgacgcatcagggaagcctttgaacatctgggtctgagcgcggtgggcggagtcaatgcgccctatgtctgggtgcgcctgcctgagggcgtggattcctgggatttttttgataccctgctcacgcggacgggcattgtcggcactcccggcgtgggcttcggcgcccaggggcagggctgcctgcggctgaccggcttcggcgccggcgcggacacggctgaagccatagaacgactgcggagttttgccttgtaa

SEQ ID NO: 74970 - protein, 171 aa, Unknown
  Obtained from environmental sample
  misc_feature (1)..(171): Xaa is any amino acid
MAVEFRSYSKSAGFTGLRCSYVAVPKSVKALAPDGGRVPLNGLWNRRQSTKYNGCPYIVQRAAEATHSPEAKAQLRPIIDGYLSNARRIREAFEHLGLSAVGGVNAPYVWVRLPEGVDSWDFFDTLLTRTGIVGTPGVGFGAQGQGCLRLTGFGAGADTAEAIERLRSFAL

SEQ ID NO: 74971 - DNA, 654 bp, Unknown
  Obtained from environmental sample
  misc_feature (1)..(654): n is a, c, g, or t
atgaaatggcaccaaacgaagagacgccagatggtgccgatgtcaactgatttggatccgtacgtttatcccggcaccaatgtgctaaagaatcgcatggggttacagtctgcgaaagatctcggaaacttggaataccatatcacctggccccgcaggcaagaacttgaggtgaacccagtagcaggtaattttgatctagaacatcttcaagaaattcaccggcggttattccaggacttattcgactgggctggtgagctgcggactgtggcgattaccaaaggtagttcaacgttctttgcaggttcagactgggaaaccgcaagtgaatatacttttggttacctacgcgaggggccgttattaagccctgctcccatttctgattcagaattcgtccagaatctcgctgaattgttaagcagaatcaactatttgcacccattcagggagggtaacggccgcgcccagcgggcgttccttgaccaagtggcgggcctaagtgggcgcacgctttcttggcgcaatgttggcgctatggaaaacaccagggcgtctatccaagcgttcaattccggtgatggcaagcctttcgaaccattgattgctcagatactagcgccgccgttagatggattatcgcccgtttga

SEQ ID NO: 74972 - protein, 217 aa, Unknown
  Obtained from environmental sample
  DOMAIN (70)...(193): Fic protein family
  misc_feature (1)..(217): Xaa is any amino acid
MKWHQTKRRQMVPMSTDLDPYVYPGTNVLKNRMGLQSAKDLGNLEYHITWPRRQELEVNPVAGNFDLEHLQEIHRRLFQDLFDWAGELRTVAITKGSSTFFAGSDWETASEYTFGYLREGPLLSPAPISDSEFVQNLAELLSRINYLHPFREGNGRAQRAFLDQVAGLSGRTLSWRNVGAMENTRASIQAFNSGDGKPFEPLIAQILAPPLDGLSPV

SEQ ID NO: 74973 - DNA, 930 bp, Unknown
  Obtained from environmental sample
  misc_feature (1)..(930): n is a, c, g, or t
ttgtggttagcactgtttatcgtaatgaatgctgcgctttggcgcaaaggatttcgcaaaggcgttgagcgcatcaacttagtggcgatgccggtgtttatcgtaatgatgttgggcctagccatttacaccattactttacctggtgctggcgaaggcgtaaggcatttcttgttgccagacttcaataacttaaccataaatacgtttatcgcagcaacccgccaatcattcttctcgctatcattagcgggcggtgtaatggtggcttatggctcttatatgaaaaagagtgccaacattgaaaaagcggccgtgcaaattgccgcgtttgataccagcgcctcgctaattgctggtctattggttatcccggcggtagttgtagtagctggcattgacggcctgggtcaaggcgccgggctgctattcgccaccctgcctgcggtgttttacgcgatgccgggcggcaacgtggtgggcgccatcttcttcaccctgatgttggccgctgcggtgacctccggtatttcgctgatggaagtagtggtcaccacagtaaccgaccgcacccggttgacccgcccgcaagctgcgtggttggtggctgtgggctcgtttgtggccgcgctgccggtcacccttggatttggcgtatggagccacgtgcgcctaggcggacgcgacatcttgggcatgatgaacttcctcaccgacacggtatttatgccgctggtgggcctgggtaccgtactactaatcggttggggcattgggcctaagcggattatcgatgccgtagaagccagtggccgcaaattccgcctggccgggctgttcactgtgctaatcaaatgggtaggcccgctgctactcagcggcctagtaatcacctcattcctgatggcgttcggggtaatcaccctctag

SEQ ID NO: 74974 - protein, 309 aa, Unknown
  Obtained from environmental sample
  DOMAIN (3)...(309): Sodium:neurotransmitter symporter family
  misc_feature (1)..(309): Xaa is any amino acid
MWLALFIVMNAALWRKGFRKGVERINLVAMPVFIVMMLGLAIYTITLPGAGEGVRHFLLPDFNNLTINTFIAATRQSFFSLSLAGGVMVAYGSYMKKSANIEKAAVQIAAFDTSASLIAGLLVIPAVVVVAGIDGLGQGAGLLFATLPAVFYAMPGGNVVGAIFFTLMLAAAVTSGISLMEVVVTTVTDRTRLTRPQAAWLVAVGSFVAALPVTLGFGVWSHVRLGGRDILGMMNFLTDTVFMPLVGLGTVLLIGWGIGPKRIIDAVEASGRKFRLAGLFTVLIKWVGPLLLSGLVITSFLMAFGVITL

SEQ ID NO: 74975 - DNA, 612 bp, Unknown
  Obtained from environmental sample
  misc_feature (1)..(612): n is a, c, g, or t
atgaccctgacactgcgtccgatgccgctggctggcgtgcagtcacgtttcagcgccggggagctggcgcggcagcagcgctcgcgtgccctcctcgccgcgcccggggcgagagcgccggccagtgaggtcgatctgctcaccggccgtgtgatcgtgtgggagtgcctcgacggaacagaggtggcgggtcagtgcaccggagactgcctgaccggtgagatcctctgcctggaggttcaggcgagccacgaaggccgcggcatcggcaggatgctgctcttccacgtggccgctcagctgcgagccgccggcgcccgtgaggtctggctgatcgcgcccgccgactgccgggtgcgtgcgcacggcttctatcgtgccctaggctgcacgcaaaccggcacccaggcctcaagcggcaatgacatcctggaggttcccgtggctccccgccgcagtccagacccgcgctgcgcggcggccgcccgcagcgcgcccatgcttaggcccgccaacacttacagcgcccggtgcatcaccagggcgtccaccaggccgagccggggatggcggaaggcacccggcagacgccccacttccttgaagccgtag

SEQ ID NO: 74976 - protein, 203 aa, Unknown
  Obtained from environmental sample
  DOMAIN (54)...(131): Acetyltransferase (GNAT) family
  misc_feature (1)..(203): Xaa is any amino acid
MTLTLRPMPLAGVQSRFSAGELARQQRSRALLAAPGARAPASEVDLLTGRVIVWECLDGTEVAGQCTGDCLTGEILCLEVQASHEGRGIGRMLLFHVAAQLRAAGAREVWLIAPADCRVRAHGFYRALGCTQTGTQASSGNDILEVPVAPRRSPDPRCAAAARSAPMLRPANTYSARCITRASTRPSRGWRKAPGRRPTSLKP

SEQ ID NO: 74977 - DNA, 810 bp, Unknown
  Obtained from environmental sample
  misc_feature (1)..(810): n is a, c, g, or t
gtgggaagctccttcagctatgcggccacgggcaactcgccgtccctggtcggagaacttctgcgcggcgccgccactgtgctcgccaaccttgttttctttaccccgcgccgggaagtgaccatggaattcgtcgagccggacgatatcccccgtgacggcgacaagcacacgctcaacctctggctggaggccttttataatgaggccgaacgcccggccatggccgtgccccgcttcttctggcaggggaagaccccctatcccgttgaggaatttaccgaaggcggcgcggcacacggggaggactccgtttcccccgccgtgcgtgaagccgtgtatgaagccctgcgcgaggccgccggactcccggcggatcatcccatcagcgacgatatgaaccttgtcgccgatctcggcctggacagcctggggatcatggaactcagcctcagcctggaagcggtgcggggcattccggtttccgacctggaagccctgatctccgtccgggattgccttatggccgcttccggcaagctcggcggcgaggaacagacaacttgcgtacccgaaggctggttcgctccccaaacccgcgaagaccttgtgtgccccgttggcgcggctaccattcccgatgcctttctcgccctggtccggcaagctcccctcgaaccgctttgcgccgaccgaacctccctgcgcacccggcgcgacatcctcaccggcgcccttgttctctcagggcgcctgcgctccctgccggggcaacgcatcggcatctcggccgatctgatgcgtggntga

SEQ ID NO: 74978 - protein, 269 aa, Unknown
  Obtained from environmental sample
  DOMAIN (111)...(177): Phosphopantetheine attachment site
  misc_feature (1)..(269): Xaa is any amino acid
MGSSFSYAATGNSPSLVGELLRGAATVLANLVFFTPRREVTMEFVEPDDIPRDGDKHTLNLWLEAFYNEAERPAMAVPRFFWQGKTPYPVEEFTEGGAAHGEDSVSPAVREAVYEALREAAGLPADHPISDDMNLVADLGLDSLGIMELSLSLEAVRGIPVSDLEALISVRDCLMAASGKLGGEEQTTCVPEGWFAPQTREDLVCPVGAATIPDAFLALVRQAPLEPLCADRTSLRTRRDILTGALVLSGRLRSLPGQRIGISADLMRG

SEQ ID NO: 74979 - DNA, 774 bp, Unknown
  Obtained from environmental sample
  misc_feature (1)..(774): n is a, c, g, or t
atgatgcctatcttcataaaaatacaactttatttacaattattcagagttaagcattggataaaaaatatccttatatttattcctcttttctttagtgttagtttctttaacacttcacttataacaggtacgatttttggttttatttgtttctctttactatcttcaatcgtttatattctcaatgacataaaggacgtagaaaaagatcgcctgcacaatacaaaatgccgccgtccattagcatccggagaaatatctgtatctcatgcgattttagttctggttgttttatcaatgttattatttttcctgctggttatgttacggattcaagaaaactatttgtttaatatcaagcttattgggttaatgctgctgtatatggtattgaatattgcctatagctggggattaaaaaatatacctattgttgatgtaacgatacttgcatctggatatattattcgggttctctttggctcgataattatcggagtaaatatttccgtgtggttatatttagtgattacgcttggagcgtactatatgggacttggaaaacgcaggaatgagataaccggtaatgaaacggaaaccagagcggttatgaaattctattcacataattttcttgataagaatatgtatgtatgccaggcgctttgcgttgttttctatgcattgtggagtatcgattccgtaactgtagaaagatttcacacgtccgcgtttgtttatacaataccggtaatacttattattttttaa

SEQ ID NO: 74980 - protein, 257 aa, Unknown
  Obtained from environmental sample
  DOMAIN (23)...(257): UbiA prenyltransferase family
  misc_feature (1)..(257): Xaa is any amino acid
MMPIFIKIQLYLQLFRVKHWIKNILIFIPLFFSVSFFNTSLITGTIFGFICFSLLSSIVYILNDIKDVEKDRLHNTKCRRPLASGEISVSHAILVLVVLSMLLFFLLVMLRIQENYLFNIKLIGLMLLYMVLNIAYSWGLKNIPIVDVTILASGYIIRVLFGSIIIGVNISVWLYLVITLGAYYMGLGKRRNEITGNETETRAVMKFYSHNFLDKNMYVCQALCVVFYALWSIDSVTVERFHTSAFVYTIPVILIIF

SEQ ID NO: 74981 - DNA, 852 bp, Unknown
  Obtained from environmental sample
  misc_feature (1)..(852): n is a, c, g, or t
gtggcccgccgcttgggcctggagccgaccgatccccgccgcctctcggccggccttcttttcgccttgaacaagtttacagaggagggacatatttatacccgggatagggagcttttagaggccggggccaagctgcttcctgaagccgaaccgtcggccctgaaagaggccttgtcccgcttggttttgtccgggcaagtccaggccggtccacctgatgagccccaggccgggctggatatctatcagcctcgcctttaccgggccgaagaatgggtggcccgtgaccttctggctattctgcgcacccaggcctcggtcgaggtcccccgccagccccaggccttggcttgggctgaaaatgctctggccattaacctctccgaaagccagcggcaggccgtggccttggctctctcccaaaaggttttggttataacaggcggccctgggactggcaaaacaactctcacccgagccataaccgccattttcggagccctgcgggccaggctggccctggtggccccaactggccgagcggcccgccgcctggccgaggcgacaaacctcccggccaaaacagttcaccgtcttttggaatacgctccccaagtgggctttcagcggcatccggatcgaaagctggagattgatttgctcttggtcgatgaggcttccatgattgatctgcccttgatgaatncattgaccggagccctgccccatacggcccgcctcatcttggtcggggaccgcgaccagttgccatccgtgggccctggccgggtgctggctgatcttatgattcccagggcgtgggcgtcgccgccttacccgagttcatag

SEQ ID NO: 74982 - protein, 283 aa, Unknown
  Obtained from environmental sample
  DOMAIN (145)...(267): Putative ATPase (DUF699)
  misc_feature (1)..(283): Xaa is any amino acid
MARRLGLEPTDPRRLSAGLLFALNKFTEEGHIYTRDRELLEAGAKLLPEAEPSALKEALSRLVLSGQVQAGPPDEPQAGLDIYQPRLYRAEEWVARDLLAILRTQASVEVPRQPQALAWAENALAINLSESQRQAVALALSQKVLVITGGPGTGKTTLTRAITAIFGALRARLALVAPTGRAARRLAEATNLPAKTVHRLLEYAPQVGFQRHPDRKLEIDLLLVDEASMIDLPLMNXLTGALPHTARLILVGDRDQLPSVGPGRVLADLMIPRAWASPPYPSS

SEQ ID NO: 74983 - DNA, 348 bp, Unknown
  Obtained from environmental sample
  misc_feature (1)..(348): n is a, c, g, or t
ttggccgccaccgttaccgcggtccagcccggcggccgctacggggtgatgcgctttgacgacgaccctgagacggtgaccggcttccaggaaaaggcggttgaggatggcggctggataaacggcggctttatggtcctggagccggacatctttaaatatcttgatggcgacaattgctccctggaagccggtcccctggtcagcctggccatggagaagaaactggccgcctttcggcacaccggcttctggcagtgcatggacacccaaagggataaagattccctggaaaggctgtggcagggaggtcaggccccctggaaagtttggccggacccggcctga

SEQ ID NO: 74984 - protein, 115 aa, Unknown
  Obtained from environmental sample
  misc_feature (1)..(115): Xaa is any amino acid
MAATVTAVQPGGRYGVMRFDDDPETVTGFQEKAVEDGGWINGGFMVLEPDIFKYLDGDNCSLEAGPLVSLAMEKKLAAFRHTGFWQCMDTQRDKDSLERLWQGGQAPWKVWPDPA

SEQ ID NO: 74985 - DNA, 882 bp, Unknown
  Obtained from environmental sample
  misc_feature (1)..(882): n is a, c, g, or t
gtgagctgttttcagcgcccggcaatctctatgggaggggttgcctttgtgaacctgaaaagttctcgcggaggcattatgaccgatcttctcgtttccccgtctgtttctctcgtcaatggccgcccctgcgtttcctctctcaaaatcgctgaacactttggcaaagcccatgaccgtgtgctgaaagacatccgccgcgttatgggcgagtgcccggcagaatttaacgccgtcaattttgacgccgttgattacaccgatgccaaaggcgaaacgcgccccatgttcaacgtcttccgcgacggcttcgtgatcctcgtcatgggctacaccggcccgaaggccatgccgctcaagctggcgtacatcgccgcgttcaatgcgatggccgacgaactcgccagccgcgcacaacccgccctgcccacagccaagccacagaagccgaagaagaagctgcccggcctgccgctgcgcgggctgccccacgtccagcaggcgaaacttgcgctgccctgctccgattatgacgcggccatgaagatcaaggcgctgaaccctggtccgggaaactccggcgaatactatgaggaagaactgctgcgcgtgttccagcgcttcgtgaagtggcgccgggaaaccatcgccggcattgatgcgctggagaaagacttttccggcgtgaccggcccgctggttcaggacgtgctccacaggctcacggcgggcacgccgcttgtcgcgctcgacgacggcgtttgggccatgcacgaaagcagaagcgacgcggtgaagggcatccgcgacaacatctacaagtgggaatgcctcttcacgaaagcgcagtggttcgccaagacgctgcgcgttggggggtga

SEQ ID NO: 74986 - protein, 293 aa, Unknown
  Obtained from environmental sample
  misc_feature (1)..(293): Xaa is any amino acid
MSCFQRPAISMGGVAFVNLKSSRGGIMTDLLVSPSVSLVNGRPCVSSLKIAEHFGKAHDRVLKDIRRVMGECPAEFNAVNFDAVDYTDAKGETRPMFNVFRDGFVILVMGYTGPKAMPLKLAYIAAFNAMADELASRAQPALPTAKPQKPKKKLPGLPLRGLPHVQQAKLALPCSDYDAAMKIKALNPGPGNSGEYYEEELLRVFQRFVKWRRETIAGIDALEKDFSGVTGPLVQDVLHRLTAGTPLVALDDGVWAMHESRSDAVKGIRDNIYKWECLFTKAQWFAKTLRVGG

SEQ ID NO: 74987 - DNA, 444 bp, Unknown
  Obtained from environmental sample
  misc_feature (1)..(444): n is a, c, g, or t
atgaaagaaataacgtatgagattatggaaaatggttgttggatttgtacgagtcattcaaaaaattctgatggttatccccgtatacggcgtaatggaaaatctcaatatatgtctcgatttatgtttgaacaaaagaatgggccaataccaaaaggtttactaattaggcataaatgcgacaatcctgcatgtattaacccggatcatcttgaaacaggaacacaatatgacaatatgcacgatatgaaagaaagaggaagagagcgaaaaccatttggaagcaatcatcatgaggcaaaatttacagatgaacaggtaaaagaaattttattacttaataaatctgggatgcgacagattgacattgcgcgtaagcatggtgtttctcgtggcgtgattcataggatagtccataaaaaaacctggaaacatattatttag

SEQ ID NO: 74988 - protein, 147 aa, Unknown
  Obtained from environmental sample
  misc_feature (1)..(147): Xaa is any amino acid
MKEITYEIMENGCWICTSHSKNSDGYPRIRRNGKSQYMSRFMFEQKNGPIPKGLLIRHKCDNPACINPDHLETGTQYDNMHDMKERGRERKPFGSNHHEAKFTDEQVKEILLLNKSGMRQIDIARKHGVSRGVIHRIVHKKTWKHII

SEQ ID NO: 74989 - DNA, 570 bp, Unknown
  Obtained from environmental sample
  misc_feature (1)..(570): n is a, c, g, or t
atgaaagaactgaacaaggacctgcttttttatgagcagtccaacggaggcgtcactttttccgggggagagccgcttcatcaggccgagtttctgcttgaggccttgaaagcctgcaaagaagatcacattaacaccgcgattgatacctctgggttctgtgatactgaagcgatacttaaagccgcggagacggccaattactttctgtacgatattaaatttattgatagtgaaaaacatgaaagatactgcggcagctcaaacgatattatactgaaaaacctggaacatatttcacaaaccgggacaaaaataacgataagaataccggtcattccgaccataaacgataatttacaggaaatggcaggaatatctgaatttatcaagggcattaaaaacattgaagctgtccatcttttgccgtatcataatattcaaacggataagtacaacagaattgagaggaaatatgagctaccggaaatttcaggggatgagagcccaaacatgaacgaaataaaactcttgttttccgataaattccgaatcaaggttggagggtaa

SEQ ID NO: 74990 - protein, 189 aa, Unknown
  Obtained from environmental sample
  misc_feature (1)..(189): Xaa is any amino acid
MKELNKDLLFYEQSNGGVTFSGGEPLHQAEFLLEALKACKEDHINTAIDTSGFCDTEAILKAAETANYFLYDIKFIDSEKHERYCGSSNDIILKNLEHISQTGTKITIRIPVIPTINDNLQEMAGISEFIKGIKNIEAVHLLPYHNIQTDKYNRIERKYELPEISGDESPNMNEIKLLFSDKFRIKVGG

SEQ ID NO: 74991 - DNA, 336 bp, Unknown
  Obtained from environmental sample
  misc_feature (1)..(336): n is a, c, g, or t
atgcaggttgacagaatattatatccgataactacgctcggcccgggcgaacgccttgtaatttggactattgggtgttccagacaatgccctaaatgcgccaatccggaactgtggcataaaaaccccgcaaaggatgtcgatgttagtaatcttgtctctataatcaaacaggcaagcggtaataaaatgattgaaggcattacaattaccggcggggatccgttcgcgcaaatagaagaactaataaaaatgcttcccctgttaaaagaaatgccgatgatgtccttgtctataccggatacaccgtccaggaagcggaaagcgtttttgtaa

SEQ ID NO: 74992 - protein, 111 aa, Unknown
  Obtained from environmental sample
  misc_feature (1)..(111): Xaa is any amino acid
MQVDRILYPITTLGPGERLVIWTIGCSRQCPKCANPELWHKNPAKDVDVSNLVSIIKQASGNKMIEGITITGGDPFAQIEELIKMLPLLKEMPMMSLSIPDTPSRKRKAFL

SEQ ID NO: 74993 - DNA, 465 bp, Unknown
  Obtained from environmental sample
  misc_feature (1)..(465): n is a, c, g, or t
gtgaaaatcggctcaatcgcggcgagcgcggcttccgtcatagcgatggcgggtgacaaggtatatatatcaccggtcggacaaattatgattcacaatccaagcacaatatctttcggagacagtacagaaatgcgccgcgccgccgaaatgctggactcggtcaaggaatccatcatcaacagctacgaaattaagacgggcttgccgcgcgtgaaaatctcacggctgatggacagcgagaaattcatggacgcgcacgaggcggttgaactcggcttcgcggacggtctgctgttccgaccgcaggcagcggacaccgaactcgcggcagtattcaacagacccgccgatattatcaaaattacaaaagcgcttgaaaaacagccggaaaatccggttgtgcaaggtaaacccgtggcggaaaaatacagccgccttaattatattatgggaggattttaa

SEQ ID NO: 74994 - protein, 154 aa, Unknown
  Obtained from environmental sample
  SIGNAL (1)...(17)
  DOMAIN (2)...(102): Clp protease
  misc_feature (1)..(154): Xaa is any amino acid
MKIGSIAASAASVIAMAGDKVYISPVGQIMIHNPSTISFGDSTEMRRAAEMLDSVKESIINSYEIKTGLPRVKISRLMDSEKFMDAHEAVELGFADGLLFRPQAADTELAAVFNRPADIIKITKALEKQPENPVVQGKPVAEKYSRLNYIMGGF

SEQ ID NO: 74995 - DNA, 816 bp, Unknown
  Obtained from environmental sample
  misc_feature (1)..(816): n is a, c, g, or t
ttgggggttacggtcggcatagataaaatccgcgccgcctgtgaaagcgcgaaacagaatcccgccgaagaaaacgcgttcaggcaattgcggctctgtcaatgggtaaagcaaagtatccgctggatgccgatgagggagtgggacaaatgcgcgtttatcgttgacgaaaaagcgttagaggggcgagtgtgttacgcggggcttgacctttcaagcaccagcgatattaccgcgcttgtgctggtatttccgcctgccggcgaggatgataaattcgctgttctcccttatttctggcttcccgaagataccgtcagtcagcgagttaagcgcgattccgtaccgtatgacgtttgggttaaaaaaggtttgctccatacaaccgacggaaatgttgtagattacgcatatattgagaaatttatagacgaactgagcgcaaagtttaacatccgcgaaatcgcctacgaccgctggggagcgacgcagatgtcgcagaatttggagcgtctcggactgacagttgtaccatttggtcagggtttcgccagtatgagtccgccgacaaaggagttaatgcggcttattctgacggagaaaatcgctcacggcggcaacgaagttctgcgctggatggcggacaatatcttcgtcagacaagatccagccggaaacatcaagcccgacaaggaaaaatcgtcggaaaaaatagacggaatcgtangaatgataatggctctcgaccgcgcaattcggtgcggtaatgccgtaaccgaaagcgtgtacgattcacgaggtattatttttatataa

SEQ ID NO: 74996 - protein, 271 aa, Unknown
  Obtained from environmental sample
  DOMAIN (1)...(256): Phage Terminase
  misc_feature (1)..(271): Xaa is any amino acid
MGVTVGIDKIRAACESAKQNPAEENAFRQLRLCQWVKQSIRWMPMREWDKCAFIVDEKALEGRVCYAGLDLSSTSDITALVLVFPPAGEDDKFAVLPYFWLPEDTVSQRVKRDSVPYDVWVKKGLLHTTDGNVVDYAYIEKFIDELSAKFNIREIAYDRWGATQMSQNLERLGLTVVPFGQGFASMSPPTKELMRLILTEKIAHGGNEVLRWMADNIFVRQDPAGNIKPDKEKSSEKIDGIVXMIMALDRAIRCGNAVTESVYDSRGIIFI

SEQ ID NO: 74997 - DNA, 759 bp, Unknown
  Obtained from environmental sample
  misc_feature (1)..(759): n is a, c, g, or t
ttggaacagcaaaaaacgcctttgcggataatatttggtaatccgccgtattctgttggacaaaaatccgctaatgataacgctcaaaatcaggaataccctaaattggaaaaaagaatcgctgaaacttatgcacaaggtagttcagcgatattaataaaagggctttacgatagttacattaaagcctttcgttgggctactgacaggttagatatagaaaatggaggcatcgttgcatttataactaatggaggctggcttgatacaaatggctttgatggctttcgtaaatgtatggaaaaagaattttcttcgatctatatcttaaacttaagaggagctattcgtggtagaagtggtgaagcagcaaaaagagaagggcagaatgttttcgatataatgacaggtgttgcaataacattattgattaaaaatctttcagttagtaaagagaaagccactatatattattatgatattggcgattatttaagccgtaaagaaaagtttaatattttaacaagcaataaatcatttttaagcagtgagataaaaaaacaattaattattccaaatgaacaaggcgattggataaacaagcgaaactctaaatttgaagattttattcaaatgattcctgaaaaaaagtttgatgaagaaacacatagtttttttaatacaaatgctattggtgtggcaacaaacagagatacttggacatataatttttccaaagatatgctaaaaaaagtatga

SEQ ID NO: 74998 - protein, 252 aa, Unknown
  Obtained from environmental sample
  misc_feature (1)..(252): Xaa is any amino acid
MEQQKTPLRIIFGNPPYSVGQKSANDNAQNQEYPKLEKRIAETYAQGSSAILIKGLYDSYIKAFRWATDRLDIENGGIVAFITNGGWLDTNGFDGFRKCMEKEFSSIYILNLRGAIRGRSGEAAKREGQNVFDIMTGVAITLLIKNLSVSKEKATIYYYDIGDYLSRKEKFNILTSNKSFLSSEIKKQLIIPNEQGDWINKRNSKFEDFIQMIPEKKFDEETHSFFNTNAIGVATNRDTWTYNFSKDMLKKV

SEQ ID NO: 74999 - DNA, 420 bp, Unknown
  Obtained from environmental sample
  misc_feature (1)..(420): n is a, c, g, or t
gtgcgccccgcccggggctccgccggcccacctggaccaggcccgggccattttcgaggccgtgggggtgacggaggaactggaagaagccaagttcgatgtcggcacggctgtcagcggctcggggccggcctattttttcctgatgatggaagccctgatccggggcgcggtccggctggggctgacctgggagacagcccgccggctggtcctggaaaccgccctgggctcggccgtaacggcccagacccggccggaactgaacctggccgccttaagggaccaagtcacctcgccgggcggcaccacggccgaggcgctccaggtcctggaaaaaagcggcttctcagggctcctggccgaggccctcacggcggccgcggaaaaagggcgccggctggcctgagcccgggataa

SEQ ID NO: 75000 - protein, 139 aa, Unknown
  Obtained from environmental sample
  misc_feature (1)..(139): Xaa is any amino acid
MRPARGSAGPPGPGPGHFRGRGGDGGTGRSQVRCRHGCQRLGAGLFFPDDGSPDPGRGPAGADLGDSPPAGPGNRPGLGRNGPDPAGTEPGRLKGPSHLAGRHHGRGAPGPGKKRLLRAPGRGPHGGRGKRAPAGLSPG

SEQ ID NO: 75001 - DNA, 609 bp, Unknown
  Obtained from environmental sample
  misc_feature (1)..(609): n is a, c, g, or t
gtggtgatcgtggccgtcaaaccgcaccaggtcagagccgtcctggaagaaatacgtccggccgccccggggcggctattcatctccatcgcggccgggcttaaactggccgaccttctggcctggctgccgaattcggccggctgggtccgggttctgcccaatctgccggctctggccggacaggggatgagcctcatgtgcgccccgcccggggctccgccggcccacctggaccaggcccgggccattttcgaggccgtgggggtgacggaggaactggaagaagccaagttcgatgtcggcacggctgtcagcggctcggggccggcctattttttcctgatgatggaagccctgatccggggcgcggtccggctggggctgacctgggagacagcccgccggctggtcctggaaaccgccctgggctcggccgtaacggcccagacccggccggaactgaacctggccgccttaagggaccaagtcacctcgccgggcggcaccacggccgaggcgctccaggtcctggaaaaaagcggcttctcagggctcctggccgaggccctcacggcggccgcggaaaaagggcgccggctggcctga

SEQ ID NO: 75002 - protein, 202 aa, Unknown
  Obtained from environmental sample
  DOMAIN (1)...(186): NADP oxidoreductase coenzyme F420-dependent
  misc_feature (1)..(202): Xaa is any amino acid
MVIVAVKPHQVRAVLEEIRPAAPGRLFISIAAGLKLADLLAWLPNSAGWVRVLPNLPALAGQGMSLMCAPPGAPPAHLDQARAIFEAVGVTEELEEAKFDVGTAVSGSGPAYFFLMMEALIRGAVRLGLTWETARRLVLETALGSAVTAQTRPELNLAALRDQVTSPGGTTAEALQVLEKSGFSGLLAEALTAAAEKGRRLA

SEQ ID NO: 75003 - DNA, 471 bp, Unknown
  Obtained from environmental sample
  misc_feature (1)..(471): n is a, c, g, or t
gtgggagcgggcaatggcggaccctgcccgttctgcgacacagattacacggggacggatggacccttgggcgggcgctacgacgccgacgatctggcagacgcagccctgtccctctggcccagccgcgagcacccatttatcgtctgcaccggtggtgagccgatgatgcagatccgcgagaacctagtggccgagatgcgagccagaggctgcgagattgcgattgaaaccaatgggtctgtgccagtgactcccggcatagactggataaccgtcagccccaaaccaatggccgagctacggcagcaatttggacacgagctnaagctacttttcccgctggaaggcatggacccaccccaatacgagggcctcgacttccaacattattatctgcagccactagacagaggcgcattatgggaaaacacggccaagggcataggatactgccctggcccaccctaa

SEQ ID NO: 75004 - protein, 156 aa, Unknown
  Obtained from environmental sample
  misc_feature (1)..(156): Xaa is any amino acid
MGAGNGGPCPFCDTDYTGTDGPLGGRYDADDLADAALSLWPSREHPFIVCTGGEPMMQIRENLVAEMRARGCEIAIETNGSVPVTPGIDWITVSPKPMAELRQQFGHELKLLFPLEGMDPPQYEGLDFQHYYLQPLDRGALWENTAKGIGYCPGPP

SEQ ID NO: 75005 - DNA, 393 bp, Unknown
  Obtained from environmental sample
  misc_feature (1)..(393): n is a, c, g, or t
gtgccgctggaaaaagtgcgggactgggaacgcgaaggcgttatcgagtacctcggacagaccggggatgtgcgcccctaccttgccgcggccagtgtcatcgtgctgccgtcctggcgggagggtacgccctgttccgtcatggagggcatgagcatgggccgtcccgctgtcgtcaccgacgcgccgggctgccgggaagtggttttcagcggcgtcaacggatatatggcgcccctgcgcgaccctaaggcgctggctgacgccatggagcacttcatcctgcacccggaggatatcgcctccatgggcgcggcaagccgcaaaatcgccacggaagaattcgacgcgcacaaaaccgccgcgcacatcatgcgcgtcatgggcctgtga

SEQ ID NO: 75006 - protein, 130 aa, Unknown
  Obtained from environmental sample
  misc_feature (1)..(130): Xaa is any amino acid
MPLEKVRDWEREGVIEYLGQTGDVRPYLAAASVIVLPSWREGTPCSVMEGMSMGRPAVVTDAPGCREVVFSGVNGYMAPLRDPKALADAMEHFILHPEDIASMGAASRKIATEEFDAHKTAAHIMRVMGL

SEQ ID NO: 75007 - DNA, 318 bp, Unknown
  Obtained from environmental sample
  misc_feature (1)..(318): n is a, c, g, or t
ttgaaatacgcgctcgcattccgcgagatcatcgcgccgcaattggaattcaacgcggaacacaaaaaatattatgattcctgggccgggcgtatgtacctatacaataatgacgtgagttatcagccaaccaggtcgcgcgccgccgcgcctgttacgttgcgtatcaatatggaggcattccgcaagcttggggggacatatatcctttcaagggcggaaattggaaatgcggaagagttagggctgaagtatatacgtaaattcagcaacaatcgttctatttatgaaatattcgtgtataaggctgtcatataa

SEQ ID NO: 75008 - protein, 105 aa, Unknown
  Obtained from environmental sample
  misc_feature (1)..(105): Xaa is any amino acid
MKYALAFREIIAPQLEFNAEHKKYYDSWAGRMYLYNNDVSYQPTRSRAAAPVTLRINMEAFRKLGGTYILSRAEIGNAEELGLKYIRKFSNNRSIYEIFVYKAVI

SEQ ID NO: 75009 - DNA, 303 bp, Unknown
  Obtained from environmental sample
  misc_feature (1)..(303): n is a, c, g, or t
gtgagttttattatgaacgtgtcgcccaactgcgattgctgggccaacaacgattatccgatagtgcccgatattggaataaccgcttcgtacgacccggtggcgctcgaccaggcttgcgccgatttggttaccgccgcaccctcgctgcccggctcgcaaggcaacgaagacgggcaacacaatttaaccggaaaagataaatttgcacacatccacccgaacaccgattggcgcataggtttggaacatgccgaaaacattgggctgggaacgcggcagtatgaattggtgacggtgtga

SEQ ID NO: 75010 - protein, 100 aa, Unknown
  Obtained from environmental sample
  misc_feature (1)..(100): Xaa is any amino acid
MSFIMNVSPNCDCWANNDYPIVPDIGITASYDPVALDQACADLVTAAPSLPGSQGNEDGQHNLTGKDKFAHIHPNTDWRIGLEHAENIGLGTRQYELVTV

SEQ ID NO: 75011 - DNA, 912 bp, Unknown
  Obtained from environmental sample
  misc_feature (1)..(912): n is a, c, g, or t
atgctgtcatgccgcaaagacaggttaaaagcaaaaaacgcgacttttgattttgtacaggtaaattccggacaaccgcttactaatctgccaaaatcaggacgagacattgttacttccggaacaggctccgtttcggggacggcttcgcaaggaacggcttccgcaggcgttagtgcttcaggaacaggctccgcttcgacgacggtttcgcaaggaacggcttccgcaggcgttgctgcttccggaacaagctccgctgtagggacgacttcgtcgcaagggacggcttctgccggtgttgctgcttccgaaacaggctcttcttcgggaacaacttcgcaaggaacaatttccgcaggtacttcatcttccggaacaggtactacaaacgaaatcgggactcctgcgcagagttcttccggctcacaagtttcagaagttccggaaacaagcggtaacatagatgttaataacgatgtcaatagcaaagagggagcatccgcccaaacttctgaaaaaactcagggtaatgaaaatgtatcaaaaaacgaaaaaacatcaggaagcgttaaaacatcaggaagcgttaaaacatcaagcggcgcgaaatcaggcagctcgtcccttcattcaataggccttattttcctgtttattttccttatattggttcttggtattatcattttctttatatcacgcaggattagttcaggctcaagccgtcgtccggtggcgccggtttccaaaaaagaaccaaaagaagaacgtcaggttgcctccgagcgccgtcctgcggcgccggtcgataaacaaaagccgaaagaagaacgtcaggttgcttccggtcgccgtcccgcggcaccggtcgctaaacaagagccgaaagaagaacacgtcatttactga

SEQ ID NO: 75012 - protein, 303 aa, Unknown
  Obtained from environmental sample
  misc_feature (1)..(303): Xaa is any amino acid
MLSCRKDRLKAKNATFDFVQVNSGQPLTNLPKSGRDIVTSGTGSVSGTASQGTASAGVSASGTGSASTTVSQGTASAGVAASGTSSAVGTTSSQGTASAGVAASETGSSSGTTSQGTISAGTSSSGTGTTNEIGTPAQSSSGSQVSEVPETSGNIDVNNDVNSKEGASAQTSEKTQGNENVSKNEKTSGSVKTSGSVKTSSGAKSGSSSLHSIGLIFLFIFLILVLGIIIFFISRRISSGSSRRPVAPVSKKEPKEERQVASERRPAAPVDKQKPKEERQVASGRRPAAPVAKQEPKEEHVIY

SEQ ID NO: 75013 - DNA, 696 bp, Unknown
  Obtained from environmental sample
  misc_feature (1)..(696): n is a, c, g, or t
atgaccgacgaggtactcgcgtgtatacagggagccaaaaacgcaggcgcaaaggaggtcgtcgttagggacgcccatgcttatgccctcacatttgatcctacaaggatgccgtccggcgtaaccttgcttagaaactggtcaggccacccgtacatgatggccgacggcattgataaaactttccaggcggcgatgttcatcggttaccattcgacggcaagcaggtgcggcaaccccctgtcgcatacaatttccggcaagcaactctatataaagatcaacggtgttctcataagcgagttttttttgtacagctacgcttgcgccctggaaggcgtaccgactgtttttttaagcggcgataaaatgctctgcgatgattttaaaaacctgcatccgaacctcattacctgtcccgtcaaggaaggcgttggagccatgacaaagaattactccaccgaagataccctgagaaatataaaggaattgtcggaaaaggcgttgaagcaggatctaaagaacgccctaatcaagctacccggccattttgaggcggaagtgtgttacaaagaacaccattatgctgaaaaggtttcatggttccccggcgtaagcaggaaatccgacaacaccataacattccagtccgacagcttttttgagatattaagaaccctttactggataacctga

SEQ ID NO: 75014 - protein, 231 aa, Unknown
  Obtained from environmental sample
  DOMAIN (1)...(231): D-aminopeptidase
  misc_feature (1)..(231): Xaa is any amino acid
MTDEVLACIQGAKNAGAKEVVVRDAHAYALTFDPTRMPSGVTLLRNWSGHPYMMADGIDKTFQAAMFIGYHSTASRCGNPLSHTISGKQLYIKINGVLISEFFLYSYACALEGVPTVFLSGDKMLCDDFKNLHPNLITCPVKEGVGAMTKNYSTEDTLRNIKELSEKALKQDLKNALIKLPGHFEAEVCYKEHHYAEKVSWFPGVSRKSDNTITFQSDSFFEILRTLYWIT

SEQ ID NO: 75015 - DNA, 822 bp, Unknown
  Obtained from environmental sample
  misc_feature (1)..(822): n is a, c, g, or t
atgagaaaaaataacaataagaagttagtccatacaaaaagatctgatttttctagaaaagatttatctggcaaagatttttctaatatggttttaattggggcggatttttcaggttcaaaatgtagtaaatgtaatttttctggtgcagacttgtcatatgccatatttaaagaaactgatttatacggagctaaatttgaagaagctgttgtttatgtaactctttttgaaaactgtaatctcacaagagctagttttgatagagcatttatatacggaataagatttattaatgttaatgtaacgtattgttcttttatggaaatgcaattagaagaacgaagaagaaaagggagtatttgtaatcatgaagaagaacaaaaaaaatacaaagttgttgagtttggttcatttattggagaaatagacgttttatctcttaaccaattggataatttttgttgtaatggttactgttttgaaatacttaattatgttaaagacgaaaaagcattaaacaaatcacaaatatttaacagaataaaaagaatatttaaggaaaataattttgaaaaggaagctgccgattattattttcaggaaagatattggttgactaaatcatggcacaaacaagattactcaggaaaaatcattcaaaaaagaacatatgaaagaatatttaaaacaattttatcaaaaacagttgaattaatatgtggatatggggaaaaaccagggtatgtagtaagttggttatttggaggatggattgggtatagtttattatatatgttaggaacctttgaacaacggtaa

SEQ ID NO: 75016 - protein, 273 aa, Unknown
  Obtained from environmental sample
  DOMAIN (15)...(54): Pentapeptide repeats (8 copies)
  misc_feature (1)..(273): Xaa is any amino acid
MRKNNNKKLVHTKRSDFSRKDLSGKDFSNMVLIGADFSGSKCSKCNFSGADLSYAIFKETDLYGAKFEEAVVYVTLFENCNLTRASFDRAFIYGIRFINVNVTYCSFMEMQLEERRRKGSICNHEEEQKKYKVVEFGSFIGEIDVLSLNQLDNFCCNGYCFEILNYVKDEKALNKSQIFNRIKRIFKENNFEKEAADYYFQERYWLTKSWHKQDYSGKIIQKRTYERIFKTILSKTVELICGYGEKPGYVVSWLFGGWIGYSLLYMLGTFEQR

SEQ ID NO: 75017 - DNA, 828 bp, Unknown
  Obtained from environmental sample
  misc_feature (1)..(828): n is a, c, g, or t
atgaagaattacggcggcagcgccggatccgccccgtggaaagacgtcgtcaccaatgcggtaatcgaatccggtgtgacgtctataggatcaatggcgtttggtgattgcgcgggcttgacgtcgatcaccctcggagccgatgtgcaagagatcggaagcaacgcatttctcggcagtaacaacttgatgactataaacgttgtgcgtctcaacaacaagtatatcggcgggaacgatatgctgacggagcgtacgcctaacggttatgagcaattgtatacgctaatatgggtgcgtccgagtattcagggcgcaataagcatcgggactcctattattgaaagcggcgcgtttttcggttgcaccggattgacgtctatcgaaatcgggataagcgtgtttgagatacggggcgggttcggcggcgatttagttaatctgacggccataaatgttcaatcaggaaacagatatttcagctctgtggacggagtgctgttcaatagagacaaaaccaaattgatagactatccgagaggcaaacaaggagaatacaccgttcccaatagcgtgacggaaataggctccagcgcgtttgccggatgcagcggtctgacgtccataaccctcacggcagtcaagccgccaagcgcatacggagcgtttggcggcttggacaaaaaagccgtctgtctccacgttcccgaaagcagcgtcgaagcttaccgcgccgccnatggttggaaagactttttgtgcgtcaacggcgaagtcgtttcggtagcgtctaacgcccgcgtaattccgcaacccaattcggaataa

SEQ ID NO: 75018 - protein, 275 aa, Unknown
  Obtained from environmental sample
  misc_feature (1)..(275): Xaa is any amino acid
MKNYGGSAGSAPWKDVVTNAVIESGVTSIGSMAFGDCAGLTSITLGADVQEIGSNAFLGSNNLMTINVVRLNNKYIGGNDMLTERTPNGYEQLYTLIWVRPSIQGAISIGTPIIESGAFFGCTGLTSIEIGISVFEIRGGFGGDLVNLTAINVQSGNRYFSSVDGVLFNRDKTKLIDYPRGKQGEYTVPNSVTEIGSSAFAGCSGLTSITLTAVKPPSAYGAFGGLDKKAVCLHVPESSVEAYRAAXGWKDFLCVNGEVVSVASNARVIPQPNSE

SEQ ID NO: 75019 - DNA, 681 bp, Unknown
  Obtained from environmental sample
  misc_feature (1)..(681): n is a, c, g, or t
ttgtcgctggttaccttttcggcctgtaaagaaaaaaacaataatgactccggtgaaaagctggacaaggactccagttatgcctttgggatgctgatggcaaaccagatgattggacagttaggaatatatggcttgcattttgattaccaggcctttgcggatggttttaaggattttaacgaggcaaatgaaacccgtatcacccaggaaaaagctattgaactaatttctgcggtttttgaccgattgcaggccgtagacgatgaaagactatggcttgagggaacgaaaaaccgtgaagaaggagaaacttacatgacggtgaacgcgaccagaagcggggtaaagacaaccgaaagcgggcttcagtatgaggttttaaagcagggaagcgggccaaagccaggcccctacgattctgtcagggttaattacgaggggacgttaattgacggaaccgtatttgacagctcttacatgaacggtcagccgatagaattttcccttgactatgtaatttcgggctggacagagggactgcagctcatgaacgaaggaagcacttaccgctttgtaattccgcccgatctggcttacggaccgtatggctcagggccaattccccccgaagcgacactcatctttacagttgaactgctttcagtaataccggaatag

SEQ ID NO: 75020 - protein, 226 aa, Unknown
  Obtained from environmental sample
  DOMAIN (3)...(127): Domain amino terminal to FKBP-type peptidyl-prolyl isomerase
  misc_feature (1)..(226): Xaa is any amino acid
MSLVTFSACKEKNNNDSGEKLDKDSSYAFGMLMANQMIGQLGIYGLHFDYQAFADGFKDFNEANETRITQEKAIELISAVFDRLQAVDDERLWLEGTKNREEGETYMTVNATRSGVKTTESGLQYEVLKQGSGPKPGPYDSVRVNYEGTLIDGTVFDSSYMNGQPIEFSLDYVISGWTEGLQLMNEGSTYRFVIPPDLAYGPYGSGPIPPEATLIFTVELLSVIPE

SEQ ID NO: 75021 - DNA, 852 bp, Unknown
  Obtained from environmental sample
  misc_feature (1)..(852): n is a, c, g, or t
ttggtttattccgcagaagtagtatctttgtgcatggaaaaatttattacttgcagcggtatccctgtgcgcgttgttacgcagggcgataacctgaacagcggtggcgcggtggtgctgctgcatggctacttggaaagccttgaggtgtgggacagctttgcgaagctgctcggaaaaaattttcacaccgttacgctcgacctgctcgggcatgggctgagcggtacgcaccacgaggtaaacagcatggagcttatggctgatgtggtgcatggggcttgcttgcagctgtccgtaaggcacgccgttgtagtcgggcattctatgggcggttacgctgcgcttgccattgcaaaaaaataccccgatttagtgcagggcttatgcttgctgcactccacgcccaaccccgacagcgaggaaaaaaagcaaatgcgcgaacgcgaaattgcgcttattaaggagggcaaaaaggacttgctcattgcgcagagcattcccatgatgtttgctgcggatagcgtagcaaagttctacgaacctgttgccgaccttgaggcaaatgcggaaattgccgatgacgagggcattattgcctgtctgcgcggcatgaaatcgcgcgaggacatgaacgattttttaaagactttttcaaagcctcttctttttgttttcggaaaaaaggacaggcacatttcgtttgaagtagcaaccacgctcatggagcgttttccacaggcgcaagcgttggtactcaaaaattcgggacacgcaggatttattgaggaggaaaaagtggtggcggagaagatgatagagtttgctcaatcagccataaagaccttgtaa

SEQ ID NO: 75022 - protein, 283 aa, Unknown
  Obtained from environmental sample
  DOMAIN (62)...(274): alpha/beta hydrolase fold
  misc_feature (1)..(283): Xaa is any amino acid
MVYSAEVVSLCMEKFITCSGIPVRVVTQGDNLNSGGAVVLLHGYLESLEVWDSFAKLLGKNFHTVTLDLLGHGLSGTHHEVNSMELMADVVHGACLQLSVRHAVVVGHSMGGYAALAIAKKYPDLVQGLCLLHSTPNPDSEEKKQMREREIALIKEGKKDLLIAQSIPMMFAADSVAKFYEPVADLEANAEIADDEGIIACLRGMKSREDMNDFLKTFSKPLLFVFGKKDRHISFEVATTLMERFPQAQALVLKNSGHAGFIEEEKVVAEKMIEFAQSAIKTL

SEQ ID NO: 75023 - DNA, 777 bp, Unknown
  Obtained from environmental sample
  misc_feature (1)..(777): n is a, c, g, or t
atgcagcaaggtgaattgatagcgctcatagagcggacggctcttccgaacctggcggccgcatgggatcattcaggcttgcaggtggctgcggaacgggctgaaatcaacctcctcgccgtctgtctcgatcccacgccggctgtgatccgttccgccctggacaacggggccgacatgatcctctcgcaccaccccctgaccatgcagccgcgctttctggatcaactggatgcgttccatgaagccgcgcgcctcttgctcagcgccaatgtgcccctgtatgcggcgcacacgccgctcgacgccaatccgcacggcccggtcgcctggctggcccgcgaactggatctgtgcgatctggccgtgctggaacctgccgctgtgccgggttatggcttcggcgtgatcggccagctgccggcgccgcttgccagctcgcagcttcttgaccggcttgcccccagactgcagggaaaacacgctgttctggccggtccggaactgccggaggcgcctgtcaaactcattgccctgtgcccgggatcgggcggctcactgctgcatgcggctgcggcagccggagcggcggtcatgatcacgggcgatgtcaaataccacacggccctggaaagtcccatttcaatccttgatgtgggacattttttcttggaagaggaaatgatgcgccgctttgccatgacactgtccctggctttgccggttaccttcatccccgggcgcgatcccatgcggccgctgcccgccaccttttga

SEQ ID NO: 75024 - protein, 258 aa, Unknown
  Obtained from environmental sample
  DOMAIN (10)...(250): NIF3 (NGG1p interacting factor 3)
  misc_feature (1)..(258): Xaa is any amino acid
MQQGELIALIERTALPNLAAAWDHSGLQVAAERAEINLLAVCLDPTPAVIRSALDNGADMILSHHPLTMQPRFLDQLDAFHEAARLLLSANVPLYAAHTPLDANPHGPVAWLARELDLCDLAVLEPAAVPGYGFGVIGQLPAPLASSQLLDRLAPRLQGKHAVLAGPELPEAPVKLIALCPGSGGSLLHAAAAAGAAVMITGDVKYHTALESPISILDVGHFFLEEEMMRRFAMTLSLALPVTFIPGRDPMRPLPATF

SEQ ID NO: 75025 - DNA, 324 bp, Unknown
  Obtained from environmental sample
  misc_feature (1)..(324): n is a, c, g, or t
atggcccggggccgaagctcccccctgaccctgacccggcgcggcctggtggaccggctgcgggccaggctcggcctttcggcccgggaagccggggagtgcctggacggtttcctggatatcctggccgctcagttggccgagggcggggcggcctccttcaggggcctgggacgcttcgaaacccgccttagccccccgcggccgggccgcaacccggccaccggccagccggtccccattcccgcccgccggcgtccggtcttcatcccgagcccggacttgcgggccctcctgcgcaacgagctcacggggacggactga

SEQ ID NO: 75026 - protein, 107 aa, Unknown
  Obtained from environmental sample
  DOMAIN (11)...(100): Bacterial DNA-binding protein
  misc_feature (1)..(107): Xaa is any amino acid
MARGRSSPLTLTRRGLVDRLRARLGLSAREAGECLDGFLDILAAQLAEGGAASFRGLGRFETRLSPPRPGRNPATGQPVPIPARRRPVFIPSPDLRALLRNELTGTD

SEQ ID NO: 75027 - DNA, 402 bp, Unknown
  Obtained from environmental sample
  misc_feature (1)..(402): n is a, c, g, or t
atggcctcagaatcggaacaggttttctacaagctgtccgagctttcgaccctgctcggggtgagcgccagcgtcctgcggttctgggaaaaggaattcggcgaggccgtcaagccgctcatggccgggccccgcaaaaggctctaccgccccaaggacctggaagtattccgggaaataaaacgcctgctccaggaagagcgctacaccgtcgccggagcccggcggcggcttttgatggccgagtcttcggccgagggggaggaatccgggacggaagtcacggccctgcggtcggtcttggcggaagcccggcgtgagcttctggaactccgccggcttctggcctcggcttcagcgcccccggaccaagccggggccggcccccgagcctcgggataa

SEQ ID NO: 75028 - protein, 133 aa, Unknown
  Obtained from environmental sample
  DOMAIN (11)...(49): MerR family regulatory protein
  misc_feature (1)..(133): Xaa is any amino acid
MASESEQVFYKLSELSTLLGVSASVLRFWEKEFGEAVKPLMAGPRKRLYRPKDLEVFREIKRLLQEERYTVAGARRRLLMAESSAEGEESGTEVTALRSVLAEARRELLELRRLLASASAPPDQAGAGPRASG

SEQ ID NO: 75029 - DNA, 339 bp, Unknown
  Obtained from environmental sample
  misc_feature (1)..(339): n is a, c, g, or t
atggaaacggcaaaagccatgctggctgccggccggcatttatatgtcggctttttgtgccaccagacaatagagaaaacgctgaaagcgatgattgccaaagatggaactatcccgcccccgatccataatctgaacaggcttctggaattgggccgattatccgccgacatgagccaagagcggaacgattttattgacgctttgtcgccattgaatattgaagcgcgttacccggttgataaaaacaagctgcttggaattttgacggaaaaatattgccgagggattatctcacaaaccgaggacttgatgacatggataaaaaacaggctgtga

SEQ ID NO: 75030 - protein, 112 aa, Unknown
  Obtained from environmental sample
  DOMAIN (1)...(111): HEPN domain
  misc_feature (1)..(112): Xaa is any amino acid
METAKAMLAAGRHLYVGFLCHQTIEKTLKAMIAKDGTIPPPIHNLNRLLELGRLSADMSQERNDFIDALSPLNIEARYPVDKNKLLGILTEKYCRGIISQTEDLMTWIKNRL

SEQ ID NO: 75031 - DNA, 354 bp, Unknown
  Obtained from environmental sample
  misc_feature (1)..(354): n is a, c, g, or t
ttgccgagggattatctcacaaaccgaggacttgatgacatggataaaaaacaggctgtgacttatgcccgcctttacgccgatttagtggctaaagaactgcggcccgagcggatcgttctctttggctcccatgccgcgggtaaggccggcgaggaaagcgacattgacgtggcggtgatttttaatggcctgtccggcgatcattataatatttccactctgctctggaagcttactagacgggtctgttcccatattgaacccattcttctggacctggccgacgataaaagcggatttgccgaagaagtcttaaggacaggggaagtcatctatcacacgcggacttaa

SEQ ID NO: 75032 - protein, 117 aa, Unknown
  Obtained from environmental sample
  DOMAIN (23)...(112): Nucleotidyltransferase domain
  misc_feature (1)..(117): Xaa is any amino acid
MPRDYLTNRGLDDMDKKQAVTYARLYADLVAKELRPERIVLFGSHAAGKAGEESDIDVAVIFNGLSGDHYNISTLLWKLTRRVCSHIEPILLDLADDKSGFAEEVLRTGEVIYHTRT

SEQ ID NO: 75033 - DNA, 639 bp, Unknown
  Obtained from environmental sample
  misc_feature (1)..(639): n is a, c, g, or t
gtggacctgcgcactgatgagccggaggaacgcttcgccatcgggcaggttttggatactgaccccgatgtcggatcgcttaccgtggctaatgcccgccaacaaaatggacgatgggtattgcggttcgatgaaatcgttgaccgaactgaagctgaggcgcttaatcaggttaaattgaccattccagcgggcgattcagatgaagaagatgcctggtattcccatgaattggtcgggatgtcggcccaattagccgacggcaccgtggtcggcaaaattgccgggattgatcatggcgcagcacatgacttcttaatcttaaaagaagttaacggcgcttcaactttgattccatttgtccatgaaatagtgcccgatgtcgacaaggagaaaaagatggttaccttaaatccgcccggcggtttactggcgtctgatgctgcgaatttagtagtggctagtgaggttaacgatgccgatcgttcggaagaaaaagcagccgaattggcagctccactcgcaccaaaaccgggtactaaattacctggcgaaattgagggcaccattgaggctgaagatgtggacacgcaccagcacgctattaccgacctagaacccgaaacttccgagcaatag

SEQ ID NO: 75034 - protein, 212 aa, Unknown
  Obtained from environmental sample
  DOMAIN (3)...(66): RimM N-terminal domain
  misc_feature (1)..(212): Xaa is any amino acid
MDLRTDEPEERFAIGQVLDTDPDVGSLTVANARQQNGRWVLRFDEIVDRTEAEALNQVKLTIPAGDSDEEDAWYSHELVGMSAQLADGTVVGKIAGIDHGAAHDFLILKEVNGASTLIPFVHEIVPDVDKEKKMVTLNPPGGLLASDAANLVVASEVNDADRSEEKAAELAAPLAPKPGTKLPGEIEGTIEAEDVDTHQHAITDLEPETSEQ

SEQ ID NO: 75035 - DNA, 624 bp, Unknown
  Obtained from environmental sample
  misc_feature (1)..(624): n is a, c, g, or t
atgcctaagcatctcaggcaatccgtctcggaacacactgcttccgatttcaccactgctgccccgcagcccattttggtggaatcggaagcagtagtgtttgagccaatttcgccggtaatcgaagcgccgataaatgctaattcggtaatcgaagaccaggcagctaatggcccggtggccgacaattcggttagcgaagatgaggctaccgacgacgagtctaccgatgaggagccgcgcactacgggctgggggctgctaaaagaaactggaatcatcgtacttagtgccctaattgtttcttggttaatcaagactttcttagtccaggctttcttcattcccagcgaatcaatggaagatactttcgagcgtggtgatcgggtaatggtttctcggttagtgcctcggtttttcgaagtgcatcgcggcgatattgttgtattcaaagatccgggcggatggttaaatgcttatcagcaacccgatcggggcgcttttgccaacgcgatggttactatttttactggcgttgggcttttaccacaagatagtggcgaacatttagtaaagcgcgccattggtattggtggcgaccatngtgacttgctgcagtattga

SEQ ID NO: 75036 - protein, 207 aa, Unknown
  Obtained from environmental sample
  DOMAIN (114)...(207): Peptidase S24-like
  misc_feature (1)..(207): Xaa is any amino acid
MPKHLRQSVSEHTASDFTTAAPQPILVESEAVVFEPISPVIEAPINANSVIEDQAANGPVADNSVSEDEATDDESTDEEPRTTGWGLLKETGIIVLSALIVSWLIKTFLVQAFFIPSESMEDTFERGDRVMVSRLVPRFFEVHRGDIVVFKDPGGWLNAYQQPDRGAFANAMVTIFTGVGLLPQDSGEHLVKRAIGIGGDHXDLLQY

SEQ ID NO: 75037 - DNA, 522 bp, Unknown
  Obtained from environmental sample
  misc_feature (1)..(522): n is a, c, g, or t
atgtactctaattactttcgaacaatgggtaaagtcatcattttttccgctccctcaggctcgggaaaaacaacgatagtgaagcacttgctgacgaccatgccgaatttggagttttccatttcggctacgagccgtgcaccgcgcggcagcgaggttaacggcaaggactactactttttatctgccgacgaatttcgcaagcgcataaaagccgatgaatttgtggagtgggaagaggtgtatgcaggcaagtattacggtacgctgaaaagcgagcctgagcgcatttgggctgccggaatgcacgtggtatttgatgtagatgtgcatggcggaattagcctcaaaaaaatctttggcgaccaggcgctgctcatttttattaagccgccctcagtggaggagctgcgccagcgcctcataacccgcaacaccgatgctcctgaggttattgatgagcgggtagcaaaggcggagttggagctctcatttgccaatactttgacagggtggtggtga

SEQ ID NO: 75038 - protein, 173 aa, Unknown
  Obtained from environmental sample
  DOMAIN (45)...(151): Guanylate kinase
  misc_feature (1)..(173): Xaa is any amino acid
MYSNYFRTMGKVIIFSAPSGSGKTTIVKHLLTTMPNLEFSISATSRAPRGSEVNGKDYYFLSADEFRKRIKADEFVEWEEVYAGKYYGTLKSEPERIWAAGMHVVFDVDVHGGISLKKIFGDQALLIFIKPPSVEELRQRLITRNTDAPEVIDERVAKAELELSFANTLTGWW

SEQ ID NO: 75039 - DNA, 414 bp, Unknown
  Obtained from environmental sample
  misc_feature (1)..(414): n is a, c, g, or t
ttgaacaatccatgcttgatattgagcatggcaatacgttttacatcaatggccccaaaaaataaccccaagaaaaaacgcaaaacgcctaaagaattttttaaatcattgcaagaagccgatggttttgtttatcatttgacggcttcaaatacgttcaaaaaggatattgacctttgttataaaaggaacttaaatttggaattgcttgaaacggtagttttaaaacttgctcgcaacgaaaaattagataaaaaatatcaggtacataaactttacggaatagcgaaacagaataatgaggacgtattggaatgtcatatacaacccgattggcttttgatttggaaacaaaacgatactgatttaatccttattttatgcaatagcggaactcattccgatttgttttga

SEQ ID NO: 75040 - protein, 137 aa, Unknown
  Obtained from environmental sample
  SIGNAL (1)...(18)
  misc_feature (1)..(137): Xaa is any amino acid
MNNPCLILSMAIRFTSMAPKNNPKKKRKTPKEFFKSLQEADGFVYHLTASNTFKKDIDLCYKRNLNLELLETVVLKLARNEKLDKKYQVHKLYGIAKQNNEDVLECHIQPDWLLIWKQNDTDLILILCNSGTHSDLF

SEQ ID NO: 75041 - DNA, 552 bp, Unknown
  Obtained from environmental sample
  misc_feature (1)..(552): n is a, c, g, or t
atgccattgctgtggatgtcggcnggttcttacacgaatgtcgaaaaacgtttgggcgtatcgttggcctttcgaaatatcggcacgatgctgaaacgagacatcattaactacgaaaaaatgccgtttgaaatcacgatggccgtttaccaacgtgtgcagcacgcgcccttcgcgtattcgattgtacttgctaatttgcagaaatggaacctttccggcgtggatatgaatgctgaagaaattgactcgttaaccaatgaagttaaaaaaaccaacaaactgtcggctattgccgataatgccatgcgacacattgttccggcggtagaactgttaccgttcaaaaaccttgcgtttcgactgggctttaactatcagcgacgtcaggaattaaaaacctctacacgtcccggatttgttgggttttcgtggggagtaggcatcaatatttacaaaattcaaatcaactatgcacgttcggctttccatctggccggtgcgcctaactttatttcgattagcacgaatttgtcgaattttatcgattaa

SEQ ID NO: 75042 - protein, 183 aa, Unknown
  Obtained from environmental sample
  misc_feature (1)..(183): Xaa is any amino acid
MPLLWMSAGSYTNVEKRLGVSLAFRNIGTMLKRDIINYEKMPFEITMAVYQRVQHAPFAYSIVLANLQKWNLSGVDMNAEEIDSLTNEVKKTNKLSAIADNAMRHIVPAVELLPFKNLAFRLGFNYQRRQELKTSTRPGFVGFSWGVGINIYKIQINYARSAFHLAGAPNFISISTNLSNFID

SEQ ID NO: 75043 - DNA, 312 bp, Unknown
  Obtained from environmental sample
  misc_feature (1)..(312): n is a, c, g, or t
gtggtatacgcgattgttaaatctggtggccgccaggaaaaggtggctgtcggcgacatcgtagtgatggatcgtcaggctgccaaggtcggcgagaccattgagctgcccgcccttttgttggttgatggggataccatcaccacggataaagccaaattggctgccactaaggtcaccgctgaggttttgcgcgatgatgctaaaggccccaagattgttatcctgaaatacaagaacaagactggttatcgcaagcgccaaggtcaccgtcaaaagttgacccgcgtcaaaattactggcatcaagtaa

SEQ ID NO: 75044 - protein, 103 aa, Unknown
  Obtained from environmental sample
  DOMAIN (2)...(97): Ribosomal prokaryotic L21 protein
  misc_feature (1)..(103): Xaa is any amino acid
MVYAIVKSGGRQEKVAVGDIVVMDRQAAKVGETIELPALLLVDGDTITTDKAKLAATKVTAEVLRDDAKGPKIVILKYKNKTGYRKRQGHRQKLTRVKITGIK

SEQ ID NO: 75045 - DNA, 552 bp, Unknown
  Obtained from environmental sample
  misc_feature (1)..(552): n is a, c, g, or t
atgtcaattcagggtgagttgtcggatcgtggttttcctactgcctgcgaaaccgatgtgtggggcgcgatttcccagcttatctgttcaagcgcaagccttggtaaagatacggaattcctcgcggactggacataccgtcaccctgagaatgacaatggggaactgctctggcacggaggtccttttgcctggtccctggcttccaaagcaagaaaaccccaattccgtaagaattatcgcggcttttatgaagcgtggtttgaaatgaagcagggagatttaactctggtcagaatggatgaactgcatggtgaatattatatgtttctgggtgaaggcagaactaccactggccctgaaaccacgggcacttgggtatggcttgaagtggatagctggaaaaactgggaggaacagcttatattcgggccttttattcatcatgtagcaggagtatacggtaaatacgcagagacaatagcagaggctgcccgctatctgggtgttaatgttgttaacgccggtacacctcatcccaagagcctgtaa

SEQ ID NO: 75046 - protein, 183 aa, Unknown
  Obtained from environmental sample
  misc_feature (1)..(183): Xaa is any amino acid
MSIQGELSDRGFPTACETDVWGAISQLICSSASLGKDTEFLADWTYRHPENDNGELLWHGGPFAWSLASKARKPQFRKNYRGFYEAWFEMKQGDLTLVRMDELHGEYYMFLGEGRTTTGPETTGTWVWLEVDSWKNWEEQLIFGPFIHHVAGVYGKYAETIAEAARYLGVNVVNAGTPHPKSL

SEQ ID NO: 75047 - DNA, 870 bp, Unknown
  Obtained from environmental sample
  misc_feature (1)..(870): n is a, c, g, or t
gtggaagatgcccaagactggatcagccccagcaagctggacagaaaattctcgctccaagcgctggagaagcacttcaaagaacccgcgccagcccgattcagctttttgctcagagatgacacaaagcccaagagtccaaccaaacaggaagcggctgccaaggcgccggacatccctgtgccaagttgggaaccctacagagaggccgttgggaagctcagaaaagagaatgggaagagacgatctgagatgaaggagaggcacaagagggagagggacaagatatttgaatccgccagggagaagcagaaagagataggcaagtccccggactggagggccaagaagaaccaactggccttcgacaaggccgtggcgttactggcactcagggagaaacagaaaatggaatcggcagcattgagccgagaatacgaaaatgcgaaaaaagaccctgaaatcctcaaactgcgcccgaccccacccaaaacaaaggaaacggccagcctcgccccatcagccccggccccaagggggccagcaaaacccccggaaaacttggaagacctaaaagacctgagagcctatgagccagtccagaaaggcaacactgtccactactataggaaacaaagcccgataaaggacgatctggcctttgtggacagggggaacaaaattgtcctgaagagcaggcacccatcaaacgacgacatattggccgcgctacagctgggacaggcaaaatgggggaaaaaccaaatatctcgcggctcccaagagtacatcgacagagcagtggcgattgccctgaaacacgggatagaactacaaaaccccgaaggaaaaaagctcggccgaatctga

SEQ ID NO: 75048 - protein, 289 aa, Unknown
  Obtained from environmental sample
  misc_feature (1)..(289): Xaa is any amino acid
MEDAQDWISPSKLDRKFSLQALEKHFKEPAPARFSFLLRDDTKPKSPTKQEAAAKAPDIPVPSWEPYREAVGKLRKENGKRRSEMKERHKRERDKIFESAREKQKEIGKSPDWRAKKNQLAFDKAVALLALREKQKMESAALSREYENAKKDPEILKLRPTPPKTKETASLAPSAPAPRGPAKPPENLEDLKDLRAYEPVQKGNTVHYYRKQSPIKDDLAFVDRGNKIVLKSRHPSNDDILAALQLGQAKWGKNQISRGSQEYIDRAVAIALKHGIELQNPEGKKLGRI

SEQ ID NO: 75049 - DNA, 351 bp, Unknown
  Obtained from environmental sample
  misc_feature (1)..(351): n is a, c, g, or t
ttgactttatacccagaaaaggtattttttctcatagaacaggcgcaaagcgtagagtggtcggttaaattcagctccaaggcaggcaagcaaagaagaaaattgcctgcttatattgatgatcgtttggctgctttggcgcgggagcttatcgtggaaggccccgtgcagccggaatggaagaactatggcaaactggcggggaaaagaggcgaataccatcactgccatttgaatgctggccgaccaacctatgttgtggtgtggcaagtgattgatcaacaggtacatgttatggaagtacggtatgtcggcacgcatgaaggcataagttacaaaagatttaaatga

SEQ ID NO: 75050 - protein, 116 aa, Unknown
  Obtained from environmental sample
  misc_feature (1)..(116): Xaa is any amino acid
MTLYPEKVFFLIEQAQSVEWSVKFSSKAGKQRRKLPAYIDDRLAALARELIVEGPVQPEWKNYGKLAGKRGEYHHCHLNAGRPTYVVVWQVIDQQVHVMEVRYVGTHEGISYKRFK

SEQ ID NO: 75051 - DNA, 771 bp, Unknown
  Obtained from environmental sample
  misc_feature (1)..(771): n is a, c, g, or t
ttgctgcaacaaaaagaagaaggccgcatccgccggctcggcttttcctttcacggcgcgccggaacgtatggccatgctcctgccccgccagaactgggattttgcccaaatccagctcaactatctggactgggatctgatccaggccggcacattgtacgccatgctggccgaacgcgccattccctgcctggtcatggagccggtgcgcggcggcagcctgcatactctgtgcgagccggcgatcgacatcctgcgcgccgcgaacccgcaacgcagcccggcatcctgggccatccgcttcgcggcttccctgccgaacgtgctgaccgttctgagcggcatgacgacccttgagcaggttcacgacaacgtggccaccctggagaacttccaagccctgactcaggcggagcgccagattctggatcaggtctgcgcggcttatctggccgccggggccattgattgcaccgcctgccgctactgcatggactgtccgaacggcgtggacattcccggagtctttgccgcgtacaaccgctgcgccaccagcctgggactgccggtttacgtttcgatcatgcaccgcaccaacaaaaacgcccaagccttcctcaagtcctgtgaagaactgccgccggcaagccgggcggacaactgcacggcctgcggccagtgcctggaacactgcccgcagcagcttgacatcccggacaagatgcgtctgatcgccggattgtacaaggagctgcggggcaagccatga

SEQ ID NO: 75052 - protein, 256 aa, Unknown
  Obtained from environmental sample
  misc_feature (1)..(256): Xaa is any amino acid
MLQQKEEGRIRRLGFSFHGAPERMAMLLPRQNWDFAQIQLNYLDWDLIQAGTLYAMLAERAIPCLVMEPVRGGSLHTLCEPAIDILRAANPQRSPASWAIRFAASLPNVLTVLSGMTTLEQVHDNVATLENFQALTQAERQILDQVCAAYLAAGAIDCTACRYCMDCPNGVDIPGVFAAYNRCATSLGLPVYVSIMHRTNKNAQAFLKSCEELPPASRADNCTACGQCLEHCPQQLDIPDKMRLIAGLYKELRGKP

SEQ ID NO: 75053 - DNA, 819 bp, Unknown
  Obtained from environmental sample
  misc_feature (1)..(819): n is a, c, g, or t
gtgtatttatatgtcatcagggatcctaaacaacctactaaaacacgttgtttcataaatgaatccatgatagagggttcagtttatgattacttagattattcccctttccagaacgcgccctattctgatatacctaattttaataaaaacaacgacacggaatttaaattcgatatttcaagccttccgactccgacattggatctcagcgccagcccggttaccaaatcattcagagtaaatgacctagccgaatggaacaaagttcttgatgaaattaaaaaagaaggctctgccacgacactcaaaacctataccatcacggtcaaccaaaatatctcacttcccggaaacaccgttaacacttttggtaatgccaacgtaaatgtaacgctcacaggtaacagtacgctttcccttagcagtcagggcagtatgcttaccattggcagttctcaaactgtacgtattgaaagcacaaacctgactctgaaaggacgtacaaataataacgctcctataattaacgtaaatggcggaaaacttgaattaaaaaaaggatacataatcgggaatacgggcaactgcggggtggctgttgtcaacggtggcattttaatcatgtcgggaggccatattaaggataataatactgctgctgttggcaacaacggaggtggagtgtttgttagcagcaatggcacttttaccatgaccgacggagaaatcagcgggaatattagcggtaacggcggcggggtgtttgttaccaacagntggtaccaaattcaccatgtcgggggggaccatcagtaa

SEQ ID NO: 75054 - protein, 272 aa, Unknown
  Obtained from environmental sample
  misc_feature (1)..(272): Xaa is any amino acid
MYLYVIRDPKQPTKTRCFINESMIEGSVYDYLDYSPFQNAPYSDIPNFNKNNDTEFKFDISSLPTPTLDLSASPVTKSFRVNDLAEWNKVLDEIKKEGSATTLKTYTITVNQNISLPGNTVNTFGNANVNVTLTGNSTLSLSSQGSMLTIGSSQTVRIESTNLTLKGRTNNNAPIINVNGGKLELKKGYIIGNTGNCGVAVVNGGILIMSGGHIKDNNTAAVGNNGGGVFVSSNGTFTMTDGEISGNISGNGGGVFVTNXWYQIHHVGGDHQ

SEQ ID NO: 75055 - DNA, 414 bp, Unknown
  Obtained from environmental sample
  misc_feature (1)..(414): n is a, c, g, or t
atgatgaacatatacgccgcncatggcgggcannggctgccggttattttccataccggcgattatcgttattctcattcccacccttcccggctggcccgcgtactggataatttcccccggctctgcgcggtagccgcccatttcggcggctggtcgctttttgacattgcctacgattattttcacaaccggcgctgctatttcgacgtttccagctccctcccgtttatcggccaccggcgcgccgctgaacttattcatgattacggggctgaacgctttctgttcggctccgattatcccatgtgggatcccgctgcctgtcttgaagaatttatgacccttgatcttgcggaccgcgaaaaagaacaggtgctgtggaaaaacgcgcaggtgattttgggtatatga

SEQ ID NO: 75056 - protein, 137 aa, Unknown
  Obtained from environmental sample
  DOMAIN (2)...(137): Amidohydrolase
  misc_feature (1)..(137): Xaa is any amino acid
MMNIYAAHGGXXLPVIFHTGDYRYSHSHPSRLARVLDNFPRLCAVAAHFGGWSLFDIAYDYFHNRRCYFDVSSSLPFIGHRRAAELIHDYGAERFLFGSDYPMWDPAACLEEFMTLDLADREKEQVLWKNAQVILGI

SEQ ID NO: 75057 - DNA, 420 bp, Unknown
  Obtained from environmental sample
  misc_feature (1)..(420): n is a, c, g, or t
gtgatagacgggtgtaaccagatagcagaagaggcagggataaagctaaggcgtagttaccgccgggagagcaaacagctgctgcgtgatagcaacaacgggaaccgtccgcaggtggcaaaaaaagcgaagaaagcgcgaaaacgtcttaaaaccatagcaaatgtgcagattcgcgacttgaaacgcaaaatgaacgctgagcaggaatcagcgtaccgggagcgccttgcgctttacctgcgcgccgcaaatcaaaaggtccaagaccatgacaaagtttacagtctgcacaaaccgtttaccaagtgcataagcaaaggcaaggcgcataaacagtacgagtttggaaacaaggtaggaataatcgtaaccggtaataaaggccggaagataatcactgctgttaaagcattttag

SEQ ID NO: 75058 - protein, 139 aa, Unknown
  Obtained from environmental sample
  misc_feature (1)..(139): Xaa is any amino acid
MIDGCNQIAEEAGIKLRRSYRRESKQLLRDSNNGNRPQVAKKAKKARKRLKTIANVQIRDLKRKMNAEQESAYRERLALYLRAANQKVQDHDKVYSLHKPFTKCISKGKAHKQYEFGNKVGIIVTGNKGRKIITAVKAF

SEQ ID NO: 75059 - DNA, 648 bp, Unknown
  Obtained from environmental sample
  misc_feature (1)..(648): n is a, c, g, or t
gtggttttaaaaanaaaaaccaaaaaaaaggaaggggnnnnaaaaaggnnnnnnncgggggggggggggggnnnnttcttcttttttttttttttaagggggggagaaaaaaaaaaaanannnnnananntnnncaannnnnntnnntncccccccccccccccccgggggggggagggagaggttaaacccccttttgggggccggattanccgnncttggaagncgatagcgggggagaagctggggatcgtcaagcccgggacgccgcttgtcatgttggaaccggatgatcagcggataagagagcttgccgttgaaaaatgtaaggagatcggttcggagttggtgttttcaccggttgatatggggatgaccggcgtcgtctgtcgggacgacggtgtatcattttgccttgacgggcgtaagtacgatttatctatgataggggagtaccaggtgcagaacgccgtcttagccatgaacgcgctcaggcgcgtggatgattttgattatcgggtagtatatgaggggataaagtcggctgtactgcccgggcgttttcagattgtcgatgttcgcgatcaacaattggtgattgacgtaggccacaatcccgacgccgccgaggcccttgccggcgcgtga

SEQ ID NO: 75060 - protein, 215 aa, Unknown
  Obtained from environmental sample
  misc_feature (1)..(215): Xaa is any amino acid
MVLKXKTKKKEGXXKRXXXGGGGGXFFFFFFLRGGEKKKXXXXXXXXXXXPPPPPRGGEGEVKPPFGGRIXRXWKXIAGEKLGIVKPGTPLVMLEPDDQRIRELAVEKCKEIGSELVFSPVDMGMTGVVCRDDGVSFCLDGRKYDLSMIGEYQVQNAVLAMNALRRVDDFDYRVVYEGIKSAVLPGRFQIVDVRDQQLVIDVGHNPDAAEALAGA

SEQ ID NO: 75061 - DNA, 357 bp, Unknown
  Obtained from environmental sample
  misc_feature (1)..(357): n is a, c, g, or t
atgtttttcagcatcagaatcgtgaacaagcaaggcgtaaagatgtattcctggggaacctggaaccaggatgtaaacaaggcgcataccggaagcgatgagccgctttttctggataaagaatttttgaaaggcaggcgatatacattgcgctactcttgtggatgcaacctggcccctaatttttatgaaattcaggccggaataacgtttgtggattccctgcggagcggtggaacacaagaccttgcttggtatcatgaattggctttttttgaggtgcgcccattaaaagattatccctttggaggggtttgcgacatgggtatgcgggtaagcctgatagcggagttttag

SEQ ID NO: 75062 - protein, 118 aa, Unknown
  Obtained from environmental sample
  misc_feature (1)..(118): Xaa is any amino acid
MFFSIRIVNKQGVKMYSWGTWNQDVNKAHTGSDEPLFLDKEFLKGRRYTLRYSCGCNLAPNFYEIQAGITFVDSLRSGGTQDLAWYHELAFFEVRPLKDYPFGGVCDMGMRVSLIAEF

SEQ ID NO: 75063 - DNA, 333 bp, Unknown
  Obtained from environmental sample
  misc_feature (1)..(333): n is a, c, g, or t
ttgaactcgatgtattcggcgttattggtcgcaaaggaatattccgcccgcagttcgtttattaccagcagccctgtttccggctgtataatttccggcggttggccttcttcgccttcgccttcgtcctcttggggtgtcccggcttccggcgtttcggcttccggcggtatcacttccggcgtttcggcttccggcgtttcggcttccggtgtttcggcttccggcggtactaccgctggcggcactacctccggcggtactatttcgggcgatattgcttcaggagacgtaatttcctgcggttcgccttctcccgtttcggccccttga

SEQ ID NO: 75064 - protein, 110 aa, Unknown
  Obtained from environmental sample
  misc_feature (1)..(110): Xaa is any amino acid
MNSMYSALLVAKEYSARSSFITSSPVSGCIISGGWPSSPSPSSSWGVPASGVSASGGITSGVSASGVSASGVSASGGTTAGGTTSGGTISGDIASGDVISCGSPSPVSAP

SEQ ID NO: 75065 - DNA, 762 bp, Unknown
  Obtained from environmental sample
  misc_feature (1)..(762): n is a, c, g, or t
gtgcctgccggggacgtggctggcgtcgctgtcgttgcggggtttggccgaccaccagttcatcccggcgtcgacgcgggcctggacgagcccgatcgagctagcggtctccgtgggtgcggcggtcgtggtggcagagctggcgggcttcttcgccgcccgccgcgccagccgggtccaccccgcagccgcgctcggagaggcggcggtcgaacgacgctctccccgaccggcccgcctcctcctcggactgctcgccatggcgggcggcgtagtgatgggttacgtcgccgttcatcagcacgacgccgcccagcagctcagccaggcggagctggccctcctcgtgttcatggttgccgttgccctcctcggtccgtacctcctccgcgtcgtcgaggctgccctacgggtgcccgtccgactgctcggcggtacacctgcgcggctgtccagcgcccagctgcggaccaggtcccggcgtatggccagcgctctggtcgccatcgccctgccggtcagcttcgccggcgccatcgtcgccgtcgatgccacccagacccacgcggacaccacccaggcacaggcgcgcctcgccgccagcgcagtggtgactgcacccgggcccggactcgatccgtcggtgcttgccgcagtgaggagccaacctggtgtcagcggcgctgtcggtttgtcgccgacgaccgtctacgtgcccttcgaaggcaccgagaccacctcggccgaggcgatcacccctga

SEQ ID NO: 75066 - protein, 253 aa, Unknown
  Obtained from environmental sample
  misc_feature (1)..(253): Xaa is any amino acid
MPAGDVAGVAVVAGFGRPPVHPGVDAGLDEPDRASGLRGCGGRGGRAGGLLRRPPRQPGPPRSRARRGGGRTTLSPTGPPPPRTARHGGRRSDGLRRRSSARRRPAAQPGGAGPPRVHGCRCPPRSVPPPRRRGCPTGARPTARRYTCAAVQRPAADQVPAYGQRSGRHRPAGQLRRRHRRRRCHPDPRGHHPGTGAPRRQRSGDCTRARTRSVGACRSEEPTWCQRRCRFVADDRLRALRRHRDHLGRGDHP

SEQ ID NO: 75067 - DNA, 876 bp, Unknown
  Obtained from environmental sample
  misc_feature (1)..(876): n is a, c, g, or t
ttgtccgatgaagccagccatctggcccactattatgccctggccacggttctcttgtggtcttcggcctatgtcttcaccaaggtggccctggcgcacttcagcgccgccagcctgggttttttgcgctgcggggtggccgccgcggttctggccgtggtcttggcggtgaaaaagaccccgcggcccaaggcggcagatctgccttggttccttctgtccggggccgcgggcttcgctctctacctcctggccttcaaccgtggttcggcctggctcagcccgactacaagctgcctggtcatttcgaccgcgcccctgattaccgcgctcctggccagccgtttttttggggagggcttgaccgccgcgggctggggggctatggtgtcggctttcggcggggtcgccctcctgatgctgggccagggcggagtggcttttaccctgggcgtcttctggatgctcctggcctctttattaataagcctttacaaccttatccagcggaaactggccgccggccgcgatacgctgaccatcacggcctacagttttttcgccgccgccctcctcctggcctggggtgcggcggacgccgtcgcggaatgccgccaggctcccccgggtggtttagcggtcgccgtttacctgggggtgttccccagcgccctggcctatcttttgtgggccaaggccctggccctggcctcgcagaccagcgtggtgaccaaccatatgtatttgacgccgctcttgtccctgcttctggagtatctgattctggccgagacgccgggtctcggaaccttcctgggcggggccgtaatcctgggcagcctggttttatttcatcttaaaggccggcgtagttga

SEQ ID NO: 75068 - protein, 291 aa, Unknown
  Obtained from environmental sample
  DOMAIN (160)...(286): Integral membrane protein DUF6
  misc_feature (1)..(291): Xaa is any amino acid
MSDEASHLAHYYALATVLLWSSAYVFTKVALAHFSAASLGFLRCGVAAAVLAVVLAVKKTPRPKAADLPWFLLSGAAGFALYLLAFNRGSAWLSPTTSCLVISTAPLITALLASRFFGEGLTAAGWGAMVSAFGGVALLMLGQGGVAFTLGVFWMLLASLLISLYNLIQRKLAAGRDTLTITAYSFFAAALLLAWGAADAVAECRQAPPGGLAVAVYLGVFPSALAYLLWAKALALASQTSVVTNHMYLTPLLSLLLEYLILAETPGLGTFLGGAVILGSLVLFHLKGRRS

SEQ ID NO: 75069 - DNA, 804 bp, Unknown
  Obtained from environmental sample
  misc_feature (1)..(804): n is a, c, g, or t
gtggtcttcggcctatgtcttcaccaaggtggccctggcgcacttcagcgccgccagcctgggttttttgcgctgcggggtggccgccgcggttctggccgtggtcttggcggtgaaaaagaccccgcggcccaaggcggcagatctgccttggttccttctgtccggggccgcgggcttcgctctctacctcctggccttcaaccgtggttcggcctggctcagcccgactacaagctgcctggtcatttcgaccgcgcccctgattaccgcgctcctggccagccgtttttttggggagggcttgaccgccgcgggctggggggctatggtgtcggctttcggcggggtcgccctcctgatgctgggccagggcggagtggcttttaccctgggcgtcttctggatgctcctggcctctttattaataagcctttacaaccttatccagcggaaactggccgccggccgcgatacgctgaccatcacggcctacagttttttcgccgccgccctcctcctggcctggggtgcggcggacgccgtcgcggaatgccgccaggctcccccgggtggtttagcggtcgccgtttacctgggggtgttccccagcgccctggcctatcttttgtgggccaaggccctggccctggcctcgcagaccagcgtggtgaccaaccatatgtatttgacgccgctcttgtccctgcttctggagtatctgattctggccgagacgccgggtctcggaaccttcctgggcggggccgtaatcctgggcagcctggttttatttcatcttaa

SEQ ID NO: 75070 - protein, 267 aa, Unknown
  Obtained from environmental sample
  misc_feature (1)..(267): Xaa is any amino acid
MVFGLCLHQGGPGALQRRQPGFFALRGGRRGSGRGLGGEKDPAAQGGRSALVPSVRGRGLRSLPPGLQPWFGLAQPDYKLPGHFDRAPDYRAPGQPFFWGGLDRRGLGGYGVGFRRGRPPDAGPGRSGFYPGRLLDAPGLFINKPLQPYPAETGRRPRYADHHGLQFFRRRPPPGLGCGGRRRGMPPGSPGWFSGRRLPGGVPQRPGLSFVGQGPGPGLADQRGDQPYVFDAALVPASGVSDSGRDAGSRNLPGRGRNPGQPGFISS

SEQ ID NO: 75071 - DNA, 624 bp, Unknown
  Obtained from environmental sample
  misc_feature (1)..(624): n is a, c, g, or t
atgaccgtcgcacttgctttagccgttatgctaaacagaaaattcttcggccgtacttttttccgcggttttttttactttcctgcggttatcgcaggcattgccacggcgctcatctggcgctggatttataatccgagttttggttttatcaaccagatgtttttatcattggggattgattatcagcaaagctggatatcaaatcctaaaaccagtttgtacgcggtatttaccgcctctctgtggcagtccgtcggggcgccgatgattttcttccttgcggggcttcaaaccgttcctgaggaaatactggaagcggcgcttattgacggtgcgtcaaatatgcggcgctttgtagtcgttactattcccatgatgaaagagacgtttgtcattgttatcgccaatcttattgtgggagccatgaaggtgtttgatgtggttatggggctgactgcgggaggccccaacgacgcgacacagatgatgtctacatatatgtactcccaaacattcaggtataacaatgtcggttatggtaccgccatcgcggttctgatggttgtatttatgatgatggtaattattccctatatccgctttaccgcggccagagattaa

SEQ ID NO: 75072 - protein, 207 aa, Unknown
  Obtained from environmental sample
  misc_feature (1)..(207): Xaa is any amino acid
MTVALALAVMLNRKFFGRTFFRGFFYFPAVIAGIATALIWRWIYNPSFGFINQMFLSLGIDYQQSWISNPKTSLYAVFTASLWQSVGAPMIFFLAGLQTVPEEILEAALIDGASNMRRFVVVTIPMMKETFVIVIANLIVGAMKVFDVVMGLTAGGPNDATQMMSTYMYSQTFRYNNVGYGTAIAVLMVVFMMMVIIPYIRFTAARD

SEQ ID NO: 75073 - DNA, 900 bp, Unknown
  Obtained from environmental sample
  misc_feature (1)..(900): n is a, c, g, or t
atgatcttcaattttccaaaatactgtgaacgttgggatctttttgaagtttcctgttccggttatgacgacaagaacccatatctggattattcaatacagggaatatttaagcataagaatgagacgataaaaacagacggtttntacgacgggaatggcatatacaaggtacgctttatgccatcctttaccggagactattcttttgaaatatcaggcagtttttccgagaaaacctgtcaaggtgaatttaaagcgggacacgccgccggcaataaccacggcccggtcagggtagccaatacctgtcactttgtatacgacgacggaaccccttactatcccgtagggactacctgttatgtgtgggaattgcagagtgatgaattacaaaagaagacgcttgaaacactatcgaaaggcccgttcaacaaaatcaggttttgcctttttcctaaacactatgactacaatctgaaggaacccaggtcatatccttatgaagggaaacctatggacagttccattctaaccaaagaaaattttatgcgctacactggcgcagggaaggaagcggggaatgaatgggatttttcccgttttaaccccgggcattttcaacatatcgacaaatgtatcgccgcattgcgtgatttgggcatagaggccgacttgatcgtaatgcacccatacgaccgctgggggttcagcgcgatgacggcggaagaggatgaccgttattggaaatacgtgattgcccgatatgcggcatatcgcaatgtatggtggtcattggcgaacgaatacgatctcatgcctcaaaagaaaataagcgattgggagcgttatgcgtccatcatctgtgagaaagatcctataaccatcccgtcgatctga

SEQ ID NO: 75074 - protein, 299 aa, Unknown
  Obtained from environmental sample
  misc_feature (1)..(299): Xaa is any amino acid
MIFNFPKYCERWDLFEVSCSGYDDKNPYLDYSIQGIFKHKNETIKTDGXYDGNGIYKVRFMPSFTGDYSFEISGSFSEKTCQGEFKAGHAAGNNHGPVRVANTCHFVYDDGTPYYPVGTTCYVWELQSDELQKKTLETLSKGPFNKIRFCLFPKHYDYNLKEPRSYPYEGKPMDSSILTKENFMRYTGAGKEAGNEWDFSRFNPGHFQHIDKCIAALRDLGIEADLIVMHPYDRWGFSAMTAEEDDRYWKYVIARYAAYRNVWWSLANEYDLMPQKKISDWERYASIICEKDPITIPSI

SEQ ID NO: 75075 - DNA, 666 bp, Unknown
  Obtained from environmental sample
  misc_feature (1)..(666): n is a, c, g, or t
atgaaaaaatttaatgtaacaggaaattgtttgcctgatatgcactacatggttgataccagtaacaagatagaaaagatttttcagttggtagaagaaaaatcatactttacaatcaatcgcggtcgtcagttcggtaagacaacgacgctcggcttgctggaaaaacggttgccgaaggattatatttgtgcgagtataagttttcaggatacaactaaaaagatgtttgaaagcgagaaaggtttttgtcaggaattgcttgataaaatctttgttatattagatttaacagaccctgaagaagcaaaaaaatgggttgatgaatctgtaaccgattttagattattgagtaagttcattacaaaaatatgcaaaaataaaaaagtagtcttaattatagacgaatctgatgaagcgtcaaataatgaaatttttgtcatgtttctaaaaatgcttcgcgagaaatatctccttagaaatgcagggaaagattatacatttcacagcgtcatccttgcaggagtttatgatataaaaaatcttaaatataagatagcgttatccggcaattataccccaagcacaggcgaaagcgcccaaaattccccatggaacattgcagtggactttgaaagtgacatgtctttttctgcaaagagatag

SEQ ID NO: 75076 - protein, 221 aa, Unknown
  Obtained from environmental sample
  misc_feature (1)..(221): Xaa is any amino acid
MKKFNVTGNCLPDMHYMVDTSNKIEKIFQLVEEKSYFTINRGRQFGKTTTLGLLEKRLPKDYICASISFQDTTKKMFESEKGFCQELLDKIFVILDLTDPEEAKKWVDESVTDFRLLSKFITKICKNKKVVLIIDESDEASNNEIFVMFLKMLREKYLLRNAGKDYTFHSVILAGVYDIKNLKYKIALSGNYTPSTGESAQNSPWNIAVDFESDMSFSAKR

SEQ ID NO: 75077 - DNA, 462 bp, Unknown
  Obtained from environmental sample
  misc_feature (1)..(462): n is a, c, g, or t
atggtattaaaatactcattagtagaaaatctactaacagacagagaagacgactactctgctcaggctcacgcggctgcgagcctcgacattgaagccgtgatacagagaatgttacagcgggggactttgcttacccgtacagacattcttgccgtttggaacaacctctgcgaaacggtgaaagatgtgcatctggaggggaacacgattaacacccctctgtttaacacttctttctctatttcaggggtgtttgacagtccgttggacagttttgacccaaacaggcataaactcaacattaacgttacaaaaggctccatcttgcgggacgccgaaaaaaacgtcaaagttgagaaaacaaacgttccgctgccacatcctcaaattcaggaagtaaaggacagcattagcggtgctgtcaatctcgtgccgctcggccgatctgatcattgttaa

SEQ ID NO: 75078 - protein, 153 aa, Unknown
  Obtained from environmental sample
  misc_feature (1)..(153): Xaa is any amino acid
MVLKYSLVENLLTDREDDYSAQAHAAASLDIEAVIQRMLQRGTLLTRTDILAVWNNLCETVKDVHLEGNTINTPLFNTSFSISGVFDSPLDSFDPNRHKLNINVTKGSILRDAEKNVKVEKTNVPLPHPQIQEVKDSISGAVNLVPLGRSDHC

SEQ ID NO: 75079 - DNA, 570 bp, Unknown
  Obtained from environmental sample
  misc_feature (1)..(570): n is a, c, g, or t
atgatcagatcggccgagcggcacgaggatttattcgataatacgatttattcgaattccatagatgataaatataggtatgctctcggaacgaaaggagagaatacactttattgtttcgggataaacccaagtaccgccactcctgaaaaatatgatccaacgataacacgagtcagccgagttgccagcagattgggctttgactcattcgtaatgcttaatctttatccgcaacgggcaacggatccggctgatctggacaaagaagctaatcgggaagaacataaaaagaatttgtatgcggtagatttgatcaaggatggttcctatatttgggccgcttggggcgatttgattaatgtgagaccttatttaaaagattgcctgacccaaattcaatatatagtgcagtttttcaagaggaatgttcattgggtaaaaatgggagatttaactaaaaatggaaatccaaggcatccgctttatttgaaatatcagccgttttccgaatacgaagtcagaaagatagaatcgtccgaatattaccaaaatgtattaaacagatag

SEQ ID NO: 75080 - protein, 189 aa, Unknown
  Obtained from environmental sample
  DOMAIN (26)...(162): Protein of unknown function (DUF1643)
  misc_feature (1)..(189): Xaa is any amino acid
MIRSAERHEDLFDNTIYSNSIDDKYRYALGTKGENTLYCFGINPSTATPEKYDPTITRVSRVASRLGFDSFVMLNLYPQRATDPADLDKEANREEHKKNLYAVDLIKDGSYIWAAWGDLINVRPYLKDCLTQIQYIVQFFKRNVHWVKMGDLTKNGNPRHPLYLKYQPFSEYEVRKIESSEYYQNVLNR

SEQ ID NO: 75081 - DNA, 588 bp, Unknown
  Obtained from environmental sample
  misc_feature (1)..(588): n is a, c, g, or t
ttgcaggttgatagttctcggttcccattctataattcccttatggccggatataccaacaactttaatgacgagctgcgcgcgcggctgtccatagtcgacatagtcggccggcgcgtcccgctgaccaaaaagggcaaggacttctggggatgctgcccgtttcataacgagaagacgcccagcttcaaggtcagcgaggatatcggcagatactattgctttggctgcggggaaaagggcgacataatatcgttcatgatgaagacccagaatatgcagtatccggaggcaatccgcgagctggcggacatcgccggcatcaaggtcccggaatacaagccgaaagaccctgcgaccgccgcaagggagcagtcgtatttcgaaatcatggaatcggcggcaaagatatacggcgaccggcttttttctccggatggggaattcgcgctgaattatatcaggaaacgcggcctttcggacgagaatataagaaaataccgcatcggatacgcgccgggcggaagcataatcgcgaacaaattcgcaagccagaaactggcgaacctgcttgcgaccggccggtaa

SEQ ID NO: 75082 - protein, 195 aa, Unknown
  Obtained from environmental sample
  DOMAIN (137)...(195): DNA primase catalytic core, N-terminal domain
  misc_feature (1)..(195): Xaa is any amino acid
MQVDSSRFPFYNSLMAGYTNNFNDELRARLSIVDIVGRRVPLTKKGKDFWGCCPFHNEKTPSFKVSEDIGRYYCFGCGEKGDIISFMMKTQNMQYPEAIRELADIAGIKVPEYKPKDPATAAREQSYFEIMESAAKIYGDRLFSPDGEFALNYIRKRGLSDENIRKYRIGYAPGGSIIANKFASQKLANLLATGR

SEQ ID NO: 75083 - DNA, 414 bp, Unknown
  Obtained from environmental sample
  misc_feature (1)..(414): n is a, c, g, or t
gtggaaaagtttctgcttgaactcggggccggtttcgcttttttaggccggcagtatcacctggcggtgagcgatcaagatttttatattgacctgcttttttatcataccaagctgcattgctatgtggtgattgaattgaagtccggcaattttaagccggaatatgtcggcaaggtaaatttttactgttcggcggtggatgatattttaaggcacgaactggataatcccactatcggcctgatcctctgccaaacaaatgaccgggtcatcgttgaatataccttaaaaaaagtaaacacacccataggcgtttccgaatatgaattgactcgggctttgccggaaaatcttaaatccagcctgcccacgattgaagaacttgaaaatcggcttgaagagagtatgtga

SEQ ID NO: 75084 - protein, 137 aa, Unknown
  Obtained from environmental sample
  DOMAIN (1)...(126): Protein of unknown function (DUF1016)
  misc_feature (1)..(137): Xaa is any amino acid
MEKFLLELGAGFAFLGRQYHLAVSDQDFYIDLLFYHTKLHCYVVIELKSGNFKPEYVGKVNFYCSAVDDILRHELDNPTIGLILCQTNDRVIVEYTLKKVNTPIGVSEYELTRALPENLKSSLPTIEELENRLEESM

SEQ ID NO: 75085 - DNA, 321 bp, Unknown
  Obtained from environmental sample
  misc_feature (1)..(321): n is a, c, g, or t
atggtggttttcaggccactttcccgtgaacacctgctgcgcattgtcgagatcatgctttcggacgtacgacttcgtctaggagaacaaggcatcggtatcggtgtggaagacgaggcaaaagaaattatcctgaaaaaaggtttccagccaaaatttggagcacgtccgctgaggcgagccatccagtccatgattgaggataaattggccgactccgttctttccggacgaatcggcaagggggataccgttacagtcagcgtctcggacgacgatatttttttcggaatcgaggaaacagcattagataaagcataa

SEQ ID NO: 75086 - protein, 106 aa, Unknown
  Obtained from environmental sample
  misc_feature (1)..(106): Xaa is any amino acid
MVVFRPLSREHLLRIVEIMLSDVRLRLGEQGIGIGVEDEAKEIILKKGFQPKFGARPLRRAIQSMIEDKLADSVLSGRIGKGDTVTVSVSDDDIFFGIEETALDKA

SEQ ID NO: 75087 - DNA, 933 bp, Unknown
  Obtained from environmental sample
  misc_feature (1)..(933): n is a, c, g, or t
gtgggctttgtcacaattcgcctctttaaaatccggtggaaaaattttttcgagatcaacganatagctctaaaggaaactctgcgtgacgcgagagaaatcgccgggccggaaggaatattagctgtgaactgcatggtggcgctgaccgattacgacaggcacgtgcgcgcatcggccgagggtggtgtaaacgtcatcatatccggcgccggattgccactgaggttgcctgagtacacgaaggattttccggatgtggccttggtgcccatcgtcagctcggcaaaagcggccagcctgatagcgcgccggtgggaaaaacagtattctcgcagccctgatggctttgttgtggagacgccagctacggcaggaggtcatctgggagccacgacgatggagcaggtatacgatccagcgttgtcccttgaagttgccttgccagacgtggtgcgttttgtatctgaagaaatgaaatctgatattcctgtcattgcagccggtggtatctgggaccgcaacgacatggaacgcgcgttcgcttggggggcgaaaggcgtacaaattggtactcgtttcgcatgcacggtggagggtgacgcttctgaccgttttaaacaggcattcatcgacgcaaaagaggaggacgtggtgctgatccaaagcccagcgggccttccggggcgcgcaatcaaaaaccctttcgtggcgaagtatctgggaggcgaggttgagagtcgcccttgttttgccaattgcctgactcactgtcgctaccggaaaacgcgggagaccttttgcattgccatggcactggtggacgccttgaacggcgattgggagcgaggtcttttcttctgtggcagcaacgtcgttaaagccaacaaaatggagacggtttcggaaattgtgaacgaccttttcggatag

SEQ ID NO: 75088 - protein, 310 aa, Unknown
  Obtained from environmental sample
  DOMAIN (10)...(310): 2-nitropropane dioxygenase
  misc_feature (1)..(310): Xaa is any amino acid
MGFVTIRLFKIRWKNFFEINXIALKETLRDAREIAGPEGILAVNCMVALTDYDRHVRASAEGGVNVIISGAGLPLRLPEYTKDFPDVALVPIVSSAKAASLIARRWEKQYSRSPDGFVVETPATAGGHLGATTMEQVYDPALSLEVALPDVVRFVSEEMKSDIPVIAAGGIWDRNDMERAFAWGAKGVQIGTRFACTVEGDASDRFKQAFIDAKEEDVVLIQSPAGLPGRAIKNPFVAKYLGGEVESRPCFANCLTHCRYRKTRETFCIAMALVDALNGDWERGLFFCGSNVVKANKMETVSEIVNDLFG

SEQ ID NO: 75089 - DNA, 828 bp, Unknown
  Obtained from environmental sample
  misc_feature (1)..(828): n is a, c, g, or t
gtggtgatgatcagtgacggagacgccgggaaccgggccgccctgacagctatctccaataccactgccctcctaaaccgaaggggcacggatttccagtacatcagcgtccccatctccaggaggccgtcggtcgcgtctcagccgccctccgttacccagacgcccagccaaaacgcgaccacgccgacccagaccacgcccgctcagacgcccagccaagccgcgacagcgccgacccagaccgcgcctgttactcagacgcccagccaggccgcgaccacgccgacccagaccgcgcccgctcagacgcccagccaggccgcgaccacgccgacccagaccgcgcccgctcagacgcccagccaggccgcgaccacgccgacccagaccacgccgagtacccagaccccgagtcaagccgcgacagcgccaactcagacagcgcccgttactcagacgcccagccaagccgcgacagcgccgacccagaccgcgcctgcccagacgcccagccagcccgcgactacgccggctcagaccacgcccgcccagacgcccagccaggccgcgacaacaccatctcagactgcgccggctcagacgcccagccaagccgcgaccacgccgacccagaccacgcccgttactcagacgcccagccaggccgcgacaacaccatctcagactgcgccggctcagacgacgcccagccagactgcgccgggaggtactcangctccggcaacccggcctttcactgcgccgagtactgctgcctcttcctcagntcctggggttgcaatgagttctctgacctttatatag

SEQ ID NO: 75090 - protein, 275 aa, Unknown
  Obtained from environmental sample
  misc_feature (1)..(275): Xaa is any amino acid
MVMISDGDAGNRAALTAISNTTALLNRRGTDFQYISVPISRRPSVASQPPSVTQTPSQNATTPTQTTPAQTPSQAATAPTQTAPVTQTPSQAATTPTQTAPAQTPSQAATTPTQTAPAQTPSQAATTPTQTTPSTQTPSQAATAPTQTAPVTQTPSQAATAPTQTAPAQTPSQPATTPAQTTPAQTPSQAATTPSQTAPAQTPSQAATTPTQTTPVTQTPSQAATTPSQTAPAQTTPSQTAPGGTXAPATRPFTAPSTAASSSXPGVAMSSLTFI

SEQ ID NO: 75091 - DNA, 543 bp, Unknown
  Obtained from environmental sample
  misc_feature (1)..(543): n is a, c, g, or t
ttggctgggcgtctgagccggcgcagtctgagatggtgttgtcgcggcctggctgggcgtctgggcgggcgtggtctgagccggcgtagtcgcgggctggctgggcgtctgggcaggcgcggtctgggtcggcgctgtcgcggcttggctgggcgtctgagtaacgggcgctgtctgagttggcgctgtcgcggcttgactcggggtctgggtactcggcgtggtctgggtcggcgtggtcgcggcctggctgggcgtctgagcgggcgcggtctgggtcggcgtggtcgcggcctggctgggcgtctgagcgggcgcggtctgggtcggcgtggtcgcggcctggctgggcgtctgagtaacaggcgcggtctgggtcggcgctgtcgcggcttggctgggcgtctgagcgggcgtggtctgggtcggcgtggtcgcgttttggctgggcgtctgggtaacggagggcggctgagacgcgaccgacggcctcctggagatggggacgctgatgtactggaaatccgtgccccttcggtttag

SEQ ID NO: 75092 - protein, 180 aa, Unknown
  Obtained from environmental sample
  misc_feature (1)..(180): Xaa is any amino acid
MAGRLSRRSLRWCCRGLAGRLGGRGLSRRSRGLAGRLGRRGLGRRCRGLAGRLSNGRCLSWRCRGLTRGLGTRRGLGRRGRGLAGRLSGRGLGRRGRGLAGRLSGRGLGRRGRGLAGRLSNRRGLGRRCRGLAGRLSGRGLGRRGRVLAGRLGNGGRLRRDRRPPGDGDADVLEIRAPSV

SEQ ID NO: 75093 - DNA, 687 bp, Unknown
  Obtained from environmental sample
  misc_feature (1)..(687): n is a, c, g, or t
ttgcgcatacctataacgataaccgaaactggtgtagatacgtccatgttccgcccgcttgagtatcagttgcaggagcgttttgtttctgtgtaccatcaggataaaccggcttctgtgctgtacttgctccagagcaaaaaacagcctctttactccctcaatgggttaattgttgaaaatgattctcccggccttatctatcacaatatagggacaacagggtctatggcaactcattacaatgcaaatcccttgttctttgagcaacttcccatattgtcgccagaccttgttattgtatcgtttgggacaaatgaatcgttcagcaacatttctacggaaaaatttattgcggagatagagatgctcatcaataatatcagaataacctgccacaatgttccaattctgataattacgccgccaatttcgctgttgcaccaaaaaagatggaacacatatatcttagaatattccgaagctctgctacggaaagataacgttgctatatgggatttgtactcttttacaaaagggcttatggggtcagatgaaaaattttcagcggtaaaaatttcccatgattacatacattataccagcgaagggtatctcaatcagggaactgagtttgtctttgactttcttaatgaatataaattttataaacggagccatgaatga

SEQ ID NO: 75094 - protein, 228 aa, Unknown
  Obtained from environmental sample
  misc_feature (1)..(228): Xaa is any amino acid
MRIPITITETGVDTSMFRPLEYQLQERFVSVYHQDKPASVLYLLQSKKQPLYSLNGLIVENDSPGLIYHNIGTTGSMATHYNANPLFFEQLPILSPDLVIVSFGTNESFSNISTEKFIAEIEMLINNIRITCHNVPILIITPPISLLHQKRWNTYILEYSEALLRKDNVAIWDLYSFTKGLMGSDEKFSAVKISHDYIHYTSEGYLNQGTEFVFDFLNEYKFYKRSHE

SEQ ID NO: 75095 - DNA, 555 bp, Unknown
  Obtained from environmental sample
  misc_feature (1)..(555): n is a, c, g, or t
atgaagctctccatgtttcataaccgagaactgctccgtagtgtcctgcccaaactccgcgacctggctccaacggcagcgatttgggactccatccaggctcccacgggtggcgcggagctccacatcatggatactttggtcgaggcggtcgagatgctttcggacagaggatgggtggtttcgccgaacctgcctgacgcccgggcactggcggacatgccggacgccccactggagagcgtggcggaacggctgctggacattggattcccgggcgtgtggattaaaaggggccacggagcccgtggaaccgtgcgcgatctctggtgcaacagcagcggacccgcgtggctggagccgcacctgacgctggcaggcgatccaaggggcactggatgcactgccaccgctgcttggatcgtcctgcgcctgaacggggttggacctgcgcaagcgactgagggcgcggccgcccacgagagaaacgcgtggtcttggctgcatttcaccgggggtgtgggacagaccacattcacaccaaaggtcatatga

SEQ ID NO: 75096 - protein, 184 aa, Unknown
  Obtained from environmental sample
  misc_feature (1)..(184): Xaa is any amino acid
MKLSMFHNRELLRSVLPKLRDLAPTAAIWDSIQAPTGGAELHIMDTLVEAVEMLSDRGWVVSPNLPDARALADMPDAPLESVAERLLDIGFPGVWIKRGHGARGTVRDLWCNSSGPAWLEPHLTLAGDPRGTGCTATAAWIVLRLNGVGPAQATEGAAAHERNAWSWLHFTGGVGQTTFTPKVI

SEQ ID NO: 75097 - DNA, 528 bp, Unknown
  Obtained from environmental sample
  misc_feature (1)..(528): n is a, c, g, or t
atgaatattctgttcgcgcttattcttattgcctcgggcgttgtgtttttagttataaaccccgcgctgtttttgccgtcgcttataacgggtggaactgcgggcgtgacctttgctctaaagcttattccgatttacgccgtgtggcttgcggccctaagggtgctggagcgcgggggtatcgataagggcattgcaaggcttatttcccccattacaaagaagctttttccaaaagaggccgaggcgacctatacgtttattaacctaaacctcgcggcgaatttactcggtatgggcggcgcaagcacccctcttgggataaaagccgtagaaaccatgcagcacaaaaaaaacaaggtcatgctgattgttattaacagtacctcggttacccttatccccactacgataatatcgctgcgcgcggcgtcgggcggcttttcggatataattttgcctgccctagntaccacttttgtgacaacctttatcgggattttgcttgtaaaggtgtttcaaaagtga

SEQ ID NO: 75098 - protein, 175 aa, Unknown
  Obtained from environmental sample
  SIGNAL (1)...(17)
  misc_feature (1)..(175): Xaa is any amino acid
MNILFALILIASGVVFLVINPALFLPSLITGGTAGVTFALKLIPIYAVWLAALRVLERGGIDKGIARLISPITKKLFPKEAEATYTFINLNLAANLLGMGGASTPLGIKAVETMQHKKNKVMLIVINSTSVTLIPTTIISLRAASGGFSDIILPALXTTFVTTFIGILLVKVFQK

SEQ ID NO: 75099 - DNA, 720 bp, Unknown
  Obtained from environmental sample
  misc_feature (1)..(720): n is a, c, g, or t
atgggcaaagatacaatcaagaagcacttggatttgttggcgctgcacaagatcaacacatttcactggcatttgactgatgaccaaggatggcgcatagagatcaaaaaatatcccaagctgacaacggtaggggcatggagagagacaacaatgatccccccataccgtaacaaggccgagcagcgccgatatgacggtattccacatggtggctttcacactcaagaggacataaaggaaatagtcaattacgcagccgacagattcataaccgttgtcccagagatagaagtgccagggcacgctagggccgccattgcggcatatccacagttgggcaacttcccagatcaaaatgttacggtcgcttctatttggggggtacatcgcgaagtgttcaacgtcagcgatgagacgatacagttcttcaaagacgtgcttgacgaggtgcttgcactgtttccttccaagtttatccacatgggtggcgatgagtgtccaaagtacgagtgggccagaagcgagagtgcgttggttagaatgaagcaaattggcctcgtggaggccgacgcaacattggagactatccgaaattacgtgaacgcagatgggagaagagccgagcatcccgccctgcacggactccaaagctggttcgtngagcaatttgattcgtatttggcatcgaaaggccgcccgcttgatagggtgggatga

SEQ ID NO: 75100 - protein, 239 aa, Unknown
  Obtained from environmental sample
  DOMAIN (1)...(238): Glycosyl hydrolase family 20, catalytic domain
  misc_feature (1)..(239): Xaa is any amino acid
MGKDTIKKHLDLLALHKINTFHWHLTDDQGWRIEIKKYPKLTTVGAWRETTMIPPYRNKAEQRRYDGIPHGGFHTQEDIKEIVNYAADRFITVVPEIEVPGHARAAIAAYPQLGNFPDQNVTVASIWGVHREVFNVSDETIQFFKDVLDEVLALFPSKFIHMGGDECPKYEWARSESALVRMKQIGLVEADATLETIRNYVNADGRRAEHPALHGLQSWFVEQFDSYLASKGRPLDRVG

SEQ ID NO: 75101 - DNA, 798 bp, Unknown
  Obtained from environmental sample
  misc_feature (1)..(798): n is a, c, g, or t
atgcacttgctggaggaaaaaatgagtgagcaaactttaacaaaacaagctgacgagaaattttgcagttcttgtggagcagttgtgaaaatagcagcggaaatatgcccaaaatgcggagttcggcaaactgctgaacaaagcaaatcaagttggaaaacgctattttatatatcttttcttatcggctatctcggtgcagatagattttacgttgggaaaataggttctggtattctcaaactaataactgtgggcggttgtggaatatggtggcttatagatttattcgttattgcaggtggtagatttacagatgcttctggaaaatttattgaaaagaaaggagaaagagcaataaagcattttatcattgcttttatcataatgtcgtttggcatcggaattcttgggaatattggtaaaaattcggagccttcctcaactggttcagataatggaactgtttctcaaccggcaaaaaacacaaaagctcctatagcggaattaactgcatcgcaattattcagtgaatatgaggataacgaagtagctgcggacaatgcctacaaaggaaaatggataaaggtttctggtaccgtagaaagcataggaaaagacatattagatgatccttatattaccttcaaaacaggaaatctcgcctttagtgttcaggtatattttgatgatgcaagcaaattaggcagtattaaaaaaggacaaaaacttagcatcataggaaaatgtgatggtaagttggggaacattttcgttaaatatgcattttttgaataa

SEQ ID NO: 75102 - protein, 265 aa, Unknown
  Obtained from environmental sample
  DOMAIN (48)...(97): TM2 domain
  misc_feature (1)..(265): Xaa is any amino acid
MHLLEEKMSEQTLTKQADEKFCSSCGAVVKIAAEICPKCGVRQTAEQSKSSWKTLFYISFLIGYLGADRFYVGKIGSGILKLITVGGCGIWWLIDLFVIAGGRFTDASGKFIEKKGERAIKHFIIAFIIMSFGIGILGNIGKNSEPSSTGSDNGTVSQPAKNTKAPIAELTASQLFSEYEDNEVAADNAYKGKWIKVSGTVESIGKDILDDPYITFKTGNLAFSVQVYFDDASKLGSIKKGQKLSIIGKCDGKLGNIFVKYAFFE

SEQ ID NO: 75103 - DNA, 438 bp, Unknown
  Obtained from environmental sample
  misc_feature (1)..(438): n is a, c, g, or t
gtggtcgaaatgtttgggaacgatatttccatgatcatcgacacgctggtcaacgatctcctggaaaacagctttggccatgacgagatgcgcttcagcgatcatgtctttgaggccttcatggaattgcgcgatttcaattaccggaacatctacaccaacaggcgcacaacccaggagcatcgcaaggtggaacgcatcatctctattttatatgagggctatgccgccgagatggatatgggcttccacgagcatacggtcttcgcgcactactgccagaaattcgggaaaaagtacattcagcaaaacggcaaacgcgcgatcatcgacttcctggccggcatgaccgacgactatctgatcaaccagttccgcgccgcctatatgcccgacagctccgggtacaaaatcagcgagagccatcacccgaggtaa

SEQ ID NO: 75104 - protein, 145 aa, Unknown
  Obtained from environmental sample
  misc_feature (1)..(145): Xaa is any amino acid
MVEMFGNDISMIIDTLVNDLLENSFGHDEMRFSDHVFEAFMELRDFNYRNIYTNRRTTQEHRKVERIISILYEGYAAEMDMGFHEHTVFAHYCQKFGKKYIQQNGKRAIIDFLAGMTDDYLINQFRAAYMPDSSGYKISESHHPR

SEQ ID NO: 75105 - DNA, 660 bp, Unknown
  Obtained from environmental sample
  misc_feature (1)..(660): n is a, c, g, or t
gtgctgcgatcaatctacaatgccaaagaaggaattcttctcctatccggcaaacaaggatcaggaaaaacaacaggcatgagttccatcttgagagcctttatccgccgcaaccgcggattgggtctgatgttcgaagcgccgccggaatataaaatctccggacctgtcatggaaaaagacgaattccggggacatatcaaccaggtagccctgaccacggaaaaaagttttacggcagcggcgtctaacgccttgcgcgccgcttcgccggaagcggtggtttatggagaattgcggctggaagaaggggtactggatattttgaaccattccctgtctggccatctgattatgacgagtttgcacgcagtatcggcgggcgcggcggttgaacgcttcctggcgatggcctgcgccggaaatccgcagctgcgcgcgtactgtgcgtcaaccctggcgacaagtttccggggttgtttacatcaaaacctggtaacggaaaacggacgcaaaaccttgcagctgacctggctggaaccaagtgacaccgtacgcgcggcgatcttccgcgatgcctgccataccctggacgaacaggcggaactgcaacagaacaaacggaacgccaaggcgaatatcctcaaatccatgacgtaa

SEQ ID NO: 75106 - protein, 219 aa, Unknown
  Obtained from environmental sample
  misc_feature (1)..(219): Xaa is any amino acid
MLRSIYNAKEGILLLSGKQGSGKTTGMSSILRAFIRRNRGLGLMFEAPPEYKISGPVMEKDEFRGHINQVALTTEKSFTAAASNALRAASPEAVVYGELRLEEGVLDILNHSLSGHLIMTSLHAVSAGAAVERFLAMACAGNPQLRAYCASTLATSFRGCLHQNLVTENGRKTLQLTWLEPSDTVRAAIFRDACHTLDEQAELQQNKRNAKANILKSMT

SEQ ID NO: 75107 - DNA, 804 bp, Unknown
  Obtained from environmental sample
  misc_feature (1)..(804): n is a, c, g, or t
gtgccccggaccgtgctgctgtcctgcctggcggggcttggcatgctgctgctcgccatgaaccccatgctgcaatcctttgaagcgcccaccgtggccttcgtggtgctggccatcatcttcatgaactggtttggccggtcgcccattttcgccaggattcccaccgggcttctcctcatcgtatccggcaccgccctggcctggctgttcggcctgcaagacccggcggccatcgccaagaccttgaaagatttcggcttcaacccgcctggaatccatgtggacagcctgttccgcggcattccgcatgcgctgccctatcttgcctccgccgtgcccctgggacttgccaactatatcttcgaccttgaaaacattgaagcctcccacgccgccggcgacccctataacaccaagaaggtgctgcttgccaatgcgagcgcctcccttctcggctgctgttgcggcaaccccttcccggtcaccgtctatgtcggtcatgccggctggaaggcgcttgggggcagcatcggctacaccatcgccaccggcgcctccatgctgctcatcgctcttttcggcctcggcgcgtttctcctggcgatcattcccatatacgcccttgcgccaatcctgatcttcatcggggtggtcacctgcaaccaggtcgtgcgtgaaacggacaagcgggaggttcctgtcattttcatctgcatgttcccctggatcgccaactggtgtctgaccattgtcaacaacgccctgaacgcggcaggaacanggnccgcgcagtcgctttga

SEQ ID NO: 75108 - protein, 267 aa, Unknown
  Obtained from environmental sample
  SIGNAL (1)...(28)
  misc_feature (1)..(267): Xaa is any amino acid
MPRTVLLSCLAGLGMLLLAMNPMLQSFEAPTVAFVVLAIIFMNWFGRSPIFARIPTGLLLIVSGTALAWLFGLQDPAAIAKTLKDFGFNPPGIHVDSLFRGIPHALPYLASAVPLGLANYIFDLENIEASHAAGDPYNTKKVLLANASASLLGCCCGNPFPVTVYVGHAGWKALGGSIGYTIATGASMLLIALFGLGAFLLAIIPIYALAPILIFIGVVTCNQVVRETDKREVPVIFICMFPWIANWCLTIVNNALNAAGTXXAQSL

SEQ ID NO: 75109 - DNA, 957 bp, Unknown
  Obtained from environmental sample
  misc_feature (1)..(957): n is a, c, g, or t
atgcgcttagtcaaatcaacgttattccaatatgattctgtaacgccgccctgggttntgaaaaattatccccgggtagaaaacattctgcattttttacggagcctgaaatgttcatcatgcgagtattgtgatgaagcattagatgaaaccaaggcattaaaacggttttttcattttaatgaattcagaagttacaacggaataccgcttcaaaaaatggcggtaaaagccgcagtagataataaacctatacttgtaatatttccgacaggcggcggtaaatcaatcacgtttcaactgccagcacttatggcagggataaacgaaaaaggtttgacggtagttatttcaccgcttcaatcccttatgaaagatcaaaccgataaccttgaaaatcaacaccatatcacagaagcggtaaccataaatagttcactagatccgctcgaaagagccaaagcttttgaacgggtagaaggtggttcggcaagcattttatacatatcgcctgaatccttgcgctcaaattcaatcgaaatacttttgttgaaaagaaatgtagtcagattcgttattgatgaggcacattgcttttcctcatgggggcaggattttcgggttgattatctgtatatcggcgattttatccgtaacttgcaagaaaaaaaagatatgccacagaatattcccgtttcgtgttttacggcaacggcaaagcaaaaggtaatagcagacatcaagaattattttaaggaaaagctgtcacttgatcttgaagtattcaaggcaagcgcgacgcgttcaaatttaagttatcacattctcagcgaagaagatgacgctgaaaaatatctaaaactgcgccaacttataacagacgatgattgtccgactattgtctatgtcgcacgcacaaaacaaaccgaacgactcgtgccgctcggccgaatctga

SEQ ID NO: 75110 - protein, 318 aa, Unknown
  Obtained from environmental sample
  DOMAIN (69)...(247): DEAD/DEAH box helicase
  misc_feature (1)..(318): Xaa is any amino acid
MRLVKSTLFQYDSVTPPWVXKNYPRVENILHFLRSLKCSSCEYCDEALDETKALKRFFHFNEFRSYNGIPLQKMAVKAAVDNKPILVIFPTGGGKSITFQLPALMAGINEKGLTVVISPLQSLMKDQTDNLENQHHITEAVTINSSLDPLERAKAFERVEGGSASILYISPESLRSNSIEILLLKRNVVRFVIDEAHCFSSWGQDFRVDYLYIGDFIRNLQEKKDMPQNIPVSCFTATAKQKVIADIKNYFKEKLSLDLEVFKASATRSNLSYHILSEEDDAEKYLKLRQLITDDDCPTIVYVARTKQTERLVPLGRI

SEQ ID NO: 75111 - DNA, 888 bp, Unknown
  Obtained from environmental sample
  misc_feature (1)..(888): n is a, c, g, or t
atggacacattccaagctatatccatcggaagcgcggcgtcgaggaaatcgactatctgcatccgncttttgaagccggtgcttgaggagacctacggcatcatgatctatcaggagcaggtgatgcaggcggcgcaggtgctggcgggatacgacctgggttccgccgacctgctgcggcgcgccatgggcaagaaaaagaaggacgagatggacaagcaacgcagcgtgttcgtgcaggggtgcgagaaatgccagggcatcggcgcggatttggcctcttcgattttcgatgtgatggagcgcttcgcctcttacggtttcaacaaggcccatgcggcgggatacgccgtcatatcctatcagacggcctacctcaaggcgcactatccggcggaattcatcgccgcgtccatgagcttcgacctggatcgcgcggagaagctcgccgctttcgtcgaagacgcagaatctttgggtttgaaggtgctgccgccctgcgtcaaccgctcggaggtgctgttcgaggtggaggccggcgccatccgctacgcgctggcggcggtcaaaggcgtgggcgaaaccgcggtcgcggcgatggtggacgagcgccataagggcggcgggtttaaaagcgtttatgatttcgcctaccgcatggccggcagaattcccggtcggcgcagcttggaaaacctgatcggcgccggcgctttcgacgtcttgaacgacaatcgtgccgaaatggacgggaacgtcggcatgatcctgcgctactgcgcgtcgctttccgaggaccgcgccggcggccaagagagcctttttagcgacgccttgacggacgaaacgttcaaactgaagaaataccggcatgggacggcctgctga

SEQ ID NO: 75112 - protein, 295 aa, Unknown
  Obtained from environmental sample
  misc_feature (1)..(295): Xaa is any amino acid
MDTFQAISIGSAASRKSTICIRLLKPVLEETYGIMIYQEQVMQAAQVLAGYDLGSADLLRRAMGKKKKDEMDKQRSVFVQGCEKCQGIGADLASSIFDVMERFASYGFNKAHAAGYAVISYQTAYLKAHYPAEFIAASMSFDLDRAEKLAAFVEDAESLGLKVLPPCVNRSEVLFEVEAGAIRYALAAVKGVGETAVAAMVDERHKGGGFKSVYDFAYRMAGRIPGRRSLENLIGAGAFDVLNDNRAEMDGNVGMILRYCASLSEDRAGGQESLFSDALTDETFKLKKYRHGTAC

SEQ ID NO: 75113 - DNA, 711 bp, Unknown
  Obtained from environmental sample
  misc_feature (1)..(711): n is a, c, g, or t
atgcccgagttttttgactttttgacttttcccgacggctctccgattcccattgaagtgcgccgcagctcccgcgcccagcttatcgggctgcattgcgagctggcggacaggatggccgtgctgaccctgccgccccgcgcccgcaaggaggagggagtcgaattcctgcgtttcaaggccgcgtggctgaagaagaatctgcaggccgcgcccgagccgtggcggttttcgcccgggcgcaaggttcgcatcttgggcaaggaatatacgctgcaggcctgctccgcctgcgaaaaaggcggcgcctggtgcgagggggaccgcatcaaggtttgcggcggcaaggagcatttctcccgccgggtggtcgacttggtgaaaaagctttttttaagctatgcgacgaactctcttaaatcgaaagcgcaaaggctcaaggcgcccctaaccaaggtcagaatcaaggatccgacgagccgctggggcagctgcgcctattccggcgaaatcgccgtatcttggcgtctggccttggcgccgctcgaggtcgcggaatacgtcatgtcccacgaggtgtgccatctggtggagatgaaccactacgcgcgcttttgggccttggttcataaggtgtatgggggcgacgaggcggcggctcggcgctggctcagggaaaacggcccttcgctgcacgcgctgaagatttag

SEQ ID NO: 75114 - protein, 236 aa, Unknown
  Obtained from environmental sample
  DOMAIN (27)...(227): Protein of unknown function DUF45
  misc_feature (1)..(236): Xaa is any amino acid
MPEFFDFLTFPDGSPIPIEVRRSSRAQLIGLHCELADRMAVLTLPPRARKEEGVEFLRFKAAWLKKNLQAAPEPWRFSPGRKVRILGKEYTLQACSACEKGGAWCEGDRIKVCGGKEHFSRRVVDLVKKLFLSYATNSLKSKAQRLKAPLTKVRIKDPTSRWGSCAYSGEIAVSWRLALAPLEVAEYVMSHEVCHLVEMNHYARFWALVHKVYGGDEAAARRWLRENGPSLHALKI

SEQ ID NO: 75115 - DNA, 627 bp, Unknown
  Obtained from environmental sample
  misc_feature (1)..(627): n is a, c, g, or t
atgacgaatatcatcaatgataaatatggtatcggttatatctcgcttggttcgcttaacagcaatgttaaagctctttccatagacggaatttctccatccgccgcaaatataaaaaacagtttataccaggcgtacagaccgttttatatcgtgacgaagggaaaacctgaggggattgcaaaggactttattggttttattctttcggccgacggtcagtcgattatttctaaaaactatgttacggtaaacgatcacttcgcggcttatacgggcggtaaaagccacggcaggctcattatcgccggttcgtcttcggtaacgcctgttatggaaaaactcagggaaacgtacattgcgcttaatccggagactgaaattgagatacatcaaagcgattcctcttcagggataaatgccgtcttaaacggaacctgtaatataggtatgacgagtcgtgaattgaaagagagcgaacttaaagagcttgtccccgtcaaaatagctatggacggcattataattataataaacaatttaaatcctctgacaactttgacaaaagagcaggtgaaaaacatttttaccgganaactggaacgctggagcgatgtgaacaaatga

SEQ ID NO: 75116 - protein, 208 aa, Unknown
  Obtained from environmental sample
  misc_feature (1)..(208): Xaa is any amino acid
MTNIINDKYGIGYISLGSLNSNVKALSIDGISPSAANIKNSLYQAYRPFYIVTKGKPEGIAKDFIGFILSADGQSIISKNYVTVNDHFAAYTGGKSHGRLIIAGSSSVTPVMEKLRETYIALNPETEIEIHQSDSSSGINAVLNGTCNIGMTSRELKESELKELVPVKIAMDGIIIIINNLNPLTTLTKEQVKNIFTGXLERWSDVNK

SEQ ID NO: 75117 - DNA, 417 bp, Unknown
  Obtained from environmental sample
  misc_feature (1)..(417): n is a, c, g, or t
gtgagttctgggaccaaaggcgacattatcatagacagtcatcgggaacgggttgggtttttgaaaaaccatgccaacccgtttgcgaagcataattatatcaaaatttccgtaaatattttcgccgaacagcttaatcttgcccgcgactttgcagccatctataaggtcattcatacgattcaaggttttaagcaatgtggttttcccgcaccccgaaggacctataaatgccgttattctgttggtgtcaagatccatattaatatttttcaaggcgtgcaaatttccatagtatacatccagatccctgatttcaaaacaattcatttctgtgttccaatcctttttgtaatactggccgaaaccgtgtttataagaatgaccacaatcattaatacaaccgcagtagcgtaa

SEQ ID NO: 75118 - protein, 138 aa, Unknown
  Obtained from environmental sample
  misc_feature (1)..(138): Xaa is any amino acid
MSSGTKGDIIIDSHRERVGFLKNHANPFAKHNYIKISVNIFAEQLNLARDFAAIYKVIHTIQGFKQCGFPAPRRTYKCRYSVGVKIHINIFQGVQISIVYIQIPDFKTIHFCVPILFVILAETVFIRMTTIINTTAVA

SEQ ID NO: 75119 - DNA, 531 bp, Unknown
  Obtained from environmental sample
  misc_feature (1)..(531): n is a, c, g, or t
gtgagtatcatggctgaaacattggccggtattctttctattgtttacggcttcttcggtcttttatttttcgtgacctttttgggatgggggttttctgttctggccggtgcttttacgttatctattatgatacttccgctcattttacgctcgtctgaagaagctatcaaatctgttcccgacacatggcgggaaggggctttcgggcttggagccggcaggctcaggacggttttgcatgtcgtattgcctgcggcagcccccggaatatcggccggtattattttggccgtcggcaggattgtcggagagactgcggcgcttatctacacatccgggacagttgcgcaaattccgggcagcccgacgcagtcagcaagaacgctgtctgttcacatgtatgcgttatccagcgagggttttcacaccggcgaaggttacgctactgcggttgtattaatgattgtggtcattcttataaacacggtttcggccagtattacaaaaaggattggaacacagaaatga

SEQ ID NO: 75120 - protein, 176 aa, Unknown
  Obtained from environmental sample
  DOMAIN (1)...(174): Binding-protein-dependent transport system inner membrane component
  misc_feature (1)..(176): Xaa is any amino acid
MSIMAETLAGILSIVYGFFGLLFFVTFLGWGFSVLAGAFTLSIMILPLILRSSEEAIKSVPDTWREGAFGLGAGRLRTVLHVVLPAAAPGISAGIILAVGRIVGETAALIYTSGTVAQIPGSPTQSARTLSVHMYALSSEGFHTGEGYATAVVLMIVVILINTVSASITKRIGTQK

SEQ ID NO: 75121 - DNA, 786 bp, Unknown
  Obtained from environmental sample
  misc_feature (1)..(786): n is a, c, g, or t
atgatcgcaggtacgtccgcgtcacgcatcgttcagaccgggtgcttcgggatagaactgtgggtgtcgcaggatttagtgcggcaggcgatggacttcctttcgcccgatggcattgtaaaggccaacgaaatcattgttatgttgtttggtgtttccattggcgaatcagtccgcatcgggctggtgacattcttccgatggctcaagggcaggaaaattcgcaagatgaccgttcttgacaacgggaatgtcaagatcgagcttgatggctctcccgacacactcgaagtcgaacgcaagaccgtagaactgctgcgccaccagaacatcttgaaagagcttcggaaagttcttgagccgcttgcgaacgaaggtgtcgacacggtgacattcgttgagcctggcaaaaccgtaaagctaggcgaaaccattacaaaagaagaacttgcctatttcacgccgccagaggcggaacacgaaacactccccgacagggacgaggtgatgacgctacagctggtcgccgtgtcgttccgcagtgagaacaaatggcggttcacggacgggacaacaacattctccgccaacatttccgatgatgcgtttctgaaccgcgtccaaaactcagaaatatcgttttccgctggggacgtgctggatgtccgtatgcacaagcgacactggatggagggagatgccatgaagtccagttacaacgttacagaagtcatcaagcatgcgaagagacccacacaggtgcccctgccgtttgatggcaagtag

SEQ ID NO: 75122 - protein, 261 aa, Unknown
  Obtained from environmental sample
  misc_feature (1)..(261): Xaa is any amino acid
MIAGTSASRIVQTGCFGIELWVSQDLVRQAMDFLSPDGIVKANEIIVMLFGVSIGESVRIGLVTFFRWLKGRKIRKMTVLDNGNVKIELDGSPDTLEVERKTVELLRHQNILKELRKVLEPLANEGVDTVTFVEPGKTVKLGETITKEELAYFTPPEAEHETLPDRDEVMTLQLVAVSFRSENKWRFTDGTTTFSANISDDAFLNRVQNSEISFSAGDVLDVRMHKRHWMEGDAMKSSYNVTEVIKHAKRPTQVPLPFDGK

SEQ ID NO: 75123 - DNA, 393 bp, Unknown
  Obtained from environmental sample
  misc_feature (1)..(393): n is a, c, g, or t
atgaataatcctacaataaaaatgtgttttggcgcttttgttgtcggaggtgtgatcggagctttagctcaaggcgtttttatgattttttcaatgtttatttccaattttttgattatcctctgcttttcgctttttacgctcgtcgccgctggtggcatattaacggctaccggagtttataagaaaatagacgctgttggaggaatgggggctaacgtgccgctgtgtgggcttgcatcggctattacagggggaattatcggcgcacgggcagatggaaaatctgtcggacaagcggttatagaaggactaaaaatgccgctgatgttattgggaatagccgctgttataggggtcgtcaccgcattgatcatgttttttgtcggataa

SEQ ID NO: 75124 - protein, 130 aa, Unknown
  Obtained from environmental sample
  SIGNAL (1)...(23)
  misc_feature (1)..(130): Xaa is any amino acid
MNNPTIKMCFGAFVVGGVIGALAQGVFMIFSMFISNFLIILCFSLFTLVAAGGILTATGVYKKIDAVGGMGANVPLCGLASAITGGIIGARADGKSVGQAVIEGLKMPLMLLGIAAVIGVVTALIMFFVG

SEQ ID NO: 75125 - DNA, 828 bp, Unknown
  Obtained from environmental sample
  misc_feature (1)..(828): n is a, c, g, or t
atggcagcgacgcggtttgacgttacggaagaccgcagtctgcaaagcaccctgaacgcgttaaaaaacggtaggatagtgtcccgcccgaaccaggggactcaggcacaaaggccgctaagcgccggaaaccactttgaccgcggccttgcgttctccagccagggcgagttcgaagcggcaatcgccgaatataccgaggcgatcaggctggacccgaacatgggcatggcctattggcgtcggggattacactacttcggaaaagaagactatggccttgccataacagactttgaaaccgccttgcgaattgttaatcctgaccatcaagtcttcaaaatggcccttcgtacatcgtatagagaacggggaaacatgtacgcaggcagaggcaactacaaccgtgcaatcgcggattataccaaggctctgagcattgtcaccgttcacctcgatttcggccctcccgtcagcacatattatgatcgaggattttgttactatatgaaagaagactatgaccgcgcaatcgcggattgtaaccaagtcttgagttttgaccccaatcacgataaagcttatgccctccggggacttgtgtatgtgcaaaagaacgactttgaccaggccatagcggattttacccaggctatccggttgaattcaaaaaactccatcgcgtattgtcatcggggcaacatatacagcaacaaaagtgactatgatcgggcaatcgcggactatgaagcagcactgcgtattgacccagactattcccgtgccaggcagagccttgaaaacaccccggatgcgaggggaaggtaa

SEQ ID NO: 75126 - protein, 275 aa, Unknown
  Obtained from environmental sample
  DOMAIN (42)...(75): Tetratricopeptide repeat
  misc_feature (1)..(275): Xaa is any amino acid
MAATRFDVTEDRSLQSTLNALKNGRIVSRPNQGTQAQRPLSAGNHFDRGLAFSSQGEFEAAIAEYTEAIRLDPNMGMAYWRRGLHYFGKEDYGLAITDFETALRIVNPDHQVFKMALRTSYRERGNMYAGRGNYNRAIADYTKALSIVTVHLDFGPPVSTYYDRGFCYYMKEDYDRAIADCNQVLSFDPNHDKAYALRGLVYVQKNDFDQAIADFTQAIRLNSKNSIAYCHRGNIYSNKSDYDRAIADYEAALRIDPDYSRARQSLENTPDARGR

SEQ ID NO: 75127 - DNA, 327 bp, Unknown
  Obtained from environmental sample
  misc_feature (1)..(327): n is a, c, g, or t
atggaagcgcggtacacactccgacactatatcacggaagacggcaaggatgttattatcgaatggctgcgcgctctgaatgatcgtcgggcagtcagtcgggttatccggtgcttggacagagtgtgttcaggcaatttcggagatcacaagtccgctggggaaggtgtttgggaactgcgtatccattatggcctaggataccgagtatattactgttttgacgacgacacaatcgtactgctcttggcgggaggaacaaaaggcacccaagacgaggacatagaagtcgccagaaaacgcaaaatggattacgaaagaggataa

SEQ ID NO: 75128 - protein, 108 aa, Unknown
  Obtained from environmental sample
  DOMAIN (54)...(105): Phage derived protein Gp49-like (DUF891)
  misc_feature (1)..(108): Xaa is any amino acid
MEARYTLRHYITEDGKDVIIEWLRALNDRRAVSRVIRCLDRVCSGNFGDHKSAGEGVWELRIHYGLGYRVYYCFDDDTIVLLLAGGTKGTQDEDIEVARKRKMDYERG

SEQ ID NO: 75129 - DNA, 492 bp, Unknown
  Obtained from environmental sample
  misc_feature (1)..(492): n is a, c, g, or t
atgctcaaacttgatctgaccgcctatatcaccggcgcatcgcttttcctcaaccagcttcgttccggtcgagccgccaaagccatcgccgaagcgctgaacaaaacagccatgtcagcccgcgacgccgtgcgaaaggacatgccccgccgtttcaccatccgcagaccatgggtgctgcaaggcatcggggtgcgttttgcccgatccggatcactggaagccgccgtgttctcccgtgacgagtttatgcgcgagcaggaattcgggggcatacgtcacggcggcaaagcccgctccatccccatggggagaatccgcgaccttcaccgcaagaccgtcattcccaaagccatgcgaccacaagcgcttatgggcaagcgttccacgttttaccgcaacggcttgctctttgagcgcaaaggcaagaatcacattgaactgctttaccatttcgtaagcagacaaaaatcccgcaacgcttcggcatga

SEQ ID NO: 75130 - protein, 163 aa, Unknown
  Obtained from environmental sample
  misc_feature (1)..(163): Xaa is any amino acid
MLKLDLTAYITGASLFLNQLRSGRAAKAIAEALNKTAMSARDAVRKDMPRRFTIRRPWVLQGIGVRFARSGSLEAAVFSRDEFMREQEFGGIRHGGKARSIPMGRIRDLHRKTVIPKAMRPQALMGKRSTFYRNGLLFERKGKNHIELLYHFVSRQKSRNASA

SEQ ID NO: 75131 - DNA, 909 bp, Unknown
  Obtained from environmental sample
  misc_feature (1)..(909): n is a, c, g, or t
ttggcagagtataaaatcactggctttttgcttgtcgcagtgatgatttttggtttagcggcatgctctaaaaagacaagcggcaaggtgcaggaaggtccgaattacctgaagatcggaggcttattggatagcgccatgaacctcgaccccatcacatctacttacaacacggttttcgagatcgatggcgcgattttcaaccagcttatacagcctgatcctgtatcaatggaactaaagccttatttgatcgaagctttccctgatgtaaacgcggacggcactgtgtttacctttcaccttaaaaaaggcgtcaaattccacgacggtgttgagcttacatcaaaggacgtggaattcacgtttaaccgtttcttcgacccaaagtggaacaacctgaatatgtggatggcggactttatcctgggagcgcaggacatgatggacgggaaggcctcttcgctcgccggatttaaggttattgacaattatactttctcaatacaactggaatacccctttaccgcctttttggccgttcttgccgtcagccctctgtccattatgcctaaagaagcctgtgagaaagccggagaacgctggggaattgatactataatcggaacgggccagtataaagtaaaatccttcaatccgggcgtagagctgattgttgaaagatttgacgactattggggcacaaaagcaagactggacggcatacagtggaaccacatgcttgtggaaacacagcttcttgagtgggaggcgggaacaatcgacatctgcggcgttgatgtgcagttagtagatggatacctcgcgagatatcctaataatgtcgttgaacaggaatatgtgggaaccccattggttagctttaaccaggatataccgnccttttaa

SEQ ID NO: 75132 - protein, 302 aa, Unknown
  Obtained from environmental sample
  SIGNAL (1)...(23)
  DOMAIN (79)...(301): Bacterial extracellular solute-binding proteins, family 5 Middle
  misc_feature (1)..(302): Xaa is any amino acid
MAEYKITGFLLVAVMIFGLAACSKKTSGKVQEGPNYLKIGGLLDSAMNLDPITSTYNTVFEIDGAIFNQLIQPDPVSMELKPYLIEAFPDVNADGTVFTFHLKKGVKFHDGVELTSKDVEFTFNRFFDPKWNNLNMWMADFILGAQDMMDGKASSLAGFKVIDNYTFSIQLEYPFTAFLAVLAVSPLSIMPKEACEKAGERWGIDTIIGTGQYKVKSFNPGVELIVERFDDYWGTKARLDGIQWNHMLVETQLLEWEAGTIDICGVDVQLVDGYLARYPNNVVEQEYVGTPLVSFNQDIPXF

SEQ ID NO: 75133 - DNA, 642 bp, Unknown
  Obtained from environmental sample
  misc_feature (1)..(642): n is a, c, g, or t
atggacattgctcgcaagaaaattgtaagtgataaaaaatcccctatatattattgccgctatatgcattcctctgagcattatgtttttagcattttgataggcaacaaaccaccatnaagaggaacatatgttttgccactcgcctttgcttttatgtttttctttctcatcaagaattactctaaaaaattctgtattgctgttgtatgttttgctttattcaccgctgcatatcaagcacaaacaacagctcaactgctttattcagaccagttgagatacaacgaggatgttcgcttggcttatgaaattcgcgataaaattgttcaaacatctttaggtaatgaaaatttacctgttgcgattataggaagatccaaggtctccgaaaaattccatacgaatgcgaattttatgcaaggagaggtaatagggtattctctttttgaatggacagatggaggcaaacactcaacacgatcattgaattttatgcgctctttaggtataaattttaattcaccaaatagtgaacaatataagagagccatttatgaagcagtttatattccatcttatccaaactcgggatttgttaaaaaattgcccgatgtgattgtggtgaaactatcagattaa

SEQ ID NO: 75134 - protein, 213 aa, Unknown
  Obtained from environmental sample
  misc_feature (1)..(213): Xaa is any amino acid
MDIARKKIVSDKKSPIYYCRYMHSSEHYVFSILIGNKPPXRGTYVLPLAFAFMFFFLIKNYSKKFCIAVVCFALFTAAYQAQTTAQLLYSDQLRYNEDVRLAYEIRDKIVQTSLGNENLPVAIIGRSKVSEKFHTNANFMQGEVIGYSLFEWTDGGKHSTRSLNFMRSLGINFNSPNSEQYKRAIYEAVYIPSYPNSGFVKKLPDVIVVKLSD

SEQ ID NO: 75135 - DNA, 660 bp, Unknown
  Obtained from environmental sample
  misc_feature (1)..(660): n is a, c, g, or t
ttgatggccgagtttctgcgtcttcttcaagaactcaggggccggaaattatccttaaaaatattacccgcgccattacccacgccccagctaccattccgcctcaggcctccctgttccctcccaactggccccttgactggccaaacggcaataactggccatccgatccctcctggcaagacttcctggacgcctataacacctcccattggcccagcgatttcgcctccttcacgggcgcctccgtcccggaaaaggccgataaggttatcgccgctctcaacgcagaaacaaaacgcgcacccagcatcgttcccgaaacaggcggcgtccccgttatccagggcgaattctacgacgccatctcctttgtcagaaaaatcaggccacctaacgccccctccttcttctggtaccgctttaaagacagagacggcaagcccgcagacggcccctggatccaacgccccttgccgcccaaaggcgaaggcgattcagacagaaacgtcaaatgggaaattccccttacccaggctggcggctttacaggccgcgacggcgaaaactggctcgacatcaagattgaagacaccgcgggcaacatctcctgcctctacggcgtccgcttcctcgtcgacagaaaaaaccccgaactga

SEQ ID NO: 75136 - protein, 219 aa, Unknown
  Obtained from environmental sample
  misc_feature (1)..(219): Xaa is any amino acid
MMAEFLRLLQELRGRKLSLKILPAPLPTPQLPFRLRPPCSLPTGPLTGQTAITGHPIPPGKTSWTPITPPIGPAISPPSRAPPSRKRPIRLSPLSTQKQNAHPASFPKQAASPLSRANSTTPSPLSEKSGHLTPPPSSGTALKTETASPQTAPGSNAPCRPKAKAIQTETSNGKFPLPRLAALQAATAKTGSTSRLKTPRATSPASTASASSSTEKTPN

SEQ ID NO: 75137 - DNA, 483 bp, Unknown
  Obtained from environmental sample
  misc_feature (1)..(483): n is a, c, g, or t
atgacaccaccgacgtcgtcgacatcaatttcgaggacaagggcgcctacaaagccgattaccatgatcccgccctgcaaaatatgcccaattcctacgccgtcaaagacggtacgggcaacgcctcgggccgcgtcttctttatcgacagagccgaacccctcctctcctgggcagactccacaggcgacagactctacttccgcaatgtcgcgggccaggtcagcttcgccttcgccgcccgcgacggcaacgccatccggcgctgggaagccgtcattaaagatgaacaaggcgtcgtggtcctccgtaacagctttaccgcagacggcacctccccgggctggatccagattactacacccccgcccattcccaatattccccagccgactaccgtcccaacggcggaacttcctacccccgccgttatctctttctcgactaaagacctccaaaacctcctccttaagcccttcatga

SEQ ID NO: 75138 - protein, 160 aa, Unknown
  Obtained from environmental sample
  misc_feature (1)..(160): Xaa is any amino acid
MTPPTSSTSISRTRAPTKPITMIPPCKICPIPTPSKTVRATPRAASSLSTEPNPSSPGQTPQATDSTSAMSRARSASPSPPATATPSGAGKPSLKMNKASWSSVTALPQTAPPRAGSRLLHPRPFPIFPSRLPSQRRNFLPPPLSLSRLKTSKTSSLSPS

SEQ ID NO: 75139 - DNA, 558 bp, Unknown
  Obtained from environmental sample
  misc_feature (1)..(558): n is a, c, g, or t
gtgctgacacccagcttttcgagcgaggcgctcaaggctttccaagccaaaaagcaagtgagtctgctacagactcaaggcgtgtggcccatgggcgcggagaacatggaactccgcagcataggcggtggctacgtaatccagagacctgatgccgacttcacacccgtgtcgcagtgggaggtcatggtcacaggcggcacggcaaggccggcggacaatgacctattcttggctcaaatggcggccaaggccttgaagtcgaacagcatcgccttggcgaaggacggcggcacagtgggcctcggcgccggccagaccagccgcgtcgacagcgtggaaatcgcctgccggaaggcgggtccgaaggcaaagggcgcggtaatgggcagcgatgcattcttcccgttcgccgatagcatcgaaacggccgctacgtacggcatctctgccgtcatagagccaggcggctccatccgcgacggggaagtggtggctgcggctaagcgcttaggcatctggctgttcttcactggcatgagacacttcaggcactaa

SEQ ID NO: 75140 - protein, 185 aa, Unknown
  Obtained from environmental sample
  misc_feature (1)..(185): Xaa is any amino acid
MLTPSFSSEALKAFQAKKQVSLLQTQGVWPMGAENMELRSIGGGYVIQRPDADFTPVSQWEVMVTGGTARPADNDLFLAQMAAKALKSNSIALAKDGGTVGLGAGQTSRVDSVEIACRKAGPKAKGAVMGSDAFFPFADSIETAATYGISAVIEPGGSIRDGEVVAAAKRLGIWLFFTGMRHFRH

SEQ ID NO: 75141 - DNA, 657 bp, Unknown
  Obtained from environmental sample
  misc_feature (1)..(657): n is a, c, g, or t
atgccattagaagacaaatgcggcatttttggcatttccagccagcgcgaggccgcaagacaaacgtacttgggcctatgcgcccttcagcacagggggcaggagtcggcgggcatctgcgccagaggagatggtgtattgcggctgcacaagagcaatggcctagtggcggacgtcttttctgaacccatattggattcgctgcctgggaacgctgccataggacacatcggatgttcaggccaaaaagaacacgagtgcgaagagtccctgcccttcatcgtcaatggacgcttcggtcaattggccgtctgctacaacggaacttttttgaacgcagaccgcctgcgaaacaaactgatggcagctggctacactttttgcggcgcatcggacgcagaacttctgctggccttggtcaacaccgccatggccgccaacctagaagacgcagtggaagaggctctccaactgatagaaggggcatatagccttttggttttgtcaaaggcccacctgatcggagccaaagacccttggggcattaagccgcttgcggttggccaattgggcgaggacgccatgctgggggaaaattccatcgtgttcgcaagcgagtcctccgccttcgacctttgggcgcaaaattctgcataa

SEQ ID NO: 75142 - protein, 218 aa, Unknown
  Obtained from environmental sample
  DOMAIN (7)...(207): Glutamine amidotransferases class-II
  misc_feature (1)..(218): Xaa is any amino acid
MPLEDKCGIFGISSQREAARQTYLGLCALQHRGQESAGICARGDGVLRLHKSNGLVADVFSEPILDSLPGNAAIGHIGCSGQKEHECEESLPFIVNGRFGQLAVCYNGTFLNADRLRNKLMAAGYTFCGASDAELLLALVNTAMAANLEDAVEEALQLIEGAYSLLVLSKAHLIGAKDPWGIKPLAVGQLGEDAMLGENSIVFASESSAFDLWAQNSA

SEQ ID NO: 75143 - DNA, 471 bp, Unknown
  Obtained from environmental sample
  misc_feature (1)..(471): n is a, c, g, or t
atgtttgagaaatgtccaagcggttccggcttattgtacggaaattgttgcaagcctaacattaaaggcaagaaaaacgcgcccacgccggaagccctgatgcggagccggtactcagcctatgtgttacacgaaattgactacatcatcgacacttgcaagaacggcagagagaatatcgaccgcaaaagcgttgaggattggagtaacaagtcaatatggcttgggcttgaaatcattaaaagcgatgaaaccgggacggtagaattcaaggccatatttgataaggggaaattaaaacaggttcatcacgaaatagcgtatttcctgaaagatgatgaagggaaatggcagtacagcagcggaaagataatcggcgaacctgtaaggcgttccgaattaagacagggcaggaatgaatactgcgcctgtggatccgggaagaaatacaagcattgttgcgggaggtag

SEQ ID NO: 75144 - protein, 156 aa, Unknown
  Obtained from environmental sample
  DOMAIN (138)...(156): SEC-C motif
  misc_feature (1)..(156): Xaa is any amino acid
MFEKCPSGSGLLYGNCCKPNIKGKKNAPTPEALMRSRYSAYVLHEIDYIIDTCKNGRENIDRKSVEDWSNKSIWLGLEIIKSDETGTVEFKAIFDKGKLKQVHHEIAYFLKDDEGKWQYSSGKIIGEPVRRSELRQGRNEYCACGSGKKYKHCCGR

SEQ ID NO: 75145 - DNA, 534 bp, Unknown
  Obtained from environmental sample
  misc_feature (1)..(534): n is a, c, g, or t
atgacagaagagctggcgttgcagttgctcaaatcgatcggcgaggacccggcccgcgagggtttgcgcgacacgcccaagagggtggccaaggcgtggtcgcacctgatgcagggttatacgcagagcccttccgagatactgggcaaggccatattctccgagaagtgcgaccagatgatcatcgtcaaggacatcgaggtctacagtatgtgcgagcaccatctgctcccgttcttcggcaagtgccacatcggctacatctcgcgcggccgcgtctacggggtgagcaagctggcgcgtctggtagactgcttctcccgccgcctgcagcttcaggagcggctgacaaggcagatcgccgaggcgctgatagggcctatagaggccgagggcgttggcgtggtaatagaggcgcagcacctctgcatgatgatgcgcggcgtctccaaacaaaactcggtcatggtgacctccgcgatgctgggaagcttccgcgacgagccggagacgagggccgagttccgaaactga

SEQ ID NO: 75146 - protein, 177 aa, Unknown
  Obtained from environmental sample
  DOMAIN (59)...(163): GTP cyclohydrolase I
  misc_feature (1)..(177): Xaa is any amino acid
MTEELALQLLKSIGEDPAREGLRDTPKRVAKAWSHLMQGYTQSPSEILGKAIFSEKCDQMIIVKDIEVYSMCEHHLLPFFGKCHIGYISRGRVYGVSKLARLVDCFSRRLQLQERLTRQIAEALIGPIEAEGVGVVIEAQHLCMMMRGVSKQNSVMVTSAMLGSFRDEPETRAEFRN

SEQ ID NO: 75147 - DNA, 420 bp, Unknown
  Obtained from environmental sample
  misc_feature (1)..(420): n is a, c, g, or t
ttggtaagcctcaaggatgtacctgccaaatccgccatcaccaaagagcaggtgtccggagccgtggaaaaagcggggggtatcaaaaagggtgacattgccttttttaatctgggttactccggcttatatggaaccgacgcgtattccgcctcaccttatttttccaatgaggcgatctgctggatcgtggatcagggaataaaggtgatgggagttgatgccggcggagtcgagattcccggcagtgaagagcatataaaccatgcggccctctttaccagggatgtactcttgattgagaatctggctaatctggacaatgttccggtgagccgattcatggtatacgctttccccctctttataaagggtatggattcatttccgttgcgtgtgatagttgaggttgatgcctga

SEQ ID NO: 75148 - protein, 139 aa, Unknown
  Obtained from environmental sample
  DOMAIN (1)...(123): Putative cyclase
  misc_feature (1)..(139): Xaa is any amino acid
MVSLKDVPAKSAITKEQVSGAVEKAGGIKKGDIAFFNLGYSGLYGTDAYSASPYFSNEAICWIVDQGIKVMGVDAGGVEIPGSEEHINHAALFTRDVLLIENLANLDNVPVSRFMVYAFPLFIKGMDSFPLRVIVEVDA

SEQ ID NO: 75149 - DNA, 384 bp, Unknown
  Obtained from environmental sample
  misc_feature (1)..(384): n is a, c, g, or t
atgacagccgaggaggcgcctgttagcttaaacctagccgccgctctggcctgggccgacgacgtcgtggaaggcgccgccgcccagtcgcccggcttcatgcccagccagctcctgatcttcgggggcatgttcctcttgatctacctgatcctcttccggccccagcagaaaaagcagaaggaacaccaggccatgctaaacagcctgcaaaagggcgaccgcatccagaccaacgggggccttctgggcgtcatcaccggcagcgaccagaacgaactgaccgtggagatagcgccccaggtccgggtcaagataggccggggctttgtcagccgggtcgtcaagcccggccagggcggcgacgagaagggcaagaactaa

SEQ ID NO: 75150 - protein, 127 aa, Unknown
  Obtained from environmental sample
  SIGNAL (1)...(19)
  DOMAIN (32)...(115): Preprotein translocase subunit
  misc_feature (1)..(127): Xaa is any amino acid
MTAEEAPVSLNLAAALAWADDVVEGAAAQSPGFMPSQLLIFGGMFLLIYLILFRPQQKKQKEHQAMLNSLQKGDRIQTNGGLLGVITGSDQNELTVEIAPQVRVKIGRGFVSRVVKPGQGGDEKGKN

SEQ ID NO: 75151 - DNA, 390 bp, Unknown
  Obtained from environmental sample
  misc_feature (1)..(390): n is a, c, g, or t
ttgtcagccgggtcgtcaagcccggccagggcggcgacgagaagggcaagaactaaagggagtgaattccgtggaccattcgctcaagtggcgcctgggcctggtggcggcggtgttcatggtcttcaccgccctggtcctgccgaccttcctggaccgcccgcccgcctgggggccgcaaaaaagaataagcctgggcctggaccttcgggggggcatacacctggtcatgggcgtggacctggaggtggccctggccaacaacctcggccgccaggccgacgaattgcgccgggccctctcggaagcctctgtcccggccgcccgcgtggccaagaacccggaccgcccggtcatcgaggcggagtttcccgattccgaaagccttaa

SEQ ID NO: 75152 - protein, 129 aa, Unknown
  Obtained from environmental sample
  misc_feature (1)..(129): Xaa is any amino acid
MSAGSSSPARAATRRARTKGSEFRGPFAQVAPGPGGGGVHGLHRPGPADLPGPPARLGAAKKNKPGPGPSGGHTPGHGRGPGGGPGQQPRPPGRRIAPGPLGSLCPGRPRGQEPGPPGHRGGVSRFRKP

SEQ ID NO: 75153 - DNA, 774 bp, Unknown
  Obtained from environmental sample
  misc_feature (1)..(774): n is a, c, g, or t
gtgctcccggatgcggtcgaagattatgatggtgtcgttgatggaaaagcccacaatggtcaggatggcggccacgaaactcaaggatatctccttttccaggaaggagaagaagcccacggtgatgactatgtcgtgaaccagggccaaaatggcgcccagggcgtattggaatttcaggaaatagcagagggtcagggtgaccaggagggccaggatggtcatgacggccaggtcggcgcccagaagggaggccaggtagcagatgcccaggagggcggccacgaagacggccgaggtgccccacttctgctcgaagcggccggagatgtagatgatgatcatcaaaaggctgtagaacagggcgctgaaggccttgccccggagatcccggcccacctggggccccaccatctccacccggcggatttcggcccggtcggccccgaaatggtccaccagaacctggccggccttggtcccgaaggtggtctggccctcttcgaccctggtttcttcggcctcgccccggaggttgatgaggaattcgtggtcgtcgggcgcgccgtaggtctggatgcgggcgtcgtcgaagccggccgcgcccaggacggaccggatctcgtccgtggcggtgggccggtcgaagcgggcctggaccaaggcgccgccggcgaaatcgaggcccagctgcangcccttggtggagatggagagcaggctggccaggaccagaagaccggccaggggcagaaagaaaagcgcggccgatga

SEQ ID NO: 75154 - protein, 257 aa, Unknown
  Obtained from environmental sample
  misc_feature (1)..(257): Xaa is any amino acid
MLPDAVEDYDGVVDGKAHNGQDGGHETQGYLLFQEGEEAHGDDYVVNQGQNGAQGVLEFQEIAEGQGDQEGQDGHDGQVGAQKGGQVADAQEGGHEDGRGAPLLLEAAGDVDDDHQKAVEQGAEGLAPEIPAHLGPHHLHPADFGPVGPEMVHQNLAGLGPEGGLALFDPGFFGLAPEVDEEFVVVGRAVGLDAGVVEAGRAQDGPDLVRGGGPVEAGLDQGAAGEIEAQLXALGGDGEQAGQDQKTGQGQKEKRGR

SEQ ID NO: 75155 - DNA, 750 bp, Unknown
  Obtained from environmental sample
  misc_feature (1)..(750): n is a, c, g, or t
atgttcgacgtcgaagcctgtttggaacggcagcttgcggaggcaaagaagggcaggccaacggtcattttccccgaatgctcggacacgagggtgatagaggccgtctgccgcctgaccaggttcgtgcgcccggtgctgcttgcttcgagcgacgccgcgtcagccgccgccaaaaaaaacgacaggctggatggcgacctggtggcctatgcctttgccgaatgcgccttcgttgacataccgcagcgccgcgatttggttgaggggtacgccgacctgctggcggagcgcctggcaggactcggagaaacaattggcagggccgaagccatcgagagggtgtcccgcccgccgctcttcgccatcctgtcggtgctggcgggccacgcggacgccgtcgtgggcggctccgtctatggcccaaaagattacttcaggcccatgctgaaactcctgaaagaccgcgacgtggccaccgaggccggcatcatcgtcctgcccgacgagttcgcgcacaggctgttcccggagaacatcctgataatcggggacgccggcgtgaactccacaatggatccagccacattggcggaggtggcggtgggcacctgcgtggtggcgcgcgacatattccccgaggccgtgctgccgacggtgcgcggggcgatggtcagctattcccacagggggtcggacgaaggacagggggcggatctggtccacagggcaatgactcgtgccatctga

SEQ ID NO: 75156 - protein, 249 aa, Unknown
  Obtained from environmental sample
  DOMAIN (7)...(249): Phosphate acetyl/butaryl transferase
  misc_feature (1)..(249): Xaa is any amino acid
MFDVEACLERQLAEAKKGRPTVIFPECSDTRVIEAVCRLTRFVRPVLLASSDAASAAAKKNDRLDGDLVAYAFAECAFVDIPQRRDLVEGYADLLAERLAGLGETIGRAEAIERVSRPPLFAILSVLAGHADAVVGGSVYGPKDYFRPMLKLLKDRDVATEAGIIVLPDEFAHRLFPENILIIGDAGVNSTMDPATLAEVAVGTCVVARDIFPEAVLPTVRGAMVSYSHRGSDEGQGADLVHRAMTRAI

SEQ ID NO: 75157 - DNA, 396 bp, Unknown
  Obtained from environmental sample
  misc_feature (1)..(396): n is a, c, g, or t
atgaatgcgcccctgggtttnggtggtgggcacacgctgcacgcggtgtgttccggcttcaaacttcaggcggctgtaaaccttatggccgctgacaagaaggatgacctccttgtagccgccggtntccgaaggcgattcgctgagcagttccgtcttccagcccatgttttccgcgtagcgcatatacatgcgcaagaggtccgccccgaacagcgcggcctcttcaccgccggtgcccgcgcggatttcgagaatggtgttcctggcatccagaggatcggagggcaggagcagcaccttgagcgcctgttccagtccgggcaattccgcttcaagcagaccgcattcttcctgcgccaacacgcgcagttccggatccggatcgttcagtag

SEQ ID NO: 75158 - protein, 131 aa, Unknown
  Obtained from environmental sample
  misc_feature (1)..(131): Xaa is any amino acid
MNAPLGXGGGHTLHAVCSGFKLQAAVNLMAADKKDDLLVAAGXRRRFAEQFRLPAHVFRVAHIHAQEVRPEQRGLFTAGARADFENGVPGIQRIGGQEQHLERLFQSGQFRFKQTAFFLRQHAQFRIRIVQ

SEQ ID NO: 75159 - DNA, 633 bp, Unknown
  Obtained from environmental sample
  misc_feature (1)..(633): n is a, c, g, or t
gtgttgtcaatggaaaacgaaggggaaaggtatctttttatccaaaaatcgtcaggcttgaataagtcagattttgccggcagtttgggcctttctaaagcatacggctaccaaatagccacaggcagggccaaagccccccgccaggcattacagcggcttgcccttgaataccgtataaacctgaattggtatctttacgggcaaggcgagccgtccgccggcggggaagccgcaatagaattattggaacaagaagccgccgccggacatggccgggaaatcgaggaatatatcaataaacgtaccttacagcttcccatgtccctcattgccccctacaaaccggaaaaactgcgagccgtttatgtatcaggcgacagcatgacaggcgtgaatatcaatgacggcgatgtcgtagttttttaccccggcttgatacagggcaacggtatatatgttgtttccgttgaaaacactcttttggtaaaacaagtagaatttgacggccccgggcaggcaattctactcataagcgcaaaccccgcctatcaacccctccgttattcagggtatgaattggaaaacataagagtaacagggcgggtagtggcctggtttcaccgggcataa

SEQ ID NO: 75160 - protein, 210 aa, Unknown
  Obtained from environmental sample
  DOMAIN (123)...(192): Peptidase S24-like
  misc_feature (1)..(210): Xaa is any amino acid
MLSMENEGERYLFIQKSSGLNKSDFAGSLGLSKAYGYQIATGRAKAPRQALQRLALEYRINLNWYLYGQGEPSAGGEAAIELLEQEAAAGHGREIEEYINKRTLQLPMSLIAPYKPEKLRAVYVSGDSMTGVNINDGDVVVFYPGLIQGNGIYVVSVENTLLVKQVEFDGPGQAILLISANPAYQPLRYSGYELENIRVTGRVVAWFHRA

SEQ ID NO: 75161 - DNA, 714 bp, Unknown
  Obtained from environmental sample
  misc_feature (1)..(714): n is a, c, g, or t
gtgggctgtacctgcggctttgccgcaacaggttgtaccggcctcggtacgggctgtgccggaggccttaccggagctgcaacaggttttgccgcaacgggccgggtgggctgtgtctgcggctttgccgcaacaggttgtaccggcctcggcgcgggctgtgctgccggtcttgccgtgactggttttgccgcgacaacctgtaccggccttggtgcgggctgcgccggagaccttaccggaggtacaacaggttttgctgcaatgggccgggtaggctgtgctggcggctttgtcacaacaggttgtaccggccttgccgacggctgcatcgctggtcttgccgcaactgctggttttggtgctggccgtaccggctgcggcttagccgtagctggttgcaccggcggtctggctgctataacagtttttgtttgtttggcaggtttcgattttttcggtacagtaaccggtttgaccggaatgaggccgctttttcccgccagaccggcccctgctgcggcagatcgtattcccctgtcgggttctgtaacaggtttgcgggtaattccgggtcggcctttctttttctgttctttgtcttttgctttaccttgtttggcttcgggaggcgatagcggtttttgctgcccttggcttattacggccctcttgatcttattccagttacgctggaggtacaaatcgccatga

SEQ ID NO: 75162 - protein, 237 aa, Unknown
  Obtained from environmental sample
  SIGNAL (1)...(25)
  misc_feature (1)..(237): Xaa is any amino acid
MGCTCGFAATGCTGLGTGCAGGLTGAATGFAATGRVGCVCGFAATGCTGLGAGCAAGLAVTGFAATTCTGLGAGCAGDLTGGTTGFAAMGRVGCAGGFVTTGCTGLADGCIAGLAATAGFGAGRTGCGLAVAGCTGGLAAITVFVCLAGFDFFGTVTGLTGMRPLFPARPAPAAADRIPLSGSVTGLRVIPGRPFFFCSLSFALPCLASGGDSGFCCPWLITALLILFQLRWRYKSP

SEQ ID NO: 75163 - DNA, 774 bp, Unknown
  Obtained from environmental sample
  misc_feature (1)..(774): n is a, c, g, or t
ttgtactggcggctttgttgcggctggctgtatcggctttggcgcgggccttaccggctgcactgccgattttgccgcaactggctgtgccggagaccttaccggagctgcaacaggttntgctgcaacgggccgggtgggctgtacctgcggctttgccgcaacaggttgtaccggcctcggtacgggctgtgccggaggccttaccggagctgcaacaggttttgccgcaacgggccgggtgggctgtgtctgcggctttgccgcaacaggttgtaccggcctcggcgcgggctgtgctgccggtcttgccgtgactggttttgccgcgacaacctgtaccggccttggtgcgggctgcgccggagaccttaccggaggtacaacaggttttgctgcaatgggccgggtaggctgtgctggcggctttgtcacaacaggttgtaccggccttgccgacggctgcatcgctggtcttgccgcaactgctggttttggtgctggccgtaccggctgcggcttagccgtagctggttgcaccggcggtctggctgctataacagtttttgtttgtttggcaggtttcgattttttcggtacagtaaccggtttgaccggaatgaggccgctttttcccgccagaccggcccctgctgcggcagatcgtattcccctgtcgggttctgtaacaggtttgcgggtaattccgggtcggcctttctttttctgttctttgtcttttgctttaccttgtttggcttcgggaggcgatag

SEQ ID NO: 75164 - protein, 257 aa, Unknown
  Obtained from environmental sample
  misc_feature (1)..(257): Xaa is any amino acid
MYWRLCCGWLYRLWRGPYRLHCRFCRNWLCRRPYRSCNRXCCNGPGGLYLRLCRNRLYRPRYGLCRRPYRSCNRFCRNGPGGLCLRLCRNRLYRPRRGLCCRSCRDWFCRDNLYRPWCGLRRRPYRRYNRFCCNGPGRLCWRLCHNRLYRPCRRLHRWSCRNCWFWCWPYRLRLSRSWLHRRSGCYNSFCLFGRFRFFRYSNRFDRNEAAFSRQTGPCCGRSYSPVGFCNRFAGNSGSAFLFLFFVFCFTLFGFGRR

SEQ ID NO: 75165 - DNA, 570 bp, Unknown
  Obtained from environmental sample
  misc_feature (1)..(570): n is a, c, g, or t
gtgctcagctttgacatagcggcgcctctcacgctgaagcttgaggcagacgaaagccatcagcttacggtagaaaacatgttccctgtcgactcgacaagcagcaatgtagtgtggtttaaggatagcggcgacgcccaaataacggtgagcagcactggtcttgtgaaagtggctgacaccatcacttcaggcggcacggcggtaatcaaggcgaaggccgatgacgatgacgaagtggaatccagcaactcatgcacggtgacgatcaaggtctatgtggatgacataacactgcacggcggtgtttccgacgtggacatacccttgggcggtagtctgcaacttgacgtggtttttgacccgttgtatgcgacggaaacggatttgtcttggtcagtgagggctgatggcagcggcaatgagataaccctgagcagcactggtttagtggaggcgaacggtgcgattattagcgattggacgacaatccaagtgcaggccacgggcacccagagtggcatacccaccgcatacaaggatattacggtacacgtagtagcaccttag

SEQ ID NO: 75166 - protein, 189 aa, Unknown
  Obtained from environmental sample
  misc_feature (1)..(189): Xaa is any amino acid
MLSFDIAAPLTLKLEADESHQLTVENMFPVDSTSSNVVWFKDSGDAQITVSSTGLVKVADTITSGGTAVIKAKADDDDEVESSNSCTVTIKVYVDDITLHGGVSDVDIPLGGSLQLDVVFDPLYATETDLSWSVRADGSGNEITLSSTGLVEANGAIISDWTTIQVQATGTQSGIPTAYKDITVHVVAP

SEQ ID NO: 75167 - DNA, 507 bp, Unknown
  Obtained from environmental sample
  misc_feature (1)..(507): n is a, c, g, or t
gtggattactgggtaaaaatacaggcgcggactcttgtagactttcggatcataaacagctcccctacatccgaaggaattgttctgcacaaggcggttaatatgggaatagcggtcgccgttgaaggcggcctagtggttccggttctacgcgacgcgcacaccaagtccctgccggaaatcgcggcggcttcgcggggtctcatcgatcgggcgcggacgggaggactttcgcccgaagatatgtccggcggtacgttcacgattaccaatctcggaatgtacgacgttgattcctttatcgcgatcatcaatccgccagaggccgcgattctcgcgataggcgcgatacgcgagcgagttgtagtggaaaacagcgcaatggttatacgtccgatggtttccctaagcctgtcatttgaccaccgtatcattgacggcgcgccggctgcggatttcctgaaagcactaaagacgcggttgcagaatccgcttctggcactgtga

SEQ ID NO: 75168 - protein, 168 aa, Unknown
  Obtained from environmental sample
  DOMAIN (1)...(167): 2-oxoacid dehydrogenases acyltransferase (catalytic domain)
  misc_feature (1)..(168): Xaa is any amino acid
MDYWVKIQARTLVDFRIINSSPTSEGIVLHKAVNMGIAVAVEGGLVVPVLRDAHTKSLPEIAAASRGLIDRARTGGLSPEDMSGGTFTITNLGMYDVDSFIAIINPPEAAILAIGAIRERVVVENSAMVIRPMVSLSLSFDHRIIDGAPAADFLKALKTRLQNPLLAL

SEQ ID NO: 75169 - DNA, 537 bp, Unknown
  Obtained from environmental sample
  misc_feature (1)..(537): n is a, c, g, or t
ttgacaccctctcccttggggataacagaggctggaacagcttggagcgccacgatacgcagcagcgcggccttgggcgtattgctggcagagggcatcggcgacaccatccgcgtctccctaactggcccaggcgaagaggagtgccgggtcggccacgaactgctgcgctccctatgcttgcggcagggcggtttcaggctaattagctgcccaggctgcggcaggctgcaagttgacttgcaccgccttgcaaatgagatagagcaaaagctgtattcgatcaatgcaaatggctacacctttgcagtcatgggctgcgccgtgaatggccccggcgaggcgagggaggcccatcttggcgtcgcaggcggaaagggcgaggggctgatgttccgccgggggcaactgcttcgcaaggtaaaagaggaagaaattgttgacgaatttctcaaagaagcacaaaacctggttagttcagtcggcggagtcaatggagccagtggagccaatgggatcaatggggaaggcgcgtaa

SEQ ID NO: 75170 - protein, 178 aa, Unknown
  Obtained from environmental sample
  DOMAIN (1)...(162): GcpE protein
  misc_feature (1)..(178): Xaa is any amino acid
MTPSPLGITEAGTAWSATIRSSAALGVLLAEGIGDTIRVSLTGPGEEECRVGHELLRSLCLRQGGFRLISCPGCGRLQVDLHRLANEIEQKLYSINANGYTFAVMGCAVNGPGEAREAHLGVAGGKGEGLMFRRGQLLRKVKEEEIVDEFLKEAQNLVSSVGGVNGASGANGINGEGA

SEQ ID NO: 75171 - DNA, 405 bp, Unknown
  Obtained from environmental sample
  misc_feature (1)..(405): n is a, c, g, or t
ttgttgacgaatttctcaaagaagcacaaaacctggttagttcagtcggcggagtcaatggagccagtggagccaatgggatcaatggggaaggcgcgtaaaatggctattttttcttggatcggccaccacccatggtacagcatcttaggctacctagtattggagagcctgctcccagtgcctctccagccaacggcctgggcgcttagggccagcatccgcctgtaccaaatgacactgagccccatcaatccaaccgtctgcaagttccaccccacatgcagccactacgggctggaggccgtgaggaaatatggcaccctgaagggcagcgccttgacgacctggcggataatgaggtgcaacccctggagcgagggcggcgaagacccgctgacgtag

SEQ ID NO: 75172 - protein, 134 aa, Unknown
  Obtained from environmental sample
  DOMAIN (66)...(133): Domain of unknown function DUF37
  misc_feature (1)..(134): Xaa is any amino acid
MLTNFSKKHKTWLVQSAESMEPVEPMGSMGKARKMAIFSWIGHHPWYSILGYLVLESLLPVPLQPTAWALRASIRLYQMTLSPINPTVCKFHPTCSHYGLEAVRKYGTLKGSALTTWRIMRCNPWSEGGEDPLT

SEQ ID NO: 75173 - DNA, 735 bp, Unknown
  Obtained from environmental sample
  misc_feature (1)..(735): n is a, c, g, or t
atgggcccagtagtaatgttcggattattatttatgtgttttctcctggaaatttttgttaatgccagttatttcatatctgattttatttctttaacaatattagcggtgttaacgctggtttttttgttgggaattctggagaacctcaaaattggtttttttattacgaataagctattgataatcctcatctttatttctcccttgttactttatttacatttgtcaggaactaactttaaaaacctattcttttataaggtaattattcataacattaaatatatattgcttaccttgtcggttctttcaggaattaatttagtcctgagactcgttgagtatgtaaatgaagaatattacattaccaacaagcggataataataaaaaaaggagggttctttgaaaacatcaccgatatcccaatcgaaaaacttgaaggtattagccttgttcagggattcatgggcagcttgttcaaatacgggactattcgaatattgggacttgggggcagttgtccatgcttagtcactatagaaaaaccatatgcggtacggcggaaaattgacgcaattatagaaaaaaataaggcaataactgtagtccaggaaccctatccacaagttgtgaaagttactaaatcagttgatgaagtagttatgcctgatatatttaagtacgggactatagtaaggcagcttggtccttccaaaaaatctgaggaatag

SEQ ID NO: 75174 - protein, 244 aa, Unknown
  Obtained from environmental sample
  DOMAIN (115)...(198): Bacterial membrane flanked domain
  misc_feature (1)..(244): Xaa is any amino acid
MGPVVMFGLLFMCFLLEIFVNASYFISDFISLTILAVLTLVFLLGILENLKIGFFITNKLLIILIFISPLLLYLHLSGTNFKNLFFYKVIIHNIKYILLTLSVLSGINLVLRLVEYVNEEYYITNKRIIIKKGGFFENITDIPIEKLEGISLVQGFMGSLFKYGTIRILGLGGSCPCLVTIEKPYAVRRKIDAIIEKNKAITVVQEPYPQVVKVTKSVDEVVMPDIFKYGTIVRQLGPSKKSEE

SEQ ID NO: 75175 - DNA, 825 bp, Unknown
  Obtained from environmental sample
  misc_feature (1)..(825): n is a, c, g, or t
atggtatcatggataggcgttgaatactcttcgtttccaaaaagaaaagggtataaggattttgacttaattgatttaccttttccattaaggaaattatatataaatccaatcggtgtattgaaacaaaaaaaagatggatatgaaattgagcgaggagtatataattatccttctgttggagatatagttgttattccgaatcaaaatcaattacgtgccattgttcaaaataaagatgaaaatgcttgtgttcaaataggtgtttcttcattagcagctaacgcgcctgtcttcattaacccagataaagtatttggaaggcatattgctatattaggtaacactggcagtggaaaatcttgttccgttgcgggacttattcgatggagtattgaaagtgcaaaaaataaaataagtgtaaatgataaactaaatacaaggtttattattttagaccctaatggcgagtatacagattcttttaataatttagtcaatgttagaaaatttcaaatagtacttgacgaaaagatagcttctgataaaacaattcatcaattaaaagttccaagttggatgtggaacagttatgaatggagttctatcgctcaagcaagtgggagaactcaaaggcctttacttagacaagcattaagagaaataagatcaggtggaagacctgccgaaaatgatgatttaatcgctccaagaagatttataacaagcatacttatttctttacgcaattttgaaagaagaggaatagatgctatagctaattggcctggtaaaaataattttggtgaagtcttattctgctga

SEQ ID NO: 75176 - protein, 274 aa, Unknown
  Obtained from environmental sample
  misc_feature (1)..(274): Xaa is any amino acid
MVSWIGVEYSSFPKRKGYKDFDLIDLPFPLRKLYINPIGVLKQKKDGYEIERGVYNYPSVGDIVVIPNQNQLRAIVQNKDENACVQIGVSSLAANAPVFINPDKVFGRHIAILGNTGSGKSCSVAGLIRWSIESAKNKISVNDKLNTRFIILDPNGEYTDSFNNLVNVRKFQIVLDEKIASDKTIHQLKVPSWMWNSYEWSSIAQASGRTQRPLLRQALREIRSGGRPAENDDLIAPRRFITSILISLRNFERRGIDAIANWPGKNNFGEVLFC

SEQ ID NO: 75177 - DNA, 822 bp, Unknown
  Obtained from environmental sample
  misc_feature (1)..(822): n is a, c, g, or t
ttgatttgctttgacgacggcagctcagaaaccattgttagcgacgcttcctggacctgtaataaaagccctgtaactttttccgaaatctaccacggggaaacctacgatgcccggcttgaagaaaaaggctggaacgaaagcgggttttccggcgggctctggaagcctgtctttgttgaaagctcagatctttccgtgcttcatcctatggacgggcttccggtaaaagagcatgaacacttcaagccaaaggccttttttacaactcccggcggggacaaggttatagacttcggtcagaatatttccggttatgtgtgttttaccgtccagggaaaagccggcgaccgcgtaaaacttcgtcatgcggaggcgctcgataaggcgggcaatttatataccgaaaacttgagaagggccaggcagaccattgaatatacccttaaaggaggcgggaaagaaacttataagcctcattttactttccaaggttttaggtatatcgccgtagatgagtttccgggtacgcttgatcctccggattttgatacgaccacgtttgaggccatagcggtttactcaggaatgcggctagccgggtctttcaaatcttccaatgagctattgaatcagtttgtgagcaacgtaagctggagcatgaaggataattttgtcgatattcccaccgactgcccgcagagggacgaacggcttggctggacaggcgatgcggagatctttgtccgatcagcgggccttatcatggagaccgctccgtttttcagaaaatggcttaaggatcttgcggcttcccattaa

SEQ ID NO: 75178 - protein, 273 aa, Unknown
  Obtained from environmental sample
  DOMAIN (2)...(82): Alpha-L-rhamnosidase N-terminal domain
  misc_feature (1)..(273): Xaa is any amino acid
MICFDDGSSETIVSDASWTCNKSPVTFSEIYHGETYDARLEEKGWNESGFSGGLWKPVFVESSDLSVLHPMDGLPVKEHEHFKPKAFFTTPGGDKVIDFGQNISGYVCFTVQGKAGDRVKLRHAEALDKAGNLYTENLRRARQTIEYTLKGGGKETYKPHFTFQGFRYIAVDEFPGTLDPPDFDTTTFEAIAVYSGMRLAGSFKSSNELLNQFVSNVSWSMKDNFVDIPTDCPQRDERLGWTGDAEIFVRSAGLIMETAPFFRKWLKDLAASH

SEQ ID NO: 75179 - DNA, 540 bp, Unknown
  Obtained from environmental sample
  misc_feature (1)..(540): n is a, c, g, or t
ttgggaactcctttcgcctgccgggttcttgcggataacgacaggctcgatctggcctatgagctgcttcttaaaaccgatttcccaagctggctctaccaaatcaccaaaggcgccactaccatctgggaacactgggacggcatcaagcccgatggaaccatgtggagcgctgacatgaattcatttaaccattacgcctacggagctgtgtacgattggctctttacggatgtgggcggtatcgacacggaagaagcggctggttttaagcgtatagttttgaaacccaggccgggcagttcgctttcctgggcagaatgctcttacgaatcgccttatggaactatttacctgcgctgggaaaaaacaggcaagaacctaaaggcaaatataatgattcccccaaataccagcgcccggcttgtcatgcccaatgcggaacctgacacagcaaacggcatagcatttaccaaaactgaaggaaacgtcgaagcggtcctgggctcgggaacttattcttttcattttgttatttag

SEQ ID NO: 75180 - protein, 179 aa, Unknown
  Obtained from environmental sample
  misc_feature (1)..(179): Xaa is any amino acid
MGTPFACRVLADNDRLDLAYELLLKTDFPSWLYQITKGATTIWEHWDGIKPDGTMWSADMNSFNHYAYGAVYDWLFTDVGGIDTEEAAGFKRIVLKPRPGSSLSWAECSYESPYGTIYLRWEKTGKNLKANIMIPPNTSARLVMPNAEPDTANGIAFTKTEGNVEAVLGSGTYSFHFVI

SEQ ID NO: 75181 - DNA, 402 bp, Unknown
  Obtained from environmental sample
  misc_feature (1)..(402): n is a, c, g, or t
atgcctgaacatcatgatttattcaataaagaaagttttaaggaactcaaaaaaagtggttattcagaaattactgtaaaagctgttagttatataaatgaagggtataccgcagaagaagcttgggaaaagtcgtcatgcgaattatttgtaaaaggttcatctatgcaaaaaaatagtagtccaagaggagctttcttgggactattttcaaaagaccaaaaaaagttaactagcagaaatgctttttatgctcagaaagtgcttacaatattaaaaaatagtccaaataaaaagtttaaatctattgatttatggatgattgtattagaaaataatttcataaaacataattatcaaatggatgttgtattagctttatgggaaaataaattgatatag

SEQ ID NO: 75182 - protein, 133 aa, Unknown
  Obtained from environmental sample
  misc_feature (1)..(133): Xaa is any amino acid
MPEHHDLFNKESFKELKKSGYSEITVKAVSYINEGYTAEEAWEKSSCELFVKGSSMQKNSSPRGAFLGLFSKDQKKLTSRNAFYAQKVLTILKNSPNKKFKSIDLWMIVLENNFIKHNYQMDVVLALWENKLI

SEQ ID NO: 75183 - DNA, 480 bp, Unknown
  Obtained from environmental sample
  misc_feature (1)..(480): n is a, c, g, or t
atggatacttttatcggcgcaaaagaggagggtttggtacggttattcggcatcaccgctcacaacgcggagatgccgatcgaagcgattcgcaagtttaatttcgacacggtgatgttccctgttaattgggcgcttggactcggtgtgggtttcgaaaagaacctacccgaaatatgcgcagataaaaacatcggtctgcttgggatgaaaacgctagcgcacagaaaatggcgtgaaagcgaggaacacgtgtatccgaagtcgtggtgcaaaataatttttggcgacgataatttgggcaaactcgctatcaagtacaccttatcgcgaggcgtgaacgctgtcgtacctccggggaattttaaatcgttcaagttttgcgtggagaatatcgacgagtgcgttgacaacccgctcaacgcggacggtatcgcatatctcaaagagcttataccgagggatgaatatattttttaa

SEQ ID NO: 75184 - protein, 159 aa, Unknown
  Obtained from environmental sample
  misc_feature (1)..(159): Xaa is any amino acid
MDTFIGAKEEGLVRLFGITAHNAEMPIEAIRKFNFDTVMFPVNWALGLGVGFEKNLPEICADKNIGLLGMKTLAHRKWRESEEHVYPKSWCKIIFGDDNLGKLAIKYTLSRGVNAVVPPGNFKSFKFCVENIDECVDNPLNADGIAYLKELIPRDEYIF

SEQ ID NO: 75185 - DNA, 495 bp, Unknown
  Obtained from environmental sample
  misc_feature (1)..(495): n is a, c, g, or t
atggtaaaacaggcaaaacttattgagaatcttgtcggagcgctggtttttgttattgcgctgcttacgtttttttccacgattgcgccgacggtttcgttttgggactgcggagaatacatagcggcgagttatactttgggcatcccgcatccgcccggcaatccgctttacattttggtcgcgcgaatctttacgatgatatttttctggacgcagcaggtcgcgctcagaataaatctgctctcggtcgtaacagcagcgataacggcgtttttccttcacaaaatagtcgttttcgccatgaaggactggttcggcgaacttgacgaaaaatggaaagtcgcgacggttaatatcgccggattcgtgggagcgctttttggggttttcaattatactttttggttttcggcggtagaaagttcggtttatattcccgcaattttaacgatagttctcaacgtttacatagttctcatctcggccatctga

SEQ ID NO: 75186 - protein, 164 aa, Unknown
  Obtained from environmental sample
  misc_feature (1)..(164): Xaa is any amino acid
MVKQAKLIENLVGALVFVIALLTFFSTIAPTVSFWDCGEYIAASYTLGIPHPPGNPLYILVARIFTMIFFWTQQVALRINLLSVVTAAITAFFLHKIVVFAMKDWFGELDEKWKVATVNIAGFVGALFGVFNYTFWFSAVESSVYIPAILTIVLNVYIVLISAI

SEQ ID NO: 75187 - DNA, 393 bp, Unknown
  Obtained from environmental sample
  misc_feature (1)..(393): n is a, c, g, or t
atggagattgaagaaaacgcgatacgcgggggcgatgaagatgaaattgagagcgttgcgcagagtatcgcggacagcccgtcggcgcttggcgaaaacgtgaaaaactacgcttttggaatcgtaaagttcgcggctcaaaatctgaaagaaacggacgcggcgctttcaaaatacgtgcaaagctggtcgtttgagcgtatgagcgctatggatagaaacttgttaagaattgccgtttcggagttggacgaaaaatttgcggttccgcctgctgtggttataaacgaggcgatagaaatagcgaaaatttttgggacggacgattccgctaaatttataaacgcggttttggacaaagttaaaagagaaatattaactgaaaacaaatag

SEQ ID NO: 75188 - protein, 130 aa, Unknown
  Obtained from environmental sample
  DOMAIN (2)...(125): NusB family
  misc_feature (1)..(130): Xaa is any amino acid
MEIEENAIRGGDEDEIESVAQSIADSPSALGENVKNYAFGIVKFAAQNLKETDAALSKYVQSWSFERMSAMDRNLLRIAVSELDEKFAVPPAVVINEAIEIAKIFGTDDSAKFINAVLDKVKREILTENK

SEQ ID NO: 75189 - DNA, 363 bp, Unknown
  Obtained from environmental sample
  misc_feature (1)..(363): n is a, c, g, or t
atgggcctaccgttggcgcatgagttactggcacatgtacgtaacccntacgcgcagccgcacagcattaatctgacgcaattacccatcagcgaggctgatcggctttttctctcacgtctctgtgggccgggaaatattcagattcgtaccattggctatggcgagagctatatcaacgccacggggttacgccatgtctggcatttacgctgtacggacaccttaaaaggcccgttactggaaagttatgaaatctgcccaataccggaagtggtgctggcagcgccagaagatttggtcgactctgcgcagcggcttagcgaggtatgtcagtggctggcggaagctgcaccgacgtaa

SEQ ID NO: 75190 - protein, 120 aa, Unknown
  Obtained from environmental sample
  DOMAIN (2)...(115): HupH hydrogenase expression protein, C-terminal conserved region
  misc_feature (1)..(120): Xaa is any amino acid
MGLPLAHELLAHVRNPYAQPHSINLTQLPISEADRLFLSRLCGPGNIQIRTIGYGESYINATGLRHVWHLRCTDTLKGPLLESYEICPIPEVVLAAPEDLVDSAQRLSEVCQWLAEAAPT

SEQ ID NO: 75191 - DNA, 543 bp, Unknown
  Obtained from environmental sample
  misc_feature (1)..(543): n is a, c, g, or t
atgggctacatcaggttaattcacttcagcgccgggatggtttttaccgtggttttgctgatgcggatctactgggcttttgttggcaatcgatactcccgcgagctgtttatcgtgccggtatggcgtaaaagctggtggcagggcgtgtggtatgaaatccgctggtatctgtttctggcaaaacgtccgagtgccgatataggccataatcccatcgcccaggcggcgatgttcggctatttcctgatgtcggtctttatgatcatcactggttttgcgctgtacagcgaacacagccagtacgctatttttgcgccgttccgttatgtggtggaatttttctactggacgggtggcaactcaatggacattcacagctggcatcggctggggatgtggctgattggcgcgtttgtgatcggtcatgtctacatggcgctgcgtgaagacatcatgtccgacgacacggtgatctccaccatggtcaacggctaccgtagccacaaatttggcaaaataagtaacaaggagcgttcatga

SEQ ID NO: 75192 - protein, 180 aa, Unknown
  Obtained from environmental sample
  DOMAIN (1)...(165): Cytochrome b561 family
  misc_feature (1)..(180): Xaa is any amino acid
MGYIRLIHFSAGMVFTVVLLMRIYWAFVGNRYSRELFIVPVWRKSWWQGVWYEIRWYLFLAKRPSADIGHNPIAQAAMFGYFLMSVFMIITGFALYSEHSQYAIFAPFRYVVEFFYWTGGNSMDIHSWHRLGMWLIGAFVIGHVYMALREDIMSDDTVISTMVNGYRSHKFGKISNKERS

SEQ ID NO: 75193 - DNA, 846 bp, Unknown
  Obtained from environmental sample
  misc_feature (1)..(846): n is a, c, g, or t
ttggacgacgaaataattttgagcgataaaaacgatttcggctaccctgcgctttgtgcgcaggcggacggcgtagatatcgtttggtttgcgtcgcctaaaacagccgccgagaaaaatcctttcggattggcgaaacttttgcaattttccttgagcgaggatttcggctggttggaaaaaaatctgcggataccgcaaaacgtaaaattgcccgcaaaggcgtacggaggaagcgaatccgtatcaaaacgtctgtttgaaatcgtcagagacgctgtttgctttcccgtaatcgacgtaacaaattggcggcaattcgacgaagtacgcaaaacacgtttggaaattttgcgaaaaagcgaaaaaaccgccgtaaacgattttgtaaaattggcaaattccgtgtcgaaagtccggcagtatttggatgcgaatattgcgaaaatgccgaagtcaaaaatacttcaaaacataaaaaacgaacttgaaacttacgtcgaacaatttgtttcggggtattgcccgctggtgatttttgagagatattcgttttatgtagaggcgcttatctgcaaaacggacaagggcttaaattcgccgaaacactttgaagagtgcgaaaaaactattaacttttatcatgaaaaatctgtggaatttgtcgcaaagatacatgaaaaacctgtggaatttgaggcgtttacggaaaaattttgctttttggtggaagaattgtcgctgaaattgttcgccgagccgaaaattaaaccgattgaaaacgttttcgtaaagaagctggagaaatttctggaagaaaacggcgtatttcgcctcgttcattaa

SEQ ID NO: 75194 - protein, 281 aa, Unknown
  Obtained from environmental sample
  misc_feature (1)..(281): Xaa is any amino acid
MDDEIILSDKNDFGYPALCAQADGVDIVWFASPKTAAEKNPFGLAKLLQFSLSEDFGWLEKNLRIPQNVKLPAKAYGGSESVSKRLFEIVRDAVCFPVIDVTNWRQFDEVRKTRLEILRKSEKTAVNDFVKLANSVSKVRQYLDANIAKMPKSKILQNIKNELETYVEQFVSGYCPLVIFERYSFYVEALICKTDKGLNSPKHFEECEKTINFYHEKSVEFVAKIHEKPVEFEAFTEKFCFLVEELSLKLFAEPKIKPIENVFVKKLEKFLEENGVFRLVH

SEQ ID NO: 75195 - DNA, 651 bp, Unknown
  Obtained from environmental sample
  misc_feature (1)..(651): n is a, c, g, or t
ttgagtcttaccacaacatggcgcttctttcacgcatcagcgccgtacagtactgacgtgcaacgcatcgccgccgtgccggggcgtcttttcttgccggcatactttgccgcagcctgtctggtgctgtgtatgtcgtttggcgcacaagcgccttgtgccgctcaggatgccgcgccggcgcaaagtccgcagcacaaggcggctgcggacaaacagacgacgaaaagcgcgcccgctgcggcccggaagggactgccggcgcaggatgtctacgcgcaagacccctataccgaaaaggaactggtgcgcttcatcgagagcatgccgcattttctcacgtgggcgagaagcggcagcaagccgcaggcgcatccggtgaccaacgccgcagggaaacccgattttacctatacgccggaggcggccgccaaaacgcgggaactcggctgggaacccagacgttttttctgcctgatgggaagaactgcggcagccctgtatcttgtaggcgagggcacggatctcatgcttgccctgccccccgacatgccgacggtcaccgagacggaaatggcgctggtgcgcaagcacctggctgcgctgctgcgcgccggcgcaagtgattccncgcccgccctcgcccgctga

SEQ ID NO: 75196 - protein, 216 aa, Unknown
  Obtained from environmental sample
  misc_feature (1)..(216): Xaa is any amino acid
MSLTTTWRFFHASAPYSTDVQRIAAVPGRLFLPAYFAAACLVLCMSFGAQAPCAAQDAAPAQSPQHKAAADKQTTKSAPAAARKGLPAQDVYAQDPYTEKELVRFIESMPHFLTWARSGSKPQAHPVTNAAGKPDFTYTPEAAAKTRELGWEPRRFFCLMGRTAAALYLVGEGTDLMLALPPDMPTVTETEMALVRKHLAALLRAGASDSXPALAR

SEQ ID NO: 75197 - DNA, 501 bp, Unknown
  Obtained from environmental sample
  misc_feature (1)..(501): n is a, c, g, or t
atgccgcgggcggaaaaaatttccatcaactccggcgcggtcaaaaacccggacctcatcagccggggcgcgacggccttcggctcccaggccgttgtcgtcggtatggacgtacgcaggacggccgtttcggaaaagatgccttccggctatgaaatcgtcatccacggcggccgcaagggcatggagatggacgccgtggcctgggccgtgcgttgcgaggagttgggcgccggcgagctgtgcgtcaactccatcgacgccgacggcaccaaggagggctatgagttgaccctgaccggcatgatcagcgaggccgtgcgtatcccggtcatcgcctccggcggggcgggcgcacccgctcatctttacgacgccgtgacgcagggaggcgccgcagccgcgcttatcgcctccatcgtccactacggcgaatataccattcgggaactcaaggaatacctgcacgggcgcggcgtgcccatgcgcatgagctggtag

SEQ ID NO: 75198 - protein, 166 aa, Unknown
  Obtained from environmental sample
  DOMAIN (3)...(147): Histidine biosynthesis protein
  misc_feature (1)..(166): Xaa is any amino acid
MPRAEKISINSGAVKNPDLISRGATAFGSQAVVVGMDVRRTAVSEKMPSGYEIVIHGGRKGMEMDAVAWAVRCEELGAGELCVNSIDADGTKEGYELTLTGMISEAVRIPVIASGGAGAPAHLYDAVTQGGAAAALIASIVHYGEYTIRELKEYLHGRGVPMRMSW

SEQ ID NO: 75199 - DNA, 675 bp, Unknown
  Obtained from environmental sample
  misc_feature (1)..(675): n is a, c, g, or t
gtgcaggaactggaaatatgcgccgtatgcgccgatttgccggggaaacgtttttacgaatacggtaaatacgagatcggcgcggttgttcaacttgcgaaatacgcggcggcgcttaattgcactatattaacggggcacatcggggtaatccccgaaaaagattgccgcgaaaaagaaaatctgcggcgtgtctttacggaaaccgtcgccgcatgccgcgaatacggcgcgatattcgccgtggaaaccgggccggaagatgcgccggttttgcgggagtttatcaacggaatagacggcgcggcggtcaatttcgatcccgctaacctcgtcatggtgtgcggttcggatgccgtgaacgcatggcgtgcgctacgcgacaaagttgtccacattcacgtgaaggacggcgtaaggctaaaaaccgccgatccgaaggtaatttacggggcgatagagggcggagggttacttaatttaggcgaatactttaacgaaacagagcttggttcgggcggcgtaaattgggaaaaactgtatccagtcatggcggcggacggttacgacggatattttacgttagaacgcgaatttacggtggccgcgccatttgtggctgatattttggcaaagtctgcgtgttttatggaagcggcaggagggtgtgtatga

SEQ ID NO: 75200 - protein, 224 aa, Unknown
  Obtained from environmental sample
  DOMAIN (1)...(175): Xylose isomerase-like TIM barrel
  misc_feature (1)..(224): Xaa is any amino acid
MQELEICAVCADLPGKRFYEYGKYEIGAVVQLAKYAAALNCTILTGHIGVIPEKDCREKENLRRVFTETVAACREYGAIFAVETGPEDAPVLREFINGIDGAAVNFDPANLVMVCGSDAVNAWRALRDKVVHIHVKDGVRLKTADPKVIYGAIEGGGLLNLGEYFNETELGSGGVNWEKLYPVMAADGYDGYFTLEREFTVAAPFVADILAKSACFMEAAGGCV

SEQ ID NO: 75201 - DNA, 687 bp, Unknown
  Obtained from environmental sample
  misc_feature (1)..(687): n is a, c, g, or t
atgctcctggacacgcaggtagaaagtaacgttacggcatgcgtggggcaggtcatacgtttttgggacgaatatgtattcttgaaagaaataattgacaagaatacctacggcaaattaaagagcatagcgttaaaacgtctgagtccgttgccaacatgggcatgggagaattggctgcatgacgaaaagcgcagcggcggcatgacgcttgatctgcatattcacgataccgattgcgcgcgctggctgctgggcgaacccaaagaagtttgttcccatgcgcagaaaggcgccaagggtgaaattgaacatatttttacccaattttactataccgacaaaatcgtttctgtcgagggttgctgggattttccgaaggactttcctttcgagatgtcgtatctggcgcgtttcgagcaggcgacggccgctttctcttcgctgaaaaatccttcggttacggtttataaggccgaaggcggcgtattatcgcctgaaataaagacacagttttccgacaacaacgacatcggcggcaatttgtcgtcgctcggcgggtatttcggtgaattgaaatattggctggaatgtatacgtgaaaataaagcgccggaaattgcgcctctttctgagggtataaagtcttttgaactggtaatgaaagaaattgaatcgtgcaaataa

SEQ ID NO: 75202 - protein, 228 aa, Unknown
  Obtained from environmental sample
  DOMAIN (29)...(169): Oxidoreductase family, C-terminal alpha/beta domain
  misc_feature (1)..(228): Xaa is any amino acid
MLLDTQVESNVTACVGQVIRFWDEYVFLKEIIDKNTYGKLKSIALKRLSPLPTWAWENWLHDEKRSGGMTLDLHIHDTDCARWLLGEPKEVCSHAQKGAKGEIEHIFTQFYYTDKIVSVEGCWDFPKDFPFEMSYLARFEQATAAFSSLKNPSVTVYKAEGGVLSPEIKTQFSDNNDIGGNLSSLGGYFGELKYWLECIRENKAPEIAPLSEGIKSFELVMKEIESCK

SEQ ID NO: 75203 - DNA, 564 bp, Unknown
  Obtained from environmental sample
  misc_feature (1)..(564): n is a, c, g, or t
atgttcgccggggtcatgatttcgtatgtcattgtgaagatgaaggtgcgcggcaaagggattctggagtttctgggcatgctgcccttttccgtacccggctcggtcatcgccctcggcgtgatcctggcctggagcggcaaatacggcatcaacctgtacaacacggtctggatcatcctggtggcgtatattgcgcgctacatggccttttcgctcaaagccaactccgccgctctggagcaggtgcatgattccctggtcgaagccgcgcgcgcgtccggcgcgagcatggggcaggcgctcagggacattgtgctgcctctggtgcggcccggcatgctggcggcttttttcctcatctttttgccctcgttgcgggaactgaccgtctccgtcatgctgtacgcccccacgacgcgcaccctcggggtggccatctacaccctgaatgaagacggcgaaaccgtcgtttccgccgccttggccggagtggcgctgatcctcatcatcaccggacaaatcctgatcaaccgcttcacggcaaaaaaagcgagagggtga

SEQ ID NO: 75204 - protein, 187 aa, Unknown
  Obtained from environmental sample
  DOMAIN (1)...(186): Binding-protein-dependent transport system inner membrane component
  misc_feature (1)..(187): Xaa is any amino acid
MFAGVMISYVIVKMKVRGKGILEFLGMLPFSVPGSVIALGVILAWSGKYGINLYNTVWIILVAYIARYMAFSLKANSAALEQVHDSLVEAARASGASMGQALRDIVLPLVRPGMLAAFFLIFLPSLRELTVSVMLYAPTTRTLGVAIYTLNEDGETVVSAALAGVALILIITGQILINRFTAKKARG

SEQ ID NO: 75205 - DNA, 723 bp, Unknown
  Obtained from environmental sample
  misc_feature (1)..(723): n is a, c, g, or t
atgctggactgtacctgtccggtctgcgctcgggacaatccgaaaaacaaacgcntgcgttcttccgtgcttttgaccaagacgggcaaaaatttattgatagacgcttcggcggatttccgccagcaggggctgaaacataatatctgcgcgctggaagcaattttgctcacgcacattcatgccgaccatatttttggtctggatgaaatgcgccgctacaatcaaactgcgcaaaagagcttaaaagtttttctttccgcggattttgaccgggagattcgcgaggtgatgcgttatctctatgcgccgcccaaacagttaggcggcggtatttccctgctggacaatcaaattctggagccgctgcaaactctggagattgccggatttacggttaccgctttgccgcttaaacacggactgctggatatttacggctaccgggtggacaattttgcttatttgacggactgctcgtacataccgccggaaactttcgcggccttgcagggcgtggagatagttgcgctggatgccctgcgcgacacgccgcaccccacgcatttttctatcgggcaggcggtggaagcggcgcggcaaatcaacgcgcggcagacttacttcacgcatatcgcccacaatctggaacatgaaaccgtaaatcaaaaactgccgcccggcatgcagctggcctatgacggactggagttaacatgttag

SEQ ID NO: 75206 - protein, 240 aa, Unknown
  Obtained from environmental sample
  DOMAIN (19)...(211): Metallo-beta-lactamase superfamily
  misc_feature (1)..(240): Xaa is any amino acid
MLDCTCPVCARDNPKNKRXRSSVLLTKTGKNLLIDASADFRQQGLKHNICALEAILLTHIHADHIFGLDEMRRYNQTAQKSLKVFLSADFDREIREVMRYLYAPPKQLGGGISLLDNQILEPLQTLEIAGFTVTALPLKHGLLDIYGYRVDNFAYLTDCSYIPPETFAALQGVEIVALDALRDTPHPTHFSIGQAVEAARQINARQTYFTHIAHNLEHETVNQKLPPGMQLAYDGLELTC

SEQ ID NO: 75207 - DNA, 780 bp, Unknown
  Obtained from environmental sample
  misc_feature (1)..(780): n is a, c, g, or t
ttgtcaaaacccgttttaagcagattgttagaagcacaatttgcagacatgctgtatagagaagattttctttcgaattacaatcatgttcggataaaagattcgacaaaatttaatgttccgaataatttggcagagcattacaaaggttgcggcggacatgaaggttgtcttcttgccggcatatcgattcaatacgaatttgatttaaaaacaggtaaaattcttgacttgaacattaccgcatcagtccgtaatgaccgaactgatgcatcagagtcatcagaaaatgtttgtgaaaacgatttgataatacgtgatctggggtatttttcaatcgccgtatttcgtaaaatattagagcaacaagcgtattatctgtctcgacttgacacatccctgattgtttatgatgaaaaaggagaagaattggattttaaaaaattgtatgaaaacatgatacaaaccggtatagaacaagtcgaaaagcaagttcttcttggcaaggtaaaatttcctgtacgtatgttaataggtaccgttcccgaacatgtatacgaggaacgcatccgtcgcaaacagaaacaggaaaaaaagaatggacgtaaaatgcaggaaaaaactaaattgctatatcattttaatctctttgttacaaatgccaaagaggacaaattacctttggacaaaatcatgccattgtatttgtttcgttggcagatagaactaatgttcaaaaattggaagtcggttttttcaatacataactttcaaaaatga

SEQ ID NO: 75208 - protein, 259 aa, Unknown
  Obtained from environmental sample
  DOMAIN (30)...(257): Transposase DDE domain
  misc_feature (1)..(259): Xaa is any amino acid
MSKPVLSRLLEAQFADMLYREDFLSNYNHVRIKDSTKFNVPNNLAEHYKGCGGHEGCLLAGISIQYEFDLKTGKILDLNITASVRNDRTDASESSENVCENDLIIRDLGYFSIAVFRKILEQQAYYLSRLDTSLIVYDEKGEELDFKKLYENMIQTGIEQVEKQVLLGKVKFPVRMLIGTVPEHVYEERIRRKQKQEKKNGRKMQEKTKLLYHFNLFVTNAKEDKLPLDKIMPLYLFRWQIELMFKNWKSVFSIHNFQK

SEQ ID NO: 75209 - DNA, 522 bp, Unknown
  Obtained from environmental sample
  misc_feature (1)..(522): n is a, c, g, or t
gtgatcgaccttgcgaagctcacggacgagggcctccacttggacggctccatcgcctccgtgcgcctgggcgaaaacgacgcccttgcatccctgagctggaaaatgtttatcctgccctccagcggggacttcttcttcgatgtccaggcgcgggccgtgtacgaatgcacctgttgccgctgcctcgagcccatcgacgtgccactggccatacactcgcagtttttggggagccgcgacaggaccctggtggccagaggctcgcacactttgggcacccaggacctcgacgtcgtttacatgcccgaggagacgctggacgaagaggccatggccagggaacagttggtgctgcagctccccatgcaggtgctttgcaaagatgactgtcttgggttatgctctgtatgtggcaaaaattggaacaaggggccgtgtgcttgccgtctcgaacgcacaaagacccaaggggcgctggcaagggccctaacggaagccaggctggggtctgacgcctga

SEQ ID NO: 75210 - protein, 173 aa, Unknown
  Obtained from environmental sample
  DOMAIN (3)...(171): Uncharacterized ACR, COG1399
  misc_feature (1)..(173): Xaa is any amino acid
MIDLAKLTDEGLHLDGSIASVRLGENDALASLSWKMFILPSSGDFFFDVQARAVYECTCCRCLEPIDVPLAIHSQFLGSRDRTLVARGSHTLGTQDLDVVYMPEETLDEEAMAREQLVLQLPMQVLCKDDCLGLCSVCGKNWNKGPCACRLERTKTQGALARALTEARLGSDA

SEQ ID NO: 75211 - DNA, 591 bp, Unknown
  Obtained from environmental sample
  misc_feature (1)..(591): n is a, c, g, or t
atggactttacctctacgctcagaattaatccaaatgatactgatgctttaataggtctcggtaaaatagaaatagggaagaatgttgacaaagcaattgcttactttacacaagcaatacgacttaatcccaatgatgtagatgctcttgtagaacgtggtaatgtatatcgtttaaataagcaagattatgacagggctattacggactttacacaagcaatacgacttaatcccaatgatgaatatgcctatctctatcgaggtttggtatatcattataataagcaagactatgacagggctattgcagactatacacaagtaatacgacttaaccccaatgataatgcctactaccatcgtggttttgcatactataacaaaaaagactttgatcgggctatcacagattatacacaagccatacggctttttcccgatcatgagtatgcctacaccaatcgtggtaaggcgtacgaaaaaaaaggggataaaaatagggctattgcggattttgaaacagctttaaagatcaatccagattttaccgaagctatagataatttaagacgagttcgcggatggtaa

SEQ ID NO: 75212 - protein, 196 aa, Unknown
  Obtained from environmental sample
  DOMAIN (14)...(46): Tetratricopeptide repeat
  misc_feature (1)..(196): Xaa is any amino acid
MDFTSTLRINPNDTDALIGLGKIEIGKNVDKAIAYFTQAIRLNPNDVDALVERGNVYRLNKQDYDRAITDFTQAIRLNPNDEYAYLYRGLVYHYNKQDYDRAIADYTQVIRLNPNDNAYYHRGFAYYNKKDFDRAITDYTQAIRLFPDHEYAYTNRGKAYEKKGDKNRAIADFETALKINPDFTEAIDNLRRVRGW

SEQ ID NO: 75213 - DNA, 315 bp, Unknown
  Obtained from environmental sample
  misc_feature (1)..(315): n is a, c, g, or t
gtggcactggcccgccttcaacatcgcggactgcgccatctgcatcggcgccgggctgacctgcctcgccctgtggcgcgctccggcggacaaaggcgccagaccatgacggccgtgtttgacctctcccctgcccaagcggccctgtgctttgcgccggcactcatcaacctgtgggccatctggcatgcggccacgcgcaagtttcccggccagatcgaacaggccgcgtggatcgcggtctgcatgctcgtgcccgtgatcggcggcttggcgtacctgtgctgcggcatgcgccgcggcggcaaggcgtaa

SEQ ID NO: 75214 - protein, 104 aa, Unknown
  Obtained from environmental sample
  misc_feature (1)..(104): Xaa is any amino acid
MALARLQHRGLRHLHRRRADLPRPVARSGGQRRQTMTAVFDLSPAQAALCFAPALINLWAIWHAATRKFPGQIEQAAWIAVCMLVPVIGGLAYLCCGMRRGGKA

SEQ ID NO: 75215 - DNA, 636 bp, Unknown
  Obtained from environmental sample
  misc_feature (1)..(636): n is a, c, g, or t
atgacgcttaacgggaatactttgtctaacatcaaaaacggcaatacaaccctttcaagcagcaatgactactcaacgagcggcagtacagtaacgattaagaaagcatacttggcggcgcaggctaatggtacagtaacgcttacattcaacttcaacgctggctcagcccaaactcttactatcactgtaaaggatacgaccggcggagcggcgggaacaacttacaacttcgcgaatgataacctgcccaccggatatcctaagtacagttcaagtgaaatatccgcgacaataaccggaggagttttggtagtaaccaaaaccggcggttattcaaccccgaagattacattaccctttagtgttacaggcaacctttccggttatacaggcataaagataaatgtaaagggagtgtccggagatttccaaaacaaacaattgtatgccgcaataggttcaacgaatcttggcagcgtaaataacgctccaattccaaacggttcatttggagatgtaacaataccgataagcggcggaggtactaataccggagatatagaaatatcgttctggctcaataatacaaatgcttatgttattgagataaagagcatagagttgataaaataa

SEQ ID NO: 75216 - protein, 211 aa, Unknown
  Obtained from environmental sample
  DOMAIN (1)...(64): Domain of unknown function
  misc_feature (1)..(211): Xaa is any amino acid
MTLNGNTLSNIKNGNTTLSSSNDYSTSGSTVTIKKAYLAAQANGTVTLTFNFNAGSAQTLTITVKDTTGGAAGTTYNFANDNLPTGYPKYSSSEISATITGGVLVVTKTGGYSTPKITLPFSVTGNLSGYTGIKINVKGVSGDFQNKQLYAAIGSTNLGSVNNAPIPNGSFGDVTIPISGGGTNTGDIEISFWLNNTNAYVIEIKSIELIK

SEQ ID NO: 75217 - DNA, 399 bp, Unknown
  Obtained from environmental sample
  misc_feature (1)..(399): n is a, c, g, or t
gtgggggtggtgctgagcggcatgaccgaaatgtcccagctggacgagaacctggtcatagccgacgcggccgggcccttgagcggcaaggaaacggcggccctggacctggtcaaggaaatgttcaaaaaaaggctcaaggcgggctgcaccgcctgcggctattgcctgccctgcgcccagggcgtggccattcccaaggtcatcggccactacaacgattaccacctcatggacgccgaagaagtccgcgaacgggccaagttcatcttcggcgcccagatggccccccatgaatacccccggcactgcaccggctgccgggagtgcgaagaaaaatgcccccagcgcctgcctgtcagtgaaatcatggtcgaagcgacccagctcttcccctga

SEQ ID NO: 75218 - protein, 132 aa, Unknown
  Obtained from environmental sample
  DOMAIN (97)...(120): 4Fe-4S binding domain
  misc_feature (1)..(132): Xaa is any amino acid
MGVVLSGMTEMSQLDENLVIADAAGPLSGKETAALDLVKEMFKKRLKAGCTACGYCLPCAQGVAIPKVIGHYNDYHLMDAEEVRERAKFIFGAQMAPHEYPRHCTGCRECEEKCPQRLPVSEIMVEATQLFP

SEQ ID NO: 75219 - DNA, 462 bp, Unknown
  Obtained from environmental sample
  misc_feature (1)..(462): n is a, c, g, or t
atgccgccgctggtcatggccgtcatcctgggaggtctccagggacttagcgaatttctgcccatatcatcttccgggcacctggtcctggcccaggctttcttcggccttacggaaccggaactggcctttgacctgactctccatctcggaaccctcacggcggtcttcatcttctaccgccggcccttgggccgcctgttccgtgagcttcaattcctgccccgggccttgaccgacccggcccgcctgcggaccctttaccgggagcggcccgacttccgcttcggccttttgatagtggccggcagtctgcccacggcgattctgggcctctggctgaaagacctggtgaccgcccgcctggccacggtggaagccgtgngcccggccctcctggccacgggcttcatgctggccgccctgggccgccggggggnggggcggggcggaccaacctga

SEQ ID NO: 75220 - protein, 153 aa, Unknown
  Obtained from environmental sample
  DOMAIN (6)...(151): Bacitracin resistance protein BacA
  misc_feature (1)..(153): Xaa is any amino acid
MPPLVMAVILGGLQGLSEFLPISSSGHLVLAQAFFGLTEPELAFDLTLHLGTLTAVFIFYRRPLGRLFRELQFLPRALTDPARLRTLYRERPDFRFGLLIVAGSLPTAILGLWLKDLVTARLATVEAVXPALLATGFMLAALGRRGXGRGGPT

SEQ ID NO: 75221 - DNA, 432 bp, Unknown
  Obtained from environmental sample
  misc_feature (1)..(432): n is a, c, g, or t
ttgagaaaaacctccccgataatgccgtcttatattcaactgacagcaccactaacaacggatagatatatgaaacaccataaagttactggttttgcaagtccggcgcaagggtacgaaatgcagggcattgaccttaacgacctgttaattagacgccctgccgctacttttttctttcctgtggaagatgatgccgcaaaaagcatttccatacataacggctcattactggttgttgacagatctgttaaagccaaacctgatgatttagtagtaatagcgcatgaaggccgtattatgtgccgccgttttattttgcgagataatgaaaaattttttactgacggggtaaacatatttaaacctattaaagatgatacctctatattgggagttgtaaccgcttctatacaggtttttgacaaataa

SEQ ID NO: 75222 - protein, 143 aa, Unknown
  Obtained from environmental sample
  misc_feature (1)..(143): Xaa is any amino acid
MRKTSPIMPSYIQLTAPLTTDRYMKHHKVTGFASPAQGYEMQGIDLNDLLIRRPAATFFFPVEDDAAKSISIHNGSLLVVDRSVKAKPDDLVVIAHEGRIMCRRFILRDNEKFFTDGVNIFKPIKDDTSILGVVTASIQVFDK

SEQ ID NO: 75223 - DNA, 852 bp, Unknown
  Obtained from environmental sample
  misc_feature (1)..(852): n is a, c, g, or t
atggataatgatgaatttgataccgagcaaaaattgttggaagaaagcgagctgcccaattatcgtgagaaaattaaaaaagccagagatagcgcattggaacagtttcagaatgattttttggctaaactcaaatccagtatcgatcaagttcaggatcaagtaaaaaatttgaacaaggctctggaggatgcgtcatttggtaccgataaatatcgtttttttgttggacgcaatccggattatactgattattataatatgataatggatcccgaattgatggagggtaatgaagggctgtttgcgcaggctttccagcagaaatatggtacattgatagaagatttgttcagcagaattacaacttccgacgacactcaacttaatgctcgtaaacagagcgaacttcaacagaatattgaacgttatactgactttcggacttatttaaaatttgatctggaaacgactgattcaaatgggaataaacagatgctttctcaaaccatgaatacaaaatcaggcggagaaacgcaaacgccgttttatattgctatttttgcttcatttgcccaattatatcgtgttaatgatcaatccagtcttggcaatactgttcgtctggtgattttcgatgaggcatttaataatatggacagtaaccgcattattgaaagtgtccgcctgctgcgaaagatgcgtcttcaggctatcatctgtactcctccgcataaggtgcctgatattatgcctaaagcggattgtactctgtatgtatgcaaagataaatacactatggaggttttcccttatggcaaggaggttattgatacatggagcaagaattaa

SEQ ID NO: 75224 - protein, 283 aa, Unknown
  Obtained from environmental sample
  misc_feature (1)..(283): Xaa is any amino acid
MDNDEFDTEQKLLEESELPNYREKIKKARDSALEQFQNDFLAKLKSSIDQVQDQVKNLNKALEDASFGTDKYRFFVGRNPDYTDYYNMIMDPELMEGNEGLFAQAFQQKYGTLIEDLFSRITTSDDTQLNARKQSELQQNIERYTDFRTYLKFDLETTDSNGNKQMLSQTMNTKSGGETQTPFYIAIFASFAQLYRVNDQSSLGNTVRLVIFDEAFNNMDSNRIIESVRLLRKMRLQAIICTPPHKVPDIMPKADCTLYVCKDKYTMEVFPYGKEVIDTWSKN

SEQ ID NO: 75225 - DNA, 639 bp, Unknown
  Obtained from environmental sample
  misc_feature (1)..(639): n is a, c, g, or t
atgaatacgatgattgccaatatggaaacgtttagttcgcataattttatcggcaaaagtgattatatctggcgaaacggcattaagcatgattgctcgaaagttatggagtttgatattatggattctttactaataaatggttatggggagactgttgatatagaggacgatttattgtatcccttgttaaaaagttcagacgtcgcaaatgggaaaatagaaataagaaaaaaagttcttgtaacccagaggcatatgggcgaagatactggctatatacaatcaaaattccctaagacatggaaatatctcaatgatcacgcaaatgattttgagaaaagaaaaagtaatatatataaaaaccgaccaaaattttcaattttttctataggtgattattgcttttatccctataaaatcgctatttctgctctttataaaaaaataaatttcaaaatgatttgtcctataaatgggaagccggtaatggttgatgatacctgcaattttatatcatgtgaaaatgaatctgaagcgaatttattattttgtcttttaacagatgaacggactaacattttccttgaatcaataatattttgggattcaaaacgacccataacaacagaaatttga

SEQ ID NO: 75226 - protein, 212 aa, Unknown
  Obtained from environmental sample
  misc_feature (1)..(212): Xaa is any amino acid
MNTMIANMETFSSHNFIGKSDYIWRNGIKHDCSKVMEFDIMDSLLINGYGETVDIEDDLLYPLLKSSDVANGKIEIRKKVLVTQRHMGEDTGYIQSKFPKTWKYLNDHANDFEKRKSNIYKNRPKFSIFSIGDYCFYPYKIAISALYKKINFKMICPINGKPVMVDDTCNFISCENESEANLLFCLLTDERTNIFLESIIFWDSKRPITTEI

SEQ ID NO: 75227 - DNA, 732 bp, Unknown
  Obtained from environmental sample
  misc_feature (1)..(732): n is a, c, g, or t
atgcgcccccaagagatcccccgctacgttgagcaggggatcatagacgcgggcatcacaggccaagactgggtcgccgagaacgaggctgatgtcgtggaggtaacggaactgcactacagcaaggcttcgcggcagaagtgccgctggatactggccgttccggaggacagcccgttccaacgcgcagaagacctaaccggcaaacacatcgccactgagttagtaggaacaaccaagcgcttcttcgactccaaaggcgtaaaagacgtccgtatagaattctcatggggcgccacggaggtcaaacctccgcgccttgccgacgcgatcgttgacataacggaaaccggatcgtcattgaaggcgaatcgattgagaattattgaaacgctgatggaaacatgcaccgtcataatagccaacaaagcggcatgggcggacgagaacaaacgcggcaaactggaaaacttgaaaatgctgttgcaaggcacgctggacgcggaaaactacgtaggccttaagtgcaacatagaggagtctaagctaggcgaaataatatcaatactgccggctttgcacaacccaaccgtatcaaaactatccgacggaaattggtgcgcggtagacacaatattgtcggcgaaacagaccaaacatatcattccgctattaaagcgggcggnggcgtcggggattatcgagtatccgattagtaaggttattacgtga

SEQ ID NO: 75228 - protein, 243 aa, Unknown
  Obtained from environmental sample
  DOMAIN (167)...(241): HisG, C-terminal domain
  misc_feature (1)..(243): Xaa is any amino acid
MRPQEIPRYVEQGIIDAGITGQDWVAENEADVVEVTELHYSKASRQKCRWILAVPEDSPFQRAEDLTGKHIATELVGTTKRFFDSKGVKDVRIEFSWGATEVKPPRLADAIVDITETGSSLKANRLRIIETLMETCTVIIANKAAWADENKRGKLENLKMLLQGTLDAENYVGLKCNIEESKLGEIISILPALHNPTVSKLSDGNWCAVDTILSAKQTKHIIPLLKRAXASGIIEYPISKVIT

SEQ ID NO: 75229 - DNA, 657 bp, Unknown
  Obtained from environmental sample
  misc_feature (1)..(657): n is a, c, g, or t
atgaacacaacaacatcacagatttcatacactacgagagaagaaaccgcgcattcaattcttcacggactagggacgctggctgcggcggcaggacttgttttaatttttttacgttcaaaaagcgtnttaggcgcggaatgggaaaatcccgcaggccttgtctcctccgttgtttttgcctccgcgatgatattaatgtttttaatttccactctttatcacgctattcaaggcaaggccaaaaagatatttcgcgttcttgatcactccgcaatttatattttcatcgcgggaacttatacgccgttgtgcctgtacggcctgaagggagtgtggggccgtaacctgtttttaattgaatggggactcgccgccgtcggcattaccctttacgcgcttaatcttaaaataataaaaaagatcgaggttgtcgtttatattcttatgggctgggccatcatcatactctggaatccgctgattcattcaatacctatgaaaagcgtcgtgcttctgatagccggaggcgtcgcctatacggcgggcactcttttctatcgaaaaaaatctatacggggaacccacattatctggcacgcatttgttcttatcggggctgtttgccactggttttctgtttggttcttgaaatag

SEQ ID NO: 75230 - protein, 218 aa, Unknown
  Obtained from environmental sample
  DOMAIN (10)...(211): Haemolysin-III related
  misc_feature (1)..(218): Xaa is any amino acid
MNTTTSQISYTTREETAHSILHGLGTLAAAAGLVLIFLRSKSVLGAEWENPAGLVSSVVFASAMILMFLISTLYHAIQGKAKKIFRVLDHSAIYIFIAGTYTPLCLYGLKGVWGRNLFLIEWGLAAVGITLYALNLKIIKKIEVVVYILMGWAIIILWNPLIHSIPMKSVVLLIAGGVAYTAGTLFYRKKSIRGTHIIWHAFVLIGAVCHWFSVWFLK

SEQ ID NO: 75231 - DNA, 477 bp, Unknown
  Obtained from environmental sample
  misc_feature (1)..(477): n is a, c, g, or t
ttgatggcgaaatttgcttgcggaacaagctctgcactctgccgaaaaccttctgttatcacaggctatcctcaaggctcagaatggcttgcgggtggcgggaacagctatttcgcaaaattcttgcgagatgccggagcaaaatatatttgggaaaacactccccaaacggggcttctaacgctcaacatagaaactgccttgcaaagcggagcgcaggcgaagttctggctgcacccaagcctttgggcaagcaaggcagaaattatgcaaaacgaaccgagaatgagtatgttttcttcgtggcaaaacaacaaaatttatcaaagctcaaaacgtacgggcaaaaacggaagcagggatttttacgaatctgctgtggcatatccagatttggttttggcggaccttattttcatattccatccagaaattttgcccgaccatcgttttgtatattatgaactagtaaaatga

SEQ ID NO: 75232 - protein, 158 aa, Unknown
  Obtained from environmental sample
  misc_feature (1)..(158): Xaa is any amino acid
MMAKFACGTSSALCRKPSVITGYPQGSEWLAGGGNSYFAKFLRDAGAKYIWENTPQTGLLTLNIETALQSGAQAKFWLHPSLWASKAEIMQNEPRMSMFSSWQNNKIYQSSKRTGKNGSRDFYESAVAYPDLVLADLIFIFHPEILPDHRFVYYELVK

SEQ ID NO: 75233 - DNA, 903 bp, Unknown
  Obtained from environmental sample
  misc_feature (1)..(903): n is a, c, g, or t
atgtcgcataacgtattgggcggcttctatgacactgttggcggtgtaagcacaaaaatgatcgtgacaagccataaagcggaaataaccggccttactccgggtgtaacctattcatatagagtgggcagttcaaatgacggcatattcacctggagtgagccgcaaacttttactaccgaggcgtcaaatctcaatacatttactttcgtccatataacggactcgcagtgcggcagtgatgatatgtccaactatgaatattttagaaaaacgataaccgccgctgtagaaaagataccacagcttgaattctttgtacattccggcgatcttgttgaacaaggggggtcggaatttgaacaccaggaagttttgaaaaaggggcggggaattatcgataaattcccgctgatggcagtccccggcaaccatgactattacggcactgataaactatccgggtatggcggcggcggccttaacttcatcagccacttcaattttcccgctaacggagccggagtcagcgatattggtaacagcacatattcttttgactatggtccggcgcattttatcggtatagacgcgaattatttgggaaatacgaccaatagcatggcagtcgcgcagtggctcaaagccgatcttgccgctacggaaaaagaatggaagatcgtgaacatacatcagggaccctatatagtaaagtcatacaattcaccgccgactgtagacgttaggaactaccttgttcccgtgtttgacgagtacggcgtggatttggtgcttcagggacacgatcatcattacgcccgttcgtattttatgaagggagttataacgccttccgcgcccggcgccgcgccgtcgaatccgtcggattggccgcagatttag

SEQ ID NO: 75234 - protein, 300 aa, Unknown
  Obtained from environmental sample
  DOMAIN (68)...(272): Calcineurin-like phosphoesterase
  misc_feature (1)..(300): Xaa is any amino acid
MSHNVLGGFYDTVGGVSTKMIVTSHKAEITGLTPGVTYSYRVGSSNDGIFTWSEPQTFTTEASNLNTFTFVHITDSQCGSDDMSNYEYFRKTITAAVEKIPQLEFFVHSGDLVEQGGSEFEHQEVLKKGRGIIDKFPLMAVPGNHDYYGTDKLSGYGGGGLNFISHFNFPANGAGVSDIGNSTYSFDYGPAHFIGIDANYLGNTTNSMAVAQWLKADLAATEKEWKIVNIHQGPYIVKSYNSPPTVDVRNYLVPVFDEYGVDLVLQGHDHHYARSYFMKGVITPSAPGAAPSNPSDWPQI

SEQ ID NO: 75235 - DNA, 369 bp, Unknown
  Obtained from environmental sample
  misc_feature (1)..(369): n is a, c, g, or t
ttgaaaaaagaggtttgggctgatgggacaaaaccacacatgaagacatggaaagctgttctgataaaagaacntgcggtgattcatcatcaacctcaaggacaaaacgcaaccgatagccgaataattatagaagctaccaagctgatgctccgcgacccaagtattgacgcgttctgtatagtctctacggacgtggattttcacgtgctggctcaagacctgagggcaaatggaaaatatgtccttgggattgggaaagaagaggcaaacctaatctggaaagagtcttgcaatgaatttaaaactcttgaaagtcttaaacgctgggaaaccagcaagaaggccaatatccgtcttgtcgcgtga

SEQ ID NO: 75236 - protein, 122 aa, Unknown
  Obtained from environmental sample
  misc_feature (1)..(122): Xaa is any amino acid
MKKEVWADGTKPHMKTWKAVLIKEXAVIHHQPQGQNATDSRIIIEATKLMLRDPSIDAFCIVSTDVDFHVLAQDLRANGKYVLGIGKEEANLIWKESCNEFKTLESLKRWETSKKANIRLVA

SEQ ID NO: 75237 - DNA, 672 bp, Unknown
  Obtained from environmental sample
  misc_feature (1)..(672): n is a, c, g, or t
atgaaaatatcggcgtatattgatggttttaacttatatcacgcactccataatgagttcggcaaaacggcaaaatatttgaaatggcttgatattaaaaagttggtttctgcatatatccagaaaaacgatgaactccttgatgtgtttttcttttcagcaaatcctttgcaccaaacaccagacactcaaaacacacataaaacatatctcgctgctctcaaggctaccggcataaaatatgtagagggcaatttcaagaagaaatatttaatttgcagaaactgtcataaacaatacatgacacacgaagagaaagagagcgacgtcaatttggcaatttatattatcaaagacgcttacgaaaaaattagtgacaaaattattgttataactaatgacagcgacattgctcctgccgttgccatggcaaaaaagataaatccaaatttgaaaataaaaattattacgccacctttgccggctgataatagcaaacatcccagcatggctttactggaggctgccgggcaatttaatatacacaaagggcaaaaatatcgtctgccgtctataatcaccaaaaatattttagaacattgcaggcttcccgagaaactaaactacttaaatgaaaatatttcttgcccggaaaagtacaaaattaaataa

SEQ ID NO: 75238 - protein, 223 aa, Unknown
  Obtained from environmental sample
  misc_feature (1)..(223): Xaa is any amino acid
MKISAYIDGFNLYHALHNEFGKTAKYLKWLDIKKLVSAYIQKNDELLDVFFFSANPLHQTPDTQNTHKTYLAALKATGIKYVEGNFKKKYLICRNCHKQYMTHEEKESDVNLAIYIIKDAYEKISDKIIVITNDSDIAPAVAMAKKINPNLKIKIITPPLPADNSKHPSMALLEAAGQFNIHKGQKYRLPSIITKNILEHCRLPEKLNYLNENISCPEKYKIK

SEQ ID NO: 75239 - DNA, 354 bp, Unknown
  Obtained from environmental sample
  misc_feature (1)..(354): n is a, c, g, or t
atgaaaaaacccgtaagcacggataaggccccggccgccatcggcccctattcccaggccatagtctgcgattcgaccgtctatgtctccggccagttgggccttgatccggccaccggccttatgcccgcaaccacccttgaacaggcccggcagagcctggccaatttgcgctctgtcctggaagccgccggttccggcctggaccaggtgctgcgggtgggcatcttcatggtggacctggccgatttcaaggccgtcaatgaaatctacgccaccttcttcaccggggtctgcccggcccgcagcacggtccaggtggcggccctgcccttgggggccaagatgaaatag

SEQ ID NO: 75240 - protein, 117 aa, Unknown
  Obtained from environmental sample
  DOMAIN (7)...(117): Endoribonuclease L-PSP
  misc_feature (1)..(117): Xaa is any amino acid
MKKPVSTDKAPAAIGPYSQAIVCDSTVYVSGQLGLDPATGLMPATTLEQARQSLANLRSVLEAAGSGLDQVLRVGIFMVDLADFKAVNEIYATFFTGVCPARSTVQVAALPLGAKMK

SEQ ID NO: 75241 - DNA, 318 bp, Unknown
  Obtained from environmental sample
  misc_feature (1)..(318): n is a, c, g, or t
gtgccggcgcagtgggctttctgggtggtttcgaatgagatcgactccgttacggcggagaagatcgcacagatgtatcgcgcgcccggcatattgttccaatcaggggtgggtcggaacttgcaggtcaccatatgggtaaagacctggagccagctcatcaacgactgcaaggcccgcatgctcttctttgccgagaagctaaactacgcaccggaccgggacgcatcgctgtctcacctgaagcggacttatgacaaatatctcgccgacctcttcacaccagagaacgtgccagaggtcaaggtggaaacatag

SEQ ID NO: 75242 - protein, 105 aa, Unknown
  Obtained from environmental sample
  misc_feature (1)..(105): Xaa is any amino acid
MPAQWAFWVVSNEIDSVTAEKIAQMYRAPGILFQSGVGRNLQVTIWVKTWSQLINDCKARMLFFAEKLNYAPDRDASLSHLKRTYDKYLADLFTPENVPEVKVET

SEQ ID NO: 75243 - DNA, 537 bp, Unknown
  Obtained from environmental sample
  misc_feature (1)..(537): n is a, c, g, or t
ttgcccgcttcttacgaagtgctcaaaaaacttttgcccttcatggccacccgaaacatccccgccaccccgccaaataccgcctttttttatgactacatcacctacgccgggcccaaactcaacaaggccatcaaccagctcttggccgataacgtcaagttcggcggccatgtctccagcagcctctacaactttttctatggcgtggagcccgaggccgccccgtccggcgaccggcccccggacggcgacctccagcgggccggcgccatcaacaaggccgccgacgatttcatgaacctttcccaccgcatggcggaaagccttcataccgccagagaccagaacgaccacttcttcgaggtgctgagcagcaccagccggcaaatggccgatctcggccgggccgaagaaatcaagccctacctggaaagcctcttggccgaaaccgagcagaccctggcctccaccgacgttttttccagccggctcaaggaagccgagaccgtcatcgcctccctcaaggaggattga

SEQ ID NO: 75244 - protein, 178 aa, Unknown
  Obtained from environmental sample
  misc_feature (1)..(178): Xaa is any amino acid
MPASYEVLKKLLPFMATRNIPATPPNTAFFYDYITYAGPKLNKAINQLLADNVKFGGHVSSSLYNFFYGVEPEAAPSGDRPPDGDLQRAGAINKAADDFMNLSHRMAESLHTARDQNDHFFEVLSSTSRQMADLGRAEEIKPYLESLLAETEQTLASTDVFSSRLKEAETVIASLKED

SEQ ID NO: 75245 - DNA, 474 bp, Unknown
  Obtained from environmental sample
  misc_feature (1)..(474): n is a, c, g, or t
ttgattgattgccgagcggccgagatttcctatgaaaattctatgctttttgactctcgccgcncgccacgctttcttttgcccagctttcagggcaaaantattagccttccaaagcccaatttagacaagggctattctataacaaaatccctctctttgaggaaatctgccgaggcgcaggattttcaaaaggcaaaggatttgagccttgaggaaatttccgatttgctatgggctgcaaatggcgtaaacagacccgcagagggcaggcgcaccgcgccatctgctatgaactcccaagacatttctttatacgttcttgcaaaaagtggcgcatatctatataatgccaaagaacattctctcagtttagttgcaaacagtgatttgcgcgttgcaggtgcaggcggtcaaaaggcttttggagatgctcctattattgtgttgctggtctccgatatttccaattaa

SEQ ID NO: 75246 - protein, 157 aa, Unknown
  Obtained from environmental sample
  misc_feature (1)..(157): Xaa is any amino acid
MIDCRAAEISYENSMLFDSRRXPRFLLPSFQGKXISLPKPNLDKGYSITKSLSLRKSAEAQDFQKAKDLSLEEISDLLWAANGVNRPAEGRRTAPSAMNSQDISLYVLAKSGAYLYNAKEHSLSLVANSDLRVAGAGGQKAFGDAPIIVLLVSDISN

SEQ ID NO: 75247 - DNA, 759 bp, Unknown
  Obtained from environmental sample
  misc_feature (1)..(759): n is a, c, g, or t
ttggcggctcgcaagtatcaaccgaaagtaattattatcgaaaatgtgcctggcataaaagcgctgtataaagggcaatatttcaaggctattgaaagcgagtttgataaactggattatgatttcaagtccgatgtgttttatgctcccgatttcggcgttccgcaaatcaggaaaaggcaggtgtttattgccgtaaaaaaagatattggcaaggcaatattccccaaaaaagttataacagatccaagcgcttatattacctgtgaacaggcaatatctgatttagaaagagaaaagtacaatgccgagaatgaaattatttcttatacaacaaaacccaaaagcaaattgcaagagcaattaagaaaaggctcaaaaggcattgcaaatcacaatgtcacaaaccatactgaattagttaaatcggttattaaacaagttccggagggttgtaattataagagcttgccgagtggtgtcggcgaaagccgaaagtttaacgaggcgtggacgagataccatagcaaaaagccaagcaaaaccattgatacagggcaccgcaatcaatttcactacaaattagaccgagtgccaacagtaagggaaagcgcgcggttacaaacattccccgataaatttattttttacggcacaaaaacccagcagtataaacaagtcggcaacgccgttccccctatgctcggctatcatatagcattaaccgtaaagaaaattttacaaagggatgctaaatga

SEQ ID NO: 75248 - protein, 252 aa, Unknown
  Obtained from environmental sample
  DOMAIN (1)...(245): C-5 cytosine-specific DNA methylase
  misc_feature (1)..(252): Xaa is any amino acid
MAARKYQPKVIIIENVPGIKALYKGQYFKAIESEFDKLDYDFKSDVFYAPDFGVPQIRKRQVFIAVKKDIGKAIFPKKVITDPSAYITCEQAISDLEREKYNAENEIISYTTKPKSKLQEQLRKGSKGIANHNVTNHTELVKSVIKQVPEGCNYKSLPSGVGESRKFNEAWTRYHSKKPSKTIDTGHRNQFHYKLDRVPTVRESARLQTFPDKFIFYGTKTQQYKQVGNAVPPMLGYHIALTVKKILQRDAK

SEQ ID NO: 75249 - DNA, 390 bp, Unknown
  Obtained from environmental sample
  misc_feature (1)..(390): n is a, c, g, or t
atggatcagatcggccgagaattcccccgcctcggttgccattttggaggaagtgggccgctggatggctgccaacggcaacagcgtgtacggctgtggcactggccgccgtttgacaaacccgagtggggccgctttactcaaaagggaaacctgctgtatgcgcacatctacgaaagccaggccggaggcctgtgcctgcccggcatggcgggaaaaatcgaaaaactgcgcctgctgtccgacggcagtgaaatacaacttaccaaccattggaacttgcagcagtatcccgaacacgcctttttcttcctgaacccgaataccagcgacaattacccgctgcctgatccggttgataccgtagtggaggttacgttaaaaagatga

SEQ ID NO: 75250 - protein, 129 aa, Unknown
  Obtained from environmental sample
  misc_feature (1)..(129): Xaa is any amino acid
MDQIGREFPRLGCHFGGSGPLDGCQRQQRVRLWHWPPFDKPEWGRFTQKGNLLYAHIYESQAGGLCLPGMAGKIEKLRLLSDGSEIQLTNHWNLQQYPEHAFFFLNPNTSDNYPLPDPVDTVVEVTLKR

SEQ ID NO: 75251 - DNA, 645 bp, Unknown
  Obtained from environmental sample
  misc_feature (1)..(645): n is a, c, g, or t
gtgtacatcaagcgcgtgcgcgacacgctgcgcggcacggttatggtatccgtatcccgctcgtctgcaggctttgtgcgcaagctgttcgaaagcgaggtgcccgaaattaagtcggggctagtaaaaatcaagaacacggtacgcgaagcaggctatcgcacaaaaatctccgtctactcggacgaccaaaatattgacgcaatcggcagctgcatagggcccaagggtgcgcgcgtcaacgcaattatccaggagctagggggcgaaaagattgacgtagtgcaatattccgcagaccccagtgtctatatcgccaaggcgctatcccccgccaaggtgcttatggtaaagctggacgaggaagcaaagcacgcccaagtagtcgttgcagacgaaaagctgtcgcttgctatcggcaaaaacggtcaaaacacccgccttgcagcaaagcttaccggcttcaagatagacatcaagccgtacagcgaggtggtaaatcaggacgacctagcccttatgaccaagcccacggacaatggctatttatgttccgcacgaaagtgcctaggctgccgagaaagtcacgacaagcctagcatgctgcgtatagtgcagacccctgccgggctaattggtaaatag

SEQ ID NO: 75252 - protein, 214 aa, Unknown
  Obtained from environmental sample
  misc_feature (1)..(214): Xaa is any amino acid
MYIKRVRDTLRGTVMVSVSRSSAGFVRKLFESEVPEIKSGLVKIKNTVREAGYRTKISVYSDDQNIDAIGSCIGPKGARVNAIIQELGGEKIDVVQYSADPSVYIAKALSPAKVLMVKLDEEAKHAQVVVADEKLSLAIGKNGQNTRLAAKLTGFKIDIKPYSEVVNQDDLALMTKPTDNGYLCSARKCLGCRESHDKPSMLRIVQTPAGLIGK

SEQ ID NO: 75253 - DNA, 786 bp, Unknown
  Obtained from environmental sample
  misc_feature (1)..(786): n is a, c, g, or t
ttggttttaatgacttctaactctgttggtacctactccaatacgtctcacatttatgtaaatacaggaggaacactaatactgaaaacaggtacaaaaataacagctcccacatctgctaatggctataacctttccggagttatagtagatggcggtacattcaatatgagcggcggcgaaatctcaaagataggaagacaaagcggggtaattgtttctagcagcggaaatttcaatatgagtggcggaatcattaaagagtgcgctggaaataacggtcattatgcaggcggggtaactatcttgtccggtggtaattttaccatgagcggaactgctgagatcagcggtaattatgctggttcttctagttcgtatggtggtggaggaatctgtgttcaaaacagtggaactttttccatgacgggcggtgtcataaaaaataattggacaacttctgatagtaaattcggcggcggtgtgcttgtggaaaacggtggaacctttaccaagacaggcggaattatttatggtatgaatgcgatgacaactgtctggaacaggataacagagaatccttctcctgctaattcttatgcaggtcaaggttatgctgtatattgcgaaaatgggcataaagttagggacaacaccgcagatacgacagattctatgaattcgacaacaccaggtacgtccggcggatggaatgttcctctcacagcaggtgctataactattagcagcacagacagtaaagtaggaacccctcggccgatctga

SEQ ID NO: 75254 - protein, 261 aa, Unknown
  Obtained from environmental sample
  misc_feature (1)..(261): Xaa is any amino acid
MVLMTSNSVGTYSNTSHIYVNTGGTLILKTGTKITAPTSANGYNLSGVIVDGGTFNMSGGEISKIGRQSGVIVSSSGNFNMSGGIIKECAGNNGHYAGGVTILSGGNFTMSGTAEISGNYAGSSSSYGGGGICVQNSGTFSMTGGVIKNNWTTSDSKFGGGVLVENGGTFTKTGGIIYGMNAMTTVWNRITENPSPANSYAGQGYAVYCENGHKVRDNTADTTDSMNSTTPGTSGGWNVPLTAGAITISSTDSKVGTPRPI

SEQ ID NO: 75255 - DNA, 603 bp, Unknown
  Obtained from environmental sample
  misc_feature (1)..(603): n is a, c, g, or t
gtggatcggttcctggttacctgcgaggcttacaaggtaccggtaaaaatagtggtaaataaaatggacttataccaccaagaacagttgcaggaactggctcattttaaagaaatatatcaccgcgccggatacgatgtgttggaagtgtcagcccgtacgggacaaggggttgaaacgttgcgccgcgaaacggtaaataagttgtgtttattctccggctcgtcgggtgtaggcaaatcgtcgctaataaacgccattgacctcacgttgcaactgcgcaccggcgaaatttcggactaccaccggaaaggcatgcacactaccacattctacgaaatatttgatacagctaacggcggacatatcattgactcgcccggtatcaaagggtttggcctggttgatgttgaaaaagaagaattatatcacttttttccggaattatttcgtgtagcagcacagtgtaaattcaatatgtgtacgcacacgcacgaacccgattgcgctgtcaagcaagctgtgaaagaaggaactatctcggcagaacgctacgaaagctatctgaaaatgctggacggcaaggacgagaagtaccgttaa

SEQ ID NO: 75256 - protein, 200 aa, Unknown
  Obtained from environmental sample
  DOMAIN (1)...(193): Protein of unknown function, DUF258
  misc_feature (1)..(200): Xaa is any amino acid
MDRFLVTCEAYKVPVKIVVNKMDLYHQEQLQELAHFKEIYHRAGYDVLEVSARTGQGVETLRRETVNKLCLFSGSSGVGKSSLINAIDLTLQLRTGEISDYHRKGMHTTTFYEIFDTANGGHIIDSPGIKGFGLVDVEKEELYHFFPELFRVAAQCKFNMCTHTHEPDCAVKQAVKEGTISAERYESYLKMLDGKDEKYR

SEQ ID NO: 75257 - DNA, 870 bp, Unknown
  Obtained from environmental sample
  misc_feature (1)..(870): n is a, c, g, or t
gtgtcgctgctcgaacgcatgggacacctgcttgaccggcaaaacgaaaaactgtactctcgctaccgcgacccgacttccggcgagaaccagcccgaattgtcgcgtaaacaaatagccacacggatagaaaacgaattagatatcccgtacctgctccgcgaaaccacgagaaagctggacggtggctatgccatctgcggcatcgtggggcaaggcgacgcttttgtggtacgcgaccccaacggcattcgccccgcattctattatgccgatgacgaaataattgtcgttgcttcggaacgaccggtgattcaaaccgccatgcgggtacgcacgcgcgaagtacatgaactgcaaccagggcaagccatcatcatcaaaaaagacggctcgtacaatctggaacttatcatggaaccgcgcgaacgccgcgcctgctcgtttgaacgcatctatttctcgcgtggcaccgacaaatacatctaccgcgagcgcaaaaaactcggtgaacagcttaccgaaaaagtgctgcaagccgtgaactacgacttcgaaaacaccatcttttcctacattcccaacacggccgaaactgctttctacggcttggtaaaaggcgtggaggactacatgctgcacgacaaacagcgacaaatcctgaaggccggcaaactgccggcgcccgacgaactgtggcaaatcatctcacgccgcccgagggttgaaaaaattgccgtgaaagacgtgaaaatgcgcacgtttattaccgaagacgcttcgcgcaacgacatggtggaacacgtgtacgacgttacctacggcatcgtgcgccgcgacattgactcgctggtaactcggccgatctga

SEQ ID NO: 75258 - protein, 289 aa, Unknown
  Obtained from environmental sample
  misc_feature (1)..(289): Xaa is any amino acid
MSLLERMGHLLDRQNEKLYSRYRDPTSGENQPELSRKQIATRIENELDIPYLLRETTRKLDGGYAICGIVGQGDAFVVRDPNGIRPAFYYADDEIIVVASERPVIQTAMRVRTREVHELQPGQAIIIKKDGSYNLELIMEPRERRACSFERIYFSRGTDKYIYRERKKLGEQLTEKVLQAVNYDFENTIFSYIPNTAETAFYGLVKGVEDYMLHDKQRQILKAGKLPAPDELWQIISRRPRVEKIAVKDVKMRTFITEDASRNDMVEHVYDVTYGIVRRDIDSLVTRPI

SEQ ID NO: 75259 - DNA, 483 bp, Unknown
  Obtained from environmental sample
  misc_feature (1)..(483): n is a, c, g, or t
atgttcgtccccgggtcggttatcgaaagattgccgttggttatggtggttttgccgttcgggccgtacacgctgccgaggccgctaccgttatgtccgccgccaatccattgccctagatccagttccaccaaaccgccgcttatggtgacatcagcaccgttaccgccgtcgacgtcgccgccaccgccaccgatagccgcagaactgctaaaaaaagtaacgcctgttgccctaactatgccaccggttatagtgatattgccgccactgccgccactatcggaagcgacgccgtggccgccgccaatgcccgcaccgtcgcccgtagctgtaaccgtgccgccgttgatcgtgatatttccgccgttgccgccgttgatgctggcattgccgcagccgccgccaatgcccgcgccaatactgctcgtagctataaccgtgccgccgttgatcgtgatagtgccgccgtcgccgccgtag

SEQ ID NO: 75260 - protein, 160 aa, Unknown
  Obtained from environmental sample
  misc_feature (1)..(160): Xaa is any amino acid
MFVPGSVIERLPLVMVVLPFGPYTLPRPLPLCPPPIHCPRSSSTKPPLMVTSAPLPPSTSPPPPPIAAELLKKVTPVALTMPPVIVILPPLPPLSEATPWPPPMPAPSPVAVTVPPLIVIFPPLPPLMLALPQPPPMPAPILLVAITVPPLIVIVPPSPP

SEQ ID NO: 75261 - DNA, 414 bp, Unknown
  Obtained from environmental sample
  misc_feature (1)..(414): n is a, c, g, or t
gtggccgccgccaatgcccgcaccgtcgcccgtagctgtaaccgtgccgccgttgatcgtgatatttccgccgttgccgccgttgatgctggcattgccgcagccgccgccaatgcccgcgccaatactgctcgtagctataaccgtgccgccgttgatcgtgatagtgccgccgtcgccgccgtagccgccgccgccaatgcccgcgcccatgttgcccatagctgtaaccgtaccgccgttgatcgtgatagtgccgccgttgccgccgtcgtagccgcagccaccgccaatgcccgcgccaccccacctgctcgtagctataaccgtgccgctgttaataattatcgtaccgccatcttgtccatagccgccgccaatgcctgcgccgacgccgttgctgatagcgtttag

SEQ ID NO: 75262 - protein, 137 aa, Unknown
  Obtained from environmental sample
  misc_feature (1)..(137): Xaa is any amino acid
MAAANARTVARSCNRAAVDRDISAVAAVDAGIAAAAANARANTARSYNRAAVDRDSAAVAAVAAAANARAHVAHSCNRTAVDRDSAAVAAVVAAATANARATPPARSYNRAAVNNYRTAILSIAAANACADAVADSV

SEQ ID NO: 75263 - DNA, 303 bp, Unknown
  Obtained from environmental sample
  misc_feature (1)..(303): n is a, c, g, or t
ttgaaaatattctttacatggtttgaagaagcggtattaaaaaaattctcttttgaacggcaacaagaaataatagccaacatccaagatgttttggccaacaaaatggaggttaaacttatgatttccaatttaagcagaactattgaagaatctttagaggccagggaactaaaaggcagacttgaaagtaaacttgaaactgctaaaaatctgatagacgcaggaatggacgaaaaatttattgcaaagatggttgggcttagtgttgaggaaattagagaattgaaaaataaaaaatga

SEQ ID NO: 75264 - protein, 100 aa, Unknown
  Obtained from environmental sample
  misc_feature (1)..(100): Xaa is any amino acid
MKIFFTWFEEAVLKKFSFERQQEIIANIQDVLANKMEVKLMISNLSRTIEESLEARELKGRLESKLETAKNLIDAGMDEKFIAKMVGLSVEEIRELKNKK

SEQ ID NO: 75265 - DNA, 522 bp, Unknown
  Obtained from environmental sample
  misc_feature (1)..(522): n is a, c, g, or t
ttgatggccganttcgccggcgagcaggtgcgcaggaagccggtaaaacagccggtaaataattttaccgtacggtttgcggttattggttttgatgttctgatgatcggcaaaataaaaataaaggatataaggagtaccagcggtatgaatagtgcaaaaagaaggagcctcgagcgttcgcgccgggcggcgcgtgtccgcaagtcggtcagcggtacggctgagcgtccgcgtttatgcgtgaagcgtagcatcagccacatttacgctcagatcatcgacgatgtgcaaggcaaaactgtcgctcacgcggggagcgttggcaaggcgtttgcccagcgggccgccggcaagaagctcagcaagacggaggtttccaagatcgtcggcgagatggtggccgagatggcgataggcaagggagttaaggcggtcgtgtttgataggaagggttacctttaccacggtcgtgtgaaggcgctggctgaggcggcgcgcggcaaggggcttgaattttaa

SEQ ID NO: 75266 - protein, 173 aa, Unknown
  Obtained from environmental sample
  DOMAIN (53)...(173): Ribosomal L18p/L5e family
  misc_feature (1)..(173): Xaa is any amino acid
MMAXFAGEQVRRKPVKQPVNNFTVRFAVIGFDVLMIGKIKIKDIRSTSGMNSAKRRSLERSRRAARVRKSVSGTAERPRLCVKRSISHIYAQIIDDVQGKTVAHAGSVGKAFAQRAAGKKLSKTEVSKIVGEMVAEMAIGKGVKAVVFDRKGYLYHGRVKALAEAARGKGLEF

SEQ ID NO: 75267 - DNA, 300 bp, Unknown
  Obtained from environmental sample
  misc_feature (1)..(300): n is a, c, g, or t
ttgagtaacgaagaactggtatcaggcggcggagagtcgcagtttgcggagaggcttgtcgcggtcagccgtgtggcgaaggtggtcaagggcggccgtcgtttcggttttaacgcgctcgttgcggtgggcgacggcggcggtaccgtcggcatcggcatgggtaaggcgaacgatgtcacggaggctatccgcaaggccggcgagagcgccaagaaaaatatggtacgggtcagcgtagtggatggaacgatccctcacgacgtgatcggccatttcggcgcgggcaggatatcctga

SEQ ID NO: 75268 - protein, 99 aa, Unknown
  Obtained from environmental sample
  DOMAIN (14)...(80): Ribosomal protein S5, N-terminal domain
  misc_feature (1)..(99): Xaa is any amino acid
MSNEELVSGGGESQFAERLVAVSRVAKVVKGGRRFGFNALVAVGDGGGTVGIGMGKANDVTEAIRKAGESAKKNMVRVSVVDGTIPHDVIGHFGAGRIS

SEQ ID NO: 75269 - DNA, 816 bp, Unknown
  Obtained from environmental sample
  misc_feature (1)..(816): n is a, c, g, or t
gtggccgccttagtccaagcgggggccgcggaggatgccgccaagaaagccgccgccgacaaggccttcgcttggtcagcagaccaaaagcgtttcaccgccaaaatcgcaggtgccctgtacttcgttgacgccgtgacatcaaaggcgcggaacatcggtcctgccggtggcttcaaaaacctgctgtcaagccccgaccagtgctttggagcgttttccaaggatcatgacattcacctgattgactatgcttcaggcgaagcaaggcaactgaccacgggcggctcgcccactcggctcaatggcgaactggattgggtttaccaagaggagttatacggcaggggcaactggcgggcattttggtggagccccgatggctccaggctggcttttttgagcctggacactgccaaggtccccgtgttccgcatgacggacgaccgcttccacccccagcgcaacgccgacctttcataccctgtcgccggtgagcccaaccccgtcgccagcttgggcgtggttgacctaaaagggcaggtgcagtgcctcgaaaacccataccttggtcaagagacgctcatttcccgcgtgggctttgaccccaagggcaacgtgctggccgtgtggcaggacaggattcaatcgtggcacgacctgcggcgctatgagggcgaaaaggggacgacactcgtcaaggacgtttccaaatcttggattgaccgggatcgggtgccgctgcccaggtatttaaatgacggcactttcattttggaatccgaccgcagcggtcaccccacatttacaccatga

SEQ ID NO: 75270 - protein, 271 aa, Unknown
  Obtained from environmental sample
  DOMAIN (26)...(268): Dipeptidyl peptidase IV (DPP IV) N-terminal region
  misc_feature (1)..(271): Xaa is any amino acid
MAALVQAGAAEDAAKKAAADKAFAWSADQKRFTAKIAGALYFVDAVTSKARNIGPAGGFKNLLSSPDQCFGAFSKDHDIHLIDYASGEARQLTTGGSPTRLNGELDWVYQEELYGRGNWRAFWWSPDGSRLAFLSLDTAKVPVFRMTDDRFHPQRNADLSYPVAGEPNPVASLGVVDLKGQVQCLENPYLGQETLISRVGFDPKGNVLAVWQDRIQSWHDLRRYEGEKGTTLVKDVSKSWIDRDRVPLPRYLNDGTFILESDRSGHPTFTP

SEQ ID NO: 75271 - DNA, 855 bp, Unknown
  Obtained from environmental sample
  misc_feature (1)..(855): n is a, c, g, or t
atgatggccgagaactgcggagatttttttgcgctggatgaagaacttaaaaaacctgataattacgtgaccgttggcgggcaaagaatgaagcgttcgctctttacctatcagggcatctatgccggctatctcgaatctgttttctggccggcggtagcgggcgcagcagggctgaacgccatcaatgacatctgtaactacaaggaaggctccttccttacgcccgatgtcaggcagcttgttacaaccttcgcaaagatcggtacaggcggatacctgatggaaggcacggtaggtcttaaccacacccagtcacaggctgacatgatgctcggtaaggccctgttcattcccaacgggatttggatggaaggtgagatggcggatgctcccagggaaagcggttttgaattcgcgatattgcctccacctacgttaagggctggtcaggatcattatgtgctttcaagctatgaacagcatgaaattcccaaacaggcaaagaaccccgagcttgccaaggaattcctccgcttcctatacacaaaggattccatcatttcttttgccaaaaacgccaacgggacaatcgctgtctctgacgcgaaagatatcgcaaaagactctctgagcccaggcgtttacggcatgttcacggcctatgaaaccggaaagtttatgctgatgccttttgccactcgtccggcaaacaacaaaaccaatgtcggcgctgtggtgtttgacgataccatgggcccgctcatgaccggcaggcttacacctgatgcctattgcagaggtgttgaagatgcttttgctganatacggaaggatatggccgcagcccagtaa

SEQ ID NO: 75272 - protein, 284 aa, Unknown
  Obtained from environmental sample
  misc_feature (1)..(284): Xaa is any amino acid
MMAENCGDFFALDEELKKPDNYVTVGGQRMKRSLFTYQGIYAGYLESVFWPAVAGAAGLNAINDICNYKEGSFLTPDVRQLVTTFAKIGTGGYLMEGTVGLNHTQSQADMMLGKALFIPNGIWMEGEMADAPRESGFEFAILPPPTLRAGQDHYVLSSYEQHEIPKQAKNPELAKEFLRFLYTKDSIISFAKNANGTIAVSDAKDIAKDSLSPGVYGMFTAYETGKFMLMPFATRPANNKTNVGAVVFDDTMGPLMTGRLTPDAYCRGVEDAFAXIRKDMAAAQ

SEQ ID NO: 75273 - DNA, 768 bp, Unknown
  Obtained from environmental sample
  misc_feature (1)..(768): n is a, c, g, or t
atgtaccccatgttttggaatctaatttcatcatttaaaacaaatgcggagttatgggtaaaccaggtatcccttccaaaacaactgcnatgggacaactatgtgcgcgcattcacaaaggcaaacatgggcgcatatgtattcaattcactttttgtcgtagggctttcctctgtattgttgcttctttttgtcatacctacatcctatgcccttgccagataccgttttttcggttcaaggtttgtcgaaagcctttttatgatgtgcatattcattcaggttacctacataatggttccgttatatgttcggatgtataactttaatatggttgacagcctgccggcgttgagccttgtttacgccgttacttcgttcccattttcaatcttcctgctggccgggtttatgcggacaatttcgaaaagctatgaagaatccgctcgtatagacggttgcagtaattggcgaatactgatcagcattattgtcccgcttgcaaaatcaggcattgcgactgttacgatgctcgccgcaatgggtttttggaacgaatatccgcttgcgcttgtacttatccgttccaccgaaaaaagaaccttgccgattggcctggcgcatctttttcaggtgcaaaaacgcgccaccgacttcggggcgttgtttgccgcgcttgttatagtgctgatacctaccgtagggatttatctggcagggcagaggtatctccttaagggaataagcgccggcggattgaaggaataa

SEQ ID NO: 75274 - protein, 255 aa, Unknown
  Obtained from environmental sample
  DOMAIN (47)...(250): Binding-protein-dependent transport system inner membrane component
  misc_feature (1)..(255): Xaa is any amino acid
MYPMFWNLISSFKTNAELWVNQVSLPKQLXWDNYVRAFTKANMGAYVFNSLFVVGLSSVLLLLFVIPTSYALARYRFFGSRFVESLFMMCIFIQVTYIMVPLYVRMYNFNMVDSLPALSLVYAVTSFPFSIFLLAGFMRTISKSYEESARIDGCSNWRILISIIVPLAKSGIATVTMLAAMGFWNEYPLALVLIRSTEKRTLPIGLAHLFQVQKRATDFGALFAALVIVLIPTVGIYLAGQRYLLKGISAGGLKE

SEQ ID NO: 75275 - DNA, 399 bp, Unknown
  Obtained from environmental sample
  misc_feature (1)..(399): n is a, c, g, or t
atgataaatgcgccagtcttaaataatcaaatgtctcaatttgtttggaagcggaaatatcagaccgaatcgcttcctttcgccgacaaaattccgtttataagggaacttattattgacagcataccaatatcaatgataaaaaaaatttatatatttggttcttatgcgtatggcgaaccaaacataaacagcgatatcgatcttttggttgttatagacaataattatgaaagccggaaagcttatttagatataagggacaaattttttgataacagaatatgtccttgcgatttgattgttaagacagaggaagatttcaaaaaaaaattagaaagtaattttaacggcgtttacggcgttatacgcgataatggagtgatttcatatggctag

SEQ ID NO: 75276 - protein, 132 aa, Unknown
  Obtained from environmental sample
  DOMAIN (31)...(130): Nucleotidyltransferase domain
  misc_feature (1)..(132): Xaa is any amino acid
MINAPVLNNQMSQFVWKRKYQTESLPFADKIPFIRELIIDSIPISMIKKIYIFGSYAYGEPNINSDIDLLVVIDNNYESRKAYLDIRDKFFDNRICPCDLIVKTEEDFKKKLESNFNGVYGVIRDNGVISYG

SEQ ID NO: 75277 - DNA, 747 bp, Unknown
  Obtained from environmental sample
  misc_feature (1)..(747): n is a, c, g, or t
atgcttgacaaaaacaccaacgacgttatttctaaacttcaagagcagtacttggcggtaaattttgaaaagatgcttgcggagcaattcggcggcagtacccgcgccgccaaggaatttattctggaatcctacctaaatataatcaacttgggccgctcgaattacggcattcaagcggcggctatgttttattatggtatagacgcttcggaattatccatagcgcaagccgctactatcgcgtctataacccagaaccccacgcgcttcccgcccgacacccgcccggaaaacaactggccgcgcgcgcaactggtgttgcgcaacatgctgcggctggaatttataacggaagaagaatatgaggaagctatgcaaaccataacgcgggaggacggcacggaaattggcgcagtttattccacaattttgcaaacggaaggcggcggtacgcgccccattatttcgcaattcgactgttttacggacgcgctgcttgactccgtaagggacgacctaatgcgcgaatacagcattagccgcgacatggccaatacgcaaatttttacgcaagggctgcgcatttattccacgcaggacatggaaaagcaagcggctgtagaccgggtatttttggacgattctttttggccgtcggcagacttcactatagacgcggaatacaacctaaccctgtacaacaccgtaaccaatcagtaccgctatttccagggaaaacaatag

SEQ ID NO: 75278 - protein, 248 aa, Unknown
  Obtained from environmental sample
  DOMAIN (8)...(97): Transglycosylase
  misc_feature (1)..(248): Xaa is any amino acid
MLDKNTNDVISKLQEQYLAVNFEKMLAEQFGGSTRAAKEFILESYLNIINLGRSNYGIQAAAMFYYGIDASELSIAQAATIASITQNPTRFPPDTRPENNWPRAQLVLRNMLRLEFITEEEYEEAMQTITREDGTEIGAVYSTILQTEGGGTRPIISQFDCFTDALLDSVRDDLMREYSISRDMANTQIFTQGLRIYSTQDMEKQAAVDRVFLDDSFWPSADFTIDAEYNLTLYNTVTNQYRYFQGKQ

SEQ ID NO: 75279 - DNA, 711 bp, Unknown
  Obtained from environmental sample
  misc_feature (1)..(711): n is a, c, g, or t
ttgccgtacatatcttccgccatgaaaagggcgaagttccaagtatttacctataatctgaatcatcacgaagggagaatagaatctctactcaaaacacaaattgaaaccaataaaatcgatgttgttcttactaggggtttgtcttttaaatactatccgttgaaacaattggtaaacgcagttaaagatataaacccagaaataacggtggtggtaggaggcggaattataacaggagacccagaacacgcaatgacggcgctcaaagacgcggaatcggaatattctaaaattaaactttttgccacaaattttctcggttgtcaacactgcgggcaacgctataatgtattgattccgcaagaaattctagaaaacatcggatttcaagtggaacacttagtttcaaaacaccgcaatattgccgtttggggtgtaaactatcatacatttagattgtttgataaggtagaacaattgaatatggataccgtttatccagtcgatatatccgaaattaaacaagaactgattttaaacaaacgtaaggtcaattcgccagctattataaacgaaaaaagaatcagcacggttattatagccattccagcctacttcaatcagatagagcttcagatagaatatcagtacccgtgtgtggaaaatgtcattgatatatgcgatttggtgagccagactagccaatag

SEQ ID NO: 75280 - protein, 236 aa, Unknown
  Obtained from environmental sample
  misc_feature (1)..(236): Xaa is any amino acid
MPYISSAMKRAKFQVFTYNLNHHEGRIESLLKTQIETNKIDVVLTRGLSFKYYPLKQLVNAVKDINPEITVVVGGGIITGDPEHAMTALKDAESEYSKIKLFATNFLGCQHCGQRYNVLIPQEILENIGFQVEHLVSKHRNIAVWGVNYHTFRLFDKVEQLNMDTVYPVDISEIKQELILNKRKVNSPAIINEKRISTVIIAIPAYFNQIELQIEYQYPCVENVIDICDLVSQTSQ

SEQ ID NO: 75281 - DNA, 324 bp, Unknown
  Obtained from environmental sample
  misc_feature (1)..(324): n is a, c, g, or t
ttgtcggacatacacatgcccgggatcagcggcttcgacctgctcaagatcgtcaagcagcgcttccccaacataaagcgggtgctcatcacggcctacaacgtggaggactacctggacctcgcgttgaactacgatatcggcaatatcttcgtcaagtctgtgcctttcaacttctccgaactcgacatcatccttaataatctgctggaaaataacatcttcggcatagagaggcacttcgcgaaagacacgggcatccaacgcttcgaggtgcgcaagccggacgctttggccgaagtcgcccaaaagatcgaaacatag

SEQ ID NO: 75282 - protein, 107 aa, Unknown
  Obtained from environmental sample
  misc_feature (1)..(107): Xaa is any amino acid
MSDIHMPGISGFDLLKIVKQRFPNIKRVLITAYNVEDYLDLALNYDIGNIFVKSVPFNFSELDIILNNLLENNIFGIERHFAKDTGIQRFEVRKPDALAEVAQKIET

SEQ ID NO: 75283 - DNA, 396 bp, Unknown
  Obtained from environmental sample
  misc_feature (1)..(396): n is a, c, g, or t
atggatcagatcggccgaggtccgagatattttgtacgatgtcacgcggcgcagggcgattatcgtatcaataaaatcacccgttatatttcccagcactatgcggaaaagctgacggttaaaaatcttgccgctcatgttaatcttaacacggattattttggtcagatttttaaacaaaaaaccggcgtaatggtaaaccggtacattagccaggtcagagtgaaaaacgcggaactcatgctgcaaagcggcaattacaaagttcatgaggtagcggaaaaatgcggctttagcgacgtgttccatttttacaaacaattcagagcgctgcggggttttccgccttcacggtgcataccgagaagcaaagaacaaataacaggtaacaaataa

SEQ ID NO: 75284 - protein, 131 aa, Unknown
  Obtained from environmental sample
  DOMAIN (77)...(121): Bacterial regulatory helix-turn-helix proteins, AraC family
  misc_feature (1)..(131): Xaa is any amino acid
MDQIGRGPRYFVRCHAAQGDYRINKITRYISQHYAEKLTVKNLAAHVNLNTDYFGQIFKQKTGVMVNRYISQVRVKNAELMLQSGNYKVHEVAEKCGFSDVFHFYKQFRALRGFPPSRCIPRSKEQITGNK

SEQ ID NO: 75285 - DNA, 498 bp, Unknown
  Obtained from environmental sample
  misc_feature (1)..(498): n is a, c, g, or t
atgcagtttgttattttaggttcaggcgaccattacataaaatacgcgctgcaggaagcaaaccgcagaatgcctaaaaacacggcggtatttgttgaatacaacgaggagctggcgcataaaatatatgccggctgcgacgcctatatgatgccttcgcgttttgagccgtgcggtttaagccagcttatagctctggcttacggtactattccggttgtaaaccgcgtcggcggtttgtcggatacaataacttattacaatcattattccaaagaaggcaacggttttgtctttaatataacttacggcgaaaattttgtgcagactcttcttaaatcggaaaaaatattcaacgataagaaagaatgggagcttctgatgcaaaatgcttttaaaagcgttttttcgtgggacaaatcggttgcggagtatgaggaaatgtatcaaaatctgattgacaggaaacgtcatgaaacagtctttgcgcgcagctga

SEQ ID NO: 75286 - protein, 165 aa, Unknown
  Obtained from environmental sample
  misc_feature (1)..(165): Xaa is any amino acid
MQFVILGSGDHYIKYALQEANRRMPKNTAVFVEYNEELAHKIYAGCDAYMMPSRFEPCGLSQLIALAYGTIPVVNRVGGLSDTITYYNHYSKEGNGFVFNITYGENFVQTLLKSEKIFNDKKEWELLMQNAFKSVFSWDKSVAEYEEMYQNLIDRKRHETVFARS

SEQ ID NO: 75287 - DNA, 888 bp, Unknown
  Obtained from environmental sample
  misc_feature (1)..(888): n is a, c, g, or t
atgaaggatcacctaataaatcgtggaccaattgaagaagcgaggatgtacatccaagaaacccttgtcgtacgagaaaaattatacaagcaaagtggtacagcagaggcactacgatatttatctttttcattcaatagaatgggagattatctcacaaagtcaggacaaacagaaaaagcaggagattattatcaaaaagctgttgatgcacgagagcagttaaacgaacaaagtcatacgactgaggcattgcgtgaattatctttttcgtataatagaatgggagatcacctgacaaatatcggtcagatggaagaagccggagtatattaccaaaaagctcttactgcacgagagcggttatataagatgtataaaaagagtgctatagcagaggcagtagaagaaatgaataacttatcttattcctacaatagaatgggagagcattttacaaatttggaacagctagaagaagcaagagattattataaaaaagcgattgacgttatgaagcagttgcacgagcttaatttcacagtgcaaacatcaagagatctaattaatttatgtttaaaaatgggggatcaccttatcaagatggggcagctagatgaggctggttcatattaccgaacagtaattgtcgctatggagcaatcgtatgaggaaaacggttcagaagatattttaagattaaaagagttgctatatttatacaaaaaagctgaacagttatacgataaaattggtatagtggaggcaatatgggatttgtcctatttatataacaaaatccgtgagggtttggtaaaacttggacaaatggaagaagcaggggagtattgtttgaaattgattaaagcggatggaacaattttataa

SEQ ID NO: 75288 - protein, 295 aa, Unknown
  Obtained from environmental sample
  DOMAIN (142)...(175): Tetratricopeptide repeat
  misc_feature (1)..(295): Xaa is any amino acid
MKDHLINRGPIEEARMYIQETLVVREKLYKQSGTAEALRYLSFSFNRMGDYLTKSGQTEKAGDYYQKAVDAREQLNEQSHTTEALRELSFSYNRMGDHLTNIGQMEEAGVYYQKALTARERLYKMYKKSAIAEAVEEMNNLSYSYNRMGEHFTNLEQLEEARDYYKKAIDVMKQLHELNFTVQTSRDLINLCLKMGDHLIKMGQLDEAGSYYRTVIVAMEQSYEENGSEDILRLKELLYLYKKAEQLYDKIGIVEAIWDLSYLYNKIREGLVKLGQMEEAGEYCLKLIKADGTIL

SEQ ID NO: 75289 - DNA, 471 bp, Unknown
  Obtained from environmental sample
  misc_feature (1)..(471): n is a, c, g, or t
atgcggcgccgggtatttgcttacggcgaaagcgcggaatacgacaaggtaaagtgccttgacatgggcgcggacgattatataacgaagcccttcggcgtaaccgagcttatatcgcgcgtaaaagcggttcttcgccgttattcgggcgacgcggcttcggaaaggcgttcggacgcgctttctttcggcgaaatcgatattgacggcgcgaagagggaagttaccgcgggcggggagaaaatcacgctgacttataaggagtatgagcttttgcactttcttataaaaaacgcggggcttgtcctttcgcgagataagctgctcgaaaccgtttggggctacgacttcgagggggagagcaggacggttgacgttcatgtaaagacgcttcggcaaaaactcggcgaatacggcggttatataaaaacagtccgcaacgtagggtacaaattgaagttgggagagtaa

SEQ ID NO: 75290 - protein, 156 aa, Unknown
  Obtained from environmental sample
  DOMAIN (79)...(152): Transcriptional regulatory protein, C terminal
  misc_feature (1)..(156): Xaa is any amino acid
MRRRVFAYGESAEYDKVKCLDMGADDYITKPFGVTELISRVKAVLRRYSGDAASERRSDALSFGEIDIDGAKREVTAGGEKITLTYKEYELLHFLIKNAGLVLSRDKLLETVWGYDFEGESRTVDVHVKTLRQKLGEYGGYIKTVRNVGYKLKLGE

SEQ ID NO: 75291 - DNA, 795 bp, Unknown
  Obtained from environmental sample
  misc_feature (1)..(795): n is a, c, g, or t
atggatcagatcggccgagggctttataaaggcgttatcccccgaagtgagggagcgataggcattgacgacggaacgacccgcgacatcgcgcttatctcgcgcgtgaacaagcccgtatgctttaaagtaacgggcttttccgaggacgcgctcggaaataaaacggcgacgctttcgcgtaaaaaagcgcagacggaatgtgccgagacgtacatagaccgccttaaaaacggagatattatccccgttaaggtaactcatcccgaacaattcggctgtttcgtggacatcgggcgcggaataccttcgctgataccgattgacgctatttcggtttcgcggatttcccacccgtccgacaggttttacgtcgggcaggatattttggcgattataaaatcgcgcgaaaacaataaaatcacgcttacccacaaggagttgctcggaacgtgggagcagaacgccgctcttttcaacgggggggaaacggtttcgggaatagtgcgctcggtcgaaagttacggcattttcgtcgaactcacgccgaatttggcggggcttgccgaacttcgagaaaacgtccgcgtaaatcaggaggtaagcgtttatataaaagcgattatccccgaaaaaatgaaaattaagctgattatcgtcgacacgtttgaaaattcacgggtaaattactcttataagtattatatcgattcgggtcatatcgacagctgggtatattccgcgaaagaatccgacaagctgattaagaccgacttttcggcatccgacatctga

SEQ ID NO: 75292 - protein, 264 aa, Unknown
  Obtained from environmental sample
  DOMAIN (75)...(146): S1 RNA binding domain
  misc_feature (1)..(264): Xaa is any amino acid
MDQIGRGLYKGVIPRSEGAIGIDDGTTRDIALISRVNKPVCFKVTGFSEDALGNKTATLSRKKAQTECAETYIDRLKNGDIIPVKVTHPEQFGCFVDIGRGIPSLIPIDAISVSRISHPSDRFYVGQDILAIIKSRENNKITLTHKELLGTWEQNAALFNGGETVSGIVRSVESYGIFVELTPNLAGLAELRENVRVNQEVSVYIKAIIPEKMKIKLIIVDTFENSRVNYSYKYYIDSGHIDSWVYSAKESDKLIKTDFSASDI

SEQ ID NO: 75293 - DNA, 594 bp, Unknown
  Obtained from environmental sample
  misc_feature (1)..(594): n is a, c, g, or t
atggacggaggaaccatcaacggaaacaaagttgatgtaacagccacttcttcttcttataacaatacattacgagcgaagggcggcggagtgtattgcaacggtggtattttcactatgaatgacggaacgataagcaataataccgcctattccaacaaattcccgtctgcaggcggcggcgtgtatgttgaagaaggagaatttaccatggacggcggaaccattagcggtaatactgcggaatcgtcatctattttagcaacttcatatacttatggtggcggggtggctgcatgggacagtcaattcaccatggtaagcggaacgatcagcgggaatagcgttaaatcagcggacaaccggttaggcggtggggtatatgtagataatacttggtttgccaagatcggcggcacaatttatggttcaaacgcatcgccatcaaccttgcagaatacggctaaagataccaactcaggacacgcggtatatgctaagaaaggctctgttactttattacgtaacaccactgcggggacaactgtcgacatggatatctatacaaatggtaatgcaggtggttgggaatga

SEQ ID NO: 75294 - protein, 197 aa, Unknown
  Obtained from environmental sample
  misc_feature (1)..(197): Xaa is any amino acid
MDGGTINGNKVDVTATSSSYNNTLRAKGGGVYCNGGIFTMNDGTISNNTAYSNKFPSAGGGVYVEEGEFTMDGGTISGNTAESSSILATSYTYGGGVAAWDSQFTMVSGTISGNSVKSADNRLGGGVYVDNTWFAKIGGTIYGSNASPSTLQNTAKDTNSGHAVYAKKGSVTLLRNTTAGTTVDMDIYTNGNAGGWE

SEQ ID NO: 75295 - DNA, 420 bp, Unknown
  Obtained from environmental sample
  misc_feature (1)..(420): n is a, c, g, or t
atgaaatccgaaaagatgattcaagccgaggttcttgcggcattcggaagccgcccagacatacggctattccgcaatagcgccggcaacggtttcaccggcgaagttgttgattataatggtggcgtcgcggtgctggccaacgctcggcgcgtcacctttggccttgtcgagggcgcgagcgatctgatcggacttaaaaaggtgaaaattacgccggatatggtaggtacggaggtcgccgtatttgtcgcgttggaggttaagtcggagagagggcggccctccaaggagcaagccgcctttatcaatatggttcaggagtttggggggatcggcgcggtgataaagtcagtgtccgaggcgaatgtgagcgttaatctcactcccatgcttccgaanattccgcatccgaaataa

SEQ ID NO: 75296 - protein, 139 aa, Unknown
  Obtained from environmental sample
  DOMAIN (35)...(128): Protein of unknown function (DUF994)
  misc_feature (1)..(139): Xaa is any amino acid
MKSEKMIQAEVLAAFGSRPDIRLFRNSAGNGFTGEVVDYNGGVAVLANARRVTFGLVEGASDLIGLKKVKITPDMVGTEVAVFVALEVKSERGRPSKEQAAFINMVQEFGGIGAVIKSVSEANVSVNLTPMLPXIPHPK

SEQ ID NO: 75297 - DNA, 747 bp, Unknown
  Obtained from environmental sample
  misc_feature (1)..(747): n is a, c, g, or t
ttgagtcagtatgaaaacaaaaaaaatgtgatattatgtggctatcattgggcgggctgtaaggctttacagatacttttggaaagaggatataatgtatttgtttatacacataaagcagcagaggcaattacttcacttgaacagctttgccagaaatggaatattccatattcgcttgaaaatgtatctaatgttaaaataccttttagaccggacttaatatgtagtatttactataaatatattatcaaggaacatataatagatattagtgacgggaagataattaatttacatccttcgatgcttccaaaatatcggggttgtagcagtataacatgggctatgataaataatgaaagatattgtgggtatagatatcattatattgataaaaatgtagatacaggtagaattattttgcaaaataccgtaaggatagaggattttgatacgcaattatcgctgtattatcgtgtaatggaactagcccttgataaatttgaggaagctttagaccttgttataaatggttatataggagagcaacaactaggtgattcttcatattatccgcgcggttgtccatataacggagaaataaatgatttgtgggataatgaaaaaatagaactttttattcgtgcgatgatacatcctccgtatccatatgcaatgtataagggaaaggaaatcaaagattttagtgaatgggaaaaggtgtcccgaaatctatccctctaa

SEQ ID NO: 75298 - protein, 248 aa, Unknown
  Obtained from environmental sample
  DOMAIN (7)...(173): Formyl transferase
  misc_feature (1)..(248): Xaa is any amino acid
MSQYENKKNVILCGYHWAGCKALQILLERGYNVFVYTHKAAEAITSLEQLCQKWNIPYSLENVSNVKIPFRPDLICSIYYKYIIKEHIIDISDGKIINLHPSMLPKYRGCSSITWAMINNERYCGYRYHYIDKNVDTGRIILQNTVRIEDFDTQLSLYYRVMELALDKFEEALDLVINGYIGEQQLGDSSYYPRGCPYNGEINDLWDNEKIELFIRAMIHPPYPYAMYKGKEIKDFSEWEKVSRNLSL

SEQ ID NO: 75299 - DNA, 822 bp, Unknown
  Obtained from environmental sample
  misc_feature (1)..(822): n is a, c, g, or t
ttgcgctctcaaccccataaagacaacgatgaactttcctgcgaccgtcacggcgacagctacgaacttctgctggcgtttcttccgccaaaaaacgaaaaatcggacttatacctgctcaacgatagcacgtaccgcttgcactaccttgtgggcatgtacgagcgcaacggccacatgcagccaatggcgcacggcgtaatggagccagacagcaagcagctgcttaaaagcgtcaacctgagcgagctgcgcgaggcacgaacgctgcgagtgcaggtgctgctccacaaaaacattccctacaagccccacgaccttgcgcctgccaacgtggagctcaacccgctcaaattcttcaagcagggtgcgtttaccgagaatgagttttttgatgaaaacgcccttatttaccgcgtcttttcgagccaaagcgaggaaaagcagcagcagaccaacgtttcggcaaaggaaattgaacaggctatgctgcaaaaaaaggaggatacggtcaaaccacagcaggttaaacccgttcaagagcttgaagagattgacctgcacgccgagcagctggtggccgacccaagcaaactacaggcaggggaactgctggagctgcaaatggcacgctttgccgccacgcttgagaacgcgctcaagaatggccacaagggcaaaatagtttttatacacggcataggcagcggcaagctcaagcaggagctgcgcagcagcctgacaaagaattattcgacgttgcagtaccaagatgcctcgtttaaggagtacggctacggcgcaacaatggtgtttttataa

SEQ ID NO: 75300 - protein, 273 aa, Unknown
  Obtained from environmental sample
  misc_feature (1)..(273): Xaa is any amino acid
MRSQPHKDNDELSCDRHGDSYELLLAFLPPKNEKSDLYLLNDSTYRLHYLVGMYERNGHMQPMAHGVMEPDSKQLLKSVNLSELREARTLRVQVLLHKNIPYKPHDLAPANVELNPLKFFKQGAFTENEFFDENALIYRVFSSQSEEKQQQTNVSAKEIEQAMLQKKEDTVKPQQVKPVQELEEIDLHAEQLVADPSKLQAGELLELQMARFAATLENALKNGHKGKIVFIHGIGSGKLKQELRSSLTKNYSTLQYQDASFKEYGYGATMVFL

SEQ ID NO: 75301 - DNA, 819 bp, Unknown
  Obtained from environmental sample
  misc_feature (1)..(819): n is a, c, g, or t
ttgattcgttgctggcccatctgggagattaaagtgaaaaaattacgtatcggcgtagtgggattaggtggcattgcgcaaaaagcgtggttaccggtgctggcggcagcgtctgactggacgttacaaggagcctggtcgcctacgcgcgcgaaagccctgccaatttgtgaaagctggcgcattccttatgccgattcgttatccagccttgccgccagttgcgatgcggtttttgtgcattccagcaccgccagccactttgacgtggtcagtacgttactcaatgcgggggtacatgtctgtgtcgataaaccgctggcagaaaatctgcgcgatgctgaacggctggtggaactggcggcgcggaaaaaactgacgttgatggtcggttttaaccgtcgtttcgcaccactctacggtgagttaaaaacgcaactcgccaccgcagcctcgctaagaatggataaacatcgtagcaatagcgtcgggccacacgatctttatttcacgttgctggatgattatctgcatgtggtggataccgcgctgtggttgtcgggcggcaaagcctctctggatggcggtacgctactgactaacgacgctggcgaaatgctgtttgccgagcaccatttttcggctggtcctttgcagatcaccacctgtatgcatcgccgtgccggaagtcagcgtgaaaccgtgcaggccgtgactgacggtgcgctcatcgacattacggatatgcgcgaatggcgtgaggagcgcgggcagggcgtagtgcataaaccngattcctggttggcagagtacgcttga

SEQ ID NO: 75302 - protein, 272 aa, Unknown
  Obtained from environmental sample
  DOMAIN (144)...(238): Oxidoreductase family, C-terminal alpha/beta domain
  misc_feature (1)..(272): Xaa is any amino acid
MIRCWPIWEIKVKKLRIGVVGLGGIAQKAWLPVLAAASDWTLQGAWSPTRAKALPICESWRIPYADSLSSLAASCDAVFVHSSTASHFDVVSTLLNAGVHVCVDKPLAENLRDAERLVELAARKKLTLMVGFNRRFAPLYGELKTQLATAASLRMDKHRSNSVGPHDLYFTLLDDYLHVVDTALWLSGGKASLDGGTLLTNDAGEMLFAEHHFSAGPLQITTCMHRRAGSQRETVQAVTDGALIDITDMREWREERGQGVVHKPDSWLAEYA

SEQ ID NO: 75303 - DNA, 363 bp, Unknown
  Obtained from environmental sample
  misc_feature (1)..(363): n is a, c, g, or t
atggtaatcaaggatttgaccaaatatttacaagccatcgacaataccgaacatgttaaggtaatcggcaaagttttacaggcggtcggtttggtcattgaagcgcaggtgactggcgtggccaacggtgaactttgcacgatttttttggagggcgaggatccgcgtccggtttatgcggaagtcaccggttttaaaggcaataatgtgctgctgatgccgttgggtttgactaccggcattgcgccgggctgcaaaatcgttccgaccggacatccgctgcgcgtgggcgtgggtaatcagctgctcggccgcgtactggacggcttgggccggccgatggaccgcaaggcgcgatcgtga

SEQ ID NO: 75304 - protein, 120 aa, Unknown
  Obtained from environmental sample
  DOMAIN (25)...(91): ATP synthase alpha/beta family, beta-barrel domain
  misc_feature (1)..(120): Xaa is any amino acid
MVIKDLTKYLQAIDNTEHVKVIGKVLQAVGLVIEAQVTGVANGELCTIFLEGEDPRPVYAEVTGFKGNNVLLMPLGLTTGIAPGCKIVPTGHPLRVGVGNQLLGRVLDGLGRPMDRKARS

SEQ ID NO: 75305 - DNA, 300 bp, Unknown
  Obtained from environmental sample
  misc_feature (1)..(300): n is a, c, g, or t
ttgaccaaagacgaagtgcggcaaatcgtcgatctcctgttagagcggctcaacaaacaattaaaacagcagaacatcacggcggaattcagcggcgcgcttaaagattatctgattgaaatcggttacgaccccaattacggcgcccgcccgctcaaacgcgccattcagcgcaatgtggaaaatattatttccaaagaaatcatttccggcaaagtcaagtctgacggcaagatttttgtggacattgataaggataagaatgtaatcgtccaagaggacaatttagtcgctaaataa

SEQ ID NO: 75306 - protein, 99 aa, Unknown
  Obtained from environmental sample
  misc_feature (1)..(99): Xaa is any amino acid
MTKDEVRQIVDLLLERLNKQLKQQNITAEFSGALKDYLIEIGYDPNYGARPLKRAIQRNVENIISKEIISGKVKSDGKIFVDIDKDKNVIVQEDNLVAK

SEQ ID NO: 75307 - DNA, 600 bp, Unknown
  Obtained from environmental sample
  misc_feature (1)..(600): n is a, c, g, or t
ttgccaggcgaccggacgaaaaattggaatttcgacgagaccgtgggcgcgcttagagaaatatttttgcctaaaactgggtatatattttgtattatgaaaaagcctaaaaagtccagaaaatttgaatacaacctcaagcccgtgctcaaggtgcgggaaatctatgagaagctcgagaaagaaaagtttgccgaagcgcagcgcaaatatctggaggaattggaacgcgagcgcaaaatgaaagactacgaaatgcagcagcagcgcactttaaaaggcaatctgcagggcaatattgattttgccaatattctgcaccgccaaaattttctcaagaagtacaagcaggatgtggtcgagcaggagggcaagaccaaggaagccgaccagcacaaagaggaacagcgcgagcggctgattaagtccatgaaagaccgcaagattctggaaaaagaccgcgagcataaaaaagatgcctggaaacgtttaatggaccgcgaggcgacgaaatttctggacgatatcgccacggcgaaacatattcaaaacatggccgaacgccggcgggaaaataaaaacgcggtcagttttatttag

SEQ ID NO: 75308 - protein, 199 aa, Unknown
  Obtained from environmental sample
  misc_feature (1)..(199): Xaa is any amino acid
MPGDRTKNWNFDETVGALREIFLPKTGYIFCIMKKPKKSRKFEYNLKPVLKVREIYEKLEKEKFAEAQRKYLEELERERKMKDYEMQQQRTLKGNLQGNIDFANILHRQNFLKKYKQDVVEQEGKTKEADQHKEEQRERLIKSMKDRKILEKDREHKKDAWKRLMDREATKFLDDIATAKHIQNMAERRRENKNAVSFI

SEQ ID NO: 75309 - DNA, 831 bp, Unknown
  Obtained from environmental sample
  misc_feature (1)..(831): n is a, c, g, or t
atgtccggcgcagtggacgcaatcaaaggcgcatggaatggcgtaacgggcttcttcaaaggcaagtttgatgcagtaacttcggctttcgataacggaatcatcaaaggtattctgtctctaattagagagtttaatccggcaagtctcgtacttgacgccattaacagcatgataagcgccgtatttggcatagatataaaagcgaagtttagtgcgtggatgtccggcgcagtggacgcaatcaaaggcgcatggaacggcgtaacgggcttcttcaaaggcaagttcgatgcagtaacttcagctttcgataacggaatcatcaaaggtattctgtctctaattagagagtttaatccggcaagtctcctacttgacgccattaacagcatgataagcgccgtatttggcatagatataaaagcgaagtttagtgcgtggatgtccggcgcagtggacgcaatcaaaggcgcatggaacggcgtaacgggcttcttcaaaggcaagtttgatgcagtaacttcggctttcgataacggaatcatcaaaggtattctgtctctaattagagagttcagtccggcaagtctcctacttgacgccgtaaatggcatgataaatgccgtatttggcatagatataaaagcgaagtttagtgcgtggatgtccggcgcagtggacgcaatcaaaggcgcatggaacggcgtaacgggcttcttcaaaggcaagtttgatgcagtaacttcggctttcgataacggaatcatcaaaggtattctgtctctaattagagagtttaatccggcaagtctcctactgacgccataa

SEQ ID NO: 75310 - protein, 276 aa, Unknown
  Obtained from environmental sample
  misc_feature (1)..(276): Xaa is any amino acid
MSGAVDAIKGAWNGVTGFFKGKFDAVTSAFDNGIIKGILSLIREFNPASLVLDAINSMISAVFGIDIKAKFSAWMSGAVDAIKGAWNGVTGFFKGKFDAVTSAFDNGIIKGILSLIREFNPASLLLDAINSMISAVFGIDIKAKFSAWMSGAVDAIKGAWNGVTGFFKGKFDAVTSAFDNGIIKGILSLIREFSPASLLLDAVNGMINAVFGIDIKAKFSAWMSGAVDAIKGAWNGVTGFFKGKFDAVTSAFDNGIIKGILSLIREFNPASLLLTP

SEQ ID NO: 75311 - DNA, 666 bp, Unknown
  Obtained from environmental sample
  misc_feature (1)..(666): n is a, c, g, or t
gtggtggcggaacccccatttgaggaaatccttaccgcaatgacagcaacaacagacagcattaaaaaagataccggtattaccacatcatccgaaacaccgcagtctaaaatagtaaatcaatataccatttgggatgaatttgcggttttattttcggcaataccgcttctggaggaagaacgcccggtagaacttgttgatgaaaaacaagatgccgtcgaaacaaaaaccgcagaaacaaaaaccgcagaaacaaaaagcaaaagccaggttacgtcagttcaaagcaagtcggcagcggcctctaagtccgcctccagacccgacaataagtctgacagcaagtccgattctaaatctgacaacaagtcggcgacagcggacaccaggtctgacaataagtccgattctgaatccgacaatatgtccgactccaattccgacaataagaccgcagtcaattcagagccggtaatcgccgacagttctgcctctttagattctacgccattaaaagaaaaaaatccaatatctgacgcagataaaacggaaaccaaaataacagaaggagatgaaaatttagtactccctgcggcagatgatgacaatgacattcagaaaactgatccctttcccgatgggaaacaggtatataacttctaa

SEQ ID NO: 75312 - protein, 221 aa, Unknown
  Obtained from environmental sample
  misc_feature (1)..(221): Xaa is any amino acid
MVAEPPFEEILTAMTATTDSIKKDTGITTSSETPQSKIVNQYTIWDEFAVLFSAIPLLEEERPVELVDEKQDAVETKTAETKTAETKSKSQVTSVQSKSAAASKSASRPDNKSDSKSDSKSDNKSATADTRSDNKSDSESDNMSDSNSDNKTAVNSEPVIADSSASLDSTPLKEKNPISDADKTETKITEGDENLVLPAADDDNDIQKTDPFPDGKQVYNF

SEQ ID NO: 75313 - DNA, 582 bp, Unknown
  Obtained from environmental sample
  misc_feature (1)..(582): n is a, c, g, or t
atggaaatatgtattatcaggcacggagaaactaattggaataaagaaggaagattacaaggaagagaaaatattccccttaatgaagaaggaataaaacaaataaaaaaaacaacggaatacctaataaaatataaatgggataaaataataacaagccctttattaagggcaaaacagtcggcggaaattatagccaaaggtattggcttaaaggatattattgaagaagaggaatttatagaaagggattttggtgaagcgtcgggaatgacagtggaagaaagggaaaaggcatttccagacggaaaatataagggtatggaaatttttgaagagcttcaacaaaggatagttagttcagtaaataaatataaaaatatatattatggaaaaaacataataataatatcccatggagcggtaattaattcattgctatcatatttaagtaataatgaaattggaacaggaaaaacagtactaaaaaatgcctgtatcaatttattgagatataacgaaaaagaaaaagaattagaaataatattttatgataaacaagcaatagaattaatagaataa

SEQ ID NO: 75314 - protein, 193 aa, Unknown
  Obtained from environmental sample
  DOMAIN (2)...(146): Phosphoglycerate mutase family
  misc_feature (1)..(193): Xaa is any amino acid
MEICIIRHGETNWNKEGRLQGRENIPLNEEGIKQIKKTTEYLIKYKWDKIITSPLLRAKQSAEIIAKGIGLKDIIEEEEFIERDFGEASGMTVEEREKAFPDGKYKGMEIFEELQQRIVSSVNKYKNIYYGKNIIIISHGAVINSLLSYLSNNEIGTGKTVLKNACINLLRYNEKEKELEIIFYDKQAIELIE

SEQ ID NO: 75315 - DNA, 345 bp, Unknown
  Obtained from environmental sample
  misc_feature (1)..(345): n is a, c, g, or t
atgatcacgaacccgcgccgcgagaggcgcacggacccaggcgatcntaacaagtgcccggtgtgggacatccacaaggtgttcaacagcgacgaaggacagcgcgctgatatcgacaaggggtgccgcaccgccgggatcggatgtattgactgcaagaaaatgctcaacggccacatcgacgcgataatggggccgatccgcgaacggcgggcccattatgagaagaaggactctttaatgatcgatatcctgacggagggcacgcgccgcgcgtcagccgccgcgaggaggaccatggaagagatttatcccgcgatggggctgctttccctgtctcaataa

SEQ ID NO: 75316 - protein, 114 aa, Unknown
  Obtained from environmental sample
  misc_feature (1)..(114): Xaa is any amino acid
MITNPRRERRTDPGDXNKCPVWDIHKVFNSDEGQRADIDKGCRTAGIGCIDCKKMLNGHIDAIMGPIRERRAHYEKKDSLMIDILTEGTRRASAAARRTMEEIYPAMGLLSLSQ

SEQ ID NO: 75317 - DNA, 567 bp, Unknown
  Obtained from environmental sample
  misc_feature (1)..(567): n is a, c, g, or t
ttgggggatatgttgtttatagttgtaaaacgttttttcttcataaattattgtctttcccatcagggaaactgtaatttcccatcggggaaattgtttttccctgatggggaactgtctttcccatcggggaaattgtctttcccaccagggaaatcgtttttccctgcaggggaactgtctttcccatcggggaaattgtttttcccaccaggggaattgtctttcccatcagggaaatcgtttttccctgctggggaactgtctttcccatcagggaaatcgtttttccctgctggggaactgtctttcccatcggggaaatcgtttttccctgcaggggaactgtctttcccatcggggaaattgtttttccccgctgaggaactgtctttcccatcagggaaatcgtttttccctgctggggaactgtctttcccttcagggaaattgtttttccccgctggggaactgtctttcccatcagggaaatcgtttttccctgctggggaactgtatttccctgcagagaaatcgtttttccccatcagggaaccctctccttag

SEQ ID NO: 75318 - protein, 188 aa, Unknown
  Obtained from environmental sample
  misc_feature (1)..(188): Xaa is any amino acid
MGDMLFIVVKRFFFINYCLSHQGNCNFPSGKLFFPDGELSFPSGKLSFPPGKSFFPAGELSFPSGKLFFPPGELSFPSGKSFFPAGELSFPSGKSFFPAGELSFPSGKSFFPAGELSFPSGKLFFPAEELSFPSGKSFFPAGELSFPSGKLFFPAGELSFPSGKSFFPAGELYFPAEKSFFPIREPSP

SEQ ID NO: 75319 - DNA, 444 bp, Unknown
  Obtained from environmental sample
  misc_feature (1)..(444): n is a, c, g, or t
atgggaaagacagttccccagcggggaaaaacaatttccctgaagggaaagacagttccccagcagggaaaaacgatttccctgatgggaaagacagttcctcagcggggaaaaacaatttccccgatgggaaagacagttcccctgcagggaaaaacgatttccccgatgggaaagacagttccccagcagggaaaaacgatttccctgatgggaaagacagttccccagcagggaaaaacgatttccctgatgggaaagacaattcccctggtgggaaaaacaatttccccgatgggaaagacagttcccctgcagggaaaaacgatttccctggtgggaaagacaatttccccgatgggaaagacagttccccatcagggaaaaacaatttccccgatgggaaattacagtttccctgatgggaaagacaataatttatga

SEQ ID NO: 75320 - protein, 147 aa, Unknown
  Obtained from environmental sample
  misc_feature (1)..(147): Xaa is any amino acid
MGKTVPQRGKTISLKGKTVPQQGKTISLMGKTVPQRGKTISPMGKTVPLQGKTISPMGKTVPQQGKTISLMGKTVPQQGKTISLMGKTIPLVGKTISPMGKTVPLQGKTISLVGKTISPMGKTVPHQGKTISPMGNYSFPDGKDNNL

SEQ ID NO: 75321 - DNA, 486 bp, Unknown
  Obtained from environmental sample
  misc_feature (1)..(486): n is a, c, g, or t
atggggaaaaacgatttctctgcagggaaatacagttccccagcagggaaaaacgatttccctgatgggaaagacagttccccagcggggaaaaacaatttccctgaagggaaagacagttccccagcagggaaaaacgatttccctgatgggaaagacagttcctcagcggggaaaaacaatttccccgatgggaaagacagttcccctgcagggaaaaacgatttccccgatgggaaagacagttccccagcagggaaaaacgatttccctgatgggaaagacagttccccagcagggaaaaacgatttccctgatgggaaagacaattcccctggtgggaaaaacaatttccccgatgggaaagacagttcccctgcagggaaaaacgatttccctggtgggaaagacaatttccccgatgggaaagacagttccccatcagggaaaaacaatttccccgatgggaaattacagtttccctga

SEQ ID NO: 75322 - protein, 161 aa, Unknown
  Obtained from environmental sample
  misc_feature (1)..(161): Xaa is any amino acid
MGKNDFSAGKYSSPAGKNDFPDGKDSSPAGKNNFPEGKDSSPAGKNDFPDGKDSSSAGKNNFPDGKDSSPAGKNDFPDGKDSSPAGKNDFPDGKDSSPAGKNDFPDGKDNSPGGKNNFPDGKDSSPAGKNDFPGGKDNFPDGKDSSPSGKNNFPDGKLQFP

SEQ ID NO: 75323 - DNA, 498 bp, Unknown
  Obtained from environmental sample
  misc_feature (1)..(498): n is a, c, g, or t
atggggaactgtctttcccatcggggaaattgtctttcccaccagggaaatcgtttttccctgcaggggaactgtctttcccatcggggaaattgtttttcccaccaggggaattgtctttcccatcagggaaatcgtttttccctgctggggaactgtctttcccatcagggaaatcgtttttccctgctggggaactgtctttcccatcggggaaatcgtttttccctgcaggggaactgtctttcccatcggggaaattgtttttccccgctgaggaactgtctttcccatcagggaaatcgtttttccctgctggggaactgtctttcccttcagggaaattgtttttccccgctggggaactgtctttcccatcagggaaatcgtttttccctgctggggaactgtatttccctgcagagaaatcgtttttccccatcagggaaccctctccttagtagaaagtgtactacttttattttacttttactatag

SEQ ID NO: 75324 - protein, 165 aa, Unknown
  Obtained from environmental sample
  misc_feature (1)..(165): Xaa is any amino acid
MGNCLSHRGNCLSHQGNRFSLQGNCLSHRGNCFSHQGNCLSHQGNRFSLLGNCLSHQGNRFSLLGNCLSHRGNRFSLQGNCLSHRGNCFSPLRNCLSHQGNRFSLLGNCLSLQGNCFSPLGNCLSHQGNRFSLLGNCISLQRNRFSPSGNPLLSRKCTTFILLLL

SEQ ID NO: 75325 - DNA, 732 bp, Unknown
  Obtained from environmental sample
  misc_feature (1)..(732): n is a, c, g, or t
ttgaacgggacattgattcctatccatgcagtaagtgaatatcaagttgtgaacggaattttcccatggaaggaatggaaaactgcgaatgaattaacattaactgatgagatgggcaatgaagcctacggtattaggataatctctaccaacatggaacaaggatcattgcttatctatatcgatggtataactgaacgggcagtaaaccctggagattcaataatatacgtttcggattttgaccagcctatacacatacctacggatgatgcaacgcttgccaatttacggttgccctccgagcgtattcaaagcgatgatcctgaaattgttgcccttgccgaaacaattaccaaagacataaacagcgatcagcagaaagctaaagcgattcacttgtgggttgccggtaacatattttatgaccgcgatttatataagtataacgttgtcgatatagacgcaataaagtatagatatgaaagaggctattcaacatatgtgttgcaaaataaacgcggggtatgtgatggttatgccagcttaaccgtagcgttgctgcgggcatccggtatatccgcaaaatatatacctggctatggatataataatggatccagcattgaaggccatgcttggaccgaagcatatgttgataacaaatggattaacatggacaccacatgggacagcaaaaacaaatatgaaaaatggcagtttttcagataa

SEQ ID NO: 75326 - protein, 243 aa, Unknown
  Obtained from environmental sample
  DOMAIN (172)...(229): Transglutaminase-like superfamily
  misc_feature (1)..(243): Xaa is any amino acid
MNGTLIPIHAVSEYQVVNGIFPWKEWKTANELTLTDEMGNEAYGIRIISTNMEQGSLLIYIDGITERAVNPGDSIIYVSDFDQPIHIPTDDATLANLRLPSERIQSDDPEIVALAETITKDINSDQQKAKAIHLWVAGNIFYDRDLYKYNVVDIDAIKYRYERGYSTYVLQNKRGVCDGYASLTVALLRASGISAKYIPGYGYNNGSSIEGHAWTEAYVDNKWINMDTTWDSKNKYEKWQFFR

SEQ ID NO: 75327 - DNA, 654 bp, Unknown
  Obtained from environmental sample
  misc_feature (1)..(654): n is a, c, g, or t
ttgtttagccctatctacggtgagcagattgcgttttttacctctacccgcaagggcggtaagggcggagcagacctgtacctctacacccctaaagtgaaagcggacgagcctgttcccacacctgtacctgtggcagtggttgctgctgctgttcaaattgaggaggagactgctgaggttgaggaggcaaaggtaaaacatcctaaacctggacctgttcctgttgtatacgtaaaggtacaaaatccgaaacctgcacctgctcctggtgcagatctaaagggagaagaacccaaacctacacctgcacctgctcctgttgctgctcagcgccaggcagaaaatccaaatgcgcccccccacccgtctgactcctctgcgttcaataacatttacgttgacaactactccctgtatcctgccgacaaatcctaccgaacgatagcaaatttgcttgcctacctttgggcacatcctagcatcagcgtacattttgatgcgttctccgatgtgcatggcagctgccctgtaaacttgaaaacctccaatcgccaagccaaaattctggagggctatctgcaactgctgggcatgtctgcgcagcggattaccaccgctgcctacagcgataccaagctcgttaacagctga

SEQ ID NO: 75328 - protein, 217 aa, Unknown
  Obtained from environmental sample
  misc_feature (1)..(217): Xaa is any amino acid
MFSPIYGEQIAFFTSTRKGGKGGADLYLYTPKVKADEPVPTPVPVAVVAAAVQIEEETAEVEEAKVKHPKPGPVPVVYVKVQNPKPAPAPGADLKGEEPKPTPAPAPVAAQRQAENPNAPPHPSDSSAFNNIYVDNYSLYPADKSYRTIANLLAYLWAHPSISVHFDAFSDVHGSCPVNLKTSNRQAKILEGYLQLLGMSAQRITTAAYSDTKLVNS

SEQ ID NO: 75329 - DNA, 873 bp, Unknown
  Obtained from environmental sample
  misc_feature (1)..(873): n is a, c, g, or t
ttggttgaagggataacgccnttccaaatcacggtgcaaaagagcggcgtgaaaatccgctataacgtcaccgtgcaccgcgagggactgaatttatctaacaacgcctttttaaagagcctcgaagtaaagaacggcggcgcgatagcctttgacaagaacgtgacggaatatacaatccgcgtcccgaacaagcaaacgtcaattgtccttgtcccgatacccgaggacgacggcgcgacggtctcgggcacttggaacgtcaacggcaataggcttgccgtcggcgaaaacgcaataaggattgtcgtcaccgcgcctagcggagtcaaaaggacctacaccgtgacggtgtcgcgagcggacggctcggtgtcggcggacgctgcgctttcaagccttacggtaagcagcggcacactttcgccctcgtttgccgccgacgtgcttgaatacaccgtcatagcggacgcggcgattattatattaacaccgacaaagtccgatgcgggcgcgacgcttagcggaagctttgaccccgacggcaacattataccgattggcacaaccgtgctcacggtgattgtcaccgccgccgacggcgcgacgacaaggacttaccgcgttaccgtgacgcgcaacgtgccgccgacgctcgacgtaggggtcacaatttccgtcaagggctacaaccttacgccgtcgtttgacaagtctgtgacaagctatacgctgaccgtcggaagcaatataacgcaagtggaaattgtcgcggccgttacgggcacgacgttgcttatcgccgcggaaagtcagcttggcgtgcagcccttgcaaatgcggcgaaaaccaacttttttgccgttgtcgtag

SEQ ID NO: 75330 - protein, 290 aa, Unknown
  Obtained from environmental sample
  misc_feature (1)..(290): Xaa is any amino acid
MVEGITPFQITVQKSGVKIRYNVTVHREGLNLSNNAFLKSLEVKNGGAIAFDKNVTEYTIRVPNKQTSIVLVPIPEDDGATVSGTWNVNGNRLAVGENAIRIVVTAPSGVKRTYTVTVSRADGSVSADAALSSLTVSSGTLSPSFAADVLEYTVIADAAIIILTPTKSDAGATLSGSFDPDGNIIPIGTTVLTVIVTAADGATTRTYRVTVTRNVPPTLDVGVTISVKGYNLTPSFDKSVTSYTLTVGSNITQVEIVAAVTGTTLLIAAESQLGVQPLQMRRKPTFLPLS

SEQ ID NO: 75331 - DNA, 648 bp, Unknown
  Obtained from environmental sample
  misc_feature (1)..(648): n is a, c, g, or t
ttgaacctttcgcgcaggacttgggggcgagttcacgttcccctccgatggacggacgacgggcagatcgcccgggcggaggatttggcgcgtgaacgttggggcggcgtggacattctggtgcattccgtggcctttgccaacaaggatgaactggtgggccgctttatagacacttcccgcgccgggttcgcgcaggcgctggatgtttccgcctattccctgaccgctctctgccgcgcctttgaacctcttttcgcgcccggttcgtccgtgctgaccatgccctattatggggcgcagaaggtcatcaccaattataatgtcatgggggtggccaaggcggcgctggaagcgtcggtgcgctatctggcggttgaactgggcaagaagcagattcgcattaacgccatcagcgccgggccggtacggacgctggcggcttcggggatttcggacttcaggaagatttttgaccatattgaaaagcatgcgccgcttggccgcaacatcaccacggacgaagtgggcggcgtggcgacgtttttggcgtcggatctggcttccggcatcaccggcgaaacgctttttgtggacagcggctacaatattcttggcataacccgttccggggaagacgccggatag

SEQ ID NO: 75332 - protein, 215 aa, Unknown
  Obtained from environmental sample
  misc_feature (1)..(215): Xaa is any amino acid
MNLSRRTWGRVHVPLRWTDDGQIARAEDLARERWGGVDILVHSVAFANKDELVGRFIDTSRAGFAQALDVSAYSLTALCRAFEPLFAPGSSVLTMPYYGAQKVITNYNVMGVAKAALEASVRYLAVELGKKQIRINAISAGPVRTLAASGISDFRKIFDHIEKHAPLGRNITTDEVGGVATFLASDLASGITGETLFVDSGYNILGITRSGEDAG

SEQ ID NO: 75333 - DNA, 363 bp, Unknown
  Obtained from environmental sample
  misc_feature (1)..(363): n is a, c, g, or t
atgaattgcaaatattcccgcatgcttgttccgatcctggccgccctgctcctgctgctcggcggctgcgggacgaagtcgtggcgcacgggcggcgtggcgggcagcaagccctataccatccgcggcaaaacgtattatcccttgcaatccgcgcgcggcttcgtcgaggaaggcatcgcgtcctggtatggaccgggctttcacggcaagcgcaccgccaacggcgaaatatacgacatgcacgccatgacggcggcccacaaaatactgcccctgggcacaatcgtgcgggtcaccaacaagaacaacggccgttcgctggtctgcgcatcaatgaccgtggccctcgtgccgatctga

SEQ ID NO: 75334 - protein, 120 aa, Unknown
  Obtained from environmental sample
  SIGNAL (1)...(25)
  DOMAIN (56)...(120): Rare lipoprotein A (RlpA)-like double-psi beta-barrel
  misc_feature (1)..(120): Xaa is any amino acid
MNCKYSRMLVPILAALLLLLGGCGTKSWRTGGVAGSKPYTIRGKTYYPLQSARGFVEEGIASWYGPGFHGKRTANGEIYDMHAMTAAHKILPLGTIVRVTNKNNGRSLVCASMTVALVPI

SEQ ID NO: 75335 - DNA, 441 bp, Unknown
  Obtained from environmental sample
  misc_feature (1)..(441): n is a, c, g, or t
atgatttgccgcatactggagatacgttccgaacaggagtggcccaagctggcgcagatgctcgaagggcgcgcccgttttgacgagtccgttgaggggcaggtgcgggacatccttgccgatgtcgccctgcgcggagacgaggccgtgctggagtacacgcggcgctttgactgcccggacatgcagcctccgcttcgtttgagcgaagacgagattctgcgcgccgcggcgggtgtggatgcggcggatcgtgagatcatcgcgcaggcggcggccaatatccgagccttccatgaggcgcaggtcgaacgttcctggttcatgcacaggccggacggcactatcctcggccagcaggtcatgcctggtggatcgtgtgggcctgtatgtgccccgcggacagggcggggaaaacccccctgcttttcagcctgctga

SEQ ID NO: 75336 - protein, 146 aa, Unknown
  Obtained from environmental sample
  misc_feature (1)..(146): Xaa is any amino acid
MICRILEIRSEQEWPKLAQMLEGRARFDESVEGQVRDILADVALRGDEAVLEYTRRFDCPDMQPPLRLSEDEILRAAAGVDAADREIIAQAAANIRAFHEAQVERSWFMHRPDGTILGQQVMPGGSCGPVCAPRTGRGKPPCFSAC

SEQ ID NO: 75337 - DNA, 543 bp, Unknown
  Obtained from environmental sample
  misc_feature (1)..(543): n is a, c, g, or t
gtggactacgtggcgctgaacgtctccagccccaacacgccaggtttgcgccgcctgcaaacgcccgaactgctcgcgccatgctgggaagggatgctaaagctacgcaaggaaatgggtctggaggcacagccgattttcctcaaactggcgcctgacctagaccttgaggaactggattccatagttgacgctgcgctgtccagcggcatttcgggccttattgccaccaacacaacgctggaccgcggcataatccaaagcgaggccaatagggcaaaagtgcaggcgtggggcgacggcggcctatcgggcagggcgctcaagccaaaggcgcaggcggtccaaagacggatactgcaaagattgaacggcagactgcccctgatcgcctgcggcggcatttccacgccccaggacgcgcaggaatccctggcaatgggcgccagccttgtgcagatatacaccgcgctgatttttcaggggcctggcttggtcgggcgcatacacagagagatttgcgggggacttgtgctacaatag

SEQ ID NO: 75338 - protein, 180 aa, Unknown
  Obtained from environmental sample
  DOMAIN (1)...(177): Dihydroorotate dehydrogenase
  misc_feature (1)..(180): Xaa is any amino acid
MDYVALNVSSPNTPGLRRLQTPELLAPCWEGMLKLRKEMGLEAQPIFLKLAPDLDLEELDSIVDAALSSGISGLIATNTTLDRGIIQSEANRAKVQAWGDGGLSGRALKPKAQAVQRRILQRLNGRLPLIACGGISTPQDAQESLAMGASLVQIYTALIFQGPGLVGRIHREICGGLVLQ

SEQ ID NO: 75339 - DNA, 648 bp, Unknown
  Obtained from environmental sample
  misc_feature (1)..(648): n is a, c, g, or t
gtgtggcaaatcccgctcggcatatacgccgccgtgaggcagtactcgtggggcgacaggataatgtccgtcatatcntacgtcgggatgtcgctgccgaccttctttttggcgctgttgctcatgttcttcgtctatttaggcagggatttgccgctaatctctatgctccccacgaccggcatggtatcggcagactacgggcagatgggtttcttcggaaagttggtcgatagggcgctgcacatggtggtgccggtggcggtgctgacgatcaccgcgctggccggcctgcagaggataagccgcggaaatatgcttgaggagttacgtaagcagtacgtgacgaccgctcgcgcaaaagggctgccggagaacagggtgatctaccgccacgctctgcgcaacgccgtgaaccctctgataaccctattcggcttcgagttctcgtcgctgctgagcggcgccgcgctgttggaaataataatgaattggccgggccttggcagcctcatgttaagcgccgtacaaacccaagatacgtttttagttatgggcagtttgttattggccggattgatgttgatagcgggaaatctgttggcggatatattattggtaattgctgatccgagggtaagaagttaa

SEQ ID NO: 75340 - protein, 215 aa, Unknown
  Obtained from environmental sample
  DOMAIN (1)...(215): Binding-protein-dependent transport system inner membrane component
  misc_feature (1)..(215): Xaa is any amino acid
MWQIPLGIYAAVRQYSWGDRIMSVISYVGMSLPTFFLALLLMFFVYLGRDLPLISMLPTTGMVSADYGQMGFFGKLVDRALHMVVPVAVLTITALAGLQRISRGNMLEELRKQYVTTARAKGLPENRVIYRHALRNAVNPLITLFGFEFSSLLSGAALLEIIMNWPGLGSLMLSAVQTQDTFLVMGSLLLAGLMLIAGNLLADILLVIADPRVRS

SEQ ID NO: 75341 - DNA, 747 bp, Unknown
  Obtained from environmental sample
  misc_feature (1)..(747): n is a, c, g, or t
ttgcaggcgtgggcgcgcgaggtttttccgaaatggcgcaccggcggtctctccgcgatcttgcaggccgtcgatgaggcgcgggagacgcgcgcgcggcttccctatgatattgatggtctggtgctgaaggtcaatgagattgaggcgcgcgggaatttgggctacaccgcgcatcatccgcgctgggcgattgcgtataaatttgagtcgccgcaggctgtcacgaggcttctctcgataactgtgcaggtcgggcgcaacgggcgcatcacccctgtcgccgagctggaacccgtgtccctgtccggcagcaccatcgcgcgcgccacgctgcataacgaggactatgtgcagcagcttgaactcgcgccgggagatacggtcgcgatctcaaaacgcggcgacgtgatccccgcggttgaccgcgtgatcgaaaaggcggaagcggcggagggttcgcttgtttggacgatgcccccggcttgcccctgctgcggcacggagctcgtgaaacgcggggcgcatcatttttgcccgaacgcgactgccgcgatcgccttgttggccggcttgcgcatttcgcgggcaggcggggctcgacatagacgggcctgggcgggaaaaccctgctcctccgcttcgacaggggatctcataccgcccccgcccggatttattcccggcagattggaccaaccttgcgaattctggaccgcttcgggaataacgggtttcaatttttag

SEQ ID NO: 75342 - protein, 248 aa, Unknown
  Obtained from environmental sample
  DOMAIN (161)...(185): NAD-dependent DNA ligase C4 zinc finger domain
  misc_feature (1)..(248): Xaa is any amino acid
MQAWAREVFPKWRTGGLSAILQAVDEARETRARLPYDIDGLVLKVNEIEARGNLGYTAHHPRWAIAYKFESPQAVTRLLSITVQVGRNGRITPVAELEPVSLSGSTIARATLHNEDYVQQLELAPGDTVAISKRGDVIPAVDRVIEKAEAAEGSLVWTMPPACPCCGTELVKRGAHHFCPNATAAIALLAGLRISRAGGARHRRAWAGKPCSSASTGDLIPPPPGFIPGRLDQPCEFWTASGITGFNF

SEQ ID NO: 75343 - DNA, 858 bp, Unknown
  Obtained from environmental sample
  misc_feature (1)..(858): n is a, c, g, or t
ttgtataatttgggggcccaaaaaggcgcggaaccccaaggaaaaacaccccccccccaatatttcccaattggaatatttttgcctccccccccggaattggaagttttttttggccccatggggggggggaaggctttccgggggaaaaaggttgggtgggggtattttgtttcccgagggggggggacaaaggttcctggttcgggggggcaattttcttgccctccatgccgggctttccgaatgctcattgacgcccgcggaggcggaacggaagagcgggcgagtatcttgagggcgcggaggctgatccattcgctttcgtgggccgcgcttgctatgcggttcgccgcggaactgggcgaagacgaagaggcgcttggcatagccgccgcgctgcacgatatcgccaaacaaaaacgtttggcgaaacagcgcgagcttgccgggcgctggtgcgccgaggagggcttgcncctgccgaataatcccgctgtgtatcacgccgccgcttcggcctggatcgtccgtcatgagctgggcattgccgacgcgcgtatcacgcgggcggtggcgcgccatgccgccggcgggttggggatgacgcgctttgaggagtgcgtatacgctgcggattatcttgatcccgcccgccccttcgcggcgcaggcggcggtctggtcgcttctggccgattttgacgaggcgttgctggcgatgtgccgccagaccatggtctgcgttatggaaaagcgcgaggttctcgatcccgcctcgttggactatcacaatgagcttgtcgagcggctcgcgcaaaccggcagaacgattacggctgtacatattacaatctga

SEQ ID NO: 75344 - protein, 285 aa, Unknown
  Obtained from environmental sample
  DOMAIN (103)...(218): HD domain
  misc_feature (1)..(285): Xaa is any amino acid
MYNLGAQKGAEPQGKTPPPQYFPIGIFLPPPPELEVFFGPMGGGKAFRGKKVGWGYFVSRGGGTKVPGSGGQFSCPPCRAFRMLIDARGGGTEERASILRARRLIHSLSWAALAMRFAAELGEDEEALGIAAALHDIAKQKRLAKQRELAGRWCAEEGLXLPNNPAVYHAAASAWIVRHELGIADARITRAVARHAAGGLGMTRFEECVYAADYLDPARPFAAQAAVWSLLADFDEALLAMCRQTMVCVMEKREVLDPASLDYHNELVERLAQTGRTITAVHITI

SEQ ID NO: 75345 - DNA, 885 bp, Unknown
  Obtained from environmental sample
  misc_feature (1)..(885): n is a, c, g, or t
atgaaaaacgtatttttaacatccttcctacttatctantgcgccgcgttatacgcgcccgcgttatacgcggagaccgccgatgaaatacaaacgctgctgcaaaccccggtggtaagttactcgcaggccgcgcgttttgtgctggaagcggcggatgtaattgactcttatgataaattaagcgggcaagttgcggtgcgttttgcggctgagaaaaactggctgccgaaaacggcgaacgcgcaggacgctatttctctggaagacttgtcgctccttatcatgggagcattcggtctgaagggcggtcctatgtacacgctgtttaacaacgcccattacagttaccgcgaaatggtttttaaggaccttatacaggggcgcaccgatccctcaatgaaggtatcgggttataccatgctgctgatcgttaaccgcctgttgttccgcattgaagacaatccctgggaaatgtccgcgcagcttgagcctgtcgcggtggcggaaatgtcggaagcggcaagaattaataatgaggaaaacgaggccctcgtagaaaaaataaccgcccatattgaagcgatggatgtagccgacacggatgtccgtataacaaatcagggcgttaccatcagcgtttcaaatatccagtttctggcgaactctgtcgggctgccggaaaaggaaaaacaaacggttgcggaaatcgcgtggatactgagttctgttcccggcagaaaaatcctggtcgccggccataccgcgcttgccggaaaccagcgggacaggctgcgcatttcgcgcgaacgggcgcaggcggtcgcggattatctggttcttttgggcgcgcgcaaggcggatgaaattgtcgttgtgggatag

SEQ ID NO: 75346 - protein, 294 aa, Unknown
  Obtained from environmental sample
  SIGNAL (1)...(24)
  DOMAIN (218)...(294): OmpA family
  misc_feature (1)..(294): Xaa is any amino acid
MKNVFLTSFLLIXCAALYAPALYAETADEIQTLLQTPVVSYSQAARFVLEAADVIDSYDKLSGQVAVRFAAEKNWLPKTANAQDAISLEDLSLLIMGAFGLKGGPMYTLFNNAHYSYREMVFKDLIQGRTDPSMKVSGYTMLLIVNRLLFRIEDNPWEMSAQLEPVAVAEMSEAARINNEENEALVEKITAHIEAMDVADTDVRITNQGVTISVSNIQFLANSVGLPEKEKQTVAEIAWILSSVPGRKILVAGHTALAGNQRDRLRISRERAQAVADYLVLLGARKADEIVVVG

SEQ ID NO: 75347 - DNA, 858 bp, Unknown
  Obtained from environmental sample
  misc_feature (1)..(858): n is a, c, g, or t
atgttagttgttaaacgaatgcaactcgcccttcgcggctatgaagatttggtgcagcgtttcaacagagaagttcaggttttggcggctatgaaccatccgaacatagttcaggtttatggctattggatggaaaaagggcagctcaatttatctatggaatttataaatggctggagcttaaaacaagttttggataaatctccggcacttcctgtttgggtagcctgctctgttttatggggttgcttgaatgcgcttgtgcatgttcattcaaggcgttttgtgcacagagatttgaaacccggcaatataatggttgattttgccggtcaaaccaaacttctagattttggaatagcgcgcattgaaaaccaagagattacaattcccggaactgttataggcacagcggcctatatgagtccggaacaggttaggggagagagcgcaaccgaactatcggatatattcagccttgggataattgcttttgaaatgctcaccggcaagcatccttttagagatgaaaatgttgaaaaaacctcaaaaaacattttgagcaaaaacatttcttccataaatttcccgccaaacattccaaacgaacttcgccgccttgtgtgcagaatgttagccaaagacagctccaaaagaataagctcggcttatagctgcttaatgaaactggattccattatggaaggtttgccccgcgagcttttgcatccgctgagttcttggctaagatccgtacgcaaagaaatgccactgcccaatcctccagcttggaaaaaaccgtacccgcattcgcctggcttgcangcacaacgggagctggatttgtgggcgggttga

SEQ ID NO: 75348 - protein, 285 aa, Unknown
  Obtained from environmental sample
  DOMAIN (2)...(230): Protein tyrosine kinase
  misc_feature (1)..(285): Xaa is any amino acid
MLVVKRMQLALRGYEDLVQRFNREVQVLAAMNHPNIVQVYGYWMEKGQLNLSMEFINGWSLKQVLDKSPALPVWVACSVLWGCLNALVHVHSRRFVHRDLKPGNIMVDFAGQTKLLDFGIARIENQEITIPGTVIGTAAYMSPEQVRGESATELSDIFSLGIIAFEMLTGKHPFRDENVEKTSKNILSKNISSINFPPNIPNELRRLVCRMLAKDSSKRISSAYSCLMKLDSIMEGLPRELLHPLSSWLRSVRKEMPLPNPPAWKKPYPHSPGLXAQRELDLWAG

SEQ ID NO: 75349 - DNA, 447 bp, Unknown
  Obtained from environmental sample
  misc_feature (1)..(447): n is a, c, g, or t
ttgaggcgtgggcaggccgaggaggacaaactgtgggcctttcgcaggcgcgtatcctcctcttcctatgttctcggcccggaccgtatcggaggggacatggccgtgccgcgcggcaaactgctggccgccgtgcgccgctttgaaaaaatcgccgccggaaacggcaagcggctcatcgggttcggccacgccggcgacggcaacatccacgccaacctgcactatgacgcctcggatcccgatgacgccgcgcgtacccgcaagacccatcatgaactggacaaagccgtgatggaattcggcggcagcctttccggcgaacacggcgcgggcagcctgaaaagtccggatctgcaactcggcaaggacgaacacgaactgatgcgccggatcagaaaactctttgatcccaaggaaatcctcaatccaaggaagggatactga

SEQ ID NO: 75350 - protein, 148 aa, Unknown
  Obtained from environmental sample
  DOMAIN (1)...(147): FAD linked oxidases, C-terminal domain
  misc_feature (1)..(148): Xaa is any amino acid
MRRGQAEEDKLWAFRRRVSSSSYVLGPDRIGGDMAVPRGKLLAAVRRFEKIAAGNGKRLIGFGHAGDGNIHANLHYDASDPDDAARTRKTHHELDKAVMEFGGSLSGEHGAGSLKSPDLQLGKDEHELMRRIRKLFDPKEILNPRKGY

SEQ ID NO: 75351 - DNA, 795 bp, Unknown
  Obtained from environmental sample
  misc_feature (1)..(795): n is a, c, g, or t
gtgtcgcagggcgatgtgacccagacccgcgggggtgtacacgccgatcatgcgatcatcgtgctgaccgcctcctcggtgcaggatactttcgccatcacgctcgacgccttcaacatggccgaaacataccgtactcccgtcatcctgttgcttgacgaggtggtcggacacatgcgcgaacggctggaagtgcccgcacccggcgccgtgccggtggtggacaggttgcgcacctcggtcaaacccggcgtcaactaccatccctacctgccgcgcgaggacggtcggctgcccatgtcggacttcggcggcgtgcatcgctataatgtcaccggcctctaccacgatatctggggcttcccgaccgaacagcctgaagcggtgaacacgctgctgcatcatctcgtggacaagcttgaaaaccgggccggcgaaatcgcccgctggaaggaatactatctggacgacgcggaagaagtgctcgtctcctacggttcttcggcgcgcagcgcacggcacctggtggaacgcatgcaacagcgcggccacaaggtgggtctgctggaactccagacgctctggcccttcccggtcaaactggttcagaaaaaaacggcgaaggccaaaaacatctatgtggttgaaatgaatatggggcatatcctcgccgaggtgaagaaggccgtgcccaatcctgacagggtctatcttgtcaaccgtaccgacgggcagcttgtgacccatatggatatcagcaaggtgatgcgcgtcatcgaaggcaggggggtgtaa

SEQ ID NO: 75352 - protein, 264 aa, Unknown
  Obtained from environmental sample
  DOMAIN (1)...(135): Pyruvate flavodoxin/ferredoxin oxidoreductase, thiamine diP-binding domain
  misc_feature (1)..(264): Xaa is any amino acid
MSQGDVTQTRGGVHADHAIIVLTASSVQDTFAITLDAFNMAETYRTPVILLLDEVVGHMRERLEVPAPGAVPVVDRLRTSVKPGVNYHPYLPREDGRLPMSDFGGVHRYNVTGLYHDIWGFPTEQPEAVNTLLHHLVDKLENRAGEIARWKEYYLDDAEEVLVSYGSSARSARHLVERMQQRGHKVGLLELQTLWPFPVKLVQKKTAKAKNIYVVEMNMGHILAEVKKAVPNPDRVYLVNRTDGQLVTHMDISKVMRVIEGRGV

SEQ ID NO: 75353 - DNA, 342 bp, Unknown
  Obtained from environmental sample
  misc_feature (1)..(342): n is a, c, g, or t
atgggactgtttgatcaagtcaacaccgccgcaaattcaaacgaggagaccacccgggaaaagcatctccccgtcctcagcgccaaaaagctcgccgacaagcgctatgaactgcacatagacgtgggcggaggcaaacacccaagcgaaatcgatcacttcatccaatgggcgggcgttcgcatcaacgattgctatatcgggcgcgcggaattcgcggccgggatcatggcgccggtctgcaccctgatcatcacgccgccgacagtgcccgcgacagtaagcgttgtctcgcgctgcaacaagcacggcctctggaagagcgagatcaccctcgaataa

SEQ ID NO: 75354 - protein, 113 aa, Unknown
  Obtained from environmental sample
  DOMAIN (14)...(109): Desulfoferrodoxin
  misc_feature (1)..(113): Xaa is any amino acid
MGLFDQVNTAANSNEETTREKHLPVLSAKKLADKRYELHIDVGGGKHPSEIDHFIQWAGVRINDCYIGRAEFAAGIMAPVCTLIITPPTVPATVSVVSRCNKHGLWKSEITLE

SEQ ID NO: 75355 - DNA, 597 bp, Unknown
  Obtained from environmental sample
  misc_feature (1)..(597): n is a, c, g, or t
ttgttgtttttgctctcgtcctggaagctatggttcatagaattgtcacttggcagggtttatacaaacaangccatccgggttttgtacattatttacggagtttgtatggcgggtatatttgaagaaactgccaggtttattgcctttaaaatcctaaagcgaaaatacgatggtataggaaccgctttatcttatgggatcggccacgggggaatagaagcaatattgcttgccgggctggcaatgatcagttcaattgtaaccagtatcatcattaacaccggaaatattgaaagcataacaggcagtcttcagggagatacccttgctgcggcgaacattcagcttcaggctttgtttgtaacggctccttatatgtttttagtcggcggattcgaacgcgtgtttgcgatagccgtacatatatcattgtcagtggtggttttctattcggtatttggcaaaaacaagctgtggctgtatcctttggcgattcttcttcatgccattgttgatnataccgctatggtatttcaaacagggggtataaaaaatattattgtagtggaagtaattgtctgcgtattccggtaa

SEQ ID NO: 75356 - protein, 198 aa, Unknown
  Obtained from environmental sample
  misc_feature (1)..(198): Xaa is any amino acid
MLFLLSSWKLWFIELSLGRVYTNXAIRVLYIIYGVCMAGIFEETARFIAFKILKRKYDGIGTALSYGIGHGGIEAILLAGLAMISSIVTSIIINTGNIESITGSLQGDTLAAANIQLQALFVTAPYMFLVGGFERVFAIAVHISLSVVVFYSVFGKNKLWLYPLAILLHAIVDXTAMVFQTGGIKNIIVVEVIVCVFR

SEQ ID NO: 75357 - DNA, 888 bp, Unknown
  Obtained from environmental sample
  misc_feature (1)..(888): n is a, c, g, or t
ttgccgacggatcaaattcggcacgagcggcacgagtaccggcaaaggctggcaaacccgggtcagcgattgggtaacgcaaggggtggagagagggatgctataattaaaaactatcacatctatatcgcccatccggaaacacatccgtgttatggattgatattcaaagaaattgctttgttgttactgcattgttttaaggatatcggcatcaactgtacattgaaaatcaatcaaatcgataaaaccaaggttaatatttttttgggcactgtaaatcttaactatgctaacataccgcacgatttaaaatatataccctatcaaatggagcagttgagcgccgatgaaggctggtacaaaaaaatgcccgatatgcacgattttttgcaaaatgccgcagagatctgggattattccaccgccaatatagattttctgcgcaacaaaaatatcccggccaaatacttgcccctcggctatcaccccgccctagaaatactccctcacgccgaaaaagacattgatgttttattttgcggaagtgttaatgaccgccgaattaaaattatcgaggaattaaaaaataaaggcctcactgctgtttacagcaacggtgacttcggcgcaaaacgcgaccagctgatcgcccgcgctaaaatcgttttgaatattcattattacagtatggcgattcttgagagcgccagaattcattatctgctcaataacaaaatatttgtaattaccgaaaactcggtggacaatccgtatcccaaagttgatttggtcagcgtgccttatgaacaattggtcgatgaatgcgtcaagcgtctggcggattgggaaaattcgcgaaagctggcggagctaaattatgagtag

SEQ ID NO: 75358 - protein, 295 aa, Unknown
  Obtained from environmental sample
  misc_feature (1)..(295): Xaa is any amino acid
MPTDQIRHERHEYRQRLANPGQRLGNARGGERDAIIKNYHIYIAHPETHPCYGLIFKEIALLLLHCFKDIGINCTLKINQIDKTKVNIFLGTVNLNYANIPHDLKYIPYQMEQLSADEGWYKKMPDMHDFLQNAAEIWDYSTANIDFLRNKNIPAKYLPLGYHPALEILPHAEKDIDVLFCGSVNDRRIKIIEELKNKGLTAVYSNGDFGAKRDQLIARAKIVLNIHYYSMAILESARIHYLLNNKIFVITENSVDNPYPKVDLVSVPYEQLVDECVKRLADWENSRKLAELNYE

SEQ ID NO: 75359 - DNA, 549 bp, Unknown
  Obtained from environmental sample
  misc_feature (1)..(549): n is a, c, g, or t
atgatggatcctgcagagatgtcggcggtgcagcgccaggtcgaggtctataccgccgatctgcgggcgcgcgggatagtcggcgagcgcgacatggggcaggacaagtatctgaagcttctggttacgcagcttcgctatcaggatccgcagaatccaatgcagaatcatgaattcgcttcgcagatggcgcagttctcttcgctggagcagatgacgaagatgaacagcaatatggagaaggcgataagctccgcgaggatgagcgaaagctacgcgatgctcggcaaagaggtgagctggtacaatacggacacccgcgagctcgcgagcggcgtcgtcaaggccatcatcctcagtgacgggcatcccatgcttcgcgtgggcaatgctgatatcgagcccgcttcgatcacgggggtgcgcatcccgccgccgcaggaattgaacgcagacacgatgcgtcccagccgggcatacgaggcgatggcgcgcagagcgccggacgccgctgaggatatggaagacgcggcggacgggacatactga

SEQ ID NO: 75360 - protein, 182 aa, Unknown
  Obtained from environmental sample
  DOMAIN (7)...(145): Flagellar hook capping protein
  misc_feature (1)..(182): Xaa is any amino acid
MMDPAEMSAVQRQVEVYTADLRARGIVGERDMGQDKYLKLLVTQLRYQDPQNPMQNHEFASQMAQFSSLEQMTKMNSNMEKAISSARMSESYAMLGKEVSWYNTDTRELASGVVKAIILSDGHPMLRVGNADIEPASITGVRIPPPQELNADTMRPSRAYEAMARRAPDAAEDMEDAADGTY

SEQ ID NO: 75361 - DNA, 609 bp, Unknown
  Obtained from environmental sample
  misc_feature (1)..(609): n is a, c, g, or t
atgaaccgttggacgcatccttatttgagaagcatccccatgatgtatgcattgcagaaaaccgccctttctttcatgttgtgcgctctgcttgccgccgcctttttcacggtgccggcacatggcgctgaagaaaacggctcgttttgggtggccgtgggcgacagcatgtccaaagcctggaccaaggggacgttcgatttctatctccctgtatatacttggcacaatcgtttcatgtattcggcaaaagcgtcaaaatacaatgaaaccccctggggttttggcttgggaacatcccatttcgacagcaagggcaaccagcatgccttgcttgccgtgggttttatggattccaacaatcatttccagcccatcgtggggtatgcgcatttgtggtattgggaaatgctcaaggatctctctgccggcgtcggcataggcggaggattctccgcccgctatgaatggagctacatcccttttcccggcgccctgcccctggtcagcctgcaatataaaagtctggccgtattggcgacatacctgcccgatgcgtacaaccacggcaatgtgctgtttgtgatgctgcgctggcattttaattga

SEQ ID NO: 75362 - protein, 202 aa, Unknown
  Obtained from environmental sample
  DOMAIN (55)...(198): Antimicrobial peptide resistance and lipid A acylation protein PagP
  misc_feature (1)..(202): Xaa is any amino acid
MNRWTHPYLRSIPMMYALQKTALSFMLCALLAAAFFTVPAHGAEENGSFWVAVGDSMSKAWTKGTFDFYLPVYTWHNRFMYSAKASKYNETPWGFGLGTSHFDSKGNQHALLAVGFMDSNNHFQPIVGYAHLWYWEMLKDLSAGVGIGGGFSARYEWSYIPFPGALPLVSLQYKSLAVLATYLPDAYNHGNVLFVMLRWHFN

SEQ ID NO: 75363 - DNA, 519 bp, Unknown
  Obtained from environmental sample
  misc_feature (1)..(519): n is a, c, g, or t
atggctgccggcagttttcttggaattacgctgcaccacgacgaatctttccctgttgggaagacggataacctcaccttgtatccaatgacattttttgaatttctggccgccttgaatgaagaacagttgataaccgcgatagaagataaaaagccgcgctttgccgctctggttaaaaataatctttcaaaatatcttaaatattatttttatgtcggcggtatgccggaagtagtgcttgcttttacaaaagagaaaaattataatacgatacgatccattcagaagaaaattatcagcggttatgaagatgatttctctaaacacattgatataaggtcagcggaaaaggtaacacgcctctggaattccattcctcgccagttggcaagagagacgaaaaaatttatctacaacgaagtaaagtctggcgcaaaatcgcgcgattaccggtcctcattgttttggcttgccaaatgcggattggcgtatgactcggccaatctgtcaatgtaa

SEQ ID NO: 75364 - protein, 172 aa, Unknown
  Obtained from environmental sample
  misc_feature (1)..(172): Xaa is any amino acid
MAAGSFLGITLHHDESFPVGKTDNLTLYPMTFFEFLAALNEEQLITAIEDKKPRFAALVKNNLSKYLKYYFYVGGMPEVVLAFTKEKNYNTIRSIQKKIISGYEDDFSKHIDIRSAEKVTRLWNSIPRQLARETKKFIYNEVKSGAKSRDYRSSLFWLAKCGLAYDSANLSM

SEQ ID NO: 75365 - DNA, 390 bp, Unknown
  Obtained from environmental sample
  misc_feature (1)..(390): n is a, c, g, or t
ttgatggccgagaattgcagagcccgcgccttatcaaatccgatgatggcgggcggacggctggttgcgggacaggcgacggcaatggaaaacgcggcgtcaaatccaagcggaaccgtaggcgcgtttatgggaatgggcatggcgcaaaacgcgggcggtatgaatcccgccgaattattccaggtcggtatgcagcagcgagccgttcaacaacaagccgcgccgcaggtcgcgcggttacccgccaacgccgccggaacatggacttgtacatgcggcgcggtcaacgccggcgctttctgtcaggaatgcggaaacgaaaagtcggagactccgggtgcttcggactnctggattngcgaatgcngcgccgtncatacccggtag

SEQ ID NO: 75366 - protein, 129 aa, Unknown
  Obtained from environmental sample
  misc_feature (1)..(129): Xaa is any amino acid
MMAENCRARALSNPMMAGGRLVAGQATAMENAASNPSGTVGAFMGMGMAQNAGGMNPAELFQVGMQQRAVQQQAAPQVARLPANAAGTWTCTCGAVNAGAFCQECGNEKSETPGASDXWIXECXAVHTR

SEQ ID NO: 75367 - DNA, 963 bp, Unknown
  Obtained from environmental sample
  misc_feature (1)..(963): n is a, c, g, or t
ttgccatgcgactacgattcaaccacgtttactatgccgccttatgatgtggatgtgaccgctaactttaaaacgttggtcgcgttcactaagaacggtaaaccttatggaacctatggggtagtgactattggcaatagaaaatggatggatgagaatttgaactatgaaactgcgacaggttcttggtgttatgacgataaacccgaaaattgtgaaaagtacggtagattgtatgattggacaacggcaatgaatttagatgaaaaatatgcttcttcgctttgggatggcaacgcttatatacaacaaggtatttgccctgatggttggcatttggcgactcaagaagactggttggatttagcagcggtaggaggagggataaataccagcgatctttcaaagataactgctgcgaaaatgaagacaataggcggctgggataatggtaatggaacagacaattttggattttcggcattgcctggtggatattttgcttctcttgctaattcttattatactggagccggaacttacggcgtatggtgggtaaactttgaaaatggtaggaatggagtatcaaacgtacaaagaatagaaatagataacagaaacccgagttggatgtcatttaatagtactacaaagggatacaggtactcggtacggtgtgcggcatttcttaaagatacgtatacagttaaggtcaatagcaatggtataggtgcaacgggcaacggaaattacaaaccattcgatacggttaccgtaagagcggggatggcgcccgaaggtacgttcttcattaaatggatggcggagactaacaaaataatttttgccgatgtccataatcctacaaccacgtttatcatgcccggagggaaagatgaaacggtaaccgctgtctttgaaaaaaaacacacggttaagatcgtttggggaagttccggctga

SEQ ID NO: 75368 - protein, 320 aa, Unknown
  Obtained from environmental sample
  misc_feature (1)..(320): Xaa is any amino acid
MPCDYDSTTFTMPPYDVDVTANFKTLVAFTKNGKPYGTYGVVTIGNRKWMDENLNYETATGSWCYDDKPENCEKYGRLYDWTTAMNLDEKYASSLWDGNAYIQQGICPDGWHLATQEDWLDLAAVGGGINTSDLSKITAAKMKTIGGWDNGNGTDNFGFSALPGGYFASLANSYYTGAGTYGVWWVNFENGRNGVSNVQRIEIDNRNPSWMSFNSTTKGYRYSVRCAAFLKDTYTVKVNSNGIGATGNGNYKPFDTVTVRAGMAPEGTFFIKWMAETNKIIFADVHNPTTTFIMPGGKDETVTAVFEKKHTVKIVWGSSG

SEQ ID NO: 75369 - DNA, 906 bp, Unknown
  Obtained from environmental sample
  misc_feature (1)..(906): n is a, c, g, or t
atgaatttctttgttgtgtcattcctgattgttgccgcaggagggagtgtgctggcttttacaaataccggtatgggaaaaaacaagtcttggtcgcagttttacaaccaaggtaaagaattaggattttccacaaaggaagttgatttactccgttacctggcaaccaaaaccaacctggaggatcccagtgcgcttttcgtttcccagcgccagatggatctctgcatcagttacctgaaaaaaaacatgcatttattcgggaacgatcaggaaaataatagttttctttacaaattgttcgattttaggaaaagaatagaaatggatacccccaaggcaaaacgtggtatcattaattcacaccaaatgatcgagggccaaaatctgcgaatccttgtgaaagggctgggggtgtttaagtcccaggtagtaaaaaattcaaatcaataccttactgtttcccgtcccacggccccaaatcagccgccgggaactttttcctggatagggcagcaaatttctatttatttctggagagaagatgacgccggttatgtgtttgataccagtgtaattgacgaggtttttaccaataaaggccttgcggctattagagtaggtcattcagatgagctcttcagaacccaaaagcgaaaatcaatccgagtaaaactccataaacacgcattcctttatcttttgaccgatgaaagagatcccaataaggtagaggaagaaagcggcttanaatgtttccttgaggatctttctgatacaggctgcgcgattaccgttggcggcgaagctgatncaggattagggataaaggttcaatttgtccttnaatatagccctattgtaatgagcggaaacgtccgttctctggaatatagaaagaagtga

SEQ ID NO: 75370 - protein, 301 aa, Unknown
  Obtained from environmental sample
  SIGNAL (1)...(19)
  misc_feature (1)..(301): Xaa is any amino acid
MNFFVVSFLIVAAGGSVLAFTNTGMGKNKSWSQFYNQGKELGFSTKEVDLLRYLATKTNLEDPSALFVSQRQMDLCISYLKKNMHLFGNDQENNSFLYKLFDFRKRIEMDTPKAKRGIINSHQMIEGQNLRILVKGLGVFKSQVVKNSNQYLTVSRPTAPNQPPGTFSWIGQQISIYFWREDDAGYVFDTSVIDEVFTNKGLAAIRVGHSDELFRTQKRKSIRVKLHKHAFLYLLTDERDPNKVEEESGLXCFLEDLSDTGCAITVGGEADXGLGIKVQFVLXYSPIVMSGNVRSLEYRKK

SEQ ID NO: 75371 - DNA, 519 bp, Unknown
  Obtained from environmental sample
  misc_feature (1)..(519): n is a, c, g, or t
atgatggcggggttcgcgcccgctgganaacgcatcccggagcgtatatgccacaacgataccaaaatcaataatatccttatagacgacgcggattcaaaagccctctgcgttatagacctggatacggtcatgcccggaacaagcctcttcgacgtgggggatctgatccgcagcgtcaccactaccgcggcggaggacgagcgggacatatccaaaatagcgtttgacaccgcttttttccgggcactgcttgaggggtatctggctgaagccaaggaattccttattaaagaagaaatcgccctgatactcgaatccggcagggcgattacccagatcatggccctccgtttccttaccgattaccttgaaggggatcagtattaccatataagccggccgcagcacaacctggaccgcagccggaaccaaatcgccctgatacggtcaatggattccaaatgggaagaagctcaaaagatcgtgcaaaaacttacgaatgaaaatgccgattag

SEQ ID NO: 75372 - protein, 172 aa, Unknown
  Obtained from environmental sample
  misc_feature (1)..(172): Xaa is any amino acid
MMAGFAPAGXRIPERICHNDTKINNILIDDADSKALCVIDLDTVMPGTSLFDVGDLIRSVTTTAAEDERDISKIAFDTAFFRALLEGYLAEAKEFLIKEEIALILESGRAITQIMALRFLTDYLEGDQYYHISRPQHNLDRSRNQIALIRSMDSKWEEAQKIVQKLTNENAD

SEQ ID NO: 75373 - DNA, 660 bp, Unknown
  Obtained from environmental sample
  misc_feature (1)..(660): n is a, c, g, or t
ttgaatattgccgtagaagaaattgtcagcgcattaaaacatgtaattcatcctgctgctggcaagtctatagttgaacttaacatggtaagcgacatcagcattaatgggctgcatgttgctttggtgttaattctttccaagccacacgacccgatgaaaaatactatcgtgaatgcttgcgaaaaggcattgaggtattatgtacatcccgatattgaacttcatattgaagtaatgactaaacaatcacccgctctcgaatctaaacagccaggaaataaaacagaattacgcgcgaaaaatattatcgccgtagcatcaggcaagggtggtgtaggtaaatcaactgtggcggcaaatcttgccgttgccttgtcgaaaatgggtttcagtgttgggttgttggatgctgatatttatggaccttcaataccaaagatgcttggtgtggaaaatgtacagccttcggtaaaaaaaagcgatggacatgaagtaatagttcccgttgaacgacatggcataagaatgttgtctattggcttttttgtaagtcctgaaaatgcgctgatatggcgcggcgcaatggcgacaagcgcactcaaacagttgctcatcagggcgaatggaacgaacccgaattcctatactcggcgataa

SEQ ID NO: 75374 - protein, 219 aa, Unknown
  Obtained from environmental sample
  DOMAIN (104)...(214): CobQ/CobB/MinD/ParA nucleotide binding domain
  misc_feature (1)..(219): Xaa is any amino acid
MNIAVEEIVSALKHVIHPAAGKSIVELNMVSDISINGLHVALVLILSKPHDPMKNTIVNACEKALRYYVHPDIELHIEVMTKQSPALESKQPGNKTELRAKNIIAVASGKGGVGKSTVAANLAVALSKMGFSVGLLDADIYGPSIPKMLGVENVQPSVKKSDGHEVIVPVERHGIRMLSIGFFVSPENALIWRGAMATSALKQLLIRANGTNPNSYTRR

SEQ ID NO: 75375 - DNA, 777 bp, Unknown
  Obtained from environmental sample
  misc_feature (1)..(777): n is a, c, g, or t
atggaagagccaacgcatgtgtcatgggcaaaaatgctcagatgggtaaaagcggagacatcccggctcaaagagcttctggagcatacccatggcaaggaattgaatgccgctgaccttcgggttatccttcgcggaaaatcgctggaattttattcccggcattacggcaaggtacttaccggaaacaaccaaatccttgatgttcgttctgccttgctgggtattaatcagttactggacgaacttatcgaaggcgctgtctcatcagtgccgagaccgcctgagagtgttgaaccattaacacgtcaatatcttcggttattcagtaccaacaatcagatggaacgggacaatcttcataaaactttaaaaggcacaggtattacaacaggtgattttgagtccaggggatggatacggatagtggcaaaaaatgtctttgcaatttctataaatgaacgcttcacttatttcacacagcctggtcgtaacaggaatatcctaaaatcagatttagatcaggctcattttctaattggcgccgccatacccgattcccaaataaatattaccaatgagcttaataaggacagttttcaaattaaaaaatctgtcgatgatattcttgtctggtattctgctgtttctcccgatgcggaatggagaacagccgcaaaaaacgcttcaactttggtatcccattggcgcttagccagagcaaggacaaaaccggaacagcgcaccttgtttgatatattggaggaggaaacataa

SEQ ID NO: 75376 - protein, 258 aa, Unknown
  Obtained from environmental sample
  misc_feature (1)..(258): Xaa is any amino acid
MEEPTHVSWAKMLRWVKAETSRLKELLEHTHGKELNAADLRVILRGKSLEFYSRHYGKVLTGNNQILDVRSALLGINQLLDELIEGAVSSVPRPPESVEPLTRQYLRLFSTNNQMERDNLHKTLKGTGITTGDFESRGWIRIVAKNVFAISINERFTYFTQPGRNRNILKSDLDQAHFLIGAAIPDSQINITNELNKDSFQIKKSVDDILVWYSAVSPDAEWRTAAKNASTLVSHWRLARARTKPEQRTLFDILEEET

SEQ ID NO: 75377 - DNA, 372 bp, Unknown
  Obtained from environmental sample
  misc_feature (1)..(372): n is a, c, g, or t
atgccgaccaagatacccttcatcaaaacctacctccgcccagaggaatatgaacacttgagcaatcaagcccgaaacgccgggttatccaattcccgatttttgaaaatggtcgccttgggccatgaagtcagaagcctcgtggaccagaaagcctttctcgctctgctcaatagcaaagccgacctcggacgtttgggcggcctgttgaagcaccatctggaactgtcccgccatcagccccagaccgaccagccggaatggcaagaaagtcttcttagccttttgcgctccatcaccatgacgcaacatcaggtcggccgccacattactgatgtcagccgggaactcctgcgagggaagaaacgatga

SEQ ID NO: 75378 - protein, 123 aa, Unknown
  Obtained from environmental sample
  misc_feature (1)..(123): Xaa is any amino acid
MPTKIPFIKTYLRPEEYEHLSNQARNAGLSNSRFLKMVALGHEVRSLVDQKAFLALLNSKADLGRLGGLLKHHLELSRHQPQTDQPEWQESLLSLLRSITMTQHQVGRHITDVSRELLRGKKR

SEQ ID NO: 75379 - DNA, 804 bp, Unknown
  Obtained from environmental sample
  misc_feature (1)..(804): n is a, c, g, or t
gtgataaagggaggattcgccccgcgaatcttgagctgtatactgactgggcataattacgaacacgagatacagacgataacgcagatttttttcccgaatcaggggttttcatcggtcaaagaaatacccgatacaggttattgctgcgaaagcgcgcttgaggaatcaaaaggtaaaatcgtctgtgcaggacggatttttttaagccggacgcttgtttgcgagaaagcaattgagctaaggattcgcgtggcggacaattccttaaaaaattcgttcgatacaagagatatccgccacggccttatgaattcgctttttttggcgtgcaaagcttacacaggaattgatccgccgtggggttcgctcaccggaatacgcccttcaaagctggcgagaatgcttttggaggctggcgcgcgagatgagagaaagcttgtaaatgaaatgtcggagcggtatctggcgaaggaagaaaagataaggctctgtatcgacactgctaaaaccgccgtcagggtattaaaaaatcaaataccgggaggcgtgagcctgtatatcggcatacctttttgcccttccacatgcctgtattgttcattcgcttcttatcctattaataatagaacttccttgcaagggattcgtggaacgaatccctccatagttgaggtatatcttgacgcgctgtacaaagaattggattttatcaaaaagtataccaaaaaccgcgcgatagagagcgtttatatcggcggcggaactccgacctcacttgacgcggttcatttngtcagctga

SEQ ID NO: 75380 - protein, 267 aa, Unknown
  Obtained from environmental sample
  misc_feature (1)..(267): Xaa is any amino acid
MIKGGFAPRILSCILTGHNYEHEIQTITQIFFPNQGFSSVKEIPDTGYCCESALEESKGKIVCAGRIFLSRTLVCEKAIELRIRVADNSLKNSFDTRDIRHGLMNSLFLACKAYTGIDPPWGSLTGIRPSKLARMLLEAGARDERKLVNEMSERYLAKEEKIRLCIDTAKTAVRVLKNQIPGGVSLYIGIPFCPSTCLYCSFASYPINNRTSLQGIRGTNPSIVEVYLDALYKELDFIKKYTKNRAIESVYIGGGTPTSLDAVHXVS

SEQ ID NO: 75381 - DNA, 822 bp, Unknown
  Obtained from environmental sample
  misc_feature (1)..(822): n is a, c, g, or t
gtgaccggactcaaaggcggccacagcggcatgaacatcagcgacagccgcgcaaacgccatcaggattctggccagaaccctttacgcgcttcaggctgggacgcagatcggcattgccagcttggcggggggcagcaagcgtaacgccatcccgcgcgaggctttcgccgtcctagccgtttctgacgaggccaaggccaagtccatcttggcctctgttgaggccgagaccaaacaggcgatagggcaatttgacccagggctgcaaattttactagagccagttggcctcccagcaaaagttatggacgatgctgatgccaagattgtcgtcaacactcttttcacgatggtacacggcgttgtcgccatgagccctgacatcccagggctggtgcagaccagcaccaaccttggcgttttagaaacgcaggacgatgttgtcagtttctacatgcttcacaggtcttcgatagatgcttcaaagatgacggtggttgaccgcgtgtcggcccattgcgccctggccggattccaggccacccacataggcggctacccaggctggaagccagagcctgacagcgacttggtaaagattgtgaccggagtatataaagaagtcgccggcaaagagatgaaggtcgtcgccatgcacgctggcctagaatgtggcatcatcggcgaaaagtacccaggcatgcagatgatttccatcgggcccgacatgtgggaagtccacacccccagcgaacacgtcagcatcccctctgtggcctttttctggaagttcgtcaaggccattctggcgaaaaaataa

SEQ ID NO: 75382 - protein, 273 aa, Unknown
  Obtained from environmental sample
  DOMAIN (3)...(86): Peptidase dimerisation domain
  misc_feature (1)..(273): Xaa is any amino acid
MTGLKGGHSGMNISDSRANAIRILARTLYALQAGTQIGIASLAGGSKRNAIPREAFAVLAVSDEAKAKSILASVEAETKQAIGQFDPGLQILLEPVGLPAKVMDDADAKIVVNTLFTMVHGVVAMSPDIPGLVQTSTNLGVLETQDDVVSFYMLHRSSIDASKMTVVDRVSAHCALAGFQATHIGGYPGWKPEPDSDLVKIVTGVYKEVAGKEMKVVAMHAGLECGIIGEKYPGMQMISIGPDMWEVHTPSEHVSIPSVAFFWKFVKAILAKK

SEQ ID NO: 75383 - DNA, 804 bp, Unknown
  Obtained from environmental sample
  misc_feature (1)..(804): n is a, c, g, or t
atgccggtatacatggccggcaagataggccaggatggtgagtttctgctgcagttgcttcaatcctacggagtaaaaaccggcggtgttatccaatacgagggagtaaccggtcaggcgattattcagcttgacaggaacaaacagaattccattgttttgttcagcggcggaaacggcgaggtaaccgttgaggaaattcacaataccatagcgcaattcagcgccggtgatgccattgtattacagaatgaaatcgcgcacgttcgggaaattgtggactgcgccaaaagacagggcctgcgtatttgccttaatccctcgccgtacaatgaaaaaatcgcggagattcctctggatctggtggatatattttttgtcaatgaaattgaaggcgcggcccttgccagcctgccgcgcgagaccgcgccacccgcggcgctggactgccttgtcaggcgtttccccaaagcggagattattcttaccgccggaaaagacggcgcgtactatggctgcggtgaaatcagagcgaaaggcgatataatcaacgtgccggtagcggataccaccggcgcgggcgatacttttaccggatattttatcgctgccagagaaaaaaacatgaccgtttcccaggctttggcagttgcctgtaaggcttcctccatagcggtttcccggaaaggagcgatggtatcaattccttttgctgaagaagtgtttgaaaacggccccttangttgccaacagtgtacagatcacaaagaggcacgctacgcaggcatacattcccgtggctga

SEQ ID NO: 75384 - protein, 267 aa, Unknown
  Obtained from environmental sample
  misc_feature (1)..(267): Xaa is any amino acid
MPVYMAGKIGQDGEFLLQLLQSYGVKTGGVIQYEGVTGQAIIQLDRNKQNSIVLFSGGNGEVTVEEIHNTIAQFSAGDAIVLQNEIAHVREIVDCAKRQGLRICLNPSPYNEKIAEIPLDLVDIFFVNEIEGAALASLPRETAPPAALDCLVRRFPKAEIILTAGKDGAYYGCGEIRAKGDIINVPVADTTGAGDTFTGYFIAAREKNMTVSQALAVACKASSIAVSRKGAMVSIPFAEEVFENGPLXCQQCTDHKEARYAGIHSRG

SEQ ID NO: 75385 - DNA, 618 bp, Unknown
  Obtained from environmental sample
  misc_feature (1)..(618): n is a, c, g, or t
atgcggcgcgaggtattcgaactgatggccgcgcatccggctatagcgcatcaggcgcatctgccgatgcagtccggggacgacgaggtgctgcgccggatgcgccgctcgtatacgatggagcgctaccgcgagatcgtcggctgggtgcgcgcgcttgttccggacgcgacgctctttaccgacatcatcgtgggttttccgggcgagacggcggaggagtttgcgcgcacccgcgaggtgatatgcgacctcgcgtttgatatggtgttcacggcggcctattcgccgcgctttggaacttccggcgcgaagctgcgcgacgatgtgccccgcgaagaaaagacgcggcggctcggggaactgcaggatctgctgaaaacgatgggcgcggaaaaaaagaagcggtatatcgggacaacgcagcgcgttctggtggacggcgttgcgggcgcggatcttgtgtcggcgcgcacgaacgggcttatcccggtacacgcgcgcttgcccaacatcgcgggcgcggagcttatcgggcaattcattgatgtgcgcatcacatcgtcgagcgctctctctttggcggcggagtacgcgccgccggatactgccggatag

SEQ ID NO: 75386 - protein, 205 aa, Unknown
  Obtained from environmental sample
  misc_feature (1)..(205): Xaa is any amino acid
MRREVFELMAAHPAIAHQAHLPMQSGDDEVLRRMRRSYTMERYREIVGWVRALVPDATLFTDIIVGFPGETAEEFARTREVICDLAFDMVFTAAYSPRFGTSGAKLRDDVPREEKTRRLGELQDLLKTMGAEKKKRYIGTTQRVLVDGVAGADLVSARTNGLIPVHARLPNIAGAELIGQFIDVRITSSSALSLAAEYAPPDTAG

SEQ ID NO: 75387 - DNA, 423 bp, Unknown
  Obtained from environmental sample
  misc_feature (1)..(423): n is a, c, g, or t
atggctaatccattggtagagacttatgacgcgaagaaagtcattataactcttggaggtgttcctattagcggttacaccgatggaacatttgtcaatgttactgcaaacagcgagagatggacgcggaaggtcggcgcagacggcgaggtaaaccgcgcattgtcaaatgacaatacgagtaccattgacattactctcctgcaaaccagcctttccaatgactaccttcgcactgttgaagctgctgatgccttaacaggcctcggtatgctgcctttgctcataacggacttaaactccgggaggatacggttctggccacaggcttggattgctacagagcctgatgacggcaaggcaaaggaaacaactgatattggctggactattcacacaggacaggaatcacaagcggcttaa

SEQ ID NO: 75388 - protein, 140 aa, Unknown
  Obtained from environmental sample
  misc_feature (1)..(140): Xaa is any amino acid
MANPLVETYDAKKVIITLGGVPISGYTDGTFVNVTANSERWTRKVGADGEVNRALSNDNTSTIDITLLQTSLSNDYLRTVEAADALTGLGMLPLLITDLNSGRIRFWPQAWIATEPDDGKAKETTDIGWTIHTGQESQAA

SEQ ID NO: 75389 - DNA, 348 bp, Unknown
  Obtained from environmental sample
  misc_feature (1)..(348): n is a, c, g, or t
atgcccggcgcttcgaacctggccgcgtgcgttcctgtggggaatttttataaagagatggccgccgcagggaagatcgtcgccgcgctttgcgcgtctccggcggtgttccttgcccctttgggcctgctggaagggaaaaagtatacctgctatccgggtatggaaaaacaggtgagcgggggtacatggcttgcggatcgggtcgttgtggacgcaaaccttgtcacgagccgcgcccccggaactgcggcggactttgcccgcgctctcgtggaacaccttgcgggaaaagacgcggcaaagaatcttgccgaaagcgcgctgnntatagcgtcctgtctgtaa

SEQ ID NO: 75390 - protein, 115 aa, Unknown
  Obtained from environmental sample
  DOMAIN (1)...(96): DJ-1/PfpI family
  misc_feature (1)..(115): Xaa is any amino acid
MPGASNLAACVPVGNFYKEMAAAGKIVAALCASPAVFLAPLGLLEGKKYTCYPGMEKQVSGGTWLADRVVVDANLVTSRAPGTAADFARALVEHLAGKDAAKNLAESALXIASCL

SEQ ID NO: 75391 - DNA, 780 bp, Unknown
  Obtained from environmental sample
  misc_feature (1)..(780): n is a, c, g, or t
ttggcccacaagccgctcaagtcaggcttgccgttgcgcaggcggggcacagcgtccgcgggttgtgcgctggagggcgcgggggccgctgctgaggcggccgcggcgctgcggggcgcgctctgcgcaggcagcgcgctgggcaggcaagcccagagtgccgccgctgtgacgatgcaaccggccgccgcggtcctcatcctgggagtatcctgggagtcactcctggcttcacgcatcgcccccttcacgacacacacgggcaggagcgcaccgtggtaccccgcagctctggccgcacagctttgccgcgcagttatgccgcacagtggtcaggatgctcccgagcccgccggaaggagtctagaagcgcggggcggctgcggcaacggcagcagagccgcaggacgcggcccgcagaggccatcatccgctacgcggtctgtggcctgttccggtgctcagggccctgccgcgggcaccccggtggcgccgcgcgccgcggcatcgctcatgccgtggacgttgcgccaggtcgagccgttaaagcgcgcgccctggagggatgcggaggtgagatcactgtcgatgagggtggtctcggtcagatcggcgccggcgaggtcggcgcctgtcaggtccgctccggacaggtcggcgcgcatcagctgcgagccgggaagccgcgtgccggtcagatgcgcgaagctcaggtcggcatgcgacaggtcggcagcggtgaggtcggcatctccagccgcgccgagcgctcggcgataa

SEQ ID NO: 75392 - protein, 259 aa, Unknown
  Obtained from environmental sample
  misc_feature (1)..(259): Xaa is any amino acid
MAHKPLKSGLPLRRRGTASAGCALEGAGAAAEAAAALRGALCAGSALGRQAQSAAAVTMQPAAAVLILGVSWESLLASRIAPFTTHTGRSAPWYPAALAAQLCRAVMPHSGQDAPEPAGRSLEARGGCGNGSRAAGRGPQRPSSATRSVACSGAQGPAAGTPVAPRAAASLMPWTLRQVEPLKRAPWRDAEVRSLSMRVVSVRSAPARSAPVRSAPDRSARISCEPGSRVPVRCAKLRSACDRSAAVRSASPAAPSARR

SEQ ID NO: 75393 - DNA, 615 bp, Unknown
  Obtained from environmental sample
  misc_feature (1)..(615): n is a, c, g, or t
ttgacagattggccgagagggacgtacggatacgcctacgcactgaactcatcgcccaacaacgtcgtctgccacggcatgccgtccgcagaggatgtgctgcgcaatggtgatatcgtcaatttcgacatcacgctggagaagaacggcttcatcgccgattccagcaagacctacctggtcggcgaggtggcagccccggcgcggcgactcgtgcgggtctgctatgaggcgatgtggagcggcatccaggcggtgcgtccgggggcgacgctcgggtgcgtgggacatgcgatcgagcggcacgcccgccgcagtggctactcggtcgtgcgggagtattgcgggcatggcatcggccgggagatgcacgagccgccgcaggtgctgcactggggccggccgcagaccggattgcgcctgcaggaaggcatggtgttcaccatcgaaccgatgctcaaccaaggcggcagctccgtgcgcaccgaggaagatgggtggacggtggtgacgcgggacgggaagttgtccgcgcagttcgagcacacggtggccgtgacccgcgacggtgtgcgtgtcctgacgctgcgtcccggggaacggccgctgcactga

SEQ ID NO: 75394 - protein, 204 aa, Unknown
  Obtained from environmental sample
  DOMAIN (6)...(196): metallopeptidase family M24
  misc_feature (1)..(204): Xaa is any amino acid
MTDWPRGTYGYAYALNSSPNNVVCHGMPSAEDVLRNGDIVNFDITLEKNGFIADSSKTYLVGEVAAPARRLVRVCYEAMWSGIQAVRPGATLGCVGHAIERHARRSGYSVVREYCGHGIGREMHEPPQVLHWGRPQTGLRLQEGMVFTIEPMLNQGGSSVRTEEDGWTVVTRDGKLSAQFEHTVAVTRDGVRVLTLRPGERPLH

SEQ ID NO: 75395 - DNA, 564 bp, Unknown
  Obtained from environmental sample
  misc_feature (1)..(564): n is a, c, g, or t
gtgcagcggccgttccccgggacgcagcgtcaggacacgcacaccgtcgcgggtcacggccaccgtgtgctcgaactgcgcggacaacttcccgtcccgcgtcaccaccgtccacccatcttcctcggtgcgcacggagctgccgccttggttgagcatcggttcgatggtgaacaccatgccttcctgcaggcgcaatccggtctgcggccggccccagtgcagcacctgcggcggctcgtgcatctcccggccgatgccatgcccgcaatactcccgcacgaccgagtagccactgcggcgggcgtgccgctcgatcgcatgtcccacgcacccgagcgtcgcccccggacgcaccgcctggatgccgctccacatcgcctcatagcagacccgcacgagtcgccgcgccggggctgccacctcgccgaccaggtaggtcttgctggaatcggcgatgaagccgttcttctccagcgtgatgtcgaaattgacgatatcaccattgcgcagcacatcctctgcggacggcatgccgtggcagacgacgttgttgggcgatga

SEQ ID NO: 75396 - protein, 187 aa, Unknown
  Obtained from environmental sample
  misc_feature (1)..(187): Xaa is any amino acid
MQRPFPGTQRQDTHTVAGHGHRVLELRGQLPVPRHHRPPIFLGAHGAAALVEHRFDGEHHAFLQAQSGLRPAPVQHLRRLVHLPADAMPAILPHDRVATAAGVPLDRMSHAPERRPRTHRLDAAPHRLIADPHESPRRGCHLADQVGLAGIGDEAVLLQRDVEIDDITIAQHILCGRHAVADDVVGR

SEQ ID NO: 75397 - DNA, 360 bp, Unknown
  Obtained from environmental sample
  misc_feature (1)..(360): n is a, c, g, or t
gtgagggagtattttcccctgtcgatgaacgaaatggtaaagcggggttttgaccgtccaaatgtaaatctcgacttgaaaatcgctgttgttgcgccgaatggagatttcgtttcgtactgcggaatgtggcaagacagcgaatcaaaaagcgcgttagttgaacctgtcgcaactgacccggcatatcgtaaaatggggcttggtaaagcggcggtattggaagcagtacgccgttgcggaatgcttggagcagaatgggcttttgtcgggtcatcacagcaattttattatagtatcggttttcgtccatacgccacttcaacgtggtgggaacaaaaacatcacaaaggggagtga

SEQ ID NO: 75398 - protein, 119 aa, Unknown
  Obtained from environmental sample
  DOMAIN (29)...(103): Acetyltransferase (GNAT) family
  misc_feature (1)..(119): Xaa is any amino acid
MREYFPLSMNEMVKRGFDRPNVNLDLKIAVVAPNGDFVSYCGMWQDSESKSALVEPVATDPAYRKMGLGKAAVLEAVRRCGMLGAEWAFVGSSQQFYYSIGFRPYATSTWWEQKHHKGE

SEQ ID NO: 75399 - DNA, 639 bp, Unknown
  Obtained from environmental sample
  misc_feature (1)..(639): n is a, c, g, or t
atgaaactggaagagacattatcgactgatgtgctggtcataggagccgggctggcaggtatctgcgcctccattgcagcggcaagactgggctgttcggtaattctcgttgagaaatcccttgttttggggggtaattccggccccaatggaggggtacacccttcaggagcccataggtttcatacctttgccgctgagacaggtatcattgaagagctgattgaaacagcggcctggcaggaagcaaaaaccatatccgcggatatgcattacaacagcagtatgctctgggatggtgtgctttaccgggcgcttcgtgaagcgggagtacaggtattacgatcccattatgccagagactgtgaaacatcagaaggcattattaaatcagtaacggtggaagatacgggaacataccatacccgaataatccatgtaggtgtcgcggtaattgaatcttccgccgatggcaatatcgctgctcgcgcgggggccgaatggcggcagggccgggaaagcaaaggcatgtacggtgaaagggtagcgcctgataaagaagatcgtattaccatgggaagcagcgttgttgctatggtgcgcagggctgatacaccttcctttacccctgggcgataa

SEQ ID NO: 75400 - protein, 212 aa, Unknown
  Obtained from environmental sample
  DOMAIN (10)...(212): FAD dependent oxidoreductase
  misc_feature (1)..(212): Xaa is any amino acid
MKLEETLSTDVLVIGAGLAGICASIAAARLGCSVILVEKSLVLGGNSGPNGGVHPSGAHRFHTFAAETGIIEELIETAAWQEAKTISADMHYNSSMLWDGVLYRALREAGVQVLRSHYARDCETSEGIIKSVTVEDTGTYHTRIIHVGVAVIESSADGNIAARAGAEWRQGRESKGMYGERVAPDKEDRITMGSSVVAMVRRADTPSFTPGR

SEQ ID NO: 75401 - DNA, 759 bp, Unknown
  Obtained from environmental sample
  misc_feature (1)..(759): n is a, c, g, or t
ttgctgcttaaatccggcgcaactattggagcaaaaaacaaatataatgtaacatctttgatgtttgccgcccagaaagcggattcggaaatctttgatcttttgataaccggtggagcagacataaaggaaatagacaaacaggataactccgtgtttgcctatgccgcaataggcggaaacgaagaacttattgatgtctgccttgatgccggactgccgcttaatcccgcaaagggcattagcccgttgggcgcgtcttttggttataatacacttccgcctgttctaaagccgggaacggtaatcaactttgtcaacctgattcaatttgtccaggaggacagaaaagagccggatataaaaatgatagaaaaactgattgacgccggcgctgacgtgaacggcggaaacccgacgccgcttttctgcgctgttatgactgctcctattgagtatgttgagtttctgatttataacggcgcggatccgtcaaaaaagtcaaaaatatttattagcgtaaccccgttgaaaatactggaaatgcttatcaaatcaggtgcagaacttaccgaaaaccagatgctaagttattcattgcttacaatgcttgagggtaaacttaaagggaaattccctcatcctcatatacctcaacgtaccggactgtttaaagccacgctggaaaattgggaaaacaccagaaatgtatcagtagaattaagcgacggggataataccgaagaaaacaaagactaa

SEQ ID NO: 75402 - protein, 252 aa, Unknown
  Obtained from environmental sample
  misc_feature (1)..(252): Xaa is any amino acid
MLLKSGATIGAKNKYNVTSLMFAAQKADSEIFDLLITGGADIKEIDKQDNSVFAYAAIGGNEELIDVCLDAGLPLNPAKGISPLGASFGYNTLPPVLKPGTVINFVNLIQFVQEDRKEPDIKMIEKLIDAGADVNGGNPTPLFCAVMTAPIEYVEFLIYNGADPSKKSKIFISVTPLKILEMLIKSGAELTENQMLSYSLLTMLEGKLKGKFPHPHIPQRTGLFKATLENWENTRNVSVELSDGDNTEENKD

SEQ ID NO: 75403 - DNA, 498 bp, Unknown
  Obtained from environmental sample
  misc_feature (1)..(498): n is a, c, g, or t
gtgatgatgggtacacgcagcggcgattttgatccttatgtggttctctatctgatgcagaaggaaaacctggatataaacggcatgaacaatctcttgaataaaaagtccggcatgttgggcctttcccagagttctagcgatatgcgcgatatcgaaggccagattggccaaggcaacgaactagctaaagtcgcttgggacgcttacgagtaccgcattcgcaagtacatcggttcctatgtggcagcgttaaatggcgtcgatgccctagtctttaccgccggagtaggcgaaaatgacgccacactacgagcggcgatctgcaagaatctgacctacttagggataaccattgatgaagagctaaacgctaaccgtaaaattaaggaaaaggaaataactaccactggctctaaggtaagggtctgggtcatccccactaacgaagagctggttatcgctcgtgatacttataaaatagtcaagcgcggatag

SEQ ID NO: 75404 - protein, 165 aa, Unknown
  Obtained from environmental sample
  DOMAIN (1)...(156): Acetokinase family
  misc_feature (1)..(165): Xaa is any amino acid
MMMGTRSGDFDPYVVLYLMQKENLDINGMNNLLNKKSGMLGLSQSSSDMRDIEGQIGQGNELAKVAWDAYEYRIRKYIGSYVAALNGVDALVFTAGVGENDATLRAAICKNLTYLGITIDEELNANRKIKEKEITTTGSKVRVWVIPTNEELVIARDTYKIVKRG

SEQ ID NO: 75405 - DNA, 624 bp, Unknown
  Obtained from environmental sample
  misc_feature (1)..(624): n is a, c, g, or t
gtgagaatcatgggtgaagaactacagcttttaacgaactcgcggcgttcgtgttttttgagttgcccgcgaaagcattacttcatgtacgaacttcggcgccgtccggtgtcggagtcgaaagcgttggtattcgggaagatgtttcaccgcgccttagagttgtggctgactggcgcggcggggagcgtcgcggggattatggatactgttgtcaacgcacgcgacgccggcggagataacgatccctacacgatcagacggctcaatgccttgatggacggctacgacgccgtctatggcgcgtcgcggcaagactacaaggttgtgagcgcggagcgagagtaccgcgcaccgctgatcaacccagtgacgatgaaggaatcgcgaacgtggttgttggccggaaaaatcgacgccattgtcgaaaatgcgtttggcgaccaaattatcgtcgaacacaagacgacatcggacagcgttgcgcccgaatcgggctactggccgcgcctcgcggtggacggccaaatatccggctatatggtcggggccgctactctcaacataaacgccgtgcactgcctatacgatgtgatccataaacctgcaataaaaccgcattag

SEQ ID NO: 75406 - protein, 207 aa, Unknown
  Obtained from environmental sample
  misc_feature (1)..(207): Xaa is any amino acid
MRIMGEELQLLTNSRRSCFLSCPRKHYFMYELRRRPVSESKALVFGKMFHRALELWLTGAAGSVAGIMDTVVNARDAGGDNDPYTIRRLNALMDGYDAVYGASRQDYKVVSAEREYRAPLINPVTMKESRTWLLAGKIDAIVENAFGDQIIVEHKTTSDSVAPESGYWPRLAVDGQISGYMVGAATLNINAVHCLYDVIHKPAIKPH

SEQ ID NO: 75407 - DNA, 366 bp, Unknown
  Obtained from environmental sample
  misc_feature (1)..(366): n is a, c, g, or t
atgggtgcaaagaactatcaagagctgattgtctggcagaaagcaatgcaggcagccaagcaggtctattcgctggcgaagaaactgccgagagaggaactgtactccctgtcagaacagatgcgaagggcggcagtgtccatcccctcaaacatagcggaggggcaggcgcgcaactcaacaaaggagttcctgcaattcctggcgatagccagagggtcgaaagcggagctggaaacacagctaatgctgtgcgtccaaattgggtaccttgccgacacggacatttcggaagcgatggacctgctgcangaagtgggcagaatgatacatgccatctcaaattcactagccactgcccactga

SEQ ID NO: 75408 - protein, 121 aa, Unknown
  Obtained from environmental sample
  DOMAIN (4)...(113): S23 ribosomal protein
  misc_feature (1)..(121): Xaa is any amino acid
MGAKNYQELIVWQKAMQAAKQVYSLAKKLPREELYSLSEQMRRAAVSIPSNIAEGQARNSTKEFLQFLAIARGSKAELETQLMLCVQIGYLADTDISEAMDLLXEVGRMIHAISNSLATAH

SEQ ID NO: 75409 - DNA, 489 bp, Unknown
  Obtained from environmental sample
  misc_feature (1)..(489): n is a, c, g, or t
gtggtgggcgggcccatagtgatcccagtcggcctgctgggcaaactgctgggcaggccaggcctgtacagcgcggacgcagcggccaaaagcgaaatagagcgcatggccatgaacgccgtcatggaaatagaaacagggcttgggtaccagccaaaagacgtgagcgcggaaaatagaggctacgacatagagtcggccgtgccgcccgaaaagcgcggcccaaatggaaactccctgcgcttcatagaagtaaaggggagagcccttggcgcccgcaccgtgacagtcaccaaaaacgaaatattgtgcgccctaaatgtgccagacgactatatcttggcgatagtggaagtcggcaacggcagtgccaagacgacgtacctaaaaaacctaaaagagtcttttggctccctcggctttgccaccgccagcgtgaactatggcgtcgcagacctagtgcgcggcgccgaagtggtttcgatatag

SEQ ID NO: 75410 - protein, 162 aa, Unknown
  Obtained from environmental sample
  misc_feature (1)..(162): Xaa is any amino acid
MVGGPIVIPVGLLGKLLGRPGLYSADAAAKSEIERMAMNAVMEIETGLGYQPKDVSAENRGYDIESAVPPEKRGPNGNSLRFIEVKGRALGARTVTVTKNEILCALNVPDDYILAIVEVGNGSAKTTYLKNLKESFGSLGFATASVNYGVADLVRGAEVVSI

SEQ ID NO: 75411 - DNA, 783 bp, Unknown
  Obtained from environmental sample
  misc_feature (1)..(783): n is a, c, g, or t
atgttcaagcgactgccggggccgcacatcatgcccatgcgaaaccctgccgagcagcacggcccacaacaactaaccgatcgaaaccacctcaccggcccgcagcagctgcatgccagccacccacccccagcgtccccccaaacagagaaccaccatgagcgacaaacgcccgcgccgcaattcatccaccagctccaaacccaaagagccagccccgttcttccgcccgttttccggcatctccctcggcacacccgccccaacccccgacaccaacaccccaccaaccagcaccgtcagcacgaccccaaacaatcccaccaaacccagctcaacatcgcagccaaaacctccccacaagccaaccacacccacgcgtccaaccaaaacgcccacccccgcaaaacacctccagccaacaacatccaacaacaccgacgacgacgccgacaccttcgaaagattcatgtcgggcgtcgagcccctcgaaacatcgcaggcgcgccgagtgtcagcaacgcaagccgacgtccaatccaacctagcctcccgagctcgccaattcgccctagaaagggaggcagcagaccgcgaagccctccacaaactccactcgctcgtgcacgacggctgccgcttcgaagtccaagacgacggcctcagcatcgaaggacgaagacgcggcgccgactgctcccttgtccgcaaaatccgagaaggcgaagtcaccatcaactccaccctcgacatcaccaccacacccgctcacaaagcccgtga

SEQ ID NO: 75412 - protein, 260 aa, Unknown
  Obtained from environmental sample
  misc_feature (1)..(260): Xaa is any amino acid
MFKRLPGPHIMPMRNPAEQHGPQQLTDRNHLTGPQQLHASHPPPASPQTENHHERQTPAPQFIHQLQTQRASPVLPPVFRHLPRHTRPNPRHQHPTNQHRQHDPKQSHQTQLNIAAKTSPQANHTHASNQNAHPRKTPPANNIQQHRRRRRHLRKIHVGRRAPRNIAGAPSVSNASRRPIQPSLPSSPIRPRKGGSRPRSPPQTPLARARRLPLRSPRRRPQHRRTKTRRRLLPCPQNPRRRSHHQLHPRHHHHTRSQSP

SEQ ID NO: 75413 - DNA, 537 bp, Unknown
  Obtained from environmental sample
  misc_feature (1)..(537): n is a, c, g, or t
gtgttgaatttatttaaaattcgatttataatgttatttatgaaaactgacaaatacataacgggcaaatacgctttaaacgtacaccatcctgaaaacaccaatgaacccacgggggattggcatggttatatctgggacggaattaagaaactgcctgacaataaaataacttatgccggaattggttttaaaatcaacactttccacatttggggagattttggcgtttatgaagactctgacaattttaaaaaaatgggaattataataaacgaaaataacgtatatatagctgattatttcagggcgattttagacttgatttattttaatcttcttaattttaataacttaataggcttgaattttattacttatgatcatttggataacgatattcaggttatgaaaattctaaacgaagccgagaaattaaaaaaacatattaatgacaatcaatccgttattttggaagaatggattaataatgagaaaaattatgaatttgacagaaaatccggtaaaaataattaa

SEQ ID NO: 75414 - protein, 178 aa, Unknown
  Obtained from environmental sample
  misc_feature (1)..(178): Xaa is any amino acid
MLNLFKIRFIMLFMKTDKYITGKYALNVHHPENTNEPTGDWHGYIWDGIKKLPDNKITYAGIGFKINTFHIWGDFGVYEDSDNFKKMGIIINENNVYIADYFRAILDLIYFNLLNFNNLIGLNFITYDHLDNDIQVMKILNEAEKLKKHINDNQSVILEEWINNEKNYEFDRKSGKNN

SEQ ID NO: 75415 - DNA, 327 bp, Unknown
  Obtained from environmental sample
  misc_feature (1)..(327): n is a, c, g, or t
atggaagaaacaacctgcgcagcgaaagcagcggacgcagctaaaactacggacgaagaaacccttcccttatacccttactcaattcgatgctgccgtttcagcgtgttggttgccggttcaggcgcggcagggctcaacgcggcggacaccctctttgacgagggagtccgggacatggcaattatcaccgagggcctaaaggccggaacctcccggaacacaggctcggacaagcaaacctactataaactcagtctgggaggcgacgcgggggacagcgtcagacatctggcggagaccctcttcaatgctcggccgatctga

SEQ ID NO: 75416 - protein, 108 aa, Unknown
  Obtained from environmental sample
  misc_feature (1)..(108): Xaa is any amino acid
MEETTCAAKAADAAKTTDEETLPLYPYSIRCCRFSVLVAGSGAAGLNAADTLFDEGVRDMAIITEGLKAGTSRNTGSDKQTYYKLSLGGDAGDSVRHLAETLFNARPI

SEQ ID NO: 75417 - DNA, 519 bp, Unknown
  Obtained from environmental sample
  misc_feature (1)..(519): n is a, c, g, or t
ttggtgaataacgcgggggtggcgccgaaagtccgggcggatcttctggaaatgaccgaagagagctgggattacgtgacggacaccaacacaaagtcctatatgtttctgacccagcttgcggtaaaggccatgttgaatcaggaagtcgtgggaaggaaacgggggacggtgatcaatatttcctcctgttccgccgaggtgtcctcggtgaaccgcggcgagtactgcgtttccaaggcggggatttccatgctcaccaaattgtacgcggatcgtctggcccgggaaggcatttttgtgcatgaaatacggcctggtgtcataaaaaccgacatgaccgccgcagtgacagaaaaatacgataccctcattagccagggcgtctttcccattgcccgctggggaacccccgaggatgtggccgaggcagtcgcggcgtttgcgggagacagttttctctataccacgggaaatgtggttgatgtggacggcggttttcatatccgccgtttgtag

SEQ ID NO: 75418 - protein, 172 aa, Unknown
  Obtained from environmental sample
  misc_feature (1)..(172): Xaa is any amino acid
MVNNAGVAPKVRADLLEMTEESWDYVTDTNTKSYMFLTQLAVKAMLNQEVVGRKRGTVINISSCSAEVSSVNRGEYCVSKAGISMLTKLYADRLAREGIFVHEIRPGVIKTDMTAAVTEKYDTLISQGVFPIARWGTPEDVAEAVAAFAGDSFLYTTGNVVDVDGGFHIRRL

SEQ ID NO: 75419 - DNA, 807 bp, Unknown
  Obtained from environmental sample
  misc_feature (1)..(807): n is a, c, g, or t
gtgttcaaagatgatggcacaacaccattgactagtggaacatctgtcctcgcagcaagcgacactactgttaatggcaagccaattactattaagtgcaatgatgcatctgtgaaaactggtaatctgacaatctctgccaagtccttgagcgatgccgcaattagtatgaccgtcgccgagcaaacctataccggttcagccctgacacctgcggatcctgttgtaatggacggtactattccactcataaaggacactcattatacggtggagagaagcgatggtgacaaaatcaacgcgggaacctacacgggcgcggtaaccattagagccatagaaggcaccaactacacaggctttcaatccaagaatttcgtaataacccgcaagaacatttcctccgcgacaattactgtttctaatattcctgcgagaacctacacgggcaccggcttgacgcctggtgttaccgtaaaagacggtgatactgatctcacagaggacaccgatttcacggtggcgtatactaacaacaccgacgtagttctccaagcagatctcgctactgagcctaaaccacccacggcaactattaccggcataggcaactacaccggatccaaggacgagaaattcagcattgcgaagggagtgatttctgccgagaaggtgggtgactactttactgttatcggcgcctacaaagatggtattggcgacgtacatacttacgacggcacagttaaaaaggttacggtcgccctcaagtcttcttcaataaaagggatggaaccgttaccataa

SEQ ID NO: 75420 - protein, 268 aa, Unknown
  Obtained from environmental sample
  misc_feature (1)..(268): Xaa is any amino acid
MFKDDGTTPLTSGTSVLAASDTTVNGKPITIKCNDASVKTGNLTISAKSLSDAAISMTVAEQTYTGSALTPADPVVMDGTIPLIKDTHYTVERSDGDKINAGTYTGAVTIRAIEGTNYTGFQSKNFVITRKNISSATITVSNIPARTYTGTGLTPGVTVKDGDTDLTEDTDFTVAYTNNTDVVLQADLATEPKPPTATITGIGNYTGSKDEKFSIAKGVISAEKVGDYFTVIGAYKDGIGDVHTYDGTVKKVTVALKSSSIKGMEPLP

SEQ ID NO: 75421 - DNA, 333 bp, Unknown
  Obtained from environmental sample
  misc_feature (1)..(333): n is a, c, g, or t
ttgatcgcgaggaaccttacggacgaggacgtggcccttagccgctggaacatactggagcacctggacggcgaagaggaaattagggcctacctagagggggtcgccgatgacatcgaggctggtctgtgcgagcctgcgtttttcgccgtggccctgaccgacgccgccaaggctaggctcatcaaccaacttgtgcgggacgccggcatagaccgccaggccctgtgcgacatgttcctagaggcctcggacaactccgaggcgcccgaaataagccgcgacgtggttgtgaaagtggccaaggcattcgctgtgcccgtgcccgtgtag

SEQ ID NO: 75422 - protein, 110 aa, Unknown
  Obtained from environmental sample
  misc_feature (1)..(110): Xaa is any amino acid
MIARNLTDEDVALSRWNILEHLDGEEEIRAYLEGVADDIEAGLCEPAFFAVALTDAAKARLINQLVRDAGIDRQALCDMFLEASDNSEAPEISRDVVVKVAKAFAVPVPV

SEQ ID NO: 75423 - DNA, 528 bp, Unknown
  Obtained from environmental sample
  misc_feature (1)..(528): n is a, c, g, or t
gtggcggaacatttttcgcttcaactgacgccggttgacctgcgcgccgctttcacccatatggcgagcgccttgctggctgctgacggacggcccattcccaagacaggctatgatcgcgagagtatggcccaaaccttggttccgggccgtaatcttatttttgcgtctattctggcggcgattgccgagagccggcaagccgacgccgtggcgctggcgacccatgcgggagatcactctctgtacccggattgccgtccttcgttcaatgccgctcttgccgacgccatcttggaaagcagcgccggaaaagtccgtctgctgacgccgttcagcggcatggacaaggccgccattgtggctcagggcgtgcgtctgggtgttccctttgccctgacccggagctgctatgaggatcggcgcctgagttgcggtgagtgcggcgcctgccgagaacgtctggctgcctttgcggcgaacggatttgcggatcctcttgcctatgccgccgctgtcgacagctga

SEQ ID NO: 75424 - protein, 175 aa, Unknown
  Obtained from environmental sample
  DOMAIN (1)...(128): ExsB
  misc_feature (1)..(175): Xaa is any amino acid
MAEHFSLQLTPVDLRAAFTHMASALLAADGRPIPKTGYDRESMAQTLVPGRNLIFASILAAIAESRQADAVALATHAGDHSLYPDCRPSFNAALADAILESSAGKVRLLTPFSGMDKAAIVAQGVRLGVPFALTRSCYEDRRLSCGECGACRERLAAFAANGFADPLAYAAAVDS

SEQ ID NO: 75425 - DNA, 879 bp, Unknown
  Obtained from environmental sample
  misc_feature (1)..(879): n is a, c, g, or t
atggcggcggtcgatcaggcgatctacgcgatgcagccgcgcatggtgatcgatatcgagcgtttcttttatcacatacgccgcaataccgttatcggcgggacttcgtattccacgcgattctatggctatgccgaggaagataaactcgcgctcgcgcagcacctgcggcaggacgcggctctggcggatctctcaaagggaagccagcggaattttgacgaatcgcggcgcggcgattttcgggatctcgcgtattggaacgccggcattatgacggacgcaagcggcaaggccagcttcgactttaccctgcccgataacatcacgacctggaagctggatttggttgcgctggacgataccgatcgcgtgggcagcaaggagggcgcgtttatcgcgcgcaaggatctcttcctgcgtgccgtcgtgcccaccattctttatgaaaaagatcaggccatcgtatcggctacggtgcatagcctcatcggtacgcaggtaacggcgaaggcgagcctgagtataaaaaatggaaaattgctctccgccgccgagcagccggttttgctttcgccgctcggggaacggcttgtctcctggcggatcgaggccgggcaggtgagcggcgcgaaagaaaaattagagttggaatttaaagtagtcggtccggtcaatgactccgagctgcagatcgtcgatgtcaagccctttgcgcacaagcagttccagaatttcgcggggccgcttgccggaaacggccgctgggtatcccgcgagttcacgcttccggacggagcgaatcttgaggatttgggaggtctccgcggcggtctgacggtgcaggtctcgccgagcctcatcactcggccaatctga

SEQ ID NO: 75426 - protein, 292 aa, Unknown
  Obtained from environmental sample
  DOMAIN (86)...(180): Alpha-2-macroglobulin family
  misc_feature (1)..(292): Xaa is any amino acid
MAAVDQAIYAMQPRMVIDIERFFYHIRRNTVIGGTSYSTRFYGYAEEDKLALAQHLRQDAALADLSKGSQRNFDESRRGDFRDLAYWNAGIMTDASGKASFDFTLPDNITTWKLDLVALDDTDRVGSKEGAFIARKDLFLRAVVPTILYEKDQAIVSATVHSLIGTQVTAKASLSIKNGKLLSAAEQPVLLSPLGERLVSWRIEAGQVSGAKEKLELEFKVVGPVNDSELQIVDVKPFAHKQFQNFAGPLAGNGRWVSREFTLPDGANLEDLGGLRGGLTVQVSPSLITRPI

SEQ ID NO: 75427 - DNA, 792 bp, Unknown
  Obtained from environmental sample
  misc_feature (1)..(792): n is a, c, g, or t
atggataatatattaaatataaatattcaaaagaatttatcaaataaattaagggaatatactataaataaagatgaaatagggctatcacctgcaaaagtatataaaataacaggttcaaatgaaacattatatttaaaatattctcaaaaaatatttagtcccacggctttttgtgtcgacagggaaacagctataataaattggttaaatggtaaaataaatgtaccaaaaattgtattttttgaaaaatatgaaggaaatgattttatgttaatgactgaattaaaaggtatgatgctagaaaaatgcggtttatcaccttcttcttatataaattatatggtaagggcattaaaggaattacaatccattgacattaaggattgtccttttgaatcaaatgtaacatttagattaaatgaattaagatatttaattgataataatctagcagatactaatgtaaataattgggaaaagtcaacggaatttagttcatctgaagaactgtataaatggctttgtagtaataaaccaaaagaagaatttatattctcacatggagatttatgcggatcaaatatttttctagaggataatgaaattggatttattgatttaggaagagctggaatggctgataaatggtatgatatagcattttgtgttagagaaattacagattgggaaaataaagaaaagtatattaatgagttttttacattattggaaatagaacctgactgggacaaaataaactattatatattacttgatgaattattttaa

SEQ ID NO: 75428 - protein, 263 aa, Unknown
  Obtained from environmental sample
  DOMAIN (21)...(256): Phosphotransferase enzyme family
  misc_feature (1)..(263): Xaa is any amino acid
MDNILNINIQKNLSNKLREYTINKDEIGLSPAKVYKITGSNETLYLKYSQKIFSPTAFCVDRETAIINWLNGKINVPKIVFFEKYEGNDFMLMTELKGMMLEKCGLSPSSYINYMVRALKELQSIDIKDCPFESNVTFRLNELRYLIDNNLADTNVNNWEKSTEFSSSEELYKWLCSNKPKEEFIFSHGDLCGSNIFLEDNEIGFIDLGRAGMADKWYDIAFCVREITDWENKEKYINEFFTLLEIEPDWDKINYYILLDELF

SEQ ID NO: 75429 - DNA, 885 bp, Unknown
  Obtained from environmental sample
  misc_feature (1)..(885): n is a, c, g, or t
atgactcccaaacgcgagtcatatcagttcctttcatacaaccgcggtaaaaaaagcataactctgaatctgaaagatccgaaaggcatggagcttgcaaaaaaactgacagctaaggttgacattctggtggaaaatttcgcgcccggcgtgcttgaccgtttgggactgagttatgaagaagcgaaaaagatcaatcccggcataatctacgcatccatttccggtttcggccataccggtccgcgcaaaaacgacgtctgttacgacgtggtggcgcaggcgacgggcggactgatgagcgtaaccggctaccccggcggcgaaccgctcaaagcagggtgctctcttggcgactacatgggcggatacaacggcgtcatcgccattcttgccgcgcttcattacaaaaaagtcacgggcgaaggtcagtcaattgatatttccatgcaggacggcatctgggcgatggtttttcccgaccgcgccaattattttgacacgggagttacgcccggaagattcggcaacaaactcagcagttccgctccattcggtgcgtacaacgccaaagacggttatgtggtaatatgtacgattacggatgaccagtggcataaggtacttcaggcgatggggcgtgatgacctgatttcggaagaaaaattctccacacgcgagaagcgcacaaaaaacatggaagatgttgacgcgctggtaaacggctggctgaaggatatggccgctgaagacgccatttcagcgctaaggaaatacaaggttccctgttcgcctctgccgacattcgacgaagtcgccaacgatccgcatcttctgagccgcgaaatgattgtgaagtcgatcagccggtttcaggtagagtga

SEQ ID NO: 75430 - protein, 294 aa, Unknown
  Obtained from environmental sample
  DOMAIN (20)...(209): CoA-transferase family III
  misc_feature (1)..(294): Xaa is any amino acid
MTPKRESYQFLSYNRGKKSITLNLKDPKGMELAKKLTAKVDILVENFAPGVLDRLGLSYEEAKKINPGIIYASISGFGHTGPRKNDVCYDVVAQATGGLMSVTGYPGGEPLKAGCSLGDYMGGYNGVIAILAALHYKKVTGEGQSIDISMQDGIWAMVFPDRANYFDTGVTPGRFGNKLSSSAPFGAYNAKDGYVVICTITDDQWHKVLQAMGRDDLISEEKFSTREKRTKNMEDVDALVNGWLKDMAAEDAISALRKYKVPCSPLPTFDEVANDPHLLSREMIVKSISRFQVE

SEQ ID NO: 75431 - DNA, 723 bp, Unknown
  Obtained from environmental sample
  misc_feature (1)..(723): n is a, c, g, or t
ttgaggattggttttatgttgcaaccggaagtgcttcttggactggaccttggcgccaccaaggtggtggccgttgtggccgtccaggaagagccaaacgcgctcaacgtgacaggcgccagcatggccaaccccaagggcggcatcaagcagggagaaattgtcgacatcaactcgaccatggccgcaatcgcaaaggccgtggaagaggccatgcgaatggcggggcaggcgaatctggatggcatcatggtttcggttgatgggatccagttcaagggcgagaacctccgggacactgtcaccatctcgaaccctgaccgggtgataaccatccatgacaggaacagggtcatggaccaggccacgaactcctgcaaactggcaaaagaagaggtcgtgctgcacaagagcgctcagacgttccacatcaaggggcagagggacattaagaacccggtgaacatggtcggggacacgctggaggccgaggtcaggataattgtggcccctggccccgtgctggagaacatcaacagggcgctgcacttgtcgagactgcagggggcaaagctgtgttattcccccttggccagtgccaaggcagtcctttcgcgcgaggacgccgacaacggcgccgttgtggtggacatcggcgaccaactgacccacatcggcgtcttcatgcgcggggcactgttccacagcgcggaatcccgatag

SEQ ID NO: 75432 - protein, 240 aa, Unknown
  Obtained from environmental sample
  DOMAIN (12)...(203): Cell division protein FtsA
  misc_feature (1)..(240): Xaa is any amino acid
MRIGFMLQPEVLLGLDLGATKVVAVVAVQEEPNALNVTGASMANPKGGIKQGEIVDINSTMAAIAKAVEEAMRMAGQANLDGIMVSVDGIQFKGENLRDTVTISNPDRVITIHDRNRVMDQATNSCKLAKEEVVLHKSAQTFHIKGQRDIKNPVNMVGDTLEAEVRIIVAPGPVLENINRALHLSRLQGAKLCYSPLASAKAVLSREDADNGAVVVDIGDQLTHIGVFMRGALFHSAESR

SEQ ID NO: 75433 - DNA, 783 bp, Unknown
  Obtained from environmental sample
  misc_feature (1)..(783): n is a, c, g, or t
gtgctctcattcggtctccctggctgcaacatgtcctgctccttctgtcagaactggagcctaagcacgtgcagcgaccaccacctgttccccgcgctggacgcttccgactgcgtcgccctttcgcgcaagctgggctgcacggcgatagcctttacctacagcgagccttccatcgcggccgagtactgcatacacattgccgacgcggcgcacctggcgggtctaaagaccattgccgtttcaaacggctacatagccggggaggccaggggcgacttctttgcctgcatggacgcggcgaacatagacctgaagtccattgagccagacttttacgaaaagcactgcggggcgcgtcttgagccagtccttgagacgctcacgcacatagcgcgggaaaaacgcacttggcttgaggttaccaacctgttaatacctacgctgaacgattccgacaggtgcatcggcggtctggtggcctgggtggcagaaaatctaggtcccgatgtgcccctacacttttcggcattccatccagcccacaggatgctgggcattccagtgacgccggttgccacgctcgtccgcgcaagggagatggcgcttgcggcgggacttcgccacgcctacattggcaacacgccacaggtgcagacgacactttgttccaactgcggaaccgcgctgatctctcgtatgggcttcggcaaagtggaatgccacgtggaaaggggatcatgccccaactgcggtgctggcgtggcaggtgtgttctcgtag

SEQ ID NO: 75434 - protein, 260 aa, Unknown
  Obtained from environmental sample
  DOMAIN (3)...(163): Radical SAM superfamily
  misc_feature (1)..(260): Xaa is any amino acid
MLSFGLPGCNMSCSFCQNWSLSTCSDHHLFPALDASDCVALSRKLGCTAIAFTYSEPSIAAEYCIHIADAAHLAGLKTIAVSNGYIAGEARGDFFACMDAANIDLKSIEPDFYEKHCGARLEPVLETLTHIAREKRTWLEVTNLLIPTLNDSDRCIGGLVAWVAENLGPDVPLHFSAFHPAHRMLGIPVTPVATLVRAREMALAAGLRHAYIGNTPQVQTTLCSNCGTALISRMGFGKVECHVERGSCPNCGAGVAGVFS

SEQ ID NO: 75435 - DNA, 900 bp, Unknown
  Obtained from environmental sample
  misc_feature (1)..(900): n is a, c, g, or t
gtggtgacggcctctttaaagcgcttttgcgcctccatagcggtgttggccgtcgtcctgacgctcaactttttcttatttcgcattatgccaggtgacccgctcaccagcatcgtggatccacgtttttcccccgaggccaaacagcagctggccgcgcagtggggcctggataggcccatgtccgagcagtttgccgtttacgtccgtgagatgctctcgtttcgttttggcctgtcgatgatgactggacggcccgtgtgggacgagttaaaaagccgcgttcccaacacagtggcgctgttgctgccggcgctgatcctgtcggcggctttgggcatctggcttggagtaaaggcggcgttgaggcgcggttcgggcgccgagcggctggtgcttctaagcggtgcagtctcgttctcgtttccatcgttcttcgtgcagcttctgctgcttttgtgctttgcctacgtctggccgatctttcccctgcgcggcacggcctccatccctccgccggagggccttctggcctcctttttcgactacatgcggcacctggcccttccactcctgtcactggtgatcttgagcttcgggggatgggcgctgtacatccgcaatctaatggtaaagacgctgggcgaggattacgttctgatggcgcgggcacggggcttgccacgccaccgtgtggtgtggaatcacgcatttcgctccattctgccgccggtgctgacgattttcctgctgtctctgcccggagtggtgagtggcgcggtgatcacggagaccgttttttccatgcacggggcagggcgttttctcctcgaggccacgaattcccacgattacccggccgctggcgcggcgtttttctgctgccctctccggcgataa

SEQ ID NO: 75436 - protein, 299 aa, Unknown
  Obtained from environmental sample
  DOMAIN (95)...(299): Binding-protein-dependent transport system inner membrane component
  misc_feature (1)..(299): Xaa is any amino acid
MVTASLKRFCASIAVLAVVLTLNFFLFRIMPGDPLTSIVDPRFSPEAKQQLAAQWGLDRPMSEQFAVYVREMLSFRFGLSMMTGRPVWDELKSRVPNTVALLLPALILSAALGIWLGVKAALRRGSGAERLVLLSGAVSFSFPSFFVQLLLLLCFAYVWPIFPLRGTASIPPPEGLLASFFDYMRHLALPLLSLVILSFGGWALYIRNLMVKTLGEDYVLMARARGLPRHRVVWNHAFRSILPPVLTIFLLSLPGVVSGAVITETVFSMHGAGRFLLEATNSHDYPAAGAAFFCCPLRR

SEQ ID NO: 75437 - DNA, 870 bp, Unknown
  Obtained from environmental sample
  misc_feature (1)..(870): n is a, c, g, or t
gtggtatatgacatagtcctgccgcccgaattgccgggatttaatttcacagtacaaggcgaagagataacaattaccagatatttcggcaatgataccgatgttgttattcccggaacagttacgtcatccgacggaagtgtgacgtttcgggttattgctataggtgattttgcctttacaggcggcgggttttttatagacataagtatgccaaagtatctaaaaaataataaaagagcatttaaaaattgcaatttactgaaaagtgttattatatcaaaaactgtcaggagtatcggtaagtctgcattctttgggtgcaaatcattggaaaaagtcattattcccgacagtatcagtaatattgatatggatacttttggtttatgtaagtcattgaaaaacattaccatacctgacagcgttataaacattggatcaaatgcttttatggcctgtaaatccctgacaaacgtcacaatcccaaaaaacgttgaaacaatcggttatggcgcgttttccggttgtgaatctctgaggtgtgtaaccataataaacaacgatacagaagttgaagaccgtgcgttccaaatatgcaaatcactaaaaacagtgatatttccggataaaattaaaaagattgggaatcgcgcctttatatattgccctcaattggacgcgatttataatgccgataagacaatcctttgcagaggaccggcaaattggaattctccggaatcttattttattccggaaggagttacaacaattagtagcggcgctttttcaggtccgtctttattcaagaaaattgtatcgcgtatgttaattatcgcccgccaaaaaattactcggccgatctga

SEQ ID NO: 75438 - protein, 289 aa, Unknown
  Obtained from environmental sample
  misc_feature (1)..(289): Xaa is any amino acid
MVYDIVLPPELPGFNFTVQGEEITITRYFGNDTDVVIPGTVTSSDGSVTFRVIAIGDFAFTGGGFFIDISMPKYLKNNKRAFKNCNLLKSVIISKTVRSIGKSAFFGCKSLEKVIIPDSISNIDMDTFGLCKSLKNITIPDSVINIGSNAFMACKSLTNVTIPKNVETIGYGAFSGCESLRCVTIINNDTEVEDRAFQICKSLKTVIFPDKIKKIGNRAFIYCPQLDAIYNADKTILCRGPANWNSPESYFIPEGVTTISSGAFSGPSLFKKIVSRMLIIARQKITRPI

SEQ ID NO: 75439 - DNA, 438 bp, Unknown
  Obtained from environmental sample
  misc_feature (1)..(438): n is a, c, g, or t
ttgccgccacaaaaaatatccgagattatcgccgaatattcgcaaaatttccctgagatttatgacgtctttttagaaaattacggcaaattgttttcctgcataaaagacggatttaattctgacgtattggtttttgggaaaataaaggtaaattttaatttgtatttcggcgacgtaaacgattttttgaacgaattggacgtaaaattcgattgctggtatcttgacggacattcgcctgacaaaaatcctgaaatgtggagcgaaaccgttatgaaaaaagtttatgaaaaaagcaaaatcgcggcgacggcggcgacttataccgcctgcggttttgtgaaacgaaatctgcggacggcaggttttacggtaaaaaggatgaaaggtttcggcgtaaaacgtcataaattatttatagaaaaaacatgttaa

SEQ ID NO: 75440 - protein, 145 aa, Unknown
  Obtained from environmental sample
  DOMAIN (2)...(144): Protein of unknown function (DUF752)
  misc_feature (1)..(145): Xaa is any amino acid
MPPQKISEIIAEYSQNFPEIYDVFLENYGKLFSCIKDGFNSDVLVFGKIKVNFNLYFGDVNDFLNELDVKFDCWYLDGHSPDKNPEMWSETVMKKVYEKSKIAATAATYTACGFVKRNLRTAGFTVKRMKGFGVKRHKLFIEKTC

SEQ ID NO: 75441 - DNA, 369 bp, Unknown
  Obtained from environmental sample
  misc_feature (1)..(369): n is a, c, g, or t
ttggcggacgcttatctgcgtagcggtcaactgcatccgtatttggcgtcgctgcgtccgtactacaaaagaaggtcgcaaataatgctggaagcgcttgagaaatatatgccgaaagacgcgggaatttcatggacgtccccgcacggcggatttttcgtatggcttactcttccgcatggtacggattcaagcgaggtgtttaaggtcgcggtaaaaaacggcgcggcgttcgtcgtgggcaaagcgttcgacccgaaaggaataaaaaataacgggatgcgtttggcgttttcgggagcggcggagaataaaatcgaaacgggaataaaaataatcgccgaagccgtaaaagcgacgcttaaataa

SEQ ID NO: 75442 - protein, 122 aa, Unknown
  Obtained from environmental sample
  misc_feature (1)..(122): Xaa is any amino acid
MADAYLRSGQLHPYLASLRPYYKRRSQIMLEALEKYMPKDAGISWTSPHGGFFVWLTLPHGTDSSEVFKVAVKNGAAFVVGKAFDPKGIKNNGMRLAFSGAAENKIETGIKIIAEAVKATLK

SEQ ID NO: 75443 - DNA, 414 bp, Unknown
  Obtained from environmental sample
  misc_feature (1)..(414): n is a, c, g, or t
atgggcaacgacatgccccagggcatggcccaggccatgggccagatgggcaacggaacggcagccggcgcgggtgtgcccaagctgcaaaaggcccagggcgccgacgggcggaccgtcgccgaaatattggccaatggcccatccctcaacggcaagaccgtgtccgtcaggggtcaggtggtcagggccacccaagggctgaaggtgcccaacgtggccggcggcgtctgggcccacatccaggacgggacgggcgaccccgcgcgggacacgcacgacctgaccgtggccacggacgaagaagtgaaagtcggtgatgtccttgtgtttcagggcaaggtgacaacggacgccgccggatttctaagcggtcgcgtgatagtccaaggcgccaaaaagataaaacaatag

SEQ ID NO: 75444 - protein, 137 aa, Unknown
  Obtained from environmental sample
  misc_feature (1)..(137): Xaa is any amino acid
MGNDMPQGMAQAMGQMGNGTAAGAGVPKLQKAQGADGRTVAEILANGPSLNGKTVSVRGQVVRATQGLKVPNVAGGVWAHIQDGTGDPARDTHDLTVATDEEVKVGDVLVFQGKVTTDAAGFLSGRVIVQGAKKIKQ

SEQ ID NO: 75445 - DNA, 657 bp, Unknown
  Obtained from environmental sample
  misc_feature (1)..(657): n is a, c, g, or t
atgaatatttttgtcagcgaaattttccgctcgctccagggcgaggccgccggaacgctctggccgacaatcttcgtgcgcctcgcgggctgcaatctgcgctgcctctactgcgatacttcctacgcatggggcgatggcgaggaaatagaaatcgaagaggcaatgcggcgcgttcgcgcgctcggggacgcgaagcataaccgtgttctgatcaccggcggagagccgctccggcagcgggaggcggcgctggcgctggcctcgctcctgatccatgacggctattgcgcgagcatggaaaccaacggaagctatcccgtggatgatcttcccgagaagctgatcgctgtcattgatgtcaaaacgccgggaagcggcatgagcggcgtcatgaatcacgaaaatttccgcatggcgcgccgccatcacgacatcttcaaatttgtgatcgccgagcccgccgatatcgcctggtcattggactgcatcgcgcgcagccgcctcgacgagagatacgatgtgctgctctcgccggtaaccggcaaagtcggcgccgcagaactcacggaagccatcctcgcgagcgggaagagaatccggctgaacctgcagctccacaggcttatctggccggaggcggcgcgcggccggtaa

SEQ ID NO: 75446 - protein, 218 aa, Unknown
  Obtained from environmental sample
  DOMAIN (25)...(196): Radical SAM superfamily
  misc_feature (1)..(218): Xaa is any amino acid
MNIFVSEIFRSLQGEAAGTLWPTIFVRLAGCNLRCLYCDTSYAWGDGEEIEIEEAMRRVRALGDAKHNRVLITGGEPLRQREAALALASLLIHDGYCASMETNGSYPVDDLPEKLIAVIDVKTPGSGMSGVMNHENFRMARRHHDIFKFVIAEPADIAWSLDCIARSRLDERYDVLLSPVTGKVGAAELTEAILASGKRIRLNLQLHRLIWPEAARGR

SEQ ID NO: 75447 - DNA, 642 bp, Unknown
  Obtained from environmental sample
  misc_feature (1)..(642): n is a, c, g, or t
gtggagcgtttttgcgcccgctacggctttgccctgatcgtccggaacatggcggaggaaggcttgcccctgcccgaggtgaaagcatgcctgcgccgtcccatttgctcggcatgcggcaagatcaagcgtcactatttcaaccgcgtggccatggagcaaggcttcgccgtgctggccaccggccacaatctggatgacgaaacggcccggctgttcagcaacaccctgcgctgggacacggcctacctgtccgaccagggaccgcgcctggacagcgaaaccggctttgtgcgaaaaatcaagccgttttggcgcctgaccgagtttgaaatcgccaactacgcgtttctgcgcggcattgagaaccactacgcgccgtgcccctacagcgcgggcgcgacgttttccctgtacaagaacgtgtggcgcgacattgaagccgccatgcccggccgcaagctggatttctatcagggctttctggagcgcgggaaaaaggcctttgccgcggccgaagcggcgcggggggaaaagctgcgcgcctgcgccgagtgcggttcgccttcttcacaaaaagtttgcggagtctgccgcattcgcgcggccgtggcggaacggggccgggcatcgcccaactga

SEQ ID NO: 75448 - protein, 213 aa, Unknown
  Obtained from environmental sample
  misc_feature (1)..(213): Xaa is any amino acid
MERFCARYGFALIVRNMAEEGLPLPEVKACLRRPICSACGKIKRHYFNRVAMEQGFAVLATGHNLDDETARLFSNTLRWDTAYLSDQGPRLDSETGFVRKIKPFWRLTEFEIANYAFLRGIENHYAPCPYSAGATFSLYKNVWRDIEAAMPGRKLDFYQGFLERGKKAFAAAEAARGEKLRACAECGSPSSQKVCGVCRIRAAVAERGRASPN

SEQ ID NO: 75449 - DNA, 570 bp, Unknown
  Obtained from environmental sample
  misc_feature (1)..(570): n is a, c, g, or t
atgtataagataatttgcagccaacaggatagaagcgaatattattatacactcgacaaatttagagaagactttaagataccggaaaaatatactaatgccggaattgaacgaatgatacttaaacctgcacaggaacgtataagggaaagcgggtctcatgtgtggtttgaatatgaattgacagcgaggcatccaatcaaagggcggaagccaaaagcagatacaataatactgcggataaaaacggaacatccaaaagtagccggtggcgaacaatatcaggaatattactatgtttatacgtggataagcagcgcaatgggtaaaccaacaaacgactcggcactgcaggcagtagagaaaatagttgcatcgggacgtttgaaagaaatatttgaacggtgctgctattatgatgatagggtttcatcgggacaacaaacatcaatacacgcaaagaacgcaattttgaaaatgctgcgagaagactttaatattgataccaaaaagaacgtaacagcaaccaaagggacaaagacgacaaagactaaatcaattaggaattag

SEQ ID NO: 75450 - protein, 189 aa, Unknown
  Obtained from environmental sample
  misc_feature (1)..(189): Xaa is any amino acid
MYKIICSQQDRSEYYYTLDKFREDFKIPEKYTNAGIERMILKPAQERIRESGSHVWFEYELTARHPIKGRKPKADTIILRIKTEHPKVAGGEQYQEYYYVYTWISSAMGKPTNDSALQAVEKIVASGRLKEIFERCCYYDDRVSSGQQTSIHAKNAILKMLREDFNIDTKKNVTATKGTKTTKTKSIRN

SEQ ID NO: 75451 - DNA, 696 bp, Unknown
  Obtained from environmental sample
  misc_feature (1)..(696): n is a, c, g, or t
ttggataactcgaaagaacaaatcacaatagattattttattgagaatctaagaattccacttgcaattgactactcaaaatataatttggaagaaacaaatattagcagaaagatagaattagaatggcaagaatattttggtaactcctcgcaaattgaccaagaaaaattcaacacttcaatcaatagtttagatgctgtaacttccataattaaaggacagcaaatagggaaatctacggttgaattaggcgatgaaggcgaaaattttgtgttggaatttgaaaaaaatcttgttaaatcgttcaatccacgtttggttaataaggttaattatcttggcagaacaaaaggtttgggttatgacattctttctatcgaagcaagccgaaatctgtcaagccctgaatttcacagatacattgaagttaaggcaacaactcgcgttaatccaccaaatttttctgacactttagattcgataaaccttactagaaatgaatgggttgctgctgaacaacacgcttctcatttttatatttatcgaatttattttaccaatttcggaacttttatcagtatcataaatgaccccgtcaaaaaaaatattgacggtatcttatatgctaccccaacaatttacagagtagaattttcagacaaagcagttgatgaacaattaaaatttgcataa

SEQ ID NO: 75452 - protein, 231 aa, Unknown
  Obtained from environmental sample
  misc_feature (1)..(231): Xaa is any amino acid
MDNSKEQITIDYFIENLRIPLAIDYSKYNLEETNISRKIELEWQEYFGNSSQIDQEKFNTSINSLDAVTSIIKGQQIGKSTVELGDEGENFVLEFEKNLVKSFNPRLVNKVNYLGRTKGLGYDILSIEASRNLSSPEFHRYIEVKATTRVNPPNFSDTLDSINLTRNEWVAAEQHASHFYIYRIYFTNFGTFISIINDPVKKNIDGILYATPTIYRVEFSDKAVDEQLKFA

SEQ ID NO: 75453 - DNA, 390 bp, Unknown
  Obtained from environmental sample
  misc_feature (1)..(390): n is a, c, g, or t
gtggagtttttctgcctcaagactgccgtgaagaggctcacagaggagtcccaaaggatgtcagcgcaggggccagaagacccgcgtgtaaggcaactgtgcctagcaatcaaccagacaatagcctcgtggctgcttaaaccgcttcctgacttggttttggcgcatggcgcggcgagcctgattgtgtcgggcggcgttgcgtgcaattctgaacttaggtctggagccgccgcgctggcggagaggctgggcatacaggcggccatccccgacccccgcctctgcacggacaacggggccatggtagccgccaccggcgcactgctgccccaaggcggatcaccatggcgcgaaaacgcagacgcggatctggcaatcagtcagtag

SEQ ID NO: 75454 - protein, 129 aa, Unknown
  Obtained from environmental sample
  misc_feature (1)..(129): Xaa is any amino acid
MEFFCLKTAVKRLTEESQRMSAQGPEDPRVRQLCLAINQTIASWLLKPLPDLVLAHGAASLIVSGGVACNSELRSGAAALAERLGIQAAIPDPRLCTDNGAMVAATGALLPQGGSPWRENADADLAISQ

SEQ ID NO: 75455 - DNA, 357 bp, Unknown
  Obtained from environmental sample
  misc_feature (1)..(357): n is a, c, g, or t
atgaagagttttatgacgcagatacccatacagttaattgaggcggcaaagatagacgggaaaagcgaattgggaatcttttttacgattattatgcccctggccaaaccggcatggattaccctgatcatactctcttttaattctttgtggggcaatacgggaggctcttttatatattccgaagcccttaaaccggtcagcttcatgctggcccagatcatatccggaggcgtggcgcggaccggcgtcgccagcgcggtaaatcttatcatgcttgtagtccccataacggttttcatcgtctcccagagcaatgtcatccagaccatggcgacatcggggataaaggaatag

SEQ ID NO: 75456 - protein, 118 aa, Unknown
  Obtained from environmental sample
  misc_feature (1)..(118): Xaa is any amino acid
MKSFMTQIPIQLIEAAKIDGKSELGIFFTIIMPLAKPAWITLIILSFNSLWGNTGGSFIYSEALKPVSFMLAQIISGGVARTGVASAVNLIMLVVPITVFIVSQSNVIQTMATSGIKE

SEQ ID NO: 75457 - DNA, 630 bp, Unknown
  Obtained from environmental sample
  misc_feature (1)..(630): n is a, c, g, or t
atgcggagaatgtttgattgtctggcatacttgccttatctctcaatccatccttttgagggtttttatgaggtgcgtttccgtaataagggcagcattttcgcggcgaccatattgttcgcgctttacgggataatacaaatatacatcgcccaatacaccggttttataaataattattggcatttgtacggccttgagagtacggagatatttctttccggcacgctgccgcttgtactcttttttgtcagcaactacagcgccgcgacattgattaacggaaacgggcgttttcgggatatttacatggtaacgtgttattccctgtgcccgttgattctcttcggcttcatcagcactgttataagtaatttcattataattgaggagcttcccatcctcacggctttttactggataggggttgtgtggtttttgttcctcctgtttgccgggctgtgcgtcatacatgaatattcattcatgcaaaatatagcggccctgttttttacccttgtggcggcggtgatcatcatttttctttcagtgcttttattaaccctggttgacagaataatagctttcttcagcgtcatcgccattgaattgtcaaagaggtggctgtga

SEQ ID NO: 75458 - protein, 209 aa, Unknown
  Obtained from environmental sample
  misc_feature (1)..(209): Xaa is any amino acid
MRRMFDCLAYLPYLSIHPFEGFYEVRFRNKGSIFAATILFALYGIIQIYIAQYTGFINNYWHLYGLESTEIFLSGTLPLVLFFVSNYSAATLINGNGRFRDIYMVTCYSLCPLILFGFISTVISNFIIIEELPILTAFYWIGVVWFLFLLFAGLCVIHEYSFMQNIAALFFTLVAAVIIIFLSVLLLTLVDRIIAFFSVIAIELSKRWL

SEQ ID NO: 75459 - DNA, 663 bp, Unknown
  Obtained from environmental sample
  misc_feature (1)..(663): n is a, c, g, or t
gtggtttgtcagtcgcttggactggacttggaatataaggtcgtcgaaatggacggctgggagccaaacaaaggccccggctatggctggcccatgatggagagggcctggataaaccccagcccaaacgcgccaaacctcatgatggctcgggcctacccagggactgtaatgatagagggcacgacactgagcgaaggcaggggcacgacgcgcccattggaactctgcggggccccagacattgacgcaaaagaaataattaaattcatggaaaaggccgcgccacattggttaaggggctgcatattgaggccctgctggttcgagccgacattccacaagcacgtaggccaattgtgccaaggcatacagattcacaccgatgggccatactatcgcccagacacattcaggccctggcgcattcaagcgcttctcttcaaagccatccgcagcctttgccccgattatcccctgtggcgcgacttcccgtacgagtacgaaaatgaacgcctagccatagacctcatcaacggcgggccgcgcctgaaggcgtgggtggacgacacttccgctgccccgtgcgacttggacaaaatggccttggcagacgaaagagaatgggaagaagagaggaatggagcggcaatatacagttga

SEQ ID NO: 75460 - protein, 220 aa, Unknown
  Obtained from environmental sample
  DOMAIN (2)...(219): Protein of unknown function (DUF1343)
  misc_feature (1)..(220): Xaa is any amino acid
MVCQSLGLDLEYKVVEMDGWEPNKGPGYGWPMMERAWINPSPNAPNLMMARAYPGTVMIEGTTLSEGRGTTRPLELCGAPDIDAKEIIKFMEKAAPHWLRGCILRPCWFEPTFHKHVGQLCQGIQIHTDGPYYRPDTFRPWRIQALLFKAIRSLCPDYPLWRDFPYEYENERLAIDLINGGPRLKAWVDDTSAAPCDLDKMALADEREWEEERNGAAIYS

SEQ ID NO: 75461 - DNA, 630 bp, Unknown
  Obtained from environmental sample
  misc_feature (1)..(630): n is a, c, g, or t
atgggaaggtgcggctctgctgatcggcgttgggctaccatggccttcaccatcaaaacggcgcaccgcggcgtgaggtccaagggcattattgatgaaaccagcacggataaaaattacgcagctcaccatccggaaaaagttttagaaaaagtcacccgcaaaggcgctatgctttctggggttttaatggcgattggcctagccgccatcatttacggagccgacttaatgctgcgcggtgcggttgccattgcgtttgacttaggcgtttcggaaaccctggtgggcttaactgtggtagccatcggcacttccgctccggaacttgtcaccaccatcattgctactatcaaggatgaacgcagcctggcctttggcaacttggtaggttcttccacgttgaacctcactatcattttgggtgctgccttgctgttcagtcccattccagtactggttgaccccaaactgatccacttctcgatcccatttatggtgctcactggcttggcctgcgtgccggtatttttgactggtaaacgcatttcccggttggaaggcgggttgtttgtggcagcttatggggggtacttggcttacaccattatcgcgggcatcgcggcttga

SEQ ID NO: 75462 - protein, 209 aa, Unknown
  Obtained from environmental sample
  DOMAIN (69)...(202): Sodium/calcium exchanger protein
  misc_feature (1)..(209): Xaa is any amino acid
MGRCGSADRRWATMAFTIKTAHRGVRSKGIIDETSTDKNYAAHHPEKVLEKVTRKGAMLSGVLMAIGLAAIIYGADLMLRGAVAIAFDLGVSETLVGLTVVAIGTSAPELVTTIIATIKDERSLAFGNLVGSSTLNLTIILGAALLFSPIPVLVDPKLIHFSIPFMVLTGLACVPVFLTGKRISRLEGGLFVAAYGGYLAYTIIAGIAA

SEQ ID NO: 75463 - DNA, 699 bp, Unknown
  Obtained from environmental sample
  misc_feature (1)..(699): n is a, c, g, or t
gtgtttatgatttctttaatattggtcgtttccggcggagaagacatagatagtctgacaatgtttccgttcccgtttttaactttaatttttgccgttgtttcgttgatattcgtagagaaagagaaaccggcgcaggttcagccgaatcagcaaagctcgttgaaaagaacgcagactatggtaatacttgccatgttttccgcgctggcgtatctgattatgcttttcaaaattcggattgtacccgtaccgccgctgagttacgaggctaaggacgtggtaatcgtactcggcgggtttatatacggtcctctcgcttccgttgccgtatctttagtagtgtcgtacatagaaatgattacggtcagtactaccgcctggatagggttcgcgatgaacgtagtgtcaacctgttcgttcgcgtgtaccgcggcggcgatataccgaaccaagcgttcgtttatatccgcgttaatagggcttgcggcgggagcgatagccgtaaccgcttccatgatgctgtggaactatcttctgaccccgatatttatgaacgttccccgcgaagccgtcgtaaaaatgcttattccgacgttcctgccgttcaatctgataaagggcgggcttaacgctttgattgcgctcttactgtacaaacccttgttcacggcaatgaaaaaatcccgacttttctga

SEQ ID NO: 75464 - protein, 232 aa, Unknown
  Obtained from environmental sample
  misc_feature (1)..(232): Xaa is any amino acid
MFMISLILVVSGGEDIDSLTMFPFPFLTLIFAVVSLIFVEKEKPAQVQPNQQSSLKRTQTMVILAMFSALAYLIMLFKIRIVPVPPLSYEAKDVVIVLGGFIYGPLASVAVSLVVSYIEMITVSTTAWIGFAMNVVSTCSFACTAAAIYRTKRSFISALIGLAAGAIAVTASMMLWNYLLTPIFMNVPREAVVKMLIPTFLPFNLIKGGLNALIALLLYKPLFTAMKKSRLF

SEQ ID NO: 75465 - DNA, 537 bp, Unknown
  Obtained from environmental sample
  misc_feature (1)..(537): n is a, c, g, or t
atgtactccctcaacgtcggcaatatgaccctcgcgctcaacgtcgacaaggaaaaaatccgcagtaaaggcatagattcaatcaggagcagggttacgaacctggaaccttttatgcgggaaggaatgagcgcggaagaatttatggaacggcttaaagcgagtataataagcgaataccggtgcgaaacggttgcgttagacgaaacgcagacagcggaaataaacggcattatgaaccgcatatacggaaacgacgattttatttacggttcttccatgaaatatcagttcagccgcaaaatatatttcggtttcgggctggtggaggtaaatttcaactgcgacgggagcgttatgaaagacgttaagatttcgggcgattttttcggcggcggcgatataaccgagcttgaaaatctgctgaacggcgtaaagcatactcccgaagcggtagaatcgaaactcgaatcggttgacgtgtcggaatacattttcaaagcggaaacaaaagacattgtaaagctgtttatgtga

SEQ ID NO: 75466 - protein, 178 aa, Unknown
  Obtained from environmental sample
  misc_feature (1)..(178): Xaa is any amino acid
MYSLNVGNMTLALNVDKEKIRSKGIDSIRSRVTNLEPFMREGMSAEEFMERLKASIISEYRCETVALDETQTAEINGIMNRIYGNDDFIYGSSMKYQFSRKIYFGFGLVEVNFNCDGSVMKDVKISGDFFGGGDITELENLLNGVKHTPEAVESKLESVDVSEYIFKAETKDIVKLFM

SEQ ID NO: 75467 - DNA, 651 bp, Unknown
  Obtained from environmental sample
  misc_feature (1)..(651): n is a, c, g, or t
atgaggataggggaagtacacatgtaccccgcagccgatctcattcccctgtccgcgttgcagcattatgtgttctgtccccggcagtgcgccctgatccatgtggagcaggtatggnaagagaacctttttacggcagaggggcgtctgttgcataacaaggccgacagcggcaaggtcgaaatacgcggagacgtgaagaccgtcaccggactgcctttgcgatccctggcgctgggcttggccggcaaggcggatgtggtggagtttcatcgccgggaaggggtctggcatcccttcccggtggaatataaacgcggcaaggccaagacgcataatgcggatgccgtccagctttgcgcccaagccctgtgcctggaagagatgctcggcctgcctgtgccggagggagcgctcttttacggcaaaacccggcgcaggctcgcggtgtctctggacgctccgttgcgcgaactcaccgcaaacattgccggggctgttcatgcgctgctgcaaggcggcataagcccgccgcctgtggcggacgagcgttgcggggcctgttccctggcgggacaatgcctgcctcgctccttggcccggcggggggcagccggacgctatctggaatccttgcggggggctgaatga

SEQ ID NO: 75468 - protein, 216 aa, Unknown
  Obtained from environmental sample
  misc_feature (1)..(216): Xaa is any amino acid
MRIGEVHMYPAADLIPLSALQHYVFCPRQCALIHVEQVWXENLFTAEGRLLHNKADSGKVEIRGDVKTVTGLPLRSLALGLAGKADVVEFHRREGVWHPFPVEYKRGKAKTHNADAVQLCAQALCLEEMLGLPVPEGALFYGKTRRRLAVSLDAPLRELTANIAGAVHALLQGGISPPPVADERCGACSLAGQCLPRSLARRGAAGRYLESLRGAE

SEQ ID NO: 75469 - DNA, 891 bp, Unknown
  Obtained from environmental sample
  misc_feature (1)..(891): n is a, c, g, or t
gtgacaaaagatttgccgtttccagtatttgcaaagccgaccatcgggcacagcagtcgcggtaccaagctattgaacaaccgcttggagttagatgaatatatggccagccataaagattttattctatgcgaatatttgccgggcaatgaatacactatcgactgctttacagataggcatggtaaattgcgtttttgccagccgcgcgtgcgcggacgtatatcgaacgggatttcggtcaatactcatgccatcaaaatgccggatgccgaaaagtttgcagaaaaaatcagtgtcaaattgaatatgcgcggcgcatggttttttcaaatgaagcaagacaaacacggcaatcccaaacttatggaagtcgcggcgcggttcggcggctcgtcggttttatgccgcgctcgcggcgtgaatctgccattgctgtcgctttacgatgcatttgaaattgatgttgaaataatggaaaatgattatgaggttgaattagaccgcgcgttggaaaatctttacaggcttgatatttcatatgaaagcgtcttcttggattatgacgactgcctgatagtagatggcaaattgaatccggaaatgatggcattccttgccaagtgtaaaaacgaaggcaaaagcattgcattgctgtccagacacaagggcgatttgggtgccggtcttgcgcaatgggggttatccgacttcttcaattcagtcattcacataacggacaactcaccgaaatcaaaatatatcgtcggcgatgcgccaatttttatagatgattctttcgccgaacgaaaagaagtcaagaacgccttgaacataccggtattcagtcccgatatgattgaatgcctgtcaaggaataatgtaaaataa

SEQ ID NO: 75470 - protein, 296 aa, Unknown
  Obtained from environmental sample
  misc_feature (1)..(296): Xaa is any amino acid
MTKDLPFPVFAKPTIGHSSRGTKLLNNRLELDEYMASHKDFILCEYLPGNEYTIDCFTDRHGKLRFCQPRVRGRISNGISVNTHAIKMPDAEKFAEKISVKLNMRGAWFFQMKQDKHGNPKLMEVAARFGGSSVLCRARGVNLPLLSLYDAFEIDVEIMENDYEVELDRALENLYRLDISYESVFLDYDDCLIVDGKLNPEMMAFLAKCKNEGKSIALLSRHKGDLGAGLAQWGLSDFFNSVIHITDNSPKSKYIVGDAPIFIDDSFAERKEVKNALNIPVFSPDMIECLSRNNVK

SEQ ID NO: 75471 - DNA, 735 bp, Unknown
  Obtained from environmental sample
  misc_feature (1)..(735): n is a, c, g, or t
atgattgtggtctgcgcatatggaattattctaccgcaagaagtcctcgacattccaaagtacggctgcatcaacatacacatgtcgcttcttccgaaatacaggggccccaatccgatacagcgggcgataatgaacggagacgaaaaaacgggcgtcaccataatgaaaatggacgcgggcatggacaccggcgacatacttatgaaaaaaactgtcagaatctatccgaatgaaaatctcggccagcttgaactaaggcttggcctcctcggagcaagggcgattatggaatacttaaaaaacatgaataatataactccggaaaagcaaggcgacaactttacgttcgcgccaaaactcaatccggatgaacgcatgatagactggtcgaagacggcatgggaaatccacaacctcgtacgcggtctgcagccgtatgacaaggcgcgtttctgccacaaaggcaaagagatattcgtactggaaaccgaagtcggcgaacctatcccagacccgaaagaaataggcgtcgcaaaaatagtatctgtcggcgaggttatcgaaaccacgcgaaaactggcagtcgtatgcggtgacgggactgtccttcgcccggtcaaactgcaaactccaaaaggaaacgtcgtggatgcgaaggcttttctcaatggatataaaatcgaattcggcgaaattctgggtaggacatgccaaaatacaaactcgagatag

SEQ ID NO: 75472 - protein, 244 aa, Unknown
  Obtained from environmental sample
  DOMAIN (2)...(100): Formyl transferase
  misc_feature (1)..(244): Xaa is any amino acid
MIVVCAYGIILPQEVLDIPKYGCINIHMSLLPKYRGPNPIQRAIMNGDEKTGVTIMKMDAGMDTGDILMKKTVRIYPNENLGQLELRLGLLGARAIMEYLKNMNNITPEKQGDNFTFAPKLNPDERMIDWSKTAWEIHNLVRGLQPYDKARFCHKGKEIFVLETEVGEPIPDPKEIGVAKIVSVGEVIETTRKLAVVCGDGTVLRPVKLQTPKGNVVDAKAFLNGYKIEFGEILGRTCQNTNSR

SEQ ID NO: 75473 - DNA, 588 bp, Unknown
  Obtained from environmental sample
  misc_feature (1)..(588): n is a, c, g, or t
gtgacagattggccgagttctcaacggcattccgcctgcccgcgcggcctgccgtggcatgagaaaatgcgcttcatattgaccggctacgaggccgccaagcaggagggcgaccgcgtggggctggacgtgttttttggctgggagttcacaatacgcggctccgatttcctgacatacgggcttgacgcgggttttttgttcgcccaccccgattttgacgccctgcccatcgacgcctacagcgcgttggtgcgggaaaacggcggctatatagcccacgcgcatccttaccgctcggcgttttacatagagaaaccgttccctgcggacccccgttacttggacggcatcgaggtctacaacgcgtccgacccgccggagaacaacgcgcgggcgcgggagttcgcgctgaaccacggcatccctatgcaatcaggcagcgattcccactcggtgaaccggtcccgcgtaggcggcgtggcgcttacacgcaaggcgaaagacatattcgacatcatcggcgcgataagggcaggacacgtcgaactgtacgagtccgaagtcccccggggcaaatcagcatga

SEQ ID NO: 75474 - protein, 195 aa, Unknown
  Obtained from environmental sample
  misc_feature (1)..(195): Xaa is any amino acid
MTDWPSSQRHSACPRGLPWHEKMRFILTGYEAAKQEGDRVGLDVFFGWEFTIRGSDFLTYGLDAGFLFAHPDFDALPIDAYSALVRENGGYIAHAHPYRSAFYIEKPFPADPRYLDGIEVYNASDPPENNARAREFALNHGIPMQSGSDSHSVNRSRVGGVALTRKAKDIFDIIGAIRAGHVELYESEVPRGKSA

SEQ ID NO: 75475 - DNA, 765 bp, Unknown
  Obtained from environmental sample
  misc_feature (1)..(765): n is a, c, g, or t
gtgtccggacgcgactcttgggtctataattactcaacaaaaacgttattaacgaaagtaaaagatatggttgattactataatttggcattagagcacggaatccccaaggttcttgaccccgcgataataaattgggggcgtgccctgggaaattattttaataacggcaaaaaaatgctttttgaacaatcaaaaataataacttcactatatcgcccattttcaaaaacaaatatttattacggcgataagataatggaatgcagatacaaaatggatgtgttgttcccaaccccaaaattatataatattctcatatgtgtcaatggcacgggtgcaaataaagagccatcaactataattactaattcatttatcgaccttaactgtttagaagcaggtgcatattgttttccgctgtattattatgaaaaaatcgacaccaaagggcaaatcggaatgtttgatgaaaataacggcgaaaagtatatccgtcatgatggaataagcgatttcatttttaatcaagcgaaacagcgatacagtaatgcggttaaaagagaagacattttctattacgtttatggattgcttcatagtcccaaatatcgtgcagcctttgcaaacgatttaaaaaaaagtttgccgcgaattcctttgacggaaagaaccgatgatttttgggcgttttcaaaggcccggccngcgatttggcgaaattgcatttggaatatgagaccgttccgccatgcagccaagtaa

SEQ ID NO: 75476 - protein, 254 aa, Unknown
  Obtained from environmental sample
  misc_feature (1)..(254): Xaa is any amino acid
MSGRDSWVYNYSTKTLLTKVKDMVDYYNLALEHGIPKVLDPAIINWGRALGNYFNNGKKMLFEQSKIITSLYRPFSKTNIYYGDKIMECRYKMDVLFPTPKLYNILICVNGTGANKEPSTIITNSFIDLNCLEAGAYCFPLYYYEKIDTKGQIGMFDENNGEKYIRHDGISDFIFNQAKQRYSNAVKREDIFYYVYGLLHSPKYRAAFANDLKKSLPRIPLTERTDDFWAFSKARPAIWRNCIWNMRPFRHAAK

SEQ ID NO: 75477 - DNA, 378 bp, Unknown
  Obtained from environmental sample
  misc_feature (1)..(378): n is a, c, g, or t
ttggctggcgcgcctcgtggtcgcccagcttcaccacggaactccgcacgggcgccaaactccagaaggccgcgtaccgccttggtcaggggcaggccccatacggccccatttacaacgagggcaccgacagcgcgacggggcggggcttctactacaatatgggcccctacgccgacgatggcggcgacaaccgcgacaactcgactctcaacttcaagggcacgtacttcctcgacatgtacggggcgcacgagattgacttcggtctggaccactacttgggcaagcgccactcgcgcaatgagcagagcccttggtacaacaggaccatccatgtggcgggctaccgctacgacacatcaggcggcgacatag

SEQ ID NO: 75478 - protein, 125 aa, Unknown
  Obtained from environmental sample
  misc_feature (1)..(125): Xaa is any amino acid
MAGAPRGRPASPRNSARAPNSRRPRTALVRGRPHTAPFTTRAPTARRGGASTTIWAPTPTMAATTATTRLSTSRARTSSTCTGRTRLTSVWTTTWASATRAMSRALGTTGPSMWRATATTHQAAT

SEQ ID NO: 75479 - DNA, 312 bp, Unknown
  Obtained from environmental sample
  misc_feature (1)..(312): n is a, c, g, or t
ttgattcgcggcgaacgtactcgtgagattctgaaacagtctcagttttctcctctatccgccggcgagcagacggtaatcaccattgcgctcaatgctggattgtttgatagaattccgctcgcgaagatgacgaccgcaaagtccgcgcttgtagcaaaggtacgcaaagatctgaaacgggtgcttagcagaatcgaatccggacgagatcttgatggctcagagcacaaggaaatcttgaagtcctcgcgcgaggcgctcctcaaatatttcgcaaggaacaaggatgcagacgctcccgcaacttaa

SEQ ID NO: 75480 - protein, 103 aa, Unknown
  Obtained from environmental sample
  misc_feature (1)..(103): Xaa is any amino acid
MIRGERTREILKQSQFSPLSAGEQTVITIALNAGLFDRIPLAKMTTAKSALVAKVRKDLKRVLSRIESGRDLDGSEHKEILKSSREALLKYFARNKDADAPAT

SEQ ID NO: 75481 - DNA, 927 bp, Unknown
  Obtained from environmental sample
  misc_feature (1)..(927): n is a, c, g, or t
atgtccggaatcaatatttattttcccggagtgaagccgcttgacgatgttaactttactcttaggcgcggggaaatccattctatcatgggggaaaacggcgctggcaaatctaccctcattaaaatactgaccggggtctaccggaaagcatcgggaacaataaccctgaacggcgagccttttgagccggccaatcccatggaagcgcgccgctacggcgtaaattcggtatatcaggaaatcaacctctgcgataatttgacagtggcggaaaacatctacgccggacgccaaaaaacacgtttcggaaaaattgactggaaatacataaacaagggggcggtagaagccctgaaaagccttaatatttcaatagacgttacaaagttgctgaattcctatacggtagcgattaaacagatgatcgccatcgccagggcagtcgatatggattccaaaatacttatcctggacgagcctacgtccagccttgaccgccccgaagtggaacagcttttttctgtcatacgcaaactgagggatgaagggctttcggtcatttttatttcgcactttctggatcaggtctacgagttatgcgaccgggtgacggtactgcgcaacggaaaattgatcggggagtatgtgttgaaagagcttccaaaaatcgagcttgtttcaaagatggtcggcaaagaattttcaaccctgcaaaagaaagatcgcagccttctgaacaaggaagcaaacgaagtggtactcgaagcaaagaatgtcggaaagcggcgtactgttcagccttttaaccaatcgtacacaaaggcgagattcttggcttcgcgggccttcttggttcaagccggacagaatccgcccaactgcctttcggcattgacggagccgattccggagaattatatgtaa

SEQ ID NO: 75482 - protein, 308 aa, Unknown
  Obtained from environmental sample
  DOMAIN (24)...(210): ABC transporter
  misc_feature (1)..(308): Xaa is any amino acid
MSGINIYFPGVKPLDDVNFTLRRGEIHSIMGENGAGKSTLIKILTGVYRKASGTITLNGEPFEPANPMEARRYGVNSVYQEINLCDNLTVAENIYAGRQKTRFGKIDWKYINKGAVEALKSLNISIDVTKLLNSYTVAIKQMIAIARAVDMDSKILILDEPTSSLDRPEVEQLFSVIRKLRDEGLSVIFISHFLDQVYELCDRVTVLRNGKLIGEYVLKELPKIELVSKMVGKEFSTLQKKDRSLLNKEANEVVLEAKNVGKRRTVQPFNQSYTKARFLASRAFLVQAGQNPPNCLSALTEPIPENYM

SEQ ID NO: 75483 - DNA, 771 bp, Unknown
  Obtained from environmental sample
  misc_feature (1)..(771): n is a, c, g, or t
ttggcagccggtccaaataacaaccggtatacaaactacttggaggtagatatgaacgtaaagaaaattctgttggcggctttgatcattctgatcatagcaggcggcgcttttgccggcggaagcaaggaaaagaagatcaccatcggcatggccaatctcgccctgggtgattacttcaccggtatgcgcaatgcggtcgtcaaagcaggccaggatcgcggctggacggtaaatgctacaaatgctgacggcagcgattctaagctagtctctgatgttgaaaacttcatcgctcagaaagtagacggaatcatcatttcaggcgcctggttcaacgacattccggcagcgctgaatgccgctgaaaaggcaaagatccctgtggtactcgttgatcgtatgttcgattcccagaacttcactgcctgggtaggcccggataacgagttcatgggcgagcagatcggtaattacatcgtcaagcagttgcccgcgggaggtaccgcggtgattattcgcggcggccccgccgagaataccatcggcattaaccgcaccaagggtgttaccaaggctctcacggctgccggtaacttcaccattcangtctctcctgatttcggcgactggtctaccgacggcggcaagaaggctatggagaacatgcttgcaaggttcccgaagatcgactttgtcttctgcgaaaatgnnactcatggtttcggcgctcagtctgcggcaagggacgcangtcgttccatcagatga

SEQ ID NO: 75484 - protein, 256 aa, Unknown
  Obtained from environmental sample
  misc_feature (1)..(256): Xaa is any amino acid
MAAGPNNNRYTNYLEVDMNVKKILLAALIILIIAGGAFAGGSKEKKITIGMANLALGDYFTGMRNAVVKAGQDRGWTVNATNADGSDSKLVSDVENFIAQKVDGIIISGAWFNDIPAALNAAEKAKIPVVLVDRMFDSQNFTAWVGPDNEFMGEQIGNYIVKQLPAGGTAVIIRGGPAENTIGINRTKGVTKALTAAGNFTIXVSPDFGDWSTDGGKKAMENMLARFPKIDFVFCENXTHGFGAQSAARDAXRSIR

SEQ ID NO: 75485 - DNA, 708 bp, Unknown
  Obtained from environmental sample
  misc_feature (1)..(708): n is a, c, g, or t
gtgtttctgaaactggagggcaatgatcccttcattgtttttgctgacgcgacatggaaagcggcggttgaggaatgcgccgcaacccgcgttcaaaatgccggacaaacntgctgcgccnccaaacgattttttattcaaaacagcataagagaagagtttgtttcaaaattgattgaaaggctaaagaaagtcaaaacaggcagccctctagatgaaagtaccgatttaggctctttaatcaacgcttcagccggcatggaagtaaagcggcaagtggaactaaccataaatcagggggcaaagtgcgtttatggcggaaagttaagcaagccaacttattacgatcctactgtgctggtagacgttacgccggaaatggatgttgccaaagatatggaaatatttggccctgtaattcccattttaggctttaatacggaagatgaagttgtggccctttcgaacaacacagcttatggacttaacgccggggtatttacaaacgatatgaaacgggccttccgtgtagccgcctcgcttgaatgcggcagtgtagtcattaatggctcaggaaattatcgtaatattgatcaaccacacggaggccggaaacttacaggattgggacgtgaagggatttgctgcactctggaagaaatgacacagacaaaagcctatattcttaaggggatactcaaaacataa

SEQ ID NO: 75486 - protein, 235 aa, Unknown
  Obtained from environmental sample
  DOMAIN (2)...(227): Aldehyde dehydrogenase family
  misc_feature (1)..(235): Xaa is any amino acid
MFLKLEGNDPFIVFADATWKAAVEECAATRVQNAGQTCCAXKRFFIQNSIREEFVSKLIERLKKVKTGSPLDESTDLGSLINASAGMEVKRQVELTINQGAKCVYGGKLSKPTYYDPTVLVDVTPEMDVAKDMEIFGPVIPILGFNTEDEVVALSNNTAYGLNAGVFTNDMKRAFRVAASLECGSVVINGSGNYRNIDQPHGGRKLTGLGREGICCTLEEMTQTKAYILKGILKT

SEQ ID NO: 75487 - DNA, 879 bp, Unknown
  Obtained from environmental sample
  misc_feature (1)..(879): n is a, c, g, or t
gtggattggattgtgtacaacatgacngagaaggcaagcttcaacaccaacgtggtggtggtgcagcccattgagcagggcatggtggatatgctcaacgcgcaggacggcttataccatctcaacctgcagggcttggacaagggcaagcaggtgaacagcattgagctgattgacgtggtgagccgaggcttaaatccttatacccaatttgacgagtatttgaagcttgccgaaaatcccgatatgcgctttgtgatttccaacaccactgaggctggaattgccttccgcgccgaagataagcttgacgacaagcctgcaaaatcctacccgggcaagcttactcagctgctgtaccaccgctttaaaacctttaagggtgcggcagacaaaggctttatcattttgccctgcgagctcattttccacaacggaacggagctgaaaaagtgcattgagcagtacattgagctgtggaagttgggcgcagcgttcaagcagtggtttgaaaccgcttgtggcgtgtacagcacgctcgttgaccgcattgtgcctggctaccccaaagataccattgacgagattttggcaaaaatcagctacgatgataagctggtggtaaaggctgaaattttccacctgtgggtagttgaagcgccgtcaagcgttgctaaagaatttcctgccgataaggcagggcttaatgtgctgttcgtgccaagcgaaaagccctaccacgagcgcaaggttacgctgctcaacggtccgcatactgtgctttcgcctgtggcttacctcagcggattgaacaccgtacgcgaagcttgcgaagatgctgttgtgggtaagtttatcaaccaaggtaatgttcgatga

SEQ ID NO: 75488 - protein, 292 aa, Unknown
  Obtained from environmental sample
  DOMAIN (3)...(142): Mannitol dehydrogenase Rossmann domain
  misc_feature (1)..(292): Xaa is any amino acid
MDWIVYNMTEKASFNTNVVVVQPIEQGMVDMLNAQDGLYHLNLQGLDKGKQVNSIELIDVVSRGLNPYTQFDEYLKLAENPDMRFVISNTTEAGIAFRAEDKLDDKPAKSYPGKLTQLLYHRFKTFKGAADKGFIILPCELIFHNGTELKKCIEQYIELWKLGAAFKQWFETACGVYSTLVDRIVPGYPKDTIDEILAKISYDDKLVVKAEIFHLWVVEAPSSVAKEFPADKAGLNVLFVPSEKPYHERKVTLLNGPHTVLSPVAYLSGLNTVREACEDAVVGKFINQGNVR

SEQ ID NO: 75489 - DNA, 996 bp, Unknown
  Obtained from environmental sample
  misc_feature (1)..(996): n is a, c, g, or t
gtggatgagttggagaatactataaacagtttttctgacacggcgttgaaggacgctgatgatctcagcgacgaaaccagcgtgcaatccgctcgtctggtctacttttccatagggatgctcgcggcaatggcgattatctcccttattatcattatttatgtttccaaagttatccgcaaacccattgagcgccttgtggacgtagccggcaatgtggcgaaaggcaacctcaatataaatatcgatacatccttaaaagacgaaacgggtatactgtccaaggtctttgccgacgtagtggctatcgtaaaaagtttagccgcggatatcgaacaggtggcacataatcatgatattggcgacctcgatcatctctccattgacgaatcctcgtacagcggcgaatttacagctatcacgtcagccgttaacagggtaatcgtctctatgaatagtgataccttggagctcgtccagtctgtaaccgatcttggaaatggaaattttaatttcaaagtaaaacaactgccaggccaaaaaatagccatgaccaacgccttgcaagcggccaaagacaatcttatcaattttaaccatgatattgccggactgatcgacagcgcgtcggaagggaatttgcgcgtcagtgtggacataggaaagtataagggtgactggaacgcgatggtggacaggcttaacagtctgctggccacaataaacaagccgatcaacgaagcgtccgacgtattgaattatgtttcgtccggacactttgaccgtaaaatgaacggcgactatnagggcgattttctncaggtgaaagaagcccatcatatcacggttgtgaatatctcttcatatatagacgagatagcgcgtgtactgtcggaactgtcgcanaacgacctgaatcaagggataacccgcgaatatgtgggaagcttcgcaatcatcagggacgcgatgaaacatatcctagacacgttttaa

SEQ ID NO: 75490 - protein, 331 aa, Unknown
  Obtained from environmental sample
  DOMAIN (37)...(106): HAMP domain
  misc_feature (1)..(331): Xaa is any amino acid
MDELENTINSFSDTALKDADDLSDETSVQSARLVYFSIGMLAAMAIISLIIIIYVSKVIRKPIERLVDVAGNVAKGNLNINIDTSLKDETGILSKVFADVVAIVKSLAADIEQVAHNHDIGDLDHLSIDESSYSGEFTAITSAVNRVIVSMNSDTLELVQSVTDLGNGNFNFKVKQLPGQKIAMTNALQAAKDNLINFNHDIAGLIDSASEGNLRVSVDIGKYKGDWNAMVDRLNSLLATINKPINEASDVLNYVSSGHFDRKMNGDYXGDFLQVKEAHHITVVNISSYIDEIARVLSELSXNDLNQGITREYVGSFAIIRDAMKHILDTF

SEQ ID NO: 75491 - DNA, 966 bp, Unknown
  Obtained from environmental sample
  misc_feature (1)..(966): n is a, c, g, or t
gtgggggaacggggccctaataaaaggaggccgcttatgaagcctaaagagaatcttttaagggcgattcgccgtcagacgcccgaatgggtgccaaacggcctggaaaatactataactgtcgtcccgccggtggtggagcgccccgcggcggcaggcttcgacgcttggggcgtgcggtacgatatggacgaaaatgtccacggaggcacgtatccggccatgggaggccatgtcatccgcggtgccgggtcctggcgggccgatgtaaaggcgcccgacgtaaacgccatggattttaccaaaatacgcgatggcaatggccgtataattcatgccgaggatattgacagggatgaatatcttgtcatggggtttgtggaatttggcgtgtttgaacgatcatacctgctcttcggtatggaggaagccctggtcaattatctgctggaacccgaagtcatggaagaattggcgtcgcttatagccgattataaaatccggctgatagaaaaattccacgaaactttcccattggatatgatttggtacggagacgactggggtacgcagcgggatctgtttatcccggtggagacatggcgcggcatcattaagccgcacaccaaacgtatctatgattgcatgaaaaatctaggaatattgataaatcaacattcatgcgggaaaatcgattccgttttcagcgacatggcggaaatgggcgcggacatgtggaacccctgccagccctgcaatcctttgaaagaaatgaaaaaggcatacggcgaaaaggtcgccttttgcggcggcatagacagccagtttgttctggacaggccgggcgtgacgacggaggatgtccgcgcggaggtgcgcaagcgcatagatgagttggcagtgggcggcggatatatagcggcgcccagccattccgtcccctatgatccgtctcggccgatctga

SEQ ID NO: 75492 - protein, 321 aa, Unknown
  Obtained from environmental sample
  misc_feature (1)..(321): Xaa is any amino acid
MGERGPNKRRPLMKPKENLLRAIRRQTPEWVPNGLENTITVVPPVVERPAAAGFDAWGVRYDMDENVHGGTYPAMGGHVIRGAGSWRADVKAPDVNAMDFTKIRDGNGRIIHAEDIDRDEYLVMGFVEFGVFERSYLLFGMEEALVNYLLEPEVMEELASLIADYKIRLIEKFHETFPLDMIWYGDDWGTQRDLFIPVETWRGIIKPHTKRIYDCMKNLGILINQHSCGKIDSVFSDMAEMGADMWNPCQPCNPLKEMKKAYGEKVAFCGGIDSQFVLDRPGVTTEDVRAEVRKRIDELAVGGGYIAAPSHSVPYDPSRPI

SEQ ID NO: 75493 - DNA, 429 bp, Unknown
  Obtained from environmental sample
  misc_feature (1)..(429): n is a, c, g, or t
gtggattcaaaactcattaccgattatgcagtagttccagcgaatgttcatgacattacagaatttgagggtttgatagatcctttaaaagacagcgttgtctatggggatagcgcttttgtaagcgcggaaatagccgcgaacattacggctaaagccaaaaagaaaaatcgcaaaataacgttaaagataatcgagaagggattccggtataaaaagttaaccgataagcaaaaattatcaaaccgtagaaaatccgccgttcgttgccgagttgaacacgtattcgggttcatggtcaattcaatgaacggtaagaatctgcgttcaaagggtatttggcgagctcggctcaacatcggccttacaaaccttatttacaatatgtgccgatacgtatttttgaatcgccaagcactagtatgttga

SEQ ID NO: 75494 - protein, 142 aa, Unknown
  Obtained from environmental sample
  DOMAIN (1)...(129): Transposase DDE domain
  misc_feature (1)..(142): Xaa is any amino acid
MDSKLITDYAVVPANVHDITEFEGLIDPLKDSVVYGDSAFVSAEIAANITAKAKKKNRKITLKIIEKGFRYKKLTDKQKLSNRRKSAVRCRVEHVFGFMVNSMNGKNLRSKGIWRARLNIGLTNLIYNMCRYVFLNRQALVC

SEQ ID NO: 75495 - DNA, 753 bp, Unknown
  Obtained from environmental sample
  misc_feature (1)..(753): n is a, c, g, or t
gtggtggtgtacggcgggagcgtcaggtccgcgctgggcatagccatcaacgccgcgggcaacgtcgccgtgggcgacacgttgaagtggaccgccgccccgcacgtggattatctgaaggcggtggccgcggtcggtactgccggtacggacggttatatcgccgcttccgtcggagcgataacggagggtacggtcgtcacgtccattgacacattgaagttgataaacgtctcttcgggcacgacgctggccggcaacagcgcgatcaaggctaagagcgcggaggtcggcggcaaggcccgcgtcgtgatttccaaggcgacggtcgaggccaccggtacgaccggcggcgcggcggccatccgcgacaccatcgggtcggtgaaaatcaacgacagctacgcggtgatcagttcggcgtcgggatccggcatagcggtcaagaacgccagcgtggatctgttgcgcggcacggtgacgtccggtacgggttcgtccccgaacgtggttgcggggaacgccgctatctacgtcatcgacggtacggccaatgtgggcgacattcctgaccgcggcgacggcgacggcaccgggagggattccagcatactcaacgcttcgtcgaacgcgctgtgcgtctacgtcagcgggtccggggataacgacgcggccaacgtaagcaggtacgcccgtatgaacgtgaacggcacgacggaagcctccggcgcgatccgcacacgcacagggtga

SEQ ID NO: 75496 - protein, 250 aa, Unknown
  Obtained from environmental sample
  misc_feature (1)..(250): Xaa is any amino acid
MVVYGGSVRSALGIAINAAGNVAVGDTLKWTAAPHVDYLKAVAAVGTAGTDGYIAASVGAITEGTVVTSIDTLKLINVSSGTTLAGNSAIKAKSAEVGGKARVVISKATVEATGTTGGAAAIRDTIGSVKINDSYAVISSASGSGIAVKNASVDLLRGTVTSGTGSSPNVVAGNAAIYVIDGTANVGDIPDRGDGDGTGRDSSILNASSNALCVYVSGSGDNDAANVSRYARMNVNGTTEASGAIRTRTG

SEQ ID NO: 75497 - DNA, 834 bp, Unknown
  Obtained from environmental sample
  misc_feature (1)..(834): n is a, c, g, or t
atggtttccggaagttccagcatgtggcttaccgatgccttaaagagaaacgaacagcttaaagccgtgtgcaatcagcacgaacaggcgtctgttatgtcggcggatatttacggcagatttaacggcatccccggcgctgcattggttacaattggcccgggggcaacgaacgctattacaggagttgcccaggcttataccgattccagcgccttatttgttatttccggccaggctagctccaaattgctgagatatgagcaggaaaccggtattcgccagcatggcacccaaagtctggagcttgagaaaattgtaagccccataacaaaatattttgcggcggttatggagcctggaaaaatcaaataccacatggagcgggcttattttgaatcaatggatggccgcaaagggcctgtgtggctggatgttccggtagatattcaaaacaggcaaatacccgatgtcatggatggttttacggcatccgagccggcatacgataccatagatacagaaaaaatgagaagcctgttaagcgcaagtaaaaaaccgcttatccttgccggaggcggggcgacgcaggaagaaataaccgttcttagccatgctctttctattcctgttgtaacatcccgaatgggtataggcaacattctttcttccgatcctttgtttgtaggccgtccggnggcttatggcgacagggcttctcatttcgccattcagcagtgtgatctgctattaattttgggatgtcgcctttccgtgtctaccatcggttattatccggatcgtttcggattaacgctgttaaagtacaggtag

SEQ ID NO: 75498 - protein, 277 aa, Unknown
  Obtained from environmental sample
  DOMAIN (2)...(159): Thiamine pyrophosphate enzyme, N-terminal TPP binding domain
  misc_feature (1)..(277): Xaa is any amino acid
MVSGSSSMWLTDALKRNEQLKAVCNQHEQASVMSADIYGRFNGIPGAALVTIGPGATNAITGVAQAYTDSSALFVISGQASSKLLRYEQETGIRQHGTQSLELEKIVSPITKYFAAVMEPGKIKYHMERAYFESMDGRKGPVWLDVPVDIQNRQIPDVMDGFTASEPAYDTIDTEKMRSLLSASKKPLILAGGGATQEEITVLSHALSIPVVTSRMGIGNILSSDPLFVGRPXAYGDRASHFAIQQCDLLLILGCRLSVSTIGYYPDRFGLTLLKYR

SEQ ID NO: 75499 - DNA, 681 bp, Unknown
  Obtained from environmental sample
  misc_feature (1)..(681): n is a, c, g, or t
atgacctgtatccatttattgggcctgaagggcaaaatggataacgccaaggcaactcaaaagaacaaatcattttaccccgggaaaagggtgttcctaacagggcataccggttttaaaggcgcctggatgaccgctgtattgtacatacttggagtggaggcgatgggctattcccttaaacctgaaccggggtgcctttttgaaaaaatcgacggtgacggtttgattcacagtgtggccgccgacatacgggattctgaacggctgaaacaggaactctgttcttttaagcctgagatcgtgattcacctggccgccaaagtaccaatacatgaatgttttgacgatccaaaggccacatacgaaacaaacgtaatgggcacaattaatctttttgaagcgattcgcttctgtgaaagcgtaaaaagtgttttgatggttaccaccgataaagtttatgaaaataaaggggatggggctttgtataaagaaaccgatcctttggggggtattgatccatattccagcagtaagacttgtatggaatttatcagcgacacctataaaaaatcttatctccagacaagtgaaagagcggttggcgtttctacggtcagggcgagcaatgtcattggcggcggggatcatgttcaatcgcggttaataccaacaatttaa

SEQ ID NO: 75500 - protein, 226 aa, Unknown
  Obtained from environmental sample
  DOMAIN (31)...(219): NAD dependent epimerase/dehydratase family
  misc_feature (1)..(226): Xaa is any amino acid
MTCIHLLGLKGKMDNAKATQKNKSFYPGKRVFLTGHTGFKGAWMTAVLYILGVEAMGYSLKPEPGCLFEKIDGDGLIHSVAADIRDSERLKQELCSFKPEIVIHLAAKVPIHECFDDPKATYETNVMGTINLFEAIRFCESVKSVLMVTTDKVYENKGDGALYKETDPLGGIDPYSSSKTCMEFISDTYKKSYLQTSERAVGVSTVRASNVIGGGDHVQSRLIPTI

SEQ ID NO: 75501 - DNA, 909 bp, Unknown
  Obtained from environmental sample
  misc_feature (1)..(909): n is a, c, g, or t
ttgaaaccgtccccggatatgacagtaagcgaatgggcttccgcctaccgcatactgtcacaagaggaaacatcggcaccgggcaggtggacaaatgaacgcactccgtatcttgtagagattatggacagcctaacagatccttccgtttcaagaattgtttttcttgccgcctggcaaatgggcaagagcacgttatttgtaaattacctgggttatctcatacaccaaaaccccgccccggcagttatcatattgccgaccgttgaccttgccgaaaagtttagcacaacacgccttgcgaatatgttccgcgacactccatgccttaaagcattgctgcctgatgataaaacgcgatcaaataaaatattattcaaagtgtttcccggaatgttcctgatactgacaggcgcgaacagcactgcggtaattatatcaatgcccgcgtctattttgatttttgatgaaatagataattatccgcgggacatcggacgcgggcagggagatgttatttccattgccgaaaaaatgcagaccaatttcccaaacaaaaaaagtatttatacatcgacctgcacattggaagggcagagccgtattcaagccatactggaaacttccactttcaagcgatgggcgcacccctgccccaactgcggggaatattcacaattcggcttgcgcggggaagaaaacccgaacaaaaacaaagcggtatggaacacgcggttaaattttgaaaccatgaaagctatttgtctgcattgcaatacggagcatacgcgcagggaatgggaagcaggtggagggaagtatatcgcngcaaaccctgatgncaatatcgaagggtatcacgtaaacgcttttgatcacccttcatcacatggcaggaaattgttatga

SEQ ID NO: 75502 - protein, 302 aa, Unknown
  Obtained from environmental sample
  DOMAIN (18)...(302): Phage terminase large subunit (GpA)
  misc_feature (1)..(302): Xaa is any amino acid
MKPSPDMTVSEWASAYRILSQEETSAPGRWTNERTPYLVEIMDSLTDPSVSRIVFLAAWQMGKSTLFVNYLGYLIHQNPAPAVIILPTVDLAEKFSTTRLANMFRDTPCLKALLPDDKTRSNKILFKVFPGMFLILTGANSTAVIISMPASILIFDEIDNYPRDIGRGQGDVISIAEKMQTNFPNKKSIYTSTCTLEGQSRIQAILETSTFKRWAHPCPNCGEYSQFGLRGEENPNKNKAVWNTRLNFETMKAICLHCNTEHTRREWEAGGGKYIAANPDXNIEGYHVNAFDHPSSHGRKLL

SEQ ID NO: 75503 - DNA, 984 bp, Unknown
  Obtained from environmental sample
  misc_feature (1)..(984): n is a, c, g, or t
gtgcgctgcgtaagagcggcaagcattggcattttcagcgtagctcatggcaatggcaccaacaactccgcagctactctttcggctactgcggctcccggtaacaccatagaatggtatagcgagccaataggaggcaccctgctgcaaaccggtggagcgtacaccaccgccaccacgccgattattgtgtacgtgcaggcacgcagcgctgacggaacaaagacgagcaagctgcgtacccctgttatagccacctccacctatacctatactagtgccgtgcaaacggcaacgttgaatccgggcacttatcggctggatgtttatggggctcaggggggaagcgtaggagatgctgtaggaggattaggcggctacgccacaggaacatacactgtttcaacaagtacaacgctttacatttatgtgggaggcgccggaagtggattaatatataccgctgcaccgggaacatttggtggagcaagtggtggcggaggaacagatattagaacatcaagcaacaccacgttttcaaatagaattatcgttgcaggtggtggtggtggtgcaacgaggtatagcaacagagacggaggagttggtgggggtgctaatggagggcctagcgcaggtacctcaaatcaagctggtggaggtggaagtaccgccggaggagcgattacagtaacaggaaatggttgttctccagaacctcaagccggtacacttggtgttggaggtaatgcttgtaatgctggtggactagctcctaaaatagacggagggtggaatggcggtggaaatggtgcaagttggaatggttacggcggtggcggtggcggatggtatggtggagcaggtggtgcatggcatgcagccacaggcacaacttctggtggcggtggtggtagcggatacgttggtggagttgtaaatggcaatatgtcatcaggggttaaccaaaggatggctatgtaa

SEQ ID NO: 75504 - protein, 327 aa, Unknown
  Obtained from environmental sample
  SIGNAL (1)...(17)
  misc_feature (1)..(327): Xaa is any amino acid
MRCVRAASIGIFSVAHGNGTNNSAATLSATAAPGNTIEWYSEPIGGTLLQTGGAYTTATTPIIVYVQARSADGTKTSKLRTPVIATSTYTYTSAVQTATLNPGTYRLDVYGAQGGSVGDAVGGLGGYATGTYTVSTSTTLYIYVGGAGSGLIYTAAPGTFGGASGGGGTDIRTSSNTTFSNRIIVAGGGGGATRYSNRDGGVGGGANGGPSAGTSNQAGGGGSTAGGAITVTGNGCSPEPQAGTLGVGGNACNAGGLAPKIDGGWNGGGNGASWNGYGGGGGGWYGGAGGAWHAATGTTSGGGGGSGYVGGVVNGNMSSGVNQRMAM

SEQ ID NO: 75505 - DNA, 570 bp, Unknown
  Obtained from environmental sample
  misc_feature (1)..(570): n is a, c, g, or t
atgactaatagaatttataatattaataatgtaatttcatttcaaaaaactgatgagaaatatggtatattatctaatatgaagggcaaactttttcttcatattggtgatgttaatatatnttcgtcagaatcgttatatcaagcattacgctttactgattatcctgaaattcagaagataatattacaagaaaaaagccctttaatagccaaacgaattgcatataaatataaagataaaactagaattgggtgggatgagattaaaaataatattatgagattgtgtttaagaataaaatacttacagtgtaatgcatttaaatattgtttatataaaactgatgaaatgcctatagtagagatatcgaaaaaagatacatactggggaactgtttatattaatgaaaatgaagttcaaggttctaacatattgggtagacttttaatggaattaagaacagaggcaaatgaaaaaaaagtaattaaaagaataaattatattgttaaaagatatgaaaatttaaaaataattaataattatatcagtaatgaaactataatgtaa

SEQ ID NO: 75506 - protein, 189 aa, Unknown
  Obtained from environmental sample
  misc_feature (1)..(189): Xaa is any amino acid
MTNRIYNINNVISFQKTDEKYGILSNMKGKLFLHIGDVNIXSSESLYQALRFTDYPEIQKIILQEKSPLIAKRIAYKYKDKTRIGWDEIKNNIMRLCLRIKYLQCNAFKYCLYKTDEMPIVEISKKDTYWGTVYINENEVQGSNILGRLLMELRTEANEKKVIKRINYIVKRYENLKIINNYISNETIM

SEQ ID NO: 75507 - DNA, 678 bp, Unknown
  Obtained from environmental sample
  misc_feature (1)..(678): n is a, c, g, or t
atgaaaattgatgaaataatcgctcaatatataattgattatcaaaaaaataaaccaataataattgcttttgatggtgttgatacatccggaaagacaacaatagctaataatgtatgtagaattttaaaagataataataaaaatgccgtcagagtatcaatagataaatttcataatcccaaagaaattaggttacaaaaaggcgaattatcaccagaaggatatttttatgatagttttaatctaaataaaatatttgaatatataattaatccaataaaaaataatggtgagtacattattacgggtatatatgattataaaattgaaaaggaagtaatccccgaaaaaataaaaatagaaaatgatttaataatattatttgacggaatatttatgaacagggacgaattatataatatatgggatatttcaatatttttagatatagattttaagacagtattaaaacgtgcagtaattagggatatagaatattttaaaacaatagatattttaaatgaaaaatataaaaaaagatatatacccggcgaaaagatatatttacgattatgtaaaccaaaggaaagggcaacgatagtaataaataataatgattataataaacctaaaataataaaaggaatactcgaaaacctaaaaatttgtaaataa

SEQ ID NO: 75508 - protein, 225 aa, Unknown
  Obtained from environmental sample
  DOMAIN (21)...(212): Phosphoribulokinase / Uridine kinase family
  misc_feature (1)..(225): Xaa is any amino acid
MKIDEIIAQYIIDYQKNKPIIIAFDGVDTSGKTTIANNVCRILKDNNKNAVRVSIDKFHNPKEIRLQKGELSPEGYFYDSFNLNKIFEYIINPIKNNGEYIITGIYDYKIEKEVIPEKIKIENDLIILFDGIFMNRDELYNIWDISIFLDIDFKTVLKRAVIRDIEYFKTIDILNEKYKKRYIPGEKIYLRLCKPKERATIVINNNDYNKPKIIKGILENLKICK

SEQ ID NO: 75509 - DNA, 564 bp, Unknown
  Obtained from environmental sample
  misc_feature (1)..(564): n is a, c, g, or t
ttgaacgggcgcgatgccgcacttttaccgatgtcatgcgcacactgggcggttgaacacggttttccgggactgttcatgattgcggtaaactcgcacagcttccaggaagaccccactctctggggcctggacgccatgctggaatttccgccgcacggcatgtggggacatggtcttctgccaaagcggatgcactgttttgtcaatccgcattttcacggccatgtatgggacggcgccgactatgtcgccgcacggcgctatctgtatgaaccgacatataaactgttcaagggcgtatgcccatcctgggacaatacgccgcgcaaggcatattccaacggttcggtagttgacggcataagcccggcgcactacaagcaatggcttgtggactgcataggctacacccgcgcccgtcacggcaaggacgaacaatttatctttatcaacgcatggaacgaatgggccgagggaacacatctggaacccgacagccgatacggctatgcctatctgcaagccacgtgcgacgcgctgtttgagggagagaagcaatga

SEQ ID NO: 75510 - protein, 187 aa, Unknown
  Obtained from environmental sample
  misc_feature (1)..(187): Xaa is any amino acid
MNGRDAALLPMSCAHWAVEHGFPGLFMIAVNSHSFQEDPTLWGLDAMLEFPPHGMWGHGLLPKRMHCFVNPHFHGHVWDGADYVAARRYLYEPTYKLFKGVCPSWDNTPRKAYSNGSVVDGISPAHYKQWLVDCIGYTRARHGKDEQFIFINAWNEWAEGTHLEPDSRYGYAYLQATCDALFEGEKQ

SEQ ID NO: 75511 - DNA, 702 bp, Unknown
  Obtained from environmental sample
  misc_feature (1)..(702): n is a, c, g, or t
atgaaacacatttttcggcgtaaatttttagagataaacgaaaaagcaacggaaaatgattttgaaaaagagttccgcaacatagttttggaattagggcaaggcgatttggggaaatcattttacaaacgcttgataggcgaggaaaatttgagcgataagaaagatttaaaaataactagaaatatattcggagattacattcacaaatattattacaataattccataagagacggctacacgcttaaattgcttcgcgaagaaatagaaaccagttataaggaaacattaagagacgtggaaaaagaattgaaagttaaacttggaactcttaataaaaaagaactttatgctcacgagaaatttgcagaaccaatgctgaattatattttggaagataaatttcaaggcgataaaaaatatgcccgtatatttaaatatattgagaaaagcggtgaaataagcaaaaacattcctctttacgaagttatgaaagcggctaaatcaagcattgacgagaaaattcttcttaacgaaaatatgctgggcaacgaaggatatttttcaaatttggttgaaagtgatattttggatagttttgagaattccaaatacaaaattgatactccttttgtaaaaaatttaagtgaagtaacgacaagggaatattttgaggaatatagggggagaagttggtaa

SEQ ID NO: 75512 - protein, 233 aa, Unknown
  Obtained from environmental sample
  misc_feature (1)..(233): Xaa is any amino acid
MKHIFRRKFLEINEKATENDFEKEFRNIVLELGQGDLGKSFYKRLIGEENLSDKKDLKITRNIFGDYIHKYYYNNSIRDGYTLKLLREEIETSYKETLRDVEKELKVKLGTLNKKELYAHEKFAEPMLNYILEDKFQGDKKYARIFKYIEKSGEISKNIPLYEVMKAAKSSIDEKILLNENMLGNEGYFSNLVESDILDSFENSKYKIDTPFVKNLSEVTTREYFEEYRGRSW

SEQ ID NO: 75513 - DNA, 768 bp, Unknown
  Obtained from environmental sample
  misc_feature (1)..(768): n is a, c, g, or t
ttgcattgctataatatgacatacgcaggaggtttaccgagagaacacagagaaaatctagaagtaatgataaagaaaaatataatccccgccgttgtcttgataggagtagatgaaattggttgttatggcgaccctgaattacgttaccatgaattaattcgtatgccatacccaattgacgctgttcagaatgatgcggcctattataattttctgatgaaatatattaaccctgctgttttgatatcaatgccaataataatttctcataaaggagatgatataaaatatagaaagtttttttatgaaaatggcggagtggaagtatcaaaaaaaactgattttaaagatatagttgcgaatacgctgtcatttgacaattatggaattgataatgttatagcggatattcagtcaatcattgatttgtgcaatagaaataatattgaattgctcctgtttactaatccgttacatatttcgatgtatcaacaggcggtagaaaatgggtacatagatttcttatcaagattatccgggatttcagactactataatttttccggaattaatgatattaccgtaaacaatgataattactatgacccatttcattataaagttgaagttggtaacctgataattgacgcgctattcaataacaaaacggaccaaaaacttttatctcanggatttggttattatgtgacaaatgaaaataaagacgaattcatcaacttattgttaaatcagcaaaatccgtaa

SEQ ID NO: 75514 - protein, 255 aa, Unknown
  Obtained from environmental sample
  misc_feature (1)..(255): Xaa is any amino acid
MHCYNMTYAGGLPREHRENLEVMIKKNIIPAVVLIGVDEIGCYGDPELRYHELIRMPYPIDAVQNDAAYYNFLMKYINPAVLISMPIIISHKGDDIKYRKFFYENGGVEVSKKTDFKDIVANTLSFDNYGIDNVIADIQSIIDLCNRNNIELLLFTNPLHISMYQQAVENGYIDFLSRLSGISDYYNFSGINDITVNNDNYYDPFHYKVEVGNLIIDALFNNKTDQKLLSXGFGYYVTNENKDEFINLLLNQQNP

SEQ ID NO: 75515 - DNA, 666 bp, Unknown
  Obtained from environmental sample
  misc_feature (1)..(666): n is a, c, g, or t
ttggctctttctctgggatttaaattcagccaagcaaataattatatccgtttaccgctctggctattgtattatttccggccttacgattccaaagacgttattgcgtataaattatcagattttgctttccgtcggatttccaaaaccaaattctgcaccatgatagcgcgttacgataccggaaataatctaagaactaagctatacacttgcgtttctcaagctggacatgtcgactgcggcggtaaactcttgcataacgacgacagcctttggcaaaaataccgcgataataaacacgcttatttacagcaatacaaattcaatatctgcccggaaaactccgccggtgacgggtatgtcacagaaaaactgtttgaagccttacacgccggctgtattcctatctatcacggttacaacaaaaatccggaaccgggcatcatcaatcccgccatactgctttggtttgaacctgccggcgacaatcaagatttgctaaaacaaattaagaccttaaattcatccgacgcaaaatataaagagttttggcggcagcctatttttttggacacagccgtggataaaatttattattatctgcattcttattgtgtaaaaatggaaaatttgatacaagaaattcagcagcaaaaattgtag

SEQ ID NO: 75516 - protein, 221 aa, Unknown
  Obtained from environmental sample
  misc_feature (1)..(221): Xaa is any amino acid
MALSLGFKFSQANNYIRLPLWLLYYFRPYDSKDVIAYKLSDFAFRRISKTKFCTMIARYDTGNNLRTKLYTCVSQAGHVDCGGKLLHNDDSLWQKYRDNKHAYLQQYKFNICPENSAGDGYVTEKLFEALHAGCIPIYHGYNKNPEPGIINPAILLWFEPAGDNQDLLKQIKTLNSSDAKYKEFWRQPIFLDTAVDKIYYYLHSYCVKMENLIQEIQQQKL

SEQ ID NO: 75517 - DNA, 435 bp, Unknown
  Obtained from environmental sample
  misc_feature (1)..(435): n is a, c, g, or t
atggtttgcggtaatggcggcagcgcagccgatgcccagcattttgccgcacaattgagcggccgctttgtcacggaaaggaagccgctggccggaatagccctgaccacagacacatccgcgctcaccgccatcggcaacgactatggctttgacaaactgttttcgcgccaagtggaggcccttggccgccccggtgacttgctcgtgggcatcagcacgagcgggaacagccaaaacgtcatcgaggccgtcaagacagccaaggggctggggatagggacgcttgggctattgggaagagacgggggcaagctgaaagggatgatggacgattgcctagtagtccccagtgacgtgaccgctcgcattcaagaagtccacattatggtcatccatttctggtgcgaaatattggacgacaagttcaaatga

SEQ ID NO: 75518 - protein, 144 aa, Unknown
  Obtained from environmental sample
  misc_feature (1)..(144): Xaa is any amino acid
MVCGNGGSAADAQHFAAQLSGRFVTERKPLAGIALTTDTSALTAIGNDYGFDKLFSRQVEALGRPGDLLVGISTSGNSQNVIEAVKTAKGLGIGTLGLLGRDGGKLKGMMDDCLVVPSDVTARIQEVHIMVIHFWCEILDDKFK

SEQ ID NO: 75519 - DNA, 690 bp, Unknown
  Obtained from environmental sample
  misc_feature (1)..(690): n is a, c, g, or t
gtgcaaagatgccgggtttataggattagcgctgatctgcttatggggacaccaaagcaaagcctaagccaggcactcgatgatgcacggcgctntgttggagccggggccaagcacctgagcgtctatatgctagacctagacaaagaatgtccgctcaaatcacaagttgaaaatggaactctcgaactgcccgacgatggccttgtcgcagacgcatacttggctctgtctgaatccctgacaaatctgggcctagcgcattatgaaataagcaattttgcttttccggggcgcgaatcggcgcacaactgccgctactggcaaaggctttcgtaccttggactcgggcccagcgccgccagcaacattggcaaaatcagatgggccgaatgtgaaagcccagcagagtggataaatggacaaaccgagcatgaagcaagcatcctgtcgccaaaggagtcgctggccgaagtgccaatgctgggcctgagaatgagccaaggtgtcaattgggaagaactgcgccgcagggcaaactctttgggccttgccgacctagctgatacttgggatagtgagctaaagccatttctggcatgcgggctgctgcaaaaaaatggcgacaatttgcgactgacggcgaaaggcatgcttctcagcaatcaagtgttgatggtttttgcgtga

SEQ ID NO: 75520 - protein, 229 aa, Unknown
  Obtained from environmental sample
  DOMAIN (107)...(219): HemN C-terminal region
  misc_feature (1)..(229): Xaa is any amino acid
MQRCRVYRISADLLMGTPKQSLSQALDDARRXVGAGAKHLSVYMLDLDKECPLKSQVENGTLELPDDGLVADAYLALSESLTNLGLAHYEISNFAFPGRESAHNCRYWQRLSYLGLGPSAASNIGKIRWAECESPAEWINGQTEHEASILSPKESLAEVPMLGLRMSQGVNWEELRRRANSLGLADLADTWDSELKPFLACGLLQKNGDNLRLTAKGMLLSNQVLMVFA

SEQ ID NO: 75521 - DNA, 741 bp, Unknown
  Obtained from environmental sample
  misc_feature (1)..(741): n is a, c, g, or t
gtgctgcacgatgggccttccctgcacgatgaattaagcgcggaaatggccncaatcctcaacttgacaatcgaagggcctgaatctaatggcctaaaggcggatgattcaaaccttgtcatcaaggcgtggcgtgtgctggaaagggaaacagccagacccctccccgcaaagctgtcacttcaaaagcgcatccccagcggcgcagggctgggcggaggttcatcggatgctgccgctgccctccgaactggcaacagactgtaccaactagacttgcccaattcaactctgctgcgcctagccgccgaacttggcagcgacgtgtccctgttcatcttgggcggcacggtgcttggcttagacttgggccaaagagtcttccccctaaatgacatcccgctgccaccgatgctcatagtctgccccggccttcacgtcagcacgccatcagtttataaggccctcacccaaaatgacatctcccaaaacgccccctgcccttcccttggcaaaagcgaggcccccccatggcacaacggcctcacagccgccgcgctgagagtctgccctgccctagcccaagtccgcgatgcccttgccagcgtggacggtgtccccttgctctgcggctcgggaagctcctgggccgccaagtttgcaagcgacgccgaaagagataatgcgctgcacaaactacgcaccctgcacccaaaatggagtttccatgcgccccgatag

SEQ ID NO: 75522 - protein, 246 aa, Unknown
  Obtained from environmental sample
  DOMAIN (58)...(116): GHMP kinases N terminal domain
  misc_feature (1)..(246): Xaa is any amino acid
MLHDGPSLHDELSAEMAXILNLTIEGPESNGLKADDSNLVIKAWRVLERETARPLPAKLSLQKRIPSGAGLGGGSSDAAAALRTGNRLYQLDLPNSTLLRLAAELGSDVSLFILGGTVLGLDLGQRVFPLNDIPLPPMLIVCPGLHVSTPSVYKALTQNDISQNAPCPSLGKSEAPPWHNGLTAAALRVCPALAQVRDALASVDGVPLLCGSGSSWAAKFASDAERDNALHKLRTLHPKWSFHAPR

SEQ ID NO: 75523 - DNA, 867 bp, Unknown
  Obtained from environmental sample
  misc_feature (1)..(867): n is a, c, g, or t
atggtagaccttaaagcacaaggtgaaattgggttaaagcttggcaactcaggagattattttggcgttatcaatattggtgacacaagcaacctcataaagcaatgcgataaaaaaggaatagttactgttcccgatgaattttctacacagtcccttttcagaaaaatcaatgaaaacgattcaaatataaatattctcattggttcccgaaaattcaccgaaggctggaactgctggcgtgtttctacaatggggttaataaactttgcaaaaggcgaaggctcacaggcaattcaattgttcggcagaggcgtccgtctccacggctatgaaggaagattgaaaagaagtgctaaggccgaaagcacgacgactacaccgcccgctgagttaccgtatcttgaaacccttacaatcttcggcattaaagcagattacatggcacggttcagggaataccttgaaatagaaggcttgccgccaaacacccaaaataacacctacaaattggcaactgtaaaccgatatgatcataagaagaagctcaaggttctgcgggtaaaagaaggtataaatttcaaaaaacaagctaaacgctttttgctcgatgtgcctgaagctcaaggcaaaaaaaatatgccgcatataagcattactcttgattgccgatcaaaagttcaaaacatattatccccttcagaatttaaatttgacagcgagagcatcatanagccaaatacaataccatatgagtacttaaaatatatcgactatgagtatatctattggcatttacngcaatacaaaatagagaaaaagtacttttacatttccatcgacaggaaattnttacgaaactgctag

SEQ ID NO: 75524 - protein, 288 aa, Unknown
  Obtained from environmental sample
  misc_feature (1)..(288): Xaa is any amino acid
MVDLKAQGEIGLKLGNSGDYFGVINIGDTSNLIKQCDKKGIVTVPDEFSTQSLFRKINENDSNINILIGSRKFTEGWNCWRVSTMGLINFAKGEGSQAIQLFGRGVRLHGYEGRLKRSAKAESTTTTPPAELPYLETLTIFGIKADYMARFREYLEIEGLPPNTQNNTYKLATVNRYDHKKKLKVLRVKEGINFKKQAKRFLLDVPEAQGKKNMPHISITLDCRSKVQNILSPSEFKFDSESIIXPNTIPYEYLKYIDYEYIYWHLXQYKIEKKYFYISIDRKXLRNC

SEQ ID NO: 75525 - DNA, 717 bp, Unknown
  Obtained from environmental sample
  misc_feature (1)..(717): n is a, c, g, or t
atgaatgattatgtgcaggtgattgtcggtgcgcctgccgaaaccgccggaacaggctggttcggcccgtccgttgaccggggccgggtaattgccgaaccgcgctggcccagcgcgcttgcggaggctcaggctctcagagcggacagccgtccgacccagcccgccgcgggcagtacggcaaatcctccggcatctgcagcgccggttcagccgttggcaaaatcaccggcagaaacgccggttcaaccgcaaccggttccgtcagcgactcagtcagcaactccggcggcaagtccatcagcagcccgaccggcgactccggcggcaactcctccgacaacaaccacgccagcggtaacaccatcggcgacgccgccgacagtaccggacgcgtcaaaaaatgccgcttcagaattgccggtatacactgaccccgcggaatatctggacaaggcaaaagaggaatttgcggcgggccgcgtagcctcggcaatttctttccttgaccggttttgcgaacatttcccttcgggaaccgatgaaacatggtggctctacggccaattttttgaagcaaacagccccagccggaacatccttaccgccctgaactgctaccgccgtttggtgcaggagtatccccagagcggccgctatgatgacgcccgtaaaagaattgcctacttgcagagatattacataaacattaattag

SEQ ID NO: 75526 - protein, 238 aa, Unknown
  Obtained from environmental sample
  misc_feature (1)..(238): Xaa is any amino acid
MNDYVQVIVGAPAETAGTGWFGPSVDRGRVIAEPRWPSALAEAQALRADSRPTQPAAGSTANPPASAAPVQPLAKSPAETPVQPQPVPSATQSATPAASPSAARPATPAATPPTTTTPAVTPSATPPTVPDASKNAASELPVYTDPAEYLDKAKEEFAAGRVASAISFLDRFCEHFPSGTDETWWLYGQFFEANSPSRNILTALNCYRRLVQEYPQSGRYDDARKRIAYLQRYYININ

SEQ ID NO: 75527 - DNA, 360 bp, Unknown
  Obtained from environmental sample
  misc_feature (1)..(360): n is a, c, g, or t
atggaagacacccgcatccagctcattgaggaaacggaaaaaacctgggccaactacaaatccgaaaaagaacgcgccggacacttcgcccgcgccgtggagcagggaacacaaacaaaagagatgtatgtcgaacagttcagcttgggccggcgcacactgctggacgttctggacacggaaaacgaagtctttacctcatcccagcagcagaccaattccagcatgaacgaaatagccaacatgtatcgtctgctggccctgggcggcgaattgaccttcggctttgacgtgaaacccggcgatctgcacattgataccgacacaagtctctggatctggaacaaacccgctttctag

SEQ ID NO: 75528 - protein, 119 aa, Unknown
  Obtained from environmental sample
  misc_feature (1)..(119): Xaa is any amino acid
MEDTRIQLIEETEKTWANYKSEKERAGHFARAVEQGTQTKEMYVEQFSLGRRTLLDVLDTENEVFTSSQQQTNSSMNEIANMYRLLALGGELTFGFDVKPGDLHIDTDTSLWIWNKPAF

SEQ ID NO: 75529 - DNA, 561 bp, Unknown
  Obtained from environmental sample
  misc_feature (1)..(561): n is a, c, g, or t
atgttagattcggacgaggtcgacgagccgtaccgcttccttgcctttgacggagcgcaggttcctcccgtgctgcctctgtatccctatgccgtgatcggcagctccttctccaaaaacctgagcatggcgggcgaacggcttggttatctggcgctttcccccggcatggaagggcgtgatcgccttatggccgccctgaccatgaccaaccgcatcctgggctttgtcaatccgcctgtggtggcgcagcacctgatggccgccgcgctcggttcgcaggtggacgtcgcggtgtatgaacgccgccgcaacgccatggccaaagtgctgacagacgcgggctaccgctttcagttgcctgccggcgcgttttattttttcccggaagcgccgggcggggatgatgtggcctttgtgcgccgcctggcccaggaactggtgttgggcgtacccggttcgggcttcggctgtcccggatacttccgtttggccttctgcgtggaggagaaggtgattcttcgtgccgccgagggtttggcccgcgccgcgcggggctga

SEQ ID NO: 75530 - protein, 186 aa, Unknown
  Obtained from environmental sample
  misc_feature (1)..(186): Xaa is any amino acid
MLDSDEVDEPYRFLAFDGAQVPPVLPLYPYAVIGSSFSKNLSMAGERLGYLALSPGMEGRDRLMAALTMTNRILGFVNPPVVAQHLMAAALGSQVDVAVYERRRNAMAKVLTDAGYRFQLPAGAFYFFPEAPGGDDVAFVRRLAQELVLGVPGSGFGCPGYFRLAFCVEEKVILRAAEGLARAARG

SEQ ID NO: 75531 - DNA, 336 bp, Unknown
  Obtained from environmental sample
  misc_feature (1)..(336): n is a, c, g, or t
atgacgctgaaagatatgtacaagaccctgcacaaggatgcctttcccgacaccctgactctggaactgggccatgaacgcctgtgctaccgcaagcgcgtgtggacgctggacggtgaggagaagggcttgcgctacggcgaanatccggatcagcccgcggccatgtacgagctggttgaaggcggcatttcctgcggcgatatcgcctggcgttcgcccgggcagggcatcgtgtccgccgtgcgcgaagcccagatgatccaggcgggcaagcatcccccgcagacaancctgacgacgtggataacggcgtncatattttgcagtacctga

SEQ ID NO: 75532 - protein, 111 aa, Unknown
  Obtained from environmental sample
  misc_feature (1)..(111): Xaa is any amino acid
MTLKDMYKTLHKDAFPDTLTLELGHERLCYRKRVWTLDGEEKGLRYGEXPDQPAAMYELVEGGISCGDIAWRSPGQGIVSAVREAQMIQAGKHPPQTXLTTWITAXIFCST

SEQ ID NO: 75533 - DNA, 552 bp, Unknown
  Obtained from environmental sample
  misc_feature (1)..(552): n is a, c, g, or t
ttgtttacccgaaatgaggtgctggatttcagcgaaaatacgcaccaatcaaacttaacatctatattggcgtactgggtgtacattgtgataggtttggactacgatacttttgcgcagagaggtggaacggaatggctgcgtaaggcagagcgcatagcgcaaaatgcgcaaggcgagagcatgtccgggtggggaataagtggagcaaaccgccgcaatcgctattggttggttgaaaatatgctgagtgcgaagtacacgcgcgaacgtatggcgtactaccgctatcatcgcttggggcttgatgtaatgggtgaaaatcctgctgaggcacgtaagcaggtaatgcaagccttgcaggatatgcaagctttgtataaggaaaagcctgataacacgatgtttttctacaccatttttttcgatgctaaggcagacgagattgtaaatattttttcggaggcaacaccgcaggaaaaaacggctgcctacgatattctttccgctattaataacatcaacgaccccaagtacaaaaagttgaagtag

SEQ ID NO: 75534 - protein, 183 aa, Unknown
  Obtained from environmental sample
  misc_feature (1)..(183): Xaa is any amino acid
MFTRNEVLDFSENTHQSNLTSILAYWVYIVIGLDYDTFAQRGGTEWLRKAERIAQNAQGESMSGWGISGANRRNRYWLVENMLSAKYTRERMAYYRYHRLGLDVMGENPAEARKQVMQALQDMQALYKEKPDNTMFFYTIFFDAKADEIVNIFSEATPQEKTAAYDILSAINNINDPKYKKLK

SEQ ID NO: 75535 - DNA, 309 bp, Unknown
  Obtained from environmental sample
  misc_feature (1)..(309): n is a, c, g, or t
atgaaagacgtactcaacgacacctttattgcgcaaaacggcaagcccgatgtcattattcttgacccgccacgcgccggcattcaccccgatgtggcgcaagccattttacgcgctgcaccgcagcgtatagtatatgtgagctgcaaccctgccacgcaagcgcgagacttgtcgctcatggctaaacagtacgccattaccgaagtgcagcctgttgatatgtttccgcatacgcaccatgtggaaaatgtggtggtgatggagttgaaaaaagtggagagtggagagttgagaattgctaactaa

SEQ ID NO: 75536 - protein, 102 aa, Unknown
  Obtained from environmental sample
  misc_feature (1)..(102): Xaa is any amino acid
MKDVLNDTFIAQNGKPDVIILDPPRAGIHPDVAQAILRAAPQRIVYVSCNPATQARDLSLMAKQYAITEVQPVDMFPHTHHVENVVVMELKKVESGELRIAN

SEQ ID NO: 75537 - DNA, 525 bp, Unknown
  Obtained from environmental sample
  misc_feature (1)..(525): n is a, c, g, or t
gtggtgagtatgctgaaggagttgggtattcccacgtttgtcatggtggtgcagcatggtgatttacctgcgcttaacgccacaggaaaagacgatattcagttcctgttttcagctaataagggcgttgcaccacaagatattgcgcgtgttgcctcaggtggcgaaatagcgaggcttatgcttgcgctcaaatcgttggtggcgtggacaggaaatctgcctaccattatttttgatgaaatagacacaggtgtatcaggtgaagtagctgaccgcatgggcgagattataagcgacttgggcaagtccattcaaatcgtcaacattacgcacctgccgcaaattgcaagcaaggggcaagcgcattttttggtgtacaaggaggaaactcctgttggcacagccacgcgcattaggcagctgtcggactcggaacgtgttaccgccattgccaaaatgctcagcggacaaacgcttactgaagctgccataaaaaacgcaaaggagctgctaaaaaggtaa

SEQ ID NO: 75538 - protein, 174 aa, Unknown
  Obtained from environmental sample
  misc_feature (1)..(174): Xaa is any amino acid
MVSMLKELGIPTFVMVVQHGDLPALNATGKDDIQFLFSANKGVAPQDIARVASGGEIARLMLALKSLVAWTGNLPTIIFDEIDTGVSGEVADRMGEIISDLGKSIQIVNITHLPQIASKGQAHFLVYKEETPVGTATRIRQLSDSERVTAIAKMLSGQTLTEAAIKNAKELLKR

SEQ ID NO: 75539 - DNA, 510 bp, Unknown
  Obtained from environmental sample
  misc_feature (1)..(510): n is a, c, g, or t
ttgattccgatgaacacagtatcacaatcgctaagggccatttgcctgctcgccatattttctgtgctaggcatggcccagccaacaccgccttctcgcccgaccaagccaaccctgccttcgtcgggcgtgctgggcatggtgctgcagccgtacgacacattcaaggaagaaacattaaaaggcacggtttccagcgtgtccgaactggtcagcggccccgaaaccttggtctgcctcacggtaatggttgacggcagagaatggcaattgacgctggccccgcccgcctttttgaaagaaaaggacgccagcttttccaaaaacgacgaaataaccatcaaagggtacaaaacccaaaacctgcgcggagccacaatccgcgccagagaagtgacaaagggcgaaacgaccctagtgcttttggacaaagacggcaagtccgcttgggtgcccaaacaggaaaaagaccccatcacagactccggccaaaaaccgttgctgagataa

SEQ ID NO: 75540 - protein, 169 aa, Unknown
  Obtained from environmental sample
  SIGNAL (1)...(26)
  misc_feature (1)..(169): Xaa is any amino acid
MIPMNTVSQSLRAICLLAIFSVLGMAQPTPPSRPTKPTLPSSGVLGMVLQPYDTFKEETLKGTVSSVSELVSGPETLVCLTVMVDGREWQLTLAPPAFLKEKDASFSKNDEITIKGYKTQNLRGATIRAREVTKGETTLVLLDKDGKSAWVPKQEKDPITDSGQKPLLR

SEQ ID NO: 75541 - DNA, 381 bp, Unknown
  Obtained from environmental sample
  misc_feature (1)..(381): n is a, c, g, or t
atgagaattgcgggcgctacttcgtttcccaatgttggttatgctatgaccgcctctggttccggcagaatgtccctgccggttacgcctgccaactatatctattcccaatttaagcatgtttccggcgtcattgccccggaagggactaacggcgtggctattaccaagctaaaaattcttgatgtgatgattgagcatctaagccagatgaaaaagcggcccgaccttaataccgaaaacctttccaacgaacagattgatgcccttatttccaaatatgaggggcagatcaaggctgccacggctgccaacaaagttatgccctatacccccgctccccaggtttttcccggtgccttgttcagcctatctgcttaa

SEQ ID NO: 75542 - protein, 126 aa, Unknown
  Obtained from environmental sample
  misc_feature (1)..(126): Xaa is any amino acid
MRIAGATSFPNVGYAMTASGSGRMSLPVTPANYIYSQFKHVSGVIAPEGTNGVAITKLKILDVMIEHLSQMKKRPDLNTENLSNEQIDALISKYEGQIKAATAANKVMPYTPAPQVFPGALFSLSA

SEQ ID NO: 75543 - DNA, 315 bp, Unknown
  Obtained from environmental sample
  misc_feature (1)..(315): n is a, c, g, or t
ttgcgtatgaaaaaactactacttttcctttgctgtgctgcctcctttctttgccgtgcgcagcaaaaaagcgaacggaaaaccgatgtcaacacccccttgcacctgttgcagcccgactacaaaatgccctacggcgtacccacgcagcaatcggtaaaagatgtgctggacagggtgtatgcgttccttgacaaagaaacgcccatgcagttggtggattcgcgtacgggcagcagcgttcagctttcggcaatggacgaaaacacgcgctgcagcagggtacgtttcgtctancctcgtgccgaattctga

SEQ ID NO: 75544 - protein, 104 aa, Unknown
  Obtained from environmental sample
  SIGNAL (1)...(20)
  misc_feature (1)..(104): Xaa is any amino acid
MRMKKLLLFLCCAASFLCRAQQKSERKTDVNTPLHLLQPDYKMPYGVPTQQSVKDVLDRVYAFLDKETPMQLVDSRTGSSVQLSAMDENTRCSRVRFVXPRAEF

SEQ ID NO: 75545 - DNA, 504 bp, Unknown
  Obtained from environmental sample
  misc_feature (1)..(504): n is a, c, g, or t
gtgctgaaaggtgcgcctgacggcatttttacgcgctacaatgttagcgtttcggagctgccgcctgttaaggtggagctgaaaaaggtaaaagaagcaggggctgtacgcgaggtaaaaatggggaggtcgaatgtggcggaaagtcctaaggacaacgattttgagcaggctgctgtgtggcaaattattttaccgaaagatgtaaatcccgaaagggatatttacttgcgctttccctatgcaggcgatgtggcgcgtgcctacttgggcgaccagctgctaaccgataacttctacaacggaaaagcgtttgagctggggctaaggcgtttcggcagcgatgtgtatcgcgacagcttaaccataaaaatactgccgctgtcaaaagacgcaccgatttacttgcctcaaagtgcgcagcccgattttggcatttcgcagagcgttgtcagcttgccaaaagtagaggtgtacgagttgcggcaggtaacgttgagataa

SEQ ID NO: 75546 - protein, 167 aa, Unknown
  Obtained from environmental sample
  misc_feature (1)..(167): Xaa is any amino acid
MLKGAPDGIFTRYNVSVSELPPVKVELKKVKEAGAVREVKMGRSNVAESPKDNDFEQAAVWQIILPKDVNPERDIYLRFPYAGDVARAYLGDQLLTDNFYNGKAFELGLRRFGSDVYRDSLTIKILPLSKDAPIYLPQSAQPDFGISQSVVSLPKVEVYELRQVTLR

SEQ ID NO: 75547 - DNA, 858 bp, Unknown
  Obtained from environmental sample
  misc_feature (1)..(858): n is a, c, g, or t
ttgcgcgaaggggtcgatcagcgtcacctggcagagcaggttcagccgctgcggatgcgattaagcgaactggaacagcgtctacgcgagcagcaagaagctgagcgtctgctggcagatttctgcaaacgtcagggcaagaattttgatatcgacgaactggaagccctgcatcaggaactggaagcacgcattgcctctctttccgatagcgtgtctaacgcccgtgaagagcgcatggcactgcgccaggagcaggaacagctgcagtctcgcattcagagtttgatgcagcgtgcgccggtttggctggcagcgcaaaacagtctcaaccagttgagcgaacagtgcggcgaagagtttacctccagccaggacgtcaccgaatatctgcaacagttgctggagcgtgagcgagaggcgattgttgaacgcgatgaagtgggcgcgcgcaaaaacgccgtcgatgaagagatcgaacgtttaagccagcctggcggctctgaagatcagcgtctgaacgcgctggcggagcgttttggtggtgtgctgctgtcagaaatttatgacgacgttagcctggaagatgcgccgtacttctcagcgctgtatggcccgtcacgccacgccatcgtggtgccagatctgtcacaggtaactgaacacctggaaggcttgaccgattgcccggaagatctctatctgatcgaaggagatccgcagtcattcgatgacagcgtgttcagcgttgatgagctggaaaaagcggtagntggtgaaaatcgccgatcgtcagtggcgttattcacgtttcccggaagtgccgctgttggtcgtgctgcgcggaaagccgtatga

SEQ ID NO: 75548 - protein, 285 aa, Unknown
  Obtained from environmental sample
  misc_feature (1)..(285): Xaa is any amino acid
MREGVDQRHLAEQVQPLRMRLSELEQRLREQQEAERLLADFCKRQGKNFDIDELEALHQELEARIASLSDSVSNAREERMALRQEQEQLQSRIQSLMQRAPVWLAAQNSLNQLSEQCGEEFTSSQDVTEYLQQLLEREREAIVERDEVGARKNAVDEEIERLSQPGGSEDQRLNALAERFGGVLLSEIYDDVSLEDAPYFSALYGPSRHAIVVPDLSQVTEHLEGLTDCPEDLYLIEGDPQSFDDSVFSVDELEKAVXGENRRSSVALFTFPGSAAVGRAARKAV

SEQ ID NO: 75549 - DNA, 933 bp, Unknown
  Obtained from environmental sample
  misc_feature (1)..(933): n is a, c, g, or t
atgggcgacaatgtggctttgtttaccgtggatccggcgctaccccagatagcggcggcgtatcgcaatgagagtatgattgcggacgaggtgctgccgagggtgccggtgggggtgcagaatttcaagtataggaagtgggcgctggaggacgggttcacggttccgaatacggttgtgggccgcacctcgagagtgaatcaggttgagttcgggttctcggacgcggacagttcctgcacggactacgggcttgaggagccggtgccgcagaacgacatcgacaacgcgcccgcgggctacaacccgcttgagcgggctgcggcgtccgcgatggatttgatactgctcgaccgcgagatacgcgcggcgaaccttgtgttcaacgcggacacatacgcggcggcgaacaaggaaacgctttccggttccgggcagttcagcgacccgtcgtccgaccctatcggcaagatactcgcggctctcgacaagtgcgttatgcgcccgaatgtcatggtgctcggcacggccgcttggactgcgttacgtcagcaccccaaggtggtaaaagccgcgcacgggaacgccggtgatagcggcgtcgccgctcgcgaggcggtgagagaacttttggagatacagaagctcgtggtcggccagggctgggtgaacgttgcgaaaaagggacagaaggccacggtggcgcgcgtttggggcaagcacattgcgctcatataccaggacgctctcgccgacacccgcggccgcgttacgttcgggttcacggcccagtggcgcgacagggaggtcgcgagtattcccgacccgaatatcggggctcgcggcggccaaaaggtccgtgttaccgagagcgtcagggagttagtaatcgccaacgatctggggtacttcatacagaacgcggtggcgtaa

SEQ ID NO: 75550 - protein, 310 aa, Unknown
  Obtained from environmental sample
  misc_feature (1)..(310): Xaa is any amino acid
MGDNVALFTVDPALPQIAAAYRNESMIADEVLPRVPVGVQNFKYRKWALEDGFTVPNTVVGRTSRVNQVEFGFSDADSSCTDYGLEEPVPQNDIDNAPAGYNPLERAAASAMDLILLDREIRAANLVFNADTYAAANKETLSGSGQFSDPSSDPIGKILAALDKCVMRPNVMVLGTAAWTALRQHPKVVKAAHGNAGDSGVAAREAVRELLEIQKLVVGQGWVNVAKKGQKATVARVWGKHIALIYQDALADTRGRVTFGFTAQWRDREVASIPDPNIGARGGQKVRVTESVRELVIANDLGYFIQNAVA

SEQ ID NO: 75551 - DNA, 867 bp, Unknown
  Obtained from environmental sample
  misc_feature (1)..(867): n is a, c, g, or t
ttgatggcgagatgcccacgaccaatgctaattgacgctattgcaaaaactactactccattcggaacaagtattagcggaacatggaaatatgatggcggcgtttacattggagatggtaaagtagttgctataccatataatgccaaacagcctatgcttattgacgctatagcgaaaactactactccatttggaagaatgtggaataaagaatatagatatgctggtggcgtttatattggtgatggtaaagcagtcgctattccgttaattaccgcagagataatatttattaattctatcgcaaaaactaatattcaatttgaattatataatgaatattataccggcgtttatattggaaatggtaaagttgttgctatttcaatgaatgccgcacagcctattctaattgacgctattgcgctaactacaactccatttggaaaaaatattagcggaatctctaattacctaagcggcgtttatattggtgatggtaaagtaattgctattccacatagtgccgaacaacccatgcttattgacgcaataacgaaaactactactctattcggaacaagtatcagcggatgtaataaatatcaaagtggcgtttatgttggagatggtaaagtagttgctataccatataatgccgaacagcctatgcttattgacactatagcgaaaactactctattgtttggaataagtgatagcggaactcataaatattgtggtggtgtttacatcggtgatggcaaaatagttgctattccgtattgtgccgcacagcctatgttaattgaccttggccctggctatccttcggtagaagatttgactattcagacaatatag

SEQ ID NO: 75552 - protein, 288 aa, Unknown
  Obtained from environmental sample
  misc_feature (1)..(288): Xaa is any amino acid
MMARCPRPMLIDAIAKTTTPFGTSISGTWKYDGGVYIGDGKVVAIPYNAKQPMLIDAIAKTTTPFGRMWNKEYRYAGGVYIGDGKAVAIPLITAEIIFINSIAKTNIQFELYNEYYTGVYIGNGKVVAISMNAAQPILIDAIALTTTPFGKNISGISNYLSGVYIGDGKVIAIPHSAEQPMLIDAITKTTTLFGTSISGCNKYQSGVYVGDGKVVAIPYNAEQPMLIDTIAKTTLLFGISDSGTHKYCGGVYIGDGKIVAIPYCAAQPMLIDLGPGYPSVEDLTIQTI

SEQ ID NO: 75553 - DNA, 792 bp, Unknown
  Obtained from environmental sample
  misc_feature (1)..(792): n is a, c, g, or t
atgactaaacaaacgaaaaagaaagcaataagcggcgaagacctcaaaaaaacaattgccgcttataatgcccggcgcaagaacaggcttgatgaagccgaaaacgaaacagaggaagagaagaaagacggcgttgaaaacaatgataacgacgttcttacaggcgttcctactgacgccgaaccgcagagcgcaaccgccgaggaacgggtgcagctagtgaaagatcgccgagaccgcagggacgaagaaggcgaccccaaagacccggaaaaagcaatgggagtcattgcccaacaggatgaagacatcaataccctgcttgacgttattgagcaacttcaggccgaatcagatgtcaagagtgctcaagatgctgatgaagaagaaaagaccgacgaggaaaacaacaaggatgaagacgaagatcctgacagcgggggcggcgcaaagcttaaaattcaagcagattctattgacgccgttgtgcgcgagcgcatcaagctcggacgcatcggcgaccggctcaatcttgacgggcttgaagatatgaagccaatggacgccaaaaaagccatcgttaaaaaggttattccgtccatgcggcttgacggcaaaggcaagacgtacatcaacgccgcgtttgatcttgccgtcaatcagcttggaagcaagtccaaagactgcaactatcaacggcggcagatgttaggacgcatggacaatgcggagtttgcttcgactggaaagacgggcgcggctagcgccagagaacgcatgatgaaagaataa

SEQ ID NO: 75554 - protein, 263 aa, Unknown
  Obtained from environmental sample
  misc_feature (1)..(263): Xaa is any amino acid
MTKQTKKKAISGEDLKKTIAAYNARRKNRLDEAENETEEEKKDGVENNDNDVLTGVPTDAEPQSATAEERVQLVKDRRDRRDEEGDPKDPEKAMGVIAQQDEDINTLLDVIEQLQAESDVKSAQDADEEEKTDEENNKDEDEDPDSGGGAKLKIQADSIDAVVRERIKLGRIGDRLNLDGLEDMKPMDAKKAIVKKVIPSMRLDGKGKTYINAAFDLAVNQLGSKSKDCNYQRRQMLGRMDNAEFASTGKTGAASARERMMKE

SEQ ID NO: 75555 - DNA, 654 bp, Unknown
  Obtained from environmental sample
  misc_feature (1)..(654): n is a, c, g, or t
gtggttgtggagactaagattttagcaacgattacttcaatgcaatctgaaaagttgagtggtattattgaagcagatgaaacatattttagagaatcacaaaaaggttcaagaacacttacaagaaaagcacgtagatgtggtaaatcaaaattgacttataaacaagtttgtgcgttctttggaatgacaccagaggaatatacgaaaactacgcgcaagagaggattatcaaacgaccaagtttgtgttctgacagcaatagacagaagtaaaaggatttttggaaaacccaaaggttatggaaaaatgaaaccttattgggtagagaacttaaaagatttgattgctaaaaaatcaactttaatcactgatggcgataaatcttatgcaaagattcgtaatgtaaaacataaaagattagtcaatggattatcaaacaataaaacttataatcttggcagaatgaactcattgcatacatctatgaaaggtttaatcaatggaactttcaaaggtgtttcaacaaaatatcttgataattatgtgaactatgtaaaagtattaaaacaagatacaaatgtatttgataccttaataactaatttgcatacaaccacaagagaatcattaaaaacaaaagttgctttttaa

SEQ ID NO: 75556 - protein, 217 aa, Unknown
  Obtained from environmental sample
  misc_feature (1)..(217): Xaa is any amino acid
MVVETKILATITSMQSEKLSGIIEADETYFRESQKGSRTLTRKARRCGKSKLTYKQVCAFFGMTPEEYTKTTRKRGLSNDQVCVLTAIDRSKRIFGKPKGYGKMKPYWVENLKDLIAKKSTLITDGDKSYAKIRNVKHKRLVNGLSNNKTYNLGRMNSLHTSMKGLINGTFKGVSTKYLDNYVNYVKVLKQDTNVFDTLITNLHTTTRESLKTKVAF

SEQ ID NO: 75557 - DNA, 774 bp, Unknown
  Obtained from environmental sample
  misc_feature (1)..(774): n is a, c, g, or t
ttgctgcgcgatgatattgtggatgtgctgcggtccttaaacaagctccggggactggagaaaatttccctgaccaccaacggcctctttttgccgcgcctcttggaggaagttgccccggaagagctgggcggattgaacattagcttaaatagccatgactccgcggcctaccaggccataaccagaacgggccgcctggaagacgccctggccgggttgcgtgcggccctggaccggggattttcgaacatcaaaatcaactgcgtggccattgcggcgcttaacgacagcgcgattgaggaggtcgccctctgggccagggaccaggatatcgctgtccgcttcattgaatccatgcccgtgggcctggggaagggctatgcgccgatccggcaggaacaaatcgccgcccgcctggaggaacgtttcggccacctcacgccttgccccggccacttcggccctggcccggccgtctattaccgcctgcccgggttccgggggaaaatcgggttcatcagcgccgtgagccgccggttttgcgagagctgcaaccgggtgcgggtgaccgcatccgggtatcttaaaacctgcctgcattttcgccacgggttggatttggggccgcttctggagccggatgtcccggaggccgctttgatagatggaattaagcgggccatcctgggaaagccatccggacacggtttttcctctacccttggtgaatacgaggaggaaaccgggttgatgtccagtattggaggatga

SEQ ID NO: 75558 - protein, 257 aa, Unknown
  Obtained from environmental sample
  DOMAIN (112)...(238): Molybdenum Cofactor Synthesis C
  misc_feature (1)..(257): Xaa is any amino acid
MLRDDIVDVLRSLNKLRGLEKISLTTNGLFLPRLLEEVAPEELGGLNISLNSHDSAAYQAITRTGRLEDALAGLRAALDRGFSNIKINCVAIAALNDSAIEEVALWARDQDIAVRFIESMPVGLGKGYAPIRQEQIAARLEERFGHLTPCPGHFGPGPAVYYRLPGFRGKIGFISAVSRRFCESCNRVRVTASGYLKTCLHFRHGLDLGPLLEPDVPEAALIDGIKRAILGKPSGHGFSSTLGEYEEETGLMSSIGG

SEQ ID NO: 75559 - DNA, 633 bp, Unknown
  Obtained from environmental sample
  misc_feature (1)..(633): n is a, c, g, or t
atgatgaatgtagtatctgaaatagtgttgctcccagtgtcggccataaagccctatcaccgtaacgctcgctatgatgacggtacagttgataggttatgtatacttatacccaagataggctttaacgtgcctattgttcttgaccgtaaaaatgtaatagtcaaaggacataggcgttgggcagcggctatccgtttaggcatagagaaagtgccttgcgtatattcggacgctgacgaggagattttaaagctcgaccgtatagccgataataaagtacaagagtatagcaaatgggacactgaaatcttgatgagcgagttgacttctataaatcttgacttcgattttaagattttagacttcgacattgaaatccctgacgtggatatgccggagattaccctaaatcgtgccgaaaatagggctatagcgccggaatcgagcgaggacatattggagaccgccgcgcctaatataccgcaacaggcgcaaccggaggccgctatttcggataaaccttttattacgccggaggacgttcaaaagacgctgccgatttctatgaatcaatatgaggaggtagtctgtaataaatgcggtaatagaatgttcatcangagggcgtaa

SEQ ID NO: 75560 - protein, 210 aa, Unknown
  Obtained from environmental sample
  DOMAIN (9)...(93): ParB-like nuclease domain
  misc_feature (1)..(210): Xaa is any amino acid
MMNVVSEIVLLPVSAIKPYHRNARYDDGTVDRLCILIPKIGFNVPIVLDRKNVIVKGHRRWAAAIRLGIEKVPCVYSDADEEILKLDRIADNKVQEYSKWDTEILMSELTSINLDFDFKILDFDIEIPDVDMPEITLNRAENRAIAPESSEDILETAAPNIPQQAQPEAAISDKPFITPEDVQKTLPISMNQYEEVVCNKCGNRMFIXRA

SEQ ID NO: 75561 - DNA, 411 bp, Unknown
  Obtained from environmental sample
  misc_feature (1)..(411): n is a, c, g, or t
gtgattgtcgcccaggacaccatcaagcgcatcgaggcaaaagcggcgtccctcgctgccaaaatagaagccgaccgccccaaagtcgtctttgccgagtccattgaagtagccaagaactccatacttatcggcgaactcgccaagctcatccgccaggccaccgggcgcgacatagggcaaaaccgcctgttcgatttcatgcgggacaacggctacctgcacaagcacggcagccaaaagaacatgccgacgcagcgcagcattgaagccggctggatggagatcaaggaaggcacacgcatcggcgcgggcggcgaatgccacatcaccaagacgaccaaaatcaccggcaaggggcagatttattttatcaacatgttttcgcatccatgtgaggagcggcagtga

SEQ ID NO: 75562 - protein, 136 aa, Unknown
  Obtained from environmental sample
  DOMAIN (5)...(136): Phage antirepressor protein
  misc_feature (1)..(136): Xaa is any amino acid
MIVAQDTIKRIEAKAASLAAKIEADRPKVVFAESIEVAKNSILIGELAKLIRQATGRDIGQNRLFDFMRDNGYLHKHGSQKNMPTQRSIEAGWMEIKEGTRIGAGGECHITKTTKITGKGQIYFINMFSHPCEERQ

SEQ ID NO: 75563 - DNA, 876 bp, Unknown
  Obtained from environmental sample
  misc_feature (1)..(876): n is a, c, g, or t
atggacaaaacgggcgatctaatgatcacaaacaacacgcttgatgtgaaaacgggcgtattgaaaactgttgtctttaacgccgccacaagcgagcaatggaacaacgcaatcaacgctatcaaaaacggcggaggcaataacaggagctacgtcatcaatgtaaacggcgaaattgacagtattggctatgactcctctaatccaaccttcggcaactttaccggcattaacgtaaccattatcggaaacaaccacaccataacccttacatcacaaggctcgctgctccgtatcggctcgaaccagtctgtcgtaattcgtaacattaactttgacggaaacaaggacaatggcactttcaccaataacgtatcgctgatttatataaacggcggcagcttaactatggagggcaactcctcggtatccaataataataataccaacgcccgcggcggcggagtttctgttaacctctcaagcgcaacttttaccatgttagacgggacaatatcgggtaatacaagcttaggtgtaggcggcggggtggatattacaaatggaactttcaacatgaaaggcggaacaatctcaggcaattctactaccattagccctggcggcgataactggggtggcggggtgtatttagtatacggaacattccgcatggaaacagggacaatttatggtagagataacctaagtctacaaaatacgtcacctaatggagcggcattttatcgttacagcggcactgccgaacgcggaacctttagcacctacggagacccaacaagcgggtggacaaaaacgggcgatctcagtaactcagcgaccacgatcaatggagaaacggcgctatgtccatag

SEQ ID NO: 75564 - protein, 291 aa, Unknown
  Obtained from environmental sample
  misc_feature (1)..(291): Xaa is any amino acid
MDKTGDLMITNNTLDVKTGVLKTVVFNAATSEQWNNAINAIKNGGGNNRSYVINVNGEIDSIGYDSSNPTFGNFTGINVTIIGNNHTITLTSQGSLLRIGSNQSVVIRNINFDGNKDNGTFTNNVSLIYINGGSLTMEGNSSVSNNNNTNARGGGVSVNLSSATFTMLDGTISGNTSLGVGGGVDITNGTFNMKGGTISGNSTTISPGGDNWGGGVYLVYGTFRMETGTIYGRDNLSLQNTSPNGAAFYRYSGTAERGTFSTYGDPTSGWTKTGDLSNSATTINGETALCP

SEQ ID NO: 75565 - DNA, 879 bp, Unknown
  Obtained from environmental sample
  misc_feature (1)..(879): n is a, c, g, or t
ttggaatttgagcgtctcctgggcgccaccggccccaccatgggccacgtggtccggaccagcgaccacaaggagcccaaggccatcgccttcctccagtgcgtcggttcccgagacataaaccgggccgacaacggctactgcagttccgtctgttgcatgtatgccatcaaggaagccatcatcgccaaggaacacgccaaatacgacctccaggtgaccatcttttacatggacatccggagtttcggcaaagacttcgagcgctattacgaaaaggccaaggccaagggcatccgtttcgtccgcagccgcatccacaccatgcagcccctggctgacggcgggttgcgcttccactacgtgaccgaccacggccgaagcaccaccgaggatttcgacatggccgtgctctcccacggcctgaccatcaccgccgataccgtgaaaatggcccaacagttcggcctggatatggaccagtataatttcgcgaaaacctccagcttcagcccggtggccctgtcccggcccggcatctacgcctgcggcgtcttcaccggccccaaggacatccccagctcggtcatggaggcttcggccgcggccgcggcggcctcttccaagctggcctcggcccggggcaccctggcccggaccgtcaccgtgccgccgccggtggatatcacgggcgaaccgccccgggtcggcgtcttcatctgccactgcggcatcaacatcgcttcggtcgtggacataaacaaggtggtggaattcgccaaaaccctgcctttcgtggaatacgccctcaacaccatgttcgcctgttcccaggacaaccaggaacagatggtcaagctgatcaggaataccgcttga

SEQ ID NO: 75566 - protein, 292 aa, Unknown
  Obtained from environmental sample
  misc_feature (1)..(292): Xaa is any amino acid
MEFERLLGATGPTMGHVVRTSDHKEPKAIAFLQCVGSRDINRADNGYCSSVCCMYAIKEAIIAKEHAKYDLQVTIFYMDIRSFGKDFERYYEKAKAKGIRFVRSRIHTMQPLADGGLRFHYVTDHGRSTTEDFDMAVLSHGLTITADTVKMAQQFGLDMDQYNFAKTSSFSPVALSRPGIYACGVFTGPKDIPSSVMEASAAAAAASSKLASARGTLARTVTVPPPVDITGEPPRVGVFICHCGINIASVVDINKVVEFAKTLPFVEYALNTMFACSQDNQEQMVKLIRNTA

SEQ ID NO: 75567 - DNA, 444 bp, Unknown
  Obtained from environmental sample
  misc_feature (1)..(444): n is a, c, g, or t
ttgcgccgtgctaaaaatcgaaacaaccatcaaccagcacatcgcatatctgcaaacagacacacaaagggccaatccaagtttcgtcagaggttacttgaaactcagtacgactatctccggcaagttgcatccggaggtggcagtacgaaaggcgcattgacatgcgcgtttctgaaagatctgctgcttccactccccgacacgcttgacgaacaacaagaaatcgtcgccatcctcgacgccattgaccgcaaaattgacctgcaccggcgcaaaaaggccgtgctggaagaacttttcaaatccatgctgcacaagctcatgagcggcgaaatccgggtggatgaacttgatttgtcggcgctgtcttccgatcattttgccggcaccgacaaaatgatcggaattgatttgactgttaagcattcggaggtcgcatga

SEQ ID NO: 75568 - protein, 147 aa, Unknown
  Obtained from environmental sample
  misc_feature (1)..(147): Xaa is any amino acid
MRRAKNRNNHQPAHRISANRHTKGQSKFRQRLLETQYDYLRQVASGGGSTKGALTCAFLKDLLLPLPDTLDEQQEIVAILDAIDRKIDLHRRKKAVLEELFKSMLHKLMSGEIRVDELDLSALSSDHFAGTDKMIGIDLTVKHSEVA

SEQ ID NO: 75569 - DNA, 834 bp, Unknown
  Obtained from environmental sample
  misc_feature (1)..(834): n is a, c, g, or t
ttgcgcctatccgggcaggaattgcaggccgaaagctacgccgtggcccggatgaacgccatcatccacgacatggaagtggaattcgccaggggcgacaccatgatcaaccccaaattccgcaacaacgacggtgccatccggcgcaacgacattgtggtggccaatcccatgtggaaccagcctgttgccgatgacatctacaaaaatgatccctttgaccgctttcgctccgccgggggcatcactgccggcaaggcggactggggctggctccagcatgctctggcttgcctgaacgaaaacggccgggcggcggtggtgctggataccggcgcggtcacgcgcggctccggctccaaaaacgaggacaaggagcgcaacatccgcaaatggttcgtggagcgggattatattgacggcgtcatcttgctgccggaaaaccttttttacaataccacggcggcaggggtcatcgtcgtgcttgccaaacgcaagcccgccgcccgcaagggcaagattgtcctgttcaacgccgcaaaacgctttaagaaaggcaaacccaagaactatctgccggaagaggacattcccgccattgccgccgcttttttgaggggcgagcctgtggaaggagaggtgacggtgatcacactggaacaggcggcggaagcggattacaacttgagcccgagccgttgggtggggcaaaacgatgaaaagacacgtcaatctattaatgtcttaatggcggcagctgaaaaacttcagatagaaagcgtacagctttgggatgangtgaaatccgtactctacaaattggaatcgcgataa

SEQ ID NO: 75570 - protein, 277 aa, Unknown
  Obtained from environmental sample
  DOMAIN (2)...(243): N-6 DNA Methylase
  misc_feature (1)..(277): Xaa is any amino acid
MRLSGQELQAESYAVARMNAIIHDMEVEFARGDTMINPKFRNNDGAIRRNDIVVANPMWNQPVADDIYKNDPFDRFRSAGGITAGKADWGWLQHALACLNENGRAAVVLDTGAVTRGSGSKNEDKERNIRKWFVERDYIDGVILLPENLFYNTTAAGVIVVLAKRKPAARKGKIVLFNAAKRFKKGKPKNYLPEEDIPAIAAAFLRGEPVEGEVTVITLEQAAEADYNLSPSRWVGQNDEKTRQSINVLMAAAEKLQIESVQLWDXVKSVLYKLESR

SEQ ID NO: 75571 - DNA, 726 bp, Unknown
  Obtained from environmental sample
  misc_feature (1)..(726): n is a, c, g, or t
ttgacgtgtcttttcatcgttttgccccacccaacggctcgggctcaagttgtaatccgcttccgccgcctgttccagtgtgatcaccgtcacctctccttccacaggctcgcccctcaaaaaagcggcggcaatggcgggaatgtcctcttccggcagatagttcttgggtttgcctttcttaaagcgttttgcggcgttgaacaggacaatcttgcccttgcgggcggcgggcttgcgtttggcaagcacgacgatgacccctgccgccgtggtattgtaaaaaaggttttccggcagcaagatgacgccgtcaatataatcccgctccacgaaccatttgcggatgttgcgctccttgtcctcgtttttggagccggagccgcgcgtgaccgcgccggtatccagcaccaccgccgcccggccgttttcgttcaggcaagccagagcatgctggagccagccccagtccgccttgccggcagtgatgcccccggcggagcgaaagcggtcaaagggatcatttttgtagatgtcatcggcaacaggctggttccacatgggattggccaccacaatgtcgttgcgccggatggcaccgtcgttgttgcggaatttggggttgatcatggtgtcgcccctggcgaattccacttccatgtcgtggatgatggcgttcatccgggccacggcgtagctttcggcctgcaattcctgcccggatag

SEQ ID NO: 75572 - protein, 241 aa, Unknown
  Obtained from environmental sample
  misc_feature (1)..(241): Xaa is any amino acid
MTCLFIVLPHPTARAQVVIRFRRLFQCDHRHLSFHRLAPQKSGGNGGNVLFRQIVLGFAFLKAFCGVEQDNLALAGGGLAFGKHDDDPCRRGIVKKVFRQQDDAVNIIPLHEPFADVALLVLVFGAGAARDRAGIQHHRRPAVFVQASQSMLEPAPVRLAGSDAPGGAKAVKGIIFVDVIGNRLVPHGIGHHNVVAPDGTVVVAEFGVDHGVAPGEFHFHVVDDGVHPGHGVAFGLQFLPG

SEQ ID NO: 75573 - DNA, 888 bp, Unknown
  Obtained from environmental sample
  misc_feature (1)..(888): n is a, c, g, or t
atgggagaattcaatatcttgccaatcgttgggcagaataaattgaatgaagtatatgttgttggcgtattgcatattgatttatttgaattgtcggaattacaagatatggcattgagtaatcggcagggatataaatcagatgatccgcgatatgaaaaagtaattttttatgtacgcaacacactattacctgaaattttgagaaaaagagatttatacgcagacttaacaaaagtgcaaaaaaaacaaaagactataaatcagcaaaaaataaatgaggatgaattaaagaaaagaatggatgaatttcgacaaaatgcaagcaaaattgcctctgaaagcattaataagataggggcaaatgccccacaggatgaaatacaacagattatttctgattctatgaatagcagtgcacccaatttaggtataaaatccattgtggattctcaaaagaaaaaaatattaattagccaaacatccgccgataaagcattggcagatattgtatatcaaatgttacttttcaacaatgttcccgaagaagatattttatacacaaactgtgatgatgaagtttgtagaattcccgaaggacattctgtttatggttatttacggaatttctttgttgaaagttattctaaccaaaaaatctttgttctttttattacaagtgaaaacacaaaaaaatcttggggtgcaataacagaagtcggtgcatcttggattacgcaaattgaccacaaaattttcaatattgctccgtttaaacccgaacaaccattggacgatcaatcccaatggcacacaactaatagggatgcggcaagtcaagaactttcaatgtcctcgtcaaatgcagatattttntgtcaaagatag

SEQ ID NO: 75574 - protein, 295 aa, Unknown
  Obtained from environmental sample
  misc_feature (1)..(295): Xaa is any amino acid
MGEFNILPIVGQNKLNEVYVVGVLHIDLFELSELQDMALSNRQGYKSDDPRYEKVIFYVRNTLLPEILRKRDLYADLTKVQKKQKTINQQKINEDELKKRMDEFRQNASKIASESINKIGANAPQDEIQQIISDSMNSSAPNLGIKSIVDSQKKKILISQTSADKALADIVYQMLLFNNVPEEDILYTNCDDEVCRIPEGHSVYGYLRNFFVESYSNQKIFVLFITSENTKKSWGAITEVGASWITQIDHKIFNIAPFKPEQPLDDQSQWHTTNRDAASQELSMSSSNADIXCQR

SEQ ID NO: 75575 - DNA, 849 bp, Unknown
  Obtained from environmental sample
  misc_feature (1)..(849): n is a, c, g, or t
gtgcttttcgcgctggccttaccgaccttggcgccctggctcgtagtgttcgggcacagcgtgtattggatgttgtggtcgtggtttgtgccttttcttatcaccctctggggctggcgtcaaatggccttggggcaagcgcgccaaaatatgctggccgtcatgtatgccgccctgtttttgagctttgttctcaagatgtccatgggttatgagtatataagcaccatcactttggccgcatcaacccctgttgtctattatggaatccgtgaccgctgggaaaatatcaagctgatcttccatatcgccctgaccggcctgatgtcagtgggtgcctttgtcgttgccttgctgcttcatgccgcttttctcatgacgacccaagccttgactttcactggcagcctgtcagtgatttactcaaaatttgcgagtcgttcctgggaagtctttgtcaacattgaagaaattaatcatgacgttataaaagcatctcttaccagcggaccatttggggttttatggaagtattttttcggagggccgcagccttgggagattttgatcattttctccaccgctgccatggttttatggtattatttgttgtcctcaagatatggtttggcaacctcgcgcaatgtttatgccttaaacctgacggcggcatatggccttcttgcgcctctttctcattttataataatgaaagggcatagttatatccactaccatatgaactatgtattgtggaatctgccgctgaatattttttgccttttaataatcatcaactgtataaccagccgcctcagcctcagtttatcgattagtttgaaatcctga

SEQ ID NO: 75576 - protein, 282 aa, Unknown
  Obtained from environmental sample
  misc_feature (1)..(282): Xaa is any amino acid
MLFALALPTLAPWLVVFGHSVYWMLWSWFVPFLITLWGWRQMALGQARQNMLAVMYAALFLSFVLKMSMGYEYISTITLAASTPVVYYGIRDRWENIKLIFHIALTGLMSVGAFVVALLLHAAFLMTTQALTFTGSLSVIYSKFASRSWEVFVNIEEINHDVIKASLTSGPFGVLWKYFFGGPQPWEILIIFSTAAMVLWYYLLSSRYGLATSRNVYALNLTAAYGLLAPLSHFIIMKGHSYIHYHMNYVLWNLPLNIFCLLIIINCITSRLSLSLSISLKS

SEQ ID NO: 75577 - DNA, 798 bp, Unknown
  Obtained from environmental sample
  misc_feature (1)..(798): n is a, c, g, or t
atggtgaaagcggtttttgacaaccttgacaaaaaagagccgaaaaatcactttactatcggaattcacgacgacgttacgggaacttcgctcgaatacgacgcgcatttcactacggaaggcaacgaaacataccgcgctattttctacggactcggttctgacggaacggtcggcgcaaacaaaaacacgattaaaatcatcgcggacgaaaccgacaaattcgcgcagggatattttgaatacgacagcaagaaagcgggaacgctcacttcttcgcatttgcgtttcggacctactcaaatccgtgcgccttatcttattacgaaagcgaattttatcgcctgtcataatttttccttccttcccaaatacgatatgctcaaaaacgctatggaaggcggaacgttccttttgacgagcgaatattcggctgacgaagtttgggcgaagattccgggaagagtgcaaaaacagattattgataagaaactcaaattttacgttatagacgcgattaaaatcgccgaaaaccttgggcttggcgcaagaatcaatacgattatgcaggttgcgttcttcaaaatttcgcaggtgatggaagaaagcaaagccattgagtcgattaaatacgcgattcanaagacctacggcaaaaaaggcgagaaagtcgtaaaaatgaacaacgacgcggttgacgcgggtcttacgcanattcacgaagttaaatattcgggcgttaccaacccgatagaagacatttcgggcgttccagcaagcgctcccgcgtttngttaa

SEQ ID NO: 75578 - protein, 265 aa, Unknown
  Obtained from environmental sample
  DOMAIN (53)...(237): Pyruvate ferredoxin/flavodoxin oxidoreductase
  misc_feature (1)..(265): Xaa is any amino acid
MVKAVFDNLDKKEPKNHFTIGIHDDVTGTSLEYDAHFTTEGNETYRAIFYGLGSDGTVGANKNTIKIIADETDKFAQGYFEYDSKKAGTLTSSHLRFGPTQIRAPYLITKANFIACHNFSFLPKYDMLKNAMEGGTFLLTSEYSADEVWAKIPGRVQKQIIDKKLKFYVIDAIKIAENLGLGARINTIMQVAFFKISQVMEESKAIESIKYAIXKTYGKKGEKVVKMNNDAVDAGLTXIHEVKYSGVTNPIEDISGVPASAPAFX

SEQ ID NO: 75579 - DNA, 852 bp, Unknown
  Obtained from environmental sample
  misc_feature (1)..(852): n is a, c, g, or t
ttggcggtcgagaagaacgccatccgcgacacgatttacaacgacaccgatttttccgcctacgccgaaaaaatcgaaagcgcctttagcgactggaggcggcgcgtggatggcaaactccgcgccataagcaaccagaccaagccgaaactcctcattgcggaaatcgccgggcaaatcctgaaagcctacgaaccggtcgcgcttgttgataaatatgatgtttacgaagtcctgctgtcgtattggaatgagatcatgtccgacgatgtatatgtactcgttcaggatggttatggggccgtgcgcgaggttgaagcgttgacccaagagtgcgtcaaaaagaaaaaggacgggacggaggcaagcaaaatcgtcgaaaagggctgggacggcaaacttgtgccgaaagcgctcgtcatagagatgttctttgcagcggagcaacgagcaattgacgatgtggaaaccctcattgcggcggcacaggcagaactagacgaaatgattgagaatgccgaggaggactctgttgtcggggcagtgacggagaagggcaaattaaacaaggcggcgttaaaagctctgatcgaagagatgcgcgctacggtcgtcactcctgaactcacggcactgcttgcgttatcaggcgcgccgttgccgaaaaagaaagaaatgtcggcttttattcgcgccaacccgctgtgcatagacgcagttacggacgacgggacgataagcgccgcaagcgtcaaaaagcgcatcgcggaaatccgggcgaccgccgatgtttccgatgaagacgcggaagactatgcagccttgacggcactactggaaaaacagagttga

SEQ ID NO: 75580 - protein, 283 aa, Unknown
  Obtained from environmental sample
  misc_feature (1)..(283): Xaa is any amino acid
MAVEKNAIRDTIYNDTDFSAYAEKIESAFSDWRRRVDGKLRAISNQTKPKLLIAEIAGQILKAYEPVALVDKYDVYEVLLSYWNEIMSDDVYVLVQDGYGAVREVEALTQECVKKKKDGTEASKIVEKGWDGKLVPKALVIEMFFAAEQRAIDDVETLIAAAQAELDEMIENAEEDSVVGAVTEKGKLNKAALKALIEEMRATVVTPELTALLALSGAPLPKKKEMSAFIRANPLCIDAVTDDGTISAASVKKRIAEIRATADVSDEDAEDYAALTALLEKQS

SEQ ID NO: 75581 - DNA, 834 bp, Unknown
  Obtained from environmental sample
  misc_feature (1)..(834): n is a, c, g, or t
ttgatggcgctggcggcccttggccttcttttggcggcagccgcttgcagcagcactggcggcgcgtttcctgccccgccacaggccgctttgcaggacgagctggacattgccatccgcgaagcgtcggactacctgaacgcccagcttcccaggggcagcaggctgctaatcctcaacatccagtcggactacccggccttgtcgcagtacgtcattgacgagcttgtggcgaacgcggtaaacgaccgcgtcttcaccgtggttgacaggcagcagctggacgcaatccgcgccgagctggacttcaacatgtctgccgaggtgagcgacgaatccgcccagagcatcgggcaaatgctaggcgcccagatcatcgtttccggcgcggtttcgcggcttggctcgctgcaccgccttcgcctccgcgcccttggcgtccagagcgcccggatagaaggccagttcaaccgcaacgtccccgaaagccccacgcttctggcattggcgggccagccgggcgctcagggccagtccggcggcaccggcacggcggagggaacgcccacggccggcggcactggaaccgcgcccggcacagcgcccgcgcccggcaccacggctggcaccggcacaggcgcgggaacggcaggcgctcaggcccagccgggcatttactccggcaccgccttctacccccttgcggacttaaacgacgcccttgactggctgccccttaacgcccagaacggcgggaactacgccatcgtgctgggaagcgatcaggccatctcccccgccgcccttagctacagcacaggcaggttacgataa

SEQ ID NO: 75582 - protein, 277 aa, Unknown
  Obtained from environmental sample
  SIGNAL (1)...(29)
  misc_feature (1)..(277): Xaa is any amino acid
MMALAALGLLLAAAACSSTGGAFPAPPQAALQDELDIAIREASDYLNAQLPRGSRLLILNIQSDYPALSQYVIDELVANAVNDRVFTVVDRQQLDAIRAELDFNMSAEVSDESAQSIGQMLGAQIIVSGAVSRLGSLHRLRLRALGVQSARIEGQFNRNVPESPTLLALAGQPGAQGQSGGTGTAEGTPTAGGTGTAPGTAPAPGTTAGTGTGAGTAGAQAQPGIYSGTAFYPLADLNDALDWLPLNAQNGGNYAIVLGSDQAISPAALSYSTGRLR

SEQ ID NO: 75583 - DNA, 336 bp, Unknown
  Obtained from environmental sample
  misc_feature (1)..(336): n is a, c, g, or t
atggaaagatttataaagggagatgtcgtcgtcattccttttccgttctctgacnttacaggtgcaaagaaccgtccagcttttgtagtaacagatttacccggcgatgatattatcctttgccagataaccagcgcagttagagctgatccattttcactgccacttaacaatacggatttcctgtccggttcccttcctgtagaaagttttatccgcccgaataagatttttacagccgataaaaaccttattttgtataaaagagggcatctttcagaagcaaaaatcacggaagttatcaatgcactcatctccctgttacaaaacggataa

SEQ ID NO: 75584 - protein, 111 aa, Unknown
  Obtained from environmental sample
  misc_feature (1)..(111): Xaa is any amino acid
MERFIKGDVVVIPFPFSDXTGAKNRPAFVVTDLPGDDIILCQITSAVRADPFSLPLNNTDFLSGSLPVESFIRPNKIFTADKNLILYKRGHLSEAKITEVINALISLLQNG

SEQ ID NO: 75585 - DNA, 786 bp, Unknown
  Obtained from environmental sample
  misc_feature (1)..(786): n is a, c, g, or t
gtgggcgatttgttcatcgccggcataggccccgggctctgggtctttctggttttttccctttactgctacttcgccgccggccgcatgagctcggtcaaggtgcggcccaggaacacctggagcgagcggggccgggagttcaagaaagccttgctggccttgggctttcccgtcctggtcctgggcgccatctattctgggctggccagccccaccgaggcttcggccctggccgtgctttatgccttgatcgtggaagtcttggtttaccgccacctaaaattcaaggacatctaccggatagccctgtccaccggcctggtcaccggggtggtcttcattctggtgggcggcggcgcggttttttcctgggtcatcggctacgccaagatccccaaccagattctgccgcccctcttgggggacgcccccggccccgtctatctcatggccgtcatttccctggcctatttcaccgcctgcatgttcgtggattccatcgtggccatcatgatcctgtcgcccatcttccacccggtggtcgtcgccaccggcctcgatccggtcctggtcggcgttctggtgaccatgcaggcggccatcggggcggtctccccccccttcggctgcaatattttcacggccatggccgttttccggcagtcctaccttgacgctgtccggcgggtgttcggctttttggccgcctatgtcttgtgcgtgttcctgataatcattttcccggagatctccctgttcctgcgggatttggccttccgttga

SEQ ID NO: 75586 - protein, 261 aa, Unknown
  Obtained from environmental sample
  DOMAIN (1)...(252): DctM-like transporters
  misc_feature (1)..(261): Xaa is any amino acid
MGDLFIAGIGPGLWVFLVFSLYCYFAAGRMSSVKVRPRNTWSERGREFKKALLALGFPVLVLGAIYSGLASPTEASALAVLYALIVEVLVYRHLKFKDIYRIALSTGLVTGVVFILVGGGAVFSWVIGYAKIPNQILPPLLGDAPGPVYLMAVISLAYFTACMFVDSIVAIMILSPIFHPVVVATGLDPVLVGVLVTMQAAIGAVSPPFGCNIFTAMAVFRQSYLDAVRRVFGFLAAYVLCVFLIIIFPEISLFLRDLAFR

SEQ ID NO: 75587 - DNA, 948 bp, Unknown
  Obtained from environmental sample
  misc_feature (1)..(948): n is a, c, g, or t
gtggactggtccagaatcaatcaagaggcacaagaaattgtagacaagcttggattcgttttcgatgttcgtacaatggtcgaaaacctaagcgctgcgcagaaacaattagtggaaatcgcaaaggttctttcggaagacgcaaaaatcattgttatggatgaacctacttcttctttgactgtctctgaaacagaaaaccttttaaatataatcaagaagctaaaagaaaaaggtattactacaatttacatttctcacaaattggaagaagtcttttcaatatccgatttttgtactgttatgcgtgacggcaggattatcgaaacaagaaaaacatccgattttacccaggcgcaaataatcgaacgcatggttgggcgaaccgttgatatggaattcccaaaaaggaattatcaaattggcgatgttgtgttggacgtaagggatatttccatgggcaagctggttaaaaatgtttcttttgttctgcaccgtggagaaatacttggtattgcaggtcttgtaggatccggaagaacagagctggctgaaaccttgtttggggtacatggaaatgccaaaggtgaactttttattaatggcaagaaagctaaaatccgcaatacatacgacggcaaaaagaagggaattggctttctgaccgaagaccgcaaggaaacaggcttggtattgatgtatgatattacaaggaatataagtgttaccaatttgtccaaaatactaaagggattgtttctttcgacaaagaaagaaacggagaaagtaacaaactatgtgaaggatcttaaaattaagactccttctgtaaaacagctattaatgaatctttcgggtgggaatcagcaaaaggtggtatttgccnaatggctcttttctgatgcggatattcttatccttgatgaaccaaccggggcattgatgtag

SEQ ID NO: 75588 - protein, 315 aa, Unknown
  Obtained from environmental sample
  DOMAIN (1)...(105): ABC transporter
  misc_feature (1)..(315): Xaa is any amino acid
MDWSRINQEAQEIVDKLGFVFDVRTMVENLSAAQKQLVEIAKVLSEDAKIIVMDEPTSSLTVSETENLLNIIKKLKEKGITTIYISHKLEEVFSISDFCTVMRDGRIIETRKTSDFTQAQIIERMVGRTVDMEFPKRNYQIGDVVLDVRDISMGKLVKNVSFVLHRGEILGIAGLVGSGRTELAETLFGVHGNAKGELFINGKKAKIRNTYDGKKKGIGFLTEDRKETGLVLMYDITRNISVTNLSKILKGLFLSTKKETEKVTNYVKDLKIKTPSVKQLLMNLSGGNQQKVVFAXWLFSDADILILDEPTGALM

SEQ ID NO: 75589 - DNA, 489 bp, Unknown
  Obtained from environmental sample
  misc_feature (1)..(489): n is a, c, g, or t
atggggaataggatttacccctatactactgtttattgtgtgncggtaattatgcagctcttattaacaaaaactatgtttggccggtatatgtattttctcggggcanatatgaatgcggcaaaaatggcaggtattaaaattgccaatgtacgtattctggcacacattttttgtggtgcttgcgccggtttggcgggagtacttatagtcagcagggtaaattccgcttcccccttacagggtgtcggctatgaactggaggctatggcaagcgttgcggtgggcggtactagccttgccgggggtacagggagcatacttaaaacagtgctgggcgtcttcgttatcggagtcctgcttacggcgctgaacatcctgggtgtaaagagtgatgcccagcttattgcccgtggaagtgtaattatatttgccgtaattttggattcctggaacaaaagggctgcgacaaaagaggcggcaaaatga

SEQ ID NO: 75590 - protein, 162 aa, Unknown
  Obtained from environmental sample
  misc_feature (1)..(162): Xaa is any amino acid
MGNRIYPYTTVYCVXVIMQLLLTKTMFGRYMYFLGAXMNAAKMAGIKIANVRILAHIFCGACAGLAGVLIVSRVNSASPLQGVGYELEAMASVAVGGTSLAGGTGSILKTVLGVFVIGVLLTALNILGVKSDAQLIARGSVIIFAVILDSWNKRAATKEAAK

SEQ ID NO: 75591 - DNA, 945 bp, Unknown
  Obtained from environmental sample
  misc_feature (1)..(945): n is a, c, g, or t
ttggaaaatgagcaaataaataaacaaatattattactgacgccggataaggctaatcctcttgtattaacggcggcaaatctgcttttaattgaaagaaatattattgacagaattgaaaaaatatttcccgcaactcatgcgttattacaaacaaaaaattgggaaacaatgccccacgcgttttaccataatatattccaacaaaaaggttatttcggctattttaagagggggaaaaaacttgataatagttttgaaattgtaaatgaagttaacaaagaactgtatgagcgcggctgggcgcaggaaatagcgtggcgaattgacagtgaacatcaactgcggctggcgaaagacagcagccggaaagtgaaactgcaatcggaaattgatgaatttactccgtattcagtcaataaagaaaattttgaagaagcgcgtaatataataaccgccttgaattttccgtctattcttgaatctttaagacgcggaataagaggcaaaaagccaaaagaaccttccacaatatcggatggtttttataaggatgatttgagagaaagaaacacgatccttacctttcagcatcgtatgcatcctgatatttcaacatttccccgtgaacgttattacgattcaaacgcgttattggatttggaaaaacccaggcatattctggatacaagacaatgggattatatatataacagacgcagtatgtgggttgatgtaagaagcccgacaaaaggcagcagaaacatctatgaagtagaagcgctcatgcggcatcttaaggattttcttgaatacgccgttaaaaatccccagccggaaggaaaagactggaatgtcgcgtgtcttgcgttttatcgcggtcaggaacagttaattcgggaanggcgtgataantatatggngaaaagaaaatataaaatttga

SEQ ID NO: 75592 - protein, 314 aa, Unknown
  Obtained from environmental sample
  misc_feature (1)..(314): Xaa is any amino acid
MENEQINKQILLLTPDKANPLVLTAANLLLIERNIIDRIEKIFPATHALLQTKNWETMPHAFYHNIFQQKGYFGYFKRGKKLDNSFEIVNEVNKELYERGWAQEIAWRIDSEHQLRLAKDSSRKVKLQSEIDEFTPYSVNKENFEEARNIITALNFPSILESLRRGIRGKKPKEPSTISDGFYKDDLRERNTILTFQHRMHPDISTFPRERYYDSNALLDLEKPRHILDTRQWDYIYNRRSMWVDVRSPTKGSRNIYEVEALMRHLKDFLEYAVKNPQPEGKDWNVACLAFYRGQEQLIREXRDXYMXKRKYKI

SEQ ID NO: 75593 - DNA, 567 bp, Unknown
  Obtained from environmental sample
  misc_feature (1)..(567): n is a, c, g, or t
gtgcgccggcattgtgaaactggccatgtcgcgcgcgttcgaaacgggggtcgcgcccgccggatacgaacgcgtcgaaatcgccttcgccgggctgaaaggcgggcattccggcgtcgacatagtggggagaaaaagcgcgttcgattttctggttcagacgattcgcgccgtttgcgggaaatgcggcgccttggtcgccggggtcgagtgcggctccaaagccaacgcaatcgcccgcgactttcggttgtcggttttcgcgaaggagggggccgtgtccgaaatcggcgcgctcgtcgccgaactggaaaaagaattcaacggcgaattgaaatcggagcgcgtgcaattgctttcggccgccgcgccgggcgcgacggactgcctgtccgcgaaggccacggattttttggccgatttgctcggcgcgctgcccaacgggatgcagacgatgttggaggggcagggtatcgccgaaagctcgctgaacatcgggcggacgtttttggacgacggaaaactgaaactggacataacggtgcggagccgcgtcaaaccgcttga

SEQ ID NO: 75594 - protein, 188 aa, Unknown
  Obtained from environmental sample
  misc_feature (1)..(188): Xaa is any amino acid
MRRHCETGHVARVRNGGRARRIRTRRNRLRRAERRAFRRRHSGEKKRVRFSGSDDSRRLREMRRLGRRGRVRLQSQRNRPRLSVVGFREGGGRVRNRRARRRTGKRIQRRIEIGARAIAFGRRAGRDGLPVREGHGFFGRFARRAAQRDADDVGGAGYRRKLAEHRADVFGRRKTETGHNGAEPRQTA

SEQ ID NO: 75595 - DNA, 546 bp, Unknown
  Obtained from environmental sample
  misc_feature (1)..(546): n is a, c, g, or t
atgcgcagatacgtcgcggcgcagagccgggccagctcgtccccgacgggtgaaaacgcgggcgaaaccgcctcgacatcgaaagacaaatcgaacgtccgcgcgatgttcctcaatttatccatcatcgaatcttcaagcggtttgacgcggctccgcaccgttatgtccagtttcagttttccgtcgtccaaaaacgtccgcccgatgttcagcgagctttcggcgataccctgcccctccaacatcgtctgcatcccgttgggcagcgcgccgagcaaatcggccaaaaaatccgtggccttcgcggacaggcagtccgtcgcgcccggcgcggcggccgaaagcaattgcacgcgctccgatttcaattcgccgttgaattctttttccagttcggcgacgagcgcgccgatttcggacacggccccctccttcgcgaaaaccgacaaccgaaagtcgcgggcgattgcgttggctttggagccgcactcgaccccggcgaccaaggcgccgcatttcccgcaaacggcgcgaatcgtctga

SEQ ID NO: 75596 - protein, 181 aa, Unknown
  Obtained from environmental sample
  misc_feature (1)..(181): Xaa is any amino acid
MRRYVAAQSRASSSPTGENAGETASTSKDKSNVRAMFLNLSIIESSSGLTRLRTVMSSFSFPSSKNVRPMFSELSAIPCPSNIVCIPLGSAPSKSAKKSVAFADRQSVAPGAAAESNCTRSDFNSPLNSFSSSATSAPISDTAPSFAKTDNRKSRAIALALEPHSTPATKAPHFPQTARIV

SEQ ID NO: 75597 - DNA, 834 bp, Unknown
  Obtained from environmental sample
  misc_feature (1)..(834): n is a, c, g, or t
ttgcgcgcggaatcgctggacgatttcggcggcgcgcatccggagccgaacccggcctacgcgcccgagatttacgaattcatgatgtcgggcggcgcggacttcgcggcggcggcggacggcgacggcgaccgcgatatggtcttgggaaacggcatcttcatttcgccgccggacgcgctcgcgctcatgacgcggcaccataaattaatcccgtattacagggaccggctgacgggcgtggtgcggtcgcggccgacatcgggcgcggtcgacttggtcgcggaaaaaatgggactggcgcatttcgcgacgccgacggggtggaaatatttcgtgtcgctgatggacgcgggcctcgcgcaattgtgcggcgaggaaagtttcggtcagggcggcgattacatccgcgaaaaggacgccattttcgcggtgttgtattggctgaatataatggcggcgacggggcggtcggcgggcgaattgctgcatgacatgtggaacgaattcggccgcgtgttttatacgcagttcagctatgagggcgtcgacgccgatttggccgccgcgctcgtcgaacgtgtgcgcggaacgaattacgtcggacaattcggaatcgtttcgcaggaagacttttcatacaccgacccggcgaccggcgaaacggcgcataataagggcctggaattcaagacaaaggacggccggtttttctttcggctttccggcacgggcacgcacggcgcgacgttgcggttttatgccgagaaacacgaaacggacccgaaaaaattcgacacgccgtcgcgcgaatatttggcgtcgttcctttga

SEQ ID NO: 75598 - protein, 277 aa, Unknown
  Obtained from environmental sample
  DOMAIN (187)...(277): Phosphoglucomutase/phosphomannomutase, C-terminal domain
  misc_feature (1)..(277): Xaa is any amino acid
MRAESLDDFGGAHPEPNPAYAPEIYEFMMSGGADFAAAADGDGDRDMVLGNGIFISPPDALALMTRHHKLIPYYRDRLTGVVRSRPTSGAVDLVAEKMGLAHFATPTGWKYFVSLMDAGLAQLCGEESFGQGGDYIREKDAIFAVLYWLNIMAATGRSAGELLHDMWNEFGRVFYTQFSYEGVDADLAAALVERVRGTNYVGQFGIVSQEDFSYTDPATGETAHNKGLEFKTKDGRFFFRLSGTGTHGATLRFYAEKHETDPKKFDTPSREYLASFL

SEQ ID NO: 75599 - DNA, 957 bp, Unknown
  Obtained from environmental sample
  misc_feature (1)..(957): n is a, c, g, or t
gtggaaatagacggctgtgatatatcaagagccagcctgcacaacgtgtcctttatcaaagatatggaactcatgccggngtgtagaatcctgtngagcaagcggaacatgattatcccccatgtggaggcaaaccttgactgtggccgcttcaagatgagcagcatcattcccgctaagtgcccctattgcggaaaatccacacgggtacaggaaagcaataagactcaggtactccgttgcgataatccgggttgtactatgcagatcctccgcaagttcgttcatttcgcggataaaaaatctatggacatagagggtttatcagaaggcacgctggataagtttattgcaaaaggctggcttcgcagattgactgacatctaccggctggacgaacacgccgaggagatcgtcaaaatggaaggattcggcgaaaagtcttggaggaggctatgggactccatccaaaggagccgtaacaccacatttgagcgttttgtggttgcggtggatattcccatggtagggaaaacagccagccgggaactatgccgccagtttaaagggagcctgaaatcttttgaaagcgcggtgtaccggggctttgacttcactcagttaaacgattttggagaggttctgcaccgtaatattcacgaatggtttttagtaaaagaaaatcaatatttatggaaggagttacagacaatgaccgctatcaaaaagactggaaaagttgccgcctcggggaataaaagcaatccctttgccgggcgcatcatcgtggttacgggtaaactcgaacactttacccgtgactctatcaattccgcgattgaatccgtgggaggcaccgcagggagttcggtatcaggtaataccgatttcctcatttgcggtgagaaagcaggaagcaaactcgacaaagcgcgggccttaggcgtccggatctga

SEQ ID NO: 75600 - protein, 318 aa, Unknown
  Obtained from environmental sample
  DOMAIN (252)...(318): BRCA1 C Terminus (BRCT) domain
  misc_feature (1)..(318): Xaa is any amino acid
MEIDGCDISRASLHNVSFIKDMELMPXCRILXSKRNMIIPHVEANLDCGRFKMSSIIPAKCPYCGKSTRVQESNKTQVLRCDNPGCTMQILRKFVHFADKKSMDIEGLSEGTLDKFIAKGWLRRLTDIYRLDEHAEEIVKMEGFGEKSWRRLWDSIQRSRNTTFERFVVAVDIPMVGKTASRELCRQFKGSLKSFESAVYRGFDFTQLNDFGEVLHRNIHEWFLVKENQYLWKELQTMTAIKKTGKVAASGNKSNPFAGRIIVVTGKLEHFTRDSINSAIESVGGTAGSSVSGNTDFLICGEKAGSKLDKARALGVRI

SEQ ID NO: 75601 - DNA, 738 bp, Unknown
  Obtained from environmental sample
  misc_feature (1)..(738): n is a, c, g, or t
atgtatttattaaccaacgcacttaaaaaccttgtgcgaaacaaggggcgaaacatactggttgccgccgttatgttggcaatcattgtttctacggtagtgacgctgaccatcaataatgccgccgctaaaatcattgacggtattaggctggatcttggctcgagggttgagattaggcaggattttattgagatgcgtcagatcggtctgggcagagaggatgcaagttatatatccattgacgcctttttttctttcgccgaatcgaattatcttagcaaagccatattcggcgcaaatatgtatgcctggagcgacacattccgcgcggttgatgattacggtgaacgtcccggccaggttacgcgcgtcaatgacgacggcgaaagggtatttgtggaaacctgcaaactggttaccacctcagacccggaaacgctggccgatttcggaacactgcgcaggattacatccggcaggttgttcagcaatctaaacgaatgtatcgtcagcgaggacatcgcggagcttaataatatttctcttggcgacaccatcgaaactcagggcacatatgcagcagataaaaattacaatctgactgtggtcggcatttactctgacagtaccgaggaatacgtgaatttctttttggcgatgaacggacgattcgccgacnaccggcgaaacgagattattaccggcttgacacccttatggctgccngttgggtag

SEQ ID NO: 75602 - protein, 245 aa, Unknown
  Obtained from environmental sample
  misc_feature (1)..(245): Xaa is any amino acid
MYLLTNALKNLVRNKGRNILVAAVMLAIIVSTVVTLTINNAAAKIIDGIRLDLGSRVEIRQDFIEMRQIGLGREDASYISIDAFFSFAESNYLSKAIFGANMYAWSDTFRAVDDYGERPGQVTRVNDDGERVFVETCKLVTTSDPETLADFGTLRRITSGRLFSNLNECIVSEDIAELNNISLGDTIETQGTYAADKNYNLTVVGIYSDSTEEYVNFFLAMNGRFADXRRNEIITGLTPLWLPVG

SEQ ID NO: 75603 - DNA, 672 bp, Unknown
  Obtained from environmental sample
  misc_feature (1)..(672): n is a, c, g, or t
atggcccgtgttgcgactacgcctccccaagggactgaaggccacgcctctgggagtgtatgccaatgcctcgcacagccacaagaccctggccagggacgtagccgacatggggctttcgggcctggaatgggcagctggcatccctggcactctgggcggcgccctgcgcatgaacgcgggggcgtttggctccaactggggcatggtgctggaccgcgtccggtttgtgtcgcccgacggcgaaatcatcgaaaaagcacccgaagagggcgatttcgcctacaggtcgagctttcttgtaggcggccgcgtggccctgggcgcggcgataaggctggcaaccggcgacgccgcctccatcaaaaggaccatggcgaagcatcaggcggacaggcgcgggacccagcccaccgggcgcagcgcggggtgcgtgttcaagaacccccctgggcacagcgcggggcagttgatagacagcgctgggctaaagggcgcacggataggcggggtggccgtgagcgaactgcacgcaaacttcttcctgaacctgggaagcggcagcccaagcgatttcatggagctagtccggcttgtcggcgcccaggtcttcgaggcgcatggcataaagctggaactggaagtgaagtgtgggggattagcggccgctag

SEQ ID NO: 75604 - protein, 223 aa, Unknown
  Obtained from environmental sample
  misc_feature (1)..(223): Xaa is any amino acid
MARVATTPPQGTEGHASGSVCQCLAQPQDPGQGRSRHGAFGPGMGSWHPWHSGRRPAHERGGVWLQLGHGAGPRPVCVARRRNHRKSTRRGRFRLQVELSCRRPRGPGRGDKAGNRRRRLHQKDHGEASGGQARDPAHRAQRGVRVQEPPWAQRGAVDRQRWAKGRTDRRGGRERTARKLLPEPGKRQPKRFHGASPACRRPGLRGAWHKAGTGSEVWGISGR

SEQ ID NO: 75605 - DNA, 915 bp, Unknown
  Obtained from environmental sample
  misc_feature (1)..(915): n is a, c, g, or t
atggcgaggcgaaacggcggcggcgcgtttctgttgatttattttgcatttgtaatggtcatcggaattccggtggtgctctcggagtttgtgatcgggcggcgcgggcagggtaataccttcgggtcgttcaagcggttgtcgccgaaatcgcattggtacttaatcggactaatgggaatttttgcgtcgtttattattctctcgttctacagcaccattgcgggctggacgctggaatatatattgctcgccgtgaaagatattttttctccggcggcggcaacgcaagacccggcccgggttttcaacgattttcatacgcaaacgattgcgccgctgatcgggcaactggtgtttatgctgatgacggcattcatcattgttttcggcgtgcaaaaaggcatcgagaaatattccaagattttgatgccggcgctttttgtcattttggtggcgctttccgcaaaagcggtcagcctccccggtgcggctgcggggttgcagttcctgtttaatcccgacttctcaaagataaattccggcgtggtgctgagtgcgctggggcaagcagcgttttcgctgagcatcggcatgggcgcgctcatcacgtacggctcgtacatgaggaagagcgaccgcctgctgcaaacggcgttctccgtttcgataaccgacatgttcatcgccattttggcgggtgtggcgattttccccgcgctgttctcgttcggcatgagtcccgagcaggggccggggctggtgttcatcgtgcttcccgcgatatttcaacagatggttggcggcgcgtatttcgcattgttgttttttgtgctggtagccattgctgcgcttacgtctgccatctcgctgctcgaggtggttgtgggcctgttcgtagaagatttaagatga

SEQ ID NO: 75606 - protein, 304 aa, Unknown
  Obtained from environmental sample
  DOMAIN (4)...(304): Sodium:neurotransmitter symporter family
  misc_feature (1)..(304): Xaa is any amino acid
MARRNGGGAFLLIYFAFVMVIGIPVVLSEFVIGRRGQGNTFGSFKRLSPKSHWYLIGLMGIFASFIILSFYSTIAGWTLEYILLAVKDIFSPAAATQDPARVFNDFHTQTIAPLIGQLVFMLMTAFIIVFGVQKGIEKYSKILMPALFVILVALSAKAVSLPGAAAGLQFLFNPDFSKINSGVVLSALGQAAFSLSIGMGALITYGSYMRKSDRLLQTAFSVSITDMFIAILAGVAIFPALFSFGMSPEQGPGLVFIVLPAIFQQMVGGAYFALLFFVLVAIAALTSAISLLEVVVGLFVEDLR

SEQ ID NO: 75607 - DNA, 402 bp, Unknown
  Obtained from environmental sample
  misc_feature (1)..(402): n is a, c, g, or t
atgaaagtntggtatctggttgatttaccaggatatggttatgctaaagtatcgaaaaacatgcgcagagattttgacaaaacattattcaactatttaataaaccgcaaaaatctgtattgcgtatttgtacttattgattcgcgtatcgctcctcaaataaatgatattcaatttataaatagattaggcgaattgcatattccttttgttattgtatttacaaagaccgataaaacaacgcaaaagcaattgagcgacaatacaaaagcattcaagaaagagatacttaaaacctgggaagatttgccgcaatgctttttttcttcttctgtaacaaaacaagggcgagaggatattctaaactgtatcgataaaataaacgcagaaaacaaaaaataa

SEQ ID NO: 75608 - protein, 133 aa, Unknown
  Obtained from environmental sample
  misc_feature (1)..(133): Xaa is any amino acid
MKVWYLVDLPGYGYAKVSKNMRRDFDKTLFNYLINRKNLYCVFVLIDSRIAPQINDIQFINRLGELHIPFVIVFTKTDKTTQKQLSDNTKAFKKEILKTWEDLPQCFFSSSVTKQGREDILNCIDKINAENKK

SEQ ID NO: 75609 - DNA, 438 bp, Unknown
  Obtained from environmental sample
  misc_feature (1)..(438): n is a, c, g, or t
ttgatgtggcatgatgtcgaatatcaaccaggcgaaattaaagttatnggatatgataatgtcggtaaagttactgaagaaaaagttgtcaggacagccggcaaaccgtataaaatagaattgatagccgaccgcacacaaataaacgccgatggaaaagacctttcatatataacagtacgcatagttgataaagacggcaatctatgtcctaacgatgcaagtttggtaaccttttcgataaccggtgcaggtaaatatcgagcatcggcaaatggcgaccctacatgtctcgacctgtttcaccttccacaaatgcatgctttcagcggacagcttaccgcaatagcacaagcaggcgataaagcgggcgttttagtgttggaagcaaaggttaaaggtctgaaaagcggaaaaattagtataactgtaaaataa

SEQ ID NO: 75610 - protein, 145 aa, Unknown
  Obtained from environmental sample
  misc_feature (1)..(145): Xaa is any amino acid
MMWHDVEYQPGEIKVXGYDNVGKVTEEKVVRTAGKPYKIELIADRTQINADGKDLSYITVRIVDKDGNLCPNDASLVTFSITGAGKYRASANGDPTCLDLFHLPQMHAFSGQLTAIAQAGDKAGVLVLEAKVKGLKSGKISITVK

SEQ ID NO: 75611 - DNA, 402 bp, Unknown
  Obtained from environmental sample
  misc_feature (1)..(402): n is a, c, g, or t
ttgatggccgagggatgtataagcgatctcccaaatccaaataaaataaatgttttttataatcacaaattacaagaaggggctaaagtatatattggacatactggcagtttactagacgaaccttcgaaaaccataaaagctggtgatcatggcgttcctggtggcgaaaatatgatggtgttggacgatggaaatgtccgttattataccgtaagggaagctgctcgaatacaaacattccctgatgattatgtttttccttgttcttggactgaaagtatgcggcaaattggcaatgctgtacctgtaaagttagcggcaatagttgccgattctgttagaaggacattatattcttctaaacggagcggcaaaaagaatggagagaatcccctttaa

SEQ ID NO: 75612 - protein, 133 aa, Unknown
  Obtained from environmental sample
  misc_feature (1)..(133): Xaa is any amino acid
MMAEGCISDLPNPNKINVFYNHKLQEGAKVYIGHTGSLLDEPSKTIKAGDHGVPGGENMMVLDDGNVRYYTVREAARIQTFPDDYVFPCSWTESMRQIGNAVPVKLAAIVADSVRRTLYSSKRSGKKNGENPL

SEQ ID NO: 75613 - DNA, 681 bp, Unknown
  Obtained from environmental sample
  misc_feature (1)..(681): n is a, c, g, or t
ttgccgattctgttagaaggacattatattcttctaaacggagcggcaaaaagaatggagagaatcccctttaatcctcttgataaaaggaatttaggaataagtattgctaatgcaatttttgaacaaaaaataattccattaaataccttacaatcctttactggagcaggcatttatgcaatttattatagaggtaattttcctacttataacaagataacattaaaaaacaaagatgattttgtacagccaatatatgcaggaaaggcagtaccagaaggaacaagaaaaggcggtttagggcttgatgttcaaataggggaaaatctttataaaaggcttattgaacataaaaaatcaattgaagccgtagaaaatttaaacataaatgatttcttttgtagatttttgctcgttgatgatatttggattccattgngagaatcattgttaattgaaaaaacaaaacccttgtggaatattattgtagatggttttggtatcatgatccaggaagtggtcgttataatcaaacaatatcgggctgggatacaattcaccccagaagaaagttgggcnnaaaaattacaaaaaggaaaaactgaaaaagaaataattgatcaaataaatattttctgtgtcagtaaaatacctaaatttcgantatataaaaaatga

SEQ ID NO: 75614 - protein, 226 aa, Unknown
  Obtained from environmental sample
  misc_feature (1)..(226): Xaa is any amino acid
MPILLEGHYILLNGAAKRMERIPFNPLDKRNLGISIANAIFEQKIIPLNTLQSFTGAGIYAIYYRGNFPTYNKITLKNKDDFVQPIYAGKAVPEGTRKGGLGLDVQIGENLYKRLIEHKKSIEAVENLNINDFFCRFLLVDDIWIPLXESLLIEKTKPLWNIIVDGFGIMIQEVVVIIKQYRAGIQFTPEESWAXKLQKGKTEKEIIDQINIFCVSKIPKFRXYKK

SEQ ID NO: 75615 - DNA, 384 bp, Unknown
  Obtained from environmental sample
  misc_feature (1)..(384): n is a, c, g, or t
atgaaaagccaaatctccggcgccatcgtaaacatttctgcgggggccgcgaaaacaggcggaatgaacccctcgccatcgtacatcgctcccaagggcggcataaacagccttacattccactttgccgtaaacctgcacaaatacggaatcagggttaacgcgatttgccccggccccatcgacacgccgatgcttgatgaacaggcgaatctgccgggggccaagggcgacggtaaaagcagcatcgttgccgcggttcctctgggactcggttatccctccgacatagcctacggcgcgatgttcctggcttcggatacctgggcgcgttatatcaccggcgagatccttgatatcaacggcggccttgtgatggattaa

SEQ ID NO: 75616 - protein, 127 aa, Unknown
  Obtained from environmental sample
  misc_feature (1)..(127): Xaa is any amino acid
MKSQISGAIVNISAGAAKTGGMNPSPSYIAPKGGINSLTFHFAVNLHKYGIRVNAICPGPIDTPMLDEQANLPGAKGDGKSSIVAAVPLGLGYPSDIAYGAMFLASDTWARYITGEILDINGGLVMD

SEQ ID NO: 75617 - DNA, 828 bp, Unknown
  Obtained from environmental sample
  misc_feature (1)..(828): n is a, c, g, or t
gtggggaagaacgttacaaactttaaaccgggcgacaaggtaattagcgacaccgggtggttctgcggcgtctgtagctattgctaccgtggggaacccaattcctgtccccacgggcgcgcggtaggcactatcgggaagtgttggcccggagccttcgccgagtatatgctaatgcccgcgcgtgaaatgttccatgtgcccgataacatacctctggatgtggcggcccttgtggagccctccagtgtcggcttttacggccttacacgaactccgctcggaccggggagcaatctcctcgttatgggaaccggtcccatttcgctggggggcatggcctgcgcgaaagggataggtgtaggcaagacaattcttgcgggacgcaaggatgccaaactcgccgtcggtaaaaagatgggggcggacataaccgtgaacatggagaaggaagatctccgcgaggtggtgatgcgcgaaacgaacggacgcggggctgatgtagtactggacagcaccggcgcggcgagccttatcaaccttacagtatcgctggcccgatcgtcaggctatatagtgacgccgggcttttacgagcagttactcgacggctttgccattgacaacatcatcgtacgcaactgcgtacttatcggttcgggtggaacgcccgacatgcagcgacgggttctcgacatgcttgagtacgggcatgtcaacctcgccccgatgatcacagaccgctatcctttcgcgaaacataaagacgccttcgcggcggtaaaacagaaaggcgatacgcgcgtaaaggtgatggtcgatttttaa

SEQ ID NO: 75618 - protein, 275 aa, Unknown
  Obtained from environmental sample
  DOMAIN (1)...(67): Alcohol dehydrogenase GroES-like domain
  misc_feature (1)..(275): Xaa is any amino acid
MGKNVTNFKPGDKVISDTGWFCGVCSYCYRGEPNSCPHGRAVGTIGKCWPGAFAEYMLMPAREMFHVPDNIPLDVAALVEPSSVGFYGLTRTPLGPGSNLLVMGTGPISLGGMACAKGIGVGKTILAGRKDAKLAVGKKMGADITVNMEKEDLREVVMRETNGRGADVVLDSTGAASLINLTVSLARSSGYIVTPGFYEQLLDGFAIDNIIVRNCVLIGSGGTPDMQRRVLDMLEYGHVNLAPMITDRYPFAKHKDAFAAVKQKGDTRVKVMVDF

SEQ ID NO: 75619 - DNA, 699 bp, Unknown
  Obtained from environmental sample
  misc_feature (1)..(699): n is a, c, g, or t
atgtttatccttattatgactacatttttccgtaattctgcgctcttggcaatctctgtgcttgccgtgataatctccatttcctgttcaggaagtagtttcagcgagtggcttgataatgtactttatccacccgataaggataatgttttgcaaaattccaatttgggatttatgggtaattcggcacctattcctgaaggagatgttagtgctataacaagtttagatattgctggtaatgttctctccggtggatctgtttttgtcaccgttacaagttctgaaaaacttgaagatctatatttacagattgaaggtgaaaatggtcactatgtgtgggaattagagcccgaagatcaaataagcagcaatccgtatgtttatcaagttgctttggaattcaatatagatttaggtgaaaggaccacacttaaatttacagtgggcggcaaaacagaaagcggtgattatgttaaactaaaatctaaggatttgaaaatcattaatgttgggagcggagcgatgcaagtatctttgtcttgggataaatatgacgatgttgacttgcatgtttatagcccttcaggaaaacatttgtatttcggtaataaacgcgaggctaatgccgaactggacattgattccaatgctggntgccataatgatggagtaaatagtgaaaatatatttctttga

SEQ ID NO: 75620 - protein, 232 aa, Unknown
  Obtained from environmental sample
  SIGNAL (1)...(30)
  misc_feature (1)..(232): Xaa is any amino acid
MFILIMTTFFRNSALLAISVLAVIISISCSGSSFSEWLDNVLYPPDKDNVLQNSNLGFMGNSAPIPEGDVSAITSLDIAGNVLSGGSVFVTVTSSEKLEDLYLQIEGENGHYVWELEPEDQISSNPYVYQVALEFNIDLGERTTLKFTVGGKTESGDYVKLKSKDLKIINVGSGAMQVSLSWDKYDDVDLHVYSPSGKHLYFGNKREANAELDIDSNAGCHNDGVNSENIFL

SEQ ID NO: 75621 - DNA, 381 bp, Unknown
  Obtained from environmental sample
  misc_feature (1)..(381): n is a, c, g, or t
ttggatcggatagcctccggcggggagctttcccggtttttgctggcgcttgtcggcatacaggcggaagaagagcaggccaccctgatcttcgatgaagtggatgcgggcatcggcgggcttacgctgacacgccttgcggaccgccttgacgcgctggccgcccaacgacagatactgttgatcacccactggccgcagctcgcggccagggcgcgccgccattttcatgtcagcaaggaagtccggaataacgagacctttacactctgtacctgcctcgatcccgaagccgtcaggaaggagctgggacgcatgggcggcggcggcgcgcaagcggaggattttgcgaacagcctgctggcgcggcgcaacccctag

SEQ ID NO: 75622 - protein, 126 aa, Unknown
  Obtained from environmental sample
  misc_feature (1)..(126): Xaa is any amino acid
MDRIASGGELSRFLLALVGIQAEEEQATLIFDEVDAGIGGLTLTRLADRLDALAAQRQILLITHWPQLAARARRHFHVSKEVRNNETFTLCTCLDPEAVRKELGRMGGGGAQAEDFANSLLARRNP

SEQ ID NO: 75623 - DNA, 498 bp, Unknown
  Obtained from environmental sample
  misc_feature (1)..(498): n is a, c, g, or t
atgacaagcgcgtttatcagcctgggatcaaatatggacaatccgccgcaacagctcacagcggcgcgggaaaccctgatcgccttgccggacgtgcgtctggtagcgttttcgcctgtatacaaaacggagccacaaggtaaaaaggatcagccctggttccacaatcaggtggcgcatctggcctgtggggcgcgctggtccgccccggtcctgcttggcgcgttgcttgccatggaaagctccttgggacggcaaagactggacgaagaacatttcggcccacgccgtatcgatctcgatctcttgcttttcgggacggaacagtgcaaggatacgcagctttgtctgccgcatccgcgcatgttcgcacgggcctttgtcctgttgccgcttctggacatcgccccggaactggtgtttnccggacgcagcagcccgcnaagccgtctggcgacgctttcctaccgtttacaggctgactgcatctaccagtag

SEQ ID NO: 75624 - protein, 165 aa, Unknown
  Obtained from environmental sample
  DOMAIN (5)...(136): 7,8-dihydro-6-hydroxymethylpterin-pyrophosphokinase (HPPK)
  misc_feature (1)..(165): Xaa is any amino acid
MTSAFISLGSNMDNPPQQLTAARETLIALPDVRLVAFSPVYKTEPQGKKDQPWFHNQVAHLACGARWSAPVLLGALLAMESSLGRQRLDEEHFGPRRIDLDLLLFGTEQCKDTQLCLPHPRMFARAFVLLPLLDIAPELVFXGRSSPXSRLATLSYRLQADCIYQ

SEQ ID NO: 75625 - DNA, 411 bp, Unknown
  Obtained from environmental sample
  misc_feature (1)..(411): n is a, c, g, or t
ttgatactggttgacacatcagtgctgattgactttctgaagggccgcgagaacgcaaagacggaactgttcgcaactgtgctggacaggaggctgccgtttgggatcgcctcctacacgtaccaagaggtgctgcagggggcaagggacaagcgggaatacggcaaattaaagaagtacctgtcatcgcagaaaatatatttcctgccagaaacggtggaaacctacgagggggcggcaaacctgtttttcagcctaaggctacagggaacgacaccgagaagcgccgtggacatcctgattgcgatggtggcgatggaacacaagttgtcgctgctgcacaacgacagggactttgacgtgttgtcagagaaagtcagcgggttgaagatattggagcgcattgattag

SEQ ID NO: 75626 - protein, 136 aa, Unknown
  Obtained from environmental sample
  DOMAIN (2)...(131): PIN domain
  misc_feature (1)..(136): Xaa is any amino acid
MILVDTSVLIDFLKGRENAKTELFATVLDRRLPFGIASYTYQEVLQGARDKREYGKLKKYLSSQKIYFLPETVETYEGAANLFFSLRLQGTTPRSAVDILIAMVAMEHKLSLLHNDRDFDVLSEKVSGLKILERID

SEQ ID NO: 75627 - DNA, 519 bp, Unknown
  Obtained from environmental sample
  misc_feature (1)..(519): n is a, c, g, or t
atgctcgtggcaggcataatccgcgctcaggatgatcgcggcgctattattgatccaaaagaactcggacgtaaaaacataacaaaaacgttttttaaggtagaatcgattaccatctcggcgcagcaacgtatcagaattcgaaagctcctgcaaaaagccggtattaatgttaatccgagtgatgaacaatcccgcattccccaatttttggaataccttttctcgctggctgaaaaagccggcggagatatgccaaagccaaaaaaacctgatactgcgtttgttaacgatcttcgcctctgcacaggtaatgaacaactgcaacaaatatttgatcaagccgactccatttcagaatatattgattcatgtacattgttggcggagcagatagaaaaacggcggcctgactggctattactgaagcagttggttaaccatgcgcaaaatctgaacggcattgaagttatagaaacccagattaaaagcatagaagaatcacgaatgtttacatga

SEQ ID NO: 75628 - protein, 172 aa, Unknown
  Obtained from environmental sample
  misc_feature (1)..(172): Xaa is any amino acid
MLVAGIIRAQDDRGAIIDPKELGRKNITKTFFKVESITISAQQRIRIRKLLQKAGINVNPSDEQSRIPQFLEYLFSLAEKAGGDMPKPKKPDTAFVNDLRLCTGNEQLQQIFDQADSISEYIDSCTLLAEQIEKRRPDWLLLKQLVNHAQNLNGIEVIETQIKSIEESRMFT

SEQ ID NO: 75629 - DNA, 516 bp, Unknown
  Obtained from environmental sample
  misc_feature (1)..(516): n is a, c, g, or t
gtgaggtcaagcatggcgatgatagccggacggctagtaaatgcggggagcaagttgtcgttatcgcattgcggcacacacagcgcgctatgggaaatatgtggaatagaagaagtagacgtaaataaacattgctacgaagcgatggacgagctgatagggcgtcaggaagtgatacaaaagaagctggcgcggaaacatttaagagagggaatgctgatactatatgatataacgagcagctatatggaaggagagtatagcggtagcgaattggtggaatatgggtataatcgggatcagaagagggggcatgaacagatagtaatatcgttggtatgcacgagggaaggatgcccggtgggggtagaggtatttaacgggagtagaaaagacgaaacaacggttttgaaaaagatagaggaaataagagagagatatgggatagaaaaagtgatattcgtgggcgatcgcggtatggtgacccagtcaaaatatgaacagatgaacctatga

SEQ ID NO: 75630 - protein, 171 aa, Unknown
  Obtained from environmental sample
  misc_feature (1)..(171): Xaa is any amino acid
MRSSMAMIAGRLVNAGSKLSLSHCGTHSALWEICGIEEVDVNKHCYEAMDELIGRQEVIQKKLARKHLREGMLILYDITSSYMEGEYSGSELVEYGYNRDQKRGHEQIVISLVCTREGCPVGVEVFNGSRKDETTVLKKIEEIRERYGIEKVIFVGDRGMVTQSKYEQMNL

SEQ ID NO: 75631 - DNA, 594 bp, Unknown
  Obtained from environmental sample
  misc_feature (1)..(594): n is a, c, g, or t
ttgaaaattctgtttagctttatactagaacaaaacgagcgatttttagcacaccaatctaaaaatgggaaaaatggcggtgcgccgattggaaatcagaacgcaaaaaaacaacccaaacaacccaaacaacccaaacaaccctccgaatccgaatccgaatccgattccgattccgaagaaataagaaacttgggtggtaggaaggggggtgcggggggaaacgcgcaaggcgctaacgcgcccgacgcggcgcaagcgccaccgcccacgcaagcgaaaagcaaaaatcgtctatgcaaaaaatcaaagacctctttcccggaagtttttgaaatatcgcaagatatgcagaactgggcttgtaataacgctctgggcatcaacttggaagaagaaacggaaaaattccgggattactactctgggcacggaaaaccgatgtctgattggattgcaacatggcggaactggatgagaaacgcaccacgtttcaataagttacgcatagcaaataagcgtgaaagcgcgcatgaggcaaacatgcgcgtatcgctcgagctggaaaaggagggttggtttaatgcgagttga

SEQ ID NO: 75632 - protein, 197 aa, Unknown
  Obtained from environmental sample
  misc_feature (1)..(197): Xaa is any amino acid
MKILFSFILEQNERFLAHQSKNGKNGGAPIGNQNAKKQPKQPKQPKQPSESESESDSDSEEIRNLGGRKGGAGGNAQGANAPDAAQAPPPTQAKSKNRLCKKSKTSFPEVFEISQDMQNWACNNALGINLEEETEKFRDYYSGHGKPMSDWIATWRNWMRNAPRFNKLRIANKRESAHEANMRVSLELEKEGWFNAS

SEQ ID NO: 75633 - DNA, 879 bp, Unknown
  Obtained from environmental sample
  misc_feature (1)..(879): n is a, c, g, or t
gtggtgcgttttcgggggcgggagaggggggagaccggctgggcgatttngatcaagggtccggtggcctttgcccaccaggaactggacgaccttatcctcttgcggggcgacaaccagcccacctacaacctggccgtggtggtggacgatattgaaatgggcgtcacccacataatccggggcgacgaccacgtcaacaacaccccccgccagattctgctctaccgggccctgggggcgcccttgccccagttcgcccatgtgcccatgatcctgggcccggacaagacccgcctctccaagcgccacggcgccacctcggtcatggcctaccaggaaatgggctacctgcccgaggccctggtcaactacctggcccgtttgggctggtcccacggcgaccaggagattttcagcctggaggagatgcggaaccttttcgacctggcccaggtggggcgctcggccggggtcttcaacccggaaaagcttaagtggctcaacgcccattatataaaagagaccggcccggaaaccctgggggacctggtctggccttacctggccgccaagggctacgagcggccgccggccgaggtgctgggcaaaatcatgctcaccgtgcgggaacgaggccagaccttgccggaactggccgaaaaggccgaattttattttcctgacctgccgaaggtggaacctgaggcggcggccaagtttctcactgcggataacctggctctgctaagggaactgcaaggccccttgactgaacccgggctgacgccccagggctttgaggaattgcttcggggcatggccgcggccaggaacctgaaactctcggccctggcccagcccctttcggccatctga

SEQ ID NO: 75634 - protein, 292 aa, Unknown
  Obtained from environmental sample
  DOMAIN (1)...(167): tRNA synthetases class I (E and Q), catalytic domain
  misc_feature (1)..(292): Xaa is any amino acid
MVRFRGRERGETGWAIXIKGPVAFAHQELDDLILLRGDNQPTYNLAVVVDDIEMGVTHIIRGDDHVNNTPRQILLYRALGAPLPQFAHVPMILGPDKTRLSKRHGATSVMAYQEMGYLPEALVNYLARLGWSHGDQEIFSLEEMRNLFDLAQVGRSAGVFNPEKLKWLNAHYIKETGPETLGDLVWPYLAAKGYERPPAEVLGKIMLTVRERGQTLPELAEKAEFYFPDLPKVEPEAAAKFLTADNLALLRELQGPLTEPGLTPQGFEELLRGMAAARNLKLSALAQPLSAI

SEQ ID NO: 75635 - DNA, 342 bp, Unknown
  Obtained from environmental sample
  misc_feature (1)..(342): n is a, c, g, or t
ttgattgcgagacacactcgctgccaggctgcggcagaggtggccattaaggacttggactttgtaaaattctgccgcgaaaaaaatcgcgcggcgcgggaagtgtttttgcaggaagcatcgaagcaccgctgcaaggccactggcaatgctggcaattttttgcttttggagtgcgccattccggcgccagagttctttgtggagctgctgaagaaatccgtcatcgtgcgccccatgcacggctacggcctgcccaaccaccagcgggtctctttgggccgcgaggaagagatggaagcgttttgggccgcggcagggccgatgatggacggcaggtag

SEQ ID NO: 75636 - protein, 113 aa, Unknown
  Obtained from environmental sample
  misc_feature (1)..(113): Xaa is any amino acid
MIARHTRCQAAAEVAIKDLDFVKFCREKNRAAREVFLQEASKHRCKATGNAGNFLLLECAIPAPEFFVELLKKSVIVRPMHGYGLPNHQRVSLGREEEMEAFWAAAGPMMDGR

SEQ ID NO: 75637 - DNA, 516 bp, Unknown
  Obtained from environmental sample
  misc_feature (1)..(516): n is a, c, g, or t
atggcagtaaggtgtggcatcgtcggcttgcctggcgcaggcaaatctgtgttgttcaacgcgatgacaaagggcagcgccgccagtggcaattttttgttttgcacgacttctgcgactacgggcgtggtggacgtaccagatgacaggctgcacaaactggcggaaattgcgaagccccaaaaaataattcacgccacgcaggaatttgtggacattcctggactggtgaggggttcaagcaagggcgagggcctgggcaacagctttttgagcgacatccgcgacatgcacgcaattgtccaagtggtgcgctgctttgaaaaccccgacgtaccgcacgtggatggctctctagacccattgagggacctggacaccattgacatggagttgatcatcaaggacatggaagttttggaaaagtcgctggagagaaaccaaaagactgccaggtcgggcaacaaagagtccattgcgatggtggccacacttgaaaaatgcttgccgcgctga

SEQ ID NO: 75638 - protein, 171 aa, Unknown
  Obtained from environmental sample
  DOMAIN (3)...(153): GTPase of unknown function
  misc_feature (1)..(171): Xaa is any amino acid
MAVRCGIVGLPGAGKSVLFNAMTKGSAASGNFLFCTTSATTGVVDVPDDRLHKLAEIAKPQKIIHATQEFVDIPGLVRGSSKGEGLGNSFLSDIRDMHAIVQVVRCFENPDVPHVDGSLDPLRDLDTIDMELIIKDMEVLEKSLERNQKTARSGNKESIAMVATLEKCLPR

SEQ ID NO: 75639 - DNA, 411 bp, Unknown
  Obtained from environmental sample
  misc_feature (1)..(411): n is a, c, g, or t
ttggtaccagtgctgaactcaatagaaaacgtcatgctcccgctacagttgctgggactcccgacatctgaggccgccgaaagggcaaaaaaaacgctctctcgcgttggcctagagagccgtatgaaaagccgtcctagtgaactcagcggcggacagcagcagcgcgtggcgattgcgcgcgcattggcggcagggccaacattggtttttgcggacgagccgactgcaaacttggacagggcgcacggggtaccgctaatccaactgatgcgggaactagctttggaaacgggggcgtcttttttagtggccagccacgaccatttagtcattgacatggccgacgaagtttttcagctagaggacggcaggatagccgcgcatgaactcaaagggggtccatgctga

SEQ ID NO: 75640 - protein, 136 aa, Unknown
  Obtained from environmental sample
  DOMAIN (4)...(124): ABC transporter
  misc_feature (1)..(136): Xaa is any amino acid
MVPVLNSIENVMLPLQLLGLPTSEAAERAKKTLSRVGLESRMKSRPSELSGGQQQRVAIARALAAGPTLVFADEPTANLDRAHGVPLIQLMRELALETGASFLVASHDHLVIDMADEVFQLEDGRIAAHELKGGPC

SEQ ID NO: 75641 - DNA, 345 bp, Unknown
  Obtained from environmental sample
  misc_feature (1)..(345): n is a, c, g, or t
atgtcaatgactaaatggtcgtggctggccactaaaaaagacgcccccgtttccaaagctagttcccgcatcagttggattagcggtaccccgtgcgccctgtccaagtttgcagtcggctcgtccgcaaaaaccaatgttggccctgccgccaatgcgcgcgcaatcgccacgcgctgctgctgtccgccgctgagttcactaggacggcttttcatacggctctctaggccaacgcgagagagcgttttttttgccctttcggcggcctcagatgtcgggagtcccagcaactgtagcgggagcatgacgttttctattgagttcagcactggtaccaagtga

SEQ ID NO: 75642 - protein, 114 aa, Unknown
  Obtained from environmental sample
  DOMAIN (40)...(78): Protein of unknown function (DUF1602)
  misc_feature (1)..(114): Xaa is any amino acid
MSMTKWSWLATKKDAPVSKASSRISWISGTPCALSKFAVGSSAKTNVGPAANARAIATRCCCPPLSSLGRLFIRLSRPTRESVFFALSAASDVGSPSNCSGSMTFSIEFSTGTK

SEQ ID NO: 75643 - DNA, 726 bp, Unknown
  Obtained from environmental sample
  misc_feature (1)..(726): n is a, c, g, or t
atgccggatcatatactcgagattcgccatctcagcaaaacgtattccaaagggaaaaaagcggttgatgatctcagtcttgatattctcgagggcgatatatatgggtttatcggggccaacggcgctggcaaaacgactacgattcgcgccgtcgtgggcgtcatggatttcgatgagggcgagatatacatcgaggggcactgtgtgcgcgccgctcccatcgcctgcaagtcgatcacagcctatattcccgataaccctgatatatatgagtttttaacgggcattcagtatctctcctatattgcggatattttttcaatccctgcggataaacgcgaagccaatatcgcaaaatatgccgggattttcggcatgagttccaatctgggcgatcccatatcttcctattcgcatgggatgcggcaaaagttgattttgattggcgctctgatccatgagccgaaatttctcgttctggatgagccctttatggggttggatccggaagcatcctttcatcttaaaaatctgatgcgcgaattatgcgcggaaggaaaagcgatctttttttctacgcatatacttgaggtcgctgaaaaactctgcaacaagatcgccattatcaaagaggggaaacttattgccagcgggctgatcgatcaggtgcgtggtcaaaagagcctcgaaaagattttccttgaggtgatggggcatgagtaa

SEQ ID NO: 75644 - protein, 241 aa, Unknown
  Obtained from environmental sample
  DOMAIN (32)...(213): ABC transporter
  misc_feature (1)..(241): Xaa is any amino acid
MPDHILEIRHLSKTYSKGKKAVDDLSLDILEGDIYGFIGANGAGKTTTIRAVVGVMDFDEGEIYIEGHCVRAAPIACKSITAYIPDNPDIYEFLTGIQYLSYIADIFSIPADKREANIAKYAGIFGMSSNLGDPISSYSHGMRQKLILIGALIHEPKFLVLDEPFMGLDPEASFHLKNLMRELCAEGKAIFFSTHILEVAEKLCNKIAIIKEGKLIASGLIDQVRGQKSLEKIFLEVMGHE

SEQ ID NO: 75645 - DNA, 834 bp, Unknown
  Obtained from environmental sample
  misc_feature (1)..(834): n is a, c, g, or t
gtgtcttttatggttaataaaaaagaacgcaacaatccgcttgctattttagatcagttacaagcaattcgtatagttccagcgcatatatntgagaaatatttagcggagaacaacaacgattttgatgctgttaaaaaaattaaatgcgataaagacccagttgtttcaggtccatacacccttgaccagtacaataacgagcgcatagttttggtgcgtcgtgatgattattggggaaataaggttttgcacgaggatatgcttccggctccgaaatatataattcatcccatatacaaaaacaatgaccatttcgccataaatctgcaaaaaggcgcgctggacgcttccatgaattacattcctcgcataagcgaaaaaaagaaggacggtgtaagcacttggtatgatgccccaccctattttgttcccggttctatgcactttttgtatttgaacaataccaaagttccgttaaacgataaaaagttccgccgcgcaatggctgctgccatagattattctgcgattagccgccttgcgctttctaactatacgccttctatgaagccaggtcttataatgtcttctggcttggagaaaaagttttacgatgaagaagaggttaacaagcatagcgttccgcttggcaacaaggagtatgcaaaaaaattgcttgcggaggctggttataaagcagtttttgataaagacagcgttttgaaacattccattggaccaaatggcgatatcttaccctctttattgataaaagctcccgctggttggtcggactgggaagctattgtgaatttggtggtaaacaattag

SEQ ID NO: 75646 - protein, 277 aa, Unknown
  Obtained from environmental sample
  misc_feature (1)..(277): Xaa is any amino acid
MSFMVNKKERNNPLAILDQLQAIRIVPAHIXEKYLAENNNDFDAVKKIKCDKDPVVSGPYTLDQYNNERIVLVRRDDYWGNKVLHEDMLPAPKYIIHPIYKNNDHFAINLQKGALDASMNYIPRISEKKKDGVSTWYDAPPYFVPGSMHFLYLNNTKVPLNDKKFRRAMAAAIDYSAISRLALSNYTPSMKPGLIMSSGLEKKFYDEEEVNKHSVPLGNKEYAKKLLAEAGYKAVFDKDSVLKHSIGPNGDILPSLLIKAPAGWSDWEAIVNLVVNN

SEQ ID NO: 75647 - DNA, 303 bp, Unknown
  Obtained from environmental sample
  misc_feature (1)..(303): n is a, c, g, or t
atgagcgtcgatattcaagaaaaacaccgatctataatcaaaggaattttgactaaaccagaacggaaggatttagcggtttatgtttttggttccaggaccaaaggcactgccgggaaatattcggatttagatctggcggtggataatgatggtaagccaatgccgcctcagaccattttgcatttgttaattgattttgaaaattctttattgccgtataaagtggatgtggttgatttgaataatatctcggcagaatttaaatctgttattttgccggatttgcacaagtttaattag

SEQ ID NO: 75648 - protein, 100 aa, Unknown
  Obtained from environmental sample
  DOMAIN (5)...(99): Nucleotidyltransferase domain
  misc_feature (1)..(100): Xaa is any amino acid
MSVDIQEKHRSIIKGILTKPERKDLAVYVFGSRTKGTAGKYSDLDLAVDNDGKPMPPQTILHLLIDFENSLLPYKVDVVDLNNISAEFKSVILPDLHKFN

SEQ ID NO: 75649 - DNA, 897 bp, Unknown
  Obtained from environmental sample
  misc_feature (1)..(897): n is a, c, g, or t
gtgccaagccccgcctgtggctgcacggcccccttggcgagttcgtttgaactctcaaagaaaaatggcagggaggcttacgtgcagcccatcatagagggcaaaaaggtgcgcttcgaagtcaggcagggcaagggcgccccgccaggcacggtgaggcgcaacggcgccacctgcatcttttgcaactcgccaatccagttcgaccacataagggccgaaggcagggccgggcgcttgggcgagcagatgatgactatagtggcagacggccccggcgggcgcacgtacctttcccccataggaggacacataaaggtcgcccactgcccagaaccccaagagaacgtcccccagagccttttgccagaaaaagcccttggcttccgtatccaagcctacggcatgacaaagcataaagacctcttcacccaccgccagttgactgcgctctccactttcagcggcctcgtgtccgaggccaaggccaaggtaatagccgatggcggaagtcaagaatacgccgatgcagcggctacgtatctggcacttgcggttagcaagatgacaaacatcgacaatgcttttgttccttggtctgttagtcgtgaccaagctgtacagctattcagtaggcaagccatagcaatggtatgggattttgtcgaaaacaatgttttcaacaattctgctggtgatttcatcgtaagtttgagtgggatatgcagaacactcgctggttttatttgcaaaaacgttgggcacgcagaacaacatgatgcccagacagacaacgggctccgcagtgtcatggtttccactgaccccccctattacgacaacataggctacgccgacctctcagacttctctacgtctggctccgcaagccattaa

SEQ ID NO: 75650 - protein, 298 aa, Unknown
  Obtained from environmental sample
  misc_feature (1)..(298): Xaa is any amino acid
MPSPACGCTAPLASSFELSKKNGREAYVQPIIEGKKVRFEVRQGKGAPPGTVRRNGATCIFCNSPIQFDHIRAEGRAGRLGEQMMTIVADGPGGRTYLSPIGGHIKVAHCPEPQENVPQSLLPEKALGFRIQAYGMTKHKDLFTHRQLTALSTFSGLVSEAKAKVIADGGSQEYADAAATYLALAVSKMTNIDNAFVPWSVSRDQAVQLFSRQAIAMVWDFVENNVFNNSAGDFIVSLSGICRTLAGFICKNVGHAEQHDAQTDNGLRSVMVSTDPPYYDNIGYADLSDFSTSGSASH

SEQ ID NO: 75651 - DNA, 870 bp, Unknown
  Obtained from environmental sample
  misc_feature (1)..(870): n is a, c, g, or t
gtgaacggccaggggaatttcggcaacatcgacggcgatcctcaggccgcataccgctatacggaatcgaaactgacggaggccgcgatgcttatcatggccgggctggacgaggacagcgtcgacatgattccgaatttcgacggcacgacggttgagccgaaggttatgccgggcgcgtttccgaaccttttggcgaacggcgctatgggcatcgccgtcggcatggcgaccaatatcccgacgcataatgtggccgagatttgcgacgcgcttgcgcttgtcatagacaggccgaacgcgacgacggcgcagataatgcggaaactcatcgggccggattttccgaccggcggaattatcatcgacgacttcgaccagattgttaaaaattacgagtccggccgcggcgtcttccgcatccgcgcgaaatgggcggtcgagaatttggaacgcggcgcgtggcagattgtcataacggaaattccctatggcatagtgaaacaaaaactgatcgaacagattgcagagcaaatcgacgcgaaaaaacttccgtccatagaggacatcgccgacgaatccacaaccgacataagaatcgtggtcacgccgaanacgcggacgatggacgcggaaaaaattatggcgcaccttttcgcggtgacagatcttcaatcgaatttcaacatgaacatgaacgtggtcgattcgaccggggtgccgcgcgtaatgaaaatcggagacatccttaatgaattcgtcgcgcaccagaaaatcgtgctgcgacgccggacgaaatggcgccttgacaatattgcgcgccggcttgaaaatctgggcngncnttttgntcgtatatctgaaccttga

SEQ ID NO: 75652 - protein, 289 aa, Unknown
  Obtained from environmental sample
  DOMAIN (1)...(288): DNA gyrase/topoisomerase IV, subunit A
  misc_feature (1)..(289): Xaa is any amino acid
MNGQGNFGNIDGDPQAAYRYTESKLTEAAMLIMAGLDEDSVDMIPNFDGTTVEPKVMPGAFPNLLANGAMGIAVGMATNIPTHNVAEICDALALVIDRPNATTAQIMRKLIGPDFPTGGIIIDDFDQIVKNYESGRGVFRIRAKWAVENLERGAWQIVITEIPYGIVKQKLIEQIAEQIDAKKLPSIEDIADESTTDIRIVVTPXTRTMDAEKIMAHLFAVTDLQSNFNMNMNVVDSTGVPRVMKIGDILNEFVAHQKIVLRRRTKWRLDNIARRLENLGXXFXRISEP

SEQ ID NO: 75653 - DNA, 693 bp, Unknown
  Obtained from environmental sample
  misc_feature (1)..(693): n is a, c, g, or t
gtgttggcccatgtgcctgaccagatgaaagcgatcaggagagccgcgacgacggatcttatcttccaaagcatcgccggcagtgaaaaggggaacaaggctttcggcatcactatggcgctgatggacgaggccagggaactggcgcttcaccagggaaccggcgtggggccaaacgtgatgtactttgagacaggccagggctccgagctttcctccgacgcccaccatggcgctgaccaggttacgctggaagcccgctgttacggcttcgcgaagcgttacagccccttccttgtcaatacggtagtgggtttcatcggtcccgaatacctctacgactcaaagcagatcatccgggcgggactggaagatcacttcatgggcaagttgaccggtatctcaatgggctgtgacgcctgttacaccaaccacgccaaggcggatcagaatgatgttgaaaacctggcccttttactgtccgcggcaggctgcaactacttcatgggaataccccacggggatgacgtcatgcttaactaccagtgcaccagctaccatgacgggccttccctgaggcagaccctcggccttaaacctatccccgaatacgccgcatggctggaaaaatggggtatcttggaaaacggacgccttaccgaaagggccggcgacgcttcaatattcgcataa

SEQ ID NO: 75654 - protein, 230 aa, Unknown
  Obtained from environmental sample
  DOMAIN (1)...(229): Ethanolamine ammonia lyase large subunit (EutB)
  misc_feature (1)..(230): Xaa is any amino acid
MLAHVPDQMKAIRRAATTDLIFQSIAGSEKGNKAFGITMALMDEARELALHQGTGVGPNVMYFETGQGSELSSDAHHGADQVTLEARCYGFAKRYSPFLVNTVVGFIGPEYLYDSKQIIRAGLEDHFMGKLTGISMGCDACYTNHAKADQNDVENLALLLSAAGCNYFMGIPHGDDVMLNYQCTSYHDGPSLRQTLGLKPIPEYAAWLEKWGILENGRLTERAGDASIFA

SEQ ID NO: 75655 - DNA, 414 bp, Unknown
  Obtained from environmental sample
  misc_feature (1)..(414): n is a, c, g, or t
ttggcgaacngtacggctgaaaaaatcaaaatcgaagtcggctcggccattcccgatttggacaatccgcccgaagattatgccgtgcaaggtcgtgatatgttgaccggtattcccaaagaaattatcatcaatcatgccgaaatcgcacatgctttggataaatccattatcaaagttgaagccgctgtgttgaatgccttggagcaaacaccacccgaattgtcggccgatatttaccgtacgggaatttatttggccggtggaggggcgatgcttagaggtttggataaacgcttgagccaaaaaacaaaactccccgttcggttggccgaagacccgcttcgcgctgtggctcgcggaactggtatcgcgttgaagaactttgataagtttgtatttctaatcaagtaa

SEQ ID NO: 75656 - protein, 137 aa, Unknown
  Obtained from environmental sample
  DOMAIN (1)...(134): MreB/Mbl protein
  misc_feature (1)..(137): Xaa is any amino acid
MANXTAEKIKIEVGSAIPDLDNPPEDYAVQGRDMLTGIPKEIIINHAEIAHALDKSIIKVEAAVLNALEQTPPELSADIYRTGIYLAGGGAMLRGLDKRLSQKTKLPVRLAEDPLRAVARGTGIALKNFDKFVFLIK

SEQ ID NO: 75657 - DNA, 399 bp, Unknown
  Obtained from environmental sample
  misc_feature (1)..(399): n is a, c, g, or t
gtgaataatctcgttcgatttttaaaacggtttcactttttcctgctgttcattctgttcgagggaatagcgttgaccctgctggtgcaaaataacaactatcaggccggacaaaccaaacgtttttacaacgagatgacaggaactatttttggcgaatataataattggaccgattattttaatttgcgaaaaagcaaccttgcgcttagcactgaaaatgcgctcctgcgcggacaaatagagcaatcttaccaaatctacgaccgcaaaacgtttgtggtgaaagataccgtttataaacttcaatacgaatacattcaggctaaaatcattagcaattcaacgtctaggcgaaataattatttgatgattaacaaggcgctcatcacggtataa

SEQ ID NO: 75658 - protein, 132 aa, Unknown
  Obtained from environmental sample
  misc_feature (1)..(132): Xaa is any amino acid
MNNLVRFLKRFHFFLLFILFEGIALTLLVQNNNYQAGQTKRFYNEMTGTIFGEYNNWTDYFNLRKSNLALSTENALLRGQIEQSYQIYDRKTFVVKDTVYKLQYEYIQAKIISNSTSRRNNYLMINKALITV

SEQ ID NO: 75659 - DNA, 639 bp, Unknown
  Obtained from environmental sample
  misc_feature (1)..(639): n is a, c, g, or t
gtgataaaacgcgaaacgctgcatattttcgatctgattctgaaacagctgataaggctgtcgagcgtggctgtcgtgcagttcatcaatggattgttcggaacgggccatcctctggacagcgtagtggagtatcccaacacggaaaccgtgtcgcgaaaacttcggaagcttcactcagataccgtcgtcatcgtaaatggagttcacacctatcatatcgaaggagagatcgacgacgacgcgaacatggtgattcgggttttcgagtacgggcttgcggaggcgctgcgcacaaagagtgtaacggacgatgatgatgtgatagagcttcgtttccccaacgcgaggataatttattgggaaacgacggaaaaaacgccggacgccgtgacgttacgcctgatatttcctgacgggaaccactatgactacatagtggagaccttcaagttccttgaacacgagatacgggagttggaagaacgaaaactggcaattttgctgcctttttacgtgctgaagctcaggaaacgggcaaagacgcctaaactgcgatcagaattggccgtagagatgaaatcattcttgacgagttggtcgcggcggtcgagcgcagcgaaagcgcggggtgcatga

SEQ ID NO: 75660 - protein, 212 aa, Unknown
  Obtained from environmental sample
  misc_feature (1)..(212): Xaa is any amino acid
MIKRETLHIFDLILKQLIRLSSVAVVQFINGLFGTGHPLDSVVEYPNTETVSRKLRKLHSDTVVIVNGVHTYHIEGEIDDDANMVIRVFEYGLAEALRTKSVTDDDDVIELRFPNARIIYWETTEKTPDAVTLRLIFPDGNHYDYIVETFKFLEHEIRELEERKLAILLPFYVLKLRKRAKTPKLRSELAVEMKSFLTSWSRRSSAAKARGA

SEQ ID NO: 75661 - DNA, 843 bp, Unknown
  Obtained from environmental sample
  misc_feature (1)..(843): n is a, c, g, or t
atggatgacttccctggccccgaagagctgtgggcaagatatacagacaaaaagcagctcacggagcagcagatcaaggccctgctgaccccctaccaccgcaccgatggcaaggagccgcgctactatcagcaggtggccataaaccgcaccatagaggcgattgccaagggccagcggcgaatcctgctggtgatggcaaccggcacaggcaagaccttcaccgcatcccagatagtccacatcctgaaatcagccggattaaagaaaaaaatactgtacctcgcagaccgtaacgtgctgatagaccagcccatgaagggtgacttcaagccattcgcaaaagtgtccaacaagatcacgggcaagcgaatagacacagcctacgaagtatatttcgccctgtaccagcagctcaccggcgaggtcaacatggaaccttttcgtgcagtggggccaaacttcttcgacctagtgattgtagatgagtgccatcggggcagcgcctcagagaactccctgtggcgcatggtactggaatacttcagcggagccacacagataggcatgaccgccacccccaaagagaccgaggacgtatcaaacagcgactactttggcgacccggtctatacctacagccttcgccagggcatagaggacggctttctcgcgccctttagggtcagaagcattgaactggacaaggacagcggctggcggcccaagcctggccagctcgactactacggcagagagattgaggacagggagtacggccagaccgactacgacagaaacatggtaatgacccagcgcacagaaacggggccaaagagataa

SEQ ID NO: 75662 - protein, 280 aa, Unknown
  Obtained from environmental sample
  DOMAIN (41)...(200): DEAD/DEAH box helicase
  misc_feature (1)..(280): Xaa is any amino acid
MDDFPGPEELWARYTDKKQLTEQQIKALLTPYHRTDGKEPRYYQQVAINRTIEAIAKGQRRILLVMATGTGKTFTASQIVHILKSAGLKKKILYLADRNVLIDQPMKGDFKPFAKVSNKITGKRIDTAYEVYFALYQQLTGEVNMEPFRAVGPNFFDLVIVDECHRGSASENSLWRMVLEYFSGATQIGMTATPKETEDVSNSDYFGDPVYTYSLRQGIEDGFLAPFRVRSIELDKDSGWRPKPGQLDYYGREIEDREYGQTDYDRNMVMTQRTETGPKR

SEQ ID NO: 75663 - DNA, 579 bp, Unknown
  Obtained from environmental sample
  misc_feature (1)..(579): n is a, c, g, or t
ttggtgatcgcgtcctaccttttggnttcgtaccctttcgggctngtcgtgccccggctgcacaggggccttgatccgcgtctggctggcagcggcaacacnggggccaccaatgtggcccggctgtgcggcttcggttggggggtctgcacactggcctgtgatctcggcaaggggttcgcagctgtgggtggagccgtatgcatcaatcctgacgccggctttgtgagcatggccgcgctcgccgccgtggcaggccaccgctggtcgtgctttatggggtttcagggcggcaaggccgttgcaacctgcatcggggttttcctgcctctggcgttctggcagacccttgccgccgtccttctttgcgtggcatgtattcttcgcaccggattcgtctctgcgggttccctgacccttgtcgcgagtttgccgttttttctgctgctgacgggcgtatggcgcttcgtacccttggcggttattgtcgccgcagtggtcatcaaggctcataaggccaatatcctgcgtctgctgcggggtgaagaaaaaagctggaaaaaaagaaaagaattttga

SEQ ID NO: 75664 - protein, 192 aa, Unknown
  Obtained from environmental sample
  DOMAIN (2)...(181): Domain of unknown function DUF
  misc_feature (1)..(192): Xaa is any amino acid
MVIASYLLXSYPFGLVVPRLHRGLDPRLAGSGNTGATNVARLCGFGWGVCTLACDLGKGFAAVGGAVCINPDAGFVSMAALAAVAGHRWSCFMGFQGGKAVATCIGVFLPLAFWQTLAAVLLCVACILRTGFVSAGSLTLVASLPFFLLLTGVWRFVPLAVIVAAVVIKAHKANILRLLRGEEKSWKKRKEF

SEQ ID NO: 75665 - DNA, 621 bp, Unknown
  Obtained from environmental sample
  misc_feature (1)..(621): n is a, c, g, or t
atgtgtttcgatgaacctaaacgctngccgcggnccaaggaactccaattccngccgcttgcaacgcctgacccgtttttggggcgcgncctgcaacaagctggttatcccgccgaccttagaaaattagaccaagccgtcctggccgccggtcataatatgcaatcagcccgggacgttatggcactcctggctgaagaaggccggttgaccaaaattcttttcagcctgaccgctcaaagcgtgcgttacggcgaatttacccgggctaaaaaaggggccggcgaagatcaggctaatcggttcctggaccacggcaattacctggcttacggtctggcggccaccgcgacctgggttttggggctgccccacggcttggccgttctccacggcaaaaccaggagaggcgggcttatttttgatgtggccgacttggtcaaggattccgccatcctgccgcaagccttcatttccgccatgaagggtgacagtgaagaagacttccgctccgcctgcatagaaaatttgactcaaaccgaagctctggacttcatgatcgaaagccttaaggcggtcgtcaccctgtttggcgcatcttccccggaagaccgttcatga

SEQ ID NO: 75666 - protein, 206 aa, Unknown
  Obtained from environmental sample
  misc_feature (1)..(206): Xaa is any amino acid
MCFDEPKRXPRXKELQFXPLATPDPFLGRXLQQAGYPADLRKLDQAVLAAGHNMQSARDVMALLAEEGRLTKILFSLTAQSVRYGEFTRAKKGAGEDQANRFLDHGNYLAYGLAATATWVLGLPHGLAVLHGKTRRGGLIFDVADLVKDSAILPQAFISAMKGDSEEDFRSACIENLTQTEALDFMIESLKAVVTLFGASSPEDRS

SEQ ID NO: 75667 - DNA, 660 bp, Unknown
  Obtained from environmental sample
  misc_feature (1)..(660): n is a, c, g, or t
gtgtccgacacgcacaagttcgacgggcgcgtgctttccttccaatccctgatccgcaaaaaaggcgggacgataaacaagccgatctacgtatcgatgtcggtaatcaccggcgtgtacgcgaaggacgcgaagggcatcgcggacgcagattcggccaagacaaagggaagctcggagagctcctcgacgaaccagatgcagcaggagttcgtcgacttggtgtaccgcgcaagcgacatgaaggtctccgacatacacgtcgtcgtttccgaccataccacgatcatgttccgcatcgcgggctcgatgcaggtggtcctcgaatacgacaaggactggggtgagtcgttcgtgcgctccgtcttcgcctcggccgacatatccgattccaactacgcgcaaaacgagttccaggccgcgcagaagatgggctcgaccccgcttcgcgggcaaaaggacctgtaccttccggaaaacgtgcttgccatccgactgcagttcaatcccgtggcgttcggaacgcgctatctcgtcatgcgccttctgtacgccaactccgccacgacgaaagaggacaacctcaaggagctcggcttctcggagtacgaggaatcgcggctgtaccaatgcgctcgataccgacgggactttgcataa

SEQ ID NO: 75668 - protein, 219 aa, Unknown
  Obtained from environmental sample
  misc_feature (1)..(219): Xaa is any amino acid
MSDTHKFDGRVLSFQSLIRKKGGTINKPIYVSMSVITGVYAKDAKGIADADSAKTKGSSESSSTNQMQQEFVDLVYRASDMKVSDIHVVVSDHTTIMFRIAGSMQVVLEYDKDWGESFVRSVFASADISDSNYAQNEFQAAQKMGSTPLRGQKDLYLPENVLAIRLQFNPVAFGTRYLVMRLLYANSATTKEDNLKELGFSEYEESRLYQCARYRRDFA

SEQ ID NO: 75669 - DNA, 579 bp, Unknown
  Obtained from environmental sample
  misc_feature (1)..(579): n is a, c, g, or t
gtggcccggggccatgaagccggccggaaagtggtgcgcctccacaccggcgacccctccctctacggggccatccacgaacagttgacggccctcatggcccggggcgtgcccacccgggtcattcccggcgtcaccgcggccttggccgccgccgccggcctgggcctggaattcaccctcccggaaatcacccagaccctaatcataacccgcgccgccgggcgaacccccgtgcccgaaggtgaaaacctggctgccctggccgccatcggggcctccctggccctctatctctccgccgacctgggggaggaagccggccgggccctggcccggggctacggcccggaagcgcccctggccctttgctaccggaccacctggccggacgcccgcttggtctggaccacctgcgcccgcctggccgaaaccctggccgccgaaagccttcaccgtcacaccctgattttggccgggccggccgtggccgccctccgcaaccgaaccgccgccccggccagccgtctttacgacgcccagttcggccacgcccaccgcgccgcgaaagacccatga

SEQ ID NO: 75670 - protein, 192 aa, Unknown
  Obtained from environmental sample
  DOMAIN (1)...(143): Tetrapyrrole (Corrin/Porphyrin) Methylases
  misc_feature (1)..(192): Xaa is any amino acid
MARGHEAGRKVVRLHTGDPSLYGAIHEQLTALMARGVPTRVIPGVTAALAAAAGLGLEFTLPEITQTLIITRAAGRTPVPEGENLAALAAIGASLALYLSADLGEEAGRALARGYGPEAPLALCYRTTWPDARLVWTTCARLAETLAAESLHRHTLILAGPAVAALRNRTAAPASRLYDAQFGHAHRAAKDP

SEQ ID NO: 75671 - DNA, 357 bp, Unknown
  Obtained from environmental sample
  misc_feature (1)..(357): n is a, c, g, or t
gtgggcgtggccgaactgggcgtcgtaaagacggctggccggggcggcggttcggttgcggagggcggccacggccggcccggccaaaatcagggtgtgacggtgaaggctttcggcggccagggtttcggccaggcgggcgcaggtggtccagaccaagcgggcgtccggccaggtggtccggtagcaaagggccaggggcgcttccgggccgtagccccgggccagggcccggccggcttcctcccccaggtcggcggagagatagagggccagggaggccccgatggcggccagggcagccaggttttcaccttcgggcacgggggttcgcccggcggcgcgggttatgattag

SEQ ID NO: 75672 - protein, 118 aa, Unknown
  Obtained from environmental sample
  misc_feature (1)..(118): Xaa is any amino acid
MGVAELGVVKTAGRGGGSVAEGGHGRPGQNQGVTVKAFGGQGFGQAGAGGPDQAGVRPGGPVAKGQGRFRAVAPGQGPAGFLPQVGGEIEGQGGPDGGQGSQVFTFGHGGSPGGAGYD

SEQ ID NO: 75673 - DNA, 393 bp, Unknown
  Obtained from environmental sample
  misc_feature (1)..(393): n is a, c, g, or t
atggtcggagtccgggccgtcatgggtctttcgcggcgcggtgggcgtggccgaactgggcgtcgtaaagacggctggccggggcggcggttcggttgcggagggcggccacggccggcccggccaaaatcagggtgtgacggtgaaggctttcggcggccagggtttcggccaggcgggcgcaggtggtccagaccaagcgggcgtccggccaggtggtccggtagcaaagggccaggggcgcttccgggccgtagccccgggccagggcccggccggcttcctcccccaggtcggcggagagatagagggccagggaggccccgatggcggccagggcagccaggttttcaccttcgggcacgggggttcgcccggcggcgcgggttatga

SEQ ID NO: 75674 - protein, 130 aa, Unknown
  Obtained from environmental sample
  misc_feature (1)..(130): Xaa is any amino acid
MVGVRAVMGLSRRGGRGRTGRRKDGWPGRRFGCGGRPRPARPKSGCDGEGFRRPGFRPGGRRWSRPSGRPARWSGSKGPGALPGRSPGPGPGRLPPPGRRRDRGPGRPRWRPGQPGFHLRARGFARRRGL

SEQ ID NO: 75675 - DNA, 843 bp, Unknown
  Obtained from environmental sample
  misc_feature (1)..(843): n is a, c, g, or t
atggccgcccatgcgtcctttctggtggcggctggcaccggctgcggcaagaccaccctgcttgaaatgatgatgcggtggattccgcccgaggaggtgccgttcacggtcgaggacacggccgaactgcggtgcgatcaccccctgtggggcggcttcataaccagggagcgtccgccccaggctcccccaggattccaagagatgcagatggtccacggcctgaaggcggccctgcgggccagacccgactggataatcgccggagaaataagggactcggtggatccgcagaactcaccagcggacgtgttcgtcaacgcgatccagagcggccacgccggggcctgcaccctccacgccggcggcgactacgaggctttgacccggctggagagtatgctgcgcaacgcccgtccaagttccaaggacgagagcatacgtagtactatcggcgaggccgtccggatggtgatcgtgctcaacaggctccaggaggagaaaatcctgcccgacggctcaaaaatcaagcgcccgaagcgcatggccggctccatcacggaggtgcttggttccaacgggcacacatacataatgaacccccttttcaaggcaaaggcgcaccgggagaaggtgcagacggagaaaggggagatgttcgcaacggtccagcacctcgagcaggtgggcataccgctgttcggtcttgaattgaaggacaggggctacgcctccatgcccgactggtggagcgacgcgcagattgacttcatcggggaagatcaccgcagcgagnggcgcggcgcgctggcggtggatctttctcatacggcgactatctag

SEQ ID NO: 75676 - protein, 280 aa, Unknown
  Obtained from environmental sample
  misc_feature (1)..(280): Xaa is any amino acid
MAAHASFLVAAGTGCGKTTLLEMMMRWIPPEEVPFTVEDTAELRCDHPLWGGFITRERPPQAPPGFQEMQMVHGLKAALRARPDWIIAGEIRDSVDPQNSPADVFVNAIQSGHAGACTLHAGGDYEALTRLESMLRNARPSSKDESIRSTIGEAVRMVIVLNRLQEEKILPDGSKIKRPKRMAGSITEVLGSNGHTYIMNPLFKAKAHREKVQTEKGEMFATVQHLEQVGIPLFGLELKDRGYASMPDWWSDAQIDFIGEDHRSEXRGALAVDLSHTATI

SEQ ID NO: 75677 - DNA, 369 bp, Unknown
  Obtained from environmental sample
  misc_feature (1)..(369): n is a, c, g, or t
atgcgcctcggggtgtacccggcccgcctgctgcccaaatcgcaggtcgccacggcgtacggggaagacttggtcctcgagcggcaccgtcaccgctacgaggtcaacccccattaccgcacccggctggaagaagccggtttggtgtgctcgggcacctcgcccgacaaccggctggtggagttcatcgagctcccggggcacccgttctgggtgggtacccaggcccatcccgagttcaagagccgccccgaccacccccacccgctgtttcgcgaactggtgcacgccgcgctcagccgagccgaggggcgcgccccccgactcctcgacctcgacgaccttgcccgggttccgcaagatcagtga

SEQ ID NO: 75678 - protein, 122 aa, Unknown
  Obtained from environmental sample
  misc_feature (1)..(122): Xaa is any amino acid
MRLGVYPARLLPKSQVATAYGEDLVLERHRHRYEVNPHYRTRLEEAGLVCSGTSPDNRLVEFIELPGHPFWVGTQAHPEFKSRPDHPHPLFRELVHAALSRAEGRAPRLLDLDDLARVPQDQ

SEQ ID NO: 75679 - DNA, 339 bp, Unknown
  Obtained from environmental sample
  misc_feature (1)..(339): n is a, c, g, or t
atggcaactgatgcggcgactccggagctgcgggccgcgctcgaggacgagcgcggccggctacggcgccagctcgaagagctgggagttgacggcagggtggggtccttcgatgccaacttcgccgattccagccaggtcacagcggaacgaggcgagatcgaggcgctcgtggcgtcgctcgtcgagagtctcgaggccacagagcgggcgttggcgaaaatcgccgagggctcctacgggacgtgcgagaactgcggccagcagatcgccccggcccgcctcgaagccatgcccgaggcgcgcctgtgcatcaactgcgcggccaagctgcgctga

SEQ ID NO: 75680 - protein, 112 aa, Unknown
  Obtained from environmental sample
  DOMAIN (47)...(112): Prokaryotic dksA/traR C4-type zinc finger
  misc_feature (1)..(112): Xaa is any amino acid
MATDAATPELRAALEDERGRLRRQLEELGVDGRVGSFDANFADSSQVTAERGEIEALVASLVESLEATERALAKIAEGSYGTCENCGQQIAPARLEAMPEARLCINCAAKLR

SEQ ID NO: 75681 - DNA, 633 bp, Unknown
  Obtained from environmental sample
  misc_feature (1)..(633): n is a, c, g, or t
ttgggcgacgttttttttggctttaacaacatgacaggcggcgtcgtgcagatggacgaaatgctcatggcctttgccgaagatccagaatggtgcgtggatatgtttaaccacgcgcttgacgtaaacctcgccctgcttgaccttgcctgggatgccggttacgttttcgacatgcttaacctccgtgatgacctcggctacaagcagacgaccttcatatcgcttgatatgtacaaaacactgataaaaccggtacataaaaaggccgcggactgggcccataagaaggggataaaggttcgcctccattcctgcggttttgttatgccctttatggaagaatttgttgacgccggcatggatgcttttcatcccatggaagtaaaggccggcatggatccgctggaaatgaagaaacgtttcggcggcagcctcgtgttacacgggggcatcaacgcgattctctggaaagacctcgacgcggttatcgccgaaatggaacgcctcgttcccgttctaaaaaaagacggcggctatattttcgcggcggatcattccatccccaatgatgtcagttttgaaaacatcaaagcgattatagcgttggcaaaaaaactgggagcgtattga

SEQ ID NO: 75682 - protein, 210 aa, Unknown
  Obtained from environmental sample
  misc_feature (1)..(210): Xaa is any amino acid
MGDVFFGFNNMTGGVVQMDEMLMAFAEDPEWCVDMFNHALDVNLALLDLAWDAGYVFDMLNLRDDLGYKQTTFISLDMYKTLIKPVHKKAADWAHKKGIKVRLHSCGFVMPFMEEFVDAGMDAFHPMEVKAGMDPLEMKKRFGGSLVLHGGINAILWKDLDAVIAEMERLVPVLKKDGGYIFAADHSIPNDVSFENIKAIIALAKKLGAY

SEQ ID NO: 75683 - DNA, 411 bp, Unknown
  Obtained from environmental sample
  misc_feature (1)..(411): n is a, c, g, or t
gtgccgaagcagggccccaagccgcacgttgcatcgccagtggcagtccacgccaagcccaaagcgaagcctgtgccgaagcagggccctaagccgaccgccaagcccaaattgaaactcggaccgaaaccggggtcgaagcccggcacggtcacgcaccatcacagtgcctcgccagtggcggcccatgccaagccgacccccaagcccaaagcgaagcctgtgccgaagtcggccgcaaagccgcacgttgcctcgtcagtggcggcccatgccaagcccgaaccaaagcctggccctaagccgggctcaaagactaggattccaaagatcgaaaacagggtgcctgggcgtcgccggaccaagaggccgccattgggtcccccacctcccgaatacagcaagccgtag

SEQ ID NO: 75684 - protein, 136 aa, Unknown
  Obtained from environmental sample
  misc_feature (1)..(136): Xaa is any amino acid
MPKQGPKPHVASPVAVHAKPKAKPVPKQGPKPTAKPKLKLGPKPGSKPGTVTHHHSASPVAAHAKPTPKPKAKPVPKSAAKPHVASSVAAHAKPEPKPGPKPGSKTRIPKIENRVPGRRRTKRPPLGPPPPEYSKP

SEQ ID NO: 75685 - DNA, 837 bp, Unknown
  Obtained from environmental sample
  misc_feature (1)..(837): n is a, c, g, or t
gtgggtgacgggctcgcccgcgccacgttccccatcgccacggcaaacggggttctactccttggctgccaggacccttccgcgctggatgcggcaagggcggcggtggccaaggacgcacatgagatactcgagcgggcgaacatcgaggccggcgtccacctgagccgcatcgatgtggtgccaagcaccccgcccaccccacgcatgacggcggactccctgctccccaatgagtcacaggtcgcggccattatggccggcgagggggctttcctggtggaggcgggacctggttccgggaagacccgtgtgatcacggagaggatggtcaggctcataaagggcggcgtcccgccggaccggatactgatggtcacgttcaccgttgccgcggcgcggcaaatgaccgcccgcatcgcaaagatgacaaatggcctgaagccggcgtggatcagcaacttccacaaggtctgcaccagactgctcaaagaccacctggggctgaaactgcagatattcccgccccccgagatcaagaacctgatcaaggagatactcgcatacgagcggatacacagggtctatgccgacccgacctcgtatgcgttctttgacaatctgttcaaagaggtcgactaccaccgttgggagaagacgcaggcgctcataaagggcaccggtgccgtgaattcggtctgggagcccatgagcaccatggagagggttgccgccgcctatgaaaagcacctggcggagcacaacatcctcgacttcgatctgatcctgtacaaggtcatctgggcgatgcttgagaattccggagttcgcccatga

SEQ ID NO: 75686 - protein, 278 aa, Unknown
  Obtained from environmental sample
  misc_feature (1)..(278): Xaa is any amino acid
MGDGLARATFPIATANGVLLLGCQDPSALDAARAAVAKDAHEILERANIEAGVHLSRIDVVPSTPPTPRMTADSLLPNESQVAAIMAGEGAFLVEAGPGSGKTRVITERMVRLIKGGVPPDRILMVTFTVAAARQMTARIAKMTNGLKPAWISNFHKVCTRLLKDHLGLKLQIFPPPEIKNLIKEILAYERIHRVYADPTSYAFFDNLFKEVDYHRWEKTQALIKGTGAVNSVWEPMSTMERVAAAYEKHLAEHNILDFDLILYKVIWAMLENSGVRP

SEQ ID NO: 75687 - DNA, 690 bp, Unknown
  Obtained from environmental sample
  misc_feature (1)..(690): n is a, c, g, or t
atgccgtcagtccagcaatttcataaagataacgcgcttctgtatgtaggaatcaccagacggacatggcaggagcgataccgccagcattgcaatgacatgcgccgaggctccaacctgctttttcaccgggcgttacgcggcgaattctgccacatcggtattcttgaacatatcgttgaacgggccggacttactgaaaaacaagcaatggagattgaagagaaagaagtggaaaaacgttcgcttcactcgctgtaccccagcgggctgaatatgataccggggggatatgccgggcttaaatacgtccatcattttgccaacagaaccggttataaattagtaaaggaactctcggcggatactcttgaaaccgttctggtcgacgtacaacagcacaatctaaagacgcttttcaagacaacggatattaaacgggtgaatgacgcgatagccaaactttgggcgcaagacatgaatttccggataatggcgacgacaaatcaaaaaaaccggttttcattcccccagatacaggcggcgcggatatgggacgcttccggctggcagaaagaaaaaatacttgaaagccttcaaaaaattgatgccaagaaaatcggcatggatcagcttgaaaggcttttgaaaggggaaacatacgcgtcaatacctgacgtgctgatataa

SEQ ID NO: 75688 - protein, 229 aa, Unknown
  Obtained from environmental sample
  misc_feature (1)..(229): Xaa is any amino acid
MPSVQQFHKDNALLYVGITRRTWQERYRQHCNDMRRGSNLLFHRALRGEFCHIGILEHIVERAGLTEKQAMEIEEKEVEKRSLHSLYPSGLNMIPGGYAGLKYVHHFANRTGYKLVKELSADTLETVLVDVQQHNLKTLFKTTDIKRVNDAIAKLWAQDMNFRIMATTNQKNRFSFPQIQAARIWDASGWQKEKILESLQKIDAKKIGMDQLERLLKGETYASIPDVLI

SEQ ID NO: 75689 - DNA, 906 bp, Unknown
  Obtained from environmental sample
  misc_feature (1)..(906): n is a, c, g, or t
ttgatggccgagccatntatgcccgccgtcgccataaccgacaataatcttatggccggcaccgcggaactgtcggatcaagcggctgcgaacggaatccagccgattatcgggattactatcacgctgaatcatcatgcgaccgccgatcccaaggtcttgcgcgcgaccgaactgtcgcaaatagtcctgctcgcgcaaaatcacgatggctatctgaatctttgcaaattatccgaaataatgtacatgcgccaagacaactggcaccttggcgcgcatataacattggacgaattagaagcctggtccggcggattgatttgcctttcgggcggacctagcgggccgatcggaaaagcgatcctggcaaatcaagaacaccttaccgcaagccttgcggaccggttcttgaaaattttcggcgacagattctatatagagctgtccagattcggccttgatgagcagataaaaaccgaaccggaatttctgaggctcgcgcgggaaaagaacattccgatcgtcgcgacgaacgacgtctgcttcgcgcggccggaaaattacgaggcgacggacgcgctccattgcatccttgggcaaaccaaggttttatcgggcgaccgaccgcgcgcgagcgtggagcaatatttcaagtcgccggcggaaatgacagagcttttttccgacctgcccgaggcgtgcgaaaacacgttgaacatcgccaaacgctcggcctttatggtaaacacgaaggccaaggccctgcttccgcacttttgcgaggacgaagacaaggtgctgcgcgaaaaagttctggccggactagaacagcggattgtcgaacacggcatagccgagcggcaaaatatatcgaccaggcgaatttcgaagtcgacgtcataa

SEQ ID NO: 75690 - protein, 301 aa, Unknown
  Obtained from environmental sample
  DOMAIN (2)...(185): PHP domain
  misc_feature (1)..(301): Xaa is any amino acid
MMAEPXMPAVAITDNNLMAGTAELSDQAAANGIQPIIGITITLNHHATADPKVLRATELSQIVLLAQNHDGYLNLCKLSEIMYMRQDNWHLGAHITLDELEAWSGGLICLSGGPSGPIGKAILANQEHLTASLADRFLKIFGDRFYIELSRFGLDEQIKTEPEFLRLAREKNIPIVATNDVCFARPENYEATDALHCILGQTKVLSGDRPRASVEQYFKSPAEMTELFSDLPEACENTLNIAKRSAFMVNTKAKALLPHFCEDEDKVLREKVLAGLEQRIVEHGIAERQNISTRRISKSTS

SEQ ID NO: 75691 - DNA, 576 bp, Unknown
  Obtained from environmental sample
  misc_feature (1)..(576): n is a, c, g, or t
atgtcgccccactggtcgaacaacgaaggcaaaacatggacggtgtgtaccggcttgcccgcaaagaccaaagttgtgtccgacagggtgaacccgcaaaaattctacgcttttagtgctgatgcaaagaccgcgtacatgagcgccgatgcgggtaaaacttttacggtaatgaacaattcctttataaagggcagtacggacaaatgcaattttaaggccgctgtaggtcttgaaggacacctttggcttgccgccggagacgcgggtctttaccactccatggacggcgggaaaacatggcagcagtttgatggctttgacacaataccgatcatcggtcttggaaaggccgcgcctggcgcggattatcaggcgttgtacactaacgcaaagtacaagggcaagtggggcgtctaccgcagtgacgacaagggtaatagttggatacggattaacgatgatatgcatcagtttggcgcggctaacaccgctatcaccggagacccaagggtttatggcagagtgtttcttgcaaccaatggcaggggcatacagtatagggatttggagtaa

SEQ ID NO: 75692 - protein, 191 aa, Unknown
  Obtained from environmental sample
  misc_feature (1)..(191): Xaa is any amino acid
MSPHWSNNEGKTWTVCTGLPAKTKVVSDRVNPQKFYAFSADAKTAYMSADAGKTFTVMNNSFIKGSTDKCNFKAAVGLEGHLWLAAGDAGLYHSMDGGKTWQQFDGFDTIPIIGLGKAAPGADYQALYTNAKYKGKWGVYRSDDKGNSWIRINDDMHQFGAANTAITGDPRVYGRVFLATNGRGIQYRDLE

SEQ ID NO: 75693 - DNA, 495 bp, Unknown
  Obtained from environmental sample
  misc_feature (1)..(495): n is a, c, g, or t
atggcgagccatccgttcggcgcgttttgcggcgagtatctgcccgacggcatgcagcccggctccccgccgctcatcgtctataacctgcggcagcccgttgcccggcagggttttgttctggcgcactgtctgggccaccatctgctcaggcacgggccgtgcccgcgggaaaccgcgtattccgcccatacttccgaccggcgcgagaaagccgccaacgcctttgccgtggaattgctgctgccggaagaggccgtcagggaatacgtccatcatctgcgtatgaagggcggcatgtccatcgaagtgttcagccggcatttccatgtggagccggcgctgatgtcgcttcgcctgcatctgctcggccttgaaaccgggcaactcgccttgccgggcctgcagcggattccgttgcagacgcatgacaagaacaagctgcatgcctccaatttctaccgcggcaaagtgtctaccccaaatccccgctga

SEQ ID NO: 75694 - protein, 164 aa, Unknown
  Obtained from environmental sample
  DOMAIN (1)...(110): Domain of unknown function (DUF955)
  misc_feature (1)..(164): Xaa is any amino acid
MASHPFGAFCGEYLPDGMQPGSPPLIVYNLRQPVARQGFVLAHCLGHHLLRHGPCPRETAYSAHTSDRREKAANAFAVELLLPEEAVREYVHHLRMKGGMSIEVFSRHFHVEPALMSLRLHLLGLETGQLALPGLQRIPLQTHDKNKLHASNFYRGKVSTPNPR

SEQ ID NO: 75695 - DNA, 666 bp, Unknown
  Obtained from environmental sample
  misc_feature (1)..(666): n is a, c, g, or t
atggagcgacctagaaaaaccatccagagttccatgcaagacgctttcatcggactggtcaatggaactaagtcatggggcgatgccacacgcgccattctgaataatattctgcaatcgtttatccgcatgaccgcacaagaactgacacagcacatgacgatcgaaaatttgaaaacactgtttacaaccaaatccacggccacccgcacagccatcgaaacggcgggtgcggccaaaagaatggcagtcgagattgccgccgcaaccaagagcatgatagcaagcgcatgggcggcatcagcaagcgcattcaaggcgatggccggaatacccgttgtcggcccggcgttggcagttggggcgggcgcggcggcactaggcgcggttatggcgatgatcggcaagctcaacagcgccgagggcggatggggccaagttccatccgaccagcttgccatgatccacaaaaacgaaatgatactgccagaaaaatacgccagccccatgcgcgaaatgctagaggacggcgaaatgggcggcggcacagtgaacgtcaccatccaagccgttgacgcggcatcggtagaaaaactatttatggccaacggccccgcgctggcccgcgccatcaagtctcaggcgcgggactttgcctttacatga

SEQ ID NO: 75696 - protein, 221 aa, Unknown
  Obtained from environmental sample
  misc_feature (1)..(221): Xaa is any amino acid
MERPRKTIQSSMQDAFIGLVNGTKSWGDATRAILNNILQSFIRMTAQELTQHMTIENLKTLFTTKSTATRTAIETAGAAKRMAVEIAAATKSMIASAWAASASAFKAMAGIPVVGPALAVGAGAAALGAVMAMIGKLNSAEGGWGQVPSDQLAMIHKNEMILPEKYASPMREMLEDGEMGGGTVNVTIQAVDAASVEKLFMANGPALARAIKSQARDFAFT

SEQ ID NO: 75697 - DNA, 729 bp, Unknown
  Obtained from environmental sample
  misc_feature (1)..(729): n is a, c, g, or t
ttggatgcaaacaacggtaaaactattcatcaaattgaggccggtgaagaagttaagagtactcaaatagataaagtgacctcaattgcttatcggtttgacggtaaaaatattgttgccggatatagagatggaagtatcagaattttcgatgctgaaagcggtagaaaattgtctactcttggaaaacgccatgttcaagatataccatccgcggccatcagcccaaacggtaaatatgtagccgccgcctttggtaaggtaatccatctttgggatacaggaacattgcaacgtataaaaatattgagcggccataatgaagatataggaaaagtaatatggagtcctgacggtagacagcttgcaactactgcaggcggtgaaaaagacaggagtgtcaaaatctgggattttgaaaaaggtcaggtattacgaaccataagcagtggtttttgcgatagcaaatattcggataatagtgaccaggcgacatccatagcatggagtcccaatggaagaatgcttgttaccggttcgtgggaaacagtaaagatatgggacgctgaaacaggtaggcaacaacgggcttttccagtgtcatggaattggacaaattctgtatcattcagtacagataaccaacggcttttatttaatggtgattattctgcaataatatacaatataactaccagtaaggaaataaaattttccagtggtgggtga

SEQ ID NO: 75698 - protein, 242 aa, Unknown
  Obtained from environmental sample
  DOMAIN (98)...(138): WD domain, G-beta repeat
  misc_feature (1)..(242): Xaa is any amino acid
MDANNGKTIHQIEAGEEVKSTQIDKVTSIAYRFDGKNIVAGYRDGSIRIFDAESGRKLSTLGKRHVQDIPSAAISPNGKYVAAAFGKVIHLWDTGTLQRIKILSGHNEDIGKVIWSPDGRQLATTAGGEKDRSVKIWDFEKGQVLRTISSGFCDSKYSDNSDQATSIAWSPNGRMLVTGSWETVKIWDAETGRQQRAFPVSWNWTNSVSFSTDNQRLLFNGDYSAIIYNITTSKEIKFSSGG

SEQ ID NO: 75699 - DNA, 513 bp, Unknown
  Obtained from environmental sample
  misc_feature (1)..(513): n is a, c, g, or t
ttgccaattttgttaaatcttattaaaatcgtggttcagacaaacgaaaactatataactatgaatttatttgagcaaatcagcgaggacattaaaaaagcaatgctcgcaaaagaaaaaatacgccttgaggcgttgagagggataaaaaaagagtttctggaagcaaaaactgcaaaaggcagcgatggtaatttgagtgatgaaacggcgttgaaaataatccaaaagatggtaaaacaacgcaaggatgctgcacaaatatttgctgcacaggggcgttccgatttggcagacaatgaattggcagaggttaccgtattggaagaataccttcctgtccaaatgagcgagtcggaattggaagtagccataaaggctatcattgcacaagttggagcaacatctccgcaagacatgggcaaggtaatgggtgttgcgagtaaacagttaagcggaaaagccgaaggacgcgctatttcggaaaaagtaaaacaactgctgaatacgtga

SEQ ID NO: 75700 - protein, 170 aa, Unknown
  Obtained from environmental sample
  DOMAIN (26)...(168): GatB/Yqey domain
  misc_feature (1)..(170): Xaa is any amino acid
MPILLNLIKIVVQTNENYITMNLFEQISEDIKKAMLAKEKIRLEALRGIKKEFLEAKTAKGSDGNLSDETALKIIQKMVKQRKDAAQIFAAQGRSDLADNELAEVTVLEEYLPVQMSESELEVAIKAIIAQVGATSPQDMGKVMGVASKQLSGKAEGRAISEKVKQLLNT

SEQ ID NO: 75701 - DNA, 432 bp, Unknown
  Obtained from environmental sample
  misc_feature (1)..(432): n is a, c, g, or t
atggtaaaggacatgaatgacagatacaaagcggaaggaaacagccgcaatcttatagacggcgtaggaatgcaggggcattacgggcttgatttactaataccggatgtccgcgcttctatagagaaatttattgcgttaggtgtcaaagtagatatcagcgaacttgatatagcggacaaacaaacatacagaaactatggaaacggaaagaacggcgtaatgtcatccgcggacgccaatgcccaggcaagactatacggccggctttttcagcttttaaggcagtataatgagcacataacgcgcgttaccatgtgggggcttgacgacaatacaagctggatatcaataggcaatccgtgcctttttgatgaaaatcttaagccaaaaaaatctttttttgcggttttagccgcaggtttaaattaa

SEQ ID NO: 75702 - protein, 143 aa, Unknown
  Obtained from environmental sample
  DOMAIN (1)...(141): Glycosyl hydrolase family 10
  misc_feature (1)..(143): Xaa is any amino acid
MVKDMNDRYKAEGNSRNLIDGVGMQGHYGLDLLIPDVRASIEKFIALGVKVDISELDIADKQTYRNYGNGKNGVMSSADANAQARLYGRLFQLLRQYNEHITRVTMWGLDDNTSWISIGNPCLFDENLKPKKSFFAVLAAGLN

SEQ ID NO: 75703 - DNA, 627 bp, Unknown
  Obtained from environmental sample
  misc_feature (1)..(627): n is a, c, g, or t
gtgttaaaaacgcctgtcttaaaggggcggatgattacgtccgaaatgctgtccgtagtagaaatgggcagctacaatttacccgaaaaagccgtcgccgacaaagaaagcgtcgcgggcaaatacgccgcgtccgacctgtacgcgggaaaccttattttccccgatatgctgacggattcggcggataacagcgataccatgctgcgtaacctgaaagaaaacgaacgcgcggtatctatcacaattaagcaattcgcgaacggcttttccggaaaacttattacgggcgatattatcaaaatcgtgtcggttgacgaaaacaaagaggctcacatttacgcggagcttgaatttgtggaagtgctgactaccacgtccgccggcggcgcagacaatatcgaacgcccgccgactcccgacgaggacggggaaagcgatatgcccgtaactatcaccgttattatacaaaacgacttgcaggcgctgaggctcgccgagtgcgagaacacaagccttcacgccgtgtttgtctgccgcgacgaaaacagaaagtccgactacatcaaggcgcaggcggatattctggaaagccttaaagaaagcgcgggtgatgtttatgagtga

SEQ ID NO: 75704 - protein, 208 aa, Unknown
  Obtained from environmental sample
  DOMAIN (40)...(164): Flp pilus assembly protein CpaB
  misc_feature (1)..(208): Xaa is any amino acid
MLKTPVLKGRMITSEMLSVVEMGSYNLPEKAVADKESVAGKYAASDLYAGNLIFPDMLTDSADNSDTMLRNLKENERAVSITIKQFANGFSGKLITGDIIKIVSVDENKEAHIYAELEFVEVLTTTSAGGADNIERPPTPDEDGESDMPVTITVIIQNDLQALRLAECENTSLHAVFVCRDENRKSDYIKAQADILESLKESAGDVYE

SEQ ID NO: 75705 - DNA, 312 bp, Unknown
  Obtained from environmental sample
  misc_feature (1)..(312): n is a, c, g, or t
gtgccgttcgacatcataattcgccttgtctgcgaggcgtttccgattgccgtttttattaaacaattggaggacggcaaacgtcatttaatggaaatagccgagtgcttgtaccgcgagggcgataaatacgatattcgtccgctgtggatttacgaggttacggacgagaggcgcgagggcggcagggtcgttattaacggcggctttgtaaggaaaaacgacatttccgaacagttaaaaacaaggttgttggagaacggtatgccggaaacgacgttaaacaaatatattcaaagggggacgggataa

SEQ ID NO: 75706 - protein, 103 aa, Unknown
  Obtained from environmental sample
  misc_feature (1)..(103): Xaa is any amino acid
MPFDIIIRLVCEAFPIAVFIKQLEDGKRHLMEIAECLYREGDKYDIRPLWIYEVTDERREGGRVVINGGFVRKNDISEQLKTRLLENGMPETTLNKYIQRGTG

SEQ ID NO: 75707 - DNA, 384 bp, Unknown
  Obtained from environmental sample
  misc_feature (1)..(384): n is a, c, g, or t
gtgaacccggtgaactgcgtcggcgtgatgggaaaaggcttggctttgcagttcaaggcccgatacccgcacaacttccagctgtacgcgaaaaaatgcgaagccaaggaaatgaagccgggccgcttgctggtcgtcgcagaaaatgacaagtacatagtcaacttcccgacaaaaaggcactggcgagacaagagcaggcttgacgacatcaaggatggcctgaaagacctggcgaactggctggaagccccatttatccagtcagcagcgataccgccattgggctgcggcttgggcggcctcgactggaatttggtgaaacagatgatagaacaggccctttcagcagcgcaaaagccagtttacgtgtatgagccgtaa

SEQ ID NO: 75708 - protein, 127 aa, Unknown
  Obtained from environmental sample
  DOMAIN (1)...(111): Appr-1-p processing enzyme family
  misc_feature (1)..(127): Xaa is any amino acid
MNPVNCVGVMGKGLALQFKARYPHNFQLYAKKCEAKEMKPGRLLVVAENDKYIVNFPTKRHWRDKSRLDDIKDGLKDLANWLEAPFIQSAAIPPLGCGLGGLDWNLVKQMIEQALSAAQKPVYVYEP

SEQ ID NO: 75709 - DNA, 549 bp, Unknown
  Obtained from environmental sample
  misc_feature (1)..(549): n is a, c, g, or t
atgtttcgtctgtatagttttgttttacaggaatacgacaatgcccttaaccatattaacgaagcaatcagcttgaattccgatcccgatgatgaagattcattgttgaacagccgcgcctttacatacttttatctgggaagactcgacgaagccctggccgatataaacagggcaatagaactcgtctcctacgatagttactttgatacccgcggtactatttacagggccatggggaactacggtaaagcgatagaggattattcacaggccattcgtatcagcccgcattacgccatcttctggatgaaccgcgctatcgcgcatctgtggtcgggcaatcgaagctcttatgaggcggaccgggactgggcggtacaccttgattcggaagacgccgctcaggcgtggatcgacataggaaaaaaccagttgcaaacaggtttgtacgataaagcggcggaatctttcagggccgctcttgcgatctatccggaatccgatgaagcgcggaaattgctggcaagagcgcgggccggcggataa

SEQ ID NO: 75710 - protein, 182 aa, Unknown
  Obtained from environmental sample
  DOMAIN (66)...(99): Tetratricopeptide repeat
  misc_feature (1)..(182): Xaa is any amino acid
MFRLYSFVLQEYDNALNHINEAISLNSDPDDEDSLLNSRAFTYFYLGRLDEALADINRAIELVSYDSYFDTRGTIYRAMGNYGKAIEDYSQAIRISPHYAIFWMNRAIAHLWSGNRSSYEADRDWAVHLDSEDAAQAWIDIGKNQLQTGLYDKAAESFRAALAIYPESDEARKLLARARAGG

SEQ ID NO: 75711 - DNA, 675 bp, Unknown
  Obtained from environmental sample
  misc_feature (1)..(675): n is a, c, g, or t
atgaaaataaaaacaatgcttattttagccgtttttacgggcgcggttttttcggcggaagttttctcgccgccgcaaaacaggacttcgctgaatcttacgatttacaataacagtcgcgcactcgttcaggaaaaccgcaaaattccgcttgccaaaggtatctcgacgattcgctttgaaggcgtaccggcaacggttattccgcagtcgctaatcgtggtttcaaaggacggtttcggcgttttggagcagaattacgaatttgatttgatttcgcgcgaaaaacttttggaaaaatacgtcggaaaggaagtcatgcttatcgacgaagacaaaattttgagcgataaaaaaaacgttccggctaaaatcgtcgcaaataactttcttccggtgtttgaggtaggcggcaaaattctgctcggtttcgacggcaaaattctgcttccggaaatccccgcaaatttatacgcgaaaccgacgatgaactggttggtgcaaacgcagaaatccggcgactttaacgtcgacgtttcgtatctgacgcaaggaatttcgtggaacgccgactatgttatgcttcttgcagacaacgacaaatccgcttcgattaccagttggataacgctgacaaacccagtcgggcgcggcgttaaaaccaactcgcgataa

SEQ ID NO: 75712 - protein, 224 aa, Unknown
  Obtained from environmental sample
  SIGNAL (1)...(18)
  misc_feature (1)..(224): Xaa is any amino acid
MKIKTMLILAVFTGAVFSAEVFSPPQNRTSLNLTIYNNSRALVQENRKIPLAKGISTIRFEGVPATVIPQSLIVVSKDGFGVLEQNYEFDLISREKLLEKYVGKEVMLIDEDKILSDKKNVPAKIVANNFLPVFEVGGKILLGFDGKILLPEIPANLYAKPTMNWLVQTQKSGDFNVDVSYLTQGISWNADYVMLLADNDKSASITSWITLTNPVGRGVKTNSR

SEQ ID NO: 75713 - DNA, 714 bp, Unknown
  Obtained from environmental sample
  misc_feature (1)..(714): n is a, c, g, or t
atgctgcgcgtaactgccttcattgatgaagaaaagggaaaacccgcggcggaaggctggctcactattgaaatagaagaaaacaaagtcaataccggcactgtaattctgaatgcaattatttctaccggcggcacgggaacattcagttggaacatttcgtttcctgcggaaataaccgaagcctccatgaccataacgcctcttgacaaagcaaacggaaccgctgagcagaaattgtacttcaaaggtggcacacccgctgttcaaaagcaggattcgtgcgaattaaattcaggctattacaatgtattgataaccctgtttaaagatgataaaactcagcaaattgaacgcagggacatactgcatatatatcaaaacatggaaagtgaatttacagttacgttctccaatacagatattaataaaaaaaattatatagtaagatatgtttataatattaacggctgggacgacggaattcaaaccatagaaactggcgcaataataaccaatccccctaccccaaccagagacaattatgactttggcggctggtacaccgacaatggtacatttaaaacaaaatgggattttgtcaatggtactgtcacccaaaatattaacctctatgcaagatggcatccgatgggaaaatttacctttcaatttagtattaccgacagcgcgccgatagtagattcccattaa

SEQ ID NO: 75714 - protein, 237 aa, Unknown
  Obtained from environmental sample
  misc_feature (1)..(237): Xaa is any amino acid
MLRVTAFIDEEKGKPAAEGWLTIEIEENKVNTGTVILNAIISTGGTGTFSWNISFPAEITEASMTITPLDKANGTAEQKLYFKGGTPAVQKQDSCELNSGYYNVLITLFKDDKTQQIERRDILHIYQNMESEFTVTFSNTDINKKNYIVRYVYNINGWDDGIQTIETGAIITNPPTPTRDNYDFGGWYTDNGTFKTKWDFVNGTVTQNINLYARWHPMGKFTFQFSITDSAPIVDSH

SEQ ID NO: 75715 - DNA, 339 bp, Unknown
  Obtained from environmental sample
  misc_feature (1)..(339): n is a, c, g, or t
gtggaaaaggcggtagaggcagaatttgcaaagatagtcccgcacttggagagcaggctccctgtaatctccattttgggcaccaccgctcccctgctggggcttttgggaaccgtaatgggcatgatagagcttttcaatgttataaccatgcacggcacagcagaccctaagctgctggctggcggaatctccatagcccttataaccaccgaagcagggctttccgttgctattcccgtgcatcttctgcacacttggatagcgggtagggtggaaaaaaccgctcaaaacatggattatgcggctatgaaattggtcaatgccagatttgggtag

SEQ ID NO: 75716 - protein, 112 aa, Unknown
  Obtained from environmental sample
  DOMAIN (1)...(106): MotA/TolQ/ExbB proton channel family
  misc_feature (1)..(112): Xaa is any amino acid
MEKAVEAEFAKIVPHLESRLPVISILGTTAPLLGLLGTVMGMIELFNVITMHGTADPKLLAGGISIALITTEAGLSVAIPVHLLHTWIAGRVEKTAQNMDYAAMKLVNARFG

SEQ ID NO: 75717 - DNA, 390 bp, Unknown
  Obtained from environmental sample
  misc_feature (1)..(390): n is a, c, g, or t
gtgatccgcacctcggtctccacatttatggagttcatcggtaataatcctaacgccttccggttattattgcgggaacgctccggcacctccgctgcgtttcgtgccgccgttgcgcgtgaaattcagcacttcattgcggaacttgcggactatctggaactcgaaaaccatatgccgcgtgcgtttactgaagcgcaagccgaagcaatggtgacaattgtcttcagtgcgggtgccgaggcgttggacgtcggcgtcgaacaacgtcggcaattagaagagcgactggtactgcaactgcgaatgatttcgaaaggggcttattactggtatcgccgtgaacaagagaaaaccgcaattattccgggaaatgtgaaggacgagtaa

SEQ ID NO: 75718 - protein, 129 aa, Unknown
  Obtained from environmental sample
  misc_feature (1)..(129): Xaa is any amino acid
MIRTSVSTFMEFIGNNPNAFRLLLRERSGTSAAFRAAVAREIQHFIAELADYLELENHMPRAFTEAQAEAMVTIVFSAGAEALDVGVEQRRQLEERLVLQLRMISKGAYYWYRREQEKTAIIPGNVKDE

SEQ ID NO: 75719 - DNA, 624 bp, Unknown
  Obtained from environmental sample
  misc_feature (1)..(624): n is a, c, g, or t
ttgcagtcagaaataaaaacagcgtatatcatgaaaatccttcatatctccgacacgcacggccaacaccgcttggtacaaaacttattgccggccgatatcatcattcattcgggtgatttatcggttgttggaaccgaaaacgaaatcatggattttctcgaatggtttattgatttgccgtacaaacacaaaatttttataggcggtaatcatgaccatgatttgcaccgagcgcgtatccaaggactgcccaaaaactgccattatttgtctaattccggtgtgaccatcgaaggcctgaaattttatggcctacccctatttatggaagatatagaggcgggaaatttggataccaacattcgaaaaatcccaactgataccaacgttctcatcacacaccaacccccttacggcattttggactctttggccaacttcaattacggcgaccggattttgttactcaccgtactgaacattcaaccccaataccatctgttcggacatattcacggcgcttacggcatcgaaaaaagtaatcatactactttcgtgaatgccgccttgctcaacgaagattacaaaatgacctgtcaacctgttttattggacatataa

SEQ ID NO: 75720 - protein, 207 aa, Unknown
  Obtained from environmental sample
  DOMAIN (11)...(175): Calcineurin-like phosphoesterase
  misc_feature (1)..(207): Xaa is any amino acid
MQSEIKTAYIMKILHISDTHGQHRLVQNLLPADIIIHSGDLSVVGTENEIMDFLEWFIDLPYKHKIFIGGNHDHDLHRARIQGLPKNCHYLSNSGVTIEGLKFYGLPLFMEDIEAGNLDTNIRKIPTDTNVLITHQPPYGILDSLANFNYGDRILLLTVLNIQPQYHLFGHIHGAYGIEKSNHTTFVNAALLNEDYKMTCQPVLLDI

SEQ ID NO: 75721 - DNA, 726 bp, Unknown
  Obtained from environmental sample
  misc_feature (1)..(726): n is a, c, g, or t
atgctggccgcgcttcgcgggcggtttgatcttgcctctctttttatttttgcctgtatgctcctggatatgtttgacggcaggatatcgcgcgcgctcaagggcgacaatcccatcgggaaggagctcgactccctcgcggatatgctctccttcggtatcgctcccggggttatcttctacgccgcttttttgggcaataatcccatatactccgatatcgcgccgcttctgacgcaaaatgatctgtcgcagctcaccgaatataattcgacgcatatactctttggggcgcttgccttcctctttcccttgacggcagccattcgtcttgcgcgttttaatctgggcgggagcgaagcggtctacagcggctgtccctcaaccgccgcgggcgggcttgtggtcgtgctgacttgtttctcccagataccgcagatgtctttcatggagccctataacttcagtatcccgagcgttctcctgatcatcctttttatctgcattgctttactcatgattgtgcgtatacccttttcaaaaccgcaaaaatcgctgttccgcaagtcaagcttgtcacaacccctgtttctgatgtacaatcttgcggtgatagccgcgctgatattgtttttcaagtattttttgcttctggtggggttcatatatgtgatctggtcgcttgtacggggaatcaaatccgcgaaggcttccatacaggaataa

SEQ ID NO: 75722 - protein, 241 aa, Unknown
  Obtained from environmental sample
  DOMAIN (13)...(182): CDP-alcohol phosphatidyltransferase
  misc_feature (1)..(241): Xaa is any amino acid
MLAALRGRFDLASLFIFACMLLDMFDGRISRALKGDNPIGKELDSLADMLSFGIAPGVIFYAAFLGNNPIYSDIAPLLTQNDLSQLTEYNSTHILFGALAFLFPLTAAIRLARFNLGGSEAVYSGCPSTAAGGLVVVLTCFSQIPQMSFMEPYNFSIPSVLLIILFICIALLMIVRIPFSKPQKSLFRKSSLSQPLFLMYNLAVIAALILFFKYFLLLVGFIYVIWSLVRGIKSAKASIQE

SEQ ID NO: 75723 - DNA, 486 bp, Unknown
  Obtained from environmental sample
  misc_feature (1)..(486): n is a, c, g, or t
ttgcgaaatgtcgactatgacattattggggcgtcatattacccgtactggacgcagaagactgccgttcaatatgcctcgtttgccaattcagtggctctggaatttaataaaccggttatgtgcatggaaacaggtttaaactgggcggcgcgaaccggcgcgggaaacattgggcaacttagcaataacgggccgtacggcttagttgatgacagtacgccagaactccaaagggattttttagtagatttttttaatgagatgcaaggtgtcgaacatggtatgtgtatcggcagtttatactgggatcctattatgatatatgccggtggacagacaggttgggcgcactatgaatccaacgatatgaatactgtgaatgttgtcgataatactacattatttgactttaacggacgcgctttaccggcgttatttgcttataatcaatttaataaaggtgataaaaatgtatcagattga

SEQ ID NO: 75724 - protein, 161 aa, Unknown
  Obtained from environmental sample
  misc_feature (1)..(161): Xaa is any amino acid
MRNVDYDIIGASYYPYWTQKTAVQYASFANSVALEFNKPVMCMETGLNWAARTGAGNIGQLSNNGPYGLVDDSTPELQRDFLVDFFNEMQGVEHGMCIGSLYWDPIMIYAGGQTGWAHYESNDMNTVNVVDNTTLFDFNGRALPALFAYNQFNKGDKNVSD

SEQ ID NO: 75725 - DNA, 858 bp, Unknown
  Obtained from environmental sample
  misc_feature (1)..(858): n is a, c, g, or t
ttgcatttatttgccaaatcatttgaaaaaaatctttgtctcgcaaagactgttctgccatctggatcacaagaaatagaccctaaagacataaataccctgcgctatgccgttcgcgtagatgccagggacggaacgggattcctgttcattaataattaccaggatcatgccggaatgcttccaaaaaaggatgaaaaaataacaattaaattgccaaatgaagaaataatattcgacggaatatcgctggcggcaggtgaaaactgcgtgttaccttttaatatgaatataaacggtataaaactctgtaacgctttagcccagcctttaactgtaattgaggcgaacgaagaattatttgcatttttcttcgctccacagggaataaaaccaagttatatatttcccgtaaatactcaaatcaccgggacaaatgaatggagtactacatcagatggttttattaaggtagatgccggctgggatatgcctgtatttaccgcgacacagcaaaaccaaaaagttaattttgtaaccttgatccgcaagcatagccttcaatttagcgtggaggaatacaaaggcaaaaaaatcgcagtgatatgcgatggcgtgttgttatctgataaaaacaatatacgaattgagcatgactcaaatatgactgctataagtgtgtttccggataatgtcttacccatcaataaagccgtacgcattgggcagcaaggaatatttacagaataccggctggaatacaatactgtcttaccggaaattaagctcaagcaaattggggctacccgatatactattgatatccccaatgggataccaacatctcggccgatctga

SEQ ID NO: 75726 - protein, 285 aa, Unknown
  Obtained from environmental sample
  misc_feature (1)..(285): Xaa is any amino acid
MHLFAKSFEKNLCLAKTVLPSGSQEIDPKDINTLRYAVRVDARDGTGFLFINNYQDHAGMLPKKDEKITIKLPNEEIIFDGISLAAGENCVLPFNMNINGIKLCNALAQPLTVIEANEELFAFFFAPQGIKPSYIFPVNTQITGTNEWSTTSDGFIKVDAGWDMPVFTATQQNQKVNFVTLIRKHSLQFSVEEYKGKKIAVICDGVLLSDKNNIRIEHDSNMTAISVFPDNVLPINKAVRIGQQGIFTEYRLEYNTVLPEIKLKQIGATRYTIDIPNGIPTSRPI

SEQ ID NO: 75727 - DNA, 786 bp, Unknown
  Obtained from environmental sample
  misc_feature (1)..(786): n is a, c, g, or t
atgggtggtggtgatgatgatgatgatagtgaaatatttttaaaagaactccatcagaaagaagcatatgaacataacaagaatgcaaaattactnttagacaaagctgcttcaacgtccgataaaagtaaagatgatttaattaataacgcaattagtgaactctatagatcgctttctatcgacaaagagcttgcagaaacatattatttgctaggttccgcctatgtaaaattgggtgagtattattcattctttaataatattccaagggcaatagaggtttataatgagagtttgcaaaattttcaaagagctgaagataaaatatatgagcctagaacaaatatattctatgaaaggggaaaggcattcaatgcgcttggttccatttatcaaaataataacgccgatctttcagaagactatttctttagagcacttgatgaatatgtattttgtatagttaacgactatccatcacaaaatgcccatttcgaaattgcagaaatctattgcaaaatgggaaatttccaagaggctataaaatattatactgatgctttaaaagttattaatataaccagaccaactgaaaatgaaatacttatcaggcgttccaatgcatactatctattagggatgcgctattttctttttcaagattactcgagtgctattaaatcttataagaagtctgtcaacgataaccataaaaactactatgcacattatgaactgggaaaaacatatacatttgaaaaaatngtggttggagagtattga

SEQ ID NO: 75728 - protein, 261 aa, Unknown
  Obtained from environmental sample
  DOMAIN (162)...(195): Tetratricopeptide repeat
  misc_feature (1)..(261): Xaa is any amino acid
MGGGDDDDDSEIFLKELHQKEAYEHNKNAKLLLDKAASTSDKSKDDLINNAISELYRSLSIDKELAETYYLLGSAYVKLGEYYSFFNNIPRAIEVYNESLQNFQRAEDKIYEPRTNIFYERGKAFNALGSIYQNNNADLSEDYFFRALDEYVFCIVNDYPSQNAHFEIAEIYCKMGNFQEAIKYYTDALKVINITRPTENEILIRRSNAYYLLGMRYFLFQDYSSAIKSYKKSVNDNHKNYYAHYELGKTYTFEKXVVGEY

SEQ ID NO: 75729 - DNA, 798 bp, Unknown
  Obtained from environmental sample
  misc_feature (1)..(798): n is a, c, g, or t
gtgggaaaccgctgccgcccggatagacgaacttatgcgcaaggggcgttacatttcacgcgaagccttgacaacgcccttgataacgagcggctcgaactggccaataaactgtggtttttctaccgcgacgatatgcacagtatgccggaggaatgggacgcgggacacgggcatcccgaagatatagttaaaatcaaggcgctgcttgacgatgacgccgaacgccagacaattcgcgaccgtttggaagctgacgttaccgcgtggagccgcgacccggaaagccgttcatggaataacccgttccgcctgctggacgatatgaacaacgccatgcgcctgcccgtcatattccccaacggcgatttcacgcccgcgcggaacttttcttacttcatcacgcaggacgaaatcgacgcgcttattacgcacggcggaagttatgccgagggcaaattccgcgtcctatcgttttttcccggcggctcgcacgggacgctcccgcacgacgaaaaggaaacgctcgcgtttattaaacgcgaatacggtcacggcggcggtacgtggagccaacttccgaactatccgcccgaacctatgccaccgcaaatgccgacatttgtttccgattttgcagttgccatagaaagcgaatttgtttttgtcaaacttggcggtatcgactggcgagtgcttgctgtggaaaacaacagggcgttactcatcagcgatatattttatcaaaaaaaatacgcccatatcattcatacgggcatagaaagctgccttatttga

SEQ ID NO: 75730 - protein, 265 aa, Unknown
  Obtained from environmental sample
  misc_feature (1)..(265): Xaa is any amino acid
MGNRCRPDRRTYAQGALHFTRSLDNALDNERLELANKLWFFYRDDMHSMPEEWDAGHGHPEDIVKIKALLDDDAERQTIRDRLEADVTAWSRDPESRSWNNPFRLLDDMNNAMRLPVIFPNGDFTPARNFSYFITQDEIDALITHGGSYAEGKFRVLSFFPGGSHGTLPHDEKETLAFIKREYGHGGGTWSQLPNYPPEPMPPQMPTFVSDFAVAIESEFVFVKLGGIDWRVLAVENNRALLISDIFYQKKYAHIIHTGIESCLI

SEQ ID NO: 75731 - DNA, 702 bp, Unknown
  Obtained from environmental sample
  misc_feature (1)..(702): n is a, c, g, or t
atgccgattaaaacagccgtccgtaaagaggttatctctttgtttgacgaggaaatagaaaattatccgcttgaaacatcaaatatttatgatcttgttattgataagacaagagtagggatttcagaaccaacatattgcaggaaaaatggtctattatttaccggaaacagccttcattggttaaaactgctcgaaactagttccattgatctaatatttgctgatcctccctacaatattcaaaaggcggcttgggataaatttgattcacaggaacagtatataagttggtcaatagattggatttctgaggcatcccgtattctaaagccaacaggtacgctttatatatgcgggtttagtgaaaacttagcggatttaaagtatcccgcaatgagatttttttctgaatgtaaatggttgatatggtattacagaaacaaggcaaatcttggaaaagattggggacgatcacatgaaagtatattacatttgcgtaaatcaaaacattttacaatgaataccgataatattagggttccttacagtgagcatactctaaaatatccagaacacccacaggcagaaaccagtcaatacggaaacggtaagaaagattcccagttatggaaaccacatccaatgggggctaaaccgaaagacgttatgaaataccgacaacgtgaacgctcgcgataa

SEQ ID NO: 75732 - protein, 233 aa, Unknown
  Obtained from environmental sample
  DOMAIN (70)...(233): DNA methylase
  misc_feature (1)..(233): Xaa is any amino acid
MPIKTAVRKEVISLFDEEIENYPLETSNIYDLVIDKTRVGISEPTYCRKNGLLFTGNSLHWLKLLETSSIDLIFADPPYNIQKAAWDKFDSQEQYISWSIDWISEASRILKPTGTLYICGFSENLADLKYPAMRFFSECKWLIWYYRNKANLGKDWGRSHESILHLRKSKHFTMNTDNIRVPYSEHTLKYPEHPQAETSQYGNGKKDSQLWKPHPMGAKPKDVMKYRQRERSR

SEQ ID NO: 75733 - DNA, 660 bp, Unknown
  Obtained from environmental sample
  misc_feature (1)..(660): n is a, c, g, or t
gtgaccggtgtgctgaagccgatgtatcgtccctacgacatgggtatttttacatccatagaaacgatatgggaaatgcacggggatcatgaactcgatgatgaagatggcgatgagcatggcaatgtcacggcgttgatggtaacgcctatagattacgtcggtttgatgcagatgtaccaggaaacaaaccgcaataacgaggctcaggcggctttccccggccaggtgcttgggaacgtgttcagcatcatggggaacgcggaggatattctgtaccttatatcctatatggtcgttgttatcgggtttctcacaatcatcatcacattgcactggtcctgtcttaaccgaaagcgcgaccatgccacattaagggcaataggcgcacacaaaagcgcgatcttctctttggtacttatcgagagtttgctggtcatgctggtttcaggcattgtggggcttattatcggacacggcatcgcctacgccataggctcctatatgcggaggatctcctatgtctacgccgccgttggctttgatcctaaggagcttgttattctggccgcctacaccctggcaggagtcgccgtttcgatagtccccgcccttggcgtctacagacatgacgccgcctccaacctgagcagtgtttaa

SEQ ID NO: 75734 - protein, 219 aa, Unknown
  Obtained from environmental sample
  DOMAIN (43)...(212): Predicted permease
  misc_feature (1)..(219): Xaa is any amino acid
MTGVLKPMYRPYDMGIFTSIETIWEMHGDHELDDEDGDEHGNVTALMVTPIDYVGLMQMYQETNRNNEAQAAFPGQVLGNVFSIMGNAEDILYLISYMVVVIGFLTIIITLHWSCLNRKRDHATLRAIGAHKSAIFSLVLIESLLVMLVSGIVGLIIGHGIAYAIGSYMRRISYVYAAVGFDPKELVILAAYTLAGVAVSIVPALGVYRHDAASNLSSV

SEQ ID NO: 75735 - DNA, 393 bp, Unknown
  Obtained from environmental sample
  misc_feature (1)..(393): n is a, c, g, or t
atgatgcgaatgttttatgttgctctaagccgggcgcaaaatctgcttatccttccgcgttttggaaagggaaagaagacaccgccgaccagttattatgaaaccaaagaatttacttctttttttgaagaattgaatttaccgacaatcccaataattagtaaaaatattgattcaattccgtccggaaaagaaaaaaccgatgagcttgcaaaaagttattcttatacttcggactttatcttttacaagaagtgtccgcgccagtatatggtgatgcgtaagtatggctttgttcccagcagatcggaaaccatgctttttggcagtcttatccacgaaaccattgaagaccttcataatctgttaataaatgaaaaggagggaaaatga

SEQ ID NO: 75736 - protein, 130 aa, Unknown
  Obtained from environmental sample
  misc_feature (1)..(130): Xaa is any amino acid
MMRMFYVALSRAQNLLILPRFGKGKKTPPTSYYETKEFTSFFEELNLPTIPIISKNIDSIPSGKEKTDELAKSYSYTSDFIFYKKCPRQYMVMRKYGFVPSRSETMLFGSLIHETIEDLHNLLINEKEGK

SEQ ID NO: 75737 - DNA, 423 bp, Unknown
  Obtained from environmental sample
  misc_feature (1)..(423): n is a, c, g, or t
atgaaccaaaaagaaatagaagaacgcattgttgaaatgtttgaagaaaactatcaatctcttcgtcttgccgggggacacgctttgaccgaaaatactaaacgactcgctcttaatcagatcattgcgtattaccgtaaactcaggcatattgcggaaaaagttaccgaaaccgaagtcaagctcacgcttcccaaccagatgacacctaacaaaaacaagttcaacattgagggtattgttgacatagttcgggaagacaatgaagtctggatgtatgatcttaaaacccatgatgccgaatatatccgtgaacatactgaattttatgagagtcaactgaatatttacgctcatatttggcaaaacctcaggaaatatcatcttgatcatacggcgattatttccactgctttaccctga

SEQ ID NO: 75738 - protein, 140 aa, Unknown
  Obtained from environmental sample
  misc_feature (1)..(140): Xaa is any amino acid
MNQKEIEERIVEMFEENYQSLRLAGGHALTENTKRLALNQIIAYYRKLRHIAEKVTETEVKLTLPNQMTPNKNKFNIEGIVDIVREDNEVWMYDLKTHDAEYIREHTEFYESQLNIYAHIWQNLRKYHLDHTAIISTALP

SEQ ID NO: 75739 - DNA, 603 bp, Unknown
  Obtained from environmental sample
  misc_feature (1)..(603): n is a, c, g, or t
ttgaaccaaaatcgggaagctgacttgaggaaggaagttgaccgcttgaaggaactttacgaacagcgccgggccgcctgccggccggaaccggagcccgtggccccgccggcacctgaggttcagaatctcccggaatccccggaggccgcggcgccggaaccgcccggcccgccggatttgccggagccggaggcggacaaggatatgagcatccctgaaaacgctttggaaaacaaggatttttctttcctggacggctgctgggcctcgaagtttcaggatctgtccaatgaaaaaaccaagcagcccatagtcttcatatattgtttcgacaagaccggccgggccagcgtccggatggaggaaaaggacgaaaagggccggcttctggatatctgccgcaccacggcttcggccgaagccaaggggcggaaactggtcataaagcagcacggcccggccatgtgcggcaaaggcggggggtatagccgggccacggcggaatgcgccccggatcccgtccgcggagtgctctgccttttccagcaggacggaagcaagcttcggccccgagccggattcaccagggtcgaggaatag

SEQ ID NO: 75740 - protein, 200 aa, Unknown
  Obtained from environmental sample
  misc_feature (1)..(200): Xaa is any amino acid
MNQNREADLRKEVDRLKELYEQRRAACRPEPEPVAPPAPEVQNLPESPEAAAPEPPGPPDLPEPEADKDMSIPENALENKDFSFLDGCWASKFQDLSNEKTKQPIVFIYCFDKTGRASVRMEEKDEKGRLLDICRTTASAEAKGRKLVIKQHGPAMCGKGGGYSRATAECAPDPVRGVLCLFQQDGSKLRPRAGFTRVEE

SEQ ID NO: 75741 - DNA, 810 bp, Unknown
  Obtained from environmental sample
  misc_feature (1)..(810): n is a, c, g, or t
ttgggcgaggtgcggatagccaaattggacaacagcgcggccattaaagtcgatctggtgctggatatcggcaattcaaggctcaccggcattctggtggaaacccagcctgacagccaaacccaattgacggattgttacaccctgcccatccgggatatatccgagccgggcaaaatctatgatgagccagtcagttcgcgggtggaattcgcggagccctatttcgggccgcccgaattaagcctggaatcccgcgggcaccaccagagcttcccctggccttccatcgtccgtctggggccggaagcggcccgcctggccgcggattcccgggaagaccggggcccgaccggcatgtccagccccaaacgctacctttgggatacgaggccgcagaccaaaatggactggtatttgaataacaaatatcagcggtatggggaaaacgaggaacaggccgtcgttcgggggattttcctggacaagatcaacagcgccggcctgcccctgtccgtcgtgcccgccggccgcggcaagattcagattcccgaggaaatctcaaattccgacgggcccagcaatgacgacatggtggcctttgaagcccgctacagccgcagttccctcatgctcttccttttaagtgaaataatcgcccaggccctttccgccgccaatgaccccaagaggcgggacaaccggcaccccctcctgccccggcatctggccagaatcatacttaccgtgccggcggccatgcccctggggagcagaatatctnaaaacctggcgctcgtgccaatctga

SEQ ID NO: 75742 - protein, 269 aa, Unknown
  Obtained from environmental sample
  misc_feature (1)..(269): Xaa is any amino acid
MGEVRIAKLDNSAAIKVDLVLDIGNSRLTGILVETQPDSQTQLTDCYTLPIRDISEPGKIYDEPVSSRVEFAEPYFGPPELSLESRGHHQSFPWPSIVRLGPEAARLAADSREDRGPTGMSSPKRYLWDTRPQTKMDWYLNNKYQRYGENEEQAVVRGIFLDKINSAGLPLSVVPAGRGKIQIPEEISNSDGPSNDDMVAFEARYSRSSLMLFLLSEIIAQALSAANDPKRRDNRHPLLPRHLARIILTVPAAMPLGSRISXNLALVPI

SEQ ID NO: 75743 - DNA, 681 bp, Unknown
  Obtained from environmental sample
  misc_feature (1)..(681): n is a, c, g, or t
ttgactaccatgcaaaaattatgcgcagagttcattcagcgcgagcttatccgcatttcaagcgaggtgcagcgcaggtcgtttgacgatgctattgatgtgcaggacttgctcgactcggcgcagcaggagattcttacgctggcagacggcaacgtgaagcgcgaggcagaggctgtgagcaacgtggtggacagggtgatgcgccgcattgaggagctgggtaagagcgagaatgactttagcggcgtaccttcgggctttaccgcgcttgacaggctcacgcagggctggcagccttcggacttgattgttatagcggcacgccccgccatgggtaaaacggcgtttgtgcttactatggcgcgcaacatggctattgaccataaacgccccatagcgtttttttcgctcgaaatggcaagcgaccaattagtaactcgcttgctgatgagcgagagcggacttagcggcgaaaagctgcgcagcggcaggctcgataaagatgaatggaatcagctgagcagcagcattcagcccttgcttagcgcgcctatttacattgacgacacgccgggcttaggcatttacgagtttcgctctaaggtgcgccgcctgtacgttacgcaccacatacagtgcgtggtgattgactacctgcagctcctcggccgaatctga

SEQ ID NO: 75744 - protein, 226 aa, Unknown
  Obtained from environmental sample
  DOMAIN (80)...(226): DnaB-like helicase C terminal domain
  misc_feature (1)..(226): Xaa is any amino acid
MTTMQKLCAEFIQRELIRISSEVQRRSFDDAIDVQDLLDSAQQEILTLADGNVKREAEAVSNVVDRVMRRIEELGKSENDFSGVPSGFTALDRLTQGWQPSDLIVIAARPAMGKTAFVLTMARNMAIDHKRPIAFFSLEMASDQLVTRLLMSESGLSGEKLRSGRLDKDEWNQLSSSIQPLLSAPIYIDDTPGLGIYEFRSKVRRLYVTHHIQCVVIDYLQLLGRI

SEQ ID NO: 75745 - DNA, 819 bp, Unknown
  Obtained from environmental sample
  misc_feature (1)..(819): n is a, c, g, or t
atgggtgagcacgatctggtggttgccatggtaggccgtgaaattgtccaattttttccaaagcgggacgtagttcctggcgaagaaattttcagggtggaaaagctcggcaggacgggctttttccgcgatgtgagtttttccgtacgcaagggtgaaattgtcgcgcttactggcctggtgggtgccggccgcaccgaggtttgcgaggcgatttatggtatcacctcttacgattcaggcggcgtttttcttgaagggaaaaaattgccgccgccgcagcccgcggatgccattgcgtccggcatcggttttcttcccgaagatcgcctgaaacagggactgatactccgctgggaaatcgccaaaaatatcagcctgcctgcgctggcaaaattccttcgccacggcatggttgacatcgaaaaggaaaatcgggaagcaggcgagctcgctggcaaactgggagtgaaagcccaaagcattcacgacaaggtttcgaccctttcaggcggaaatcaacagaaagtgatagtggccaaaatcctgagcggcagcatgaaactcatcatacttgacgaacctaccaagggcgtcgatgttggcgcgaaaaccgccatttacgagatcatgaacgagctggtgaaaatggggtacggtatcattatggtttcttcggaaatgcccgaggttcttggcatgagcgatcgaattgtggttatgcacgaaggcagggtgagcgcgacttttaacacaggggagcggatcagacaaagatactcanggcagccatgcaggattcggaatcaaagattctga

SEQ ID NO: 75746 - protein, 272 aa, Unknown
  Obtained from environmental sample
  DOMAIN (52)...(244): ABC transporter
  misc_feature (1)..(272): Xaa is any amino acid
MGEHDLVVAMVGREIVQFFPKRDVVPGEEIFRVEKLGRTGFFRDVSFSVRKGEIVALTGLVGAGRTEVCEAIYGITSYDSGGVFLEGKKLPPPQPADAIASGIGFLPEDRLKQGLILRWEIAKNISLPALAKFLRHGMVDIEKENREAGELAGKLGVKAQSIHDKVSTLSGGNQQKVIVAKILSGSMKLIILDEPTKGVDVGAKTAIYEIMNELVKMGYGIIMVSSEMPEVLGMSDRIVVMHEGRVSATFNTGERIRQRYSXQPCRIRNQRF

SEQ ID NO: 75747 - DNA, 501 bp, Unknown
  Obtained from environmental sample
  misc_feature (1)..(501): n is a, c, g, or t
ttgcctggagttacgttgggccattttccttttatacttctggcgtttatagttgcggcaattgtcttcggtattgtgcttcacagaaccggattcggcagaatcctttacggaatgggaagcaataatttagcctgtaaatattcgggggttaaaacagaccgcgttgtaatgatcgtcagccttattaccggtctgatgtgcggggtatgcgcgatttttctcacgtctcgtatgggcagtaccaggccaaacgtggcacagaactacgagcttgacgtaatcgcgatggtggtgcttggcggggtcagcacttcgggcggcacaggccgcatcgccggtccgcttctggcaatttttgttatcggtttccttaactatggccttgggcttatgaatgtgtccgcccagataatactcattgtactgggtcttttgctgatactttcggtgctcgtaatgaatttgcggtttaacacaaggggaaaatcaccggtgtag

SEQ ID NO: 75748 - protein, 166 aa, Unknown
  Obtained from environmental sample
  misc_feature (1)..(166): Xaa is any amino acid
MPGVTLGHFPFILLAFIVAAIVFGIVLHRTGFGRILYGMGSNNLACKYSGVKTDRVVMIVSLITGLMCGVCAIFLTSRMGSTRPNVAQNYELDVIAMVVLGGVSTSGGTGRIAGPLLAIFVIGFLNYGLGLMNVSAQIILIVLGLLLILSVLVMNLRFNTRGKSPV

SEQ ID NO: 75749 - DNA, 777 bp, Unknown
  Obtained from environmental sample
  misc_feature (1)..(777): n is a, c, g, or t
atggcgagcggagtcgtcgataggattttcggcatttcgtcggcaataatatatgtattagacgcaaacggccacttcatcttcgtgaaccgagccgtggaggagatactcaacttctccaccgaggagatgatcggcaagcacttctcctttattctgccgccggaagagtacgagcgcgtaagccgcgaggtggtgctgccgcggattgcgggcttggcgaccggatccgagatggcgcccaagctcttcgacgagcggcgcagagggatgcggcggacgcaaaacatggaggtcaggctgatgacgcggcgtccgggcgacttccgcataatggtcggcgacgtaaccggaatcgtggacgtggagggcgcctacagcgtcaacgaaggaaccgacgccccgtcgccaaacggcagacgcgatgttttcctaggtagccagggcgtaatattcgacataaccaagtacaaacgcgccgaatttgagcgtctggaactgcaaaaacgcctcttccaaatacaaaaattggacgcggtcggcaagctctccggacgcgttgcgcacgacctcaacaaacagctgggcagcataatcggcacggtggaggtcataaagcagtgcgtaaacgccgccgcaagcgacgaacgtctgtcgacctatttagacaccatactaacggcctccaagaacgccgcccaactttcacgcaaactcttcgagttcagccgcagggggggagagccccttcgagatgctcgacttccaacaaactga

SEQ ID NO: 75750 - protein, 258 aa, Unknown
  Obtained from environmental sample
  DOMAIN (179)...(248): His Kinase A (phosphoacceptor) domain
  misc_feature (1)..(258): Xaa is any amino acid
MASGVVDRIFGISSAIIYVLDANGHFIFVNRAVEEILNFSTEEMIGKHFSFILPPEEYERVSREVVLPRIAGLATGSEMAPKLFDERRRGMRRTQNMEVRLMTRRPGDFRIMVGDVTGIVDVEGAYSVNEGTDAPSPNGRRDVFLGSQGVIFDITKYKRAEFERLELQKRLFQIQKLDAVGKLSGRVAHDLNKQLGSIIGTVEVIKQCVNAAASDERLSTYLDTILTASKNAAQLSRKLFEFSRRGGEPLRDARLPTN

SEQ ID NO: 75751 - DNA, 741 bp, Unknown
  Obtained from environmental sample
  misc_feature (1)..(741): n is a, c, g, or t
ttgaaattgatgataatgacatctttttttgtaaacagacgatctgcaattgatgatcctaatgtatggaaaatgaatttattaggtggtagtaggattagaaatattatttcgaaagtaaaacaattcccaaaactgaataaatatttatatgataataattgtatgattgaagaaggttttgaaataggagggaaaaaagataaatttcctgattttatctatacaatcccatttttgccaacatctgcaatttctgaagaaaaaatagattatacattattaaaagaaatagataaaaatcaaaaatttactaaaattcctgatcagaaagctttcttagctccaaatttaattatttgggaaaacataggagaaaagaaatttcctatgttttttaataacatatctttctcattccaaagaagaataatttccataaaatcagaaaataacgatctcgtattactgaaaaatatacttaagtcatttgaaaaacattatctgttttataaattttttattctcgttacaagttctgaaacattgattaatagaaatgatacatttctattaagggatatgaaaaacatacctttttatatgcatgatgatgatccatttannntgagcgagatnnaatatataaatgatgttatatattattatcagaatttttttatcacggagaaaaatacatngtttggacaatatccccaagacgaattagatccctactag

SEQ ID NO: 75752 - protein, 246 aa, Unknown
  Obtained from environmental sample
  misc_feature (1)..(246): Xaa is any amino acid
MKLMIMTSFFVNRRSAIDDPNVWKMNLLGGSRIRNIISKVKQFPKLNKYLYDNNCMIEEGFEIGGKKDKFPDFIYTIPFLPTSAISEEKIDYTLLKEIDKNQKFTKIPDQKAFLAPNLIIWENIGEKKFPMFFNNISFSFQRRIISIKSENNDLVLLKNILKSFEKHYLFYKFFILVTSSETLINRNDTFLLRDMKNIPFYMHDDDPFXXSEXXYINDVIYYYQNFFITEKNTXFGQYPQDELDPY

SEQ ID NO: 75753 - DNA, 726 bp, Unknown
  Obtained from environmental sample
  misc_feature (1)..(726): n is a, c, g, or t
ttggttgtccagcccgaattattaaaacccataactgcccatcaagttagttttaaagatggtataaaggtagctcataataaggccatttcaagtaagccaaaagtaccatttatgattcatgctgcagaagggaagaagggcgtagatgaaattacaggaaaggaaatacgcctgcttaaagactggggaatactcacccctgaaacaatattagtacattgtataaattcagacgcttcggatatgcaggcaattactcaaggtggaagcagtgttgtttggtgtccatattcaagtgattttgttattggcggtcatgctgacataccagcaatgatctcatatggaataaatgtatgtataggtactgattcttcgtgctcaggaagtaaaaatttaataactgaaatgcagtatgctcaaataaaatataaaaatgagtttaagtcttccatatcaagctccgaattatttaatcaagtaacaattaatccggctcgggctttactaataaataattttacagganaaatagctgatggttataatgctgatatagttattattgataaaaaaaatgataatccttatgatgatgtattgacctgtaacccgnaaaacattgtagtcctgctttgtaatggaatttttgtttatggtgataaagagtattctaatttatggtccctgtatgaaggaataaatatacatctttcaatttaa

SEQ ID NO: 75754 - protein, 241 aa, Unknown
  Obtained from environmental sample
  misc_feature (1)..(241): Xaa is any amino acid
MVVQPELLKPITAHQVSFKDGIKVAHNKAISSKPKVPFMIHAAEGKKGVDEITGKEIRLLKDWGILTPETILVHCINSDASDMQAITQGGSSVVWCPYSSDFVIGGHADIPAMISYGINVCIGTDSSCSGSKNLITEMQYAQIKYKNEFKSSISSSELFNQVTINPARALLINNFTGXIADGYNADIVIIDKKNDNPYDDVLTCNPXNIVVLLCNGIFVYGDKEYSNLWSLYEGINIHLSI

SEQ ID NO: 75755 - DNA, 807 bp, Unknown
  Obtained from environmental sample
  misc_feature (1)..(807): n is a, c, g, or t
ttgcgcgggataactgtcgcggggctgacgctggataccatgatcgccgcctatctgctggagcccgggagcagggttaatctggacgatctcgccgcgcggtatcttggccgccggacgatacactatgaggatgtcgtacccgaccgaaagagcacccttgccgacgcgcctcttgacgccgtgcttgcctacgccgccgaggacgccgaggtctgttacagtctcgccgcgcgccttacgcctcttcttgccggggcgaagcttgaatcggtgctgcgtaccatcgagcttccgctcatccccgtgctggccgcgatggagataacggggatagcctatgacggcgagcttctggcggaaagttcccgtcaactgggggagcggatcgccgcgctggagcagagcatctacgcggagagcggcacggagtttaatctgaactcgcccaagcagctcgcggacatactcttcgggcagcttaggcttccgccggtcaaaaaaacgaanaccggatattccacggacgaggaggtgctcgccgaactcgcggtgcatcatgagatagcgcggctccctgctgaaatacggcgatcccataaagctcagaccacctaccttgatgtgctgccgacgctcgcgcatccggcgacgggacggatccattccagctttnancaggncgtcacgggcacagggcgccctcttctcagcgaacctaatctgcaaaatattcccctgcgccaaggatgcccggggtatgcctgcccccgccctttgtcccggcgcccgggcttgggtgtttaa

SEQ ID NO: 75756 - protein, 268 aa, Unknown
  Obtained from environmental sample
  misc_feature (1)..(268): Xaa is any amino acid
MRGITVAGLTLDTMIAAYLLEPGSRVNLDDLAARYLGRRTIHYEDVVPDRKSTLADAPLDAVLAYAAEDAEVCYSLAARLTPLLAGAKLESVLRTIELPLIPVLAAMEITGIAYDGELLAESSRQLGERIAALEQSIYAESGTEFNLNSPKQLADILFGQLRLPPVKKTXTGYSTDEEVLAELAVHHEIARLPAEIRRSHKAQTTYLDVLPTLAHPATGRIHSSFXQXVTGTGRPLLSEPNLQNIPLRQGCPGYACPRPLSRRPGLGV

SEQ ID NO: 75757 - DNA, 438 bp, Unknown
  Obtained from environmental sample
  misc_feature (1)..(438): n is a, c, g, or t
ttgccggtaatagacacatcgaaccgttatggaatagttgaaccttttataacggcgataggacaatcatcagccaaggacagaagccgctcattggacgatccgctttcaacggtggtaacaaaacaggaacacgttttggttgaaccgtttttaataaattattatggaaatggcaatgcctactctatcgacgttcctcttggtacagcaaccacaaaagacaagtttgcgctcattgaaccgggcggtgagtttgctctggacattaggttccgtatgttacaaccgcatgaattggcagcggcgcaagggttcccccgtgattataagttttgcggaacgaagggcgatattacaaaacagataggtaatgctgtcccggtaaatacctccagggaattggcgtattgttgtctacaaacggaggctgcgtaa

SEQ ID NO: 75758 - protein, 145 aa, Unknown
  Obtained from environmental sample
  misc_feature (1)..(145): Xaa is any amino acid
MPVIDTSNRYGIVEPFITAIGQSSAKDRSRSLDDPLSTVVTKQEHVLVEPFLINYYGNGNAYSIDVPLGTATTKDKFALIEPGGEFALDIRFRMLQPHELAAAQGFPRDYKFCGTKGDITKQIGNAVPVNTSRELAYCCLQTEAA

SEQ ID NO: 75759 - DNA, 966 bp, Unknown
  Obtained from environmental sample
  misc_feature (1)..(966): n is a, c, g, or t
ttgaacgtcaaaacacgttctgccgttaatcgcggcttcatattgttaaccgtcactttctccgcttttccggccgccgtgccctcgcagaccgtgaagggggacaccgttagactgcgccgcgttgtgtctcccgaaaagcctatgtggattgtacatattgacacgtggaactatgccgaccctgcaaaaattatagacttgattcccaaagacattctcccttatgtggtgtttaacatctcgctttccatcaattggaatcacgatgagaacagatggattattgtgcaatacggctacgaaacggctaaatcttggctgagaacctgtgcggaaaaaggtgtttgggcaatgattcagccatcaagcggcggccagagtcatttccccgactataccaatgccggaaacatagcaactcaagatgcgcagtttgaagattcgtggtacggcgaatttttccgagattatcctaattttcttgggtttaactattgcgaacagttctggggttttgaccagacaaaaaaaattgaccctaccgtgttagggtatgacgcaccgtcttttactccgtccacagtggacagatacaaacactttgctggattgctcaggctatgcaacagatacggaggttatcttgtaatcagttggagcgggaatgagtggagcccaaacataaatccgctcgctatgctcaaacgcgttcccgaatggagaacatcttgccaaaactatttccaaaactatattgttatagaaaaatacacacaggcaacctacctttacgatagggagagccttgtttttgggcagttcctttcgggctatgccggtaatttcggcgttcgctacgatgaaactggatggactgaccacgattgggcaaacgatggagaccggggaggcgatgacaagggagaatatacgttgttcaccgggtttgcccgctcattttga

SEQ ID NO: 75760 - protein, 321 aa, Unknown
  Obtained from environmental sample
  SIGNAL (1)...(29)
  DOMAIN (31)...(319): Glycosyl hydrolase family 98
  misc_feature (1)..(321): Xaa is any amino acid
MNVKTRSAVNRGFILLTVTFSAFPAAVPSQTVKGDTVRLRRVVSPEKPMWIVHIDTWNYADPAKIIDLIPKDILPYVVFNISLSINWNHDENRWIIVQYGYETAKSWLRTCAEKGVWAMIQPSSGGQSHFPDYTNAGNIATQDAQFEDSWYGEFFRDYPNFLGFNYCEQFWGFDQTKKIDPTVLGYDAPSFTPSTVDRYKHFAGLLRLCNRYGGYLVISWSGNEWSPNINPLAMLKRVPEWRTSCQNYFQNYIVIEKYTQATYLYDRESLVFGQFLSGYAGNFGVRYDETGWTDHDWANDGDRGGDDKGEYTLFTGFARSF

SEQ ID NO: 75761 - DNA, 630 bp, Unknown
  Obtained from environmental sample
  misc_feature (1)..(630): n is a, c, g, or t
gtgagaaaaacttttgtaaaagtaaaagattatgttcttgtttatgcaaaaaataaacctttgattgataacaaacaacctctttttgatgaatcaagagagctttatgatagtcattataacactataattgaaaataatctttcaaaaaaaacattactccaatttctaaaagaagttcaatggattaaagaattgtttgaagaaaacaattttaagataaataccaaaaacattaatcgcttaatgaaaattagtaataaatttaaagaatatatttttatagaaatatcaaaaaaactttatgcagatgctccattcaacaaagatatagacataaaagacaaatcatcacaaattccatttatatatgaggataaaatactttttaaaacggcaacaggaagtttaagaatgtatctacctttttcagacactttaagacagtcagatgactatatttctcaatttacaagaactactattcgtggagatttgtggaaagggttccattttgacatgaggaatattcaagatgagggttgtattcctttcaaaaatggaaaaaagcctgttcgtttaataaaacaattcgcaaaatggtataacataaaaaatgccatcatntag

SEQ ID NO: 75762 - protein, 209 aa, Unknown
  Obtained from environmental sample
  misc_feature (1)..(209): Xaa is any amino acid
MRKTFVKVKDYVLVYAKNKPLIDNKQPLFDESRELYDSHYNTIIENNLSKKTLLQFLKEVQWIKELFEENNFKINTKNINRLMKISNKFKEYIFIEISKKLYADAPFNKDIDIKDKSSQIPFIYEDKILFKTATGSLRMYLPFSDTLRQSDDYISQFTRTTIRGDLWKGFHFDMRNIQDEGCIPFKNGKKPVRLIKQFAKWYNIKNAIX

SEQ ID NO: 75763 - DNA, 666 bp, Unknown
  Obtained from environmental sample
  misc_feature (1)..(666): n is a, c, g, or t
atgctctatgtctttgccatggggatagccgtctcgataatcaacatagcctccatgtccatttccatgggcagcatgttcggctcccgcatgacagagcacgctacggagagcgcggctgctgcgactgcacccgacgatgtcattgccgccaccgctgggttttccactggtgtgtcgcagagttcggacacctttgctgcacttagaacagagaggaacgcggtcgagactgcaatgattaatgacgcggtcaccgacatcgcggcgcagacgtctggcatagcggccgtcataaatcccacgacgatcctgctggtgctgctgatgatgattcccctgggcctgatgttctcgacgctgataatactgatggggattcaggcgaaaaactcccaagaggccgggactgcaatgatgccgattttcttggtggtcgttttcctaagcgtcttctcgatgtcgcccggcatagagaagatgggcatcctgccctacatccccatagtcaacatcagcctggtcatacgcaagctgttcgcccagcaggcgagcgcactggagtatgcgatagccttcctgatgaccatcggcctggccgcgctgatgacttacgtctcgacgaaactcctcggccgcgagtccgccatcttcaaaagcacgtaa

SEQ ID NO: 75764 - protein, 221 aa, Unknown
  Obtained from environmental sample
  SIGNAL (1)...(24)
  misc_feature (1)..(221): Xaa is any amino acid
MLYVFAMGIAVSIINIASMSISMGSMFGSRMTEHATESAAAATAPDDVIAATAGFSTGVSQSSDTFAALRTERNAVETAMINDAVTDIAAQTSGIAAVINPTTILLVLLMMIPLGLMFSTLIILMGIQAKNSQEAGTAMMPIFLVVVFLSVFSMSPGIEKMGILPYIPIVNISLVIRKLFAQQASALEYAIAFLMTIGLAALMTYVSTKLLGRESAIFKST

SEQ ID NO: 75765 - DNA, 582 bp, Unknown
  Obtained from environmental sample
  misc_feature (1)..(582): n is a, c, g, or t
gtgctttggacaggcgtgtttgcgcagggcgagtacgtgaaagacgctttctcggcgttcctctcaggctctctctcgggcaacttctaccgctggcacaactggggcgcagcacccattgacggcaagcaaaaatcggagtgggtgagcttcatgccctacagcattaagggcggtgcgaactacaagttttttgataaccataacgtatttgccaacggtgggtactttactcgcgcacccttcttcaacagcaccttcatcaactacaccatagaaaccaaccccggcgcaaaggttgaaagggtttacaccgctgagctgggctacggctacgccgacaactttctgaacgtaacgctgaacggctactacacgctgtggttagacaagggcttgacgcgcactatgggcggaacgctctacaacattccgggcgttaacgctcgccacatgggtgttgagctggaggctctttaccgccctgtgagcaactttaacctgaagggcatgttgtccgttggcgactggattntgagagatgatgtggactttaccgagtacgatgaaaaccacacgtag

SEQ ID NO: 75766 - protein, 193 aa, Unknown
  Obtained from environmental sample
  misc_feature (1)..(193): Xaa is any amino acid
MLWTGVFAQGEYVKDAFSAFLSGSLSGNFYRWHNWGAAPIDGKQKSEWVSFMPYSIKGGANYKFFDNHNVFANGGYFTRAPFFNSTFINYTIETNPGAKVERVYTAELGYGYADNFLNVTLNGYYTLWLDKGLTRTMGGTLYNIPGVNARHMGVELEALYRPVSNFNLKGMLSVGDWIXRDDVDFTEYDENHT

SEQ ID NO: 75767 - DNA, 822 bp, Unknown
  Obtained from environmental sample
  misc_feature (1)..(822): n is a, c, g, or t
ttgcgattgctcttagaaggcggtataaacgagtacgaggacgactcggagtacgcaccaagcgggtgcgtatcgtttctgacaattcaccaatctaagggtatggagtttccaatcgtgttcgtagactcgctgaacaagggtccgcgcaaatcccacaacgacttgatgatgcaggttgaagagaagtacttcaagcgccgaccgtacgagccgtacggtgatatcaaatacttcgacttctggcgtctctattacacggccttctcgcgagctcaaaatctgctggtgctaacctgcaacgagacaaacaccccacgcgccacgccgagcacatatttcaaaggagtctacgtcaatctacccaacgcggacaatccaccattcaatatccaagaattcgaccttaaaaccgtaaaaaaagcaaatatcaaagagtcgttctcctttacgtcgcacatcatcgtctacgaaacttgctcactgcagtacaagttctacaaagaattggggttcacgcccgttcgggccaacgccatgcttttcggtatactggtacacncaaccatagaggacattcaccgtgccgcactacgtaaagaggagcacctgatcaccgccgaaaatgtggagacttggtttaacgcaaactataccgctatatccaaagcagaacgcacatatcttgcccatcccagagagaggcagcacttaaaacaactctacgctacgctgagcgtcaaagtatcaatggcacactatccaagaagcgaggtagacgtaagcctagttaaaccggactcatcttggagggcggattga

SEQ ID NO: 75768 - protein, 273 aa, Unknown
  Obtained from environmental sample
  misc_feature (1)..(273): Xaa is any amino acid
MRLLLEGGINEYEDDSEYAPSGCVSFLTIHQSKGMEFPIVFVDSLNKGPRKSHNDLMMQVEEKYFKRRPYEPYGDIKYFDFWRLYYTAFSRAQNLLVLTCNETNTPRATPSTYFKGVYVNLPNADNPPFNIQEFDLKTVKKANIKESFSFTSHIIVYETCSLQYKFYKELGFTPVRANAMLFGILVHXTIEDIHRAALRKEEHLITAENVETWFNANYTAISKAERTYLAHPRERQHLKQLYATLSVKVSMAHYPRSEVDVSLVKPDSSWRAD

SEQ ID NO: 75769 - DNA, 534 bp, Unknown
  Obtained from environmental sample
  misc_feature (1)..(534): n is a, c, g, or t
ttgctaactatacatttgtatagtataatcaaaagtatggctcatggtataaaagtagggaaaacaacaggctttgcctctccttcgcagggatatgaagaaacgaatatagacctcaacgaactactgataaaaaacccttcctctacctacctttttcgcctagaaagctctgatatgaccgaattagggctgccccaagggacattactggtggtagaccgttcaaaaaagcctgtttttaatcaatttgcccttatccggcatgaagggcagtttttatgccgccttatggtaaaacacaaccagcaggcggtattcaccaacggcgttagtgaaataacccctacagcggatgaaaccgagattgtaggagctgtcaccgcttccattaaggatacccatgattnacacattgacggtaactcattctatgcggcttgcgagcgtgttttagaccggattataccatacccccctagccgtattgtcaaaataagacgggataggtatcgccccttatgcagaagttaa

SEQ ID NO: 75770 - protein, 177 aa, Unknown
  Obtained from environmental sample
  misc_feature (1)..(177): Xaa is any amino acid
MLTIHLYSIIKSMAHGIKVGKTTGFASPSQGYEETNIDLNELLIKNPSSTYLFRLESSDMTELGLPQGTLLVVDRSKKPVFNQFALIRHEGQFLCRLMVKHNQQAVFTNGVSEITPTADETEIVGAVTASIKDTHDXHIDGNSFYAACERVLDRIIPYPPSRIVKIRRDRYRPLCRS

SEQ ID NO: 75771 - DNA, 579 bp, Unknown
  Obtained from environmental sample
  misc_feature (1)..(579): n is a, c, g, or t
gtgttcgtcgagggcgtaacgatccaaggcacaggcagcgtcacgctttccaacgtgggagatgataggacgcttactgccgatatgttcccgccgacgcttggaatagttgattggtccaccagcaatgcctccgtggcgacagtcgatgctacaagcggcaaggtggtagccgttgccaatggcacagccacaataacggccaccgtgcgtggcactgcctataccgccacccgcgatgtcaacgtaacggcagcagagacggtggaatctgtcaccatcactccaaacgcgaaagtaatacttgaaaagacaggggacgcagccgcaacaaccaagcagttcactgccgaagtcaaaaatggggccggcataaaccactccaacccggccgtcaattggtacagcgagacccccactgttgcctcagtggatgcagccggcttggtgacagcccatttacctggcaaaaccaagatatgggccgagtcaaaggcaaacactgacaaggaatctgccaaggtggatgtggaggtcagcggcatagtgctgacaagaagcacggggagcatacgctag

SEQ ID NO: 75772 - protein, 192 aa, Unknown
  Obtained from environmental sample
  DOMAIN (2)...(81): Bacterial Ig-like domain (group 2)
  misc_feature (1)..(192): Xaa is any amino acid
MFVEGVTIQGTGSVTLSNVGDDRTLTADMFPPTLGIVDWSTSNASVATVDATSGKVVAVANGTATITATVRGTAYTATRDVNVTAAETVESVTITPNAKVILEKTGDAAATTKQFTAEVKNGAGINHSNPAVNWYSETPTVASVDAAGLVTAHLPGKTKIWAESKANTDKESAKVDVEVSGIVLTRSTGSIR

SEQ ID NO: 75773 - DNA, 741 bp, Unknown
  Obtained from environmental sample
  misc_feature (1)..(741): n is a, c, g, or t
gtggcacccaacaccattgtcgaaaaaccgcttcaattggtgaatgtgattgacaccgttgagtcgttggatgttgctcatgcttttgaaattgttgttggggaagggtcttcgctctcgctcattcactgcgatgagtcgatgaacaaggttaaaaataccattcaaactcgtgtttccattgaattaaaaccgcatagttcgctgcattattacaaccttcaaaacatcaataaccacagcacactaaaccatcaaaccgatgtgaaacaacatgaacactcgcatctcatttctcacacgtacacgctgaacggaaaaattctgaacaagcaacaacatgttgatttcgtaaataaatccgctgctgcggatattcaagggttgtatctgttggataaaaatcaggaatatgctcatcgcatccgcctcaatcacaaccatccatttggtcggtcaaaccaactgtttaaagggattttggacgactctgctcaagcgcattttgaaaggcatgtttttgtggcacaacacgctcaaaaaacggaggccctgcaacaccacaaaaatcttttgctaccgacnaggcaaacgtacaaacgcatccgtttttgggaatcaacgccgaatgacgtcaaatgctcgcatggcgctacaatcgggcaaatgggacgaagaacccgctatttctatctgcgccccccctgcattttccaaaaaaaaagccaaaactttgcttaa

SEQ ID NO: 75774 - protein, 246 aa, Unknown
  Obtained from environmental sample
  DOMAIN (20)...(245): Uncharacterized protein family (UPF0051)
  misc_feature (1)..(246): Xaa is any amino acid
MAPNTIVEKPLQLVNVIDTVESLDVAHAFEIVVGEGSSLSLIHCDESMNKVKNTIQTRVSIELKPHSSLHYYNLQNINNHSTLNHQTDVKQHEHSHLISHTYTLNGKILNKQQHVDFVNKSAAADIQGLYLLDKNQEYAHRIRLNHNHPFGRSNQLFKGILDDSAQAHFERHVFVAQHAQKTEALQHHKNLLLPTRQTYKRIRFWESTPNDVKCSHGATIGQMGRRTRYFYLRPPCIFQKKSQNFA

SEQ ID NO: 75775 - DNA, 702 bp, Unknown
  Obtained from environmental sample
  misc_feature (1)..(702): n is a, c, g, or t
ttgccgaatacgacggcttattatggaagcgactcaataggttttttccggtttcccagacacgttgttgaagcggccgatgcaatggttgatttctcccagtatgcacaacttatgaaaaacccaaacagcctcacggacaccaccgaaacacttagagtaccgtcttttcatattatttttgcagggtatggagatgaagtcgtccacaacggacaacaggtttggtcgcacaaatcgatttttatcaacgattccagaacggactaccaaccgttgcaattagatggcgtatgggtaggtgatgtttattcctgttctcccgaattggcgggaggaatcggagcaaccatctccaacgtaggtgttatttgccatgaactttgtcatgcgtttggcgcttccgattactacgatattgactatgacggttcgggcggaaattatttgggttccggcctatgggatttgatggccgacggcatgtggaatggtataacaagcgccgacggctcttcgccggctcanatcaatatgtttcanaaaatactgtttggttgggtaaatccgatcgaactcacgacggccacgtcggtcatccacatgcctaattctgttgacagcgccatggcttatatcgtgaaagtaaaacgccaacgcgaaatgtacgtttttggaaaatcgtcagcaaaaaggctttga

SEQ ID NO: 75776 - protein, 233 aa, Unknown
  Obtained from environmental sample
  misc_feature (1)..(233): Xaa is any amino acid
MPNTTAYYGSDSIGFFRFPRHVVEAADAMVDFSQYAQLMKNPNSLTDTTETLRVPSFHIIFAGYGDEVVHNGQQVWSHKSIFINDSRTDYQPLQLDGVWVGDVYSCSPELAGGIGATISNVGVICHELCHAFGASDYYDIDYDGSGGNYLGSGLWDLMADGMWNGITSADGSSPAXINMFXKILFGWVNPIELTTATSVIHMPNSVDSAMAYIVKVKRQREMYVFGKSSAKRL

SEQ ID NO: 75777 - DNA, 678 bp, Unknown
  Obtained from environmental sample
  misc_feature (1)..(678): n is a, c, g, or t
atgcaatcatttattaggctgttagcttacggcaggccatttgggggcttttgggtcaaatatttattcaccaccatatttagcgtgatttttggcgcgttgaacttcacgctgctcatacccctgctacgtgtcatttttagcagcgaagcaccggcggaggtggcagcggttcctgcttttcagctgaacgttgaattttttaaagacctttttaactacttcttctcaaaggtactggtgagccaaggaacaggcggagcattaaaatttatatgcgctgtcattcttgtatccgttctactctccaacgtgagcaaatatttggctaactatatcatgactggcttgcgtagccgagtgatgagaaatttgagaaaagatatttttgtaaaaattaatgccctgcacatggggtattttaaaacccataacaaaggagatattttatctactgcatcaaatgatgtcaatgaaatacaaagttgtgtagtcgcgggtactcaggtgatttttcaggagccatttttattcatcgcctactttattctgctgctgtacatctcgccgcaactaacgctatttacgtgcatagtgctccctttttctgctctaatcattgttaacttgacaaaaaaaatgaagcgagataccagcaagtcgcagatgctgtggtaa

SEQ ID NO: 75778 - protein, 225 aa, Unknown
  Obtained from environmental sample
  misc_feature (1)..(225): Xaa is any amino acid
MQSFIRLLAYGRPFGGFWVKYLFTTIFSVIFGALNFTLLIPLLRVIFSSEAPAEVAAVPAFQLNVEFFKDLFNYFFSKVLVSQGTGGALKFICAVILVSVLLSNVSKYLANYIMTGLRSRVMRNLRKDIFVKINALHMGYFKTHNKGDILSTASNDVNEIQSCVVAGTQVIFQEPFLFIAYFILLLYISPQLTLFTCIVLPFSALIIVNLTKKMKRDTSKSQMLW

SEQ ID NO: 75779 - DNA, 360 bp, Unknown
  Obtained from environmental sample
  misc_feature (1)..(360): n is a, c, g, or t
gtggaggtactgcgtgaactgcgcggcctgaacaagtccgaacgctggctttttccggctatgcgtctgcacggcgacaaattgcccatgacaggcgatgtattccgcaatgcgttgcgcggtctgggatacagccaaaacgtgatgtgtccgcacggttttcgcgcgatggccgctaccttgctttcagagcagggctggccgtctgaggccatcgagcgccagcttgcccatgctgaccgcaaccaagtcagggcggcgtatcagcgcagtgagttacttgctgaccggcgcgccatgatgcaggcgtgggcggattatctggatacgcgtacagccggggctattctagggaggtaa

SEQ ID NO: 75780 - protein, 119 aa, Unknown
  Obtained from environmental sample
  misc_feature (1)..(119): Xaa is any amino acid
MEVLRELRGLNKSERWLFPAMRLHGDKLPMTGDVFRNALRGLGYSQNVMCPHGFRAMAATLLSEQGWPSEAIERQLAHADRNQVRAAYQRSELLADRRAMMQAWADYLDTRTAGAILGR

SEQ ID NO: 75781 - DNA, 390 bp, Unknown
  Obtained from environmental sample
  misc_feature (1)..(390): n is a, c, g, or t
gtgttgataaatttttccgtcatgggtgtttatcgccagcttggcagttatcctccagaaaaagcagatgttgataaggtcaatatattgatgggtacagatgagtggtttccaattgtgtataaaaaaagtaaacaaggaacattatttgacttaccgaaccttgattatgaacgccaaaaaagacatgtggctgaactcattattgaattttatcgaaaaagattaacaacatgctttacatcagttagtaaagcagttataatgcgcaatatgaatcgtgggcctatgtatgccttaattctcgccagccatcacgcattggcgaaaaagaagatggaagatattttcaaaagagaagagcggcaacaagacgcaatgaccagataa

SEQ ID NO: 75782 - protein, 129 aa, Unknown
  Obtained from environmental sample
  misc_feature (1)..(129): Xaa is any amino acid
MLINFSVMGVYRQLGSYPPEKADVDKVNILMGTDEWFPIVYKKSKQGTLFDLPNLDYERQKRHVAELIIEFYRKRLTTCFTSVSKAVIMRNMNRGPMYALILASHHALAKKKMEDIFKREERQQDAMTR

SEQ ID NO: 75783 - DNA, 585 bp, Unknown
  Obtained from environmental sample
  misc_feature (1)..(585): n is a, c, g, or t
gtgggagaatttgaagtcattgaggaagatataaaatgtaacggaaacgaaaagccgccgatatatgagctacatcttattacaagtatagcaaaagcattcggctgtcaatctgcttatggatggcacaaagggcatgaatcagaatccggtgatatttggattgagggctggtatggtcatacatttgtaggacttgaacatcgtgtaaaaatagcctgctttatcacggaagtcctttttagaaaactgaaaaaggttcgtggtgaatatacaaagcggctaacaagggtgcgttcaacaaaaaacaaaataaaaagggcagacgaattctgccttggatgggtttgcacagtagttgataaactcaacaaatttacaaattcaccagacgaacaaaaggcaatagataattatgtcgctaatctcaagtggggaaataacctaaaaacaattagccgaggggcaataaagggatcagctatagatgactttatgaatggccgccgtgctggtactggtgttgatatacaaaatggaattgaaggacaagagtctggggctttgcttttggagtcggtgtga

SEQ ID NO: 75784 - protein, 194 aa, Unknown
  Obtained from environmental sample
  misc_feature (1)..(194): Xaa is any amino acid
MGEFEVIEEDIKCNGNEKPPIYELHLITSIAKAFGCQSAYGWHKGHESESGDIWIEGWYGHTFVGLEHRVKIACFITEVLFRKLKKVRGEYTKRLTRVRSTKNKIKRADEFCLGWVCTVVDKLNKFTNSPDEQKAIDNYVANLKWGNNLKTISRGAIKGSAIDDFMNGRRAGTGVDIQNGIEGQESGALLLESV

SEQ ID NO: 75785 - DNA, 567 bp, Unknown
  Obtained from environmental sample
  misc_feature (1)..(567): n is a, c, g, or t
ttgttcaaagacaatccatatgtgtggttcaatattatgaacgaacccggccaaagcggtctgatgggcgaacaagcctcctgtgacctgtggtacgagattcacgcgcaagtgattacggccctccgcgaagtcgcgccccataacctcattgtgcttgacgagcatctgtacgggcagggcaattataatccgctcgaccccaacggcccgggcagcgccatcctgaataaaggcccagcgctgaacgccctctttgacaatttggtttattcgctgcatccctacggctggacggattacgcgcgaatggagcaattcgcggcggattgtgtagagagaaatctcgcgctcatcatgggcgaatacggcgcgcaagagggcagtctggccactcacaaatccaccatgcatgtgtacaacacggtattaaaatacaatataggacgcctgtactgngcgtgggaagacggggcgttcggagtgctcgacaaatcgtttcggggcgtcagccggggaatgggattcgagattgaantcaaagacggcacgaagtctaaaagctga

SEQ ID NO: 75786 - protein, 188 aa, Unknown
  Obtained from environmental sample
  misc_feature (1)..(188): Xaa is any amino acid
MFKDNPYVWFNIMNEPGQSGLMGEQASCDLWYEIHAQVITALREVAPHNLIVLDEHLYGQGNYNPLDPNGPGSAILNKGPALNALFDNLVYSLHPYGWTDYARMEQFAADCVERNLALIMGEYGAQEGSLATHKSTMHVYNTVLKYNIGRLYXAWEDGAFGVLDKSFRGVSRGMGFEIEXKDGTKSKS

SEQ ID NO: 75787 - DNA, 615 bp, Unknown
  Obtained from environmental sample
  misc_feature (1)..(615): n is a, c, g, or t
ttgattctgatggatgaactggtaaattacgcaaaaaaattatatggaaggaaggatcttcccgccggaactttcgataactttatcgcctttattcaggaaattaccgaagcggcacgggcaagcaaaaacagcctggttgtcgcttccattcccgaatcggaaattgagatcggcggtgacgcgggaaaaacggttctggaaactattgaacatacctttgggcgcatggaggctatttggaaaccggtagcagctaacgaaggttttgaagttgtccggcgcaggcttttccttaattgtaaaaatcccaatggccgggatgtggtatgcgcgcaatttagccggatgtatatcgacaaccaaagcgatttccccattgagtcaaaagaattggaatatatgccgcgtatggtttcctgttatcccattcaccctgaaattttcgaccggctttatgaggattgngctactcttgaacgttttcagcgtacacgcggtgtcctgcgtctcatggcagcggttattcatgaactatggatggcgaatgacgcaagtctgatgataatgccaggttctataccgcttgatgttcccatatccgtgacgaactga

SEQ ID NO: 75788 - protein, 204 aa, Unknown
  Obtained from environmental sample
  misc_feature (1)..(204): Xaa is any amino acid
MILMDELVNYAKKLYGRKDLPAGTFDNFIAFIQEITEAARASKNSLVVASIPESEIEIGGDAGKTVLETIEHTFGRMEAIWKPVAANEGFEVVRRRLFLNCKNPNGRDVVCAQFSRMYIDNQSDFPIESKELEYMPRMVSCYPIHPEIFDRLYEDXATLERFQRTRGVLRLMAAVIHELWMANDASLMIMPGSIPLDVPISVTN

SEQ ID NO: 75789 - DNA, 444 bp, Unknown
  Obtained from environmental sample
  misc_feature (1)..(444): n is a, c, g, or t
atggcttacgtaaacgttcccaaagaccttagcaaggtcaagacgaaaatagcgctaaatttgactaaaaggcaattaatatgtttcggagcggcggcggctattggaataccgacgtatatattcactcgcggcgtattgggcaacagcggagccgcgatgctgatgataggcgtaatgctgccgctgttctttgtggcgatgtacgagcgcgacggtcaagccgccgaaactatactgcggaactatatacgctgtaagttttattggggcgcaaggcgcttgtacaaaacggagaacctatatgaaataataacgaacggaggaaaaaatattgcaaccgaaagaaaaacaacggatggcgctattgtcggcaaacgtccggcaggcaaacgcaagccgcgcggacgccaaggaatcaaagccgcggcgcgcggccgctaa

SEQ ID NO: 75790 - protein, 147 aa, Unknown
  Obtained from environmental sample
  misc_feature (1)..(147): Xaa is any amino acid
MAYVNVPKDLSKVKTKIALNLTKRQLICFGAAAAIGIPTYIFTRGVLGNSGAAMLMIGVMLPLFFVAMYERDGQAAETILRNYIRCKFYWGARRLYKTENLYEIITNGGKNIATERKTTDGAIVGKRPAGKRKPRGRQGIKAAARGR

SEQ ID NO: 75791 - DNA, 741 bp, Unknown
  Obtained from environmental sample
  misc_feature (1)..(741): n is a, c, g, or t
atggcagacttggcagaagtccaagacgttgcgcgaaggcgtattgtcggtcactggctgaaaatgggcgtttgcactatggaccccgcctccgcttttataggcccccgcgtgaagctatcaagcaagggcataaccatagagccgatggttaggctggagggaaatgtcatcgtcggggacggcactactatcggccaaggctcaataattgttgattcaaccatcggccccaacgtcgaaatacgcccatactcggtcataagcaattcaaacgttggcgaaggcgcaaagatcggcccgttcgcacacctccgcgaaggatcggtgattggctctcaagcccatattggcaattttgtcgagacaaaaaaggcgcgtctgggcagtggctccaaagccaatcacctgtcctaccttggcgattgcgaagtgngcgaaaaaacaatgtcggcgcaggctgcatcacgtgcaactatgacggctttgtccagcataggactgtcattggcaaccgagtcttcatcgggtctggcagccaactggtggcacccgtcgaaagtggcgacggcgcaaatccttggggcggggacgacgttgaacggcnaatgccccaagcggcaacatggttcatcacaaagccccgagaccgttaatcaaggaaggcgggaccctagaaagctcagggaaaagaaaaaaaaaaaaaccaaccgccacccattgaaccccaaccccctttag

SEQ ID NO: 75792 - protein, 246 aa, Unknown
  Obtained from environmental sample
  misc_feature (1)..(246): Xaa is any amino acid
MADLAEVQDVARRRIVGHWLKMGVCTMDPASAFIGPRVKLSSKGITIEPMVRLEGNVIVGDGTTIGQGSIIVDSTIGPNVEIRPYSVISNSNVGEGAKIGPFAHLREGSVIGSQAHIGNFVETKKARLGSGSKANHLSYLGDCEVXEKTMSAQAASRATMTALSSIGLSLATESSSGLAANWWHPSKVATAQILGAGTTLNGXCPKRQHGSSQSPETVNQGRRDPRKLREKKKKKTNRHPLNPNPL

SEQ ID NO: 75793 - DNA, 573 bp, Unknown
  Obtained from environmental sample
  misc_feature (1)..(573): n is a, c, g, or t
ttgtttccgtctattgcgggcattgttgttgtcgttgtgccggtgggagttcccagattaacaagtaccaacgtaggcggtgcggcttcaaccgtaaccgtcacatcaaccgtgtcaaacttactaccgtcagcaacgctggtagctttaatagtcgtattacctgcgccaacaggagttaccacgccgttagctacggtcgctaccgccgtattaccggatgaccatgtcaccgttgtagttaatgtgccggttaccgtggcgcctagtgtcacgtttgtcggtgaaaaactgccgccgtacggcttgttaaaactcaggcctccttcgggtgctccggtaatagtcacggtcaccacatttggctcactgccttgtgttaccgtcacgcttacctcgtcaaacttggtactgtcagcactgctggtagctttaatagtcgtactacctgcgccaacaggagttaccacaccgttagctacggtcgctaccgccgtattaccggatgaccatgtcaccgctgtatttgatgtgccggttaccgtggcgtttaaagtcgcnggttgccggtga

SEQ ID NO: 75794 - protein, 190 aa, Unknown
  Obtained from environmental sample
  misc_feature (1)..(190): Xaa is any amino acid
MFPSIAGIVVVVVPVGVPRLTSTNVGGAASTVTVTSTVSNLLPSATLVALIVVLPAPTGVTTPLATVATAVLPDDHVTVVVNVPVTVAPSVTFVGEKLPPYGLLKLRPPSGAPVIVTVTTFGSLPCVTVTLTSSNLVLSALLVALIVVLPAPTGVTTPLATVATAVLPDDHVTAVFDVPVTVAFKVAGCR

SEQ ID NO: 75795 - DNA, 540 bp, Unknown
  Obtained from environmental sample
  misc_feature (1)..(540): n is a, c, g, or t
atgatcagatcggccgagcgctggccgacagcaggaaacgtgtcctggaccaccgacgcctacggcaacaagtacggctggtatcagctgccgacgcccgggcgcttgtccgaagccgccgggcgtctggccgccgagggcgcgcgcctgacgatgatcacggcctatagccgaaaacagttggctgactcggcgcaggacgtggcctaccattttgaggtcggtaaaagcgccgtctataccgttaccgtgacgcttgaccaggaatgttcctccgtggcttcgatcacgtcccttttccccaacgccgactggcatgagcgcgagatgcgcgaactcaacgccgtgcaggtggacggacatcccgacccccgccgcttgtttctggatgagaagattgaggaaggcattctcggcgaagccgtgcctctgtccattatgatgaacggcgcctgcaccacggatttgtgggaaaaaatcctgaaagatcgcgtccgggccgagcaagaaagcgccgggcgcgaggaggccagatcatga

SEQ ID NO: 75796 - protein, 179 aa, Unknown
  Obtained from environmental sample
  DOMAIN (82)...(144): Respiratory-chain NADH dehydrogenase, 30 Kd subunit
  misc_feature (1)..(179): Xaa is any amino acid
MIRSAERWPTAGNVSWTTDAYGNKYGWYQLPTPGRLSEAAGRLAAEGARLTMITAYSRKQLADSAQDVAYHFEVGKSAVYTVTVTLDQECSSVASITSLFPNADWHEREMRELNAVQVDGHPDPRRLFLDEKIEEGILGEAVPLSIMMNGACTTDLWEKILKDRVRAEQESAGREEARS

SEQ ID NO: 75797 - DNA, 585 bp, Unknown
  Obtained from environmental sample
  misc_feature (1)..(585): n is a, c, g, or t
ttgccaggaagggggatctccgttttgatggaagttctcaagacaacatcaaaccgggcaccatgcccacggagaatccccatggaaagtttcaaccaaaacgtcatcaagcacaagaccggacttttgcatctcgccgccgaactcggcaacatctccaaggcctgccggattatgggcttttcacgcgataccttctacaggtatcaaacagcgcgagacgccggtggcgtcgaggcgctgtttgaggtcagcaggagaaagccgaatctgaaaaatcgcgtcgaagaagctacggaagccgccgtaaccgcctttgccgtcgccttccccgctcacggccaagtacgcaccagcaatgaactgcgcanacagggcgtctttgtttctccttccggagtgcgctccatctggctgcgccacggcctggaatccatgaagcggcgtctggccgccctggagaaaaagtccgccgaagaaggtattgtgcttaccgaagcccaggtacaggctctggaacgcaaaaagcaggatgacgaagcctgcggcgagatcgaaacccaccattcccggctacctcggtag

SEQ ID NO: 75798 - protein, 194 aa, Unknown
  Obtained from environmental sample
  misc_feature (1)..(194): Xaa is any amino acid
MPGRGISVLMEVLKTTSNRAPCPRRIPMESFNQNVIKHKTGLLHLAAELGNISKACRIMGFSRDTFYRYQTARDAGGVEALFEVSRRKPNLKNRVEEATEAAVTAFAVAFPAHGQVRTSNELRXQGVFVSPSGVRSIWLRHGLESMKRRLAALEKKSAEEGIVLTEAQVQALERKKQDDEACGEIETHHSRLPR

SEQ ID NO: 75799 - DNA, 720 bp, Unknown
  Obtained from environmental sample
  misc_feature (1)..(720): n is a, c, g, or t
gtgggcttgatgaacttctccgacctggacatgtccgaaagcggagccggtttgacctggataccgaccggcacggcagccgctccaacgagcagctttgtcggagcctactggggcacgcaaaaaggattcccggttctgacctttaacggcggaaacgcagcgaccaaatcgggagcggcaaacatcacaccggggaatttccaaggggtggatgccgctaaaaactatgccttccttggcgactacacctatgcctcacagagctcgccaagcaatccctcatggattgcctatgtcgtccctggtcaaatccgggtcttcaacacggctgatgccaacggggcgaccctcggcaactggacgcataatctgtctggtgtgacgactggtacacccgtagcgggcaacaccatgcaggcatgggcggacacggcagcgggcacggcgtccaactcaatccgagtcatgtacgtcatgcagtacacgagcaatgtcaaccctgccttccagttccaagcggcaaatggctcttatgtccaaagtcgtgctgcctcagcctacaacggcacggtcttaaacagctacagctcctacaatccaagctttagcgtcaatcccgacggctcggtcacaggcggagcaacggctggctttagcaccaacgattactttacgggcaaccagcaggacggcagcaatgaccctcggccgatctga

SEQ ID NO: 75800 - protein, 239 aa, Unknown
  Obtained from environmental sample
  misc_feature (1)..(239): Xaa is any amino acid
MGLMNFSDLDMSESGAGLTWIPTGTAAAPTSSFVGAYWGTQKGFPVLTFNGGNAATKSGAANITPGNFQGVDAAKNYAFLGDYTYASQSSPSNPSWIAYVVPGQIRVFNTADANGATLGNWTHNLSGVTTGTPVAGNTMQAWADTAAGTASNSIRVMYVMQYTSNVNPAFQFQAANGSYVQSRAASAYNGTVLNSYSSYNPSFSVNPDGSVTGGATAGFSTNDYFTGNQQDGSNDPRPI

SEQ ID NO: 75801 - DNA, 366 bp, Unknown
  Obtained from environmental sample
  misc_feature (1)..(366): n is a, c, g, or t
gtgccgctcggaatacccggtgttgaaataagtgcggccgtcctgtgtgaaaccgacgagctcgccgtccgcgctcgcgcgcaaaatcggcgtcggccgcgcgaacgtccaagcggccgcgacggcgaacgcggcggcggccaaacggcgccgcccaagtatgacgaacataaatcccgcgaacgccgaatacaggcaccacccgggaatgtccgggaactccgccatcgaaaacggcagcgcggccagccgccccgaaaatccgaccgcgaaatcatacagccaatccgaaaccgcgaacgacccgccccacccgaacaacgacgtaatcgttcccgcgaaaaccgcgggcattattccgattga

SEQ ID NO: 75802 - protein, 121 aa, Unknown
  Obtained from environmental sample
  misc_feature (1)..(121): Xaa is any amino acid
MPLGIPGVEISAAVLCETDELAVRARAQNRRRPRERPSGRDGERGGGQTAPPKYDEHKSRERRIQAPPGNVRELRHRKRQRGQPPRKSDREIIQPIRNRERPAPPEQRRNRSRENRGHYSD

SEQ ID NO: 75803 - DNA, 870 bp, Unknown
  Obtained from environmental sample
  misc_feature (1)..(870): n is a, c, g, or t
ttggacggcacttggcgaggacgcccccgcccggagcggcggaagagccgggcctgcgggaaattctgggaggtctgggctggattgcgggtcttgccgcgctctttgcctggatcagggggcggcgtgcatcttgaggactttgcccaaggccgaaccccgctgcatcggctcgatccccggatcaagctgccggcggcgtttttctggtcctgcatggtcgcaacgagcgatcagctgctcctgccggcctgggcgctgggatgcggccttacgctgacgctcatggcccgcttgcccgcgcgcaagctgtggccgcgccttgccttggtgaacgccttcctcgtcctgttctggctcaccctgccgttttccctgcccggcgaacgcatcttttccttggggccgctggatgccggacgtgaaggcgtgctgcttgccctctgcatcacgctcaaatgcaatgccattttgctggccgttaccgccctgctcggcacctcgacggtctttgccctgacgcgtgcgctgcggagtctgggtctgccggaaacgctggcccaaattttctttttcaccttccgctattttcagctcatccactccgaatacctgcgcctgcgcgaagccatgcgggcgcgctgcttcacgccgggcgtcaacctgcacagctacggaagcattgcgcaactcatgggcatgttgctcgtgcgcagcctggatcgcgccgagcgcgtgcatgaggccatgctctgccggggatatgccggaagcttcccgctgttcgggcacgttgccctgcggcggcatgatctgctttttgtcctgttttttgcggcgggttgcgcctgcctgctctttctgacatga

SEQ ID NO: 75804 - protein, 289 aa, Unknown
  Obtained from environmental sample
  DOMAIN (51)...(261): Cobalt transport protein
  misc_feature (1)..(289): Xaa is any amino acid
MDGTWRGRPRPERRKSRACGKFWEVWAGLRVLPRSLPGSGGGVHLEDFAQGRTPLHRLDPRIKLPAAFFWSCMVATSDQLLLPAWALGCGLTLTLMARLPARKLWPRLALVNAFLVLFWLTLPFSLPGERIFSLGPLDAGREGVLLALCITLKCNAILLAVTALLGTSTVFALTRALRSLGLPETLAQIFFFTFRYFQLIHSEYLRLREAMRARCFTPGVNLHSYGSIAQLMGMLLVRSLDRAERVHEAMLCRGYAGSFPLFGHVALRRHDLLFVLFFAAGCACLLFLT

SEQ ID NO: 75805 - DNA, 912 bp, Unknown
  Obtained from environmental sample
  misc_feature (1)..(912): n is a, c, g, or t
gtgtcgctgctgtacgaagccagcgtcgcaggcggcattcccatcgtgcagatcatgaaggaaagtctggccgcgaaccgtatcgtgtcgctttccggcatcctgaacggcaccagcaactatattctcagtaagatggagaccgagggactggatttcgccgccgcgctcgcgcaggcgcaggagttgggcttcgccgaggcggatccgactctggacattgacggccaggacgcggcgcacaaactcgtgatcctcatccgcctggcctacggagcggaatatccctatacggccctgcccgtgcagggcatacgcgacattgaccaactggatatccgtttcgcgcgcgaattcggctaccatatcaggctgctcggcacggtacgggcggaagacggctgtttgcaggccggagtattccccacgcttatccgcaactccgcgctgctggcgcaggtgagcggggcgttcaacgccatccgggtggtcggcaatgcggtggagtctcttttcttccacggcaagggagcgggggccatgccgaccgccagcgccgttgtgggcgacctgctcacgttggcgcgcggcgtcgcgccgaacaatacgggctttgtgaacagggttcccctcgcagcgcgcatcatgccgcctgccgcggcggtgagccggtattacctgcgggttatggtgcgcgatgcgcccggcgttctgcgcgatctcgccggcgctatggccgctgaaggcatcagcattgcccaggccatccagaaaactgaagaacggcgcgccgtgccgctggtgttcatgacgcatgccgcccaggccaagtctatggaaacggccctgaagcagatggagaacaacggcctgctgctcggccccgccgtatgttgccgggttctggactga

SEQ ID NO: 75806 - protein, 303 aa, Unknown
  Obtained from environmental sample
  DOMAIN (225)...(296): ACT domain
  misc_feature (1)..(303): Xaa is any amino acid
MSLLYEASVAGGIPIVQIMKESLAANRIVSLSGILNGTSNYILSKMETEGLDFAAALAQAQELGFAEADPTLDIDGQDAAHKLVILIRLAYGAEYPYTALPVQGIRDIDQLDIRFAREFGYHIRLLGTVRAEDGCLQAGVFPTLIRNSALLAQVSGAFNAIRVVGNAVESLFFHGKGAGAMPTASAVVGDLLTLARGVAPNNTGFVNRVPLAARIMPPAAAVSRYYLRVMVRDAPGVLRDLAGAMAAEGISIAQAIQKTEERRAVPLVFMTHAAQAKSMETALKQMENNGLLLGPAVCCRVLD

SEQ ID NO: 75807 - DNA, 369 bp, Unknown
  Obtained from environmental sample
  misc_feature (1)..(369): n is a, c, g, or t
atgaaccctgccgccgcagaacaaataatccagctgttagaccaacactacccctttgacggggtatgttttttacactatgaaacgccgtggcagttattagccgccacgatactcagcgcccaatgcaccgacgaccgagtaaaccaagtgacggcggcactgtttaaaacctacccggcaccgaaggacttcgcggaagcggcgctgcccgatttggagcgggcaatattttccaccgggttttaccgtacgaaagcggcgcatttacaacaggccgcccagatgctgctggcggaacacggcggcgaactgcccgccgatatggacgcgctgacgcgcctgcccggcggggctcggccgatctga

SEQ ID NO: 75808 - protein, 122 aa, Unknown
  Obtained from environmental sample
  DOMAIN (35)...(121): HhH-GPD superfamily base excision DNA repair protein
  misc_feature (1)..(122): Xaa is any amino acid
MNPAAAEQIIQLLDQHYPFDGVCFLHYETPWQLLAATILSAQCTDDRVNQVTAALFKTYPAPKDFAEAALPDLERAIFSTGFYRTKAAHLQQAAQMLLAEHGGELPADMDALTRLPGGARPI

SEQ ID NO: 75809 - DNA, 516 bp, Unknown
  Obtained from environmental sample
  misc_feature (1)..(516): n is a, c, g, or t
gtgacccgtgcgttctttcagccgacccgtttgctttcgcttcacacccggaacggcgcggcttacaagggcgttatggcgctgatccttggcgaaggggcgcgtgattttatcagcggagacaaaatggacttcacaaactttgccgccgacgcggtggacatccaccatatctttccgcagcaatactgcaaagatcaaaatttcgataagatcaaatggaactgtatcgtcaataaaacgccgattgcttaccgtaccaacagaaaaatcggcggcgacgcgcccagcaaatacctgaaagcgatagaagccgccgccacagccgccgcgctggacgaaaacgtcaagtcgcacggcattgacgtggcttcgcttcgggcggacgactttgacaagttctttgctttgcgggcaaagacgatactccatcttatcgccaaggcgatgggaaagcacatagataacctaaacagcgccgatgtggtggcggccttcggtatgccgctggattga

SEQ ID NO: 75810 - protein, 171 aa, Unknown
  Obtained from environmental sample
  misc_feature (1)..(171): Xaa is any amino acid
MTRAFFQPTRLLSLHTRNGAAYKGVMALILGEGARDFISGDKMDFTNFAADAVDIHHIFPQQYCKDQNFDKIKWNCIVNKTPIAYRTNRKIGGDAPSKYLKAIEAAATAAALDENVKSHGIDVASLRADDFDKFFALRAKTILHLIAKAMGKHIDNLNSADVVAAFGMPLD

SEQ ID NO: 75811 - DNA, 927 bp, Unknown
  Obtained from environmental sample
  misc_feature (1)..(927): n is a, c, g, or t
gtgacgcttgaaaaagaaattaacgatctgaaaaaagaatacgctaaacttgttgtggccacacaacgccataagaatccttctgaaaaactaatgtttattgttgcttcgggaagctttaatcaagcgtatcgtcggattaagtattttcaacaatacagcacacatcgaaaaaaacaaattgcatttattcatcaaaaacaagacgaattggtaaatttgaaaaaccaacttgaacaggaaaaagcggttaaaacgcacctgttaaccaaagaagagcaacaaaaacaaagtttggatgctgaaaaaaacaaaaaaaatcaaaccatatcggatctgcaaaaaaaagaaaaagaattacgcgaagagatccggaaagatcaagtcgaagctaaaaaactttcgcaacaaatagaaaaaattattgctcaagaaatagaaacggcacaaaaagaaaaagcggcagcgaccaaaaagaacgaagaaacaaacactaagaaaggaaccacgactaagccaacatcatctccaacaatttcgacaccgccacctgcggatgttttccaacttacacccgcagaaaaaaaattggcagacgactttgtgagcaatcgtggtaaactgccttggcctaccgaacgtggcgtaatcactgagttttttggcacacacgagcatcaagtgcttaaaggcgtaaaagtttccagcgatggaatagatatcaccacagggaaagacgaagttgtacgcgccgtgtttgaaggaataataacaagtgtaactaacgtgccgtatggcgatgcaaaaatggttattatcgttcacggaaaattaccgaactgtgtatatcaatttgaaatctgtgagtgtgaaatcgggtcaaaaagtaactaccaaacaatctatcggcgttgtcaatacttatga

SEQ ID NO: 75812 - protein, 308 aa, Unknown
  Obtained from environmental sample
  misc_feature (1)..(308): Xaa is any amino acid
MTLEKEINDLKKEYAKLVVATQRHKNPSEKLMFIVASGSFNQAYRRIKYFQQYSTHRKKQIAFIHQKQDELVNLKNQLEQEKAVKTHLLTKEEQQKQSLDAEKNKKNQTISDLQKKEKELREEIRKDQVEAKKLSQQIEKIIAQEIETAQKEKAAATKKNEETNTKKGTTTKPTSSPTISTPPPADVFQLTPAEKKLADDFVSNRGKLPWPTERGVITEFFGTHEHQVLKGVKVSSDGIDITTGKDEVVRAVFEGIITSVTNVPYGDAKMVIIVHGKLPNCVYQFEICECEIGSKSNYQTIYRRCQYL

SEQ ID NO: 75813 - DNA, 771 bp, Unknown
  Obtained from environmental sample
  misc_feature (1)..(771): n is a, c, g, or t
ttggaactgtttcgtgtgaaaatgcttggtaaaaaaggtgaacttaatgatttgttcgaagctttcaaaaccgttgctaatgaagaaaaacgcgaaatagggcaaaaattgaatatcctgaaaaatgcgattcaagaaaaaatagacatcctaaagaattcactcgaaaccacagaaagtgtttctgaaacaacagatttgacgcgtcctgtaaatgattttgcatcgggttctcgacatcccattgcactggttcgaaaagaaataatcgatattttttcacgaatgggttatgtggttgctgaaggccccgaaatagaagacgattggcataattttacggcgttgaattttccgcccgaacatccggctcgcgacatgcaagacactttttttgttgaaaaaaacgagaaaaacgatatcgctttacgtacacacacgtcgtcggtgcaagtacgtatgatggaaacgcaaaaaccgcctattcgtgccattttccccgggcgcgtgtaccgcaatgaagccatttcggcacgtgcacactgcttttttcatcaagtggaagggttgtatattgataaaaatgtgtcgttcgcggatttgaaagaaaccttgttatattttgctaaagaaatgtttggcgaagaaacaaaaattcgactacgaccttcatttttcccattcaccgaaccatccgcagaaatggacatttcttgtaacctgtgtggaggaaaagagttgttcgttttgcaaacattcgggctgggttga

SEQ ID NO: 75814 - protein, 256 aa, Unknown
  Obtained from environmental sample
  DOMAIN (1)...(62): Aminoacyl tRNA synthetase class II, N-terminal domain
  misc_feature (1)..(256): Xaa is any amino acid
MELFRVKMLGKKGELNDLFEAFKTVANEEKREIGQKLNILKNAIQEKIDILKNSLETTESVSETTDLTRPVNDFASGSRHPIALVRKEIIDIFSRMGYVVAEGPEIEDDWHNFTALNFPPEHPARDMQDTFFVEKNEKNDIALRTHTSSVQVRMMETQKPPIRAIFPGRVYRNEAISARAHCFFHQVEGLYIDKNVSFADLKETLLYFAKEMFGEETKIRLRPSFFPFTEPSAEMDISCNLCGGKELFVLQTFGLG

SEQ ID NO: 75815 - DNA, 333 bp, Unknown
  Obtained from environmental sample
  misc_feature (1)..(333): n is a, c, g, or t
ttgggagtggtatcttcgtttgctgcaggcggcccagagcttgaacactggctgcggggtaaaaacgcgctttgcgactaccttgtggattatacgaccaaatcggcgataaaggacggtgggcgtcccaactggacccgggttatctgggatgtgtgtgccgtcggatggcttttggacggtagttttatggaagattatctctgtcccagtcctatacctcagtacgatcatcactacagttttgatccccggaggcactttatccggtacgtgtactatataaaccgggataagctgtttgaggaattattcaggaaactggcagagtga

SEQ ID NO: 75816 - protein, 110 aa, Unknown
  Obtained from environmental sample
  misc_feature (1)..(110): Xaa is any amino acid
MGVVSSFAAGGPELEHWLRGKNALCDYLVDYTTKSAIKDGGRPNWTRVIWDVCAVGWLLDGSFMEDYLCPSPIPQYDHHYSFDPRRHFIRYVYYINRDKLFEELFRKLAE

SEQ ID NO: 75817 - DNA, 744 bp, Unknown
  Obtained from environmental sample
  misc_feature (1)..(744): n is a, c, g, or t
ttgacgactttgttagggattggcgagcccaggggggagatacaattacatcggaagtttccgcatggtaccgttctgtccgatgacagtaattactgtggggcaggcaaaaccatcgcctgtcccatacagggaaatattggtatggtatctttaccgaaaattttaaaactaaaaaaatgctggcagcttcatataatgatgctgccaatattagttctattgataatattctgttatatcccgatggtgggcattgtcatttcctttcaggatttccttcccacaaagggtttttttggctcgccgtgggtcggcctggctaattttaaattcctgttcagcttaagagatttctcccaaatcatccgcaatacattggtaatctcaggcggtaaaattggtcttgggctgacagtatctgttttttttgcaattctgttgtccgaaagccggttttctctgcttaagaacgttacgcaaacactggtttttttgccttattttttatcatgggttgtattgggaggaatatttctggatgtattttccctgaacggaggaattaaccgggttttatcattttttggtatcgaacgcataatgtttctggggcatccggtctggtttgtaatagttatgataataaccgatgtatggaaaggttttggctacagcatgatcgtattttacgcggcgatccttggaattgacggttccctttatgaaagncgcgactattga

SEQ ID NO: 75818 - protein, 247 aa, Unknown
  Obtained from environmental sample
  misc_feature (1)..(247): Xaa is any amino acid
MTTLLGIGEPRGEIQLHRKFPHGTVLSDDSNYCGAGKTIACPIQGNIGMVSLPKILKLKKCWQLHIMMLPILVLLIIFCYIPMVGIVISFQDFLPTKGFFGSPWVGLANFKFLFSLRDFSQIIRNTLVISGGKIGLGLTVSVFFAILLSESRFSLLKNVTQTLVFLPYFLSWVVLGGIFLDVFSLNGGINRVLSFFGIERIMFLGHPVWFVIVMIITDVWKGFGYSMIVFYAAILGIDGSLYEXRDY

SEQ ID NO: 75819 - DNA, 924 bp, Unknown
  Obtained from environmental sample
  misc_feature (1)..(924): n is a, c, g, or t
gtggaactcggaaagacctatcgggaattggccgaagaattgcccgaatacatcaagaaaatgggctttactcatgtcgagtttatgccagtcgcggagcatccatttagtggctcgtggggttatcaggtaaccggttattatgcgccgacttcgcgtttcggtacacccgatgatttccggttcttggtagataaattgcaccaggccggaattggcgtaatcgtggactgggtgcctgcccacttccccaaagacgcttttgcgttagcgcgttttgatggcacgcctttgtatgagcacccagacccccgcttaggtgagcacccggactggggcacttatgtgttcgactttgggcgcaccgaagttcgtaatttcttggtagccaatgcgacttattggttcgaggaatttcatatcgatggtttgcgcgtcgatgcggtggcatcgatgctttatcgcgactattcgcgtaaagatggcgaatggttccccaacatttatggcggtcgcgaaaaccttgaagcgatcggattcttacaagaggcgaacgctaccgcctacaagcgcacgcctggcgtgatgatgatcgctgaggaatccaccgctttcccaggcgttactgcgcccacttcgcatggcggtttaggttttggcttgaagtggaatatgggttggatgaacgactcactccgctatatggaaaccgaccccatgtatcggcgctaccaccatggcgaattgacgttctctttggtgtatgcgtttagtgagcaatatgttttgccgatttcccatgatgaagttgtgcacggtaagggttctttgatcaacaagatgccagggggatcgtttggcagcaaattcgctaactttggcgggcgtttcttggggttacaatgtggacgcccccctgggtaa

SEQ ID NO: 75820 - protein, 307 aa, Unknown
  Obtained from environmental sample
  DOMAIN (1)...(281): Alpha amylase, catalytic domain
  misc_feature (1)..(307): Xaa is any amino acid
MELGKTYRELAEELPEYIKKMGFTHVEFMPVAEHPFSGSWGYQVTGYYAPTSRFGTPDDFRFLVDKLHQAGIGVIVDWVPAHFPKDAFALARFDGTPLYEHPDPRLGEHPDWGTYVFDFGRTEVRNFLVANATYWFEEFHIDGLRVDAVASMLYRDYSRKDGEWFPNIYGGRENLEAIGFLQEANATAYKRTPGVMMIAEESTAFPGVTAPTSHGGLGFGLKWNMGWMNDSLRYMETDPMYRRYHHGELTFSLVYAFSEQYVLPISHDEVVHGKGSLINKMPGGSFGSKFANFGGRFLGLQCGRPPG

SEQ ID NO: 75821 - DNA, 471 bp, Unknown
  Obtained from environmental sample
  misc_feature (1)..(471): n is a, c, g, or t
atgacgatgcagaagacaagaagaaataaaagagtcgaacccgctacatataaggagatacaagaatctgctgacgaaccgttgaaaattgtaattggtagtcatggaaaggtaatagccaaaaatagccgagtatcaaaagcagcacttgtagaggctaattacaaatgccaaatagacccaagtcacacaacttttttaacaaaacgaagctttccttacatggaaggtcaccatctaataccttgtaccgtaaccaatagcgagcgcttcaaagagaaaaccggcaaaaatattgactgtatagaaaacatcgtctgtatttgtccgaattgtcatagatctgtccattttggagataaacaaacaaaaaaagagaaaataaaggtaatgtttactatgcaggtagagaaacttgcacgatcaggaataaacataaccgaagaagaattgttagcattatacgaataa

SEQ ID NO: 75822 - protein, 156 aa, Unknown
  Obtained from environmental sample
  misc_feature (1)..(156): Xaa is any amino acid
MTMQKTRRNKRVEPATYKEIQESADEPLKIVIGSHGKVIAKNSRVSKAALVEANYKCQIDPSHTTFLTKRSFPYMEGHHLIPCTVTNSERFKEKTGKNIDCIENIVCICPNCHRSVHFGDKQTKKEKIKVMFTMQVEKLARSGINITEEELLALYE

SEQ ID NO: 75823 - DNA, 870 bp, Unknown
  Obtained from environmental sample
  misc_feature (1)..(870): n is a, c, g, or t
atggaaaagcgctatgccttttttccgggatgcgtgctgaccaaggccgccgccgaggcgaatacggccatccgggccgtagccagggcgcttgaggtggaacttgtggaagttcccggctggagttgctgcggagcttcccatgtccaagatatagaacccttggccgcgctgacggcgaacgcgagaaacctcgcccttgccgaacagatcggcgcgcccctgctcaccgcatgcagcacctgcgcgctcatgctgcgccaggccaaagccgcgctggacggcggacgcaaagacgaaatcaacgtctttctcaaaacgggcaagctcacctacaacggcacggttccggtgaccatgctgctgtgggaactcgccaaggatatccccgccctcaaagccaaggtaaaaaaacccctcaacaaattgcgggccgccgccttttacggctgccacaccgtccgtcccgaagcgatcatgggttttgagggttcccaagctccgaagagctttgagaacgtcctcgccgccctgggcgcgacacccgcacccttcgccaaacgtctgagctgttgcggattccacgcggtctattccgccgaggccgacgctctgaanatgatctcggaaatagtggactgcgcgggaaaagccggcgcgcactgcgtagtgacgccctgtccgctctgccagatgcagctcgacatgtatctggacgatgccgccggcgccaccggcatcaaagcgcgtgtgcccgccctgcatttacagcangttgtcggtctcgcccttggcgttccgggcaaagaactcggccttgaacgcaacatcgtggaagtggacgggctgaaaaacatcgggctggcataa

SEQ ID NO: 75824 - protein, 289 aa, Unknown
  Obtained from environmental sample
  DOMAIN (175)...(235): Cysteine-rich domain
  misc_feature (1)..(289): Xaa is any amino acid
MEKRYAFFPGCVLTKAAAEANTAIRAVARALEVELVEVPGWSCCGASHVQDIEPLAALTANARNLALAEQIGAPLLTACSTCALMLRQAKAALDGGRKDEINVFLKTGKLTYNGTVPVTMLLWELAKDIPALKAKVKKPLNKLRAAAFYGCHTVRPEAIMGFEGSQAPKSFENVLAALGATPAPFAKRLSCCGFHAVYSAEADALXMISEIVDCAGKAGAHCVVTPCPLCQMQLDMYLDDAAGATGIKARVPALHLQXVVGLALGVPGKELGLERNIVEVDGLKNIGLA

SEQ ID NO: 75825 - DNA, 825 bp, Unknown
  Obtained from environmental sample
  misc_feature (1)..(825): n is a, c, g, or t
ttggaagacctggaaggaactttttggattaacgatttgcgactttctgggataaacaatgcttggggttatgccacaagaatgcacgggcagcttgatttttccgatgtattttctatctctggcgaactgcgctaccaagatggaaattttgcaactcttaaatcagaagggaagagccccaaaccaacactcagcgaagcgaataccagcttggatgtaaatggaactgcaagcctgaacataaacaaatttttcaaagacgattacggcttgcgtttgccttttagtgttggctacagttccacaacacttcgcccttatttgaaacccgacgatgacattgctcttagccaagataacgcttttgatatgttcagcgattttgcaacatttggtttggaagttaaagatacaagcgaagaacaatctttaagggatgcttctcagtccaaggggtatcagagtttttctcgttcaagaactttgtctattggttttagcaaagattacaaaaaaaatgataatatttttcaagaaattttagggcaaatgtttttggaacgccctgcattgaattattcttatagggaaaccgagcggcgttcagcaaaaatcgcagatagcctttatcagtataacactgttttggaatataaattaggaccttttgaacgaagcaacacatatctgtttggcaataaaaacttacctattgaactgtggcccggaacctttgatttaacggttatggatttgtcttatagcagaaccgaaaatcaagagagagacccgaattttatggatcctcaggggaaaaaataa

SEQ ID NO: 75826 - protein, 274 aa, Unknown
  Obtained from environmental sample
  misc_feature (1)..(274): Xaa is any amino acid
MEDLEGTFWINDLRLSGINNAWGYATRMHGQLDFSDVFSISGELRYQDGNFATLKSEGKSPKPTLSEANTSLDVNGTASLNINKFFKDDYGLRLPFSVGYSSTTLRPYLKPDDDIALSQDNAFDMFSDFATFGLEVKDTSEEQSLRDASQSKGYQSFSRSRTLSIGFSKDYKKNDNIFQEILGQMFLERPALNYSYRETERRSAKIADSLYQYNTVLEYKLGPFERSNTYLFGNKNLPIELWPGTFDLTVMDLSYSRTENQERDPNFMDPQGKK

SEQ ID NO: 75827 - DNA, 357 bp, Unknown
  Obtained from environmental sample
  misc_feature (1)..(357): n is a, c, g, or t
gtgctgaaacgaatatcgtgcgacagcgccatcaaacgcgtagtcttcggccccgacggccaaatcctcgacgtcggacgaacccaacgcaccgtcccaccccacgtcagaaccgcagtcattgcccgcgaccaaagctgcgtcttcccaggctgcgaccagccaccccaacgatgcgaagtccaccacgccatcacccactgggccgatggcggcaccaccagcgcagagaactctgccctgctctgttggcatcaccacggcatagtggataacaacaacatcaaaatgagctacaaccaccgagccaaaaactggaacctcaccaccaaacacggccaacaaatcgggagttag

SEQ ID NO: 75828 - protein, 118 aa, Unknown
  Obtained from environmental sample
  misc_feature (1)..(118): Xaa is any amino acid
MLKRISCDSAIKRVVFGPDGQILDVGRTQRTVPPHVRTAVIARDQSCVFPGCDQPPQRCEVHHAITHWADGGTTSAENSALLCWHHHGIVDNNNIKMSYNHRAKNWNLTTKHGQQIGS

SEQ ID NO: 75829 - DNA, 900 bp, Unknown
  Obtained from environmental sample
  misc_feature (1)..(900): n is a, c, g, or t
atggccgagcgaatgacagctggtcgcccctgggccgccattttcacctgggacgcggacaatctgcccggcctgcgcgaactgggctttgaacatgtctttcatttaccgctgggcacggacaccgaacgcttcgcgcccgcgaaaagcgcaaagccgcccgtggccgcatggcgcagcgaggtttccttcgtcggcaactcgatggtctacaaggtggcaaaacgcatgcaaaagatgcgttttcccgccgcgctgctgcgcggctaccgcgagcttgccgccgcgttcggcgaaagcgacgaacgtctggtgcgcgccttcctgccgcactatagcgcggacatgttcgcaagctaccaatcgctgccggacaacgaagcacgcctcgcctacgaagccctgatcacctgggaagccacccgccagtatcgcacccgttgcgtgcgccggatactgcctttcaagccgctcatcgcgggcgacagaggctggcggcagaacttcaggcacgagagcctgccctggcggctgcacgccgaactcagctattattcggaactgcccgccttctatccttggtcggacatcaacttcaactgcacgagcaagcagatgaaaggcgcggtcaaccagcgcctcttcgacgtgcccgccgccggcgcctttgtgctgaccgattggcgcgaacagaccgacacgctcttcgagccgggcaaggaactgatctgctaccgcgagccggaggaagttccggaacttgtccggtattttctggcccacccggaggaacggcggcgcatcgtgcaggcggcgcgcgcccgcgtgctggcggaacacacctgggcgcatcgcgtgcaacgcatttctacgcacctgcgcgagacttacgggacatga

SEQ ID NO: 75830 - protein, 299 aa, Unknown
  Obtained from environmental sample
  misc_feature (1)..(299): Xaa is any amino acid
MAERMTAGRPWAAIFTWDADNLPGLRELGFEHVFHLPLGTDTERFAPAKSAKPPVAAWRSEVSFVGNSMVYKVAKRMQKMRFPAALLRGYRELAAAFGESDERLVRAFLPHYSADMFASYQSLPDNEARLAYEALITWEATRQYRTRCVRRILPFKPLIAGDRGWRQNFRHESLPWRLHAELSYYSELPAFYPWSDINFNCTSKQMKGAVNQRLFDVPAAGAFVLTDWREQTDTLFEPGKELICYREPEEVPELVRYFLAHPEERRRIVQAARARVLAEHTWAHRVQRISTHLRETYGT

SEQ ID NO: 75831 - DNA, 330 bp, Unknown
  Obtained from environmental sample
  misc_feature (1)..(330): n is a, c, g, or t
atgggcgtcagtttttaccgcattctgggcggatttgttctggcagttatccttggcattccggtgggaattttggttggcacatttaaaatggcggaagcgtttacgcgccctttgtgtgaatttatccgttatatgcctgtaccggcctttgtgccgctgattatgatctgggtcggcataggcgaagaagccaaaatggcggttatttttatgggaacgctgtttcagctgattcccattatcgcagaacatatcatgagtgtgccagacgacttgataaacgcgggctatacgctgggcgccaatcgccggcagtctattttttaa

SEQ ID NO: 75832 - protein, 109 aa, Unknown
  Obtained from environmental sample
  misc_feature (1)..(109): Xaa is any amino acid
MGVSFYRILGGFVLAVILGIPVGILVGTFKMAEAFTRPLCEFIRYMPVPAFVPLIMIWVGIGEEAKMAVIFMGTLFQLIPIIAEHIMSVPDDLINAGYTLGANRRQSIF

SEQ ID NO: 75833 - DNA, 795 bp, Unknown
  Obtained from environmental sample
  misc_feature (1)..(795): n is a, c, g, or t
atgatttcaggtttcgacagatttcccaccagcgacctgaatttccgcaagggtgtggcctatgcgctagactatgaactgattgcgcgaatgatcagcggcccatacggcgaagtcgcntacaccaacgccgtgtcgccggcgcaattgggctacgtggacggttacccgcgcaacaggctggatattgaactggcgaaaaagcatctggacgcgggcggtttcatagaccgggacggcgacggctaccgcgagctgccggacggcggccaaatgaacgtcggcatacttatctactactacccgccggacctggtacccaagtaccggcgcacggcggagatcatgaaggttaagctggcggaagcgggaattcgcgtccaggtcgacgagaagtccttgacgggcaaccgggactatatcctagacgtcatcagaaacaacaaatacgagttgtggctaggttcaacgaccatggcgacagccacctggggcggcatagccaattatgtcgccgaccttgacagtgaccggtccggccggtttttcgggacgttgcgcgacccggaatatctcgacgcctacaccggaatgctcatttcaagcaactaccgcgattacaaacgagcctatgccgacatccagcggatgaacgccgaactcaccacggctatcgtttgggacattacgcgggctttctatcccttccgctccgaccgcttcaccggctgggttaattatcccggcatgggcgtgataaatggcgatacctggtataagacaataatgaaataa

SEQ ID NO: 75834 - protein, 264 aa, Unknown
  Obtained from environmental sample
  misc_feature (1)..(264): Xaa is any amino acid
MISGFDRFPTSDLNFRKGVAYALDYELIARMISGPYGEVAYTNAVSPAQLGYVDGYPRNRLDIELAKKHLDAGGFIDRDGDGYRELPDGGQMNVGILIYYYPPDLVPKYRRTAEIMKVKLAEAGIRVQVDEKSLTGNRDYILDVIRNNKYELWLGSTTMATATWGGIANYVADLDSDRSGRFFGTLRDPEYLDAYTGMLISSNYRDYKRAYADIQRMNAELTTAIVWDITRAFYPFRSDRFTGWVNYPGMGVINGDTWYKTIMK

SEQ ID NO: 75835 - DNA, 906 bp, Unknown
  Obtained from environmental sample
  misc_feature (1)..(906): n is a, c, g, or t
atggcgagctgctgcctcatcggcagtcctcactcctacagcgaaaactgcggcgaagccaaagcgttagacggaaccatgaactacaactttgacgaggccggatgtattatgagttttggagcgcccctctttgacgctccgggaaaaccggctttgaacaggtttctcaaaaacagaacgcgcggccaaaaaataatctacataggcaccaactgcaacagaacggcctctatagccgacgaatggatacctgtaaaaccggggacagagtgcgttttcgcaatagcaatggccggctatatattcaaaaaataccgtaaaactccggccgcgccaaacgctcctgaatggctctccattgcctcacaattgaatgtcaattctgccgcggcaattacgggcgcagatgagaaaaaaataacggcggcagccgaaaccctctgcctcgcaaaaaatccgctcgccgtaacgtggaacaaagcatcatccatagacctgatgacggtctgctgccttaactcaatgctgcgaagtccggcgttttatctgcttgcggacaagggaagcgatgacagaaaatttccgggccttgacagctttatcggaaactccttttttgagatgctttttataaacgaagccaatccagtttactcaagcatctttgggaaagaactctcgaaaaaagccgccggcgcgtttaccgttgcaatatctccctttgtaaacgacagcgcaatgtacgcagactatatattgccgccgttaagcaatatggaacagcttatagacggcggccagcctgtagtaaaaactctcggcgaggcatgcacggttcacagattattttttcgattgcaaaaatattccatcgggcgttctaccatacaaagactacaatga

SEQ ID NO: 75836 - protein, 301 aa, Unknown
  Obtained from environmental sample
  misc_feature (1)..(301): Xaa is any amino acid
MASCCLIGSPHSYSENCGEAKALDGTMNYNFDEAGCIMSFGAPLFDAPGKPALNRFLKNRTRGQKIIYIGTNCNRTASIADEWIPVKPGTECVFAIAMAGYIFKKYRKTPAAPNAPEWLSIASQLNVNSAAAITGADEKKITAAAETLCLAKNPLAVTWNKASSIDLMTVCCLNSMLRSPAFYLLADKGSDDRKFPGLDSFIGNSFFEMLFINEANPVYSSIFGKELSKKAAGAFTVAISPFVNDSAMYADYILPPLSNMEQLIDGGQPVVKTLGEACTVHRLFFRLQKYSIGRSTIQRLQ

SEQ ID NO: 75837 - DNA, 471 bp, Unknown
  Obtained from environmental sample
  misc_feature (1)..(471): n is a, c, g, or t
gtgcgcgccatcgatacgggcgatgacggaatcgtggggtatgtgcaggaacgctgcacaggctgcgtttactgcatggcggcctgccctnacggcgcaatcagcttcaactggaaaaaacctgaatatcacgcattcaaaaactcgctcaaccctgaagccgcaatatcttccaaaggaactatcgcaaagtgttctctctgccatcatatatggagacgcgaaaggcagcgagccgctgccgccggaattaccgatattaacagcgttacatacacgccagcatgcgtaagcgcctgcccgaccggagccttcgtcttcggcgacctgaacgaccatgattcggaactttcgcgcctgattaaagacaaacgcgcttttaatcttgcaaacggaataaagtccaggactaaaccaaatgtgtggtatctcagcgcggctgaatggataaaaaatataataaaattttag

SEQ ID NO: 75838 - protein, 156 aa, Unknown
  Obtained from environmental sample
  DOMAIN (12)...(35): 4Fe-4S binding domain
  misc_feature (1)..(156): Xaa is any amino acid
MRAIDTGDDGIVGYVQERCTGCVYCMAACPXGAISFNWKKPEYHAFKNSLNPEAAISSKGTIAKCSLCHHIWRRERQRAAAAGITDINSVTYTPACVSACPTGAFVFGDLNDHDSELSRLIKDKRAFNLANGIKSRTKPNVWYLSAAEWIKNIIKF

SEQ ID NO: 75839 - DNA, 564 bp, Unknown
  Obtained from environmental sample
  misc_feature (1)..(564): n is a, c, g, or t
atgactgccatttatcccggcagttttgacccggtgacgctggggcatatggacattatacaccgcgccgtccggtttgcggatgttttgatagcggcggtgctgggcaaccctgccaaaaagccggtgttcacagctgaagaacgcgccgcttttttacgggaagccacggcagacatgcccggcgtgcgcgtggaatgtttttccggcatgttggcggctttcgctctggagcggaaagccagcctgattatacgcggggtacgggggctggcggactttgagtatgagaacattgtcgcgcgttttaaccggcaactgacgggggggacagatacatgttttctgatggcggatccggcgcttgcgcatgtttcggccagcaatgtacgtgaggctgccatgctggtctataccaccggttttgacgacgccgtgcttgacgcgatggtggcgccggcagtaaaaaacgcgctgaaagcccggtttctggcaagggagggtactgatggagacgctgctggactatctggacgcgatagaagacatattggacaacagtaa

SEQ ID NO: 75840 - protein, 187 aa, Unknown
  Obtained from environmental sample
  DOMAIN (4)...(133): Cytidylyltransferase
  misc_feature (1)..(187): Xaa is any amino acid
MTAIYPGSFDPVTLGHMDIIHRAVRFADVLIAAVLGNPAKKPVFTAEERAAFLREATADMPGVRVECFSGMLAAFALERKASLIIRGVRGLADFEYENIVARFNRQLTGGTDTCFLMADPALAHVSASNVREAAMLVYTTGFDDAVLDAMVAPAVKNALKARFLAREGTDGDAAGLSGRDRRHIGQQ

SEQ ID NO: 75841 - DNA, 747 bp, Unknown
  Obtained from environmental sample
  misc_feature (1)..(747): n is a, c, g, or t
atgcgttttaaaatccaccatgggacaaaagagattggcggttcatgcgtagaggtctggacggattcagcaaggattgttattgaccttgggatgccactggtcaatcccgacaggactccttttgacgcacgggaaactgaaaatctaaccacggaagaattgatccgtgatggcattttgccggatattccctctttgtaccagaatggcgcaaataccgccttgcttatttcccatgcccatcaggatcattatggccttatgagccgtatcagcccgtcctgccctgtttggcttggctcttcaacacaacttttaatagagctgaccaccacttttacaggcaaggaatggactattcaaaacgcaaaccattttaggcacaacgaaaaatttaaggttgggaatattgatattactccgtacttaatggatcacgccgcctttgatgcttatgctttcttaattgaatcagatgggaaatcaatattctattctggagatttcaggcttcatggcagaaaggctgccctttttaataagttctccaaaaagtttaatgcaaaagttgattatttgctctttgaggggactacaattgggcgaaccgatnagccattccccagcgaaagcgaacttgaagaggaatttgttaaaacttttagggagaccaaggaatcaacctggtctatgtgtccggccagaacattgaccgcttggntaccatatatcgtgcttgtctaa

SEQ ID NO: 75842 - protein, 248 aa, Unknown
  Obtained from environmental sample
  DOMAIN (13)...(198): Metallo-beta-lactamase superfamily
  misc_feature (1)..(248): Xaa is any amino acid
MRFKIHHGTKEIGGSCVEVWTDSARIVIDLGMPLVNPDRTPFDARETENLTTEELIRDGILPDIPSLYQNGANTALLISHAHQDHYGLMSRISPSCPVWLGSSTQLLIELTTTFTGKEWTIQNANHFRHNEKFKVGNIDITPYLMDHAAFDAYAFLIESDGKSIFYSGDFRLHGRKAALFNKFSKKFNAKVDYLLFEGTTIGRTDXPFPSESELEEEFVKTFRETKESTWSMCPARTLTAWXPYIVLV

SEQ ID NO: 75843 - DNA, 510 bp, Unknown
  Obtained from environmental sample
  misc_feature (1)..(510): n is a, c, g, or t
gtgggattttttcattcctgctgcggcggttccaccgaagacagtggggatgtctggtcgcgcaccttgccctacctgcgcgcccggacttcaacgtattgcgagggcaccaagcaccgcgattggggcgttgtggtcggcaaggcggatcttgcccaagcgctcggcatgagcggcgaggtgagcgcgatcggggtgcgcgggcggacttcgggcggacgcgcggtcaatgtctacgcgcagagcacgagcggcgagagccggctgatctcgggagagcgctttcgcgtcctcctgggggcgaaccgcctgaagagccggctttttgatatcaacatccgcgggccctatgtgcaaatcctcgggcatggctgggggcatggagtcggcatgtgccagtggtcgtgcgcgaagatggcggaactcggattcgacgccgcgagcatcgtgcactatttttttacggatgtacgcatcgagccccgcagggtacgctggcaagcgccatga

SEQ ID NO: 75844 - protein, 169 aa, Unknown
  Obtained from environmental sample
  misc_feature (1)..(169): Xaa is any amino acid
MGFFHSCCGGSTEDSGDVWSRTLPYLRARTSTYCEGTKHRDWGVVVGKADLAQALGMSGEVSAIGVRGRTSGGRAVNVYAQSTSGESRLISGERFRVLLGANRLKSRLFDINIRGPYVQILGHGWGHGVGMCQWSCAKMAELGFDAASIVHYFFTDVRIEPRRVRWQAP

SEQ ID NO: 75845 - DNA, 825 bp, Unknown
  Obtained from environmental sample
  misc_feature (1)..(825): n is a, c, g, or t
atggaagaagacgctctcngccttcggatcaccgatgtctttcacgcggcggcccataagcatgtgcggctcatggaaaatttccccgacgaggcggttaagaataatgtctatggcagttacgtggccgcgcgggctgccgcgcgcacgggtgtccgccgctttctgatgatctccacggacaaggcggtgcatccaagctccgtgatgggcgccaccaaacgcgtcgctgagcgtgtggtgctgggtatgaacgggggggcgacgcgctacgtagtcacacgcttcggcaacgtactcggaagccgcggctcggtgctgccgctgtttatccagcagatccgcaacggcggtccgctcacgatcaccgatcccgaggttacgcggtatttcatgtccatccgcgaggcggcgcgtctcgtgatcaaggcctgcagcctcgacgcgggtgaaatatatgtgctcgacatggggcgtccggtcaacatccgccagctcgcgcagcgcctgatcctgctctcggggcatttgcccgatgagattccaatagtctacaccgggctcagaccgggcgaaaaaatgcacgaggagcttctgcacgggcatgagaatctcatcgccgcgccctttgaccgcctctttatcgcgagcaacgccggcgcgcacatcgaggcccccatgatgcaaactcttattgagaaaatggatccgatactgtccgcctccgaccacgaggcgatacgcgcgatgctgtttgaatacgcnggtgtgagcgtttttggaatgacgttttcttttttgatttttttgggggttcaaacgtaa

SEQ ID NO: 75846 - protein, 274 aa, Unknown
  Obtained from environmental sample
  DOMAIN (4)...(156): NAD dependent epimerase/dehydratase family
  misc_feature (1)..(274): Xaa is any amino acid
MEEDALXLRITDVFHAAAHKHVRLMENFPDEAVKNNVYGSYVAARAAARTGVRRFLMISTDKAVHPSSVMGATKRVAERVVLGMNGGATRYVVTRFGNVLGSRGSVLPLFIQQIRNGGPLTITDPEVTRYFMSIREAARLVIKACSLDAGEIYVLDMGRPVNIRQLAQRLILLSGHLPDEIPIVYTGLRPGEKMHEELLHGHENLIAAPFDRLFIASNAGAHIEAPMMQTLIEKMDPILSASDHEAIRAMLFEYAGVSVFGMTFSFLIFLGVQT

SEQ ID NO: 75847 - DNA, 315 bp, Unknown
  Obtained from environmental sample
  misc_feature (1)..(315): n is a, c, g, or t
atggggcggctggctctgcgtaaaagcgatatttgttttgtcacttccgacaatccgcgcacggaaaatccgcacagtattattcaagatattttgcgcggcatgacccattatgctccggcgtataagtatattgttgtcgaaccggaccgcgccaaggccattccgcgggccattgctctggccaagcccggcgattttgtcgtgctggccggcaaaggccacgagacctatcaagtcctcggcaccaaaaaacaccattttgatgaccgcgaggaagcccggaaagctttgaaaaaatggcaaaagaaataa

SEQ ID NO: 75848 - protein, 104 aa, Unknown
  Obtained from environmental sample
  misc_feature (1)..(104): Xaa is any amino acid
MGRLALRKSDICFVTSDNPRTENPHSIIQDILRGMTHYAPAYKYIVVEPDRAKAIPRAIALAKPGDFVVLAGKGHETYQVLGTKKHHFDDREEARKALKKWQKK

SEQ ID NO: 75849 - DNA, 429 bp, Unknown
  Obtained from environmental sample
  misc_feature (1)..(429): n is a, c, g, or t
atggcaaaagaaataaaacggtttaaaacccaagttgtgcaaatcggttctgtccaaatcggcggcggtaatcctgttgctgtgcagtccatgactaatacttttaccaccgatattaaggccaccgtcaaacaaatccgggactgcgcggcggccggctgtgacattatccgcgtgaccgtccctgaccaaaagtctgtcgaggctttcgcggcgatcaaaaaactttcgcctctgccggtcgtggcggacattcatttcgattaccgtctggctatcggcgccattgaagccggcgcggataaaatccgtatcaatcccggcaatctgcagggcgaggctaaattaaaagaaattatcgccgcggccaagaaacggcaaattcccatccgtatcggcgtacacgcgggctccactaaaaaagattag

SEQ ID NO: 75850 - protein, 142 aa, Unknown
  Obtained from environmental sample
  DOMAIN (7)...(142): GcpE protein
  misc_feature (1)..(142): Xaa is any amino acid
MAKEIKRFKTQVVQIGSVQIGGGNPVAVQSMTNTFTTDIKATVKQIRDCAAAGCDIIRVTVPDQKSVEAFAAIKKLSPLPVVADIHFDYRLAIGAIEAGADKIRINPGNLQGEAKLKEIIAAAKKRQIPIRIGVHAGSTKKD

SEQ ID NO: 75851 - DNA, 675 bp, Unknown
  Obtained from environmental sample
  misc_feature (1)..(675): n is a, c, g, or t
atgcgggaactctttaacaccttcaacgccctgcatgggcagaaaaaacagatcatattcacaagcgatcgcacaccgcagcagttacagatggatggccttgatgaccgtctcgcgtcacggatgggcggcggactggacgtggaaattcgcgggccttcgtttgaaacgcgcaaggctatattgatggccaaagccgatgaagagaaagtgcagataccgaacgaagtgtattatttgatagccgacagcatcgaaacggatatacgcagcctcgagaacgccctgaatcgcgtcatcgcggaacacaaactcctgaatcaggagataaccgtcgatatggcaaagcgcattatccgcccgatgtttgccgaaaaaaccgtacgcaatgtttcctttgaggatatactccgcgaaacatccaacgtattcaagctcagtaaaacagacatccgttcaaagagccggaccagccagattaaccaggcccggcagatagtgatgcttctttcgagtaattacatccccatgtcgctcacggagatcgccggtgaactcggcagggaacatcccactattatttccggcatccggcatatagagagcgaattacaaaagaattcccgcctcaaggaaaaattcaacgaaatcatcgaaaatctcaaagcgcgataa

SEQ ID NO: 75852 - protein, 224 aa, Unknown
  Obtained from environmental sample
  DOMAIN (1)...(106): Bacterial  dnaA  protein
  misc_feature (1)..(224): Xaa is any amino acid
MRELFNTFNALHGQKKQIIFTSDRTPQQLQMDGLDDRLASRMGGGLDVEIRGPSFETRKAILMAKADEEKVQIPNEVYYLIADSIETDIRSLENALNRVIAEHKLLNQEITVDMAKRIIRPMFAEKTVRNVSFEDILRETSNVFKLSKTDIRSKSRTSQINQARQIVMLLSSNYIPMSLTEIAGELGREHPTIISGIRHIESELQKNSRLKEKFNEIIENLKAR

SEQ ID NO: 75853 - DNA, 483 bp, Unknown
  Obtained from environmental sample
  misc_feature (1)..(483): n is a, c, g, or t
atgatcgcgcggcttcaggaatatatccgggaacgaacggaaaaaatgatcctgccgtcccttgatctgcgtttgacttatcaaagcctgnaggatgaggaacattttgaaaaaaaactgcgcgcgtcaaaaaaacaggaagatatgtacaaaacgaccgtgattgggccgcatcgcgacagcatcctgtttcttgatcacgggcatgatatgcgggatttttcctcacaggggcaggtgcgcatgacgattttgggaactaaactcgcgcttgcggaattactgcacagagaaagagaacagcaccccgtgtttctgtttgatgatattttgctggagatagatccgcacaacacggaagccatactcgcggcctttggcgaaaggaaccagatgttttttgcgtccacgaccattccggcgcttgattattttaagcggttaccgcaatcctgcttttttgatctcacggggggcgaatga

SEQ ID NO: 75854 - protein, 160 aa, Unknown
  Obtained from environmental sample
  misc_feature (1)..(160): Xaa is any amino acid
MIARLQEYIRERTEKMILPSLDLRLTYQSLXDEEHFEKKLRASKKQEDMYKTTVIGPHRDSILFLDHGHDMRDFSSQGQVRMTILGTKLALAELLHREREQHPVFLFDDILLEIDPHNTEAILAAFGERNQMFFASTTIPALDYFKRLPQSCFFDLTGGE

SEQ ID NO: 75855 - DNA, 300 bp, Unknown
  Obtained from environmental sample
  misc_feature (1)..(300): n is a, c, g, or t
atgtggcatatcacgctggcggggattaagcctacaatcatcattctgctgatattcgcggcgggcgggctgctggcgtccaacttcgaccagacctacatgctgaccaaacagatgggcaacgccatgctgcgcgagcgggctgacgtgctggccacctacgtgctgcgcataggcatacgcgagatgcgtttttcttacgcggcggcggtggggctgttcagcacggtggtcaacttcgcgctggtgctgggcgccaacttccttgccaataagaccggtcagtccgggctgttctag

SEQ ID NO: 75856 - protein, 99 aa, Unknown
  Obtained from environmental sample
  SIGNAL (1)...(26)
  misc_feature (1)..(99): Xaa is any amino acid
MWHITLAGIKPTIIILLIFAAGGLLASNFDQTYMLTKQMGNAMLRERADVLATYVLRIGIREMRFSYAAAVGLFSTVVNFALVLGANFLANKTGQSGLF

SEQ ID NO: 75857 - DNA, 603 bp, Unknown
  Obtained from environmental sample
  misc_feature (1)..(603): n is a, c, g, or t
atgatacctccgctgcggggaccttacggcgcttaccaccagcctaaagcacgtttgggtaacggcgtggtttttacagccgcagctcaaaagcgccccgactttgagagactggtccgcgccgttgacgatatgttgtattccgacgcggctatggaactctggtgcctcggcaaagaaggcgtatccttcttccgcgacgccggcggcaatgtccggttttaccccgcggctttgaacgctccggacggcgtctacaaatacctccaggtcacccacggtatgggcgccgccggtacgcaaatggtatgggtaaacgctctggaaatgcttaagtatgaccaaaactacgcggacataaacaccaaggtcgccgctatgaacggcataccgctgataccgcccaccgccgtccttggcgttgccgacaccgagcgggcgagcatactgcgcgctactctccgcacctccttcgagatttggaacaacgactttatcacgggcaagaaaagcctcgataccgactgggccgcatacgtaaaagagatgaaagatttgggtatcgacgaattccttggtatctacaacagaaacaggagataa

SEQ ID NO: 75858 - protein, 200 aa, Unknown
  Obtained from environmental sample
  misc_feature (1)..(200): Xaa is any amino acid
MIPPLRGPYGAYHQPKARLGNGVVFTAAAQKRPDFERLVRAVDDMLYSDAAMELWCLGKEGVSFFRDAGGNVRFYPAALNAPDGVYKYLQVTHGMGAAGTQMVWVNALEMLKYDQNYADINTKVAAMNGIPLIPPTAVLGVADTERASILRATLRTSFEIWNNDFITGKKSLDTDWAAYVKEMKDLGIDEFLGIYNRNRR

SEQ ID NO: 75859 - DNA, 573 bp, Unknown
  Obtained from environmental sample
  misc_feature (1)..(573): n is a, c, g, or t
ttgttttggcacataagaaaagccgcgcctaaagccccgatagtagtgggttcaaacaaatggaacagccctgagaaatttgcggacttaacgccgctagacgatgacaatgttctatacagttttcattcatatcagcccgtgattttcacccatcaaaaagctgcctggattccagagccatattttcaccaaaaccgctcatggccgggagcttacgaacctccgcagaatagagatgtttctgtgacgctcccacttgaagatggtgcctgggataaaaacaggttgcgttccacaatggaaaacgctctggagttcagagccaagcacaaggttccagttgcctgcaatgaatttggcgtttacgtgcaggttgaacgtgccagccagttgaactggattcgcgattttaccgcacttttaagagaggcggatgtgggtttttcctattggaattacaaaaatctggatttcgggttggtgagcataggcgagaatttgcacaacaatttgccgcaatacaacaatgaagagcggctggacagggaattgctggagttgcttttctaa

SEQ ID NO: 75860 - protein, 190 aa, Unknown
  Obtained from environmental sample
  misc_feature (1)..(190): Xaa is any amino acid
MFWHIRKAAPKAPIVVGSNKWNSPEKFADLTPLDDDNVLYSFHSYQPVIFTHQKAAWIPEPYFHQNRSWPGAYEPPQNRDVSVTLPLEDGAWDKNRLRSTMENALEFRAKHKVPVACNEFGVYVQVERASQLNWIRDFTALLREADVGFSYWNYKNLDFGLVSIGENLHNNLPQYNNEERLDRELLELLF

SEQ ID NO: 75861 - DNA, 810 bp, Unknown
  Obtained from environmental sample
  misc_feature (1)..(810): n is a, c, g, or t
gtgcatatcgcggatcaaaaacgacaagaacaaaagcgtattcttgctttagctgaggttcgtaagaaaattgccaggtatcaaaattgcatttcttgttccgcatggagtacgacggtgatagggcgtggtgactttagttctaaatttataattggtttgaaatcaaacggtactgtagttactgtcggtaattatttagcttatacggggagctactatatgtattccgaatttaataccagtagttggcggaatattattgctgtttgtgcggggtatggtggatatgtattaggattgagatcaaacggaacagtcgcttgggatggggataaaagtaaatatttaaacgctagggctggtctatacgctgttgacaattggcgtgatatcgttgccattagtagtggtagtagctatggctggggctatctgatatacggtttaaaatcaaacggcacggttgtcgtttatagtactgaccgtaaaaacagcgaaacccttggctgtcaagacatagtcgcgatttctggtggttatggcttgaaatccgacggtacggtagttaatctatattacaatagagactgtggatatcgggacatagtcgcgatttccggtacgatttccggtgggttaggcttgaaagcggacggcacggtagtcgggtcagagggcactaaaaactggcgggacatagtcgcgatttccgatgggttaggcttgaaagcggacgggcacgtagtcgggtcagaaggcactaaaaactggcgagacattgtcgcggttgctgttcatggaaagtaa

SEQ ID NO: 75862 - protein, 269 aa, Unknown
  Obtained from environmental sample
  misc_feature (1)..(269): Xaa is any amino acid
MHIADQKRQEQKRILALAEVRKKIARYQNCISCSAWSTTVIGRGDFSSKFIIGLKSNGTVVTVGNYLAYTGSYYMYSEFNTSSWRNIIAVCAGYGGYVLGLRSNGTVAWDGDKSKYLNARAGLYAVDNWRDIVAISSGSSYGWGYLIYGLKSNGTVVVYSTDRKNSETLGCQDIVAISGGYGLKSDGTVVNLYYNRDCGYRDIVAISGTISGGLGLKADGTVVGSEGTKNWRDIVAISDGLGLKADGHVVGSEGTKNWRDIVAVAVHGK

SEQ ID NO: 75863 - DNA, 840 bp, Unknown
  Obtained from environmental sample
  misc_feature (1)..(840): n is a, c, g, or t
atggcagaccttcatgatttcacgggaaaaatacacattgactttcattatgatatagataatatcctcggcgaagctgacagaaaaattgagagtattatactctcgacttcatctattttttataaaaacatttgtgacggatcattggacaggctgcttgaatactttaagaattataaagtacgacaatttttagtcaaagagaaccgtgggggctctttttgctttctggcagaagaaaaaaaattatatgaagctgattcattctatattcctaccatgcattcagtcggagtcggtgatgtctacaactcaatttttataagtacattatttggaactgatatggcaaaaaggatgcgcctggctgctttatgcgccgctaaatatgcggaaaccatgtattataaaaaattcaaggataatgttcaaataatttatgggaatattgatgaagtcaatgatctactcggcattcgattgccttggtctgaaagaaaacatattaatatctatttggctgcgcctgattttcctgaaattgatactgggttactggacaggctaaaggattccttactctatcacaatttcactccgaggctccctatccgggaaaatggaattgcaacaaaagtattgaattatgaagaaaagctgaacatataccgtanagatattattctgttaaatgaatgtgctcttttaattgctgttctgcttaacaatgatcccgggacattagtagaacttggaaatgttcaacagacaggcaaaccaacgattatatttgatccgtttaatattgtaagatatgtttgttngccatacacctga

SEQ ID NO: 75864 - protein, 279 aa, Unknown
  Obtained from environmental sample
  DOMAIN (172)...(279): Nucleoside 2-deoxyribosyltransferase
  misc_feature (1)..(279): Xaa is any amino acid
MADLHDFTGKIHIDFHYDIDNILGEADRKIESIILSTSSIFYKNICDGSLDRLLEYFKNYKVRQFLVKENRGGSFCFLAEEKKLYEADSFYIPTMHSVGVGDVYNSIFISTLFGTDMAKRMRLAALCAAKYAETMYYKKFKDNVQIIYGNIDEVNDLLGIRLPWSERKHINIYLAAPDFPEIDTGLLDRLKDSLLYHNFTPRLPIRENGIATKVLNYEEKLNIYRXDIILLNECALLIAVLLNNDPGTLVELGNVQQTGKPTIIFDPFNIVRYVCXPYT

SEQ ID NO: 75865 - DNA, 459 bp, Unknown
  Obtained from environmental sample
  misc_feature (1)..(459): n is a, c, g, or t
atggatcttacacctttagatattcgtaatcaaaaattcagcgtaaaaaagctgggtggcgtagacgttgacgaagttcaggcttttttaaatcaagttgcgacttcttttgaacagattttagccgaaagagcggacttgctcaaaaccataaacaacgataaaaaaaccgttgaggattaccgcaggatagaaaaaaccataggcgatgctgtggtcacaatgcaaaaagttatagaagaaaaaagaacgcaagcaaataaagaagccgagttgataattgcagaggcaaaggcaaaagccgaaaaagaggttgatgccataagaagccgagcgaccgacctacgtactgaaattgaccgcttgaaacaaactaaaaccagctatttttcaaaacttcgcaatttgatgagaacccaagcagatctattggacaacttggagaatgaagaagcataa

SEQ ID NO: 75866 - protein, 152 aa, Unknown
  Obtained from environmental sample
  DOMAIN (1)...(151): DivIVA protein
  misc_feature (1)..(152): Xaa is any amino acid
MDLTPLDIRNQKFSVKKLGGVDVDEVQAFLNQVATSFEQILAERADLLKTINNDKKTVEDYRRIEKTIGDAVVTMQKVIEEKRTQANKEAELIIAEAKAKAEKEVDAIRSRATDLRTEIDRLKQTKTSYFSKLRNLMRTQADLLDNLENEEA

SEQ ID NO: 75867 - DNA, 930 bp, Unknown
  Obtained from environmental sample
  misc_feature (1)..(930): n is a, c, g, or t
atgcagatcgccgaggtcacggcaaggaaaaatgttaaggttcccgccgtaatagataaagtacaggttaagataataggggagaacgctttcgcaaacaatcagacaatagaaagcattaccctggacaataacaccagaacgatagaggccggggcatttatgaattgctctaagttaactaccgtaaacatacaaaaaaccgcaatacagatgagctttggggacaacgcttttaaaggaacgaaacttactgatgccgccaaggcgaagttgagggatctggggtatacgggggagggcgtaggcgaggaactctttaccgtaaccttcatggtgccaaatggaagcccggtaaaaaagactgcctataaaaacaacacagtaacttttccgaataacccgacgaagacaggctttacttttattgaatggaatacccagtctgacggaaaaggcgccgcgttcaccgcgtccaccaaagtcacgagtaacgccaccgtgtatcccaagtggaaagagaacgccgcccagcctgccgcccagtcaacccagcaggcacagccggctcaatcggctaaaaagacctacaatataggcgatacaggcccaaatggcggcatagttttttccgccggcaaggaatgcagcaaagaccttggcccggtagtctggagtgaagctgacaagcttgtcaaaagtttagggagcggctggaacatgcccacaaagagtgaactgaacgccatgtacaataatctgcagaaaaaaaatatgggcaattttaagaaggattcgtattgggccaaaaacggcaattccgcgtacgcgcaaaatttcggatcgggcgccgacaacaactccccgaaaacgggagataaaaaatatattcgcggccgtggcggaattttaaaggtacacgcacagtga

SEQ ID NO: 75868 - protein, 309 aa, Unknown
  Obtained from environmental sample
  misc_feature (1)..(309): Xaa is any amino acid
MQIAEVTARKNVKVPAVIDKVQVKIIGENAFANNQTIESITLDNNTRTIEAGAFMNCSKLTTVNIQKTAIQMSFGDNAFKGTKLTDAAKAKLRDLGYTGEGVGEELFTVTFMVPNGSPVKKTAYKNNTVTFPNNPTKTGFTFIEWNTQSDGKGAAFTASTKVTSNATVYPKWKENAAQPAAQSTQQAQPAQSAKKTYNIGDTGPNGGIVFSAGKECSKDLGPVVWSEADKLVKSLGSGWNMPTKSELNAMYNNLQKKNMGNFKKDSYWAKNGNSAYAQNFGSGADNNSPKTGDKKYIRGRGGILKVHAQ

SEQ ID NO: 75869 - DNA, 870 bp, Unknown
  Obtained from environmental sample
  misc_feature (1)..(870): n is a, c, g, or t
atgtctgtttatgatgtcaatgacgtgctgcacaaaatcaaggttaagctgtgccggagcaacctgccccgcgcaaagggggcgtattacgccaggccggtcaacgaggccgcgctgtcggttgaggacgtggccgccgcgctgaagaaaaggggcgggtttacgggcagttaccccgacctggtcctgcatgtcgggctgttttttactgagatggcgcgccagctgtgcgacggtttctcggtcaacaccgggtggttttcggtccagccggttgtcggggggctgtttgagccgccggaaggcggctttgacccgaaagggcataaggtaacgttccgttaccgcaccggcgcggaactgcgcaggctcgcggagggtgtcgaaattgaaatggacggcgggccgggcacggcgggccggattggctgttttaccgacgtcgagtccggctcggtgaacgcggcggttacgccgggggggcttttcagggcggaagggcgcagaatcaaggtggcggggggcggcccggaatgcggggtgtggtttgtgtcaacggcggacccgcggcggcggcacagggtcgaaaaggccctcgccgaanacgcaagcgcgaaggttatcggcacggttcccgatttgcccgccggggaatacggcgtcgaaatcgtgacgtgttacacggccggcggcaacgagctgaaagagccgaaaacggttaaaagcggctttacggtgagggcgcataacaataacaaagccgggggggggggcgaaatagcgtgtcggcaacacgctacgcttgctanccccccccccgtcccggccgccggccgggttttaaatttcccgggtagcggcaaaaaataa

SEQ ID NO: 75870 - protein, 289 aa, Unknown
  Obtained from environmental sample
  misc_feature (1)..(289): Xaa is any amino acid
MSVYDVNDVLHKIKVKLCRSNLPRAKGAYYARPVNEAALSVEDVAAALKKRGGFTGSYPDLVLHVGLFFTEMARQLCDGFSVNTGWFSVQPVVGGLFEPPEGGFDPKGHKVTFRYRTGAELRRLAEGVEIEMDGGPGTAGRIGCFTDVESGSVNAAVTPGGLFRAEGRRIKVAGGGPECGVWFVSTADPRRRHRVEKALAEXASAKVIGTVPDLPAGEYGVEIVTCYTAGGNELKEPKTVKSGFTVRAHNNNKAGGGGEIACRQHATLAXPPPVPAAGRVLNFPGSGKK

SEQ ID NO: 75871 - DNA, 756 bp, Unknown
  Obtained from environmental sample
  misc_feature (1)..(756): n is a, c, g, or t
atgaccatacgcattgccaccgtaaacggaacagccgccgagattgcggcccggaacggggttctgcaaatacgtgcaagcaccaagaatgaatttgaagcgaatgaccggttcaggttttcaaagggcgagatacaaggtcctgctagtaataaagtagcaaatctcattattcccagtactatttggggcgacccggttatttccattagtaaagaggcgttcaggaatgctggattaaccagtataaccattcccaacagcattacttccattggggatgaaatgtttgcaaataatcagctcaccagcataatctttccagacagcctcacttccattggggcaaatgcgtttgcagataatgatattcgccagataaccattggcgcgaatgttaatgttgcggatactgcatttaattattacaaaccggcgttcacggacagtaatggaaactattaccccgcaaagtacgtgaattcttattttgccagagagtacaacactatggggcgtatggcatatacttactgctattatagtggctacgatagtggctactggtatttgaatagttggccttcagattttgttggaacatggaaaaggtctgattttgccaataggctgactattaccgaaaccactataaacagtagtagcagtaataatggcgggagaattcgactaanactttcccaacatatgtatgtgtgggaaattattccttcangaaaatcagtttcagaataa

SEQ ID NO: 75872 - protein, 251 aa, Unknown
  Obtained from environmental sample
  misc_feature (1)..(251): Xaa is any amino acid
MTIRIATVNGTAAEIAARNGVLQIRASTKNEFEANDRFRFSKGEIQGPASNKVANLIIPSTIWGDPVISISKEAFRNAGLTSITIPNSITSIGDEMFANNQLTSIIFPDSLTSIGANAFADNDIRQITIGANVNVADTAFNYYKPAFTDSNGNYYPAKYVNSYFAREYNTMGRMAYTYCYYSGYDSGYWYLNSWPSDFVGTWKRSDFANRLTITETTINSSSSNNGGRIRLXLSQHMYVWEIIPSXKSVSE

SEQ ID NO: 75873 - DNA, 834 bp, Unknown
  Obtained from environmental sample
  misc_feature (1)..(834): n is a, c, g, or t
gtggctctttcagcttatgcctggtccggggagctagtgaaggaaattctggtggaactccgtcaatatcttggttttaccggtaaaataattttgggaggatatgagataactgcccgaaataaggaacaactggagatggaatatccgggggtgaattattatatccagggatatggagaaaaagcctttgagaaaatttttaagggggaagtggaagagggcgtagtattcgaggaggtaaagagtcctgatctggtgtctccgtatttaaccgggattttggatcctgaggggaagaggatttattgggaaaccaaaagaggctgtatgttaaggtgcgatttctgcgagtggggtaccgcggcccggaagaactccaaacatgggaagatagtaaaaattgaacatgataggcttataaaagaaattgaaatatttaagaagactaaagatatcaggggtataaaaatcctggactccagttttatagccacgaaggatgatctggcaatatttgaaaaacttctgaaagcgacagagtgtcaaataaattttgagtcccattttaatgatgcagagaaacatttagaggagataataaaactggtgataccccataaagaccggctggtctttgaattcgggttgcagaccattgttccgaacgagatggtccagttaaagaggataaataagcctgaaaaaattgaaaaagtcatggccgcttttaaccagcataaaatcaaatatgaaatcagtataatttacggcataccaaagcagaagtcggacacattcaaggagaacattaaattcatcgtgaaaaaatga

SEQ ID NO: 75874 - protein, 277 aa, Unknown
  Obtained from environmental sample
  DOMAIN (104)...(274): Radical SAM superfamily
  misc_feature (1)..(277): Xaa is any amino acid
MALSAYAWSGELVKEILVELRQYLGFTGKIILGGYEITARNKEQLEMEYPGVNYYIQGYGEKAFEKIFKGEVEEGVVFEEVKSPDLVSPYLTGILDPEGKRIYWETKRGCMLRCDFCEWGTAARKNSKHGKIVKIEHDRLIKEIEIFKKTKDIRGIKILDSSFIATKDDLAIFEKLLKATECQINFESHFNDAEKHLEEIIKLVIPHKDRLVFEFGLQTIVPNEMVQLKRINKPEKIEKVMAAFNQHKIKYEISIIYGIPKQKSDTFKENIKFIVKK

SEQ ID NO: 75875 - DNA, 651 bp, Unknown
  Obtained from environmental sample
  misc_feature (1)..(651): n is a, c, g, or t
gtgctgataaaggcaatgccccaatggggctgggccctatccgaccacaaagcactattggagaaattcntgaagcatccgtcttggacggcaaggctggacgcttggcgcgagttgaacaggcttggtgtcgaaacgccgtggcccaaggcccccgagccaaccaacactgaccagagcatactggcccttgcccaagaacttctgacaaagggggaatccgtcagggtgagcgttgtctttaagggcggcggctctgtggtgatgaggctggaccccatgaacgccccgatgaacgtcgcaaacttgctgctgctggcgcgtaggggcttcttcgacggcaggcgcgttccccggatagtcccggactttgtggttcagatgggcagcccctgcgacaccatggacggcggccctggctacaacgtgcgctgcgaaaacagcttggcttggtacggcccaggcagtgtgggcatggcgctttcgggcatggacactggcggctgccagtttttcttcacgctgaacgccacgccccacctgaccggcagatacaccaggattggcgagttggaagacctggatgccgccatgaaggtgctggaatccttggagcttggggcggtgattgagcgcgttggcgtgatgtga

SEQ ID NO: 75876 - protein, 216 aa, Unknown
  Obtained from environmental sample
  DOMAIN (78)...(216): Cyclophilin type peptidyl-prolyl cis-trans isomerase/CLD
  misc_feature (1)..(216): Xaa is any amino acid
MLIKAMPQWGWALSDHKALLEKFXKHPSWTARLDAWRELNRLGVETPWPKAPEPTNTDQSILALAQELLTKGESVRVSVVFKGGGSVVMRLDPMNAPMNVANLLLLARRGFFDGRRVPRIVPDFVVQMGSPCDTMDGGPGYNVRCENSLAWYGPGSVGMALSGMDTGGCQFFFTLNATPHLTGRYTRIGELEDLDAAMKVLESLELGAVIERVGVM

SEQ ID NO: 75877 - DNA, 771 bp, Unknown
  Obtained from environmental sample
  misc_feature (1)..(771): n is a, c, g, or t
atgccgctgatgattagttttgtgggcgcaggcccgggggccgcggatttgattacgctgcgcgggcaaagtctcttaacggcggcggacgttattgtgtacgccggctctttggttaatcctgatttattaaaaaacgctaaagaaggctgcgccatttataacagtgcgtccatgacgctggaagaagtaaccggcgttttaattgccgccgcccgggaaaataaggctgtcgtgcggctgcataccggtgatccgagtatttacggggctatccgcgaacaaatggatattttggaccaacacggttcagaatatgaagttgttcccggcgtaagttcattttgcgccgccgccgccgcactgaaggcggaatatactttacctaatgtcagccagacagtaatcattacccgcatggaaggccgcacgggcgtaccttccccggaagatatatctcttttggcgaaacaccgcgcaaccatggttatttttctttccgccggcatggtagaggaacttgcggcaaaacttaaagatagttatccgcaagatacgcctgccgctgttgtgtataaagccagttggcaagatgagcgcgttatccgcacgacaattgaaaatctggcggctgccgccaaagatgcgcaaattaccaaaacggcgttaatccttgtcggcggatttttaggcgacgagtacgcccggtctttgctgtatcaccccggggtttaccatgagttcagaaaaggggacgaaaagtttaaatga

SEQ ID NO: 75878 - protein, 256 aa, Unknown
  Obtained from environmental sample
  DOMAIN (4)...(210): Tetrapyrrole (Corrin/Porphyrin) Methylases
  misc_feature (1)..(256): Xaa is any amino acid
MPLMISFVGAGPGAADLITLRGQSLLTAADVIVYAGSLVNPDLLKNAKEGCAIYNSASMTLEEVTGVLIAAARENKAVVRLHTGDPSIYGAIREQMDILDQHGSEYEVVPGVSSFCAAAAALKAEYTLPNVSQTVIITRMEGRTGVPSPEDISLLAKHRATMVIFLSAGMVEELAAKLKDSYPQDTPAAVVYKASWQDERVIRTTIENLAAAAKDAQITKTALILVGGFLGDEYARSLLYHPGVYHEFRKGDEKFK

SEQ ID NO: 75879 - DNA, 417 bp, Unknown
  Obtained from environmental sample
  misc_feature (1)..(417): n is a, c, g, or t
atgtgtcgggcgtcacggccgccgttcggccgcggcggccctggcgcgcntttaacgaacgattttgcggtagtcagtttaagcgatcagcttactccttgggaaatgatcgaaaaacgcttgattgcggcgtcgcagggagattttgttacgncgatttacaatcccgccggttcgcagcggcatgattatttaaaaaaggcttgcgccattattcttaagtataaagacgcggacactcctngcggtttggtcagaaatatcgggcgcgaaggatgcgccgttgaattatgcacacttgcggaaatggcggaaaaaagcgtcgatatgttcactaccgtaattatcggcaacagcgcgaccaaaataattaacaacaagttagtaaccatcagaggttacaagtttgaaaaataa

SEQ ID NO: 75880 - protein, 138 aa, Unknown
  Obtained from environmental sample
  misc_feature (1)..(138): Xaa is any amino acid
MCRASRPPFGRGGPGAXLTNDFAVVSLSDQLTPWEMIEKRLIAASQGDFVTXIYNPAGSQRHDYLKKACAIILKYKDADTPXGLVRNIGREGCAVELCTLAEMAEKSVDMFTTVIIGNSATKIINNKLVTIRGYKFEK

SEQ ID NO: 75881 - DNA, 840 bp, Unknown
  Obtained from environmental sample
  misc_feature (1)..(840): n is a, c, g, or t
gtgactcagcggaaaatccaaaaagaattcgcggaaatgttagggatacctcaaacaacatggtcaggatatgaaaatggaaaatttacccctaaaatgggggttttgtgggcacttgccgcaaagggctacaagataaaagggttgactaccggcatccttgaagacatggttacagatggaaagatcagcagggaagagcttctaaaaaggcttgaaattgctcggaaaatggctgaaaaagccccaccggatactccaatcgatgatgactggagcaggaaagtcgaagaggaatacaaaaggcaaactcccctcgcgtcaggcgaaacacctgtttatacaatggcagaccttgaaaggacggactgcgaagtaagccttttcaagttttcgcatgggaagcccgcgccggtccaaacccacgatgccgaccccaatgccctggtaatgctcccggtttactcccagcgggcagccgccgggccgggtcagccgccaacccaactggcggaaattgaggcgtacatccccatcatttttgagcttctcggcggggcgcatccccggaattgcggcattgtccgggttgtgggggattcaatgaccgacatgaccctatacaatggcgaccttgtcattttcgaccggagccagattgaaggcgatggggtctacgttatcagcatggcgggtgatgtcagggtcaagcgtttggagtaccgttctttcgagcaaaaaattgtcatccggtctgagaacgcgaagcgctaccccgaccctgaaaatattactttggaacagcccgtgaaatgctcattatccacgggagggttatag

SEQ ID NO: 75882 - protein, 279 aa, Unknown
  Obtained from environmental sample
  DOMAIN (196)...(267): Peptidase S24-like
  misc_feature (1)..(279): Xaa is any amino acid
MTQRKIQKEFAEMLGIPQTTWSGYENGKFTPKMGVLWALAAKGYKIKGLTTGILEDMVTDGKISREELLKRLEIARKMAEKAPPDTPIDDDWSRKVEEEYKRQTPLASGETPVYTMADLERTDCEVSLFKFSHGKPAPVQTHDADPNALVMLPVYSQRAAAGPGQPPTQLAEIEAYIPIIFELLGGAHPRNCGIVRVVGDSMTDMTLYNGDLVIFDRSQIEGDGVYVISMAGDVRVKRLEYRSFEQKIVIRSENAKRYPDPENITLEQPVKCSLSTGGL

SEQ ID NO: 75883 - DNA, 387 bp, Unknown
  Obtained from environmental sample
  misc_feature (1)..(387): n is a, c, g, or t
atgatcgcgaccggcgatatcggaacaggcagctatgcagacctgctggcgtttatagaatcggccgctgcggaggagaagatacaggtcgagtgctatcaatccaactccgagggagcaatcgtggataaaatccagcaggcttacgccgtgttcgacgggattgtcattaaccccgccgcctatacgcataccagtatcgcgataccagacgcgctgaaggccgtgggcataccggcggtggaggtacatctgaccgacatcaaccggcgtgaggcgtaccgacgcgtatcctatacgtccgaggcctgtctcgcgactattgcgggcaagggtttcgagggatatcgtgaggggatggcggtgctaacagaaaggctgcgatag

SEQ ID NO: 75884 - protein, 128 aa, Unknown
  Obtained from environmental sample
  DOMAIN (8)...(128): Dehydroquinase class II
  misc_feature (1)..(128): Xaa is any amino acid
MIATGDIGTGSYADLLAFIESAAAEEKIQVECYQSNSEGAIVDKIQQAYAVFDGIVINPAAYTHTSIAIPDALKAVGIPAVEVHLTDINRREAYRRVSYTSEACLATIAGKGFEGYREGMAVLTERLR

SEQ ID NO: 75885 - DNA, 471 bp, Unknown
  Obtained from environmental sample
  misc_feature (1)..(471): n is a, c, g, or t
ttgaataattcacgaattaacgcgttatggggcaaaaaaaccagagaagacaacattatgggctggcttccactgatcgcacatctggaggacacagcggagaccgcacggcgtctctgggataaatgggttccatatggtatgaaacgacaaatagcagacggaataacgatctgcgataaaccggccgactccaaagcggcattgcaggtgtttatttttctcgcgtatacgcatgatctgggcaaagcgagtccgatattccaatggaaagtatacgacgcgcataacgataacgacgcaagactgcgtgacgcgcttctagacgccggctttccgcagaaagataaacatatcgggaaatctggtatttatcacgcgttaatctcgtaccagattcttgttatgcgggaattgagcaagaccgtcgcgggtatcgtccgcggacatcacggaagccgccggacatag

SEQ ID NO: 75886 - protein, 156 aa, Unknown
  Obtained from environmental sample
  misc_feature (1)..(156): Xaa is any amino acid
MNNSRINALWGKKTREDNIMGWLPLIAHLEDTAETARRLWDKWVPYGMKRQIADGITICDKPADSKAALQVFIFLAYTHDLGKASPIFQWKVYDAHNDNDARLRDALLDAGFPQKDKHIGKSGIYHALISYQILVMRELSKTVAGIVRGHHGSRRT

SEQ ID NO: 75887 - DNA, 636 bp, Unknown
  Obtained from environmental sample
  misc_feature (1)..(636): n is a, c, g, or t
ttgctccttgccagcgacagaaatcatttaacccgtttacaaggcgatggggattttagaagcgaagagataaaaaaattgagggatgaagccgatataatcatcaccaatcctccgttttcgcttttcagagaatttttggcttggattgtggaggcggagaaaaaatttctcataatcggcaatatgaatgcgattacctacaaggaagtttttccattaattaaaggaaataaaatgtggcttggcgcaacaggaaacggtaatgatatggttttcggggttccaaaaggagcaaatgtttctgaatctgatcggcaaaaagcagcacgacttggttatgttggaaattatacgcggctaggaaattcttgttggttttccaaccttgagcatggccgccgccatcaacctttaccgctcatgacagtgcaagacaatttgaaattcagtaagcataaagaaataaaagagaaaaaagcatacgataaatatgacaactacnacgcaatagaagttccttttaccgatgctatcccttccgactatgacggtataatgggcgttcctatttcttttttggataaatactgtcctgaacagtttgatattttggggaatgtgcgaaaaccttga

SEQ ID NO: 75888 - protein, 211 aa, Unknown
  Obtained from environmental sample
  misc_feature (1)..(211): Xaa is any amino acid
MLLASDRNHLTRLQGDGDFRSEEIKKLRDEADIIITNPPFSLFREFLAWIVEAEKKFLIIGNMNAITYKEVFPLIKGNKMWLGATGNGNDMVFGVPKGANVSESDRQKAARLGYVGNYTRLGNSCWFSNLEHGRRHQPLPLMTVQDNLKFSKHKEIKEKKAYDKYDNYXAIEVPFTDAIPSDYDGIMGVPISFLDKYCPEQFDILGNVRKP

SEQ ID NO: 75889 - DNA, 756 bp, Unknown
  Obtained from environmental sample
  misc_feature (1)..(756): n is a, c, g, or t
ttgaaacataataagcttatagttgaacataatgaaaaaattgaccgaaaagatatagcattagaagagattaaggctgtgttttggaaaattatgcgttgggattatgatcaaaccatttgtgcttatatttctgataaacttcaatcacaaaagaatattgcgacaattaataatacgttgcaagatattaaggcgaaaataaggaagcaacaagaaatcattgccgaccagcagaaaaacaccgcaaacattgtggaagctattacaaacatcaatgataacctaatcgatttaggaattgaacattttcaaattgaaccacaatctgaacatttatgtaaaattgttagaggacaaaacgacagtgggatttttcgctcgctaagtgaaggagagaaaatgattattagttttctatattttgttgagttgtgcaaagggaagaaaaatgcaacagaaacagaaaaaaagaagatcattgttattgatgacccaatctcaagtttatcgcacatttatgtttttaatattggtagattaataaaaaatgaatattttggaaaaaaagaaaataaaatctggaattataaatatgagcaagtgttcattttaactcatagtttgtacttcttttatgaaataactggaacaaaacacgatgatagaaaagtgtgtcaaaaaatatttccgctcacaaagaatgaaaatggtagttcgtttgttgcaatgagttatgaaaaaaacccaaaatga

SEQ ID NO: 75890 - protein, 251 aa, Unknown
  Obtained from environmental sample
  misc_feature (1)..(251): Xaa is any amino acid
MKHNKLIVEHNEKIDRKDIALEEIKAVFWKIMRWDYDQTICAYISDKLQSQKNIATINNTLQDIKAKIRKQQEIIADQQKNTANIVEAITNINDNLIDLGIEHFQIEPQSEHLCKIVRGQNDSGIFRSLSEGEKMIISFLYFVELCKGKKNATETEKKKIIVIDDPISSLSHIYVFNIGRLIKNEYFGKKENKIWNYKYEQVFILTHSLYFFYEITGTKHDDRKVCQKIFPLTKNENGSSFVAMSYEKNPK

SEQ ID NO: 75891 - DNA, 600 bp, Unknown
  Obtained from environmental sample
  misc_feature (1)..(600): n is a, c, g, or t
atgtcattgacaggcggcagcggtaacaagcggctcagtccaggcattgaagacttcctcaggtattgcgaaacccggcagggacaaacgggcgccacccgtgacgcctacgccgcggatctcgcccagttccaggatcatctggaaagcttgggcttaagcccggaacaacccgaatccattgcccgccgccatatccagcagttcctcgcccatctcttcaaatccggcatggcgaaaagctccatggcccgcaagctcgcggcggtacgcgcttttttcaaatacctgctgcgcatgcgccgtctgcaaaacgatccctgccttgggatacgtaacccgaagcaggaaaagcgccacccccgcatgttgaatgtggatcagacctttgccctgcttgatgctccacccggcgcgtcgcggaaaaaggatcccaagggccgcgccctggccgcccgcgacaacgccctcgcggaactgctctatggttcgggcctgcgcatctctaaagccctgagtctggatctgctggatgtggacccgcgctccggagtcctgcgcgtcatggggaaagcgcgaaacaacgccttgcgccgctaa

SEQ ID NO: 75892 - protein, 199 aa, Unknown
  Obtained from environmental sample
  DOMAIN (16)...(101): Phage integrase, N-terminal SAM-like domain
  misc_feature (1)..(199): Xaa is any amino acid
MSLTGGSGNKRLSPGIEDFLRYCETRQGQTGATRDAYAADLAQFQDHLESLGLSPEQPESIARRHIQQFLAHLFKSGMAKSSMARKLAAVRAFFKYLLRMRRLQNDPCLGIRNPKQEKRHPRMLNVDQTFALLDAPPGASRKKDPKGRALAARDNALAELLYGSGLRISKALSLDLLDVDPRSGVLRVMGKARNNALRR

SEQ ID NO: 75893 - DNA, 717 bp, Unknown
  Obtained from environmental sample
  misc_feature (1)..(717): n is a, c, g, or t
ttgcgcgttcctcttttggcccagggatttacaaaactctcccccttttcccccgggtggggcccatgggtttcccccaaacccttgggaaaagtatttccttgcggggctcacagaaaattagggcccccaaagtcacagctcggttcccccttatttgggagggcgcttcgggcgggccttttacgtaatattgccctcccggaggggccgtttaaagagggcctttttaatttttttgtgccgttttgggcgggccatgaaaaaatgaagattttgctcctgggcaggatgccccagttcaagcggcgctttgttccgttgaatatgcttgttttgttcatccttttcttgctgttaagccccttgcgcggcctggggaatgtcctggtgttcaagaagatacaggccatgtttggcgggcgcttcagggccggagtttccggcggcggggcactgcccgaagcggtggacaagttctttgccgccgctggggtgatggtgctggagggttacggcattaccgaagcagccccggtgctggcggtacggcattttaatcaccctgtagcggatactatcggccctcccttccccgacatggaagcggtcatccgcgacccggaaacgggaaaggaactgccccccggacaaaagggaattgtctacgggcggggcgaacagatcatgatggggtattacaagaagccggagtaa

SEQ ID NO: 75894 - protein, 238 aa, Unknown
  Obtained from environmental sample
  misc_feature (1)..(238): Xaa is any amino acid
MRVPLLAQGFTKLSPFSPGWGPWVSPKPLGKVFPCGAHRKLGPPKSQLGSPLFGRALRAGLLRNIALPEGPFKEGLFNFFVPFWAGHEKMKILLLGRMPQFKRRFVPLNMLVLFILFLLLSPLRGLGNVLVFKKIQAMFGGRFRAGVSGGGALPEAVDKFFAAAGVMVLEGYGITEAAPVLAVRHFNHPVADTIGPPFPDMEAVIRDPETGKELPPGQKGIVYGRGEQIMMGYYKKPE

SEQ ID NO: 75895 - DNA, 561 bp, Unknown
  Obtained from environmental sample
  misc_feature (1)..(561): n is a, c, g, or t
gtgctgttcaataaagctaaaaccaagctcttgctgtatccggagggaaagagcgggagttacacaattccttcatcagttaccgaaatcgtgtattgcgcttttgaggactgtgcgaagcttacgagcgttgccattccgtacggcgttacgtccatcggcggaggtgcgttttttagatgcaccggattgacttcaatcactatcccggatagcgtaacatttatcggtgagagtgcgtttgaagaatgtagcagactggtttcaatcactatcccagacagcgttacttcaatcggagcatgggtgtttgccgactgcaccgaattgacttcattcactattccggacggcgttacgtccatcggtgatagtacgttttatagctgcaccggattgacttcaatcactatcccagacagcgttacgtccatcggtgagtttgcgttttatagctgcaccagattgacttcaatcactattccagacagcattacgtcaatcggtaggggtgcgtttgtacgttgtactaggagccctgtcggacttaggctaaattag

SEQ ID NO: 75896 - protein, 186 aa, Unknown
  Obtained from environmental sample
  misc_feature (1)..(186): Xaa is any amino acid
MLFNKAKTKLLLYPEGKSGSYTIPSSVTEIVYCAFEDCAKLTSVAIPYGVTSIGGGAFFRCTGLTSITIPDSVTFIGESAFEECSRLVSITIPDSVTSIGAWVFADCTELTSFTIPDGVTSIGDSTFYSCTGLTSITIPDSVTSIGEFAFYSCTRLTSITIPDSITSIGRGAFVRCTRSPVGLRLN

SEQ ID NO: 75897 - DNA, 576 bp, Unknown
  Obtained from environmental sample
  misc_feature (1)..(576): n is a, c, g, or t
atgccacccactctctccaccctacaccactcccccnccgggcctccgccccctcctccccccctacgactcctgcaccgccccccccccccccccctcccctctctccccgcctcccngccctccacccacacccccccagtcccctccatctctactcctcccgcaccccgccctcgccctcccccccatctcacccccntcacccgccccctcccccccctnnncttccnnttactcaanaattcacancccaccncccgccccnnnncnccctttcctcccntacctncncctctccccnccaaantacctttcncccccnnnnnccacnnnccccnccncccctcntctctcncnccnccnnntttnnagnnnntccnnntntnaaaanangcnccncctncgtttttttccnntnnncnnnaagccnnnnnnnctnctnnnntattttnncccnnttcagggagggcatggggnctgtggaaagctcnatttttnnntntaaataaagaaancnnnggttngaaagggaaccaagcccntccagcatgggatgggnnttttgngcnttaa

SEQ ID NO: 75898 - protein, 191 aa, Unknown
  Obtained from environmental sample
  misc_feature (1)..(191): Xaa is any amino acid
MPPTLSTLHHSPXGPPPPPPPLRLLHRPPPPPLPSLPASXPSTHTPPVPSISTPPAPRPRPPPHLTPXTRPLPPLXFXLLXNSXPTXRPXXPFPPXPXPLPXKXPFXPXXHXPXXPSSLXPPXXXXXXXXKXAPPXFFSXXXXAXXXXXXFXPXSGRAWGLWKAXFXXXNKEXXGXKGNQAXPAWDGXFXX

SEQ ID NO: 75899 - DNA, 315 bp, Unknown
  Obtained from environmental sample
  misc_feature (1)..(315): n is a, c, g, or t
ttgtcccaccaccccgtcgccncccccccccttcccccccctatatttctccccccgccctnnctttccacccccccccncccccctccccccccgccccccctctcctattctcccccngatntcaacctctcccccccctccacccaccccttctcccctcccatntccanaaaatatttttttcanacatcacccatactcccncccctcatatatntcctctataacccgggctctcnnntnatcatctcaacttatattctggtgttgccagcatcacgggacgcaaggtacgctctaatggtacggtaa

SEQ ID NO: 75900 - protein, 104 aa, Unknown
  Obtained from environmental sample
  misc_feature (1)..(104): Xaa is any amino acid
MSHHPVAXPPLPPPIFLPPPXLSTPPXPPPPPPPLSYSPPDXNLSPPSTHPFSPPXSXKYFFXTSPILPPLIYXLYNPGSXXIISTYILVLPASRDARYALMVR

SEQ ID NO: 75901 - DNA, 309 bp, Unknown
  Obtained from environmental sample
  misc_feature (1)..(309): n is a, c, g, or t
gtgacgcgtatcggctccgagtacgtctatattgacatcggagcgaagaacgaggcgatgatcaaggccgccgaactcgcgaacgacgaggtgaaagcgggagacaccgtaagcgggtttatcgtctcggaccgggacggcgagaccctcgtgagncagagcgtaagcgccggcggcggggtagccgacctgagcgccctgcgcgaggcgcttgacgcgcgtatgccggtgcagggcaaggtgaccggcgtcagcaaaaacgggcttatcggtcaaatcatggggccaccgctcggttctgccccataa

SEQ ID NO: 75902 - protein, 102 aa, Unknown
  Obtained from environmental sample
  misc_feature (1)..(102): Xaa is any amino acid
MTRIGSEYVYIDIGAKNEAMIKAAELANDEVKAGDTVSGFIVSDRDGETLVXQSVSAGGGVADLSALREALDARMPVQGKVTGVSKNGLIGQIMGPPLGSAP

SEQ ID NO: 75903 - DNA, 363 bp, Unknown
  Obtained from environmental sample
  misc_feature (1)..(363): n is a, c, g, or t
ttggagatttttgggggtgaaatgggaaacccccgacggcacccgcttccgggaatagttccactggaccgatttgggcgtggggcaccaccctgtccattagaggttttgtggggggcgggaaaaagcctcacactcaatttagccagcgagaccgaaatcagcgtaaaatcaatgctggaaacgcaaagaacggtaacgggcaaagagatcccggccgtagtagccccgcgccgcgccggagacccggagcgcgtagtggcgtcggcatcgaaagctaaagataagctgggatggacagctaagcatagcgatgtcgaaacattgatcgacagcacatggaggatgtataatggtcactaa

SEQ ID NO: 75904 - protein, 120 aa, Unknown
  Obtained from environmental sample
  misc_feature (1)..(120): Xaa is any amino acid
MEIFGGEMGNPRRHPLPGIVPLDRFGRGAPPCPLEVLWGAGKSLTLNLASETEISVKSMLETQRTVTGKEIPAVVAPRRAGDPERVVASASKAKDKLGWTAKHSDVETLIDSTWRMYNGH

SEQ ID NO: 75905 - DNA, 885 bp, Unknown
  Obtained from environmental sample
  misc_feature (1)..(885): n is a, c, g, or t
ttggtcgcatttattctttataaaataggcacaggtccggtaaaaggttttggtttaactntgatggttggcatagcagcatcgcttttctctgcattaactgttaccagagctatttttgatcttaaactttccaaacacgatgcgaaaagcataaatataggcaatggcataaaatggctgcaagaagcaaaacttcaaattgtttccaagcgtggaatttgggcaaaactctccctagggctttgcgttgcttgcattgcgcttgcagttttaaaaggttttgattacagcatagatttcactggtggtttggtttacactgttgaatattcagacgattccattcataccgatgaactgaacagtgctttgggcaaaggtggtcttggcgatgcaacaattcgcaaactaggcggcacatcgctcaatcaatatatgttgagcattcaaactcaggattccggtgaagaagcagttagaaaaacaaccgcagtgttaaacgccgcgcttgcaaacgctggtactccaaaaattgtagccgaagatattgttggacccacaataggcggcgagcttcgctttaacgcaatacttgccgttattctctcttggattggcattggtatttatatatgggcgcgttttggtaaaatgggtctgggttttggagcgggtgcaataatcacgctaattcacgatacaattctctgccttggcgtgataagcctatttaaacttcctgtggacggtgcaatgatagcggctttcctcactatgataggttattccattaacgatacaatagttatttacgatcgtattcgcgagaataaattgcttgccaaagaaactctagaagagcgcaaaactcggccgatctga

SEQ ID NO: 75906 - protein, 294 aa, Unknown
  Obtained from environmental sample
  DOMAIN (166)...(290): Protein export membrane protein
  misc_feature (1)..(294): Xaa is any amino acid
MVAFILYKIGTGPVKGFGLTXMVGIAASLFSALTVTRAIFDLKLSKHDAKSINIGNGIKWLQEAKLQIVSKRGIWAKLSLGLCVACIALAVLKGFDYSIDFTGGLVYTVEYSDDSIHTDELNSALGKGGLGDATIRKLGGTSLNQYMLSIQTQDSGEEAVRKTTAVLNAALANAGTPKIVAEDIVGPTIGGELRFNAILAVILSWIGIGIYIWARFGKMGLGFGAGAIITLIHDTILCLGVISLFKLPVDGAMIAAFLTMIGYSINDTIVIYDRIRENKLLAKETLEERKTRPI

SEQ ID NO: 75907 - DNA, 489 bp, Unknown
  Obtained from environmental sample
  misc_feature (1)..(489): n is a, c, g, or t
gtgacacttgcaggcatcgacgtcagcgccataggccagggcagcaacttcaactggtcggcatggaaaggcaagatccagttcgccgggatcaaggtcagcgagggcacgaccttcgccgatcccgacgccgcccgcaacatcgccggggcgcgcgccaacggcgtggccgtcatgggctaccacttcctgcacgcgggagagtccggcgtgtcgcaggctaacgcgtccttgagccactgccaggcggcgaagctcgaacggggagacctgctcgcggtcgacgtggagcagggcggcctcgacggcaagagcacggcagcgctgtgggaggccgcggcggaattcgcggacaccatccatggtcatttcggcgcccggccggttgtttacccggacatctccctggccgggccagcccaaagcggcaatgggaaatgcccccttgtgctcccccaccccagccggaccccggtgactaacatttga

SEQ ID NO: 75908 - protein, 162 aa, Unknown
  Obtained from environmental sample
  DOMAIN (6)...(162): Glycosyl hydrolases family 25
  misc_feature (1)..(162): Xaa is any amino acid
MTLAGIDVSAIGQGSNFNWSAWKGKIQFAGIKVSEGTTFADPDAARNIAGARANGVAVMGYHFLHAGESGVSQANASLSHCQAAKLERGDLLAVDVEQGGLDGKSTAALWEAAAEFADTIHGHFGARPVVYPDISLAGPAQSGNGKCPLVLPHPSRTPVTNI

SEQ ID NO: 75909 - DNA, 348 bp, Unknown
  Obtained from environmental sample
  misc_feature (1)..(348): n is a, c, g, or t
atggatcagatcggcacgaggctggccatcaagtaccgcgacgattaccgcagcgccggcattccgatgctgcccgttgtcgccccggtccgccgggtcctcgtggaatccgtgatctacagctggctgatggtgggggtctcgctcgcggtgtggccgtgggccggcccgctctacggcgtgatcgccgtcgtggccggggccgcgttcctgttcgaggtgcaccggctgctgcgcctgtcccgcggcgccgccgtcgaactcgtcacgatgcgtctgttccacctgtcgatcttgtacctgaccttggttttcgtcggcgtcgccgttggggccttcatccgctag

SEQ ID NO: 75910 - protein, 115 aa, Unknown
  Obtained from environmental sample
  misc_feature (1)..(115): Xaa is any amino acid
MDQIGTRLAIKYRDDYRSAGIPMLPVVAPVRRVLVESVIYSWLMVGVSLAVWPWAGPLYGVIAVVAGAAFLFEVHRLLRLSRGAAVELVTMRLFHLSILYLTLVFVGVAVGAFIR

SEQ ID NO: 75911 - DNA, 756 bp, Unknown
  Obtained from environmental sample
  misc_feature (1)..(756): n is a, c, g, or t
atgaccggcgccgcgcagattctttttattattgtgaacagccttacccgggaacacagcgtttacctggatcagagggctgttattacaagccagcaggcaaaaattgcggaactaattattgaacagaaggccaaggcagccttgcctgaagaaaagcagaaaaaaacggcctaccccgtagataaagaaaaggaactcatcggcttcgtagaaaaaggcagtctggaacaagccagaatttcgttaaacaccctgcttggggaaatttttcttttttccgaaggcaaaatagacacaataagggtacgggtttttgagcttattgcctttttgtccaggatcgctgtagaaaccggcgctcccctttcagaaataaatcgtataaccgaaagttcttttgggatctttagtgagcccgtagattttgaaaggctttgttaccttacccggcaaactatggaagaattcatcacccatattttcaggcatcatgaaaaaaaacagttaagcaatcatttatccaaggccattgagtatatcagcctgcatcatggcgatgaactgaccctgcaaaaagtttccaaggaaatttttgtcagcggtttttatttgagccatcttttcagaaacgaattggacacaactttttccgattatatttgccgttttcgcattgccaaggcccaggattttttgaaaaaccataagttcatgcgggattcaggaaattgccgaaagaaacagtttcaatga

SEQ ID NO: 75912 - protein, 251 aa, Unknown
  Obtained from environmental sample
  DOMAIN (176)...(222): Bacterial regulatory helix-turn-helix proteins, AraC family
  misc_feature (1)..(251): Xaa is any amino acid
MTGAAQILFIIVNSLTREHSVYLDQRAVITSQQAKIAELIIEQKAKAALPEEKQKKTAYPVDKEKELIGFVEKGSLEQARISLNTLLGEIFLFSEGKIDTIRVRVFELIAFLSRIAVETGAPLSEINRITESSFGIFSEPVDFERLCYLTRQTMEEFITHIFRHHEKKQLSNHLSKAIEYISLHHGDELTLQKVSKEIFVSGFYLSHLFRNELDTTFSDYICRFRIAKAQDFLKNHKFMRDSGNCRKKQFQ

SEQ ID NO: 75913 - DNA, 396 bp, Unknown
  Obtained from environmental sample
  misc_feature (1)..(396): n is a, c, g, or t
atgtcgttgtcatcaatggtggcggccggaatcgcaatgccggtcgcaatgcgcatgctggccaacaactctaatatgtatctgcgcagcattctggaatcagcgctgcactatgtcgcgaacggtgacaatttgggaactgcgctgaacaataccggccgggattttccgaatgatgaaattatcggcgatttggcaatctatgctgacatgaatggattcgacgagaatctgtcgcggattgcaagcgattatctgaacgaatccgtgcgcaaaatggagtctatatccaacactctgaacagtttcggaatattgctggtgtctgtcatcatcggctgggtggtgctgggcacgttccagatgcaggaccagattacagcggcattgacatag

SEQ ID NO: 75914 - protein, 131 aa, Unknown
  Obtained from environmental sample
  SIGNAL (1)...(23)
  DOMAIN (1)...(122): Bacterial type II secretion system protein F domain
  misc_feature (1)..(131): Xaa is any amino acid
MSLSSMVAAGIAMPVAMRMLANNSNMYLRSILESALHYVANGDNLGTALNNTGRDFPNDEIIGDLAIYADMNGFDENLSRIASDYLNESVRKMESISNTLNSFGILLVSVIIGWVVLGTFQMQDQITAALT

SEQ ID NO: 75915 - DNA, 690 bp, Unknown
  Obtained from environmental sample
  misc_feature (1)..(690): n is a, c, g, or t
atgaatgactttggaacaattacaacacgaatgaatcagttccgccttaaactattaaacgctaaacccggcgtttgtgttgaacgggcacagataactaccgatgcctaccggaaaaacatggatcaacctctggcaatacgccgggcgctgatgtacaaaaatatacttgaaaaaatgagcatattcattgaggatgaaacccttattgcgggcaaccaggcttccggcaaccgctgtgcgcccatttttccggaatacgccatggattgggtcattgatgaacttgacgaattcgataaacgcacaggggatcgtttttttattacagaagaaaccaggacagcgctaagagaaattgccccattctgggaacacaatacagtcaaagaccggggactggctgccatgcccgatcagacaaaagtattctacgatctggggattatcaaggcggaaggaaacattacatccggggatgcccatgtggcggtaaactacaagcgcgtacttgaggcggggcttaaggaataccggcagcgggctgaacaaaaactcccggaactggatttaactgattacaaaaatcttgcccaagtccatttttacaaagcggtccttatcgtgattgaagccaccagatctttcgcgggcccgttaccgcaaaacttgccgatggaaattggctga

SEQ ID NO: 75916 - protein, 229 aa, Unknown
  Obtained from environmental sample
  misc_feature (1)..(229): Xaa is any amino acid
MNDFGTITTRMNQFRLKLLNAKPGVCVERAQITTDAYRKNMDQPLAIRRALMYKNILEKMSIFIEDETLIAGNQASGNRCAPIFPEYAMDWVIDELDEFDKRTGDRFFITEETRTALREIAPFWEHNTVKDRGLAAMPDQTKVFYDLGIIKAEGNITSGDAHVAVNYKRVLEAGLKEYRQRAEQKLPELDLTDYKNLAQVHFYKAVLIVIEATRSFAGPLPQNLPMEIG

SEQ ID NO: 75917 - DNA, 672 bp, Unknown
  Obtained from environmental sample
  misc_feature (1)..(672): n is a, c, g, or t
gtgttcgcggcgtcgccatctgaaacgccgtgtacgctggacgcgatttgcgagaacgatcacgccgacgccgccaaccctgtcatcgccgatccgctcaggctgtacgggatatgccctgtttccgacggcgccgcgtccctgctcctgtgcgccgaggattcgccgaagatgcgccatttcaccaagccgccggtggagatcagcgggatcgcgtcggcgacggatacgcattgcgttcatctgcgcaaggatccgcttatcctcgacgcggtgcgtcttgccgccgagcgcgcctacgttatggccgggctggggccgcgcgatatttcgttcgccgagctgcatgacgcctttgttatcctcgagctcgccatcgccgaagaggtgggattttttgagcgcggcaaggcgcatctcgcggtgcggcgtgatgagacgcgcgttgacggcaggctgcccataaacacgtcaggcgggctgaaggctaagggacatcccctgggcgcaaccggtgtctcgcagatttatgaactcgtcaaacagcttcgcgggcaggccgagcctgatcgccaggtgcgggatccgaagcacgggatggcggtcaatttcggcggcttcgggaataacgttgttgttacgatctgttcaagagcttcaacaggatgttga

SEQ ID NO: 75918 - protein, 223 aa, Unknown
  Obtained from environmental sample
  DOMAIN (62)...(215): Thiolase, C-terminal domain
  misc_feature (1)..(223): Xaa is any amino acid
MFAASPSETPCTLDAICENDHADAANPVIADPLRLYGICPVSDGAASLLLCAEDSPKMRHFTKPPVEISGIASATDTHCVHLRKDPLILDAVRLAAERAYVMAGLGPRDISFAELHDAFVILELAIAEEVGFFERGKAHLAVRRDETRVDGRLPINTSGGLKAKGHPLGATGVSQIYELVKQLRGQAEPDRQVRDPKHGMAVNFGGFGNNVVVTICSRASTGC

SEQ ID NO: 75919 - DNA, 693 bp, Unknown
  Obtained from environmental sample
  misc_feature (1)..(693): n is a, c, g, or t
atgatcgccnggcgcggtttttgctgtgagataccgaaatcttcttccgatggcggaactccgctgtccgaagcaatgctggccgtacagaaactgggcgtcccggttaccgtatgggcagccgaaacagccgccgccgcgattgccgaggctgatgttgtcattgacggaatagccggtaccggcttaaacggccccctgcgcggcgccgctttggaaatggcggaactgattaacgccgctggccgggaaaaggagcagccgtttattgtttccattgacctgccttcgggtaattttgacggatggcagtccggaatgcccatggtgaaggctcatgcgacccttgccattgagccgcgaaaactctgcctgtatacgcccgcggcccggtcctatgcgggcgcgattattccggtggagggaatattctcccccgcgttaatcgatacataccgcgaggcggaacttgtccggtgggagtccgcagcggcgaanattccgccggttcagccaaccgcttataaatacgaacgtggtctggtagagatcagggccggttctcccggcgcgacgggggcggcgcggctttgcgcccagggagcgcaaggcgcccggaacgggaatgggtgcggcttatctttgatccttccccggatcccattattgccccccggtggtcccggcatttaa

SEQ ID NO: 75920 - protein, 230 aa, Unknown
  Obtained from environmental sample
  DOMAIN (5)...(124): YjeF-related protein N-terminus
  misc_feature (1)..(230): Xaa is any amino acid
MIAXRGFCCEIPKSSSDGGTPLSEAMLAVQKLGVPVTVWAAETAAAAIAEADVVIDGIAGTGLNGPLRGAALEMAELINAAGREKEQPFIVSIDLPSGNFDGWQSGMPMVKAHATLAIEPRKLCLYTPAARSYAGAIIPVEGIFSPALIDTYREAELVRWESAAAXIPPVQPTAYKYERGLVEIRAGSPGATGAARLCAQGAQGARNGNGCGLSLILPRIPLLPPGGPGI

SEQ ID NO: 75921 - DNA, 393 bp, Unknown
  Obtained from environmental sample
  misc_feature (1)..(393): n is a, c, g, or t
ttggatttggcgttacatcaccctgaaatagataacaacattttaccctataatgttgtagaacataggcatacatatgaaattgaacaagaattatctttgcttgctaaaaacaaagtaacaataaatttttcttcatgctatattccaatttcaagagggattttaacaataaatcattgtttccctgttaagcaattgaatcgtaaaaatcttctggatttgtataaagatttttataaagacgaatatttcattaaaattatagacattccaaaggacaaaaacgcttcatggaattacttgccttacccgtgggtcgctacggtatcggcgacaaatttttgccacataggacttgatattgatgaaaaaaggaatttcggattgtag

SEQ ID NO: 75922 - protein, 130 aa, Unknown
  Obtained from environmental sample
  DOMAIN (1)...(130): Semialdehyde dehydrogenase, dimerisation domain
  misc_feature (1)..(130): Xaa is any amino acid
MDLALHHPEIDNNILPYNVVEHRHTYEIEQELSLLAKNKVTINFSSCYIPISRGILTINHCFPVKQLNRKNLLDLYKDFYKDEYFIKIIDIPKDKNASWNYLPYPWVATVSATNFCHIGLDIDEKRNFGL

SEQ ID NO: 75923 - DNA, 714 bp, Unknown
  Obtained from environmental sample
  misc_feature (1)..(714): n is a, c, g, or t
atggatgaaggcgactttaaggcagagtatctcgaaatggtccccctgcaccaccccaatggcgtcaagggctgccgctggatactgctggtgggcctgggcgatgaggaaaaagtaacgctcaacaaaatgcgcaaggcagttggagccgccgtccgtttctgcatgaaaaaaggatggaagtccatcggactcctgtcgcccgccacttccaacatggagccaggccaagtgcaaaccgccgcacttgaagggactctgctagccgactacgacttttccgccttccgcagcaagccagaggcaacccgcttggagcgcatagagctattcacgaacaacgatgacaaccgcaagctccgccgacggcaggccattaccgagataggagtcgctgcaaaccacttagtccgcgatttggtcaacactcctgccgccgacatgtacccggagtcattcgccgctaaggctaaggcattggcggcagagaacaagatagcagttgaggtgttggtacccgaagagttagagaaggacggattcagggcccttttggccgttggcaggggttcggcccatccgccccgtgtggaaaaactcgattacacaccaagcgaaaaaatccaaaagcacctcctgctggtcgaaaaaagctctgcttttaattccggggggctgtccctcaaaaaaagcccccaaattggaaaaccataa

SEQ ID NO: 75924 - protein, 237 aa, Unknown
  Obtained from environmental sample
  DOMAIN (1)...(100): Cytosol aminopeptidase family, N-terminal domain
  misc_feature (1)..(237): Xaa is any amino acid
MDEGDFKAEYLEMVPLHHPNGVKGCRWILLVGLGDEEKVTLNKMRKAVGAAVRFCMKKGWKSIGLLSPATSNMEPGQVQTAALEGTLLADYDFSAFRSKPEATRLERIELFTNNDDNRKLRRRQAITEIGVAANHLVRDLVNTPAADMYPESFAAKAKALAAENKIAVEVLVPEELEKDGFRALLAVGRGSAHPPRVEKLDYTPSEKIQKHLLLVEKSSAFNSGGLSLKKSPQIGKP

SEQ ID NO: 75925 - DNA, 540 bp, Unknown
  Obtained from environmental sample
  misc_feature (1)..(540): n is a, c, g, or t
ttgtatatgactacattctttacagcggattttcatttcaatcatttcaatgtgataggacataacaagcggccattcaaacgtgtagaggagatgaacgaacgtttgatagaaaaccacaattcaagggttaagcctgaagacgaatgctacatattgggcgatatgtatttcaaaactactactgacgatgtagttcctctgataaaaagacttaatggcactaagtaccttattcgtggcaatcatgacgcatactcaaaagatccttctgtgagagagaactttgtttggataagagactattttgaacttaagcatgattctatgccagataggcgcatcataatgtttcattaccctttagctcgctggaacaatcaggatcgtggcgctgtgcatctttatggccacgtgcataatgactttgcgctgaatttacctaatgcatataatgttggcgtagatgtgaataattataagccaatatctcttgaagagattatggttaagcttactgggacgaagaatattttttag

SEQ ID NO: 75926 - protein, 179 aa, Unknown
  Obtained from environmental sample
  DOMAIN (3)...(142): Calcineurin-like phosphoesterase
  misc_feature (1)..(179): Xaa is any amino acid
MYMTTFFTADFHFNHFNVIGHNKRPFKRVEEMNERLIENHNSRVKPEDECYILGDMYFKTTTDDVVPLIKRLNGTKYLIRGNHDAYSKDPSVRENFVWIRDYFELKHDSMPDRRIIMFHYPLARWNNQDRGAVHLYGHVHNDFALNLPNAYNVGVDVNNYKPISLEEIMVKLTGTKNIF

SEQ ID NO: 75927 - DNA, 675 bp, Unknown
  Obtained from environmental sample
  misc_feature (1)..(675): n is a, c, g, or t
atggtggtcgtcaccaactccacctatgacgggctgctctataatgtggcggttgcggaggacttgctgggccgcagcgtggatcgcctgcactttgacgaggcgtggtacggctacgcccgcttccatcccatctacgccaaccgcttcgcgatgtatggcgatccgaaaaaccacgacgcctccaagcccaccgtgttcgccacccagtccacgcacaagctgctggcggccttgtcgcagtcttccatgatccatgtgcgtgacggacgcaacccggtggaacacgcccggttcaacgaatcgtacatgatgcatgcttcgacctctcccttgtatcccatcatcatttccaacgaggtcagcgcggccgtcatggacggtccgcgcggcacggccctgttggacgattccatcgccgaagcggtggccttccggcagtccctgggcaagttgcatgcccggtttggggccgacaagcaatggttcttcaggtgctggcagccggatacggtctcgctgcaaggcaggaagaccccctttgccgaaatcccgggcaaaggaatttgcagtcgccgggcggaatctgtggaatcttgggcccccaatgccccccggggaaaggggttcaaaaaatattcccgggcagggatatgccgtggctgggatacataa

SEQ ID NO: 75928 - protein, 224 aa, Unknown
  Obtained from environmental sample
  DOMAIN (2)...(224): Orn/Lys/Arg decarboxylase, major domain
  misc_feature (1)..(224): Xaa is any amino acid
MVVVTNSTYDGLLYNVAVAEDLLGRSVDRLHFDEAWYGYARFHPIYANRFAMYGDPKNHDASKPTVFATQSTHKLLAALSQSSMIHVRDGRNPVEHARFNESYMMHASTSPLYPIIISNEVSAAVMDGPRGTALLDDSIAEAVAFRQSLGKLHARFGADKQWFFRCWQPDTVSLQGRKTPFAEIPGKGICSRRAESVESWAPNAPRGKGFKKYSRAGICRGWDT

SEQ ID NO: 75929 - DNA, 747 bp, Unknown
  Obtained from environmental sample
  misc_feature (1)..(747): n is a, c, g, or t
ttgggcgttaccgtcagcaaagatgaatttttcttgacgttcgaaatactttcaacacagatgattttactggcaggcaaaggaaaaaagaggatggaagaattttctgaacaaacgcttgtcatgttttttactgtatttcttgttgtgacaattatggtcgttgttttgtctgtcatcctgacatccatcatctcaaaacctgttcaaagattggcggaagaagtcgccggcatcgacgccggtcatttagatgtaaaaatagcagggaagtatgatgacgagcttgataaaattaaaaatgccgtgaatgtgatggctgcggacacaaaagtatatatggaaggtatgcttcgagcggaaaaagaattggcggcaagcaagatttccctcatgctcagccggatcaagccgcattttctctataattccctggcgactatccaacggctctgcgcaaaagacccgaagtcggctgaggaagccgtcgtggagtttacagagtatctgcgcggcaatatggattcgcttgccgtcgaaagtcttgttcctttcgcaaaggaactgcaccatttggaaagctatctcgcgctggaaaaaaagcgtttcggcgcaaggctgaatatcgtgtatgagattttcacggaaaacttttttcttcccgtgcttaccgtgcagcccatcgtggaaaacngccgtgcggcacggcgttacgaaacgcgaggagggcggcgcggtgacgattag

SEQ ID NO: 75930 - protein, 248 aa, Unknown
  Obtained from environmental sample
  DOMAIN (43)...(112): HAMP domain
  misc_feature (1)..(248): Xaa is any amino acid
MGVTVSKDEFFLTFEILSTQMILLAGKGKKRMEEFSEQTLVMFFTVFLVVTIMVVVLSVILTSIISKPVQRLAEEVAGIDAGHLDVKIAGKYDDELDKIKNAVNVMAADTKVYMEGMLRAEKELAASKISLMLSRIKPHFLYNSLATIQRLCAKDPKSAEEAVVEFTEYLRGNMDSLAVESLVPFAKELHHLESYLALEKKRFGARLNIVYEIFTENFFLPVLTVQPIVENXRAARRYETRGGRRGDD

SEQ ID NO: 75931 - DNA, 717 bp, Unknown
  Obtained from environmental sample
  misc_feature (1)..(717): n is a, c, g, or t
atggaaaccagacaaggcggcaacacagacccggaaatcctgtctttacgcgacaagcgccttgtctggtgttcagaaacccgtgacaatcaacgcctcaacgctgaacgaatcaaagctttcagtggaggcgacacgcttacagggcgctttctcttttcctcggaaatagtcagcttcacgccggcttttacgctgattctcagtaccaactacaagccgaaagtatccggcagcgacgccgccctttggaaccgcctgcgccttgtccccttccggatgtcttttgttcctgaaccacgcgaggcgcacgaaaaacaggcagacccggaactgaaagacaggctcgcacgcgaggcagccgggattcttacttggcttgtccaaggcgctattgacgcacaacggcacggatacaaaccgccggcaagcgtcacggaagcgggcaacgagtaccgcacggacgaatcagccctgcttcagttcatccaagagtgttgccgcaccggcgaagcatacaaggcgcaagcaaagccgctgcatgatgctttttccgagtggttcaaagacacttacggcgaccatgccacaatcccaagtctgaagaggataagcggcgaattacaacgcatccccggcattacgcgcgaaggaaaagaaacgacaggaaagcaacatactttttttcatggccttgcccttgccgccgatgaatag

SEQ ID NO: 75932 - protein, 238 aa, Unknown
  Obtained from environmental sample
  DOMAIN (1)...(217): Poxvirus D5 protein-like
  misc_feature (1)..(238): Xaa is any amino acid
METRQGGNTDPEILSLRDKRLVWCSETRDNQRLNAERIKAFSGGDTLTGRFLFSSEIVSFTPAFTLILSTNYKPKVSGSDAALWNRLRLVPFRMSFVPEPREAHEKQADPELKDRLAREAAGILTWLVQGAIDAQRHGYKPPASVTEAGNEYRTDESALLQFIQECCRTGEAYKAQAKPLHDAFSEWFKDTYGDHATIPSLKRISGELQRIPGITREGKETTGKQHTFFHGLALAADE

SEQ ID NO: 75933 - DNA, 699 bp, Unknown
  Obtained from environmental sample
  misc_feature (1)..(699): n is a, c, g, or t
ttgcccgttacgcattatcgcctgccgctcgggcttctgcgcgcgggcgacagcgctgattttattattctggagcatccgctcaaagcagagccagaggtgcgggtgcttgaggcatggatgcgcggcagatgtgtcgccaaaaacggcgcgtatcttggcgagctccccccggtacaggcggtcaattcctttagggaaattacaataaatgaaagcgatctcgcggtcgcctctccttcggcacaggatacggaatgcactgcgcgcgtcatagaactgaccgacgggcagatcctgaccgggtcttccgaggccaaattacctgtgcgcggcgggaaggttcttgccgatcccgaacgcgatattctcaaattggcggttgtggggcgctatccgcgcgatgagcaatttccgcccgccctcgctttcgttcgtggttttgggatacgcggcggagcgatagcctccagcgtcgcgcatgacgcgcataacatcattgccgccggcagtgacgacgcttccatcgcgcgcgcgatcaacctgattgccgaaagtcgcggcgggatcgccgcttgctctgcggacgggcgcgggcatatactcccgctgccctttgggggcatcatgacgctgctcgattgcgccgacgccgccgcccaactggacaccctggaaagtttgcgcgccaaaaaatga

SEQ ID NO: 75934 - protein, 232 aa, Unknown
  Obtained from environmental sample
  misc_feature (1)..(232): Xaa is any amino acid
MPVTHYRLPLGLLRAGDSADFIILEHPLKAEPEVRVLEAWMRGRCVAKNGAYLGELPPVQAVNSFREITINESDLAVASPSAQDTECTARVIELTDGQILTGSSEAKLPVRGGKVLADPERDILKLAVVGRYPRDEQFPPALAFVRGFGIRGGAIASSVAHDAHNIIAAGSDDASIARAINLIAESRGGIAACSADGRGHILPLPFGGIMTLLDCADAAAQLDTLESLRAKK

SEQ ID NO: 75935 - DNA, 474 bp, Unknown
  Obtained from environmental sample
  misc_feature (1)..(474): n is a, c, g, or t
gtgtctgcgaattatgtatgctatttaggcggtattgcggtgcaggccattgccaaaggcagggagccttggtttttggtggaagatttaggaaggctattggagattaggaatttaaggcagcgtatgaaagaagtgccggaagaagaaaaaagtctttgctatgcgaccttttctgaaggtaggtttaaggagcagaggagaaggatgcgcgtcgtcaacgaggcggggctgtacaggctgattatgatgtcgcgtaccgaggcagcggaaaagttcaagacgtgggttgtccgggaagtgctgcccgctatacgcaggacggggaagtatgaggataggaaaaggctcgacatgtgcctgatgccgaaaggcatgtccaagcgggaagccttccaaatcgccgtaggccaaaggttccgcgctttggaatggataaaggaagataggaagctggagcagactgcttcttga

SEQ ID NO: 75936 - protein, 157 aa, Unknown
  Obtained from environmental sample
  DOMAIN (11)...(103): BRO family, N-terminal domain
  misc_feature (1)..(157): Xaa is any amino acid
MSANYVCYLGGIAVQAIAKGREPWFLVEDLGRLLEIRNLRQRMKEVPEEEKSLCYATFSEGRFKEQRRRMRVVNEAGLYRLIMMSRTEAAEKFKTWVVREVLPAIRRTGKYEDRKRLDMCLMPKGMSKREAFQIAVGQRFRALEWIKEDRKLEQTAS

SEQ ID NO: 75937 - DNA, 531 bp, Unknown
  Obtained from environmental sample
  misc_feature (1)..(531): n is a, c, g, or t
ttggtaggattaatggtgtgtgcgtttgttgtttctgcacagggattagaaatctttggagaatactactccattttcgctttcggattagtagccttcggatttctgggcatgggtcccgtaaccattgctgtggacagttacggaccggtaaccgacaacgcccaatctgtatttgaactatctcagattgagcatattaacggtattaattccgagattgaaaaagatttcggttttaaacccgactttggaaaaggaaaatactttctagaagccaacgacggtgcaggaaatactttcaaagccaccgcaaaaccggtactcatcggaacagcggtagtgggcgcaaccaccatgatttttgccattatcttactgttgaaaaacttgggactgttgcaattaagtttgaccgatgcccctgtaattctcggatttattacgggaggggcagtcatctattggtttagcggcgcttccatgcaagccgtaaccaccggcgcataccgtgccgtagaaattctttaa

SEQ ID NO: 75938 - protein, 176 aa, Unknown
  Obtained from environmental sample
  misc_feature (1)..(176): Xaa is any amino acid
MVGLMVCAFVVSAQGLEIFGEYYSIFAFGLVAFGFLGMGPVTIAVDSYGPVTDNAQSVFELSQIEHINGINSEIEKDFGFKPDFGKGKYFLEANDGAGNTFKATAKPVLIGTAVVGATTMIFAIILLLKNLGLLQLSLTDAPVILGFITGGAVIYWFSGASMQAVTTGAYRAVEIL

SEQ ID NO: 75939 - DNA, 342 bp, Unknown
  Obtained from environmental sample
  misc_feature (1)..(342): n is a, c, g, or t
atgatggccnaggtctcctcttcggactatagccttgttcactttacccactatttcttcgccagcctgaccgcgcatgccacggctctcatgccggtattgctggccactggcgtcgccgccggtctggacatccgtcttttgggcatggtgctggccggcagtctgggcatcatgggcatcctgacgccatacggcgcaggccccagtccggtctactacaacagcggctacattgagaagaaaactttctggatattcggatctgtgtacgggtttatcttttttgtggtgtacgccgcatttgccatgtactggttccccaccgcactgaaaatgtga

SEQ ID NO: 75940 - protein, 113 aa, Unknown
  Obtained from environmental sample
  misc_feature (1)..(113): Xaa is any amino acid
MMAXVSSSDYSLVHFTHYFFASLTAHATALMPVLLATGVAAGLDIRLLGMVLAGSLGIMGILTPYGAGPSPVYYNSGYIEKKTFWIFGSVYGFIFFVVYAAFAMYWFPTALKM

SEQ ID NO: 75941 - DNA, 534 bp, Unknown
  Obtained from environmental sample
  misc_feature (1)..(534): n is a, c, g, or t
atggacaaatggccgaatccggacgagctgaaaagagacatggaagaatttttcgcgctgaaatacggcgacaagattaaacttggaatcattggcgcagagcccgatcaggcacagacggcggaagagggaacggaaaccaaaaatacatcccttaacctgaatttcgattatctcccgcgtgatatcaagaaatatcttgacaggttcgtcgtcaggcaggacgccgcgaaaaaagtcttagcgacggcgatctgcgatcactacaaccacatcaaacggtgttcggctaaaggaacgtgcggggaatatgccaagcagaacattattatgcttggtcccacgggcgtcggaaaaacctatctggtgcgaactatcgccgaccttatcggcgtgccttttgtggaggctgacgccaccaagttttccaaaaccggttacgtccgcggcaattccaaaaaccttgtgcgtgaactggttcacaagggccatggggatgtaccccctcccggaaaacggcaaaatttattttag

SEQ ID NO: 75942 - protein, 177 aa, Unknown
  Obtained from environmental sample
  misc_feature (1)..(177): Xaa is any amino acid
MDKWPNPDELKRDMEEFFALKYGDKIKLGIIGAEPDQAQTAEEGTETKNTSLNLNFDYLPRDIKKYLDRFVVRQDAAKKVLATAICDHYNHIKRCSAKGTCGEYAKQNIIMLGPTGVGKTYLVRTIADLIGVPFVEADATKFSKTGYVRGNSKNLVRELVHKGHGDVPPPGKRQNLF

SEQ ID NO: 75943 - DNA, 564 bp, Unknown
  Obtained from environmental sample
  misc_feature (1)..(564): n is a, c, g, or t
atgtcccgcctgacggaagcggaaaaagcggccggagtcatttgcgtttcagcgggcaatcatgcccagggcgtgtccctttccgcccggcgcatgggtgtgcgcgccctgatcgtcatgccgcggagtacgccgcccatcaaaatacaggcggtaaaaaggctggacggcgaagtgctgctgtacggggaagcctttgacgacgcctatatacgggcgcgggagctggcaaaggagcaggggctgacctttatccacccctttgacgacgaggacgtgatcgccgggcagggaaccatcgccctggaacttttcgagcagaatccggatctcaacgccatcttcgtgcctgtcggcggcggcgggctggccgccggcatagccgcctatacaaagtttctgcggccggacgtgaaggttatcggcgtagagcctgtggatgcggcatccatgcacgcgtccttggccgccggcaagcctctggccctgtcccgggtgggagtgttcgcggacggtgtggccgtgcgtgaacccggccggcgtacctcgctcgtgccgatctga

SEQ ID NO: 75944 - protein, 187 aa, Unknown
  Obtained from environmental sample
  DOMAIN (1)...(180): Pyridoxal-phosphate dependent enzyme
  misc_feature (1)..(187): Xaa is any amino acid
MSRLTEAEKAAGVICVSAGNHAQGVSLSARRMGVRALIVMPRSTPPIKIQAVKRLDGEVLLYGEAFDDAYIRARELAKEQGLTFIHPFDDEDVIAGQGTIALELFEQNPDLNAIFVPVGGGGLAAGIAAYTKFLRPDVKVIGVEPVDAASMHASLAAGKPLALSRVGVFADGVAVREPGRRTSLVPI

SEQ ID NO: 75945 - DNA, 408 bp, Unknown
  Obtained from environmental sample
  misc_feature (1)..(408): n is a, c, g, or t
gtgcatggatgccgcatccacaggctctacgccgataaccttcacgtccggccgcagaaactttgtataggcggctatgccggcggccagcccgccgccgccgacaggcacgaagatggcgttgagatccggattctgctcgaaaagttccagggcgatggttccctgcccggcgatcacgtcctcgtcgtcaaaggggtggataaaggtcagcccctgctcctttgccagctcccgcgcccgtatataggcgtcgtcaaaggcttccccgtacagcagcacttcgccgtccagcctttttaccgcctgtattttgatgggcggcgtactccgcggcatgacgatcagggcgcgcacacccatgcgccgggcggaaagggacacgccctgggcatgattgcccgctga

SEQ ID NO: 75946 - protein, 135 aa, Unknown
  Obtained from environmental sample
  misc_feature (1)..(135): Xaa is any amino acid
MHGCRIHRLYADNLHVRPQKLCIGGYAGGQPAAADRHEDGVEIRILLEKFQGDGSLPGDHVLVVKGVDKGQPLLLCQLPRPYIGVVKGFPVQQHFAVQPFYRLYFDGRRTPRHDDQGAHTHAPGGKGHALGMIAR

SEQ ID NO: 75947 - DNA, 519 bp, Unknown
  Obtained from environmental sample
  misc_feature (1)..(519): n is a, c, g, or t
ttgaataccgtttttctccatgcggcaatcaaaaatgaattgagctttaatgcggtagcagaaaaaataaaagccgcctgcgaaataatccgggaagacaggcgcttccttttaagagtacagaaaaataccctttccagccccaacgataactatctggcctctcatgcggtaaaatcaaccatcatttcgctgataataggtttctacctgaaactgcccatacacaggctgattgagcttggcgtggcagcgctgctccatgaaatcggaatgattaaacttccgccccaaatatacctgtccaaacgtccgctccagccacaggaacagaaagccattcttacccatccaatattgagctacaatttattaaaatccttcgactttcccctgactgtcaccctggccgcccttggacaccacgagcgggaaaaccggtcaggctaccccaaaaagctccctggcgacagaattaacccttttcgcaaaataatagccgtttccctgttccaataa

SEQ ID NO: 75948 - protein, 172 aa, Unknown
  Obtained from environmental sample
  DOMAIN (53)...(170): HD domain
  misc_feature (1)..(172): Xaa is any amino acid
MNTVFLHAAIKNELSFNAVAEKIKAACEIIREDRRFLLRVQKNTLSSPNDNYLASHAVKSTIISLIIGFYLKLPIHRLIELGVAALLHEIGMIKLPPQIYLSKRPLQPQEQKAILTHPILSYNLLKSFDFPLTVTLAALGHHERENRSGYPKKLPGDRINPFRKIIAVSLFQ

SEQ ID NO: 75949 - DNA, 426 bp, Unknown
  Obtained from environmental sample
  misc_feature (1)..(426): n is a, c, g, or t
gtgctgcgtcgcggctatcaccgtgtgggcgcccgtggtcaggtccatcgcgccgcccatgccgggcaccatcttgccgggtatcttgtagttggccaggttgcccccctggtcaacctccagcacacccaggaccgtgtagttgacgtggccgccccggatgatgcagaagctggtcgcgctgtcgaagtagcagccgccgggcaggatggtcgccggcacgccgccggcgttcacgatgtcccggttctcggttcccgggctcggcgccgggccaaggcccatcatgccgttttcgctctgcaacagtatggtgacgcccttggggacgaagttgccgaccagggtgggcaggcctatgccaaggttcaccacgtcgccgtccttgaagaaccccgccacgcgcttgaatctcggccgatctga

SEQ ID NO: 75950 - protein, 141 aa, Unknown
  Obtained from environmental sample
  misc_feature (1)..(141): Xaa is any amino acid
MLRRGYHRVGARGQVHRAAHAGHHLAGYLVVGQVAPLVNLQHTQDRVVDVAAPDDAEAGRAVEVAAAGQDGRRHAAGVHDVPVLGSRARRRAKAHHAVFALQQYGDALGDEVADQGGQAYAKVHHVAVLEEPRHALESRPI

SEQ ID NO: 75951 - DNA, 627 bp, Unknown
  Obtained from environmental sample
  misc_feature (1)..(627): n is a, c, g, or t
gtggcggggttcttcaaggacggcgacgtggtgaaccttggcataggcctgcccaccctggtcggcaacttcgtccccaagggcgtcaccatactgttgcagagcgaaaacggcatgatgggccttggcccggcgccgagcccgggaaccgagaaccgggacatcgtgaacgccggcggcgtgccggcgaccatcctgcccggcggctgctacttcgacagcgcgaccagcttctgcatcatccggggcggccacgtcaactacacggtcctgggtgtgctggaggttgaccaggggggcaacctggccaactacaagatacccggcaagatggtgcccggcatgggcggcgcgatggacctgaccacgggcgcccacacggtgatagccgcgacgcagcacttcgaccccaagggcatcagccgcctgaaaaggagatgctccctgcccctcacggcgaagggcgaggtcaactacgtgataacggagttaggtctgttcgaggtggtcggcggcaggttcgtgctgaaggaggtgttcgccccctacacggccgagaggatagtgcaggaaaccgacgcggacatacatgtggccgcagactgcaaaacagtggaggtcttatga

SEQ ID NO: 75952 - protein, 208 aa, Unknown
  Obtained from environmental sample
  DOMAIN (1)...(191): Coenzyme A transferase
  misc_feature (1)..(208): Xaa is any amino acid
MAGFFKDGDVVNLGIGLPTLVGNFVPKGVTILLQSENGMMGLGPAPSPGTENRDIVNAGGVPATILPGGCYFDSATSFCIIRGGHVNYTVLGVLEVDQGGNLANYKIPGKMVPGMGGAMDLTTGAHTVIAATQHFDPKGISRLKRRCSLPLTAKGEVNYVITELGLFEVVGGRFVLKEVFAPYTAERIVQETDADIHVAADCKTVEVL

SEQ ID NO: 75953 - DNA, 576 bp, Unknown
  Obtained from environmental sample
  misc_feature (1)..(576): n is a, c, g, or t
gtggaatatgcaatgcatgagaataagataaaatttgtaatatgcacatcgactttagcccaaggtgttaacttgccaattagatatctaattatttctagttataatcaaggaggagaaaacataaaaaccagagactttcataatcttattggtcgtgtaggtagagctggtatgcatacagaaggaagtattttatttgctaatccagaaatatttgacaacagaaatatatttatgaaacaatggaaatggaataaagtacaagaactgctaaatccagaaaaaagtgagccatgctcaagcgaattactaagtattttcgaaccattaaaaaacattaatagaaaggaagtattacagctaaaaacaaatactttcataaagcagtatcttgatacatcagatttaatttatagatttatcgaaaatattcttcaaaaatatccagaatataattttacaaaagatagtcttgaacagcaattttcaaataagttaaacttaatttctgctattgagaatttcatgttatctaactgggatgaactagaaacactaaaagggggaaaataa

SEQ ID NO: 75954 - protein, 191 aa, Unknown
  Obtained from environmental sample
  misc_feature (1)..(191): Xaa is any amino acid
MEYAMHENKIKFVICTSTLAQGVNLPIRYLIISSYNQGGENIKTRDFHNLIGRVGRAGMHTEGSILFANPEIFDNRNIFMKQWKWNKVQELLNPEKSEPCSSELLSIFEPLKNINRKEVLQLKTNTFIKQYLDTSDLIYRFIENILQKYPEYNFTKDSLEQQFSNKLNLISAIENFMLSNWDELETLKGGK

SEQ ID NO: 75955 - DNA, 432 bp, Unknown
  Obtained from environmental sample
  misc_feature (1)..(432): n is a, c, g, or t
atgatggccgagcggcacgagntctacnagnttcagggnnatatgggatacacntgccggaactccgtttttaattttctggcgctcctgggctggtccgcaggggaggacaaggagatcttcgaccgcaaggaggcgtcccgcctctttgagctttcaagggtgacgcgcaaagccgccgtgttcgaccccgacaaactcaatttcatcaaccaagaacacctgaagcggctcgaccccaacgcgcggcttgacctgatcaaacccttctggaaagagatgggcctgccantcnaacaacacgacaacgcctatctggcggatgccctgactctgatgggagggcgcgggcagacngcaagggagctggcctcnttctcngactactacntgtcgtttgaacccnngaaaggncggtggaaacccgattaa

SEQ ID NO: 75956 - protein, 143 aa, Unknown
  Obtained from environmental sample
  misc_feature (1)..(143): Xaa is any amino acid
MMAERHEXYXXQGXMGYTCRNSVFNFLALLGWSAGEDKEIFDRKEASRLFELSRVTRKAAVFDPDKLNFINQEHLKRLDPNARLDLIKPFWKEMGLPXXQHDNAYLADALTLMGGRGQTARELASFSDYYXSFEPXKGRWKPD

SEQ ID NO: 75957 - DNA, 591 bp, Unknown
  Obtained from environmental sample
  misc_feature (1)..(591): n is a, c, g, or t
atggcgtttttaaaaattgtcttcggtataataatacctgttgttttttccctcatgcttaacgaggttaataaattacacataaaaaaaataattcaaaccatagtttaccttcctcacttcatctcgtggatactattggccagtattatttccaaatttttagggcaatacggtattataaaccaggttttaagccttttcgatgtcgagcctataatttttctggcgcgaaaagaccttttccgcgggatcatggtatttaccgatgtgtggaaagaattcggttacggaagtatcgtgtacctcgccgcaattaccggtattgatccaaacctctatgaggcggcttcaattgacggggcaggccgctggcggcagacattgcatgtaacccttccgggaatgatgcccatgataattctcatgaccaccctttcgttaggccgcatcatggacgccggttttgatcaaattttcaacctctattctcccattggggataaaaccggggaaataatagatacctatacttaccgcatggggattgaaaaacccccagttcattttttccacccgccacgggggtaa

SEQ ID NO: 75958 - protein, 196 aa, Unknown
  Obtained from environmental sample
  misc_feature (1)..(196): Xaa is any amino acid
MAFLKIVFGIIIPVVFSLMLNEVNKLHIKKIIQTIVYLPHFISWILLASIISKFLGQYGIINQVLSLFDVEPIIFLARKDLFRGIMVFTDVWKEFGYGSIVYLAAITGIDPNLYEAASIDGAGRWRQTLHVTLPGMMPMIILMTTLSLGRIMDAGFDQIFNLYSPIGDKTGEIIDTYTYRMGIEKPPVHFFHPPRG

SEQ ID NO: 75959 - DNA, 423 bp, Unknown
  Obtained from environmental sample
  misc_feature (1)..(423): n is a, c, g, or t
atgatcggcgcctactacgcgctcctgacgagcgatgacggcgagctcctgcggcgcgccgcgcgcgcctggtcgatctgggagggcgcgacgagctttctgcacgccaacccggactacgtcgcccgcttccacgaggacgactacgccgcggccttcgcgcgcatcgagtgtcactacttcatcaaccgcgggttcttcacctcggacaaccagctgatcgagaacatcgcgcgcatccgccacattcccggggtgatcgtgcagggccgctacgatgtcatctgcccgatgcgcagcgcctgggatctgcaccgggcctggccggaagcggatttgcgcgtggtgcaggatgccgggcactccgccttcgagcccggcacgctgcacgagctggtcagcgccaccgaccgcttcgcctga

SEQ ID NO: 75960 - protein, 140 aa, Unknown
  Obtained from environmental sample
  misc_feature (1)..(140): Xaa is any amino acid
MIGAYYALLTSDDGELLRRAARAWSIWEGATSFLHANPDYVARFHEDDYAAAFARIECHYFINRGFFTSDNQLIENIARIRHIPGVIVQGRYDVICPMRSAWDLHRAWPEADLRVVQDAGHSAFEPGTLHELVSATDRFA

SEQ ID NO: 75961 - DNA, 339 bp, Unknown
  Obtained from environmental sample
  misc_feature (1)..(339): n is a, c, g, or t
gtgtcactacttcatcaaccgcgggttcttcacctcggacaaccagctgatcgagaacatcgcgcgcatccgccacattcccggggtgatcgtgcagggccgctacgatgtcatctgcccgatgcgcagcgcctgggatctgcaccgggcctggccggaagcggatttgcgcgtggtgcaggatgccgggcactccgccttcgagcccggcacgctgcacgagctggtcagcgccaccgaccgcttcgcctgaaggccgccgccggacctcacgccccctcaccctcaagctcgcgtcccagcctctctcggactgtgcccggtctgcgcggcgcttga

SEQ ID NO: 75962 - protein, 112 aa, Unknown
  Obtained from environmental sample
  misc_feature (1)..(112): Xaa is any amino acid
MSLLHQPRVLHLGQPADREHRAHPPHSRGDRAGPLRCHLPDAQRLGSAPGLAGSGFARGAGCRALRLRARHAARAGQRHRPLRLKAAAGPHAPSPSSSRPSLSRTVPGLRGA

SEQ ID NO: 75963 - DNA, 504 bp, Unknown
  Obtained from environmental sample
  misc_feature (1)..(504): n is a, c, g, or t
ttgggcgagaanataagccttttggtatccctcagcggcgtggccttcatagccctcaacctgacgggtggcgaaaacacgttcatcggtctgctcttgctgtttggggccatggcttccgccagcctgtacaacgtgttttcgcgcaaatctagcaaatactttgtacccgccgagataacctttgcaatgatggcatcgggcatgatagtctttggctgcctagctttcgttaaggggtcgcctggcctgatacaaagagcgctgcccgtgctgccgcccatagcgtatttgggcggcctgtcttcggtggtggcatttttcttggtcaatttcaatttgagcaggctgaaggccagccagtcatctgtcttttcaaacctctcgactgcggtctcggtggcggcagggatcacattccgaggcgagagctttggcctggcccaagctgccggggccgcgctgatactccttggcgtatggggggccaaccgcaagccatga

SEQ ID NO: 75964 - protein, 167 aa, Unknown
  Obtained from environmental sample
  SIGNAL (1)...(23)
  DOMAIN (39)...(165): Integral membrane protein DUF6
  misc_feature (1)..(167): Xaa is any amino acid
MGEXISLLVSLSGVAFIALNLTGGENTFIGLLLLFGAMASASLYNVFSRKSSKYFVPAEITFAMMASGMIVFGCLAFVKGSPGLIQRALPVLPPIAYLGGLSSVVAFFLVNFNLSRLKASQSSVFSNLSTAVSVAAGITFRGESFGLAQAAGAALILLGVWGANRKP

SEQ ID NO: 75965 - DNA, 810 bp, Unknown
  Obtained from environmental sample
  misc_feature (1)..(810): n is a, c, g, or t
atggatcccaaagccaagaccggtagcggggcttccggagttcaggtctggggcaaggacatgaaaacgctcgaactattcggcaacgcgcttgccggcgaggagcgcttctccaaggacagggcggaggagacctacgccgccatagagaagatggcgcagaagaactcgtcgctcgccggtttctcctactcggcggcgcttgtcgcgggacgcgccgaggagttcgccaaggccgtcaagcatatagaggcggtgataagcaagtccaaggattatccggcgttgcagttgcgtctggcggagtaccagcgcggcgcgcaacgctattcggaggcggtgagggcggctgaaacggcggctaagagtccggcgctgaaggtcgccgcgtcaatagagatggccatgatttcgcaagcgcagggcaatcttgatagggcgcgttccgagtatgaggccgtccttagggacggcgaggcgaacagccgcgtgctctttatgcttgcgcttttgagcatccaaatgggtcgtatatccgagagcgaggactacttgcgccgcgccgaagagggcgggctgacgctggacgagggcgagtatttagaccttggccgcgcatacgcaaacgcgagcggatacgaggataaggcggtcgagtaccttaaaaagagcatgggccccaagcagagcaacgaggacgcgtgggaggccatcgccgagctgtacaagaagaccgggaatgaagtggaagcggcggagtcctacgtgaacttgttcaaatcaatatgcagatccacagcggaaagctga

SEQ ID NO: 75966 - protein, 269 aa, Unknown
  Obtained from environmental sample
  misc_feature (1)..(269): Xaa is any amino acid
MDPKAKTGSGASGVQVWGKDMKTLELFGNALAGEERFSKDRAEETYAAIEKMAQKNSSLAGFSYSAALVAGRAEEFAKAVKHIEAVISKSKDYPALQLRLAEYQRGAQRYSEAVRAAETAAKSPALKVAASIEMAMISQAQGNLDRARSEYEAVLRDGEANSRVLFMLALLSIQMGRISESEDYLRRAEEGGLTLDEGEYLDLGRAYANASGYEDKAVEYLKKSMGPKQSNEDAWEAIAELYKKTGNEVEAAESYVNLFKSICRSTAES

SEQ ID NO: 75967 - DNA, 729 bp, Unknown
  Obtained from environmental sample
  misc_feature (1)..(729): n is a, c, g, or t
atgggtgatggaccggccctgcggttcatggacatgacgcgctggtcggcgtgcgcccgaacgcgggacgaagtactggcggcgataacggataaggcggcggggcggtgctacataggcgttgacatgtccgcgacgatagacttgacatccgtgtcgttcgtttttccgtgggcggagggcgacatcaggaagtacgcggtactgtcgcattcgttcatgccggaggacacgttcatcaaaaaaattgacatagataaggtgccttatgatttatggcgcgatcaaggctacgtaacttcgacaaaaggttcggttgtggattaccaggtcgtcatgcggtacatgctgcagacgtgcgaggcgcacggttggaagtgcgtcgagtactgcctcgacatggccggcgccacggctctcagcacggatttacaaaacagcgggcaaatagtcgttaacatccgtcaaggctcgttaacgcttggcgagcctacgaaggcctttcgggacgcggcgtaccaagggcgtttgatacacgacgccaatccggtgctgacgtgggcgttgtataacgccgtgacgcggatggatcgcaacgaaaacatgatgcttgacaaagggagagcgcggcatcgcatagacccggcggcggcagccatgaacgccatgaccagggcgatgctgattccgccgaaacctaagcggcgggtagggccgaaattcttttag

SEQ ID NO: 75968 - protein, 242 aa, Unknown
  Obtained from environmental sample
  misc_feature (1)..(242): Xaa is any amino acid
MGDGPALRFMDMTRWSACARTRDEVLAAITDKAAGRCYIGVDMSATIDLTSVSFVFPWAEGDIRKYAVLSHSFMPEDTFIKKIDIDKVPYDLWRDQGYVTSTKGSVVDYQVVMRYMLQTCEAHGWKCVEYCLDMAGATALSTDLQNSGQIVVNIRQGSLTLGEPTKAFRDAAYQGRLIHDANPVLTWALYNAVTRMDRNENMMLDKGRARHRIDPAAAAMNAMTRAMLIPPKPKRRVGPKFF

SEQ ID NO: 75969 - DNA, 357 bp, Unknown
  Obtained from environmental sample
  misc_feature (1)..(357): n is a, c, g, or t
atggccggngtcctgtctgcccgccactgtataattgaccgtcggaacgagtcggtgtatgttgatacggacgaggaattggaaaaattattgtcggaaaagtacaagggaaaaaagtacgaaatcagccgattcaagggactcggcgaaatgatgccgaaccagcttaaggaaacgacaatgagcccgaaaacgcggaggttgatccgcgtagaattgccgccgaaaacggaagacgcggccgaggacacggcgcgaacgaaacaaatggtcggtgaattgatgggcaagaagccggagttccggtttcgatttataaccgaaaacgccaaattcgtgaaagacctcttcgtttaa

SEQ ID NO: 75970 - protein, 118 aa, Unknown
  Obtained from environmental sample
  DOMAIN (33)...(107): DNA gyrase B subunit, carboxyl terminus
  misc_feature (1)..(118): Xaa is any amino acid
MAGVLSARHCIIDRRNESVYVDTDEELEKLLSEKYKGKKYEISRFKGLGEMMPNQLKETTMSPKTRRLIRVELPPKTEDAAEDTARTKQMVGELMGKKPEFRFRFITENAKFVKDLFV

SEQ ID NO: 75971 - DNA, 429 bp, Unknown
  Obtained from environmental sample
  misc_feature (1)..(429): n is a, c, g, or t
gtggtgggtagtgtatggcttttcacgatggccagtttgcttagggctgaaattgactttaatttcattctaaaggacatgattgacagcggagccatgcgcccttggctggccgaacgggttaaggccattcagaacaaataccgctcggaaggcaattttggctcggttattttaaacctggggatgaaattccccgactcggagatggccgaggaattggctgttctgggcactctgcccaagttagaccccaatttatatgacatcgccaaggaatggcttgatgatggtgtaagccggatcaaaaggcaggccggctttctcaagaaggtcctgatatggtggataatttttctggtatggaggttgggccttgccttgggctccatccagcaacaactaaccaccggaacgggaggattctga

SEQ ID NO: 75972 - protein, 142 aa, Unknown
  Obtained from environmental sample
  misc_feature (1)..(142): Xaa is any amino acid
MVGSVWLFTMASLLRAEIDFNFILKDMIDSGAMRPWLAERVKAIQNKYRSEGNFGSVILNLGMKFPDSEMAEELAVLGTLPKLDPNLYDIAKEWLDDGVSRIKRQAGFLKKVLIWWIIFLVWRLGLALGSIQQQLTTGTGGF

SEQ ID NO: 75973 - DNA, 390 bp, Unknown
  Obtained from environmental sample
  misc_feature (1)..(390): n is a, c, g, or t
gtgacccccttgaatatctctgcaacaataacgtgctggccggtctgtacttatcagcggcttctgccggttctctgcccccattgcaaaatgcctctgcattcacgcgaccggccccccgaagatatgaaacattttctggaagtcttgcccaacaatacccacgcccgctattctgaaaccgtgcatgaccagcacatggttcatatccggggccgggggtgtgaaaaatgctactatcttggcctcaccggtcagactgtggccgccgacgtcatcctcacggacgagcattttctgcgtcacatacaccggggccattacaacaaagcctattcatattggctccaggacatggccggccggcactacttacaacaagcaatctaa

SEQ ID NO: 75974 - protein, 129 aa, Unknown
  Obtained from environmental sample
  misc_feature (1)..(129): Xaa is any amino acid
MTPLNISATITCWPVCTYQRLLPVLCPHCKMPLHSRDRPPEDMKHFLEVLPNNTHARYSETVHDQHMVHIRGRGCEKCYYLGLTGQTVAADVILTDEHFLRHIHRGHYNKAYSYWLQDMAGRHYLQQAI

SEQ ID NO: 75975 - DNA, 423 bp, Unknown
  Obtained from environmental sample
  misc_feature (1)..(423): n is a, c, g, or t
ttgaccggtaaaaatgtgcagctcaatataagtgaatcaaccaatgtaaatacctgcgcgattttactggccgaaaatgtggcttcccagttggagagacgcattgcttttcgccgtgccatgaaacaagttattaccaaagctttaaagtccggcgcgcaagggattaaggtgatggtttccggccgtttgggcggcgcggaaattgcgcggacggaatggtatagagaaggccgtgtgccgctgcatacctttcgcgcggacgtggattatgccgtggcggaagctcagacaacctacggtaaaatcggcgtgaaagtctgggtgtacaaaggcgatattttggataaaaaagatgtaaaactggaattgaaaccctcggctgtagagatagaggaggaaaaagaaaatgttaatgcctaa

SEQ ID NO: 75976 - protein, 140 aa, Unknown
  Obtained from environmental sample
  DOMAIN (26)...(109): Ribosomal protein S3, C-terminal domain
  misc_feature (1)..(140): Xaa is any amino acid
MTGKNVQLNISESTNVNTCAILLAENVASQLERRIAFRRAMKQVITKALKSGAQGIKVMVSGRLGGAEIARTEWYREGRVPLHTFRADVDYAVAEAQTTYGKIGVKVWVYKGDILDKKDVKLELKPSAVEIEEEKENVNA

SEQ ID NO: 75977 - DNA, 408 bp, Unknown
  Obtained from environmental sample
  misc_feature (1)..(408): n is a, c, g, or t
atgttaatgcctaagcgcactaaataccgcaaacaacagcgcggcaaaaaccgcggcgttgcttcgcgcggtacgaaagtgtctttcggcgaatatggtttgatgtctttggataattgcgctttaaccagccggcagatcgaggcggcgcgtaaagcgattacgcatcatgtgctgaaaggcggcaagatttggattagggtgtttccggatcacgtggttacgcagcggccggctgattcgcgcatgggtaaaggcaaaggcgctccggtgctgtgggtggccaaggtgcgcgccggcaaggtgttgtttgaagtgagcggtttgtccaatgaagtggcgcanaaggctctggcttcggccggccacaaattgccttgccatgtaaagtttgtgacggcggaataa

SEQ ID NO: 75978 - protein, 135 aa, Unknown
  Obtained from environmental sample
  DOMAIN (1)...(132): Ribosomal protein L16
  misc_feature (1)..(135): Xaa is any amino acid
MLMPKRTKYRKQQRGKNRGVASRGTKVSFGEYGLMSLDNCALTSRQIEAARKAITHHVLKGGKIWIRVFPDHVVTQRPADSRMGKGKGAPVLWVAKVRAGKVLFEVSGLSNEVAXKALASAGHKLPCHVKFVTAE

SEQ ID NO: 75979 - DNA, 318 bp, Unknown
  Obtained from environmental sample
  misc_feature (1)..(318): n is a, c, g, or t
atggtcaggatcggccgagattcctattccccggtagggatggggcgggccgctgaacacagttcaccggtccaaaaaaaagtgaagtctctgcgggggcttttcggcggcaagaaactgacgcctcacaagctccgccacaccttcgccacatcgctcttccggtcgggggtcgatatcaagactactcaggagctcctcggccacgcatcaatcgcgacgacgcagatctacacgcacattgaagacgcccagaaactacaggcggtcatgaagctgaagccggtggggcggtcgtcgggggtaggtgggaggtag

SEQ ID NO: 75980 - protein, 105 aa, Unknown
  Obtained from environmental sample
  misc_feature (1)..(105): Xaa is any amino acid
MVRIGRDSYSPVGMGRAAEHSSPVQKKVKSLRGLFGGKKLTPHKLRHTFATSLFRSGVDIKTTQELLGHASIATTQIYTHIEDAQKLQAVMKLKPVGRSSGVGGR

SEQ ID NO: 75981 - DNA, 849 bp, Unknown
  Obtained from environmental sample
  misc_feature (1)..(849): n is a, c, g, or t
ttggccgagagacgccgaaaagagcagatgatcggaattgcggtcgagaaatcaaaacagcagatcgccctggaagccgaagaaacggcaaagaaggaacttgccgtagaaaaagtccgccagataacaaacgcgtcaataacgcaggagaaggaaattatcgacgcggaaacggtcaagaagacaactatcataaaggcggaccaggacaaagagaaaatgaagattgacgccgaggcccagaaagagaagattaaaattgacgccgacgcggtaaaataccaggtcgagatcaaggccgaagccgagaaacaggcgaaacaaattgacgccgacgctgtaaagtatcagatcgaaaccagggccgaagcggacaaaaccgcgaaagaaaaagaggcggtcgccattaaaacgctgaaagaagcggaagcgcagggcattaaagcggtaggtaacgcgaacgcggacgccgaaaaacaaatgcagttggcccgcgtaaccgctgaaataactttggcggaaaaaatcggcaataacgaaggttatcagggatacctggtcaatctggaagttgtaaaacagcaggccaatgtccagattgaacaggcaagatacaacgccgaagtcggtaaggcccaggcggaaaacctgaacagggccgacatcaagatcattacgaatacatcagacggcaatgtcggcggcggcgtttcaaaagtaatggatctgttttcgccgcangggggaaccgcgctcagcggcatgatggaagcctttgcccaaaccgatctcggcaaatccgtgttggcgaaaatcggactacaaaaacaacaagacaatgaacagtga

SEQ ID NO: 75982 - protein, 282 aa, Unknown
  Obtained from environmental sample
  misc_feature (1)..(282): Xaa is any amino acid
MAERRRKEQMIGIAVEKSKQQIALEAEETAKKELAVEKVRQITNASITQEKEIIDAETVKKTTIIKADQDKEKMKIDAEAQKEKIKIDADAVKYQVEIKAEAEKQAKQIDADAVKYQIETRAEADKTAKEKEAVAIKTLKEAEAQGIKAVGNANADAEKQMQLARVTAEITLAEKIGNNEGYQGYLVNLEVVKQQANVQIEQARYNAEVGKAQAENLNRADIKIITNTSDGNVGGGVSKVMDLFSPXGGTALSGMMEAFAQTDLGKSVLAKIGLQKQQDNEQ

SEQ ID NO: 75983 - DNA, 441 bp, Unknown
  Obtained from environmental sample
  misc_feature (1)..(441): n is a, c, g, or t
atgagggaaaatgagcccaaggtggtggacatcattacgcagggcttggggcacgtgggcaagggcagagagggcgtgtacctcaaccccaagagcgagggaattgtgatgaacaacggtaaagatgtgtttacgcaagcctgcacctacattgcaaaaaacgcgagagaggtggtggaaagaaacggctatgcgctctccgacctgtcgtacttcataggtcatcaagccaacgcccgcattgtggggcgcgtggtgcaggagctgggcattcctgccgaaaaggcgctgaacaacattcaagagctgggcaacacaggctcggtaagctccatgctcatctttgcgcaaaattacccccgctttcaaaagaacgatttggtttgcctgtccgtattcggcggcggctactcggctggcgcgtgcttggtgaggtgttag

SEQ ID NO: 75984 - protein, 146 aa, Unknown
  Obtained from environmental sample
  DOMAIN (59)...(146): 3-Oxoacyl-[acyl-carrier-protein (ACP)] synthase III C terminal
  misc_feature (1)..(146): Xaa is any amino acid
MRENEPKVVDIITQGLGHVGKGREGVYLNPKSEGIVMNNGKDVFTQACTYIAKNAREVVERNGYALSDLSYFIGHQANARIVGRVVQELGIPAEKALNNIQELGNTGSVSSMLIFAQNYPRFQKNDLVCLSVFGGGYSAGACLVRC

SEQ ID NO: 75985 - DNA, 342 bp, Unknown
  Obtained from environmental sample
  misc_feature (1)..(342): n is a, c, g, or t
ttgtaccccgaaagtaaggctatggacaccgacaacatacagcgcatacaaaaggatattgtgcgcgtgctgcgcaacatctacgaccccgaaatccctgtgagcgtgtacgagcttgggcttatctacgatgtgagcgtgggcgaggaggggagcgtgaacgttaccatgacgctcaccgcgcccaactgccccattgccgatgacattgtgcgcgatgtgcgtgagcaggtggcggcggtgtcgggcgttacctcgtgcaacgtaacgcttgtgtttgacccgccatggacaaaggacatgatgagcgaggaggcaaagctggagctggggcttttgtag

SEQ ID NO: 75986 - protein, 113 aa, Unknown
  Obtained from environmental sample
  DOMAIN (16)...(91): Domain of unknown function DUF59
  misc_feature (1)..(113): Xaa is any amino acid
MYPESKAMDTDNIQRIQKDIVRVLRNIYDPEIPVSVYELGLIYDVSVGEEGSVNVTMTLTAPNCPIADDIVRDVREQVAAVSGVTSCNVTLVFDPPWTKDMMSEEAKLELGLL

SEQ ID NO: 75987 - DNA, 867 bp, Unknown
  Obtained from environmental sample
  misc_feature (1)..(867): n is a, c, g, or t
atggcggcggaagagcaggccggcgacgaggccggacatctgacaaatcacctgctgatcgcgggcttcggggtcagcggcaggcatctggcgcgggcggccaagggcgcgggcatcaactatgtgattctggaaatgaaccccgacacggtacggcgctgcaaggatcaggaacccatcttctacggcgatgcttcacaggctccggtgttgacgcatttgaacatcagcgcggcgcgggtcatggccatcgtcatttccgatcccgcagcggtgcgggccgcgacgctggccgccaggacgctgaacccccatctgcacattatcgcccgcacccgcttcctggcggaagtcggacctttacggaacctgggcgcgaacgaggtgatcgccgaggagttcgaaagctccctggaagttttttcgcgtgtgctggaaaagtaccttgtgccccgacaggacatcgtgaattttgccgcgcgcatccgcgcggagaattatgacatggtgcgcaaactcgccttgcagtccgcgtcgctggaaagtctggccggccagttgcccgacgtgggcatccaggtggtgcggctggaggaaggttccgaattggccggcaaaagtctggccgaaagcgccctgcggcgggaacacggagtaaccgttgtggctatccgcaagggcgaaaccctgctcgcttcgccggacgcgaacacgcttctggaggccggcgatgtggtgtacctgcttggcgaggagagccgtttgcatccggccgacgcccttttcgcgtccgccgtggccgtccctcccggccggcgggggagggatgaggccgctacatgcgatagagcgtttcaccccggatga

SEQ ID NO: 75988 - protein, 288 aa, Unknown
  Obtained from environmental sample
  DOMAIN (192)...(263): TrkA-C domain
  misc_feature (1)..(288): Xaa is any amino acid
MAAEEQAGDEAGHLTNHLLIAGFGVSGRHLARAAKGAGINYVILEMNPDTVRRCKDQEPIFYGDASQAPVLTHLNISAARVMAIVISDPAAVRAATLAARTLNPHLHIIARTRFLAEVGPLRNLGANEVIAEEFESSLEVFSRVLEKYLVPRQDIVNFAARIRAENYDMVRKLALQSASLESLAGQLPDVGIQVVRLEEGSELAGKSLAESALRREHGVTVVAIRKGETLLASPDANTLLEAGDVVYLLGEESRLHPADALFASAVAVPPGRRGRDEAATCDRAFHPG

SEQ ID NO: 75989 - DNA, 783 bp, Unknown
  Obtained from environmental sample
  misc_feature (1)..(783): n is a, c, g, or t
gtggtgcttggagggctggatcccgcgcagcagttcattgacatagtgtaccaagagctgacagacgtgatgggcgggaagccagacgaaaagccaattaacatggcatccagcccgccgacggtgataatgatggtcggcttgcaaggcagcggcaagacatcaacgtgcgccaagctggccaaatatctgaagaaaaatgggcacagtccgcttttagcccctgcggacttgagccgcccggcggctatagagcaactgcacgtcgtagccaaggaggcgggcgcgcagtcgttccacagcgaggaaaaaactccagtagcagtctgcacggccgcgctggaagaggcgaaggccaagggctgggacgtactcatactagacaccgcagggcgcttgcacatcaacgaagacctgatggaagagctttccttaatcaaagccgcctgcaagcccgatgagacgctttttgtagcggatgccatgaccggccaggatgcagtgcggtcggcggtggccttcaatgaaaaacttggcctgacgggcgtgatcctaaccaagacggacggcgacagccgaggcggagcggcctttagcgtcaagcaggtgacggggcagccaataaagtttgtgggcaccggggaaaagtcggacgacctagaaaggttccacccagacagaatggcgcagcgaattttgggaatgggcgatgtgctgacgctcattgaacaggccaaagaaaaaatcggcgaaggcgaagcggagaaaattgcaaaaaaatag

SEQ ID NO: 75990 - protein, 260 aa, Unknown
  Obtained from environmental sample
  DOMAIN (43)...(222): CobQ/CobB/MinD/ParA nucleotide binding domain
  misc_feature (1)..(260): Xaa is any amino acid
MVLGGLDPAQQFIDIVYQELTDVMGGKPDEKPINMASSPPTVIMMVGLQGSGKTSTCAKLAKYLKKNGHSPLLAPADLSRPAAIEQLHVVAKEAGAQSFHSEEKTPVAVCTAALEEAKAKGWDVLILDTAGRLHINEDLMEELSLIKAACKPDETLFVADAMTGQDAVRSAVAFNEKLGLTGVILTKTDGDSRGGAAFSVKQVTGQPIKFVGTGEKSDDLERFHPDRMAQRILGMGDVLTLIEQAKEKIGEGEAEKIAKK

SEQ ID NO: 75991 - DNA, 528 bp, Unknown
  Obtained from environmental sample
  misc_feature (1)..(528): n is a, c, g, or t
atgcgcgttgacccccttgtagctccgtccattctatcggccaacttcatgaagctggccgacgagatagctatgctggaatccgctggcgcggacgcagtgcatgtagatgttatggatggtcgctttgtccccaacataactgttgggctgcccattgtggaatcgctgaggaaggggacgcgccttgtactggactgccacttgatgatagtcgagccgctaagatatgcggttgaattcgtcaaggccggggccaactgggtgtcggttcaccaagaggccgacccgcacctccaccgcaccatagccgccatcaagggcgcgggggcaaaagccggagttgcgctcaacccctcgactccagttgaggctctgacagacattcttggtgacgtggattttgtgctattgatgagcgtgaaccctggctttggcgggcagtcctttatcccgagcacgataagcaagatgggccgcttggtcaagttgcggcatgaggctggcgcttctttcttatacaagtaa

SEQ ID NO: 75992 - protein, 175 aa, Unknown
  Obtained from environmental sample
  DOMAIN (6)...(175): Ribulose-phosphate 3 epimerase family
  misc_feature (1)..(175): Xaa is any amino acid
MRVDPLVAPSILSANFMKLADEIAMLESAGADAVHVDVMDGRFVPNITVGLPIVESLRKGTRLVLDCHLMIVEPLRYAVEFVKAGANWVSVHQEADPHLHRTIAAIKGAGAKAGVALNPSTPVEALTDILGDVDFVLLMSVNPGFGGQSFIPSTISKMGRLVKLRHEAGASFLYK

SEQ ID NO: 75993 - DNA, 753 bp, Unknown
  Obtained from environmental sample
  misc_feature (1)..(753): n is a, c, g, or t
atgggtgggaaaaatgttgaaataaaacaagatagggcaaaacacgacaggggttttcatcgcgttggcataaattggcacagtgtctgcacatatcctttcgggagaaccattatgcggaaaatattgcctatcggcctactgctcacacttgggacagcttgtacgctgccgcccaagcacaatccaaatcttttaaagtcagagcttccatatattccagaggccgtgccgactggccctacctcggaaggcagcctttgggagggcaggtcgctttttgccgacccgcgcgcggcgcgcctgaacgacctagtgaccatccaaatatctgaaagcaccaacgcgataacccaagctaacacgaccaccagcaagaaggggaacaacgccatgaccgccccagtgcttatgtcgcgcatccaaaacacttcaagtgccagcgacttccaaggcacgggaaccaccggcaggagcgccacgttcaggaccactgtcacggcccgcgttgtaaaggtgttgaacaatggcaatttaatatttgaagggtctaggcagatcaacctcaacaatgaaacccaaaggctttacgtcgccggcctgatagacccaagaaggctttccaaagacaacaccatccagtccggccttgtgtcagacttgcacatcgcctacggcggcgccggaatagttgacgagcaactgaagccaggcgtcataagccgactgctcaactacgtttggccattctga

SEQ ID NO: 75994 - protein, 250 aa, Unknown
  Obtained from environmental sample
  DOMAIN (55)...(249): Flagellar L-ring protein
  misc_feature (1)..(250): Xaa is any amino acid
MGGKNVEIKQDRAKHDRGFHRVGINWHSVCTYPFGRTIMRKILPIGLLLTLGTACTLPPKHNPNLLKSELPYIPEAVPTGPTSEGSLWEGRSLFADPRAARLNDLVTIQISESTNAITQANTTTSKKGNNAMTAPVLMSRIQNTSSASDFQGTGTTGRSATFRTTVTARVVKVLNNGNLIFEGSRQINLNNETQRLYVAGLIDPRRLSKDNTIQSGLVSDLHIAYGGAGIVDEQLKPGVISRLLNYVWPF

SEQ ID NO: 75995 - DNA, 702 bp, Unknown
  Obtained from environmental sample
  misc_feature (1)..(702): n is a, c, g, or t
ttggaggccgagcaggtcgcccgcggcgaggaccccaccttcgtttcgcacatgtttgatggctcggacatcccgctcgagcacaaccttgaggtcgccaaggaactgcttgatctgtccaaaaaggcgaacaccgtgctggagattgaggtcggcgtagtcggtggcgaggaagatggccacgtcgccgagatcaacgaaaagttgtacaccacccccgaagacggcatcgacaccgtcaaagaactcggcctgcccgaggaggatggcaaggtgcggtatttgaccgcgctgaccttcggcaacgtgcacggcgtctacaagcccggtgcggttaagctgcgcccggccatcttgaaggacattcaggatgccgtgggcgagaagtaccacgacaaggatccgttctatctggtgttccacggcggctcgggctccacgcctgaggagatcgccgaagcggtggacaatggcgtcgtaaagatgaacatcgacaccgacacccagtatgcctacacccgtccggtggtcgaccacatgttcaagaactatgacggcgtgatcaaggccgatggcgaggtcggcaacaagaaggcctacgacccgcgtgcctggggcaagtcggctgaggctggcatggccgaacgcatcaaggaagccgccgagcaactgcgctccgcgggccagacgatgggcgtgtag

SEQ ID NO: 75996 - protein, 233 aa, Unknown
  Obtained from environmental sample
  DOMAIN (3)...(230): Fructose-bisphosphate aldolase class-II
  misc_feature (1)..(233): Xaa is any amino acid
MEAEQVARGEDPTFVSHMFDGSDIPLEHNLEVAKELLDLSKKANTVLEIEVGVVGGEEDGHVAEINEKLYTTPEDGIDTVKELGLPEEDGKVRYLTALTFGNVHGVYKPGAVKLRPAILKDIQDAVGEKYHDKDPFYLVFHGGSGSTPEEIAEAVDNGVVKMNIDTDTQYAYTRPVVDHMFKNYDGVIKADGEVGNKKAYDPRAWGKSAEAGMAERIKEAAEQLRSAGQTMGV

SEQ ID NO: 75997 - DNA, 465 bp, Unknown
  Obtained from environmental sample
  misc_feature (1)..(465): n is a, c, g, or t
atggcatacagccatatcgcccacgactgcacgctgcacaacaatatcgtcatgtccaacggtgccaccctcgccgggcatatcacgctttttgatggggtcgtcattggtggactgtcggccgtacaccagttttcccgcatcggacggcacgcttttatcggcggcatgacaggcattagccaggatctgcctccgtacttgatggccgtgggaagccgcgctgggatccatggcccgaacctggtgggcatgcgccgcataggcgtcagcccggccgcgattgcagccgtgcgttcggcgttccgccttatctggctgtcaacgttgccccggcaggtagctctggacacggcggagcaggaatactcccaggtgccggaagttatggaactggtcacgtttgttcgtgaaagcccgcgcggagttctgcctgccgcaaaggcagccgatgtcaaggagtag

SEQ ID NO: 75998 - protein, 154 aa, Unknown
  Obtained from environmental sample
  misc_feature (1)..(154): Xaa is any amino acid
MAYSHIAHDCTLHNNIVMSNGATLAGHITLFDGVVIGGLSAVHQFSRIGRHAFIGGMTGISQDLPPYLMAVGSRAGIHGPNLVGMRRIGVSPAAIAAVRSAFRLIWLSTLPRQVALDTAEQEYSQVPEVMELVTFVRESPRGVLPAAKAADVKE

SEQ ID NO: 75999 - DNA, 384 bp, Unknown
  Obtained from environmental sample
  misc_feature (1)..(384): n is a, c, g, or t
atgacagatcggccgagagatagaaacgcgaatctttataaaaaatatctttcagaagttgaagggatacaattccaaaaagatgaaccgaatgctttaaacgtacattggatgaattctatattaattaatcctgatattttcggtaaaaaaaaggattttgttatcgaatatttaaaaaataacggtattgaaaccagattattgtttaccggaatgcaccttcaaaaatcattaaaaaaatatggatgcgactgctcaggttcatatcctgtaacagaaatattaactgataatggtttttatttaccctccggctctaatctgcgagagaaagatattttatttatttgtaataaaataaaagaagcaaaatctatttag

SEQ ID NO: 76000 - protein, 127 aa, Unknown
  Obtained from environmental sample
  misc_feature (1)..(127): Xaa is any amino acid
MTDRPRDRNANLYKKYLSEVEGIQFQKDEPNALNVHWMNSILINPDIFGKKKDFVIEYLKNNGIETRLLFTGMHLQKSLKKYGCDCSGSYPVTEILTDNGFYLPSGSNLREKDILFICNKIKEAKSI

SEQ ID NO: 76001 - DNA, 456 bp, Unknown
  Obtained from environmental sample
  misc_feature (1)..(456): n is a, c, g, or t
atgaaatatgcccctatagttctttttgtttataatcgtcccgatcatacgcgacaaactcttgaagcgttagcggtaaatgaatatgcaaatgagtctgaattatttatatattcagatggtcctaaaaatcagaatgcaatagaaaaggttcaagcggttcgttctttgattaaaaatgtacaaggatttaaatctgttaatgttattgaacgagacaaaaattggggccttgcaaactcaattatagacggagttacaagcattgttaataaatacgggcgaattattgtacttgaagatgatattaaaacatctccatatttcttaaaatatatgaatgatgggctggaaatttatgagaatgaaaaaagagtagtttgtattcatgctcatcagtatcctatatctcccaaaagggctgccgaactacattcttttattaaagggggctga

SEQ ID NO: 76002 - protein, 151 aa, Unknown
  Obtained from environmental sample
  misc_feature (1)..(151): Xaa is any amino acid
MKYAPIVLFVYNRPDHTRQTLEALAVNEYANESELFIYSDGPKNQNAIEKVQAVRSLIKNVQGFKSVNVIERDKNWGLANSIIDGVTSIVNKYGRIIVLEDDIKTSPYFLKYMNDGLEIYENEKRVVCIHAHQYPISPKRAAELHSFIKGG

SEQ ID NO: 76003 - DNA, 348 bp, Unknown
  Obtained from environmental sample
  misc_feature (1)..(348): n is a, c, g, or t
ttggnncngggttatgngccgagggatatttcattcattatggatagggccttgttttttacaggtattgttgacgagcatacgcgccatttgggaagcgcggcgttttacgccccaatcaaccttaggggaataatcttcgccggtattattataggcgcgatgggcgcgatcatggatgtcgccatgtcaatgtcgtcggcgttatgggaagtaaaagagaaagcggaaaaaattacatttaaagaactgttccgttcaggcatgaatatcgggcgggacgttatgggcactatggcaaacacgcttgtttttggctatatcagctcttcattatcggatgtctaa

SEQ ID NO: 76004 - protein, 115 aa, Unknown
  Obtained from environmental sample
  DOMAIN (1)...(115): YibE/F-like protein
  misc_feature (1)..(115): Xaa is any amino acid
MXXGYXPRDISFIMDRALFFTGIVDEHTRHLGSAAFYAPINLRGIIFAGIIIGAMGAIMDVAMSMSSALWEVKEKAEKITFKELFRSGMNIGRDVMGTMANTLVFGYISSSLSDV

SEQ ID NO: 76005 - DNA, 567 bp, Unknown
  Obtained from environmental sample
  misc_feature (1)..(567): n is a, c, g, or t
ttgtggtcttggtgggataaaaagcttgacaattttgacgaatgggacgaacaggacgaaaaagacgaacaggacgaaaaggacaaacaggataaaccgaaacatccggatacctataaacaacgtctacagaaaattccggatgaaagcgggagggaacaccgggaagacgaacggggcgaatcaaagcctgagtctgacgcgaatgaagaaaacgaatacatgggcgggagctatgaagatttaaaatggaattatgccgggcacggggataaatatgaagtacatcatatacctgcggattcggcatctgaattacgaagatctgacggtcccgcgattgctatggattacgctgaccacaggcaaacggcaagttgcggtagatcatcggaagcggaggaataccggcaggcacagaaggaattgattgagcaaggtaaattttgggaggctttccagatggatgttgatgacatacgagaaaaattcggcgataaatatgacaaagtaatagacgaagcacgggaatatgcaaaaaaacttgaggaggaaggccgtgtctaa

SEQ ID NO: 76006 - protein, 188 aa, Unknown
  Obtained from environmental sample
  misc_feature (1)..(188): Xaa is any amino acid
MWSWWDKKLDNFDEWDEQDEKDEQDEKDKQDKPKHPDTYKQRLQKIPDESGREHREDERGESKPESDANEENEYMGGSYEDLKWNYAGHGDKYEVHHIPADSASELRRSDGPAIAMDYADHRQTASCGRSSEAEEYRQAQKELIEQGKFWEAFQMDVDDIREKFGDKYDKVIDEAREYAKKLEEEGRV

SEQ ID NO: 76007 - DNA, 546 bp, Unknown
  Obtained from environmental sample
  misc_feature (1)..(546): n is a, c, g, or t
ttggagaaaatggaaaaaaaagttatccctgaacttttaaagaaaagtgctaagctctctatttggagtgcgggtgtttctaccggggcggagccttattctttggccatagctctcaaagacatgactccccatactactcacagaattctggcaaccgaccttgacgtagagatgctgaccaaagctaaggaaggcgtctacaatgtcaacgagcttaaaaacgtatcacctccccgtttggcaaaatattttactaaaagttctagcccaaatacaatggctatcgtcaatgagctgaaatcttgtatcgagtataaaagacacaatcttttagaagataaatttgagacaggttttgaccttattctttgccgtaatgtggttatttattttaccgaagatgcgaaagaaggtttgtaccgccgcttttttgcgtctttaaaaccaggcggagtgttgtttgtcggcggcacggaagctgttttgaatttccgttcaatgggttatcagcagtatctgcctttcttctataaaaaaccgtaa

SEQ ID NO: 76008 - protein, 181 aa, Unknown
  Obtained from environmental sample
  DOMAIN (2)...(175): CheR methyltransferase, SAM binding domain
  misc_feature (1)..(181): Xaa is any amino acid
MEKMEKKVIPELLKKSAKLSIWSAGVSTGAEPYSLAIALKDMTPHTTHRILATDLDVEMLTKAKEGVYNVNELKNVSPPRLAKYFTKSSSPNTMAIVNELKSCIEYKRHNLLEDKFETGFDLILCRNVVIYFTEDAKEGLYRRFFASLKPGGVLFVGGTEAVLNFRSMGYQQYLPFFYKKP

SEQ ID NO: 76009 - DNA, 627 bp, Unknown
  Obtained from environmental sample
  misc_feature (1)..(627): n is a, c, g, or t
atgcacgaacaatcttcccgcctgacgctaaaaggtcaccgcgacgcgctcaaatgcctgtctgatgccaaaaaggctggtgtgatcaaagctgtcggagtttccacacatgctattgaagtagtgcaatcggcttcgttgattgatgaaattgacgtaattcatcctttgatcaataaaaaaggggtcggcattgttgacggcagcgcggcagacatgctcaaagccattacggcggctcattctatgaacaaaggcatttacgccatgaaagcccttggcggaggaaatctgcggcaaataagtgccgcggcatttgattatctgctgcaaaaaccgtatatatcttcaatagctgtgggtatgcgaactttagaggaagttgctctcaacgccgctattttttccggcgaaagcgtaaaggaggaactttgggcggatgttcgcgggagtgtgaggaaattgctgcttgaagattggtgtagagggtgcggcaaatgcacggaaaaatgtccggcaaacgcccttaccatgaaaaatggcaaagtggcagctgactttgacaaatgtattttatgcggttactgtggcgcggcttgtcctgatttttgcttaaaaattatttag

SEQ ID NO: 76010 - protein, 208 aa, Unknown
  Obtained from environmental sample
  DOMAIN (183)...(206): 4Fe-4S binding domain
  misc_feature (1)..(208): Xaa is any amino acid
MHEQSSRLTLKGHRDALKCLSDAKKAGVIKAVGVSTHAIEVVQSASLIDEIDVIHPLINKKGVGIVDGSAADMLKAITAAHSMNKGIYAMKALGGGNLRQISAAAFDYLLQKPYISSIAVGMRTLEEVALNAAIFSGESVKEELWADVRGSVRKLLLEDWCRGCGKCTEKCPANALTMKNGKVAADFDKCILCGYCGAACPDFCLKII

SEQ ID NO: 76011 - DNA, 717 bp, Unknown
  Obtained from environmental sample
  misc_feature (1)..(717): n is a, c, g, or t
ttgaaaggggttttagttccgggaaaaaaggggcggtccatgaaaaaagaattttgtcgatttggataccccgtttttgaaattaaacagttgatttcccgcgccgaggattttgccggaaaccgtaagcgcggtatcgcgggatgcggcaaacagggccgtgccgtaacatgggatcaaaagcagttgtccgcgcgaaacgcgttgggagattatgtcatcgacggcatggcggacggtacggctgtcaaatgttatttgagcgtcgaggataaaaattacattgtcaacggcggttttgaagacacggatatgcgaatgtggaatgtttccggttccgtaagttccggcggccatattgaacggcgtccgacagactcccgatccggcgaggccagcttccatttctgggacagcgcgccgttgaatttcacggtgacgcaggacattaccggacttgagccgggtaaatatatgcttgcggcctggctgcacggggataaaggcggctccggcgcggaatgtttcatttttgcgcaagccggcccggtttatgagcgtacggacataaaactggcgggttataagaattttcaacaggctgtactttacgttaaagtaggcgaagtcggttccttaactgtcggctttaccgttaaatgcgcggctgaaggatggggcggatgggacgatttcaggctgtttaaggtggaatag

SEQ ID NO: 76012 - protein, 238 aa, Unknown
  Obtained from environmental sample
  misc_feature (1)..(238): Xaa is any amino acid
MKGVLVPGKKGRSMKKEFCRFGYPVFEIKQLISRAEDFAGNRKRGIAGCGKQGRAVTWDQKQLSARNALGDYVIDGMADGTAVKCYLSVEDKNYIVNGGFEDTDMRMWNVSGSVSSGGHIERRPTDSRSGEASFHFWDSAPLNFTVTQDITGLEPGKYMLAAWLHGDKGGSGAECFIFAQAGPVYERTDIKLAGYKNFQQAVLYVKVGEVGSLTVGFTVKCAAEGWGGWDDFRLFKVE

SEQ ID NO: 76013 - DNA, 411 bp, Unknown
  Obtained from environmental sample
  misc_feature (1)..(411): n is a, c, g, or t
atgatagccgtaggtataagcgcggtacccggttacgccagagtcgtaagagctgctgtattgaccatacgcgaacaggaattcatcgaagccgcacgggcaataggcggaaacgatttccgcataatcacccgccacatactgccaaactgtatggcgccggttattgtgcaatccacactcggtatggcaggagcaatactatcagcggcaggtttgagtttcattggactcggtgttatgccgccaagtcccgaatggggctttatgctgtccgttggacggcgttttatacgggatcaaccgtatttatccatatttcccggacttaccatcgtggttgttgtattggcactcaatatgttgggcgacggcttgcgcgatgctttagacccaaaactcaagaaatag

SEQ ID NO: 76014 - protein, 136 aa, Unknown
  Obtained from environmental sample
  DOMAIN (1)...(136): Binding-protein-dependent transport system inner membrane component
  misc_feature (1)..(136): Xaa is any amino acid
MIAVGISAVPGYARVVRAAVLTIREQEFIEAARAIGGNDFRIITRHILPNCMAPVIVQSTLGMAGAILSAAGLSFIGLGVMPPSPEWGFMLSVGRRFIRDQPYLSIFPGLTIVVVVLALNMLGDGLRDALDPKLKK

SEQ ID NO: 76015 - DNA, 585 bp, Unknown
  Obtained from environmental sample
  misc_feature (1)..(585): n is a, c, g, or t
atgcgaacggatattcagccgccgaacatgttccggcccggcctactcgaccccgggcggcgcgtggtctggctcgggctcggcggcctggccctggggctggagattttctcctacgtctatttccaggcccatttgaaattgcggccctgcgaactctgcgtccagatccggttttccatggcggctctggccgtgggcgcctggctgatcgccctgagcccccgccgcctcgcctgccggttggccggcggcttggtcatggcctgggccctggttcagggcctggcctgggatatcaggctggaaatgatctatttgaaccccgcggccccgggctacgccctttgttcaccctcggccgtccgtttgcccttgccgctggatcgctggctgccggcccatttcacccccacggccccctgcggggccgatggctggagcctcttgggcctgaacatggccgagtggcttttgccggtttacgcctttttcctgatcgcctgttccggcctgtggtggaggtggggccgggcgcgccggcgaatgatacagggaaacgccgattacaaggagggaccatga

SEQ ID NO: 76016 - protein, 194 aa, Unknown
  Obtained from environmental sample
  DOMAIN (19)...(175): Disulfide bond formation protein DsbB
  misc_feature (1)..(194): Xaa is any amino acid
MRTDIQPPNMFRPGLLDPGRRVVWLGLGGLALGLEIFSYVYFQAHLKLRPCELCVQIRFSMAALAVGAWLIALSPRRLACRLAGGLVMAWALVQGLAWDIRLEMIYLNPAAPGYALCSPSAVRLPLPLDRWLPAHFTPTAPCGADGWSLLGLNMAEWLLPVYAFFLIACSGLWWRWGRARRRMIQGNADYKEGP

SEQ ID NO: 76017 - DNA, 660 bp, Unknown
  Obtained from environmental sample
  misc_feature (1)..(660): n is a, c, g, or t
atgaggaggccaaaaagaccatggccgccctggggcagaacatggcctggcttttggaaagattcaccggccctgacctttgatcgcctggctcggggtgtcgctctggccgtccgcctcgggcagtgtgcatatgcattaattttgagcccgcgggtggcggttgaattgagcgacgccctgaacatcacggataaaagaataatattccacctaagcggcgatctgggggcctcggcccggccctatgccgaactggcggaaaagctggggctcacggaaggcgaagtgcttctggccgtcaggcgttttcaggcccaaggcttgatccggcgctttggggccgttttggggcatcagaaatcaggcttcaaggccaacgccatgacggcctggcaggtcaagccggaggaaatggcggccgcgggcgggcgcctggccgggctcccctatgtttcccactgttatcagcgccggacaacgccgaactggccctttaacctctacaccatggttcacgccgattcgacggcccgcctggagggcttcctggcggaaatggccgaaatctgccgggccgaggattggcgggtgctggagagcctcaaggaattcaaaaaaacgtccttgcggtttttttccgaagaagaggccggataa

SEQ ID NO: 76018 - protein, 219 aa, Unknown
  Obtained from environmental sample
  misc_feature (1)..(219): Xaa is any amino acid
MRRPKRPWPPWGRTWPGFWKDSPALTFDRLARGVALAVRLGQCAYALILSPRVAVELSDALNITDKRIIFHLSGDLGASARPYAELAEKLGLTEGEVLLAVRRFQAQGLIRRFGAVLGHQKSGFKANAMTAWQVKPEEMAAAGGRLAGLPYVSHCYQRRTTPNWPFNLYTMVHADSTARLEGFLAEMAEICRAEDWRVLESLKEFKKTSLRFFSEEEAG

SEQ ID NO: 76019 - DNA, 702 bp, Unknown
  Obtained from environmental sample
  misc_feature (1)..(702): n is a, c, g, or t
ttggcttggccggatctgacccgggcgggcctgacccaggccgacttggtcagggcggcccacgacttggccgatgaattgcgggcttccgagccggtttccttcggtctgcttttcagttccggcggcccccgcctaggccgggacttggtggaggacgcccgcaaagccttggacgaggccgctttctccggctcgggccaggtttccgtcttcggccccctggctctgaacatcagcggcgaccggctgttcgaaggcggcgacttaagcggagccctgcgggaatatgagcgcgggctggccatggcccccgaccatctcaacctgttgaacagcctcggtgtctgccagggccgcttgggccgggctcgtgaagccttggccacttttcacaggatagtcgggttggaccccgaaaacatgatggcccattataatctcggctatacccatcttctggccggacgcctgcccgaagccgaggaagccctggcccgggccgcggaactggccccggacaattttgaaaccctcttccatctgggccgcatcgccctggaactcggccatctggacaaagccttgccggccctgaaaaaagccggcgaggtgggggaaaaccgaccggcggtttttcgccttctgggtgaagccctgcttttggcccacgatcaccagggggccatggccgctttttaa

SEQ ID NO: 76020 - protein, 233 aa, Unknown
  Obtained from environmental sample
  DOMAIN (142)...(167): Tetratricopeptide repeat
  misc_feature (1)..(233): Xaa is any amino acid
MAWPDLTRAGLTQADLVRAAHDLADELRASEPVSFGLLFSSGGPRLGRDLVEDARKALDEAAFSGSGQVSVFGPLALNISGDRLFEGGDLSGALREYERGLAMAPDHLNLLNSLGVCQGRLGRAREALATFHRIVGLDPENMMAHYNLGYTHLLAGRLPEAEEALARAAELAPDNFETLFHLGRIALELGHLDKALPALKKAGEVGENRPAVFRLLGEALLLAHDHQGAMAAF

SEQ ID NO: 76021 - DNA, 606 bp, Unknown
  Obtained from environmental sample
  misc_feature (1)..(606): n is a, c, g, or t
atgcgtaccggaaaacggcttgaccaacgccgcgccctggccgcgagaaggtcgaatgagcgcaagctgaacaagatgacgctgttatcctcgacagactgcggcacttatgggatgctggacttccccggcattaccgagtctactctccctgctgacggaactggcggttcaacttcatggcgcaataaatccgcagaccaaatcctgcgcgatatcaccgaccttctcaatgctgttattcatccgacaaatggccaagaagtacccgatacccttctgctgccacttaaggtttataccgaccttaccacaaggcggcttggaagcacggagatttccctgctgaaatacataacagataacttcccgcagatcaggagaattgattggctcaatgaactttccggcatcggcgcgggtggcagaaatcgtgtattcatcgggaagatcgactccgaccacatcgagaaccaggtcgtaacctactttgagcagttggatattgagcataagggtggcacgtacaccattccctgccagtcctcaaccgcaggggtactcatctattacccgcaggcctttgcctatgcggacggagtataa

SEQ ID NO: 76022 - protein, 201 aa, Unknown
  Obtained from environmental sample
  misc_feature (1)..(201): Xaa is any amino acid
MRTGKRLDQRRALAARRSNERKLNKMTLLSSTDCGTYGMLDFPGITESTLPADGTGGSTSWRNKSADQILRDITDLLNAVIHPTNGQEVPDTLLLPLKVYTDLTTRRLGSTEISLLKYITDNFPQIRRIDWLNELSGIGAGGRNRVFIGKIDSDHIENQVVTYFEQLDIEHKGGTYTIPCQSSTAGVLIYYPQAFAYADGV

SEQ ID NO: 76023 - DNA, 612 bp, Unknown
  Obtained from environmental sample
  misc_feature (1)..(612): n is a, c, g, or t
gtggacagggaaagcgcgaggctgatcgtgtccgagcagctgcgaaggctggacggcgaatacgggaatttgatgataaccggcggcaacgattacgcgctggcggcggcggaacatctggtgaacgtgccggtggaggccgaccggcattacatactggacaccgagataccgttttacgagatggtggtccacggctatatagactacgcgggcagcccgtacaacacgcgcgaggttcaggacacgcatatgtcgctgctgtattcgatggcgaccggcgccgcgccgcattaccagtggtcgtaccagaaaacccgcgagctggagatgaccccgtacgagaagctgtactccatatactacgggtactggctcgatgacgcagcggaactgtaccgcgcctacaacgacgtatacaagtacctgcggaacaagcgcatggccggacacgcggtgctgtccgaggcgaccagccatatggcggccgtcaccgtgaccgaatacgagggcggcgcgcgcgtgtacgtgaacaccaccgacaagccttttgtcacgggaggtataacgatccccgccaaggggtattatgtggaggggaccccgaaatga

SEQ ID NO: 76024 - protein, 203 aa, Unknown
  Obtained from environmental sample
  misc_feature (1)..(203): Xaa is any amino acid
MDRESARLIVSEQLRRLDGEYGNLMITGGNDYALAAAEHLVNVPVEADRHYILDTEIPFYEMVVHGYIDYAGSPYNTREVQDTHMSLLYSMATGAAPHYQWSYQKTRELEMTPYEKLYSIYYGYWLDDAAELYRAYNDVYKYLRNKRMAGHAVLSEATSHMAAVTVTEYEGGARVYVNTTDKPFVTGGITIPAKGYYVEGTPK

SEQ ID NO: 76025 - DNA, 936 bp, Unknown
  Obtained from environmental sample
  misc_feature (1)..(936): n is a, c, g, or t
gtggaaataaacaaagcatggacgaattgnntagtatcggcgcgaaagtatagaccacaggtgtttgcctcagtgtgggggcaagcctccattacggctacgctcaaaaatcccattgtgcgcaagcacttggcgcatgcctacctgttctgcggaccgcgcggcgtgggtaaaaccacctgcgcccgtatttttgccaaaaccatcaactgctttaaccncacgcccgacatggaggcgtgtaacgaatgcgagagctgccgttcgtttaacgaaggtcgctcgtacagcattcacgagcttgatgctgcgtcaaataactcggttgatgatattcgccagctcatagagcaggtgcgcattccgccacagatagggcagtacagcgtgttcatcattgatgaggtgcatatgctatcggcggcagcgttcaacgcatttctcaaaacgttggaagagccaccggcacacgccatttttattttggctaccaccgaaaagcacaggattatttccacgattctttcgcgctgccaaatctacgactttaaccgcattcgcgttgaggatacggtggagtacctcaagttcattgccaagagcgagggcgtaaccgctgaggacgctgcgctgcacatcatcgcacagaaggctgacggcgcgatgcgcgatgcgctctccatattcgaccaggtagtttcgttttgcggtgataacctcacctacacgcaggttatctcaaacctcaacgtgcttgactacgactactacttccgcctcaccaaagcgtttttggcaggcagctacacagatgcgctgctcattttcaacgaaattttaagcaagggttttgaggcgcagcactttatagcaggcttgtgtacgcacttccgcgatctgttagtgtgcaaagacccgcaaacggggagctgctga

SEQ ID NO: 76026 - protein, 311 aa, Unknown
  Obtained from environmental sample
  DOMAIN (47)...(238): ATPase family associated with various cellular activities (AAA)
  misc_feature (1)..(311): Xaa is any amino acid
MEINKAWTNXXVSARKYRPQVFASVWGQASITATLKNPIVRKHLAHAYLFCGPRGVGKTTCARIFAKTINCFNXTPDMEACNECESCRSFNEGRSYSIHELDAASNNSVDDIRQLIEQVRIPPQIGQYSVFIIDEVHMLSAAAFNAFLKTLEEPPAHAIFILATTEKHRIISTILSRCQIYDFNRIRVEDTVEYLKFIAKSEGVTAEDAALHIIAQKADGAMRDALSIFDQVVSFCGDNLTYTQVISNLNVLDYDYYFRLTKAFLAGSYTDALLIFNEILSKGFEAQHFIAGLCTHFRDLLVCKDPQTGSC

SEQ ID NO: 76027 - DNA, 900 bp, Unknown
  Obtained from environmental sample
  misc_feature (1)..(900): n is a, c, g, or t
gtggcgcctgtgcccaaactgcccccacgcgcagttggagagtccggcaaaaacgtggcggcctgccccaagtgcggcagcccaagctgggcggaccaggggcaggtgcgctccatgctgaaggtgcagttggtctattccagaatggactacgcggaaagcgtgatagacgatgaaagcgaggaccgccaaaggactttctactgcaagcagatgctggtggacgtcaaggacgacgacatagccaaggcgtacagcatgaacaacagcgaattcgactttggctacgagttcgtcaaaaaggcctgcctgcgcgaaatcaacttcggcgaaaccgacgccgtgggggaaaaactggcggtggcggggcaggagaacgtccgcaagggcttcaggatctgcaaggactgcggcagaattcagggaaaatccaacaggatagaccacagcttcacatgcaaatcgcggaacacggcggccgccacctgcgaggaccatcttttcctgtaccgcgagttcgacacggaggcgcttcggattctcatacccgccaccaccattgacactaccaggaagcggctggaatccttcatcgcggccttcatgctgggcatgaaggagtacttcggcaacgtggaccacctgaaggccactgtaagcgaagttcccacgcaggacggcgcttaccacaagcagtaccttgtcatctacgattcggtccccggcggcacgggctacctgaaacagttgatgaacaagcaccattcgctgatagagatttttgaaaagagcgctgctggtcctggagaagtgcgggtgcaaggaagacccgcgcaaggacggctgctaccgctgtctgtacgcatnaggcagggcagactcggccaatctgatcaatga

SEQ ID NO: 76028 - protein, 299 aa, Unknown
  Obtained from environmental sample
  misc_feature (1)..(299): Xaa is any amino acid
MAPVPKLPPRAVGESGKNVAACPKCGSPSWADQGQVRSMLKVQLVYSRMDYAESVIDDESEDRQRTFYCKQMLVDVKDDDIAKAYSMNNSEFDFGYEFVKKACLREINFGETDAVGEKLAVAGQENVRKGFRICKDCGRIQGKSNRIDHSFTCKSRNTAAATCEDHLFLYREFDTEALRILIPATTIDTTRKRLESFIAAFMLGMKEYFGNVDHLKATVSEVPTQDGAYHKQYLVIYDSVPGGTGYLKQLMNKHHSLIEIFEKSAAGPGEVRVQGRPAQGRLLPLSVRXRQGRLGQSDQ

SEQ ID NO: 76029 - DNA, 849 bp, Unknown
  Obtained from environmental sample
  misc_feature (1)..(849): n is a, c, g, or t
atggataaaaatgaattgtgctctttatacacgattttaggctcatttatttatttattaggggatgataatgcctcagcattgaggcttattcagaaggcgcttgccattaatgaagaaattctgggaaaagaacatgaagatactttagaaagttataacatcataggattgttacattttacaatgggcaattaccagaaggctcttgaatattatcagcaggcattgaatattcagaaagaaatacttggggaaaaacatatcaataacgccacaagctataacagtataggacagttgtatcagataataggtggttatccaaaagctcttgaatattatcagcaagcattgaatattcagaaagaaatacttggggaaaaacatatcaataccgccgcaatctacagcaatatcggtttactgtataattcaataggcgattatcccaatgctcttgaatattcttatcatgcattgaatattcagaaagaaatacttggagaaaaacatatcaatactgccgtgagctataacaatatcggactaatttattcttcaatgggggacaagcaaaaatcccttgagtattatcggcaggcattgaatatccatgaagaaacattgggtaaaaaccataaaaataccgcatcatgttataacaatgtaggaatgggatattctataattggcgattatcccaaagcgcttatgtatgttgagcaggcattgaatattcaaaaagaaatactcggggaaaaacatattgataccgccatgagctataataatatcggagagattaattttttaatgggtaatttatcaaatgcccttttgatataa

SEQ ID NO: 76030 - protein, 282 aa, Unknown
  Obtained from environmental sample
  DOMAIN (176)...(209): Tetratricopeptide repeat
  misc_feature (1)..(282): Xaa is any amino acid
MDKNELCSLYTILGSFIYLLGDDNASALRLIQKALAINEEILGKEHEDTLESYNIIGLLHFTMGNYQKALEYYQQALNIQKEILGEKHINNATSYNSIGQLYQIIGGYPKALEYYQQALNIQKEILGEKHINTAAIYSNIGLLYNSIGDYPNALEYSYHALNIQKEILGEKHINTAVSYNNIGLIYSSMGDKQKSLEYYRQALNIHEETLGKNHKNTASCYNNVGMGYSIIGDYPKALMYVEQALNIQKEILGEKHIDTAMSYNNIGEINFLMGNLSNALLI

SEQ ID NO: 76031 - DNA, 792 bp, Unknown
  Obtained from environmental sample
  misc_feature (1)..(792): n is a, c, g, or t
gtgcgcggctgcaacgccatacagcagagcggcgtggtggcgaacaccaccgcctgcccgaatactgcctacgccatggactttggtgcagccaccggcggtgacggtacctttacctaccagtggcaggcgcgtttgggcaacagcggcagctgggcagatgtgccgagcgcaaccgcccaaagttacagcggctcaacccctgccaccggcggcgagagcaacttctaccgccgcgtggcaacctcctgcggcgtgaaccacacctccagcgaggtaacggtaaccagcagccctgccatagcgcagcccacgctggcgcagcagctggcatgcccctctacaagcgttacgcttaacttagcagccgctaccggaggcaacggctcctacacctaccagtggcaggttagcgatgacgctggtgccacatggagcgcggctccgggtacggcaaccaacagcgcgtacacctttacctcagacactatagcaggaacggtgaaccactaccgccgcaacgccaccagctgcggacagacgaactcctctgcgcccataggggtgctagtgcaggcaggggctaacctggcgcagcctgcgcccaaccgaacgagctttgaaacctgccccggcaccgccattcccgccaacaccttcaccatgggcgcggctaccggcggcaccggcagcgactacacctacgtttgggtgttgaacaacgcnggtgcaggcaaaccgaacagccctgaactacgacaccattataacgccaacgctcggccgatctga

SEQ ID NO: 76032 - protein, 263 aa, Unknown
  Obtained from environmental sample
  misc_feature (1)..(263): Xaa is any amino acid
MRGCNAIQQSGVVANTTACPNTAYAMDFGAATGGDGTFTYQWQARLGNSGSWADVPSATAQSYSGSTPATGGESNFYRRVATSCGVNHTSSEVTVTSSPAIAQPTLAQQLACPSTSVTLNLAAATGGNGSYTYQWQVSDDAGATWSAAPGTATNSAYTFTSDTIAGTVNHYRRNATSCGQTNSSAPIGVLVQAGANLAQPAPNRTSFETCPGTAIPANTFTMGAATGGTGSDYTYVWVLNNAGAGKPNSPELRHHYNANARPI

SEQ ID NO: 76033 - DNA, 726 bp, Unknown
  Obtained from environmental sample
  misc_feature (1)..(726): n is a, c, g, or t
gtgctatccggggtcggcgaggcttacgggctgttgggcgtgggtcttgtggtgggactcaccgcgattctcgttttcacgctcttcttcagtgcctacaagacacacggcttccaaaagtacctactgataggcactggggcgtatctgggggcccaggccatcgtcaacgctttgggtgtcatgggctggttgcccatgacggggcttccattcacattcgtctcctatggtggggcatccatcgtcacaggctttgctatgttggcgctctgtcttgtggcgacgcactactccgccgatgaaaggagcgatgagagggccgccacttcatgggcggggatattctttgcggctgcattcgcagcgatattcgccaaggcagtcttggtcatggggtcaggcgcggacgtgatcgccgcgagacccgcgctagcattgcaggatgacggcgcacgtaggttcgtcaacaacccgcgacttgaggaaatacgcaggtcgcttacaaaggctaccatcctcgatgcgagcggtctgccgctggccaccagcgattttgacgaactgatgatccacaaggacgaatacgtcaaactggggctgttcgatgcacagacctttggggtgaaagccgccaagcaaaaatcaaacggcagatactatcccctcggacatgtcgcaagtcaactgctgcaacagatagactcacccttntacaggcggtag

SEQ ID NO: 76034 - protein, 241 aa, Unknown
  Obtained from environmental sample
  misc_feature (1)..(241): Xaa is any amino acid
MLSGVGEAYGLLGVGLVVGLTAILVFTLFFSAYKTHGFQKYLLIGTGAYLGAQAIVNALGVMGWLPMTGLPFTFVSYGGASIVTGFAMLALCLVATHYSADERSDERAATSWAGIFFAAAFAAIFAKAVLVMGSGADVIAARPALALQDDGARRFVNNPRLEEIRRSLTKATILDASGLPLATSDFDELMIHKDEYVKLGLFDAQTFGVKAAKQKSNGRYYPLGHVASQLLQQIDSPXYRR

SEQ ID NO: 76035 - DNA, 525 bp, Unknown
  Obtained from environmental sample
  misc_feature (1)..(525): n is a, c, g, or t
gtgggtgcgggcgcggactgggtcgccgtctcggcgggctgctaccagaccgtggccctgaagaaagacggtagcctttgggcttggggagctggtaagagcggcactcccgtccgtgtgggcgcggactcggattgggcagccgtttcgactgcgggcatgctccgcggggcgggcatcgtcagcggcggtcgcaccgcactgctgaagaaggatggcagcctgtggatgtggggcggagacaccgagaaagttcccgtccgcgtgggcgcggattcggactggtccgccgtttcggctggccaagcgcgcatcatggcactgaagaccgacgggagcctatgggcattgcggggagcccccacccgcgtgggcacggaatcggactgggccgccgtctcggccggcggcaaccacacgtacaccgtggccctgaagaccgatggaagcctctgggtgtggggcggcacagacaaaaatgcccccgtccaagtcggcacggactacagcgtccctagcaaatga

SEQ ID NO: 76036 - protein, 174 aa, Unknown
  Obtained from environmental sample
  misc_feature (1)..(174): Xaa is any amino acid
MGAGADWVAVSAGCYQTVALKKDGSLWAWGAGKSGTPVRVGADSDWAAVSTAGMLRGAGIVSGGRTALLKKDGSLWMWGGDTEKVPVRVGADSDWSAVSAGQARIMALKTDGSLWALRGAPTRVGTESDWAAVSAGGNHTYTVALKTDGSLWVWGGTDKNAPVQVGTDYSVPSK

SEQ ID NO: 76037 - DNA, 909 bp, Unknown
  Obtained from environmental sample
  misc_feature (1)..(909): n is a, c, g, or t
ttgatcggcgagttggatcggctacaagacgtgccctcctatccggtgggctttgaggaacaggtcgccatgtacccgctcgattttgaggagtttttatgggcgataggcgtatccgccgaggtcgtggaccggctacgcgaagactacgcggcggcgcgcctgatagaagcgtttttgcacgagcggatgatgaaggcctatagagagttcctagtcgtaggcggaatgccggccgtagtggaggcgtttgtcgaaaacgacgatttctctagaacattgaggatacagaacggcatcgtcgacagttaccgcgacgacatatccaaatacgcggacaaggaaaagatactcgccaaaaggatgtttgacgcgatacccgggcagctaaacaagaagaacaaacgctttatactggccgacttggagaagggcgcggcggcgcggaaatacgaaaacgccgcgatgtggctgaccgaagctggcgtagcgtacaactgcttcaatgtcgccgcgttagagacagggctgcggttcaacgaaaaacgcaatctgtataaactatatatgctcgacaccggcttactgtgcgcgctcggcatgaacggaatccaaagcgccctgctcggcggcggcattgagatgaacgagggcggcataaccgaaaacgccgtggcagcggaactcgcgaagaagaacatcccgctctactactacgataaaaagggacgctcggaactcgacttcgtattcgaggagagcggcggcctctcggtgatagaggtaaagtcagggaaaaaccacaaatcgcacgcctcgcttgacaacgcctgcaaagaggccatagcgccgattcgcagacgcatgggtctaagncagcacaacactgaaaccggtacggacgggtga

SEQ ID NO: 76038 - protein, 302 aa, Unknown
  Obtained from environmental sample
  misc_feature (1)..(302): Xaa is any amino acid
MIGELDRLQDVPSYPVGFEEQVAMYPLDFEEFLWAIGVSAEVVDRLREDYAAARLIEAFLHERMMKAYREFLVVGGMPAVVEAFVENDDFSRTLRIQNGIVDSYRDDISKYADKEKILAKRMFDAIPGQLNKKNKRFILADLEKGAAARKYENAAMWLTEAGVAYNCFNVAALETGLRFNEKRNLYKLYMLDTGLLCALGMNGIQSALLGGGIEMNEGGITENAVAAELAKKNIPLYYYDKKGRSELDFVFEESGGLSVIEVKSGKNHKSHASLDNACKEAIAPIRRRMGLXQHNTETGTDG

SEQ ID NO: 76039 - DNA, 906 bp, Unknown
  Obtained from environmental sample
  misc_feature (1)..(906): n is a, c, g, or t
ttgattgccgttgacgttttgattttgggcgcggggcctgcggggctttcggctgggatatatgctgcgcgcgcgggggcgaaaaccgtaattttggaaggtttagccgccggcggttcggtcaatttaacgcccgacatttgcaattatccgggatttaccgaaataagcggggcagagttggcggaaaaaatgtctgaacacgccgaacacgccggcgccgaaatcgtttacgacgaagtcaaaagtgttgaccttgataaaaaaacagtcaccgcgcatgagaacacttataaatatggggcgcttattattgcggcgggcgcgcggccccgaaaattgggacttgaacacgaagaagatttaatcggcgcgggcgtgcatttttgcgggctttgtgacggacaattttacaagggcaaggacgtaatcgttgtcggcggcggcaatcacgcggtcgaagaagcgatttatttgtccggcattgccaaatccgtgacgattgtaaacaatgtggaccgacttttggcgcaagaagcccttgtaaaacaattaccgaaaagcgtaaaagtttatcacaattcaataatatctggaataattaccgaaaacggcaaattcaagggagcaaagatttccctgtcggacggagttgcggccaaaccgacctttacgcaggaggcgtcagccattttcgttgcgattgggcgcgtgccgaatacggatttatttaaaggcaaattggaactgtcgcgggacggttatatcgtcgtgaacgccgaaatgcggacatcgaacgcgtcggtttttgcggcaggcgatgttattcaaaagcaggtccgccaagttataaccgcctgcgtcgatggtgcgattgcggcgacctttgcacaaaaaagtagttaa

SEQ ID NO: 76040 - protein, 301 aa, Unknown
  Obtained from environmental sample
  SIGNAL (1)...(27)
  DOMAIN (142)...(236): Pyridine nucleotide-disulphide oxidoreductase
  misc_feature (1)..(301): Xaa is any amino acid
MIAVDVLILGAGPAGLSAGIYAARAGAKTVILEGLAAGGSVNLTPDICNYPGFTEISGAELAEKMSEHAEHAGAEIVYDEVKSVDLDKKTVTAHENTYKYGALIIAAGARPRKLGLEHEEDLIGAGVHFCGLCDGQFYKGKDVIVVGGGNHAVEEAIYLSGIAKSVTIVNNVDRLLAQEALVKQLPKSVKVYHNSIISGIITENGKFKGAKISLSDGVAAKPTFTQEASAIFVAIGRVPNTDLFKGKLELSRDGYIVVNAEMRTSNASVFAAGDVIQKQVRQVITACVDGAIAATFAQKSS

SEQ ID NO: 76041 - DNA, 825 bp, Unknown
  Obtained from environmental sample
  misc_feature (1)..(825): n is a, c, g, or t
ttggtggggcgctttgaaaaggatttcaagggtaagaagttgccgagggttgcgcttgattgcgcgaacggaagcggggcaaaagcggcgattgaagttttggggcgccttgggttcgcggtggatgtttacaacaccgaaaccgacggaaaaaatgtcaatgtcggatgcgggtcactgcaccctgaatttttgcaaaagcaaatggcgaaaaaaaccgccgacattggattcacttttgacggagatgcggacaggtgtatcactttggacggcaagggcaaggtaatcgaaggcgaagtcttacttgcggcgcttggattacatttcggcgcaaaggaaatggtttctaccgtggtttttaacggcggggttgaaaaatatcttgttggcaaggggattaagtttactcggacgcctgttggttgccggcacgttgttgcggccttgcgcgagatgaaatgtgtgtgccttgggggagagccgaatggtcattttatgttccctatggtcacaaagccgaaaaagattttggtggacgatgggttaattaccgcgcttatgattttgtctatggttgtgggttcgggtgcaaatgtttcggaactttgcaaaaatattcctttttggcccgccgcaaatcgtgaagtccgcgggcgcgaagtcaaactttcgcccgaagaagccgacgcaatgggcaaaggcggtttttggcgtgacggctgtcgtatccttatccgaaaaagacgggaccgaagacatgacccgaatctatgtgaaggcgaggacgtcaaaaaggtcaatgctattgcggattcttattaa

SEQ ID NO: 76042 - protein, 274 aa, Unknown
  Obtained from environmental sample
  DOMAIN (98)...(210): Phosphoglucomutase/phosphomannomutase, alpha/beta/alpha domain III
  misc_feature (1)..(274): Xaa is any amino acid
MVGRFEKDFKGKKLPRVALDCANGSGAKAAIEVLGRLGFAVDVYNTETDGKNVNVGCGSLHPEFLQKQMAKKTADIGFTFDGDADRCITLDGKGKVIEGEVLLAALGLHFGAKEMVSTVVFNGGVEKYLVGKGIKFTRTPVGCRHVVAALREMKCVCLGGEPNGHFMFPMVTKPKKILVDDGLITALMILSMVVGSGANVSELCKNIPFWPAANREVRGREVKLSPEEADAMGKGGFWRDGCRILIRKRRDRRHDPNLCEGEDVKKVNAIADSY

SEQ ID NO: 76043 - DNA, 810 bp, Unknown
  Obtained from environmental sample
  misc_feature (1)..(810): n is a, c, g, or t
ttgctgtgggctgttgaggatcccgcgataccttcggggactgtgctttccgtccagatccgttccaatatagaacaggcatggattactgatgttccggatgaatacaagactgccgaggagcaggtcgccatggttcccctgccccgtctggaatttttccggaccaggggagcggcggagaaatatgccgccgcttttgccgaatacgccaccgcctatgcggaaaccatacaggacgggcttcctattcgggacaagccggaaaacaacgcccgccgtacctaccgtctcaaagaaggggagatcattaagcttctggaaaaggttgaaggaacggaagctgtcagtaccactggatctgttttggaaggcgactggttcagggtgctgacccagagcggcagtacgggctattgtttttcctaccggctgaggatctttgagcacattaccgggcctctgggtgacgcgcctgtagagacggatacaagcggagaccgggaactggaactggttttaagccgaacctggtatcctgaactttacgggaagatggtaagctcaaaccggctggatttggacattctgtcacaaaattattcgtttaccgccgggatcgcaagggggagagcccggattcacctggaagacggagatgcggaatttccctaccggaaaattaccaaaaccgganaccgttcctggaacttcgacggtacgccgttggtggtaactctcctttccgaatcaaaactggaagttgaatgggaagatgaggataaacaacaaagacagaagtctttgtaa

SEQ ID NO: 76044 - protein, 269 aa, Unknown
  Obtained from environmental sample
  misc_feature (1)..(269): Xaa is any amino acid
MLWAVEDPAIPSGTVLSVQIRSNIEQAWITDVPDEYKTAEEQVAMVPLPRLEFFRTRGAAEKYAAAFAEYATAYAETIQDGLPIRDKPENNARRTYRLKEGEIIKLLEKVEGTEAVSTTGSVLEGDWFRVLTQSGSTGYCFSYRLRIFEHITGPLGDAPVETDTSGDRELELVLSRTWYPELYGKMVSSNRLDLDILSQNYSFTAGIARGRARIHLEDGDAEFPYRKITKTGXRSWNFDGTPLVVTLLSESKLEVEWEDEDKQQRQKSL

SEQ ID NO: 76045 - DNA, 594 bp, Unknown
  Obtained from environmental sample
  misc_feature (1)..(594): n is a, c, g, or t
gtgatgggaaacgcaaagaagcttgcggaaaaagcatgtaagacatggatagatgtgcgtgcctttggtcagctttttgcgtacaaaggtgagggaaaaggatccggcgtatcagtaggtatacgcgggccggtaagcatccagtcggcgttcagccatgatcccgtaaatgttacaagcattcagattaccaaaagcgtcagcggtgaaggggatgggacaaagaaggcttcagatacaatgggaatgaaacaccgtgttgattttggcctctatataacctacggaagcattaatccgcagcttgcaactaaaacaggtttttcttatgaagacgctcagaaaatcaaacaggcacttttgcacatttttgacaacgatgcttcatctgcaagaccggaaggcagcatggaagtaattcagctttactggtgggaacattccagtaaatcgggccaatattcttcagcgaaggtgcaccggagtctaaagatcaccgtgaaaaacaaggcagaaagacctcaagcaatcaatgattatgatttaacgcttgaatcacttgatggacttaagccggaagtattaagttattga

SEQ ID NO: 76046 - protein, 197 aa, Unknown
  Obtained from environmental sample
  DOMAIN (3)...(185): Family of unknown function (DUF694)
  misc_feature (1)..(197): Xaa is any amino acid
MMGNAKKLAEKACKTWIDVRAFGQLFAYKGEGKGSGVSVGIRGPVSIQSAFSHDPVNVTSIQITKSVSGEGDGTKKASDTMGMKHRVDFGLYITYGSINPQLATKTGFSYEDAQKIKQALLHIFDNDASSARPEGSMEVIQLYWWEHSSKSGQYSSAKVHRSLKITVKNKAERPQAINDYDLTLESLDGLKPEVLSY

SEQ ID NO: 76047 - DNA, 519 bp, Unknown
  Obtained from environmental sample
  misc_feature (1)..(519): n is a, c, g, or t
atgatgttcctacaggccggcctgcagttaatcgcgaacgggcagtggcctctgggactcggcttcatagccgccgccggctccagcgcgatcatatccggttatgtcgacggggcgagcaaacacgcccagggcggcgtgtttgacgagtacgggcgcgcggcgcggatgttcgccgccggcggcgcgttcaccaatcaaatcgtcagctcccccacttatttcgcgcacggcggcggcctgggccttatgggagaagccgggccggaagccataatgccgctcacgcggatgcccaacggcgacctcggggtgcagacggccgggagcgggtcaaatgtagttataaatataattaacaattccggcgccgaggtgaggcaagaggaaaccgagactccgggcggcggcaggcagattgacattaccatcggcgatatgatcaaccggcatatcgcgtccgggaaggccgaccgcgccatgggcgtgcgtttcggcgtgcgggcccagggggtgtaa

SEQ ID NO: 76048 - protein, 172 aa, Unknown
  Obtained from environmental sample
  misc_feature (1)..(172): Xaa is any amino acid
MMFLQAGLQLIANGQWPLGLGFIAAAGSSAIISGYVDGASKHAQGGVFDEYGRAARMFAAGGAFTNQIVSSPTYFAHGGGLGLMGEAGPEAIMPLTRMPNGDLGVQTAGSGSNVVINIINNSGAEVRQEETETPGGGRQIDITIGDMINRHIASGKADRAMGVRFGVRAQGV

SEQ ID NO: 76049 - DNA, 309 bp, Unknown
  Obtained from environmental sample
  misc_feature (1)..(309): n is a, c, g, or t
ttgagctcagggccaaagcggccgcctattcctgaacggctgcacgttgccgggtctattcccggcgttttggtgcaaacctctattcttcccgacgtgggggccagcgttccagtcaggggccccgtcgcgaatatcaacctgttttcaggatcgaatggccctatttccggcggaatttcgtcccacatcaattntgcgccaagcccaagtcctccaatgaaatcttttactatcggcaaactggattccctggaaatttttccagtagtcaggtctatcctgagaataacgcctttccagccataa

SEQ ID NO: 76050 - protein, 102 aa, Unknown
  Obtained from environmental sample
  misc_feature (1)..(102): Xaa is any amino acid
MSSGPKRPPIPERLHVAGSIPGVLVQTSILPDVGASVPVRGPVANINLFSGSNGPISGGISSHINXAPSPSPPMKSFTIGKLDSLEIFPVVRSILRITPFQP

SEQ ID NO: 76051 - DNA, 399 bp, Unknown
  Obtained from environmental sample
  misc_feature (1)..(399): n is a, c, g, or t
atgggagatggtgaacaggctgaaggctcagtttgggaagcagctatggcggcggcaaaattctcacttgagaatctgacggctattattgacaggaattttttagaaatcagcggtaataccgaagaggtaatgccattggaaaaactgggagacaagtatagcgcctttggatgggacgtgcgttgctgtgatggtcatgagccttcctcgatcctgagcgtcctgaatcgtcccaaagcagggaagcctgtcttaattatcgccacaacggtaaaaggttacggcagcgtagttctggaaaacaaagccgtatctcaccacctgataccatcggaagatcaatacctggaaataaagaacgatcttttaaaacagcgggaactctataatggctaa

SEQ ID NO: 76052 - protein, 132 aa, Unknown
  Obtained from environmental sample
  misc_feature (1)..(132): Xaa is any amino acid
MGDGEQAEGSVWEAAMAAAKFSLENLTAIIDRNFLEISGNTEEVMPLEKLGDKYSAFGWDVRCCDGHEPSSILSVLNRPKAGKPVLIIATTVKGYGSVVLENKAVSHHLIPSEDQYLEIKNDLLKQRELYNG

SEQ ID NO: 76053 - DNA, 498 bp, Unknown
  Obtained from environmental sample
  misc_feature (1)..(498): n is a, c, g, or t
atggctaaagtctcctgccggaaggcttttacccggacattgttgaaagcggccaggaaagatcctgctctttacgcaattaccaccgattccagggggagtgtaaccctggatgaatttgctgcggaatttccaagccagttccttgagcttgggatcgctgaacaaaacgcactggccgttgccgcaggtcttgccgccgcaggccggaatgtctttgtggcaggtcctgcctgctttttatccgctcgtggtcttgagcaaattaaggtggatatagcctataaccggagtaatgtaaaggtggtgggggtcagcgctggagtcagctacggcccactggggggaacccacacagccctccacgatttcgcctctctccgcgccatgcctaatatatgcatctatgtccccagcgatagcgtccagacagagggcattacccaggtatttggtttcttttcaaggacctgcctatcttcaaacgggtcgtggtga

SEQ ID NO: 76054 - protein, 165 aa, Unknown
  Obtained from environmental sample
  DOMAIN (4)...(161): Transketolase, pyridine binding domain
  misc_feature (1)..(165): Xaa is any amino acid
MAKVSCRKAFTRTLLKAARKDPALYAITTDSRGSVTLDEFAAEFPSQFLELGIAEQNALAVAAGLAAAGRNVFVAGPACFLSARGLEQIKVDIAYNRSNVKVVGVSAGVSYGPLGGTHTALHDFASLRAMPNICIYVPSDSVQTEGITQVFGFFSRTCLSSNGSW

SEQ ID NO: 76055 - DNA, 360 bp, Unknown
  Obtained from environmental sample
  misc_feature (1)..(360): n is a, c, g, or t
ttgaataacgaaccaggtgaacatctgtttaactatattgataaacctgattttaatatgaatactcttgttaccgaaataaataagatattaggtaaatctaagaaattatttcattggccctattggttgggatattcaggaggtttgtgttttgatttactgacatttattttacataaaaaattaccaataagttcaatcagagttaaaaaattctgttcaaatactatgtttgaagctgcaaatataaaaaaaacaaattttaaggctcctataactcttattgagggattgaaacgtactataaaatacgaatttattgataaaattgatgatcaagtattttatacggaataa

SEQ ID NO: 76056 - protein, 119 aa, Unknown
  Obtained from environmental sample
  misc_feature (1)..(119): Xaa is any amino acid
MNNEPGEHLFNYIDKPDFNMNTLVTEINKILGKSKKLFHWPYWLGYSGGLCFDLLTFILHKKLPISSIRVKKFCSNTMFEAANIKKTNFKAPITLIEGLKRTIKYEFIDKIDDQVFYTE

SEQ ID NO: 76057 - DNA, 402 bp, Unknown
  Obtained from environmental sample
  misc_feature (1)..(402): n is a, c, g, or t
atggaaggaaaaataaaagttattgagcatataaaattaatacaattaattatctctcgtatgagttcatcgatgttatcaattaaagcattaactcttactgtcctttcattattaatcggttttgctgtaaaagataaaataatgataatattaattattgtttatccattattaatattgtttatgttttttgatatgttttatttatggcaagaaagattgtttcgtaatttatataataatatgaaagataaagaagacacagatttttcaatggatgtaaatgaatacaaaaaaataaataattttttattttgtattanatcagttgttatatggcctttttattttacattatgtatcataaataccataatattaattgtattattaatataa

SEQ ID NO: 76058 - protein, 133 aa, Unknown
  Obtained from environmental sample
  misc_feature (1)..(133): Xaa is any amino acid
MEGKIKVIEHIKLIQLIISRMSSSMLSIKALTLTVLSLLIGFAVKDKIMIILIIVYPLLILFMFFDMFYLWQERLFRNLYNNMKDKEDTDFSMDVNEYKKINNFLFCIXSVVIWPFYFTLCIINTIILIVLLI

SEQ ID NO: 76059 - DNA, 801 bp, Unknown
  Obtained from environmental sample
  misc_feature (1)..(801): n is a, c, g, or t
atgatcagatcggccgagtcggcaagtgcggcactagcgaacgttaatgctggctgcggttccattgttgtttcagctccgcctgcgtgtgtgtaccaaacctcttggtgcggcggaaaagcccttagcgcagttacgatgaatactactactattccgactaccgctggagcatgtacgttctataagtcactacaaaaagcacagtcaggaagcaatggtggcgaggtgtgtataaacggagtctgcaagaacaacagtgggggctggtatagcgagagtgattttacaaattcaggaatcacacctaaagatggcggatattatgtttattgcaaaactttgggtcaatatggtgacggatgcatcaacaccaatggcactgctgtaacagccggttacccagaatgcgcctacggcggcggcggaactagctcatcgtccactggcggcggcggaactagttcatcgtctggcggtggtggcggcacttgcacaggaacaaacgttacttcgacatgggccagtttgagtactgctaattctaccaatgcgaagaatttgtgttgcaccggaggttttcatgtgtattacaatggaagctccaccaaaagtgtgactgttgcaagtggggcaggtagcactggctgtagtggaagttacgcacttggttctgcctatggcacaagcacacctactacctcaaccaataatttggtttgcaccaatactggcaccggagcaattactcttacacctcctaatgctggtagtaatttttatgctaaatgcgtaccatag

SEQ ID NO: 76060 - protein, 266 aa, Unknown
  Obtained from environmental sample
  SIGNAL (1)...(25)
  misc_feature (1)..(266): Xaa is any amino acid
MIRSAESASAALANVNAGCGSIVVSAPPACVYQTSWCGGKALSAVTMNTTTIPTTAGACTFYKSLQKAQSGSNGGEVCINGVCKNNSGGWYSESDFTNSGITPKDGGYYVYCKTLGQYGDGCINTNGTAVTAGYPECAYGGGGTSSSSTGGGGTSSSSGGGGGTCTGTNVTSTWASLSTANSTNAKNLCCTGGFHVYYNGSSTKSVTVASGAGSTGCSGSYALGSAYGTSTPTTSTNNLVCTNTGTGAITLTPPNAGSNFYAKCVP

SEQ ID NO: 76061 - DNA, 684 bp, Unknown
  Obtained from environmental sample
  misc_feature (1)..(684): n is a, c, g, or t
atggacgcgccccggctaggtcaagcacaagaatcgggccatgcccttatcgtcaacgacttgcacaagacctacccaggtgccgagcatcctgtatttaacggctactcccttaacgtggcccaaggcgcgctgtgcgccatagtcggtgtcagcggcgtgggcaagaccacactgctgaactgcatagccgcgctggacaattgggattctggcgcgatcatggtcggcggagaagcggtgccaaaaaacgatgccgcaaagggagctatgtacaggcggcgcaaagttggcatggctttccagtcgccccacctgctgccagagttcaacctgcttgaaaacatggaaatgccattgaggattgacaacgcgctggacgcgcaaggtaaggaatggtgcaaacagctactggaactcgttggcttgcagagcttgatgggccgactgccatcgcaggtcagcggaggccaagcggccagggccggcctggcccgcgccttagtcaggcgccccgccctctggctgctcgacgagccaacaggcaacctggaccccgaaaccgcgctggaagtgttccaagtcctcttggccctccacaaagaactatcccccacgacgctgctggtcacgcacaacccaaccttggnccatanctgcnaaaaggtgaaaaggctgggctag

SEQ ID NO: 76062 - protein, 227 aa, Unknown
  Obtained from environmental sample
  DOMAIN (43)...(227): ABC transporter
  misc_feature (1)..(227): Xaa is any amino acid
MDAPRLGQAQESGHALIVNDLHKTYPGAEHPVFNGYSLNVAQGALCAIVGVSGVGKTTLLNCIAALDNWDSGAIMVGGEAVPKNDAAKGAMYRRRKVGMAFQSPHLLPEFNLLENMEMPLRIDNALDAQGKEWCKQLLELVGLQSLMGRLPSQVSGGQAARAGLARALVRRPALWLLDEPTGNLDPETALEVFQVLLALHKELSPTTLLVTHNPTLXHXCXKVKRLG

SEQ ID NO: 76063 - DNA, 534 bp, Unknown
  Obtained from environmental sample
  misc_feature (1)..(534): n is a, c, g, or t
ttgtgcgtgaccagcagcgtcgtgggggatagttctttgtggagggccaagaggacttggaacacttccagcgcggtttcggggtccaggttgcctgttggctcgtcgagcagccagagggcggggcgcctgactaaggcgcgggccaggccggccctggccgcttggcctccgctgacctgcgatggcagtcggcccatcaagctctgcaagccaacgagttccagtagctgtttgcaccattccttaccttgcgcgtccagcgcgttgtcaatcctcaatggcatttccatgttttcaagcaggttgaactctggcagcaggtggggcgactggaaagccatgccaactttgcgccgcctgtacatagctccctttgcggcatcgttttttggcaccgcttctccgccgaccatgatcgcgccagaatcccaattgtccagcgcggctatgcagttcagcagtgtggtcttgcccacgccgctgacaccgactatggcgcacagcgcgccttgggccacgttaagggagtag

SEQ ID NO: 76064 - protein, 177 aa, Unknown
  Obtained from environmental sample
  misc_feature (1)..(177): Xaa is any amino acid
MCVTSSVVGDSSLWRAKRTWNTSSAVSGSRLPVGSSSSQRAGRLTKARARPALAAWPPLTCDGSRPIKLCKPTSSSSCLHHSLPCASSALSILNGISMFSSRLNSGSRWGDWKAMPTLRRLYIAPFAASFFGTASPPTMIAPESQLSSAAMQFSSVVLPTPLTPTMAHSAPWATLRE

SEQ ID NO: 76065 - DNA, 720 bp, Unknown
  Obtained from environmental sample
  misc_feature (1)..(720): n is a, c, g, or t
gtgaaagacaccgaggacgatgcggtctggcgctgtcccaatgaaaactgcgcggcacggatcaaaggcgccttgaaacattttgtcagtaaagatgcggcagacattgagggctgcggcgaacaaattgtcgagcagttaaataaagcgggactggtgcataatcccgccgatttgtattacctgaaatatgaggatttgctgcagcttgagcgcatgggtgagaaatccgtaaataatctcctgagcgcgattgaacgcagcaagcaggtcggtttggcgcggattttgttcggcctgggtatccgtcatgtcgggcaagtggttgcggaaacactggcgaataaatttcattccatagataacttatttaaggctagcgaagaagatctggccaataccgacggcgtaggcgagattattgcggcttctctgtatcaagctttggcgcgcgcggatttgcgtaaaattatcgaacgtttgcaaaaagccggtgtggttttgcaggataatcgggtacagatttccgatacatttgccgggcagacttttgttttgacaggaacattgccggccttaactcgcagtgaagccgaggagttgatcaaatcccacggcggcagtgtttcttccagcgtcagcaagaaaacaagttatgttttggccggagcagaggcaggcagtaaattagaaaaagncgcagaaanctgggcgtggtga

SEQ ID NO: 76066 - protein, 239 aa, Unknown
  Obtained from environmental sample
  DOMAIN (174)...(234): BRCA1 C Terminus (BRCT) domain
  misc_feature (1)..(239): Xaa is any amino acid
MKDTEDDAVWRCPNENCAARIKGALKHFVSKDAADIEGCGEQIVEQLNKAGLVHNPADLYYLKYEDLLQLERMGEKSVNNLLSAIERSKQVGLARILFGLGIRHVGQVVAETLANKFHSIDNLFKASEEDLANTDGVGEIIAASLYQALARADLRKIIERLQKAGVVLQDNRVQISDTFAGQTFVLTGTLPALTRSEAEELIKSHGGSVSSSVSKKTSYVLAGAEAGSKLEKXAEXWAW

SEQ ID NO: 76067 - DNA, 447 bp, Unknown
  Obtained from environmental sample
  misc_feature (1)..(447): n is a, c, g, or t
atggatccggatattaaattagaagttgaaggttcgaaagcaacggttgttcgtccgaccgaccaaaaacgccatcgtgcgcttcacggtttgtaccgcgcattggtcgccaatatggtgaaaggcgtttcggaaggatttaaaaccacgttggaaattgtcggcgttggttataaagctaatattgaaggacaaattttggaattgtcgttaggctattcgcacaacttgttcctgcagttgccgcctgaggttaaagccaccacaacggcagaaaaaggtaagaaccccaccatcacattgacgtcgcacgacaaagaattgttgggattggttgtggcgaaaattcgttcgtatcgcaaacctgaaccgtacaaaggaaaaggtatcaagtttgaaggtgaagtgttacgtagaaaagccggtaaatcagcatcaagtaaataa

SEQ ID NO: 76068 - protein, 148 aa, Unknown
  Obtained from environmental sample
  DOMAIN (1)...(46): Ribosomal protein L6
  misc_feature (1)..(148): Xaa is any amino acid
MDPDIKLEVEGSKATVVRPTDQKRHRALHGLYRALVANMVKGVSEGFKTTLEIVGVGYKANIEGQILELSLGYSHNLFLQLPPEVKATTTAEKGKNPTITLTSHDKELLGLVVAKIRSYRKPEPYKGKGIKFEGEVLRRKAGKSASSK

SEQ ID NO: 76069 - DNA, 870 bp, Unknown
  Obtained from environmental sample
  misc_feature (1)..(870): n is a, c, g, or t
atgatcagatcggccgagcggcacgagaacattgagttcctggcccgcgtggtgatggtcgatggagaagaggggtcgcaattagcgtacccagacagctgcgtcggcaccgactcgcacaccaccatggttaacggcctgggcgtgctgggctggggcgtgggcggcattgaagctgaagcggcaatgttgggccaacccgcacccatgctaattccacgcgtagtgggctttaagcttaccgggtctattcccgctggagccactgcaactgacgtggtgctgaccatcaccgagatgctgcgtaagcatggggtagttggcaaattcgttgagttttacggttcgggtgtggcacaggtcccgctggctaatcgggccaccattgggaatatgagtcctgagttcggctccactgctgcaattttccccatcgatgacgaaacactacgttatctgcgccttacagggcgcactgatgaacaagtagctttggtggaggcctacgctcgggagcaaggtttgtggcatgacccatccgcgcccggctatgttgaacctgagttttctgagtatttagagttggatttgggtacagtggtgccttccatcgcggggccaaaacgcccgcaagatcgcattgccttgaccaaatcaaaagcagcttttgctgatgctgttctgaattatgtgggaccagaagaggtggaacagttcaaggctgctggcggcaatgagtttgtggctgcagtgcaggagggtgatgaagagagcttcccggcttcagatccgttagcagtggatggattncgcaattcggtagatggtgatgctggggtagcccagaaccacttatgtgcggccaaatag

SEQ ID NO: 76070 - protein, 289 aa, Unknown
  Obtained from environmental sample
  DOMAIN (1)...(288): Aconitase family (aconitate hydratase)
  misc_feature (1)..(289): Xaa is any amino acid
MIRSAERHENIEFLARVVMVDGEEGSQLAYPDSCVGTDSHTTMVNGLGVLGWGVGGIEAEAAMLGQPAPMLIPRVVGFKLTGSIPAGATATDVVLTITEMLRKHGVVGKFVEFYGSGVAQVPLANRATIGNMSPEFGSTAAIFPIDDETLRYLRLTGRTDEQVALVEAYAREQGLWHDPSAPGYVEPEFSEYLELDLGTVVPSIAGPKRPQDRIALTKSKAAFADAVLNYVGPEEVEQFKAAGGNEFVAAVQEGDEESFPASDPLAVDGXRNSVDGDAGVAQNHLCAAK

SEQ ID NO: 76071 - DNA, 681 bp, Unknown
  Obtained from environmental sample
  misc_feature (1)..(681): n is a, c, g, or t
ttgagttgtttgcgcggaaaatggaaaggccaaggtgtgatcacgcgaaaagggagcatagtggacgccagttttgttgaagcgccgaagcaacgcaacaaccgtgatgagaacaaaaagatcaaagaaggtgaaggcggtgatttatgggaagacaatatccacaaaagccgccaaaaggataaagacgctcgctggacgaagaaaaacaatgaaacgcattatggatacaaagaccacgtgaaagtcgatcgcgacagtaaaatgatcgtggcttattctgtgacccacgcggcggttcatgacagccaagaagcggtggcgcttatagacgataaagaccaggaactccatgccgacagcgcgtatgttggtgaagaattacgtgagtctatgctgaagaaaaatcccggcttaaggttgaggatcaacgaaaaaagctatcggcataagccacttaccgacgagcaaaaagccaataaccgcgaaaagtccaaggtcagagccagggttgaacacattttcgggcatatgaccaattcgtttggcgagctttacctcagaaccatagggattgttcgggccgggtgccaaatagcgcttaaaaatttggcgtataacctacaaaggtatgagtgtctattgcgtcttaaaaatgtcctgttgccaagacaagggtga

SEQ ID NO: 76072 - protein, 226 aa, Unknown
  Obtained from environmental sample
  DOMAIN (18)...(208): Transposase DDE domain
  misc_feature (1)..(226): Xaa is any amino acid
MSCLRGKWKGQGVITRKGSIVDASFVEAPKQRNNRDENKKIKEGEGGDLWEDNIHKSRQKDKDARWTKKNNETHYGYKDHVKVDRDSKMIVAYSVTHAAVHDSQEAVALIDDKDQELHADSAYVGEELRESMLKKNPGLRLRINEKSYRHKPLTDEQKANNREKSKVRARVEHIFGHMTNSFGELYLRTIGIVRAGCQIALKNLAYNLQRYECLLRLKNVLLPRQG

SEQ ID NO: 76073 - DNA, 921 bp, Unknown
  Obtained from environmental sample
  misc_feature (1)..(921): n is a, c, g, or t
atggatttctatgattttaattccatcaaaaaccagggatatctgattgaattgttaaaaaaaacaaactgggatatttcagatttgcaaaaaagaagttttgaacaaaatgtggatattacaggtttcttcaataatatattcaatgattatataaataacaataaaaagaaatataaaataattttatacgaaaaattaaggaattccgatattatcggcaaaaaaagatttctttatgaggtaaataaatttgaaaattttgaatataaaaaactgacagaaaattcagtgctgttcaatcccattgaaataatatataagcattttccagaattgaaggaagatattgaaaatacggacttggatgttattttccaacaaaatcttcaattgttcagcgaaaacaaaaatataaatatcgttcatgacatgattaataatgatatgaacagaagcctgatttattttaatgaattagagtttttaaacgaagaatacaataaaataaatgacagccacttaacagattcggcgcttattaacagtaaagcttcgaatcttttttcccaaactccgattgtaactgattatcttgttccggcagaacaaatatcatccgaaaaacaaaaatcaaacatcggcaaaatagtttcaacggtaaaagaaaacgctcaaaataaaaggaaacaagaacaaggcgacaaggcggaaaaatttgcggtaaatgcgttacgaaaaagagaaataccgcaagtttgcagttttgttaattccgcagactatttagtaaggtgggtatctggcgcagcgcagagaattgaacatctggctggtaatgactatctgcattatgatatgcatatagaggttgatgacaaaataatgctttatatagaaagtaaaagtcttcggatataa

SEQ ID NO: 76074 - protein, 306 aa, Unknown
  Obtained from environmental sample
  misc_feature (1)..(306): Xaa is any amino acid
MDFYDFNSIKNQGYLIELLKKTNWDISDLQKRSFEQNVDITGFFNNIFNDYINNNKKKYKIILYEKLRNSDIIGKKRFLYEVNKFENFEYKKLTENSVLFNPIEIIYKHFPELKEDIENTDLDVIFQQNLQLFSENKNINIVHDMINNDMNRSLIYFNELEFLNEEYNKINDSHLTDSALINSKASNLFSQTPIVTDYLVPAEQISSEKQKSNIGKIVSTVKENAQNKRKQEQGDKAEKFAVNALRKREIPQVCSFVNSADYLVRWVSGAAQRIEHLAGNDYLHYDMHIEVDDKIMLYIESKSLRI

SEQ ID NO: 76075 - DNA, 684 bp, Unknown
  Obtained from environmental sample
  misc_feature (1)..(684): n is a, c, g, or t
gtgcttttctcgaagcttgaggatgaccggatcgccgacntgagggaggcttattccggcagccagaaagagcggaaagaaagcgcgcccccggcggacggaaacagtgtcccgcaaggcaaggcaggcggcgggaacaatcagggtaaacctgaaagcgtgaaaccggcaaagactccggaggaaatcgttgcatccttcgcttctaccctggatctccgggtggcggagattgtaaaggtaacgcggcaccccaacgcggaaaaactctacgttgaaaccctggacattgccggagaggaacgggtgattgtttcgggcatcgcgcctttctacaaggaagaagaactgctccacaagcggattatcgtcgcttacaaccttaagccggccaagctccggggggtggtaagccgggggatgcttttggccgcggaagatcacaacggccccggcggcgcggaacgctgcgaagtattggatgtttccggcgttcctacaggaaccagggttgtgctggaaggttcttcttccggccaagcgccggaggaaatcaccgtggatacctttttcagtattcccctgcgggtttccggccatgtcgtaacggcaggcgggaaggcgcttaccgtggatggaaaaccaattaccacgtccacaatagccgacgcggaagtccattga

SEQ ID NO: 76076 - protein, 227 aa, Unknown
  Obtained from environmental sample
  DOMAIN (73)...(170): Putative tRNA binding domain
  misc_feature (1)..(227): Xaa is any amino acid
MLFSKLEDDRIADXREAYSGSQKERKESAPPADGNSVPQGKAGGGNNQGKPESVKPAKTPEEIVASFASTLDLRVAEIVKVTRHPNAEKLYVETLDIAGEERVIVSGIAPFYKEEELLHKRIIVAYNLKPAKLRGVVSRGMLLAAEDHNGPGGAERCEVLDVSGVPTGTRVVLEGSSSGQAPEEITVDTFFSIPLRVSGHVVTAGGKALTVDGKPITTSTIADAEVH

SEQ ID NO: 76077 - DNA, 771 bp, Unknown
  Obtained from environmental sample
  misc_feature (1)..(771): n is a, c, g, or t
ttgctaaattcgctttcacttataatgctttctataaactatgagaaaatcccaaaatacaatcttggtggcagttatttccaaacgataatagacaatacagtaggtataaaacttgaaaagaatattcccattattgcaaggcttacaattacagaaacaaccagtctttacacagaaattatgcaaattagccatttttttgacctaatttattggcaaatagaaaattgttcttcatttaatgatttcaattctttttacataagttatacgtatgaaatcaatttattgtattcgatctggctaaaatattttgaagctggcaccatgcttaaatttgttccatttatggcgataataaaatttatgttttttcatgatcgttctgacaagctgttttcctgtgggtatggtcgaggtatggtctatattcaaacaaatggtaattgttatgcctgtagtgataacatcgaagatggtaaacactatataggtactttaaagacaggggttaatttaagtaataatacgcttgataaattcaaatgcgccggatgcggataccgccctctgtgtatggggcggtgtggacgtatgcacattgaatttaatgataaacatatcacggaatattgcaaattaaatcaatttatgtttgacctatttatttctgataaagaaagattaggtattgctttgcataaatatagctattataaagaagaattgtcgggatatcttcttgaatatactgagtttacgccatga

SEQ ID NO: 76078 - protein, 256 aa, Unknown
  Obtained from environmental sample
  misc_feature (1)..(256): Xaa is any amino acid
MLNSLSLIMLSINYEKIPKYNLGGSYFQTIIDNTVGIKLEKNIPIIARLTITETTSLYTEIMQISHFFDLIYWQIENCSSFNDFNSFYISYTYEINLLYSIWLKYFEAGTMLKFVPFMAIIKFMFFHDRSDKLFSCGYGRGMVYIQTNGNCYACSDNIEDGKHYIGTLKTGVNLSNNTLDKFKCAGCGYRPLCMGRCGRMHIEFNDKHITEYCKLNQFMFDLFISDKERLGIALHKYSYYKEELSGYLLEYTEFTP

SEQ ID NO: 76079 - DNA, 540 bp, Unknown
  Obtained from environmental sample
  misc_feature (1)..(540): n is a, c, g, or t
atgacttgtatatatttatctgtgagattatgtattgaaccaacttggctaaatgaccgtgaccaatttttatatccaaatgatgagtgggaaagagacaaaatatttcaatatgattgtataatctttacactatttcatggtcaaaatcgtgtttccgtaaaagacggcacaaatcattggataccctttacagcacaggaagttagcgctaaagataacttcaaatcggactttatgagcagttttctaaaaggtaaaagattcagcaaagaagccaatgcagtattaaaaacaggcaaggaattatggacatattaccattcaaaaataaaaggtaatgataaaaccttattaaacgcttctttttatgatattcgtgagttctttcaaggacgttcagaaactagcggctcaatgaacataaaatccaatgatgatacatataacgacttaattaaaaaattacgccaaaaaatgtcagtattggcggaaaaaataaaacccaaagtatatgaatatgggtttttaatggagtaa

SEQ ID NO: 76080 - protein, 179 aa, Unknown
  Obtained from environmental sample
  misc_feature (1)..(179): Xaa is any amino acid
MTCIYLSVRLCIEPTWLNDRDQFLYPNDEWERDKIFQYDCIIFTLFHGQNRVSVKDGTNHWIPFTAQEVSAKDNFKSDFMSSFLKGKRFSKEANAVLKTGKELWTYYHSKIKGNDKTLLNASFYDIREFFQGRSETSGSMNIKSNDDTYNDLIKKLRQKMSVLAEKIKPKVYEYGFLME

SEQ ID NO: 76081 - DNA, 852 bp, Unknown
  Obtained from environmental sample
  misc_feature (1)..(852): n is a, c, g, or t
atgtcattgacaaaagctacacagttataccttcgagatatcgcattaaaaatcaatgaaaccctgaccatcaggatacctaatttaaaagaaattattataaattttcctaaaaagaagttagaggatttaaaaactattaaagaaacaagttattctggtatctattttttgtgggctagaaataaaaaattagtatatattggtcaagcaagtaataaaaaacttaaacaaagattaaaggaacactatgaaaaaaaagattggtggaatagatgtatatttgttaccactacagacaatactcttgataatacagatttaaattatctagaatataagtttatagaaaaggcaaaagatttagataataataccgaagggaataaaagtgggaatatttctgaatcgaaaaagaaacttcttgactcttttatcaagaagattctcttaattttagaaattattgaaatagatatatttttaaacaaacataaagaacctcatagaagatggtctgaaaaaatctctaaagaaaaatttcatttagaaggttttggatgtgatgcaacaattgtatggcgaaaaagaaacaaagttatcgtacaaaaaaacagtaaattagcttctagttatttagagagtaaaaaaggtgaattaaaatccaaagtgagaaaatatagtagctttattgaaggcaaaaatgtaataagagatatatcttttgaaactttaaatgaagcagcaacgttctgttatagaggtgcaataaatgtttggcagcgtctaaaaaataaagaaggtgaaagtttagacaaagtatgtaaagagctgtatgaaaaatgttgctag

SEQ ID NO: 76082 - protein, 283 aa, Unknown
  Obtained from environmental sample
  DOMAIN (52)...(129): GIY-YIG catalytic domain
  misc_feature (1)..(283): Xaa is any amino acid
MSLTKATQLYLRDIALKINETLTIRIPNLKEIIINFPKKKLEDLKTIKETSYSGIYFLWARNKKLVYIGQASNKKLKQRLKEHYEKKDWWNRCIFVTTTDNTLDNTDLNYLEYKFIEKAKDLDNNTEGNKSGNISESKKKLLDSFIKKILLILEIIEIDIFLNKHKEPHRRWSEKISKEKFHLEGFGCDATIVWRKRNKVIVQKNSKLASSYLESKKGELKSKVRKYSSFIEGKNVIRDISFETLNEAATFCYRGAINVWQRLKNKEGESLDKVCKELYEKCC

SEQ ID NO: 76083 - DNA, 678 bp, Unknown
  Obtained from environmental sample
  misc_feature (1)..(678): n is a, c, g, or t
gtggaaacgcggatgaaaatttccgtgatgacgnccacgggcgacgacgatctgatcaatgccgaggaaaagagcgacctcgaatacgcaaaggcccagcttgaacgcntgcaaaacgatgttgtggatattgaggaaatgcagagcggcatttccatcatggatttggggctgaatgagttcaggcttgatctgctggaatacatcaaggtcaacggcgatctggacaagacgcccttcggcctgcacgcccttgttcccgcctgcggcgaatatcctcccggcgttgtattcgtgctgaaaaatcgctccggcggcgtgaacatagccggccgcaacaggctgcatcctttctacatggtgtatatcagcgacacgggcgagcttgtccgcgaccatcttgcgccaaaggacatgcttgatgcgctgcgtttgatctgcaaaggcaaaacagcccccttgcctgacctgtgtcgggtcttcaacgcggaaactaaagacggcaaggacatgcggaaatattcggcgctgctcggtgaagcgatcaactccatcattgacgtaaaagcgaagagcgaacttgacggctttctggccggggaacaggtcagctttctggccaacaaaatacgcggtctggacgattttgagctgatttgcttttttgtggcaaggtag

SEQ ID NO: 76084 - protein, 225 aa, Unknown
  Obtained from environmental sample
  misc_feature (1)..(225): Xaa is any amino acid
METRMKISVMTXTGDDDLINAEEKSDLEYAKAQLERXQNDVVDIEEMQSGISIMDLGLNEFRLDLLEYIKVNGDLDKTPFGLHALVPACGEYPPGVVFVLKNRSGGVNIAGRNRLHPFYMVYISDTGELVRDHLAPKDMLDALRLICKGKTAPLPDLCRVFNAETKDGKDMRKYSALLGEAINSIIDVKAKSELDGFLAGEQVSFLANKIRGLDDFELICFFVAR

SEQ ID NO: 76085 - DNA, 360 bp, Unknown
  Obtained from environmental sample
  misc_feature (1)..(360): n is a, c, g, or t
gtgattgcgacctggttcaggacaacctttatggacggtatggccgcgtatatccccttccaggcctttcaagtaatgatagttctggtggagataggcatcggcctggccatgataggcggtcttttcacctggtgggccgcggcggtttccattgttatgtgcctggtatttactatttcgggactgttcagatgggatcaggtgtggttcatctttgcgggattcctcctgcttggcggggccggccgggcttttggcctggactgttgggtcgttcccttctttaaaaagtggtggaatggcaccaggtttgcccgaaagcgttattggtatttggacaacccttcaaaaaaatag

SEQ ID NO: 76086 - protein, 119 aa, Unknown
  Obtained from environmental sample
  misc_feature (1)..(119): Xaa is any amino acid
MIATWFRTTFMDGMAAYIPFQAFQVMIVLVEIGIGLAMIGGLFTWWAAAVSIVMCLVFTISGLFRWDQVWFIFAGFLLLGGAGRAFGLDCWVVPFFKKWWNGTRFARKRYWYLDNPSKK

SEQ ID NO: 76087 - DNA, 480 bp, Unknown
  Obtained from environmental sample
  misc_feature (1)..(480): n is a, c, g, or t
atgacgtcgttttggaatgatttttccggaatgccggaaacattggataaggtttccggcattatcaaggagtcggtggcttcgcagaacccgattatcagcaaagggttggcgaatcttttcagcgagggcggcaagatgctcaggccgggtctgtttctcattgccgcccggtttggaaagatcaaggaaaagcactataagcttgccgcggctctcgaaatactccacatggctacgcttgtccatgacgatgttattgatgattctccccttcgcagggggcttccggcgctgcacacccagtacggaaaaagagatgcggtgcttataggagattttctcctttcacgttgttttatacttaccgccgaatacacctctgtgcagaacgcgctcaatctggcccggcttatttctgttatctgctcaatggaaattgaacaaaacaacgatcggtttaaagcattatttccatga

SEQ ID NO: 76088 - protein, 159 aa, Unknown
  Obtained from environmental sample
  DOMAIN (32)...(158): Polyprenyl synthetase
  misc_feature (1)..(159): Xaa is any amino acid
MTSFWNDFSGMPETLDKVSGIIKESVASQNPIISKGLANLFSEGGKMLRPGLFLIAARFGKIKEKHYKLAAALEILHMATLVHDDVIDDSPLRRGLPALHTQYGKRDAVLIGDFLLSRCFILTAEYTSVQNALNLARLISVICSMEIEQNNDRFKALFP

SEQ ID NO: 76089 - DNA, 597 bp, Unknown
  Obtained from environmental sample
  misc_feature (1)..(597): n is a, c, g, or t
ttggggccggccccgccgtttcctgaaaagaggaaagacctgggggcccccttcatgcaaggccggcggaatgactttaaggcggcgcaccgcttttcatttggcgaaaacccggggactttccaaccctggaggttgggcgcgggcccccgcccggatcaaggcggaacgcggcatcggcatggtggatcgtggattatctgcaactcatgcgcaccaaccgccggaccgattcccgcgaactcgaatttccgacatctcccgctcgctcaaagccttggcaaggaaacgaacatcccggtcgtcgccctgtcccagctcaacgcaaggtcgaagacgcggcgacaaacgccccgttctttccgattgcgtgaatccggggccattgagcaggatgccgacgtcatcctcttcatctaccgcgacgacgtatacaaataccaaaaacccgccgatcgccccccggtgggcgatgccgagatcatcatcggaaagcagcgcaacgggccggtaggcatggtggagctaacctaccactccgtgtacacctcgttcgatgaaaaagacttcaggacgcagccctcggaagccctgtga

SEQ ID NO: 76090 - protein, 198 aa, Unknown
  Obtained from environmental sample
  misc_feature (1)..(198): Xaa is any amino acid
MGPAPPFPEKRKDLGAPFMQGRRNDFKAAHRFSFGENPGTFQPWRLGAGPRPDQGGTRHRHGGSWIICNSCAPTAGPIPANSNFRHLPLAQSLGKETNIPVVALSQLNARSKTRRQTPRSFRLRESGAIEQDADVILFIYRDDVYKYQKPADRPPVGDAEIIIGKQRNGPVGMVELTYHSVYTSFDEKDFRTQPSEAL

SEQ ID NO: 76091 - DNA, 525 bp, Unknown
  Obtained from environmental sample
  misc_feature (1)..(525): n is a, c, g, or t
ttggcaatgaagatcatactccgggccgacgtggaaaacctgggccacctcggcgatgtggtcaccgtcaaaaacggatacgggcgcaactatctcctgccccagcggcttgccatgcccgcctctcccgccaacctgaaggtgtttgaactggagcgcaaaaagcttcaggccaagatggacgccctgcgcgccgatgcggcaggcatggcttccaaactggaaggctacgtggtgcgcattgaaatgcgcgtgggcgaaaacgacaaactctacggctccgtcaccaacaccctcatctgcgacagcctgcgcgccgcagggatggaagttgaccgccgccgcatcctgcttgacgcgcccatccgcaccttgagcgaacatcccgtgcgggtgcgcctgcacgccgatgtcacggctacgctgaaggtcgtggtgtcgcccgaaggccatcacgccaaatccgaagcggagggcaaacctgatgccgacacagaccggacgcaacagtccgaatccgcctag

SEQ ID NO: 76092 - protein, 174 aa, Unknown
  Obtained from environmental sample
  DOMAIN (64)...(149): Ribosomal protein L9, C-terminal domain
  misc_feature (1)..(174): Xaa is any amino acid
MAMKIILRADVENLGHLGDVVTVKNGYGRNYLLPQRLAMPASPANLKVFELERKKLQAKMDALRADAAGMASKLEGYVVRIEMRVGENDKLYGSVTNTLICDSLRAAGMEVDRRRILLDAPIRTLSEHPVRVRLHADVTATLKVVVSPEGHHAKSEAEGKPDADTDRTQQSESA

SEQ ID NO: 76093 - DNA, 780 bp, Unknown
  Obtained from environmental sample
  misc_feature (1)..(780): n is a, c, g, or t
ttgacgattgatctcggctccgcctttgaagtggactatggcaacatagtttttggcaacgaaaaaccaaagggcttcgttgttgagctttcaacaacagggtcggcatggtcaaaagttttttctcaagcagaaaattcagacaacagcgtgttcctgagttttgcaaagcagccagcgaggtacgtgcggctgaccttgtccggcaatacaaacggatatacagtgcgcgagtttgatttgtacggcgatagcccagtagcttctattgcaatcaaccaaagctcggcctccatgtttacaggcgatgagctgagcctgacgccggttgtcatgcctgaaagcgctcgcaacaaaaccgttctgtggggcagctcagacgatgccgtgctaaaagtaaatagccgcggcgttttgactgcgctcaaggccggcgtcgctacggtaactgccaagacagaggcggacaatgccaaggccgtgacttgcgttgtaacggtcagggatgtccccgtgagcggcctggcactgaatataacaaatgccacactggaacttggagaaaaaacacaactgatggccagtgtcgccccggataacgccaccaaccaagatgtcgtttggagtgttgagaacaacaaaattgtctctgtaacccctgaaggcttcgtggcaaccctcaaaatcggcaagactacgattcgggcaacttcagcctccgacaaaaccatatttgctgaatgtgaaattgtggttacaaaacccgagcgccgaaaatag

SEQ ID NO: 76094 - protein, 259 aa, Unknown
  Obtained from environmental sample
  DOMAIN (86)...(164): Bacterial Ig-like domain (group 2)
  misc_feature (1)..(259): Xaa is any amino acid
MTIDLGSAFEVDYGNIVFGNEKPKGFVVELSTTGSAWSKVFSQAENSDNSVFLSFAKQPARYVRLTLSGNTNGYTVREFDLYGDSPVASIAINQSSASMFTGDELSLTPVVMPESARNKTVLWGSSDDAVLKVNSRGVLTALKAGVATVTAKTEADNAKAVTCVVTVRDVPVSGLALNITNATLELGEKTQLMASVAPDNATNQDVVWSVENNKIVSVTPEGFVATLKIGKTTIRATSASDKTIFAECEIVVTKPERRK

SEQ ID NO: 76095 - DNA, 381 bp, Unknown
  Obtained from environmental sample
  misc_feature (1)..(381): n is a, c, g, or t
ttggggatcagccactttaggaccagcgtctctaagggcatagagatcatcgaaaacctgcgaggacacaccactggaatggctgtgccgacctttgtcgttgacgcgcctgggggcggcggaaaaatccccgtcatgcccaattacctgatctcaatgggcgacggcagggccatattgagaaactatgagggcgtgatcactaggtattcttggccgatgcatcatgcaacgatagcgaaagcatgccactgcgaaacagaaagtgacaaagccaagtacgccgcaaaggaaggcgtggcggcacttttgtctggggatgctctatgcatagaacccgccgatcttcccagaaagcaaagacactttgattttgaatga

SEQ ID NO: 76096 - protein, 126 aa, Unknown
  Obtained from environmental sample
  misc_feature (1)..(126): Xaa is any amino acid
MGISHFRTSVSKGIEIIENLRGHTTGMAVPTFVVDAPGGGGKIPVMPNYLISMGDGRAILRNYEGVITRYSWPMHHATIAKACHCETESDKAKYAAKEGVAALLSGDALCIEPADLPRKQRHFDFE

SEQ ID NO: 76097 - DNA, 345 bp, Unknown
  Obtained from environmental sample
  misc_feature (1)..(345): n is a, c, g, or t
atgctggaagtgctgcggcaggactacatcctcgccgcgcgggcgcgcggcatctcacgccgcaggatcctgtacaaccacgccctccgcaacgccctccttcccattataaccctcgtgggcagcctgatccccacactgatctccggcagcgtcatcatcgaacgcatcttcagcctgcccgggatcggacaactcttttttgagagcgtcctctaccgcgattacaccaccatcatgggactctccgtgctgtccgccgtgctgaccctcgcgggcgttttgattgcggatatagtatacgcgcttgtagacccgcgcatcagctatgaggaaacgcgatga

SEQ ID NO: 76098 - protein, 114 aa, Unknown
  Obtained from environmental sample
  misc_feature (1)..(114): Xaa is any amino acid
MLEVLRQDYILAARARGISRRRILYNHALRNALLPIITLVGSLIPTLISGSVIIERIFSLPGIGQLFFESVLYRDYTTIMGLSVLSAVLTLAGVLIADIVYALVDPRISYEETR

SEQ ID NO: 76099 - DNA, 771 bp, Unknown
  Obtained from environmental sample
  misc_feature (1)..(771): n is a, c, g, or t
ttgatcgcctggcagcaaaagaacagcccgtttttcgcggacgcgcgcgtgcgccgcgccatgactctttgtctggatcgcgaatcgatcctgaagagcatctaccaagggatcggcgcggtgcagagcggcccgttttaccgttcatcctgggctgaggatacaaacatcgccccgctgccctacgatcccaggcaggcggcggaactcctggacgcggcgggctggaagctggacgccaagaccgagctgcgcatgaaagacggcaaggccttcagctttgagcttcttctctcgcagggctcggaaaacgggcgcgcgacagccgttatcttgcagagtgaattgcgcaaactcggcgtggatatgcagatccgctcgctggagtggtcggtcttcaataagcggctgaccgcgcgcgaattcacggcggcgctcttcgcctggaataactcggtggactgcgacgtctacgatctctggcattcctccatgcaaaatgacggactgaaccatatcggttacgccaaccccgaactcgacctcctgctcgaaaaggcgcgaaccacctttgccatgcccgagcgcgtgcggatcgcgcacgccattcaccgcgtcattcacgaggatcagccctacaccttcctgatcgccaacgagaatctttccctctataatacacgcgtccagggcgtgatcagctcggtgcgcggcgtctactcgtcgtggcccgggctgatcggctggcgcgcggcgatcgcgccggattag

SEQ ID NO: 76100 - protein, 256 aa, Unknown
  Obtained from environmental sample
  misc_feature (1)..(256): Xaa is any amino acid
MIAWQQKNSPFFADARVRRAMTLCLDRESILKSIYQGIGAVQSGPFYRSSWAEDTNIAPLPYDPRQAAELLDAAGWKLDAKTELRMKDGKAFSFELLLSQGSENGRATAVILQSELRKLGVDMQIRSLEWSVFNKRLTAREFTAALFAWNNSVDCDVYDLWHSSMQNDGLNHIGYANPELDLLLEKARTTFAMPERVRIAHAIHRVIHEDQPYTFLIANENLSLYNTRVQGVISSVRGVYSSWPGLIGWRAAIAPD

SEQ ID NO: 76101 - DNA, 348 bp, Unknown
  Obtained from environmental sample
  misc_feature (1)..(348): n is a, c, g, or t
gtgcgaatcgtcaagatcgaaggtgaagaaaaactgaaggctctggcctcaattgtttttgacgactgctttctgttgggcgacttgagggtggtcgagtccgaggacggctactttgtagccatgccaagcaagcgcaagcgcgatggtagcttcaaggacattgcatatccattgaacaatgaattccgcctagagatggagcgcacgatattggcggcctacgaatcagccacgtctaatcgtgcaatatccaagatagagactggcgaggccgaaactgtcaggcccgacttgttaggcgtagaagagtttggtttcaaggccaagccacagggttcgaattag

SEQ ID NO: 76102 - protein, 115 aa, Unknown
  Obtained from environmental sample
  DOMAIN (1)...(80): SpoVG
  misc_feature (1)..(115): Xaa is any amino acid
MRIVKIEGEEKLKALASIVFDDCFLLGDLRVVESEDGYFVAMPSKRKRDGSFKDIAYPLNNEFRLEMERTILAAYESATSNRAISKIETGEAETVRPDLLGVEEFGFKAKPQGSN

SEQ ID NO: 76103 - DNA, 396 bp, Unknown
  Obtained from environmental sample
  misc_feature (1)..(396): n is a, c, g, or t
ttgacgggggaatatgtattttttgggagtagagacctaggaaccggcaatctagaccccaaccaagacattttcattgccatcacccaactgcgggacgggatgatgaccgacgacacagacttgataaaacaagcctacgacaacatcagggccataaaggacaggataaatgtgtgcctgacacaggtcggaagccgcactgtgtccatcgaaaacacggggttcaacctgggcgacttcaccgaatctcttcaggcaatacaaaacacctatgacggcctagagtacccaagagcgataacccagcttgcagctgaacagacctcccagcaagcgtccctgtccatactctcaaagctgggcaagttgagtttgtttgactacataggataa

SEQ ID NO: 76104 - protein, 131 aa, Unknown
  Obtained from environmental sample
  misc_feature (1)..(131): Xaa is any amino acid
MTGEYVFFGSRDLGTGNLDPNQDIFIAITQLRDGMMTDDTDLIKQAYDNIRAIKDRINVCLTQVGSRTVSIENTGFNLGDFTESLQAIQNTYDGLEYPRAITQLAAEQTSQQASLSILSKLGKLSLFDYIG

SEQ ID NO: 76105 - DNA, 873 bp, Unknown
  Obtained from environmental sample
  misc_feature (1)..(873): n is a, c, g, or t
ttgatcttgaccgacgttaatgtagatggtcatttcaaggtggaactgggcataggcaagccgacgctcgagcagccccctggctctggcaactatgtgcatgacgcctcgaaaaatgaaaaggtggacgttacctcggccatcagaagcggctcgcttggtggcctgatagacctgagggacaacatcctccctgattatctaatgcagatggatcaattggccgcaagcgtggtgtatcgtgtgaaccaaattcatagagccggcgcgggcttggacgatccgaccacagccggtgacttggatttctttttggccaatggcggcaatgaactgactaccgacccggatttcgctggcttgcccaccggcgtgaactatttgaacaaatacaagggcatgattcagcgcctggccatcaatcaggacattttggacgaccccagaaggattgcttctggcgacccctatgcggtggactcgtttggcaattcgactgcggggccaggcaacaatgacatagccagattgctggcagggctgcaaaacctggaagaatcggtggattcgatgaatttggggttcacagccaccagcaaccctctccagagattcgtgggcccatacggcgtattcctcagcaccatatccaacaaaattggcaaccagacactaaagtacaaggccgatgccaccaccgacgaggacataaggatggccatcgagacacagagggatcgcatttctcangttgacatggacgaagaggcgacgaatttgatcgtcttccagcgcagctaccaagcctgctctagggtcataggcgtgatagaccaacttacagaacagctaatcaancactttggaaggtaa

SEQ ID NO: 76106 - protein, 290 aa, Unknown
  Obtained from environmental sample
  DOMAIN (249)...(287): Domain of unknown function (DUF1078)
  misc_feature (1)..(290): Xaa is any amino acid
MILTDVNVDGHFKVELGIGKPTLEQPPGSGNYVHDASKNEKVDVTSAIRSGSLGGLIDLRDNILPDYLMQMDQLAASVVYRVNQIHRAGAGLDDPTTAGDLDFFLANGGNELTTDPDFAGLPTGVNYLNKYKGMIQRLAINQDILDDPRRIASGDPYAVDSFGNSTAGPGNNDIARLLAGLQNLEESVDSMNLGFTATSNPLQRFVGPYGVFLSTISNKIGNQTLKYKADATTDEDIRMAIETQRDRISXVDMDEEATNLIVFQRSYQACSRVIGVIDQLTEQLIXHFGR

SEQ ID NO: 76107 - DNA, 369 bp, Unknown
  Obtained from environmental sample
  misc_feature (1)..(369): n is a, c, g, or t
gtgctgctgcaaacgctcgaccagtgtgggaaggagaacntactgcagtgggactatctgaaaaagggcatcggcctgcgcgcgtacgggcagaaggatccgctcaacgagtacaaaaaggaagccttctacatcttcgaggaaaacatggagcggcttcgcatgcaggtgactcgcatactccttaccaccaacttcacgcgcgagggtgtcgaggccatagccgaggagcaggaagccgccgactccggcatggaaatccgccccgaggaaacggtcataaaacctgacttgaactatccccgcaacgcgccctgcccctgcggcagtggaaaaaagtacaagcactgccacggaagtcttgcatga

SEQ ID NO: 76108 - protein, 122 aa, Unknown
  Obtained from environmental sample
  DOMAIN (1)...(66): SecA Wing and Scaffold domain
  misc_feature (1)..(122): Xaa is any amino acid
MLLQTLDQCGKENXLQWDYLKKGIGLRAYGQKDPLNEYKKEAFYIFEENMERLRMQVTRILLTTNFTREGVEAIAEEQEAADSGMEIRPEETVIKPDLNYPRNAPCPCGSGKKYKHCHGSLA

SEQ ID NO: 76109 - DNA, 336 bp, Unknown
  Obtained from environmental sample
  misc_feature (1)..(336): n is a, c, g, or t
gtgtcttggcggtttatgcgtacaatggttatgtttgatttgcctacggatacggtagaggataagcgggagtatgcgcggtttaggaagtttcttctaaaggagggctttataatgcttcaatattccgtgtattgcaagctcgccgtaaacaaaaccgtgcaggaggcgatagcgcggcggctcgataaaaacaagcccaaggcgggggtcatttcgctcttggaaatcaccgaaaaccaattcgcgggtatgaaatggattctcggggggaagcagacgagcgtgctagataccacggatagattgaccgtctacgaggagggcggcgaatga

SEQ ID NO: 76110 - protein, 111 aa, Unknown
  Obtained from environmental sample
  misc_feature (1)..(111): Xaa is any amino acid
MSWRFMRTMVMFDLPTDTVEDKREYARFRKFLLKEGFIMLQYSVYCKLAVNKTVQEAIARRLDKNKPKAGVISLLEITENQFAGMKWILGGKQTSVLDTTDRLTVYEEGGE

SEQ ID NO: 76111 - DNA, 717 bp, Unknown
  Obtained from environmental sample
  misc_feature (1)..(717): n is a, c, g, or t
ttgacctgcaataagccgcttaccgaggacataatcggcggctttgtggataggcagcttgtggcgacaaatcaagcggttaaggagacggcgaagcttctttctaggctgttcggcaatgctaaaatcgtgtatagcaaggcgggcaacgtttccgactttaggcatcgatacgaattggtaaagtgccgcgaggtaaacaatttgcaccacgcgcacgatgcctatctcaatatcgtagtgggcaatgtttgggacagggtctacggcgatatcgcgtctataatggggcgcaataaggacgcggataggagctcctattttaacgaagaccgcgctttcgagcgtctctttaaggagggcggcaggtcggggtggcgggatagctattttgatttaataagaggctaccttttcgataataagaggtaccttaacaaattccccgtcactacgagaccctaccttaagtcgggagaattctataaccaaaccattcaccctaagggcaaggggcagtatatactgcacgagacgaggggcgataaggacgaattcgtctataccaccgataaatacggngggtataagagcgaagcgaccgcctacaactgtgtcatagggtacgatacccaaaagggcagagaatgcaaattctttagtgtgcccgtgcgttatgtgggacggtacaaggacgaagagcttttaaacagatag

SEQ ID NO: 76112 - protein, 238 aa, Unknown
  Obtained from environmental sample
  misc_feature (1)..(238): Xaa is any amino acid
MTCNKPLTEDIIGGFVDRQLVATNQAVKETAKLLSRLFGNAKIVYSKAGNVSDFRHRYELVKCREVNNLHHAHDAYLNIVVGNVWDRVYGDIASIMGRNKDADRSSYFNEDRAFERLFKEGGRSGWRDSYFDLIRGYLFDNKRYLNKFPVTTRPYLKSGEFYNQTIHPKGKGQYILHETRGDKDEFVYTTDKYGGYKSEATAYNCVIGYDTQKGRECKFFSVPVRYVGRYKDEELLNR

SEQ ID NO: 76113 - DNA, 651 bp, Unknown
  Obtained from environmental sample
  misc_feature (1)..(651): n is a, c, g, or t
gtgctatccatgcttaagccgctcgccactcgtcacgcttacggtgaagctctgctcgctttaggcgctcagcagccgcagatcgtcgttctcgacgctgacctgagcagatcaaccatgacctatagcttcgcccaagcctatccccagcgctttttcaacatgggcattgccgaagcggatatgatgggaactgccgctggcttagctaccatggggctcatccctttcgccagcacttttgccgttttcgccaccggccgagcttatgatcagatccgcaacaccatcgcttttgctcagctaaatgtcaaaatcgccgccacccatgctggtctgactgtgggcgaagatggcgcttcgcaccaggctttggaggatatcgggctgatgcgcggtttaccgggcatgacggttatcgtgcccgcggatggcgctgaaacgcgtcaagctgtacagttagccgccgcctatacagggccggtctatatacgcttaggtcgctcggcagtgccgccagtacatgccgaagatttccagttacaatggggcagagcccaggggctgcgcagcggccaagcggtgactatctgcgcttgcggctatctaacgcaaattgccttacaagccggccgaacagttggcggctag

SEQ ID NO: 76114 - protein, 216 aa, Unknown
  Obtained from environmental sample
  DOMAIN (8)...(173): Transketolase, pyridine binding domain
  misc_feature (1)..(216): Xaa is any amino acid
MLSMLKPLATRHAYGEALLALGAQQPQIVVLDADLSRSTMTYSFAQAYPQRFFNMGIAEADMMGTAAGLATMGLIPFASTFAVFATGRAYDQIRNTIAFAQLNVKIAATHAGLTVGEDGASHQALEDIGLMRGLPGMTVIVPADGAETRQAVQLAAAYTGPVYIRLGRSAVPPVHAEDFQLQWGRAQGLRSGQAVTICACGYLTQIALQAGRTVGG

SEQ ID NO: 76115 - DNA, 504 bp, Unknown
  Obtained from environmental sample
  misc_feature (1)..(504): n is a, c, g, or t
ttgctcttgccagtctttgtcttggaagagctgcgtaccttggctgattcgtcggacgcgcaaaagcggacacggggacggcgtggtctggatatcctgcagcaggtgcagcaagtaggcggcatcgaagtgcagatcattgaaattgattaccctgagctagcggtcgatgataagctgatcaagctagcgcagcaaaccgatgccaaactgctgaccttggactttaatctaagcaaaatctgtactttgcgtaaaatcgccgtgctgaacatcaatgaattggctaacgctttacgagcagtgttgctgccaggtgaagaagtggaagtgacggtgttacgaccgggcaaagagcctggtcaaggtgtcgcctacctgaacgatggcaccatgatcgtcgtcgaaggtggggcgcgctgcgtcaaccagactgtcaatgtcatcgtgaccagcactttacagacggcggccggtcgcatgatcttcgccaaagtcagctag

SEQ ID NO: 76116 - protein, 167 aa, Unknown
  Obtained from environmental sample
  DOMAIN (102)...(163): TRAM domain
  misc_feature (1)..(167): Xaa is any amino acid
MLLPVFVLEELRTLADSSDAQKRTRGRRGLDILQQVQQVGGIEVQIIEIDYPELAVDDKLIKLAQQTDAKLLTLDFNLSKICTLRKIAVLNINELANALRAVLLPGEEVEVTVLRPGKEPGQGVAYLNDGTMIVVEGGARCVNQTVNVIVTSTLQTAAGRMIFAKVS

SEQ ID NO: 76117 - DNA, 720 bp, Unknown
  Obtained from environmental sample
  misc_feature (1)..(720): n is a, c, g, or t
atgctgttcatcgatgaaatcaaagcggcttatcattatgacccggcggccagaaatatagaaattctgctgtatcagggtttatgggcggtgtggctgcacaaattcgcgcatctgctctggatactgcatatcccttttttgccccgcctgctgtcgcaaatcagccgtttcctgaccggcattgaaatacatcccggagcaaaattaggccggggtgtttttatcgaccacggcttcggcgtggtcatcggcgaaacggccgaggtcggggacaactgtctcatatatcacggtgtaacgctgggcggcaccagcacccggcgggttaaacgtcatccgactatcggcgccaatacgattatcggctgcggggcgaaaatactgggcaatatccgcatcggcaataattgcaaaatcggcgccaatgccgtggtcgtcaaagatgtgccggacaactccacggtcgccggtatgcccggccgggtaataatgcaggccggacaaaaaccggacaccgcttggaaagatattcccgacccggtggaggaaactatcgtgcatctgatcggcagaattgtggaactggaaaagaaaataataacccctcagtctgccggaaaaacaaccccacagactgctaactacttctaccccctcggcgctgagtacagcgccactcccccttgtntagggggagaaaaaatacttgagcaataa

SEQ ID NO: 76118 - protein, 239 aa, Unknown
  Obtained from environmental sample
  misc_feature (1)..(239): Xaa is any amino acid
MLFIDEIKAAYHYDPAARNIEILLYQGLWAVWLHKFAHLLWILHIPFLPRLLSQISRFLTGIEIHPGAKLGRGVFIDHGFGVVIGETAEVGDNCLIYHGVTLGGTSTRRVKRHPTIGANTIIGCGAKILGNIRIGNNCKIGANAVVVKDVPDNSTVAGMPGRVIMQAGQKPDTAWKDIPDPVEETIVHLIGRIVELEKKIITPQSAGKTTPQTANYFYPLGAEYSATPPCXGGEKILEQ

SEQ ID NO: 76119 - DNA, 468 bp, Unknown
  Obtained from environmental sample
  misc_feature (1)..(468): n is a, c, g, or t
ttgtatgccgccgctggcgacgccttgcctgcaaacaatggctcatttcattcgccagcccctcagtctgctgcgcagacagctccccctcacgctttgcgtgcggggagcaaaatttcggacgctgattatagctcatacgagagagacttcctttcttatatggacgacgatttcaattcggccggggcgctgggcgtgctatttaatctggccacggccgtcaaccgtgaccgctcgccggaagccgcacaattattaaaaaaactcggcggtattttaggcctgttgcaggccggacttgctgtagcggaaataccggcggaaattacctcgctggccgaacagagactgctggccaaaaagaataaagattttacgctggctgacaaactgcgcgcggaaattctggccaaaggctacaacattaaagatacggcgcaggggtttgcggtggagaaaaagtag

SEQ ID NO: 76120 - protein, 155 aa, Unknown
  Obtained from environmental sample
  misc_feature (1)..(155): Xaa is any amino acid
MYAAAGDALPANNGSFHSPAPQSAAQTAPPHALRAGSKISDADYSSYERDFLSYMDDDFNSAGALGVLFNLATAVNRDRSPEAAQLLKKLGGILGLLQAGLAVAEIPAEITSLAEQRLLAKKNKDFTLADKLRAEILAKGYNIKDTAQGFAVEKK

SEQ ID NO: 76121 - DNA, 462 bp, Unknown
  Obtained from environmental sample
  misc_feature (1)..(462): n is a, c, g, or t
gtggatctcagaagatttctgcccgatggcgccatcgtcactggggcccaagctcgagatgggcgcgaagcagtcgaaattgccggagctgctctagtagctcagtgtgctgcaacggtaacatacacccgggaaatggttgaaacggttgagcaactaggcccttacattgtggtagcaccgggatttgcgttagcccacgcccgaccgtcatcgtcggttctgaaaaatgggattagctgggttaacctggcggaacctgtccggtttggaaaccaagccaatgatccagtgcatctagtagttgggttggctgcgaaagatcacgaatcccacctggaaatcatgtcagccttagctgaagtactgatggatcgggaagtgctggaagctgccatggccgctgattctccggtccaagtgcgtgaactcttggcgtcccttgccacagttgacggctaa

SEQ ID NO: 76122 - protein, 153 aa, Unknown
  Obtained from environmental sample
  DOMAIN (6)...(148): Phosphoenolpyruvate-dependent sugar phosphotransferase system, EIIA 2
  misc_feature (1)..(153): Xaa is any amino acid
MDLRRFLPDGAIVTGAQARDGREAVEIAGAALVAQCAATVTYTREMVETVEQLGPYIVVAPGFALAHARPSSSVLKNGISWVNLAEPVRFGNQANDPVHLVVGLAAKDHESHLEIMSALAEVLMDREVLEAAMAADSPVQVRELLASLATVDG

SEQ ID NO: 76123 - DNA, 546 bp, Unknown
  Obtained from environmental sample
  misc_feature (1)..(546): n is a, c, g, or t
atgctgggttccagatacagtgcccaggagttgtcttttaccaaaatgctcgggcaactccaggacgcggggaatacagttactttggcgcattatcttgaccttctcgctaaagccaatatacttacaggcttgcggaattattccgggagccagatcagaatccgcaaaagttcccccagactaatggtttacgatacatccttgatgacttacgctgacggtgcaggccggcggcgcctgctggaaaacccaacggataagggcaggttggtcgagagcgcggtcggtgcgtatttgctcgcccgaggccaggaagaaggttttgaggtttactggtggcgggagcgtaatcatgaagttgactttgtcatcaaaaaaggaaagcacctgacggctattgaagtgaaaagcggccgagtgaaaaacgcaggcgggagcttggtgtttaagaaaaagtatcccgaagcgctatcacttactattggaaacgccaatttgagcctggaagatttcctattaggcagaaagccattgttcatttaa

SEQ ID NO: 76124 - protein, 181 aa, Unknown
  Obtained from environmental sample
  misc_feature (1)..(181): Xaa is any amino acid
MLGSRYSAQELSFTKMLGQLQDAGNTVTLAHYLDLLAKANILTGLRNYSGSQIRIRKSSPRLMVYDTSLMTYADGAGRRRLLENPTDKGRLVESAVGAYLLARGQEEGFEVYWWRERNHEVDFVIKKGKHLTAIEVKSGRVKNAGGSLVFKKKYPEALSLTIGNANLSLEDFLLGRKPLFI

SEQ ID NO: 76125 - DNA, 381 bp, Unknown
  Obtained from environmental sample
  misc_feature (1)..(381): n is a, c, g, or t
gtgnntgagcatctttccgggctgcgcagcgcgtacgcccagatcatccacactcccgaagcccgtgcggcggcgccccagattagcgcgcgccatactccgcaggaagccgacatggctcagcgcaatacgcccgtcatcaaccggaacatgcccgctcctcccgccgccgtgggccgcttgcaggcccaggccgcctatcagacaatgcagggggccgcaacgccaccggcgtccgcgccgtctccgaccgccgccggcgcggctgcgagcgcaaacgcggaaaacgcttccgcgccgcggacaacggccgcgcctcccgcctcgggcggattcaataaaggcatggccgcctacggcaaactgaccgcggggggatag

SEQ ID NO: 76126 - protein, 126 aa, Unknown
  Obtained from environmental sample
  misc_feature (1)..(126): Xaa is any amino acid
MXEHLSGLRSAYAQIIHTPEARAAAPQISARHTPQEADMAQRNTPVINRNMPAPPAAVGRLQAQAAYQTMQGAATPPASAPSPTAAGAAASANAENASAPRTTAAPPASGGFNKGMAAYGKLTAGG

SEQ ID NO: 76127 - DNA, 768 bp, Unknown
  Obtained from environmental sample
  misc_feature (1)..(768): n is a, c, g, or t
atggatattttacggaccgtatgtaccggtgtcagttattatcctgaacactggccgcggaagatgtggcaggacgatatatccagtatggcggatatgggacttcaggcggtacgcattgctgaatcagcctgggcagacatggaatgtcaggatggacaattcagttttgactggttaacggattttattgaactcgctgcaaaacgcaacttgaaaattatcctcgggacaccgtcatgggcggcccctgtatggcttgaaaaatcacatcctgaaatcatgcgtacagaacctgacggcaggcacgcagcagacggccgtaaatactgctatcgttccaaatcctttcgctattatgcgggaaggatcgcggaggaaatggctttacgtttcgggaaggatgaccgtgtggccggatggcaaatagataatgaactgggcggtctgccctgctactgttccgactgtcttgatgcttttatcaaatggctcanagcaaaatacggtactatcgaaaacctgaactgttcctggggaacaaaattcaggagccgccggtataattcctttgaagaaatcgatctgtcgtcgccgaaaattaatattctgctgcccggatatcttctggattattaccggttcatttcatggtcagtagctgatttcgtgaatatgcaggcggaaataatcaaaaaacacagccgtaaccagtttatcacccataatccctggcacataaccagggaaattatatgtatgaaataa

SEQ ID NO: 76128 - protein, 255 aa, Unknown
  Obtained from environmental sample
  DOMAIN (12)...(254): Beta-galactosidase
  misc_feature (1)..(255): Xaa is any amino acid
MDILRTVCTGVSYYPEHWPRKMWQDDISSMADMGLQAVRIAESAWADMECQDGQFSFDWLTDFIELAAKRNLKIILGTPSWAAPVWLEKSHPEIMRTEPDGRHAADGRKYCYRSKSFRYYAGRIAEEMALRFGKDDRVAGWQIDNELGGLPCYCSDCLDAFIKWLXAKYGTIENLNCSWGTKFRSRRYNSFEEIDLSSPKINILLPGYLLDYYRFISWSVADFVNMQAEIIKKHSRNQFITHNPWHITREIICMK

SEQ ID NO: 76129 - DNA, 966 bp, Unknown
  Obtained from environmental sample
  misc_feature (1)..(966): n is a, c, g, or t
atgaagccggcttccagcacgccagcaggggcaaccattgcncacaccagccccggtgttccgttttttacattgcccgccatgtttaacgagatggtgaacaagtttgggaacaatccccatgtagcaggctggcagattgacaatgaactaagaggctctgaatgtcactgccacgcatgccgtcacgcgttccaggtgtggttgttgaaaaaatacggctctgttgaaaatctcaatgaagcgtggggtacatggttctggagtcagcattacaattcaatagaggaagtagaacttccctcaatgaaagaagtgaccatttcaaccagccagtatctggattacaagagatttgtctcttggtccaccgtggattttatgaataaacaggttgaaataatacgtaaaaaagcccctcatcagtttatctcccataattccctgggtctgtatccggaagtcaataattacgatctggcaaaagagctcgatgtcatggcttgggatgtatatccgcatgtagatgatgattgtattaacgtagccaaaggccacgattttatccgcgcaacaaagcatgacaatttctggatgctggaacagaaaaacggttatttcaacggcggtgattataaccttgccattacgcccggactggtccgcgcttggggtctcctggatatttcccgcggggcgaacggtgtagtattttaccgttaccgcgcaaaccggtggggccaggaacaaaacccgaacggcatccttcgccacgacggatccaaacgccgggcctattttgaaattaaacaaatgaataaagagctggatccaataagggagaaacttggaaagacaaaagtaaagaccgctgtagcccttattcacagtcatgatgaaatatggtcggctatggcaaaaaagcagtacaagaattttaatgtcacaagcctcggccgattctga

SEQ ID NO: 76130 - protein, 321 aa, Unknown
  Obtained from environmental sample
  DOMAIN (2)...(279): Beta-galactosidase
  misc_feature (1)..(321): Xaa is any amino acid
MKPASSTPAGATIAHTSPGVPFFTLPAMFNEMVNKFGNNPHVAGWQIDNELRGSECHCHACRHAFQVWLLKKYGSVENLNEAWGTWFWSQHYNSIEEVELPSMKEVTISTSQYLDYKRFVSWSTVDFMNKQVEIIRKKAPHQFISHNSLGLYPEVNNYDLAKELDVMAWDVYPHVDDDCINVAKGHDFIRATKHDNFWMLEQKNGYFNGGDYNLAITPGLVRAWGLLDISRGANGVVFYRYRANRWGQEQNPNGILRHDGSKRRAYFEIKQMNKELDPIREKLGKTKVKTAVALIHSHDEIWSAMAKKQYKNFNVTSLGRF

SEQ ID NO: 76131 - DNA, 636 bp, Unknown
  Obtained from environmental sample
  misc_feature (1)..(636): n is a, c, g, or t
gtgcaattggagaagacggtgcggtatatccgccaacgctaccctgagcagtttatcatagccgacgccaagcgcggcgacatcggcaacacgtcgaaatgctacgccgaagccttttttgagcgtatggattttgacgctgtgacgttgtcgccttacatggggcgcgacacggtgcagccgtttttggaataccgcgggaaatgggcggtcctgctggcgttgacgtccaacgcttcggcggcggattttgaaactgtggctaccgccggcggcgacaaggtgtatgaaaccgtgctgaaaacatcgcaacaatggggaactaccgacaatattatgtatgtggtgggcgctacgcaggccgccatgctggaaagcatccgaaaaattgtgcctaatcattttttgctggtgccgggtgtgggcgcacagggcggaagtcttgaagaggtggtgaaatatgggatgaacgaccggtgcgggttgctgattaactcgtcgcgcgaaatcatttttgccgacagcggcaaagattttgcggccgctgcgggcgcgaaagcgaaggaattgcaagggcagatgttaaagattcaaaaattcaatgatttaattattcaattaaaaattaaaaattaa

SEQ ID NO: 76132 - protein, 211 aa, Unknown
  Obtained from environmental sample
  DOMAIN (1)...(183): Orotidine 5'-phosphate decarboxylase / HUMPS family
  misc_feature (1)..(211): Xaa is any amino acid
MQLEKTVRYIRQRYPEQFIIADAKRGDIGNTSKCYAEAFFERMDFDAVTLSPYMGRDTVQPFLEYRGKWAVLLALTSNASAADFETVATAGGDKVYETVLKTSQQWGTTDNIMYVVGATQAAMLESIRKIVPNHFLLVPGVGAQGGSLEEVVKYGMNDRCGLLINSSREIIFADSGKDFAAAAGAKAKELQGQMLKIQKFNDLIIQLKIKN

SEQ ID NO: 76133 - DNA, 720 bp, Unknown
  Obtained from environmental sample
  misc_feature (1)..(720): n is a, c, g, or t
atggttgataatcctgataaagccgttcaggcggcctctctttttgccgaaaaacgggcagaggcgttatttctttatatctcaacctacgcgctttcccatacggtgcttcctgtagcgcggaatctaaaggttcctgttattatcctcaacctccaaccggaagcggcgattgattatgccgcttttaacgcaatcggcgacaggggtaaaatgaccggcgaatggctcgcgcattgccaggcttgttcagttccggaaatagccggtgtttttaataacgcggggattaattacgatatagtatcaggctggcttgatgatgccggggcgtggaaagaaatcgctgattgggcagcggccatacatgcaaagtcggcgttgttgaacgccagaatcggcattcttggccactactactgcggtatgctcgatgtgtataccgatgtaacacgcattgcttcagtatttggcagccattttgaacttctggaaatcgacgagcttaaggcgcttagagacagtataaacccgaggcaaattcaggaaaaacgcggacaatttgaaagagaattcacggtatctcctgaatgtagcgaggacgagcttgacagggcggcgcatacttcatgcgcgctggacgcgcttgtggaaaaaaacgtcttgacgcgctggcatactattatgaaggctgggccggtaatgatcatgaaaaaatag

SEQ ID NO: 76134 - protein, 239 aa, Unknown
  Obtained from environmental sample
  misc_feature (1)..(239): Xaa is any amino acid
MVDNPDKAVQAASLFAEKRAEALFLYISTYALSHTVLPVARNLKVPVIILNLQPEAAIDYAAFNAIGDRGKMTGEWLAHCQACSVPEIAGVFNNAGINYDIVSGWLDDAGAWKEIADWAAAIHAKSALLNARIGILGHYYCGMLDVYTDVTRIASVFGSHFELLEIDELKALRDSINPRQIQEKRGQFEREFTVSPECSEDELDRAAHTSCALDALVEKNVLTRWHTIMKAGPVMIMKK

SEQ ID NO: 76135 - DNA, 777 bp, Unknown
  Obtained from environmental sample
  misc_feature (1)..(777): n is a, c, g, or t
gtggttgacggagtcaaaacaagcgaagagttatatcccaccatgagtttggcgattttggcgggatttatccaactgttcttggggatgggtataaagacctatttaaaattgcgggacgaaggattcttcgcgggtctgcagccggtatcgtcaatattcatggcgctcggaatagtgatactcggcgcgaagaacaactcgttcggtttgggtttgggctttgagacgttctcaataggaaatcaggacaaatttataccgataggcgcggcgcttaaatcgataggggagttaaacatcgggttgccggtaggcatcggcgagatatgcctcggcggcggccttgccctgctgctgttgttcaacagtttggacaaggcgatattttggcgtccgctgacgggtctgtgggagttgttcaactactctacgggtctgctctcgaacgtactctcgtacctgcgtctgttcgcgctcggtcttgccggaggtcttttggctgccgcgataaaccagatagcgttcatgttcatcaccgccaaagacggcacggtcaacccgatgtcgcccggcatagttgtgacggtgattgttctgctgggcggccacgcgttgaacttcgggctttcgggcttaggctctttcatacacccgttgcgtctgatgttcgtggagttttacggcgcagtgggttttcagggcgggagtaagccgtttgtgccgttttcaaaggtagagaaaatagcacccaatacccataaaaatacacattag

SEQ ID NO: 76136 - protein, 258 aa, Unknown
  Obtained from environmental sample
  misc_feature (1)..(258): Xaa is any amino acid
MVDGVKTSEELYPTMSLAILAGFIQLFLGMGIKTYLKLRDEGFFAGLQPVSSIFMALGIVILGAKNNSFGLGLGFETFSIGNQDKFIPIGAALKSIGELNIGLPVGIGEICLGGGLALLLLFNSLDKAIFWRPLTGLWELFNYSTGLLSNVLSYLRLFALGLAGGLLAAAINQIAFMFITAKDGTVNPMSPGIVVTVIVLLGGHALNFGLSGLGSFIHPLRLMFVEFYGAVGFQGGSKPFVPFSKVEKIAPNTHKNTH

SEQ ID NO: 76137 - DNA, 315 bp, Unknown
  Obtained from environmental sample
  misc_feature (1)..(315): n is a, c, g, or t
ttgaatcaagcagtagggattttagaggtatatggcctggtatgcgcctttatggcagcagatgccgggtgcaaggcaggaaatgtaattttggagaattttgataagaataagcccgccaatgcggattcacttccggtgccgctgttggtcacaatcaaattccgtggaagcatatccgatgtggaagcggctatgggggcagggattgaaaaagcaaaaagcatatccggcgtggtacagcatcatatcattgccaaccccaccgacgatacttgcaaaatgttaaaactggatggatttgataagtcatag

SEQ ID NO: 76138 - protein, 104 aa, Unknown
  Obtained from environmental sample
  DOMAIN (3)...(88): BMC domain
  misc_feature (1)..(104): Xaa is any amino acid
MNQAVGILEVYGLVCAFMAADAGCKAGNVILENFDKNKPANADSLPVPLLVTIKFRGSISDVEAAMGAGIEKAKSISGVVQHHIIANPTDDTCKMLKLDGFDKS

SEQ ID NO: 76139 - DNA, 948 bp, Unknown
  Obtained from environmental sample
  misc_feature (1)..(948): n is a, c, g, or t
ttgcccgggaaggcgggccctatgccgaccatggcgacagccacaggcgcttcgcggccctctcctgggcggcgggccacatggggcatctatggcgatgccgaaggcataaagttcgacatcgtgcactcgcacgactggcagacggccttggcaccgatatatgtgaacctgtctttccaaggcaagaagccaaagacggtgctgactatccacaacttggcctaccaaggcaggtttcccaagcatctnttaagcgaaatttggctcccgcgtgaagcctataacgtgaatggcgccgaattcttcggccagatcaattttctcaaaggcggcttggcgtatgccgacaaaatagtgacagtcagccaaaaatacgcagaagagatcaagaccaaagaaggcggctgggagcttgacggaatgttgcggagccgcgccgccgaccttaaagggatactgaatggcgtggacgagctggtgtggaacccagcaaaggattcccacctcaggactgctttttccgcaaagaacctaaaaaagccaaaggcctacaacaaaaaaatcttccaagacgaaatggggctgaaccaagaacccggcgccccgctgttcggcctagtgagcaggctgaacgagatcaaggggatagacctgctgctccccaacatagactatttggtttctgctggcgcccagctggccatcatcggccaaggcgactaccaattggaatcggccattgattgggcgtgcggaaagcacccagggtccgtcgccgcttattttggctacgatgagggcaaagcgcacagggccattgcagcatccgacatcttcttggtgcccagcaggtccgagccctgcgggctgacccagctgtacgctatgcgatacgggaccatccccttggttcgatgtacgggcggcttggccgacaccgtgtga

SEQ ID NO: 76140 - protein, 315 aa, Unknown
  Obtained from environmental sample
  DOMAIN (4)...(145): Starch synthase catalytic domain
  misc_feature (1)..(315): Xaa is any amino acid
MPGKAGPMPTMATATGASRPSPGRRATWGIYGDAEGIKFDIVHSHDWQTALAPIYVNLSFQGKKPKTVLTIHNLAYQGRFPKHLLSEIWLPREAYNVNGAEFFGQINFLKGGLAYADKIVTVSQKYAEEIKTKEGGWELDGMLRSRAADLKGILNGVDELVWNPAKDSHLRTAFSAKNLKKPKAYNKKIFQDEMGLNQEPGAPLFGLVSRLNEIKGIDLLLPNIDYLVSAGAQLAIIGQGDYQLESAIDWACGKHPGSVAAYFGYDEGKAHRAIAASDIFLVPSRSEPCGLTQLYAMRYGTIPLVRCTGGLADTV

SEQ ID NO: 76141 - DNA, 915 bp, Unknown
  Obtained from environmental sample
  misc_feature (1)..(915): n is a, c, g, or t
ttgggccacttggcccgagcgcagcacattttccacaatggcggcatcgtccggccnccgggccgggtgtccgtggacctcgatgagcaaaacagccgccgttcacgcggcaaagccgcattgcacgaagtcttccacatagttgatggtcagatgtcccatgagttccagagtgcagggcactacatgggccgcgatgatgccggatacggcttcggccgcgccctgcagatcgtcgaatatggccatgatcgctttggaggccttgggcggcggcacaagcttgaggatcagcttggagacaacgcccagtgtgccttccgatccggtcatgagcgaggacaggttatagcctgtggagcatttgaccgttcgggttccggtgctgacgagttcgccctcgaagtcgtagaactccatgcccatgacgtagtgcttggtcaccccgtacttgaggcaacgcaagccgcccgcgtttgcgactacattgccgccgagcgtggaaatgctttgagagcccggatccggcggataaaacagtccgcgcctgagcatggcttccgcgaactgctgcgtgatcacgcccggttcgaccacggcgtagaggtcttcatcatgcacttcaagaattttgttcaggccggtcgtgctgatgacgaccgaatccgcgctgtcgggcgtggcggcgccgcagaggctggtgccagcgccgcgcacggtgatgggcagatcgttttcataacacagcttgatcagcgggccgatctgcccggtcttgtccgggcagagaacggcagcaggcgtcaccggcggaacaacggtggcgtcgtatgcgtaactttgacgatccgcttcactgacgagcacatttcccttgccgacgattttttgaaattcttgagcagagatgactga

SEQ ID NO: 76142 - protein, 304 aa, Unknown
  Obtained from environmental sample
  misc_feature (1)..(304): Xaa is any amino acid
MGHLARAQHIFHNGGIVRPPGRVSVDLDEQNSRRSRGKAALHEVFHIVDGQMSHEFQSAGHYMGRDDAGYGFGRALQIVEYGHDRFGGLGRRHKLEDQLGDNAQCAFRSGHERGQVIACGAFDRSGSGADEFALEVVELHAHDVVLGHPVLEATQAARVCDYIAAERGNALRARIRRIKQSAPEHGFRELLRDHARFDHGVEVFIMHFKNFVQAGRADDDRIRAVGRGGAAEAGASAAHGDGQIVFITQLDQRADLPGLVRAENGSRRHRRNNGGVVCVTLTIRFTDEHISLADDFLKFLSRDD

SEQ ID NO: 76143 - DNA, 765 bp, Unknown
  Obtained from environmental sample
  misc_feature (1)..(765): n is a, c, g, or t
gtgctcgtcagtgaagcggatcgtcaaagttacgcatacgacgccaccgttgttccgccggtgacgcctgctgccgttctctgcccggacaagaccgggcagatcggcccgctgatcaagctgtgttatgaaaacgatctgcccatcaccgtgcgcggcgctggcaccagcctctgcggcgccgccacgcccgacagcgcggattcggtcgtcatcagcacgaccggcctgaacaaaattcttgaagtgcatgatgaagacctctacgccgtggtcgaaccgggcgtgatcacgcagcagttcgcggaagccatgctcaggcgcggactgttttatccgccggatccgggctctcaaagcatttccacgctcggcggcaatgtagtcgcaaacgcgggcggcttgcgttgcctcaagtacggggtgaccaagcactacgtcatgggcatggagttctacgacttcgagggcgaactcgtcagcaccggaacccgaacggtcaaatgctccacaggctataacctgtcctcgctcatgaccggatcggaaggcacactgggcgttgtctccaagctgatcctcaagcttgtgccgccgcccaaggcctccaaagcgatcatggccatattcgacgatctgcagggcgcggccgaagccgtatccggcatcatcgcggcccatgtagtgccctgcactctggaactcatgggacatctgaccatcaactatgtggaagacttcgtgcaatgcggctttgccgcgtga

SEQ ID NO: 76144 - protein, 254 aa, Unknown
  Obtained from environmental sample
  DOMAIN (23)...(163): FAD binding domain
  misc_feature (1)..(254): Xaa is any amino acid
MLVSEADRQSYAYDATVVPPVTPAAVLCPDKTGQIGPLIKLCYENDLPITVRGAGTSLCGAATPDSADSVVISTTGLNKILEVHDEDLYAVVEPGVITQQFAEAMLRRGLFYPPDPGSQSISTLGGNVVANAGGLRCLKYGVTKHYVMGMEFYDFEGELVSTGTRTVKCSTGYNLSSLMTGSEGTLGVVSKLILKLVPPPKASKAIMAIFDDLQGAAEAVSGIIAAHVVPCTLELMGHLTINYVEDFVQCGFAA

SEQ ID NO: 76145 - DNA, 333 bp, Unknown
  Obtained from environmental sample
  misc_feature (1)..(333): n is a, c, g, or t
atgtctaatgaacgcttaaacgaactttacgcaaaaattaacgagtacgattcggcgtattacggcagaggaatcagccttatttgcgaccgggaatacgatttgctttacaaagaaatgcttgatttggaagaaaaatatccgagtttcaaaagcgacacgtcgccgagtacgcgtatcggaaacgatttgacgggcggatttgcaaaaattgcgcataaaatccccatgatgagcatagataactcttacgatgaaaacgacgtgaatcaatggataaaccgtctttacgatttgtgtaaacaaaagaaatttccgtttgtgcggagatga

SEQ ID NO: 76146 - protein, 110 aa, Unknown
  Obtained from environmental sample
  DOMAIN (2)...(110): NAD-dependent DNA ligase adenylation domain
  misc_feature (1)..(110): Xaa is any amino acid
MSNERLNELYAKINEYDSAYYGRGISLICDREYDLLYKEMLDLEEKYPSFKSDTSPSTRIGNDLTGGFAKIAHKIPMMSIDNSYDENDVNQWINRLYDLCKQKKFPFVRR

SEQ ID NO: 76147 - DNA, 879 bp, Unknown
  Obtained from environmental sample
  misc_feature (1)..(879): n is a, c, g, or t
ttgggcgtttcatttttggcaggaaggcaaaaaagagaattaaataaggataaaaccgcagttaccaaaaaggaaacgaagccgaaaaaaaactttgcagaaccgaaaaacaaactgtcttttgaagacgtatcgaaaacgcttgcggaaaatccggcgaatttcgaccaaaactgcgatacggtaaaatggcaaaaaggcgaaatcattcgttatttcagcatagataccgctttgcaaaaaaaaacttcgctgcttntgcggcgttcaaaacccaaatacggcgcggcggtcgcgctgaacccaaaaaccgggcaggttttggcgatggtttcttacggcgaccccgaacaaccgaaaatcgcggacaatttgtgtctttcaaacagatttcccgcggcgtcgattttcaaaacgattatcgccgacgcggtttttgaaaacacgaatatcgcctgctcaacaaaaataaactacgtcggcagaaacacgacgctttacaaaaagcagttccttcccgaaaatataggcgaagacgccaaaagcatttcgtttgcggacgcgttcgcagagtcgataaatccggttttcggctggctttcggttcataaagtagggatgcaaaagttgtataaatccgcgcagaaattcggctacaacacaaaaatcccgtttgaattgcaaacggacataagccatttccccgaaccggcgggctttgacgccggagattctacaaatcttgcggaactgggaagcggatttaacagcgaaacgacgctgacgccgcttttgggcgggcttatagccggttccgtcgcaaacggcggaattatgatggcgccgagaattatcgacagtatacccgtgcgattctga

SEQ ID NO: 76148 - protein, 292 aa, Unknown
  Obtained from environmental sample
  misc_feature (1)..(292): Xaa is any amino acid
MGVSFLAGRQKRELNKDKTAVTKKETKPKKNFAEPKNKLSFEDVSKTLAENPANFDQNCDTVKWQKGEIIRYFSIDTALQKKTSLLXRRSKPKYGAAVALNPKTGQVLAMVSYGDPEQPKIADNLCLSNRFPAASIFKTIIADAVFENTNIACSTKINYVGRNTTLYKKQFLPENIGEDAKSISFADAFAESINPVFGWLSVHKVGMQKLYKSAQKFGYNTKIPFELQTDISHFPEPAGFDAGDSTNLAELGSGFNSETTLTPLLGGLIAGSVANGGIMMAPRIIDSIPVRF

SEQ ID NO: 76149 - DNA, 480 bp, Unknown
  Obtained from environmental sample
  misc_feature (1)..(480): n is a, c, g, or t
ttggccgagggacgcgnggaagcgtatgtgggcttaggaaaatttgaggaggcgattagcgacctgaccaaagcaattgaaatctgcggcgctccggaaaattggtacgaactgacggaggattgcgccaacgcgtataatgagcgtggaatagcgtatttccactgcaaaaagtacgacgaggcgataaatgacctgactaaagcaatcgacacaagggcgacggctgacctctacgattacttggggcgcggcgtcgcccacctcgaaaacgggaactacgggaaagcgataagcgatctgacaaaggccatgacattgagggacgcggaaaaccccattgattatcaccttagggcggtcgccaattttcgcggcgggaaccgcaacgccgcgttgcgagacgtagataaaacgctgaatttagccccggacaataaagaggctaaggcgttacggcggcaaataatggcttcataa

SEQ ID NO: 76150 - protein, 159 aa, Unknown
  Obtained from environmental sample
  DOMAIN (43)...(76): Tetratricopeptide repeat
  misc_feature (1)..(159): Xaa is any amino acid
MAEGRXEAYVGLGKFEEAISDLTKAIEICGAPENWYELTEDCANAYNERGIAYFHCKKYDEAINDLTKAIDTRATADLYDYLGRGVAHLENGNYGKAISDLTKAMTLRDAENPIDYHLRAVANFRGGNRNAALRDVDKTLNLAPDNKEAKALRRQIMAS

SEQ ID NO: 76151 - DNA, 306 bp, Unknown
  Obtained from environmental sample
  misc_feature (1)..(306): n is a, c, g, or t
atggctacagcaaaaagcaagacagcccccgacgccggcgattcaacccggactttcgagtcggcgctctccgaacttgagggtatcatagagcggttggagcgcagcgaccttacgctcgactccgctcttgggcactttgaggacggggtgcggctgatgcgtttttgcgacgcccacctcaaatcccgccagggacggctattggagcttacgcggggcgaggacggcaaacttgttacggcgattctgggcgagggtctggaatcctttaccgatggggtgggagataacggcaatggataa

SEQ ID NO: 76152 - protein, 101 aa, Unknown
  Obtained from environmental sample
  DOMAIN (17)...(81): Exonuclease VII small subunit
  misc_feature (1)..(101): Xaa is any amino acid
MATAKSKTAPDAGDSTRTFESALSELEGIIERLERSDLTLDSALGHFEDGVRLMRFCDAHLKSRQGRLLELTRGEDGKLVTAILGEGLESFTDGVGDNGNG

SEQ ID NO: 76153 - DNA, 315 bp, Unknown
  Obtained from environmental sample
  misc_feature (1)..(315): n is a, c, g, or t
atggtttcggttgtaaaacaaggcgggtttcagtataaggtcgcggaaggcgaatcgcttgaaattccgcttgtagagggcgaagtcggtcaggaaattactcttgaatccgttcttcttttaagcgacggggataaaacgacaataggagcgccggatataaaaggcgcggtcgtaaaggcgcaaatcgtggaacacggacgagcgaaaaaaattttggtggtaaaaaagcacagaagaaaggactaccagagaagaaacgggcatcgtcaaggattcacaaaaattaaaattatttcgattaaagcggcgtaa

SEQ ID NO: 76154 - protein, 104 aa, Unknown
  Obtained from environmental sample
  DOMAIN (1)...(96): Ribosomal prokaryotic L21 protein
  misc_feature (1)..(104): Xaa is any amino acid
MVSVVKQGGFQYKVAEGESLEIPLVEGEVGQEITLESVLLLSDGDKTTIGAPDIKGAVVKAQIVEHGRAKKILVVKKHRRKDYQRRNGHRQGFTKIKIISIKAA

SEQ ID NO: 76155 - DNA, 594 bp, Unknown
  Obtained from environmental sample
  misc_feature (1)..(594): n is a, c, g, or t
gtgatgcaaatatccaccgttaattttgtgcttggggcaacctcaataaaacaggttccgagtgacggaattccgcatcttgcatttcttggccgttcaaatgccggcaagtccagcctgatgaatgctcttttgggaaaaaatattgtgaaaaccagcggtactccgggaaaaacaagggagataaacttttttttagctgagagttctttgggaaaatctttttactttgtggacttgccaggtgtgggttatgcaaaagtgagcatgagcatgcgagacgatatggcaaatcgcataaaaaactatgtggaaaaagcacaggacttgaaaggcatagtttatttgatagatattaggcacggtgggcacaaaatagatttagaaaccataaatggaataaaaaactctggaataccaattcttttaattgcaagcaaagcagacaaattaaatcagggagaattcatagccgcaaaaaaaaaactgagggaaaattttaatttgccagaacttccgcttgcaaccagcgcaaaaacaaaaaagggcattccagaactttgggaagagataaatggactcctctgcttctaa

SEQ ID NO: 76156 - protein, 197 aa, Unknown
  Obtained from environmental sample
  DOMAIN (25)...(149): GTPase of unknown function
  misc_feature (1)..(197): Xaa is any amino acid
MMQISTVNFVLGATSIKQVPSDGIPHLAFLGRSNAGKSSLMNALLGKNIVKTSGTPGKTREINFFLAESSLGKSFYFVDLPGVGYAKVSMSMRDDMANRIKNYVEKAQDLKGIVYLIDIRHGGHKIDLETINGIKNSGIPILLIASKADKLNQGEFIAAKKKLRENFNLPELPLATSAKTKKGIPELWEEINGLLCF

SEQ ID NO: 76157 - DNA, 564 bp, Unknown
  Obtained from environmental sample
  misc_feature (1)..(564): n is a, c, g, or t
gtggagggagcgacgtttggagcgtacaccccttcaacggccccagtaatatcatcgttaacggcgtcacggacggatgagacgagcggaacagtatcatttacgcttggaacatccggagggataggatattacctgatcactgggccgtcggcagatgagcctaccgcggcggaagtaaaagccggaacatcgttaggctcgttatcaaccggatctataacagatgaagcgataacgataacatcggcagccggtaaagtttgggtagttgtagaaaatgcgtcaagtgagtttagcaatgtggagggaacgacgtttggagcgtacaccccttcaacggccccagtaatatcatcgttaacggcgtcacggacggatgagacgagcggaacagtatcatttacgcttggaacatccggagggataggatattacctgatcactgggccgtcggcagatgagcctaccgcggcggaagtaaaagccggaacatcgttaggctcgttatcaaccggatctataacagatgaagcgataacgataacatcggcagccgggtaa

SEQ ID NO: 76158 - protein, 187 aa, Unknown
  Obtained from environmental sample
  misc_feature (1)..(187): Xaa is any amino acid
MEGATFGAYTPSTAPVISSLTASRTDETSGTVSFTLGTSGGIGYYLITGPSADEPTAAEVKAGTSLGSLSTGSITDEAITITSAAGKVWVVVENASSEFSNVEGTTFGAYTPSTAPVISSLTASRTDETSGTVSFTLGTSGGIGYYLITGPSADEPTAAEVKAGTSLGSLSTGSITDEAITITSAAG

SEQ ID NO: 76159 - DNA, 831 bp, Unknown
  Obtained from environmental sample
  misc_feature (1)..(831): n is a, c, g, or t
ttgataaggcgaatttttaaatttacttttggcgttaaagaattcctgtccgatgaacaaaaacaacccgtcagcgataaaataaaagaattaatagaaataaaaaaatatcttacaagcgacgatgttttatataagcttgttaagaatcctactgtaaggttatattatgtcgtaatgggtaagtggaatgatgatccccagttgttatccgttgcggaaggatttaaaaaagatataatcagtttaaacgcgtataatgaagatataattataaattttattgacagtaaacaattaaatatcattcttaattcaaatgagaataaatttgaagtcacgataaacacaatgaagattatgcctctgccggaaaccgaactcgtggaaaattcctgcgttttactttgcaatgccggggagctaatcaaaatacttaaatcgcctgacgggttaataaggaagtcattattcgaggataatgtccgggattaccagggcgacagcagcattaataaggaaatcagcaagacaatcagcacagaaccgttaaaattcgcgttgttaaataacggaataacaattgtttgtgaaaaatttaatcaggtaaatgataaagtcgtcattaaaaacccgcagatagtgaacggctgtcaaacaagtcatgttatatttaacagtttaaagaacaacacggatttatccaaagtacccattattatcaagctgatttncacgganaacgatgaaattacaaatcagatcgtaagaagcacaaaccggcaaaacatcgtctttgaagaagctttgaaagtaccaaacttttcataa

SEQ ID NO: 76160 - protein, 276 aa, Unknown
  Obtained from environmental sample
  misc_feature (1)..(276): Xaa is any amino acid
MIRRIFKFTFGVKEFLSDEQKQPVSDKIKELIEIKKYLTSDDVLYKLVKNPTVRLYYVVMGKWNDDPQLLSVAEGFKKDIISLNAYNEDIIINFIDSKQLNIILNSNENKFEVTINTMKIMPLPETELVENSCVLLCNAGELIKILKSPDGLIRKSLFEDNVRDYQGDSSINKEISKTISTEPLKFALLNNGITIVCEKFNQVNDKVVIKNPQIVNGCQTSHVIFNSLKNNTDLSKVPIIIKLIXTXNDEITNQIVRSTNRQNIVFEEALKVPNFS

SEQ ID NO: 76161 - DNA, 696 bp, Unknown
  Obtained from environmental sample
  misc_feature (1)..(696): n is a, c, g, or t
atgcgcatagctcctgccgggctgatgttttggaacgcaaagggatggaacgctcaaatggtcttttgtctgggtacagaattggcggcctatactcacgggcatccgaccggagcgttgaccggaggcgtactggcagtgcttgtgctggcgcttgtggacggagtgccgttacagaacgccttgaccgctgcaaagactctcctccaagagataacggcaaaaaatggcaatggcgtggatgtggattatgatgaagggacacaagccgtttgccagaaagagggcgctcatattgaaacattgcgcgctattgaaatggccgaaaaacttgccgcttcatccatgccgccccatgaagcccttgccgcattgggccaaggatgggtcgctgaggaagcactgtcaatttccatttattgttcactggtcgcccgcaatttcagggaaggcgtgatactggcggtgaaccatgacggcgattccgattccacaggctccatcagcggaaacctgttgggcgccatgtatggcgtcaaggccatccccgccagatggcttgagcctttagaattgcgcgaggtcattaccgagatagcggaagatctttatgcgtggcgggactgggacatcggcgcatacagagaacatacggaaggcagtaaacgaatctcacgaaaatatccaggttggtaa

SEQ ID NO: 76162 - protein, 231 aa, Unknown
  Obtained from environmental sample
  misc_feature (1)..(231): Xaa is any amino acid
MRIAPAGLMFWNAKGWNAQMVFCLGTELAAYTHGHPTGALTGGVLAVLVLALVDGVPLQNALTAAKTLLQEITAKNGNGVDVDYDEGTQAVCQKEGAHIETLRAIEMAEKLAASSMPPHEALAALGQGWVAEEALSISIYCSLVARNFREGVILAVNHDGDSDSTGSISGNLLGAMYGVKAIPARWLEPLELREVITEIAEDLYAWRDWDIGAYREHTEGSKRISRKYPGW

SEQ ID NO: 76163 - DNA, 873 bp, Unknown
  Obtained from environmental sample
  misc_feature (1)..(873): n is a, c, g, or t
gtgattatacgttattataaaggtggagcattggaatttaattatgtatataacggtaatgttttaaccaaagattccgatttaaaaatggccttaaacgcgagttttgccggaatttccggcgatgcttcgtacaatacatccggcaacagcagagaactggaagaaaaaagcacattccattactacacatatggcggcaacgctcttgacgcatttactttggcggagcttaaaagcgcgtataacggttggatgggttcaataacaaacaacgcggatatttgcggcataggcaatttcgaccagagttttgttcctatatgggcgttagcagaggcgaagggcgacctatcgaaagcaaaggcgttggaaacagagtttaacgcgagggctatcaggcaggggaaagcgttattggtgaaaagaataaaaactgaaacgtacgaacaaagtacctccggttcatatacctatacctttagtgacgcggagaaaaattctccagcggaaatagaagtttacgtacttggagcgggcggaggtggacagggcggacataaaaagagcacattatttcaaacacgtgaaggaacaggcggggctggcggcggcggtgcagcggcttacatgaaattagtcgtggaagaaccggttacgtttgacataacggttggcaaaggcggggccggcggtcataacatggacgttggaattacaggaggagagagcaggtccggttatgacggaacctcaggcgaggagacatctgtaagatggggcgcanagggcataacccttagagctaacggcggaaaaggcgggngccggaacgggaacagatacatatggcggagacggtggaaagggtga

SEQ ID NO: 76164 - protein, 290 aa, Unknown
  Obtained from environmental sample
  misc_feature (1)..(290): Xaa is any amino acid
MIIRYYKGGALEFNYVYNGNVLTKDSDLKMALNASFAGISGDASYNTSGNSRELEEKSTFHYYTYGGNALDAFTLAELKSAYNGWMGSITNNADICGIGNFDQSFVPIWALAEAKGDLSKAKALETEFNARAIRQGKALLVKRIKTETYEQSTSGSYTYTFSDAEKNSPAEIEVYVLGAGGGGQGGHKKSTLFQTREGTGGAGGGGAAAYMKLVVEEPVTFDITVGKGGAGGHNMDVGITGGESRSGYDGTSGEETSVRWGAXGITLRANGGKGGXRNGNRYIWRRRWKG

SEQ ID NO: 76165 - DNA, 747 bp, Unknown
  Obtained from environmental sample
  misc_feature (1)..(747): n is a, c, g, or t
atggtgttcaccgaggtgcaggctgcccgcaacaccggcgagaaatccaccgccaccgtcgtttacgacgactccggcgccgagcaccagctgatcatgactttcacccacaccggcacccccggcgagtggctgtgggagcttacgcttgccggcggcgaggagattatcctcggcggcaataggggaaaaatgactttcgccttagacggttcgcccgcctccttcaccttcgacgacggcaccaaccagttccgtttcgacccccgcaacggcgccagcgaggtgaacatcgcgatagaccacggcggccccggctctttcttgggcatcacccagttcgagtccgagagcaccacggccttcaagggtcaggacggctacgcgatgggcaagctgaccgagatcaccatcggcgagagcggcgagatttccggcctctactccaacggcataagcaaggcgatagcccagatctacgtggccgagttcaacaacccggctggtcttttgaagatgggcgacagcatgttcggcgtctcgaacaactccggcgaggcggcgatgtaccagccgggcgtaggttcgacgacgaagatcaagccgggcgcgatagagatgtcgaacgtggagttggagacggagttcacgaacatgatcacccagcagcgcggctaccaggcttgcgcccgcgtgatcacgacgagcgaccagatgttgcaggagctcgttcagttggtgaggtag

SEQ ID NO: 76166 - protein, 248 aa, Unknown
  Obtained from environmental sample
  DOMAIN (10)...(128): Flagellar basal body protein FlaE
  misc_feature (1)..(248): Xaa is any amino acid
MVFTEVQAARNTGEKSTATVVYDDSGAEHQLIMTFTHTGTPGEWLWELTLAGGEEIILGGNRGKMTFALDGSPASFTFDDGTNQFRFDPRNGASEVNIAIDHGGPGSFLGITQFESESTTAFKGQDGYAMGKLTEITIGESGEISGLYSNGISKAIAQIYVAEFNNPAGLLKMGDSMFGVSNNSGEAAMYQPGVGSTTKIKPGAIEMSNVELETEFTNMITQQRGYQACARVITTSDQMLQELVQLVR

SEQ ID NO: 76167 - DNA, 480 bp, Unknown
  Obtained from environmental sample
  misc_feature (1)..(480): n is a, c, g, or t
gtgcgcatcaatttcatgacgaactttttcgcgccgggaggcgactatacattttactcgggagtcagcgcgttcattctgacaattgtctggatcacaggtataacgaacacaataaacctgatagacggccttgacgggctggcagccggcgtttcggccatcgcttcgctttcgatcagctatgtcgcgttcaacctgaactattatcccgccgcgctcgccatgctggcagtcgccggcggcgcgctcgggttcctgccattcaacgcgcatccggcgaagatcttcatgggcgacagcggctcgctatttttgggatatatgcttgcggtattgtcgatcgagggcgcgacgaagagcgcggcggtcgtcgcgaccatcgccccggtactcgtcctgggtgttccgatctttgataccgcgttcgcgatcctgcgcaggatcgtcaataaaaggcccataatggaggcggattaa

SEQ ID NO: 76168 - protein, 159 aa, Unknown
  Obtained from environmental sample
  DOMAIN (1)...(123): Glycosyl transferase family 4
  misc_feature (1)..(159): Xaa is any amino acid
MRINFMTNFFAPGGDYTFYSGVSAFILTIVWITGITNTINLIDGLDGLAAGVSAIASLSISYVAFNLNYYPAALAMLAVAGGALGFLPFNAHPAKIFMGDSGSLFLGYMLAVLSIEGATKSAAVVATIAPVLVLGVPIFDTAFAILRRIVNKRPIMEAD

SEQ ID NO: 76169 - DNA, 408 bp, Unknown
  Obtained from environmental sample
  misc_feature (1)..(408): n is a, c, g, or t
ttgccgatagcgctgcaaagcctgatcggctcgtcgctgaaccttattgacaaccttatggtcggaaagctcggcgaaacggagcttgcggctgtaggcgtggggatccagccgttttttatattctggatgttaatgttcggatttgtcagcggcacggcgacatttatggcgcagttctggggcgcgggtgatatccgcaatatcaggaagacgcttggcttcgcgatatgcgtgagttcaggcgcggggtttgtgttcttcatatgcgcgatgttttttcctgggatgtttgtggattttttcacgaatattgaggaaataaagcccctcgcgcgggaatacatacagatcgggtccgtctgctttttattcctgagcgtcacagtcccgtttacatttgcctga

SEQ ID NO: 76170 - protein, 135 aa, Unknown
  Obtained from environmental sample
  DOMAIN (2)...(135): MatE
  misc_feature (1)..(135): Xaa is any amino acid
MPIALQSLIGSSLNLIDNLMVGKLGETELAAVGVGIQPFFIFWMLMFGFVSGTATFMAQFWGAGDIRNIRKTLGFAICVSSGAGFVFFICAMFFPGMFVDFFTNIEEIKPLAREYIQIGSVCFLFLSVTVPFTFA

SEQ ID NO: 76171 - DNA, 855 bp, Unknown
  Obtained from environmental sample
  misc_feature (1)..(855): n is a, c, g, or t
ttgacgggtggagtgttacctgtgttgatggtgatggtgttcgcctttaagttccaagagttaaaaaggcaggtgtatctatttacgggagatgcgcccgcgaccgccataaaaaaggatatacgggaggccggggcagacatgaataatatctttatggttgacggtgcggatgtgccgccgttggattcccctgacttagaatccatgtttgtcgtgtacaagcccgatgtcgtaatcatagatatgttgcagcacgtagttccagaaggtacgtcaatgaatagtattagcgaggccgcagcaatgttcaaaaatataaaagtattagcggaaagatattcggcggctataatctttgcgcaacataccacaaaattctcttcgtctaatggcgggctttccgtccatttttctgtaggcagtgtgggaattaatggaattatgcgaacggttcacgtagtagggcagctgcgcgacgaatccgggaaaaataccggggtgcgcgggttcgccgtggccaagtcgaatattgggcgaagcgacctaccctgcctactatatgaaatcgacaatgagagcaggctaaagtgggtaggcttagatcgtgatttgaccgccgaggggttaatatacgttccgaagcctaaccaccggccaagcgacaaacgagaggaggctaaggcctttattaaggagtttttgagcaggggacagaaacccgctgaggaggttcgggctgcggctgaggaggccgggataggcaagaacacctattaccgcgcggtaaaagaaatcggggcggagcgggagtatgtggagggcgtgccgtttttgaggatagaagcgcgttaa

SEQ ID NO: 76172 - protein, 284 aa, Unknown
  Obtained from environmental sample
  misc_feature (1)..(284): Xaa is any amino acid
MTGGVLPVLMVMVFAFKFQELKRQVYLFTGDAPATAIKKDIREAGADMNNIFMVDGADVPPLDSPDLESMFVVYKPDVVIIDMLQHVVPEGTSMNSISEAAAMFKNIKVLAERYSAAIIFAQHTTKFSSSNGGLSVHFSVGSVGINGIMRTVHVVGQLRDESGKNTGVRGFAVAKSNIGRSDLPCLLYEIDNESRLKWVGLDRDLTAEGLIYVPKPNHRPSDKREEAKAFIKEFLSRGQKPAEEVRAAAEEAGIGKNTYYRAVKEIGAEREYVEGVPFLRIEAR

SEQ ID NO: 76173 - DNA, 375 bp, Unknown
  Obtained from environmental sample
  misc_feature (1)..(375): n is a, c, g, or t
atgtcgcgcgcggaacgcttggcagaactgctcaagaccgagatcggcgggatcattctccataaactgaacgaccaccgtattggttttgtttcgatcacggaagttacggcttccgatgatttatcgaccgccaaagtttttatctcctgtctgggcgacgcggaggcccgcaaaaaatccctgcgcggtttgatttcctcgattccctatatccgcagtctcctggccgaaagcatcgacacgcgcattgtgccgaaactgcggtttattctggatgattcgttggcggccggcggccggcgcctggaaattttaaataaactggagaaagagagggcagagcgtgaaaccaaactggcggccaattcttaa

SEQ ID NO: 76174 - protein, 124 aa, Unknown
  Obtained from environmental sample
  DOMAIN (3)...(109): Ribosome-binding factor A
  misc_feature (1)..(124): Xaa is any amino acid
MSRAERLAELLKTEIGGIILHKLNDHRIGFVSITEVTASDDLSTAKVFISCLGDAEARKKSLRGLISSIPYIRSLLAESIDTRIVPKLRFILDDSLAAGGRRLEILNKLEKERAERETKLAANS

SEQ ID NO: 76175 - DNA, 315 bp, Unknown
  Obtained from environmental sample
  misc_feature (1)..(315): n is a, c, g, or t
atgctcgccccgaatacgaagaagtgcagctggcaaaagcggaaatccgcaacgttttcaattctccaaagcgggcgcaatcgccggcgcgttgtcagcgagggtatcttgcgtaaaaacgcggacaaagttttgctctaccgcggcaataagcagctggccgaaactaaatttgccagttgnaaacgctttaaagacgatgtgaaagaagtggcgctcaattacgagtgcggttttactctggaaaaattgnaagcctatgaagtgggcgatacaattgtggcgtttgagcgccgggaaaaaaccagagtttaa

SEQ ID NO: 76176 - protein, 104 aa, Unknown
  Obtained from environmental sample
  misc_feature (1)..(104): Xaa is any amino acid
MLAPNTKKCSWQKRKSATFSILQSGRNRRRVVSEGILRKNADKVLLYRGNKQLAETKFASXKRFKDDVKEVALNYECGFTLEKLXAYEVGDTIVAFERREKTRV

SEQ ID NO: 76177 - DNA, 453 bp, Unknown
  Obtained from environmental sample
  misc_feature (1)..(453): n is a, c, g, or t
gtgatcgcgagatccgcggatggcggggaacccgaaccccttgcacaactgagcgaaagagacataggtgggatcaggctcatggcaggctacggcagcagcccattttttgactatgagagcaaaggcttaacagtcgagaatcggggttcggagaaactcggaaaaggctctgttcacaaagtggccttgaaaacgaaagagggccttgaatttatctatttcattgatgcaaagaaataccttccagccaagatggaaagagatggctcggccaccatctttagcaactataaaaaaacaaatggcatcaaagccgcccacacattggagttgccggtaactggcctaaaaatggccattgaaaaaatagagatcaatccgcccataggccgcgaaagattccaattcccagaacccaaagtggacgaaaccaaagctggagtgaaatga

SEQ ID NO: 76178 - protein, 150 aa, Unknown
  Obtained from environmental sample
  misc_feature (1)..(150): Xaa is any amino acid
MIARSADGGEPEPLAQLSERDIGGIRLMAGYGSSPFFDYESKGLTVENRGSEKLGKGSVHKVALKTKEGLEFIYFIDAKKYLPAKMERDGSATIFSNYKKTNGIKAAHTLELPVTGLKMAIEKIEINPPIGRERFQFPEPKVDETKAGVK

SEQ ID NO: 76179 - DNA, 480 bp, Unknown
  Obtained from environmental sample
  misc_feature (1)..(480): n is a, c, g, or t
gtgagtatgaaaaagttttttgtttcgttattttttgctttgcttcttagctgtaacgatggttttgaatcaaagatagcggcagatacgcaaaaaaaagttttttgccaaattggaaataaatgccaaaaaattagcgaaagcctttgctatgaaataggaggcgttacaccatgtaacaccattaactccggcgaaagcagtagcagttcagacgaagaaatcagcagcagttctcgcagtgtgagtagcagcagtttggtcggttcggttagcagcagttcaggcggttcggttagcagcagctctggtggttcggttagcagcagctcctggcggttcggtagcaacagttcaggcgggtcggttaacaacagttcaagcggttcagttagcaacagttccggcggttcggttaacagccaatcgggcggttcatttaacaacaattcagggggttcggttaacaccaattcctaa

SEQ ID NO: 76180 - protein, 159 aa, Unknown
  Obtained from environmental sample
  SIGNAL (1)...(27)
  misc_feature (1)..(159): Xaa is any amino acid
MSMKKFFVSLFFALLLSCNDGFESKIAADTQKKVFCQIGNKCQKISESLCYEIGGVTPCNTINSGESSSSSDEEISSSSRSVSSSSLVGSVSSSSGGSVSSSSGGSVSSSSWRFGSNSSGGSVNNSSSGSVSNSSGGSVNSQSGGSFNNNSGGSVNTNS

SEQ ID NO: 76181 - DNA, 324 bp, Unknown
  Obtained from environmental sample
  misc_feature (1)..(324): n is a, c, g, or t
ttggtgttaaccgaaccccctgaattgttgttaaatgaaccgcccgattggctgttaaccgaaccgccggaactgttgctaactgaaccgcttgaactgttgttaaccgacccgcctgaactgttgctaccgaaccgccaggagctgctgctaaccgaaccaccagagctgctgctaaccgaaccgcctgaactgctgctaaccgaaccgaccaaactgctgctactcacactgcgagaactgctgctgatttcttcgtctgaactgctactgctttcgccggagttaatggtgttacatggtgtaacgcctcctatttcatag

SEQ ID NO: 76182 - protein, 107 aa, Unknown
  Obtained from environmental sample
  misc_feature (1)..(107): Xaa is any amino acid
MVLTEPPELLLNEPPDWLLTEPPELLLTEPLELLLTDPPELLLPNRQELLLTEPPELLLTEPPELLLTEPTKLLLLTLRELLLISSSELLLLSPELMVLHGVTPPIS

SEQ ID NO: 76183 - DNA, 588 bp, Unknown
  Obtained from environmental sample
  misc_feature (1)..(588): n is a, c, g, or t
ttgagtaaaaacgttttatttttaattttagcggccgtcgtattatttttcgtcgtgcagatgaaagaaatcatcctgctatttttcgcggcatatgtcatcgcgtgcgcgttggacccgtttgtggcaaagttcgagaacaaaaaaatcggacgcacatcagcggccgcgatagtcgtgggcgtgagcgttctaagcgttttggcgttacttgcgccgatgttttttgtcacgtttaaagaagttaaagggtttatcgaactctttcctgaaaaacttgtccaaatcagcagcttcagctttatgggttatgatttcagcgatgtcaaatatttgttgacgtcttcaagcgattttatgcagagttttttcacgcgctcgatgaatttcacgttcgggattgttcaatttatcgtgattattatcgcgttgttgatgattgtttattttattttgattgataaaacttatatcaaaaacaaatttcaggaattcttcccgccgtcgatgaaaggaaaagcggcgaaaataggccgcacaatcagcgttcggttgggagttatgtgcgcgtccagatactttctatga

SEQ ID NO: 76184 - protein, 195 aa, Unknown
  Obtained from environmental sample
  SIGNAL (1)...(21)
  misc_feature (1)..(195): Xaa is any amino acid
MSKNVLFLILAAVVLFFVVQMKEIILLFFAAYVIACALDPFVAKFENKKIGRTSAAAIVVGVSVLSVLALLAPMFFVTFKEVKGFIELFPEKLVQISSFSFMGYDFSDVKYLLTSSSDFMQSFFTRSMNFTFGIVQFIVIIIALLMIVYFILIDKTYIKNKFQEFFPPSMKGKAAKIGRTISVRLGVMCASRYFL

SEQ ID NO: 76185 - DNA, 774 bp, Unknown
  Obtained from environmental sample
  misc_feature (1)..(774): n is a, c, g, or t
gtggccggggcggaacgttttctcggtttaggagatgcgcgagtgttccgggcggaagagccggaacgccatgatcctcccccggccgtctggctgcaaggcccgactgcggcggccggcgcgcttgaagggcaggcgcccttcgatcccctgtttcgcggttctcccgccttggccgcgctggagaaattgtggagcgcgacgaaggactggaaagagctgtttacgcaactgcacttcatgcaagatgtggaacaggtgcgcgcgcgggcggagcaggtgaggattttgacgcttcatgccgccaaggggcttgaattcaaagcggtgtttctgcctgcgctggaacagggcattttgccccttgagcgtagcggcgggacggacgctgcggcggccttggatgccgcaacggccgcgcaggaagagttgcggcttttctatgtgggcgtcagtcgcgcgagcgaagcgctcttcctcagccatgcggcgcaacggcatgtatacnggcgcattgtccggcaggcgccctccccttttctccgggatgtgcggcagtattgcaaaggcgccgttcttgcgggcccgcagcgtccgggcgggacggcaattgtccttgctgtagcggccctgcccaatgcggctcaacttaccatacttcccgcacccaaacattccccatgccccccggccgtggtttccgtttgccggcctttcggggaaaaacctttcttctgtcctcaaaacaaaggtcctccttcccaacattcctaa

SEQ ID NO: 76186 - protein, 257 aa, Unknown
  Obtained from environmental sample
  misc_feature (1)..(257): Xaa is any amino acid
MAGAERFLGLGDARVFRAEEPERHDPPPAVWLQGPTAAAGALEGQAPFDPLFRGSPALAALEKLWSATKDWKELFTQLHFMQDVEQVRARAEQVRILTLHAAKGLEFKAVFLPALEQGILPLERSGGTDAAAALDAATAAQEELRLFYVGVSRASEALFLSHAAQRHVYXRIVRQAPSPFLRDVRQYCKGAVLAGPQRPGGTAIVLAVAALPNAAQLTILPAPKHSPCPPAVVSVCRPFGEKPFFCPQNKGPPSQHS

SEQ ID NO: 76187 - DNA, 741 bp, Unknown
  Obtained from environmental sample
  misc_feature (1)..(741): n is a, c, g, or t
ttgtatgcgagcatagcgagcacgaacaaattgcgttatccgagatctttatttgaaacaaagaccgcgcagcaagtgcgcggtgacatgactgtagtcaatataatcctctatcatctactggaatacgacgaggacatcctgcgcgtattgaaagaatacgcaccgtttatggataaatacatggtcaacctgcacaaaaacacctttctacataatatatattatcggcatatatctaaaagttataaaaaggcactaaaacaccttaaaaatggcaatattactttcaggcttcacgctgaggacgcaaggaaagctgtcgcgcatctgaatgaactctacgattatatatttttggacgcgtttacgccgtcaaaatgcccgtgcctttggacgctggagtttttcaaattactttacgagcggttggcgccggacggaaaacttctgacatattcgcaagccgccccggttcgaaacgccatgctccaggcggggtttcaagcatataaaacccaatccggaaccattgcatataaaaacaagccggctcttctctcttctctcatttctcatctctcagaatacgatttggggcttttaaatacccgtgcgggtgttgtgtatagggatgaaaatttaacgttggataacgaggctatactcgccgctcatcgccnagcgcaggaaacaagcggtctaatgtccacctcgcgttatattaaggactgtgcttaa

SEQ ID NO: 76188 - protein, 246 aa, Unknown
  Obtained from environmental sample
  DOMAIN (5)...(182): Protein of unknown function (DUF752)
  misc_feature (1)..(246): Xaa is any amino acid
MYASIASTNKLRYPRSLFETKTAQQVRGDMTVVNIILYHLLEYDEDILRVLKEYAPFMDKYMVNLHKNTFLHNIYYRHISKSYKKALKHLKNGNITFRLHAEDARKAVAHLNELYDYIFLDAFTPSKCPCLWTLEFFKLLYERLAPDGKLLTYSQAAPVRNAMLQAGFQAYKTQSGTIAYKNKPALLSSLISHLSEYDLGLLNTRAGVVYRDENLTLDNEAILAAHRXAQETSGLMSTSRYIKDCA

SEQ ID NO: 76189 - DNA, 903 bp, Unknown
  Obtained from environmental sample
  misc_feature (1)..(903): n is a, c, g, or t
ttggtttnngcatgtcagatcggccgagcggccgagggcgttcacgtcaccttgcttgaggacagagagcatattatgccgatgtttgatgatgatatttcgcaaattataaaagaacagctgatgagcgcggcgaacggcaaatatgaaattttgacctcggaaacggtcgcggaattttccggcgacgcggacggcgtgcgctctgtgcgaactgactcagggctggatatcccggcggatttggtcatattggcggcgggcgccgtgcctaattccgaaatcgctgctgatgctgggattgcgctcggcacaaaaggctctatccaggtcaacgaacggatggaaacgaatatcccggatatctacgcggcgggcgattgtgctgaaaaccattttgtgatgaccggcacaaaaatctggtcgcctttgggctctatcgccaacaaagaaggccgctgcgccgcgatgaacgcgtgcgggtttgaagataatttccccggcgtcctcgggtcggccgccacgcgctgtttggattttacgatgtcaaaaacaggtttgaccgaaggatatgcgcttaaaagaggcttcaaggccgtcagcgcgaccgtgcacaagaacgataaagtcggctatatgccaaacaccaaggatatcatcctgaaactcgttgcggacagcgaaacagggcttttgctcggcgcacaggggattggtacaggcgatgcggacaagcgcgtgaatatcttcgcgtccgctctgctcggcaaagtcacggtcaacgaatttgtgacgcacgatttgacgtacgcgccggcgttctcgccaacaatcgacccgctgctttacggcgcgcaaatccttgagtcaaaaattagacagtccccgaactcaaccgcttaa

SEQ ID NO: 76190 - protein, 300 aa, Unknown
  Obtained from environmental sample
  DOMAIN (1)...(133): Pyridine nucleotide-disulphide oxidoreductase
  misc_feature (1)..(300): Xaa is any amino acid
MVXACQIGRAAEGVHVTLLEDREHIMPMFDDDISQIIKEQLMSAANGKYEILTSETVAEFSGDADGVRSVRTDSGLDIPADLVILAAGAVPNSEIAADAGIALGTKGSIQVNERMETNIPDIYAAGDCAENHFVMTGTKIWSPLGSIANKEGRCAAMNACGFEDNFPGVLGSAATRCLDFTMSKTGLTEGYALKRGFKAVSATVHKNDKVGYMPNTKDIILKLVADSETGLLLGAQGIGTGDADKRVNIFASALLGKVTVNEFVTHDLTYAPAFSPTIDPLLYGAQILESKIRQSPNSTA

SEQ ID NO: 76191 - DNA, 828 bp, Unknown
  Obtained from environmental sample
  misc_feature (1)..(828): n is a, c, g, or t
atgaacttgcttaagggatttcgaccggttattcggttcgatgctatttcgggcgaaccacaagtggagatttcgtacaatacggaggttgaaaaaacacatacgttgcaaggaattttacattttctaaattcgcaaaaaacattaattcttcttgccatagacgaatttcaacaaatcaacgatttcccggaaaaaaatactgaggcgatgcttcgctccacaattcaacacttgcacaatattcgttttatcttctgcggtagcaaaaaaacgataatgaccgatatgtttgccaatgccaaacggccattttatgcaagtacgcagtttatgtatcttgataaaatagaccaccataaatatagtgcttttattgaaaaactattccgtgaaaacggaacacaaattgataaagaaaccattgattttgttttagattggacgcgaacacatacgttttatacacaaagcttgtgtaatatgattttttcgatgagtgaagaaaatgcggttattgatgtgcaaacggctaaagaagcatgcttggaactgatgaaacgcaacgaaccgactttttttcagtacaaagaattgctcagcctttcacaatggaaatatctgattgctgttgccaaagaacattcggtggaacaaccgtctgccaaaagttttttgatgaaatatcagattggaacgccaaccgactcgcanagactgaaaacatcgcttttagacaaggatttaattctgaaaataacaactaaagaacaaacttatttaccagtgccgatgtattttctcgcggtgggtggaaatggggtttaa

SEQ ID NO: 76192 - protein, 275 aa, Unknown
  Obtained from environmental sample
  misc_feature (1)..(275): Xaa is any amino acid
MNLLKGFRPVIRFDAISGEPQVEISYNTEVEKTHTLQGILHFLNSQKTLILLAIDEFQQINDFPEKNTEAMLRSTIQHLHNIRFIFCGSKKTIMTDMFANAKRPFYASTQFMYLDKIDHHKYSAFIEKLFRENGTQIDKETIDFVLDWTRTHTFYTQSLCNMIFSMSEENAVIDVQTAKEACLELMKRNEPTFFQYKELLSLSQWKYLIAVAKEHSVEQPSAKSFLMKYQIGTPTDSXRLKTSLLDKDLILKITTKEQTYLPVPMYFLAVGGNGV

SEQ ID NO: 76193 - DNA, 423 bp, Unknown
  Obtained from environmental sample
  misc_feature (1)..(423): n is a, c, g, or t
ttgttaggtctggttcccctaagcaacccgtttggtattgtcttatttatcatttcttttttctttaatcataatcacgcttccaaaattataggaatggctgttgttaaaattctttcaacgatgattttgctacaactcgacttacttggatggtggattcttcatattgattccttacaacctttatttactaccatgtacaatatgccgttcgtaccctttacaaaatttaacaatacccttgttatgggcgggcttgcggccgggattgtactttggcttccggttttcattttctttatggtttttattccgctttacagaaaatatatatcttcaaaattaaaagaatcaaagtttgtaaaaaaacttgcgcaaatacccatcatcggttctttaggcaagatgttcacaagttaa

SEQ ID NO: 76194 - protein, 140 aa, Unknown
  Obtained from environmental sample
  misc_feature (1)..(140): Xaa is any amino acid
MLGLVPLSNPFGIVLFIISFFFNHNHASKIIGMAVVKILSTMILLQLDLLGWWILHIDSLQPLFTTMYNMPFVPFTKFNNTLVMGGLAAGIVLWLPVFIFFMVFIPLYRKYISSKLKESKFVKKLAQIPIIGSLGKMFTS

SEQ ID NO: 76195 - DNA, 300 bp, Unknown
  Obtained from environmental sample
  misc_feature (1)..(300): n is a, c, g, or t
gtgatgtccattctgacctacgagtcggaagacgaagtcattcgccgcgctaacgataccgactacgcctggccgcggggcatcgtgacagcggacctgaaccgcgcgcatcgcgtcattcatcagctggaagcgggtatttgctggatcaacacctggggcgaatccccggcagagatgcccgttggcggctacaaacactccggcattggtcgcgagaacggcgtgatgacgctccagagttacacccaggtgaagtccatccaggttgagatggctaaattccagtccatattctaa

SEQ ID NO: 76196 - protein, 99 aa, Unknown
  Obtained from environmental sample
  misc_feature (1)..(99): Xaa is any amino acid
MMSILTYESEDEVIRRANDTDYAWPRGIVTADLNRAHRVIHQLEAGICWINTWGESPAEMPVGGYKHSGIGRENGVMTLQSYTQVKSIQVEMAKFQSIF

SEQ ID NO: 76197 - DNA, 408 bp, Unknown
  Obtained from environmental sample
  misc_feature (1)..(408): n is a, c, g, or t
atgcgcgatatcaccagtcagctgcgtgacgcggttttgaatcgattacatgcacttccgcagggcagtgcagagcagcgattacaggcgattgttggcggaaacttcgatgaaacgcaggtgagcagtgcggcgatgaaagcctggctggcgttctgggccagcagtatgcatcagccgatgctctatcgtttacagcaggtcagcagccgccgcttgctgtcgaatctggtgagcgagtttcgtcgcgaattgccgcgcgaacaggcacaggaagcgggctacggcctggccgcgctgattgatggattatggctgcgcgcggctctgagcggcaaaccgctggataaaacccgcgctaattccctgacccgccactttatcactcagcatctacccaccgattaa

SEQ ID NO: 76198 - protein, 135 aa, Unknown
  Obtained from environmental sample
  misc_feature (1)..(135): Xaa is any amino acid
MRDITSQLRDAVLNRLHALPQGSAEQRLQAIVGGNFDETQVSSAAMKAWLAFWASSMHQPMLYRLQQVSSRRLLSNLVSEFRRELPREQAQEAGYGLAALIDGLWLRAALSGKPLDKTRANSLTRHFITQHLPTD

SEQ ID NO: 76199 - DNA, 396 bp, Unknown
  Obtained from environmental sample
  misc_feature (1)..(396): n is a, c, g, or t
gtgatgtcccgaatggcagaacagcagctttatatacatggtggttatacctccgccaccagcggtcgcaccttcgagaccattaacccggccaacggtaacgtgctggcgaccgtgcaggccgccgggcgcgaggatgtcgatcgcgccgtgaaaagcgcccagcaggggcaaaaaatctgggcgtcgatgaccgccatggagcgctcgcgtattctgcgtcgggccgttgatattctgcgtgaacgcaatgacgaactcgcaaaactggaaacctcgacaccggaaagcatattcggaaacctcaaccgtcgatatcgttaccggtgcggacgtgctggagtactacgcccggctgatccccgcgcttggaggcaaccagatcccggtgcgtga

SEQ ID NO: 76200 - protein, 131 aa, Unknown
  Obtained from environmental sample
  misc_feature (1)..(131): Xaa is any amino acid
MMSRMAEQQLYIHGGYTSATSGRTFETINPANGNVLATVQAAGREDVDRAVKSAQQGQKIWASMTAMERSRILRRAVDILRERNDELAKLETSTPESIFGNLNRRYRYRCGRAGVLRPADPRAWRQPDPGA

SEQ ID NO: 76201 - DNA, 573 bp, Unknown
  Obtained from environmental sample
  misc_feature (1)..(573): n is a, c, g, or t
atgtggttgttccatcttattgcaattatttttaacagaacggatgtatttatgtctgaaaaaatgtggggaaaaaacacttccgaagaagcgattcgtttacgaaagaaagcgttatcatatatggaacgggacgatcttaatgatgacgattttggcgaggcgcttaccctgattgagaaggccgcgcaacttggcgatgcggaagcccaatcggagtttgccgatgctttaagagcgagcggcgatgtgacaaccgctctcaaatgggagaagaaggcggcagaacagggttacccgaaagcgcaacacaacgtagcctaccattaccaaaacggtgtaggtactccggtgaaccaagaacagcagttctattggtataaaaaagccgccgaaaacggatttaccgagtctaaacacagtttagcggtttgttacctgaatggtgttggtacgccccaagactttaaaaaggctattgattggttagaaaaagccgctaatgatgggcatgctgccgccaaaaggagattaggggccggttatgttgaaggcatagcaggcttggtgtag

SEQ ID NO: 76202 - protein, 190 aa, Unknown
  Obtained from environmental sample
  DOMAIN (100)...(135): Sel1 repeat
  misc_feature (1)..(190): Xaa is any amino acid
MWLFHLIAIIFNRTDVFMSEKMWGKNTSEEAIRLRKKALSYMERDDLNDDDFGEALTLIEKAAQLGDAEAQSEFADALRASGDVTTALKWEKKAAEQGYPKAQHNVAYHYQNGVGTPVNQEQQFYWYKKAAENGFTESKHSLAVCYLNGVGTPQDFKKAIDWLEKAANDGHAAAKRRLGAGYVEGIAGLV

SEQ ID NO: 76203 - DNA, 858 bp, Unknown
  Obtained from environmental sample
  misc_feature (1)..(858): n is a, c, g, or t
atgggagcggaagaagtagtaacaagcggaacgatgccgacaataaggagcagtgaaaataaagggacagacaagaatacgataggcggcttgagttttgaattaccagcgttaaaaaatggaatgagtaatccgtttagttggggtagttttaattatcaaaacggagacttcattatgaatataggtctggacggaatgaaaataggaaacgtgaagaacacaaacgaatccaaaatgacgttgaatatacaggatataaacggggacgggatacctgatattctgaggtcaggtagcgggagaatatatgtagtatccgggcagcgtgacggagctgactgggatggagtaaaatatttacacaattatgagataaccggcggcggagataatttaagttcatatacaacgaatataaaagagtcagtaggaggatcagtaagcccgtccggtacaataaattttaagaaaagcgcgagcggggcgctgaaaagcgtagacgtgaacggcggcggtgggaatacacttacacatacgaaaggaacaaatgagcaaaaaaaaggactaatagatataaacggggacggtttgcccgattattttaacggtacctcttttgggttgaacaccgggaaaaagtttgagaacgaaaccggatataccgctcaatgtgacagccttagtaaaagcgacacggaaagccttggagtgtcagtatcattaagcagcgggttagggttgaattttgatttangagaaacggcgacagaagcgaaaaccactgcggtagtaagcgccggaagtaacggagcgataaacgtatcatactcagcgaatctgctcagtgaaacataa

SEQ ID NO: 76204 - protein, 285 aa, Unknown
  Obtained from environmental sample
  misc_feature (1)..(285): Xaa is any amino acid
MGAEEVVTSGTMPTIRSSENKGTDKNTIGGLSFELPALKNGMSNPFSWGSFNYQNGDFIMNIGLDGMKIGNVKNTNESKMTLNIQDINGDGIPDILRSGSGRIYVVSGQRDGADWDGVKYLHNYEITGGGDNLSSYTTNIKESVGGSVSPSGTINFKKSASGALKSVDVNGGGGNTLTHTKGTNEQKKGLIDINGDGLPDYFNGTSFGLNTGKKFENETGYTAQCDSLSKSDTESLGVSVSLSSGLGLNFDLXETATEAKTTAVVSAGSNGAINVSYSANLLSET

SEQ ID NO: 76205 - DNA, 768 bp, Unknown
  Obtained from environmental sample
  misc_feature (1)..(768): n is a, c, g, or t
ttgttgaataaaataaaactgccccaggaggagagntactcgcttgattacgtttggaaaatgggaacaatagagatgccgcagagccggtatgtgctgtcaagcgtgacaataaaagagaatgacaaataccagaaacagcttaaaggagtacacagttatacaacacgttatgagtatacgcaaggatattacaacaggagagaaaaagagttctacggattcaagatagtaaagacaagatacgctgacgaatcatataaggaaacatattattacaatgataaatattacagcaaaggaatggtaagccaggagagccgctatgatgaaaagggaaataaagtacaggaaacgttttatgagatagacgcggccagggcgttagtgaaaaggcagacaagcgaaaggagcgaattaaaaggtgacggaagcaaaataacgacgatgatagaatacgagtacgatgagtacgggaacgtaacggatatgtgggataacggaggagaaggaaccagaaggatatacgcgaatataacgtacaaggattacgccgggaagtatctgcacgcgcatcctgagatgataaaagtatacgaggaagggagaaataaggaacagatattaataaggaagagggaaggagaatatgacggaaaaggctcgcttgtaaaactgaaacagtactacggagcgaacgagggcgactgcggagttacagagctaaaatgggatgattacgggaacctgaggaggataacatcctga

SEQ ID NO: 76206 - protein, 255 aa, Unknown
  Obtained from environmental sample
  misc_feature (1)..(255): Xaa is any amino acid
MLNKIKLPQEEXYSLDYVWKMGTIEMPQSRYVLSSVTIKENDKYQKQLKGVHSYTTRYEYTQGYYNRREKEFYGFKIVKTRYADESYKETYYYNDKYYSKGMVSQESRYDEKGNKVQETFYEIDAARALVKRQTSERSELKGDGSKITTMIEYEYDEYGNVTDMWDNGGEGTRRIYANITYKDYAGKYLHAHPEMIKVYEEGRNKEQILIRKREGEYDGKGSLVKLKQYYGANEGDCGVTELKWDDYGNLRRITS

SEQ ID NO: 76207 - DNA, 753 bp, Unknown
  Obtained from environmental sample
  misc_feature (1)..(753): n is a, c, g, or t
atggagaaaatgggagagccatatctggggacaacagacggcgatgggaattttgtggtagaagtagacggggtaatcgtatcgccatacattatacttgaggtagatggaaactatgtgagcgaagtgagtggcaaacagacaactgctcctataacgctgaatgccgtggcggatgtgtcaaagaaaaaagtagtcaatataaatgtgttcactcatttggaatatgacagggttttgaagttggcgaagagcggcgagatgtttgaggatgcaaagaagaaagcccagaaagaggtgctgaaagcgcttgggatggacgagagcgtagccaagaataagaacagcgaggagctgtctctttttggcaggagcaaaggcgattctttgttgctagtggcttctgttttgttgcaagcaacgccggatgtttccaatttgcttaccgcaattggcagtgagattgagaaagatggagttttgagtgaggagaccaaagctgaggttaaaagcggcgttgattatgtgtatgcgaatatggacaaggtgatggggaacatacggaaattggattcctctgccagatttcctagccgtaatgagattagagatatagagaagagaatagattccactgccacctcgcctaatttgccgagtagttcaagcggcagttcgtccagcattagtggtattgaatacgaaggggcattttacagaaactgtaaatcggcgaccaagtttggatgctga

SEQ ID NO: 76208 - protein, 250 aa, Unknown
  Obtained from environmental sample
  misc_feature (1)..(250): Xaa is any amino acid
MEKMGEPYLGTTDGDGNFVVEVDGVIVSPYIILEVDGNYVSEVSGKQTTAPITLNAVADVSKKKVVNINVFTHLEYDRVLKLAKSGEMFEDAKKKAQKEVLKALGMDESVAKNKNSEELSLFGRSKGDSLLLVASVLLQATPDVSNLLTAIGSEIEKDGVLSEETKAEVKSGVDYVYANMDKVMGNIRKLDSSARFPSRNEIRDIEKRIDSTATSPNLPSSSSGSSSSISGIEYEGAFYRNCKSATKFGC

SEQ ID NO: 76209 - DNA, 666 bp, Unknown
  Obtained from environmental sample
  misc_feature (1)..(666): n is a, c, g, or t
gtggtgagccagcaggggaatatcctctttcctggtccggaggctcggcatctcaatgggaaaaaccgccaggcggtagtacagatcctcccgaaaggccccggttttgatttccgtgcgcagatccttgttggtagccgagatgatacgcacatcaacactgtgtaccgcttcttcacccaccctctggtattcgccttcctggagtacgcggagcagtttgctttgcaggtaaaccggaatttcacccacctcgtccaaaaacagcgtgccgccgtccgccgcctgaaaatacccgatgcgggtttttacggctccggtgaaagcccctctggcgtggccgaaaaattcgctttcgaacagatccgcaggaatcgcggaacagttgattctgatcatggggttattgcgtcggctgctcagattgtgtatttcccgcgcgatcatctccttgcccgtgcccgattccccatatataagcacgttggcgtccgtcggcccgaccatgtggatcaaggcgcggatcttgtctatgctcgcgctttgcccgatgatccctttaaaagactgaacctctttaatttcttcgcgcagataggcattttccaattcgatctgccgcttgaggctgtccaccagttcaaaggctcggcgttgcatggctaa

SEQ ID NO: 76210 - protein, 221 aa, Unknown
  Obtained from environmental sample
  misc_feature (1)..(221): Xaa is any amino acid
MVSQQGNILFPGPEARHLNGKNRQAVVQILPKGPGFDFRAQILVGSRDDTHINTVYRFFTHPLVFAFLEYAEQFALQVNRNFTHLVQKQRAAVRRLKIPDAGFYGSGESPSGVAEKFAFEQIRRNRGTVDSDHGVIASAAQIVYFPRDHLLARARFPIYKHVGVRRPDHVDQGADLVYARALPDDPFKRLNLFNFFAQIGIFQFDLPLEAVHQFKGSALHG

SEQ ID NO: 76211 - DNA, 732 bp, Unknown
  Obtained from environmental sample
  misc_feature (1)..(732): n is a, c, g, or t
atgcaacgccgagcctttgaactggtggacagcctcaagcggcagatcgaattggaaaatgcctatctgcgcgaagaaattaaagaggttcagtcttttaaagggatcatcgggcaaagcgcgagcatagacaagatccgcgccttgatccacatggtcgggccgacggacgccaacgtgcttatatatggggaatcgggcacgggcaaggagatgatcgcgcgggaaatacacaatctgagcagccgacgcaataaccccatgatcagaatcaactgttccgcgattcctgcggatctgttcgaaagcgaatttttcggccacgccagaggggctttcaccggagccgtaaaaacccgcatcgggtattttcaggcggcggacggcggcacgctgtttttggacgaggtgggtgaaattccggtttacctgcaaagcaaactgctccgcgtactccaggaaggcgaataccagagggtgggtgaagaagcggtacacagtgttgatgtgcgtatcatctcggctaccaacaaggatctgcgcacggaaatcaaaaccggggcctttcgggaggatctgtactaccgcctggcggtttttcccattgagatgccgagcctccggaccaggaaagaggatattcccctgctggctcaccactttctttctctcatcagcaaaaagatgaacaggccgcgcgtgagcctgagcgaagaggaatgcatatcctga

SEQ ID NO: 76212 - protein, 243 aa, Unknown
  Obtained from environmental sample
  DOMAIN (59)...(205): ATPase family associated with various cellular activities (AAA)
  misc_feature (1)..(243): Xaa is any amino acid
MQRRAFELVDSLKRQIELENAYLREEIKEVQSFKGIIGQSASIDKIRALIHMVGPTDANVLIYGESGTGKEMIAREIHNLSSRRNNPMIRINCSAIPADLFESEFFGHARGAFTGAVKTRIGYFQAADGGTLFLDEVGEIPVYLQSKLLRVLQEGEYQRVGEEAVHSVDVRIISATNKDLRTEIKTGAFREDLYYRLAVFPIEMPSLRTRKEDIPLLAHHFLSLISKKMNRPRVSLSEEECIS

SEQ ID NO: 76213 - DNA, 765 bp, Unknown
  Obtained from environmental sample
  misc_feature (1)..(765): n is a, c, g, or t
atgagacgatgtttaaccgcgttttttattgcattattagtaatcacagcaattacgtgtaaaagcgagcaagtaaaaagccatgaaaaaatcaatgaaattatttctgaggaaataaccgttgggaaaggcagtgaatgggaattaaacggtttacttacattgcccggaaataccaaaggaaagatacccgctgttgtcctggttcacggttccggcccgcaggatatggatgaaactatacgggccaatagacctttcaaagacattgccgaatatcttgcttccaggggaatagccgttttaaggtataataaaagaacatttacgcatccgacaaaaataatcgagaactttcaggattttacagttaaagaagaaactgtcgacgatgctatatttgcggcgaatattctaagaaacgacaatcgtattgacagcaaaaaaatatttcttttggggcacagtttgggaggtatgcttgcgccaagaattgacgctgaaggcggtaatttcgcaggtcttattattctggcaggttcgccgcgcagatttgccgatatatggcaagatcaagccctggcttcaattgaaacgcttccggaagatactaaagcgctagggcaggcgcaaattatagaaattatgagttattttaattcttttaaaaacatgacagacgaagaagcaaaaaattattcactgcttggcgcaacggggtattattataaagattttgactcatacccgtcaaacgaatattaa

SEQ ID NO: 76214 - protein, 254 aa, Unknown
  Obtained from environmental sample
  SIGNAL (1)...(22)
  misc_feature (1)..(254): Xaa is any amino acid
MRRCLTAFFIALLVITAITCKSEQVKSHEKINEIISEEITVGKGSEWELNGLLTLPGNTKGKIPAVVLVHGSGPQDMDETIRANRPFKDIAEYLASRGIAVLRYNKRTFTHPTKIIENFQDFTVKEETVDDAIFAANILRNDNRIDSKKIFLLGHSLGGMLAPRIDAEGGNFAGLIILAGSPRRFADIWQDQALASIETLPEDTKALGQAQIIEIMSYFNSFKNMTDEEAKNYSLLGATGYYYKDFDSYPSNEY

SEQ ID NO: 76215 - DNA, 864 bp, Unknown
  Obtained from environmental sample
  misc_feature (1)..(864): n is a, c, g, or t
atgtttcatattattatttttacgttctttaataacccaaatttaggattagtaaagttcaaattttattctgaatacattgcgtatttaggtaaaaaagtatttacaaatacgaaaaatctgttaataaatttgtatctntgcgctatggaaattattaacgcaaacacgagacgaacggttggaaaatatatccgttccacacaaccgcaaacatttatcgaacaaggcaaattacctcctcaggccttagacatggaggcggcagttttaggcgcgttgatgctcgaacaggacgcattgaccaacgcgattgatttggttaaacccgattttttttacaaaccggaaaaccgtgcgatttttgaggcgattacgcaactttttgatgctgcgcaaccggttgatattttaacggtaaccaacaaactgcgcgaactcggcaaactcgaagaggttggcggggcttactatatttcgcagttgaccaatcgtgtggcatcgaccgccaatacggaatattacgcgcggattgtggcgcaaaactacatcaaacgcgaactcattcggatttcggcggatattaccaaaaatgcctacgacgaaacggtggacgttttggaaatgctggatagtgctgaaagagatttatttgccattggcgaaaagaattttcagtccgactatatcgatatgaatacgttaattcgcgacgcgattgaggaagtgaaatccgcacgttcgcacgaagacaagattagcgcaaatgctgtgccatcgggctttatgtcgctagatcgtataacaaacgaggtttcaaaaatcaacattggttattttggcggcgcgtcccggaatgggtaa

SEQ ID NO: 76216 - protein, 287 aa, Unknown
  Obtained from environmental sample
  DOMAIN (79)...(181): DnaB-like helicase N terminal domain
  misc_feature (1)..(287): Xaa is any amino acid
MFHIIIFTFFNNPNLGLVKFKFYSEYIAYLGKKVFTNTKNLLINLYLCAMEIINANTRRTVGKYIRSTQPQTFIEQGKLPPQALDMEAAVLGALMLEQDALTNAIDLVKPDFFYKPENRAIFEAITQLFDAAQPVDILTVTNKLRELGKLEEVGGAYYISQLTNRVASTANTEYYARIVAQNYIKRELIRISADITKNAYDETVDVLEMLDSAERDLFAIGEKNFQSDYIDMNTLIRDAIEEVKSARSHEDKISANAVPSGFMSLDRITNEVSKINIGYFGGASRNG

SEQ ID NO: 76217 - DNA, 642 bp, Unknown
  Obtained from environmental sample
  misc_feature (1)..(642): n is a, c, g, or t
ttgggcgaaatggcggcgatgcggggcgattcgctttccgtatcggcgatcgataaattccagcgcggcgaatacccgaccgggacaagcaaatatgaaaagcgccgcatcgcggaacaggtcgcctccgtcgacattgataaatgcatccagtgcggcaaatgctcgatgttatgcccgcatgcggcgatacgatgcaatgtattgccggaatccggaattcggaattcgggattcgaagaaatggcacggctcaaactctcggttggcggccccgccgcccgaatcccgaattccgaattccgaattccgaagttcgtcccctgcaaaaccaagaatgtgggcgactacatgaggtggacgataagcgagtgtgtggcgcactgcccgggatgcagaatattcgcgaacgaatgtgcggtcaaaataataaagatgattccggcatccaaagcggatcactctgcactcgacgtggcggatctattgccgaaaataccgcgcgaaaatttgaaccttgatattgccaagcacatacgattgctggcccactattcccaattccaaagcacgagcgcggagagctcgaagacgcattacatatgggggttatgtcatctgggcgcgcgagataacggttga

SEQ ID NO: 76218 - protein, 213 aa, Unknown
  Obtained from environmental sample
  DOMAIN (42)...(65): 4Fe-4S binding domain
  misc_feature (1)..(213): Xaa is any amino acid
MGEMAAMRGDSLSVSAIDKFQRGEYPTGTSKYEKRRIAEQVASVDIDKCIQCGKCSMLCPHAAIRCNVLPESGIRNSGFEEMARLKLSVGGPAARIPNSEFRIPKFVPCKTKNVGDYMRWTISECVAHCPGCRIFANECAVKIIKMIPASKADHSALDVADLLPKIPRENLNLDIAKHIRLLAHYSQFQSTSAESSKTHYIWGLCHLGARDNG

SEQ ID NO: 76219 - DNA, 849 bp, Unknown
  Obtained from environmental sample
  misc_feature (1)..(849): n is a, c, g, or t
atgacagtttcatcggcaaacgcccgcaacgtccacgaaactcaccaggccgtgaccaattacagctttgagttcaaggtctttcacgataacgagctttcggtgcaagtggtggaccgggctttcgtggtcacgcctttaattcttggccatgacttcctaatcaacggcctgggccatgaccagggagggacggtttatttgacgccgcagggccgcgacaaggccgggaccggcaacgccctggtcatactgcgtcaaatgcggttcgtccaggaaattgattattcgccccatgacattttcccggccgagacccacgagcgggccttggacattctgaccatgatatgccaggagctccgagagatgatgggccgggccattatcgccccgccgaactgggataagtccatccagttcagcgacctggccgccctattgcgggactccgaagccgccttggccgccgcccgggcggcggcggagttggccgcggatatggccgggcgggcggaggcggctttcggccaggtggccacggacataaaccaatggaaaaccctctccacggccgcctatgacgtgccccacgaaaagatgccctcggccatctatcatcccgagagcaacatgattctgttcggcgtgccccggggccgggacggcgcccaagggcggccaggggagaccggaaagcggggggcgcgcggccggacgggcaagcaaggccgcgatgggcggcccgggcccatggggccggtccatcccggcccggtggttggactcatagactgcggcggggccgaaggctttcacaacaaacgctttcgactgcggccaggctga

SEQ ID NO: 76220 - protein, 282 aa, Unknown
  Obtained from environmental sample
  DOMAIN (218)...(276): Collagen triple helix repeat (20 copies)
  misc_feature (1)..(282): Xaa is any amino acid
MTVSSANARNVHETHQAVTNYSFEFKVFHDNELSVQVVDRAFVVTPLILGHDFLINGLGHDQGGTVYLTPQGRDKAGTGNALVILRQMRFVQEIDYSPHDIFPAETHERALDILTMICQELREMMGRAIIAPPNWDKSIQFSDLAALLRDSEAALAAARAAAELAADMAGRAEAAFGQVATDINQWKTLSTAAYDVPHEKMPSAIYHPESNMILFGVPRGRDGAQGRPGETGKRGARGRTGKQGRDGRPGPMGPVHPGPVVGLIDCGGAEGFHNKRFRLRPG

SEQ ID NO: 76221 - DNA, 348 bp, Unknown
  Obtained from environmental sample
  misc_feature (1)..(348): n is a, c, g, or t
atggaatacgccccgctgcccgatggctggagcgatacgccgcccccgcccggtccggaagaacagcaagcgnctctcacagccgccgtccaggcccggcttgatgacttcgcccggaccaggggctacgacaatgccctggcctgtattacttacgctcactcaactgatccgcaattccaaattgagggccagtatatgcttacggcccgtgacgaaacatgggcagcggccatttgggttttatctcaagccgcgatgggggtaaaccccatgccgagcatggaggattttctggcagagttgccggagttggcctggccagaggaagcggaggccccggcatga

SEQ ID NO: 76222 - protein, 115 aa, Unknown
  Obtained from environmental sample
  misc_feature (1)..(115): Xaa is any amino acid
MEYAPLPDGWSDTPPPPGPEEQQAXLTAAVQARLDDFARTRGYDNALACITYAHSTDPQFQIEGQYMLTARDETWAAAIWVLSQAAMGVNPMPSMEDFLAELPELAWPEEAEAPA

SEQ ID NO: 76223 - DNA, 738 bp, Unknown
  Obtained from environmental sample
  misc_feature (1)..(738): n is a, c, g, or t
ttgaagtcagataaatctgcagaaaatctatttatatattttattgattttgtaaaagaaaaaaatataaaaaataaatttgatatattaaatataaaaccagaaaatgacaatccattaattttgttttataatttttgtaagaataatattaatgaaatagcctgtgatgtaaatttttctgatccatgtgataattggttattagatttgactaatacaagtctatattctctcttagttgaattctcaggagattcaaatgaagaaatatttgctttttgcgataaatcgaaaccacttttaacacaattaaaatttattaattcttttattggtgataaaagaatattatataatgatttattaggtgttaatagaagatttaattttaatttagcagcccctgttaaactaattgattcaaaagaatctatatctattcaaatcgcagattgtcttgtttcatcgatatgtttttcatttgtaaataattctgatgcattttcaaaaagtatattaaaaattgcgaatacttcttttgatatgatacattctgttggacctacaaatatgaataatctttcgaataaagaaatcaaattacatttttggttaatgaaggaattatctcgcaagaatagtaaaaacaaaaaaatagaagcaatatataagtatgattttcttatgatgcaaaatattagatttgggacaaattatttatatgaaccattttaa

SEQ ID NO: 76224 - protein, 245 aa, Unknown
  Obtained from environmental sample
  misc_feature (1)..(245): Xaa is any amino acid
MKSDKSAENLFIYFIDFVKEKNIKNKFDILNIKPENDNPLILFYNFCKNNINEIACDVNFSDPCDNWLLDLTNTSLYSLLVEFSGDSNEEIFAFCDKSKPLLTQLKFINSFIGDKRILYNDLLGVNRRFNFNLAAPVKLIDSKESISIQIADCLVSSICFSFVNNSDAFSKSILKIANTSFDMIHSVGPTNMNNLSNKEIKLHFWLMKELSRKNSKNKKIEAIYKYDFLMMQNIRFGTNYLYEPF

SEQ ID NO: 76225 - DNA, 306 bp, Unknown
  Obtained from environmental sample
  misc_feature (1)..(306): n is a, c, g, or t
atggatatgaacgagataatgaagaaagcgcaggagatgcagggcaaagtcgcggccgcgcaggaacagctggcgcggacgacgataaacggcgcggcgggcggcggccttgcggcggtcgaaatgaacggcaaatacgatacgctgaaactgacgatagcgccggctttgatgaaggaaagcccggccgacgcggcggcggtcatattggcggcgttgaaggacgcgaagacgcgggtcgatgcgacgatcgacatggtcatgacggccgcgaccgccggcatgccgctgccgaacgccgcctag

SEQ ID NO: 76226 - protein, 101 aa, Unknown
  Obtained from environmental sample
  DOMAIN (7)...(98): Uncharacterised BCR, YbaB family COG0718
  misc_feature (1)..(101): Xaa is any amino acid
MDMNEIMKKAQEMQGKVAAAQEQLARTTINGAAGGGLAAVEMNGKYDTLKLTIAPALMKESPADAAAVILAALKDAKTRVDATIDMVMTAATAGMPLPNAA

SEQ ID NO: 76227 - DNA, 552 bp, Unknown
  Obtained from environmental sample
  misc_feature (1)..(552): n is a, c, g, or t
atgcactttcttgncaagataacgagggcgataaaggcgccgcgccaaggcgtttcgaaattcgcgccgcagatctataccgtccatatcaaccccgaaaagattcgcgacgtcataggcaaaggcggcagcgtaatccaaggcatggtcaaggacaccggcgcgacgatagatatcgaggaaaccggcgacatcaaaatcttggccgtatcgaaagagcaggcggacgacgttatcgagcggataaaggccattacggccgagcccgaggcgggcggactgtacgaaggcgtcatttccggcctgaaagacttcggcctgttcgtaaagatcatgggcgacttcgaatcgctggtccatatatccgaaattacaggcaagcgcatcgagaagattacggacaccggctttaaggaaggcgatagggtatggataaaatacctcggcaaggataaccgcggcaagaccagaatgaccatgaagaacatcaatcaagaaacgggcgtcgaagaaaaggccaaagaagaaaaagccgccgcagaaaaaaaataa

SEQ ID NO: 76228 - protein, 183 aa, Unknown
  Obtained from environmental sample
  DOMAIN (88)...(161): S1 RNA binding domain
  misc_feature (1)..(183): Xaa is any amino acid
MHFLXKITRAIKAPRQGVSKFAPQIYTVHINPEKIRDVIGKGGSVIQGMVKDTGATIDIEETGDIKILAVSKEQADDVIERIKAITAEPEAGGLYEGVISGLKDFGLFVKIMGDFESLVHISEITGKRIEKITDTGFKEGDRVWIKYLGKDNRGKTRMTMKNINQETGVEEKAKEEKAAAEKK

SEQ ID NO: 76229 - DNA, 870 bp, Unknown
  Obtained from environmental sample
  misc_feature (1)..(870): n is a, c, g, or t
ttggcttatacttttctaggaacaagggaaaagaaagatctgcctgaaccggaaaaaatcacgctcaagtactggctgtctgtttttgaaaacaaagcctacagaaatttcctggggatatttctttcttttcaaattgccgtcgatttagtattggcgctttttattttctatattgatatagttgtcctacaatataaaaattacgaacttgtagtcggtttgcttcttgtctgttctatgcttttgattaccgtaatgggcgcgattgcaaagagaaaaggcaaggcattccccttgttaatcggtatacccgtctggatagtttcaacgcttagttttatctggctggattcaagcgtccatactgcgacgctttgcgtacttgccgtactgattgccataggcacatcctctggccaactttcaacatggtcaatgcttacggacatttatgacattgacgaaatacgcaccggccttcggcgcgaaggcatttacagcggagtgacaaccttccttcgcaaatttgcaagcggtgttgccgttcttttaatgggatttggtcttcaagctcttggttttgatcagaacgaatactcggtcttaaaagccagcacggataatttcgacccggctacttatgcgcagagcaatgtcgtattgggcataaagtggatgtttgttctcataccgtttacgcttctggtaacctgccttatctttgcaatcaggaacaaaatcaacaaacgacggttcgatgcggtgttaaagggtattgaagaattcaaaacccacgggtacattgacaaaatgagcgaacaagaaacagcggacgtgttgattgctacgggggtggggaaaagatag

SEQ ID NO: 76230 - protein, 289 aa, Unknown
  Obtained from environmental sample
  misc_feature (1)..(289): Xaa is any amino acid
MAYTFLGTREKKDLPEPEKITLKYWLSVFENKAYRNFLGIFLSFQIAVDLVLALFIFYIDIVVLQYKNYELVVGLLLVCSMLLITVMGAIAKRKGKAFPLLIGIPVWIVSTLSFIWLDSSVHTATLCVLAVLIAIGTSSGQLSTWSMLTDIYDIDEIRTGLRREGIYSGVTTFLRKFASGVAVLLMGFGLQALGFDQNEYSVLKASTDNFDPATYAQSNVVLGIKWMFVLIPFTLLVTCLIFAIRNKINKRRFDAVLKGIEEFKTHGYIDKMSEQETADVLIATGVGKR

SEQ ID NO: 76231 - DNA, 534 bp, Unknown
  Obtained from environmental sample
  misc_feature (1)..(534): n is a, c, g, or t
atgattgaaatgataccaagatatcgcttttttttatgccttgtttttgcgtttttttcctgctttacgacacaagtttattctgcaccgaaaacaatattggttttaggtgacagcttatcggctgaatatgggataacgcgtggcagcggctgggtcgctttactggaaaaacggttaaaagaacaaaaaaagaacgtgagcgtgattaatgcaagcgtcagcggagacacaaccagcggcggtaaatcacggttacctgcattactgaaaaagtatcagccagacattgttattgtggaactaggtggaaatgatggcttgcagggattgcccgtttcttcaatcgaagcaaattttaatgccattatttccatggctaaaaaagcaggtgcccgggttcttttgttaggaatgaaaatgtcgcctaattatgggggtgattatacgggtaattttgcaggcgtatatgtttcggttgcaaaaaaaacgggtntctttgagagtgcctttttttctggaaaaagtagctga

SEQ ID NO: 76232 - protein, 177 aa, Unknown
  Obtained from environmental sample
  SIGNAL (1)...(28)
  DOMAIN (33)...(175): GDSL-like Lipase/Acylhydrolase
  misc_feature (1)..(177): Xaa is any amino acid
MIEMIPRYRFFLCLVFAFFSCFTTQVYSAPKTILVLGDSLSAEYGITRGSGWVALLEKRLKEQKKNVSVINASVSGDTTSGGKSRLPALLKKYQPDIVIVELGGNDGLQGLPVSSIEANFNAIISMAKKAGARVLLLGMKMSPNYGGDYTGNFAGVYVSVAKKTGXFESAFFSGKSS

SEQ ID NO: 76233 - DNA, 429 bp, Unknown
  Obtained from environmental sample
  misc_feature (1)..(429): n is a, c, g, or t
ttggcctatcagcgggcattggaacttctacgggctaatccaaatgtaaaggccatgatgggttccgctatgagtacggttcccggtgtttccaaagcgattaccgaacggggacttatcgaaaaagtcgccgctttcggtacctgtcttccttcagtagccggcgattatcttgaatccggtgccgccaagtcaattcacttctgggttcccgccgatgcggcatacgctaccgcttccgccgcatataagctgcttaaaggcgaaactatcagtgatggaacggatcttggggtaaaaggttacaacaacataactatcaagaaaaatgaacatggtgttcccgttatctacggtcaagcctgggttgatgtgaacaagggcaatcttggcgaatggaaaaacgctgacggtagctacaagctctaa

SEQ ID NO: 76234 - protein, 142 aa, Unknown
  Obtained from environmental sample
  misc_feature (1)..(142): Xaa is any amino acid
MAYQRALELLRANPNVKAMMGSAMSTVPGVSKAITERGLIEKVAAFGTCLPSVAGDYLESGAAKSIHFWVPADAAYATASAAYKLLKGETISDGTDLGVKGYNNITIKKNEHGVPVIYGQAWVDVNKGNLGEWKNADGSYKL

SEQ ID NO: 76235 - DNA, 792 bp, Unknown
  Obtained from environmental sample
  misc_feature (1)..(792): n is a, c, g, or t
gtggctatctcagccgagtacattgccgcccgtgtccttattgctacgggagttaacaatattttcgtagcttttgccatagctatcgctgtgggtataggcctggggtctatcaatgcggtttttgtatctgttttcaagataccggtactcatagctaccctgggaacttccagccttttccacggagccttgctgcaatttgtgggaaccaagtcccttaatgtgggagatcttcctcaatgttttaaggatttcgggagtctttcggttatttcatggaagcttcccaacggaacgccatacggactttcagttttcttttttatactcattggactcctccttcttacctggttcatacttaggttcaccatgattggccggggcatttttgccgttggaggaaattccgaagcggcaaaacgatcaggattcaatcttcataagattcatttttttatttactgttatgcgggatttcttgcggggatcatgggtatcctgcatataagccttatcaattacggtaaccccatgtaccttgtaggtacggaattaaccgttattgccgcagtggttcttggaggtgccaggatcaccggtggaaccggaaccctgaccggaaccatgctgggggtggcaatgatcatggttttgcaaaaaaacctggttttaataggcctttcttcctattggcaggatttttttgtgggactcatcattgttataggtgtaaccattaccaatgtgcagaccaagtttaaggcatggaaaaagatggggatataa

SEQ ID NO: 76236 - protein, 263 aa, Unknown
  Obtained from environmental sample
  DOMAIN (1)...(246): Branched-chain amino acid transport system / permease component
  misc_feature (1)..(263): Xaa is any amino acid
MAISAEYIAARVLIATGVNNIFVAFAIAIAVGIGLGSINAVFVSVFKIPVLIATLGTSSLFHGALLQFVGTKSLNVGDLPQCFKDFGSLSVISWKLPNGTPYGLSVFFFILIGLLLLTWFILRFTMIGRGIFAVGGNSEAAKRSGFNLHKIHFFIYCYAGFLAGIMGILHISLINYGNPMYLVGTELTVIAAVVLGGARITGGTGTLTGTMLGVAMIMVLQKNLVLIGLSSYWQDFFVGLIIVIGVTITNVQTKFKAWKKMGI

SEQ ID NO: 76237 - DNA, 678 bp, Unknown
  Obtained from environmental sample
  misc_feature (1)..(678): n is a, c, g, or t
atgaacgaaagtgttttgtgggcggcgatactggtggtaatgggcttgtcgctgctggcacagtggctggtacactccacgtacaaccgctatgccaaaatacaggccaagaaaggcatctccgccgaggaaaccgcgaaacaaatactggcctatcacggtgtgcatattcctattaaggctgtgcccggcactttgaccgaccattacgatccgcggaataaaactctggcgctttcgcaaggcgtgtacggctccacttcgatagccgcttacggcatagccgcgcacgaggccggacacgctatccagcacgccaaagcttttaccccgctgatgctgcgcaatacgatttttccggcggccaatttcggctccaatttcgggccgtggctgtttctggccggattgtttttttcctacgggcctttggtggacatcggtctgatatttttcagctttgccgtatttttttcggtcattaccctgccggtagagtttgacgccagccgccgggcgatagaagccctgtccggacaaagactgctttctgcaacggagctgtccggcgcgaaaaaagttttgagcgcagccgcgctgacctatgtagctgccacggcaatggcggttttacaaatgctcagatttttggcgatgcgcaatgcgcggcggagataa

SEQ ID NO: 76238 - protein, 225 aa, Unknown
  Obtained from environmental sample
  SIGNAL (1)...(20)
  DOMAIN (10)...(224): Putative neutral zinc metallopeptidase
  misc_feature (1)..(225): Xaa is any amino acid
MNESVLWAAILVVMGLSLLAQWLVHSTYNRYAKIQAKKGISAEETAKQILAYHGVHIPIKAVPGTLTDHYDPRNKTLALSQGVYGSTSIAAYGIAAHEAGHAIQHAKAFTPLMLRNTIFPAANFGSNFGPWLFLAGLFFSYGPLVDIGLIFFSFAVFFSVITLPVEFDASRRAIEALSGQRLLSATELSGAKKVLSAAALTYVAATAMAVLQMLRFLAMRNARRR

SEQ ID NO: 76239 - DNA, 585 bp, Unknown
  Obtained from environmental sample
  misc_feature (1)..(585): n is a, c, g, or t
ttgatgggcttgaaacacgatgatgtcgtgatacaaaattattcgccgtcagggttttattcatcggcgataaggaatgatttaatgcggaaattagaatcgcgcaacgccacagaaatcatgtatgtggaaacgcctgatgccgataaaaccattcctcttaaattatcgccgtcgtctttgacggtttatatttccgatgatgataacaaacgggcggcggctcatatcgcggcgggcttgtcggttattttgcgcacgcccagccaatcgattgtatttgtatcgcccgaagatatgactcaaatcaaatatgattgggcgcattgcttgggctgtttgtcgcaatgccgcttttcatcgtgggcggcgaatttgccgaacaacacgacgggcaaaattcctgacccacgttcgttttgcattcatcgggcgttgtttgaagcctcgcacggattcgatatggacgattgcttgattttcgcagggaaaaacgcgactcattttgcaaccgacccgttttatgccaatggctttgtcccgacgattgcacaactggttgagcgattgcaaacaggcgcatga

SEQ ID NO: 76240 - protein, 194 aa, Unknown
  Obtained from environmental sample
  misc_feature (1)..(194): Xaa is any amino acid
MMGLKHDDVVIQNYSPSGFYSSAIRNDLMRKLESRNATEIMYVETPDADKTIPLKLSPSSLTVYISDDDNKRAAAHIAAGLSVILRTPSQSIVFVSPEDMTQIKYDWAHCLGCLSQCRFSSWAANLPNNTTGKIPDPRSFCIHRALFEASHGFDMDDCLIFAGKNATHFATDPFYANGFVPTIAQLVERLQTGA

SEQ ID NO: 76241 - DNA, 819 bp, Unknown
  Obtained from environmental sample
  misc_feature (1)..(819): n is a, c, g, or t
ttggggcacgacggcaccgcaaattgcgcctcgcccgaaatggccgcaacgattgaggacagtgaacttttccaattcaaatccatcgccgcggggaccgaacacagtgtcgcgattgacgaggccggtaatgtctgggcctggggcgggaatacttacggacaactgggtcttggcgattcgggcgcgaaatacggccgcatcacaccgaccagggtcatctttcacggccttctggcaccgctggttttcgaacaagttgtcgcgggcgcaagcacgcttttcatcgacaacaacggcgtgtactgggcgtgcgggcgaaacacctacgggcaactgggcgtgggcgacacggcaatgcgaaatgaaattcgcccggtaacggtcgattattcaacccttgaacaaccgaaccccggtattttgttcaacgctaccggccataaccgggatttggaaaaatatctgcgcgatttggccgaggccgcccacaaaaccacggtcgggacgggcacacgcccaaccgccggggtccgcgccattgccgaggccaaccgccaggtccttaaccttgaacaatcaaccggttacgcccccgaaatccaacttttcgaacgaataggcataagcaaccccagtccccaaggggccgaggagcgcaaaaacgcaacgtggtacaatttttcggtccaatactggaaacttgttttcattactatggntccgcgccttgacggcaacggcctttcgccggttttcacttttatgatgacgaactcgtacgcaagcgcgaaattcaacgacnactcgaccaaataa

SEQ ID NO: 76242 - protein, 272 aa, Unknown
  Obtained from environmental sample
  misc_feature (1)..(272): Xaa is any amino acid
MGHDGTANCASPEMAATIEDSELFQFKSIAAGTEHSVAIDEAGNVWAWGGNTYGQLGLGDSGAKYGRITPTRVIFHGLLAPLVFEQVVAGASTLFIDNNGVYWACGRNTYGQLGVGDTAMRNEIRPVTVDYSTLEQPNPGILFNATGHNRDLEKYLRDLAEAAHKTTVGTGTRPTAGVRAIAEANRQVLNLEQSTGYAPEIQLFERIGISNPSPQGAEERKNATWYNFSVQYWKLVFITMXPRLDGNGLSPVFTFMMTNSYASAKFNDXSTK

SEQ ID NO: 76243 - DNA, 537 bp, Unknown
  Obtained from environmental sample
  misc_feature (1)..(537): n is a, c, g, or t
atgatcgcgagttacgccctaaacggcatgaccccacccatgttcctgggttcacgcatccaatcctacgccaagaccagccccggcgtctggcgggctttgggacgcttctgcgaagccatcgcccttaactactacagcgtgtgggatccggatttaaccgctatggcaaaatgggaagcatgggggggcaagccctcgattatgaccgagtggtacgtcaagggcatggattcaggcctcgtcaactcatcgggcgcgggctgggtggtaaagacccagaacgaccgcggccttttttacgaacagtttgtcatgggaatgattgaatccggcacctgcgtaggctggcagtggttcaaatacaaggacaacgaccccagcgcgccggcctccgacccgtccaacgttgacggcaataagggcatcatcaacaccgcgttccaggagtacactgaccttaccaaccgcatgcggacgataaactacaacacataccggctggtggatcattttgtccaaaggaacgggttttaa

SEQ ID NO: 76244 - protein, 178 aa, Unknown
  Obtained from environmental sample
  misc_feature (1)..(178): Xaa is any amino acid
MIASYALNGMTPPMFLGSRIQSYAKTSPGVWRALGRFCEAIALNYYSVWDPDLTAMAKWEAWGGKPSIMTEWYVKGMDSGLVNSSGAGWVVKTQNDRGLFYEQFVMGMIESGTCVGWQWFKYKDNDPSAPASDPSNVDGNKGIINTAFQEYTDLTNRMRTINYNTYRLVDHFVQRNGF

SEQ ID NO: 76245 - DNA, 333 bp, Unknown
  Obtained from environmental sample
  misc_feature (1)..(333): n is a, c, g, or t
atgaaaaagggattttttctcgtagcggcagtattcgcggcgtttgccctgggggcttgcgcggatgtaaatggcgcctcagcgggcggcggatacacagtggcatttatcactaacggcggctcaagcgtaaaaagcatcaacgtcattgaaggcggcaaagcgccccgtcccacagaccccaccaaagcggacatggtgttcgagaattggtattcagacgcggggcttactaccgcgtttgattttgccaataccgctatcacccgaaatatcaccctgtacgcaaaagtggcattcgctcgtgaaaaaaaatatcttttgatgatctaa

SEQ ID NO: 76246 - protein, 110 aa, Unknown
  Obtained from environmental sample
  SIGNAL (1)...(21)
  misc_feature (1)..(110): Xaa is any amino acid
MKKGFFLVAAVFAAFALGACADVNGASAGGGYTVAFITNGGSSVKSINVIEGGKAPRPTDPTKADMVFENWYSDAGLTTAFDFANTAITRNITLYAKVAFAREKKYLLMI

SEQ ID NO: 76247 - DNA, 765 bp, Unknown
  Obtained from environmental sample
  misc_feature (1)..(765): n is a, c, g, or t
ttgaaatatgttatcaatatgccacccgatttgtttatgccaaatgctgcaacaaatacagcaattgcaatatttgaaacaaaccgctcttttgattaccaaaccgatgaagttactttttatgatttacgggacgatggttttgttttgtcaaaaaacaaagggcggaccgatgtttatggacgttgggataaaatagaaaaagaattattagattcgctaaaaccgacagcaactacaaatgacattacgcttgttcgttgtaaaattaaatcaaaagacgaatggactatttatgcacatagcaaaacggattattctacactttgcgaagaagattttgtaaaatcagtttcagattatatgatttttcaagcaaaaaaagatttagacattttgaataacgatttaacagagtctgaattgtttttaacactcaactcttatttcaaaaacgaagacggaaaaattacaaagaacgagaaaggcactattccacttgatttttcaaattggaaagaatttaaagtaggtaatttatttgatgttacaggaacaaaaacaactcctttgtacgatttggaaacaatgtacggacaaggtgaatttccttatgttacgactcgtgcaacaaataatggcattgcaggttattacgaccacaaaacagaacggggaaatgttttagttgccgatagcgccgttattggttatgtatcatatcaagcagaagattttacagcttcagaccacgtgaacttttaa

SEQ ID NO: 76248 - protein, 254 aa, Unknown
  Obtained from environmental sample
  misc_feature (1)..(254): Xaa is any amino acid
MKYVINMPPDLFMPNAATNTAIAIFETNRSFDYQTDEVTFYDLRDDGFVLSKNKGRTDVYGRWDKIEKELLDSLKPTATTNDITLVRCKIKSKDEWTIYAHSKTDYSTLCEEDFVKSVSDYMIFQAKKDLDILNNDLTESELFLTLNSYFKNEDGKITKNEKGTIPLDFSNWKEFKVGNLFDVTGTKTTPLYDLETMYGQGEFPYVTTRATNNGIAGYYDHKTERGNVLVADSAVIGYVSYQAEDFTASDHVNF

SEQ ID NO: 76249 - DNA, 723 bp, Unknown
  Obtained from environmental sample
  misc_feature (1)..(723): n is a, c, g, or t
atgtttaatatcgccacttccgaaatatttgtgcccgatggcacagagcaagaaggtgccttggccagagtaacccaccttgccatagccgcgcaccaagacgacatcgagatcatggcccatcacggcgtcttggcctgttttggcaagcatgaccactggtttgcgggagccactgtcaccaatggttcgggcagcccaagggacggcctgtacgccagcacgaccgatgctgagatgcaggttataaggcggcaggaacaaaaaaaagcggcgcgggtgggcgagtacgcggctcaggtatttttggactatggctcggcggctgtcaaagacgccaaggacgcgcaccttgtagatgaccttgtaaaactgctgcaagcgacaaagccaaaagttgtatatacccacaatcttgcggacaaacatgacacccacgtcgccgtggcactccgcacgattgaagccataaagaaactgcccaacgaccaaaagccagaacaagttataggctgcgaggtgtggagggatcaagactggctttgcgacagcgacaaagtggtcatggatctatcagcgcatgaaaacctagccgccgcgctgcttggcgtatatgacagccagatagccgggggcaagaggtacgacctagccacaatggggcgcaggcgcgcgcacgccacttttttcgcaagccacggcgtggacggggcagaatcatga

SEQ ID NO: 76250 - protein, 240 aa, Unknown
  Obtained from environmental sample
  DOMAIN (27)...(157): GlcNAc-PI de-N-acetylase
  misc_feature (1)..(240): Xaa is any amino acid
MFNIATSEIFVPDGTEQEGALARVTHLAIAAHQDDIEIMAHHGVLACFGKHDHWFAGATVTNGSGSPRDGLYASTTDAEMQVIRRQEQKKAARVGEYAAQVFLDYGSAAVKDAKDAHLVDDLVKLLQATKPKVVYTHNLADKHDTHVAVALRTIEAIKKLPNDQKPEQVIGCEVWRDQDWLCDSDKVVMDLSAHENLAAALLGVYDSQIAGGKRYDLATMGRRRAHATFFASHGVDGAES

SEQ ID NO: 76251 - DNA, 903 bp, Unknown
  Obtained from environmental sample
  misc_feature (1)..(903): n is a, c, g, or t
atgcggccattccaactggccccgggcggcggcttgtgcggggccatcttcgcggccgccggccggaaagccctggcggcggaatgcggcagcctcggcggctgtcagcccgggcaggcggtcatcaccggcgctcacgccctgccggccaaatacatcattcatgcggtcggcccgacttggcgcggcggcggccacggcgaagccgccgtcttggccgcctgctacaccgcctcgctgggcttggccgtgaagcacggctgccggtccgtggcttttccgctaatcgcttccggcgtgcgcggctaccccaaggccgcggccttgaatgtggccatatccgccatcggcgaatttctgatgaagcatgagttgaccgtcttcctggtcgtttatgaccaggaagcctatgttttgagcgaaaagctgttcgccgacatccaaaactatattgaccagcactatgtggacgaacacttcgaggagcggccctgcctttctcccgcagattcagagaccgccggggaagggccggcgagtgccgcggcctccccgcggcacttgaatgacctgttcaagcaactggatgaatcattttctcagcggcttttgcgcctcatcgccgaaaagggccgcacccaggtcgagacctacaaaagggccaatatcgaccgcaagcttttttcgaaaatccgcaaggacgtgaactatgccccggccaaggccaccgccgccgccttggccatcgccctggaattgaaccttgatgaaaccaaagaccttttgggccgggccggtttcaccctctcccatagccgcaagttcgacctgatcttggaattcttcatcaaaaggggccactacaacatctttgaaatcaacgaaatccctcttcgattttga

SEQ ID NO: 76252 - protein, 300 aa, Unknown
  Obtained from environmental sample
  SIGNAL (1)...(26)
  DOMAIN (5)...(112): Appr-1-p processing enzyme family
  misc_feature (1)..(300): Xaa is any amino acid
MRPFQLAPGGGLCGAIFAAAGRKALAAECGSLGGCQPGQAVITGAHALPAKYIIHAVGPTWRGGGHGEAAVLAACYTASLGLAVKHGCRSVAFPLIASGVRGYPKAAALNVAISAIGEFLMKHELTVFLVVYDQEAYVLSEKLFADIQNYIDQHYVDEHFEERPCLSPADSETAGEGPASAAASPRHLNDLFKQLDESFSQRLLRLIAEKGRTQVETYKRANIDRKLFSKIRKDVNYAPAKATAAALAIALELNLDETKDLLGRAGFTLSHSRKFDLILEFFIKRGHYNIFEINEIPLRF

SEQ ID NO: 76253 - DNA, 567 bp, Unknown
  Obtained from environmental sample
  misc_feature (1)..(567): n is a, c, g, or t
gtgatagcccgaaaggcgggagtggaaatatcagacacttttttatttccgtccgaaaccacgcctgggttcttcggaacaaaaaggtttgaccggcggaaaaaacaaaaaatccacgttcataccgcctgcggacttctgcatgccgattaccggcatccatctcttgactacgaaaatttattgaaattaaccaaggttttgaccaaaaaaaattcagacgtaaaaaagatggtcagacttatggttttcaatgtcaaagcccataatctcgacgaccattctaaaaatttctcttttttgcttgactcggaaaatcaatggaaactcgctcccgcctatgatttgacgctttcgacgggattccatggagaacatagcgccacggtcaacggcaaagggaaaaacattacggatgccgaccttatcgccgctgccgccaaagttgatatcccggcttcttatgtcagggaaataattcaaataacagaggcggaattagcccattacccggaaatttacgacgaaaattttcgttctgtcaaagtaggggctaaaaatgtctaa

SEQ ID NO: 76254 - protein, 188 aa, Unknown
  Obtained from environmental sample
  DOMAIN (37)...(115): HipA-like C-terminal domain
  misc_feature (1)..(188): Xaa is any amino acid
MIARKAGVEISDTFLFPSETTPGFFGTKRFDRRKKQKIHVHTACGLLHADYRHPSLDYENLLKLTKVLTKKNSDVKKMVRLMVFNVKAHNLDDHSKNFSFLLDSENQWKLAPAYDLTLSTGFHGEHSATVNGKGKNITDADLIAAAAKVDIPASYVREIIQITEAELAHYPEIYDENFRSVKVGAKNV

SEQ ID NO: 76255 - DNA, 723 bp, Unknown
  Obtained from environmental sample
  misc_feature (1)..(723): n is a, c, g, or t
ttggattctgacattgatttgtctggtatatcttttattcagcgtgaaactaaccaggcattaggattaaaatatgctcctgtagatggcgatggatattgtctgttaagagctatactggttttaaaacaacatgattattcatgggcgctggtcagttataagatgcaaaaggaagtttacaacgaattcattaaaatggttgataaaaaaacgatcgaggctcttgttgatacggcattctataatctcagggaagatgtaaagacgttatttggcgttgatctacaatctgacaaccaaattcaggggcagagtagtcttatgtcatggagctttctgttttttaaaaaacaattcattgatagttgcttgaataacgaaaaatgtatcctgcatttacccgagtttatatttaatgataacaagaacttgcttgctttagataccgacacgtcggataggattaaagcggtgaagaattttcttgttgttctttcagatagcatttgctcattatttattgttaatagtaatgtggcatcaatctccttggggaatgaatccttttcaacagatgaagatcttgagtatggttatttaatgaacactggcaatcattatgacgtttacctccctcctgaactttttgctcaggcttacaagttaaacaataaggaaatgaatgcgcaactcgactatttaaatcgttatgcaatttaa

SEQ ID NO: 76256 - protein, 240 aa, Unknown
  Obtained from environmental sample
  misc_feature (1)..(240): Xaa is any amino acid
MDSDIDLSGISFIQRETNQALGLKYAPVDGDGYCLLRAILVLKQHDYSWALVSYKMQKEVYNEFIKMVDKKTIEALVDTAFYNLREDVKTLFGVDLQSDNQIQGQSSLMSWSFLFFKKQFIDSCLNNEKCILHLPEFIFNDNKNLLALDTDTSDRIKAVKNFLVVLSDSICSLFIVNSNVASISLGNESFSTDEDLEYGYLMNTGNHYDVYLPPELFAQAYKLNNKEMNAQLDYLNRYAI

SEQ ID NO: 76257 - DNA, 405 bp, Unknown
  Obtained from environmental sample
  misc_feature (1)..(405): n is a, c, g, or t
atgcgccaggtatcgggaaccctgcgtatcgatctcgctcagttccgcgagaaggaagccttctcgatgttctcctccgatctggatgaagaaaccaagctgcagctcgccaaggggcgcctgatggtggaactcctgaagcaaaacaaggccggccccatggagctcgcggatcaggtgctgatcctctatgcggggacgcatggtcttattatggatataccgctgaaccgtatcgctgagtttgagagcggcttgctcgcggccttcgaaaagaaatacaactccatacgcagtgagattgccgagaagggcgcgctggatattgaacttgaaggcaagatcagggctttcgtcgatgaatataaaaaggaatttttgaatgtcgcgccttctcgaaattaa

SEQ ID NO: 76258 - protein, 134 aa, Unknown
  Obtained from environmental sample
  DOMAIN (2)...(106): ATP synthase alpha/beta chain, C terminal domain
  misc_feature (1)..(134): Xaa is any amino acid
MRQVSGTLRIDLAQFREKEAFSMFSSDLDEETKLQLAKGRLMVELLKQNKAGPMELADQVLILYAGTHGLIMDIPLNRIAEFESGLLAAFEKKYNSIRSEIAEKGALDIELEGKIRAFVDEYKKEFLNVAPSRN

SEQ ID NO: 76259 - DNA, 711 bp, Unknown
  Obtained from environmental sample
  misc_feature (1)..(711): n is a, c, g, or t
atgaatccgggcgcgaccctcgcgctctctcccttttcggaaccgctgctctccgcggatttcacgctcgttaccgaagaggcgctccggctgggcctgcgcgtggtgattgagacgaatggtttggcgttgaccccggagctcgcgcggttttttgccggtctggacgaggagcgatccattatcatcatatcgcccgattacgcgcgcgcggagctgtatcatcaggctaaggggatggatgcccttgcggaattggatgaaaagattcgccgtctttttacctgccgacggcgcaatatctggctgcagatcattcagtttgaaaacagcgacgaagagatggacgccttttatgccaagtggaaggattatgaggacgcgatacttccgcgcaagtacaatacctggcgcggacaacttcccggcagaacggcggttgatctctcgccgattcgccggtctccgtgctggcatctcgcgcgggatctggttgtgcgcgcggacggctcggtgtatgtgtgcaaacaggatattgacggtgctgccgcgatgggcaatgtttttgaggaggggctggcggctgtatggaaccggctggattccgtttggcgcgatcacgcgcggttatatgggcaaggtatactggaggctgcaattcaggatacccggtgcaagcagtgcgacgagtggcatacctttaactactga

SEQ ID NO: 76260 - protein, 236 aa, Unknown
  Obtained from environmental sample
  SIGNAL (1)...(18)
  misc_feature (1)..(236): Xaa is any amino acid
MNPGATLALSPFSEPLLSADFTLVTEEALRLGLRVVIETNGLALTPELARFFAGLDEERSIIIISPDYARAELYHQAKGMDALAELDEKIRRLFTCRRRNIWLQIIQFENSDEEMDAFYAKWKDYEDAILPRKYNTWRGQLPGRTAVDLSPIRRSPCWHLARDLVVRADGSVYVCKQDIDGAAAMGNVFEEGLAAVWNRLDSVWRDHARLYGQGILEAAIQDTRCKQCDEWHTFNY

SEQ ID NO: 76261 - DNA, 666 bp, Unknown
  Obtained from environmental sample
  misc_feature (1)..(666): n is a, c, g, or t
gtgattgtacaggcgcggagcggttccacgaggcttgcgggcaaggcctttctggaactgggcgggcgcgcgctgacccataccgtgctggaggctctccgcgcggcgcgcgaggcggatgtttttatgctggccgttcccgagcgtgatctggaggcattcgcgcccatcgccgaagagcatggattttatatctttggcggcagcgaagaggatgtgcttgcgcgctatgccggcgctgccgacgcctgcggatgcggaaccatagtgcgcgccacgggggataatccttttgtgtgcccgcgcctgctggacgatatcctgcggcatcaccgggaggcaaaggcggatctctcgcactatctcggtattccgccgggtgctggcgtggaggttatcgccgccgacgcgctctttgccgccgccgcgaaggcaagcgcgccttatgagcgggagcatgttacgccgtggatctatggccagcgcgcgcggctcaaagtggaagagcccgatctcgcgcttgatcccgggatccgcctgacggttgacacgatggcggatctggaacgcgcgcgccggatcctcgcggcctgcgggaatctgcgtccgataaccctggaacgtatcctcgcgctccacacggcagacccggacattttttcgtag

SEQ ID NO: 76262 - protein, 221 aa, Unknown
  Obtained from environmental sample
  DOMAIN (1)...(209): Cytidylyltransferase
  misc_feature (1)..(221): Xaa is any amino acid
MIVQARSGSTRLAGKAFLELGGRALTHTVLEALRAAREADVFMLAVPERDLEAFAPIAEEHGFYIFGGSEEDVLARYAGAADACGCGTIVRATGDNPFVCPRLLDDILRHHREAKADLSHYLGIPPGAGVEVIAADALFAAAAKASAPYEREHVTPWIYGQRARLKVEEPDLALDPGIRLTVDTMADLERARRILAACGNLRPITLERILALHTADPDIFS

SEQ ID NO: 76263 - DNA, 819 bp, Unknown
  Obtained from environmental sample
  misc_feature (1)..(819): n is a, c, g, or t
ttgcgaacggcaaccnggcttttgaccggggcgggcgggacgtttgagcttccgcgcgaaacgcggaacattttggcgtttttttcggacggggcgcttgtggtgtcgcgcacgcacagatacgacggccgcgtgcttgcgttttcggaactgctttcgcgcgaagggatacggcataaagagccgttttattccgaccttgcgattttgggcgcgatttacaaccgcggggcggaaaaaaagacgcggacggcgtcggacggctgcgacaaccgcatgcagagggattttgtcgacataatatcgcgcgccgcgtcgcttaaagtgtcggacgtgcatatagaggtcgcggatcagacgtcggtgtatttccgcctggacggaagcatgcaaaggatactggaaaagaacgcggcgtggggcgactcgttcattcgggcggcgttcgcgtcggcggacatttcgaattcgaactatgcccagaacgaatatcagtcggcgcaaaaggacgggcggacgccgcttcgcgggacaaaggatttgtaccttccggcgggcgtgcttgggataaggatgcagttcaatccgatcgcgttcgggtcgcgctatgtggtcatgcgcattttatacgacaaccccagcgaggggataaagaccgaacaggaattcggggagtacgagcagcggcttttgttccgcctgcgttcgtttccgacgggattggtcgtcgtcgcgggaccgacaagctccggcaaatccacgacgctgtttcagaatatgagcatgatgcttaaagagcataattacgagataaattga

SEQ ID NO: 76264 - protein, 272 aa, Unknown
  Obtained from environmental sample
  misc_feature (1)..(272): Xaa is any amino acid
MRTATXLLTGAGGTFELPRETRNILAFFSDGALVVSRTHRYDGRVLAFSELLSREGIRHKEPFYSDLAILGAIYNRGAEKKTRTASDGCDNRMQRDFVDIISRAASLKVSDVHIEVADQTSVYFRLDGSMQRILEKNAAWGDSFIRAAFASADISNSNYAQNEYQSAQKDGRTPLRGTKDLYLPAGVLGIRMQFNPIAFGSRYVVMRILYDNPSEGIKTEQEFGEYEQRLLFRLRSFPTGLVVVAGPTSSGKSTTLFQNMSMMLKEHNYEIN

SEQ ID NO: 76265 - DNA, 450 bp, Unknown
  Obtained from environmental sample
  misc_feature (1)..(450): n is a, c, g, or t
gtgcggccagtacttttcagaatattccgcgaccgtaaccagcgacgccgccgtcccccgccaaacaatgtccgcgcccgccgccgtcgtcagcggcggcacaaggtacaatccgaccattatcactatcgccgccgtcatcgcaagcaaaaacagcgggtacgaaagcccgtcgaacagcgacttccttatcttccgaatccccgccgaaaccatcgtaaggttgtccagcgcaagcgacagtttcgccacgtcgccgaccgaaagcataagcgattccgacgacggaacccagcgcgacaccgattcataaaaagaaagcccgcgttccagtccgtccatccacgcgcgtatcgcaatcgcaaaaggctccgacggtttccgtccgtccttcgattctatccgccatgtcctttccagcgccgacatcaatgtaaaatcgtttcttaa

SEQ ID NO: 76266 - protein, 149 aa, Unknown
  Obtained from environmental sample
  misc_feature (1)..(149): Xaa is any amino acid
MRPVLFRIFRDRNQRRRRPPPNNVRARRRRQRRHKVQSDHYHYRRRHRKQKQRVRKPVEQRLPYLPNPRRNHRKVVQRKRQFRHVADRKHKRFRRRNPARHRFIKRKPAFQSVHPRAYRNRKRLRRFPSVLRFYPPCPFQRRHQCKIVS

SEQ ID NO: 76267 - DNA, 579 bp, Unknown
  Obtained from environmental sample
  misc_feature (1)..(579): n is a, c, g, or t
ttgaatcggcaatatcaccngttctatcagaactggaatgctggtaaattctccgaatacctgaaaaaattcgggcttgacacgaaaaagaaagtcaaagagctttcgcgcggcatgaaagtaaaacttcaaatcgccgcagcgctttctcacaacgcgaagctgctgatactcgacgaaccgaccagcgggcttgaccccgtggcgcgtgacgaaatctgcgacctgctccgcgagttcgtgaccgacgatagcagaagcgtcctgttctcgactcacatcacaaccgatcttgaaaaaaccgccgactacaccacgttcattcttgacggccgtatcgttttttcgggagctaaagacgcgctgcttgaaaaatacgcccgtgttaccggcggcttatcggaaatcaatgaggagcaaaagaaactcgttatcgggtatcgggaacacggcactggctttgagggtttgattgaaaccgccaacgtcgccaaaatgccgcgctgtgttttgtcggagcaagccacgctcgatgaaatcatcatctttatgaataaggaggctaagatcaatgaataa

SEQ ID NO: 76268 - protein, 192 aa, Unknown
  Obtained from environmental sample
  DOMAIN (1)...(111): ABC transporter
  misc_feature (1)..(192): Xaa is any amino acid
MNRQYHXFYQNWNAGKFSEYLKKFGLDTKKKVKELSRGMKVKLQIAAALSHNAKLLILDEPTSGLDPVARDEICDLLREFVTDDSRSVLFSTHITTDLEKTADYTTFILDGRIVFSGAKDALLEKYARVTGGLSEINEEQKKLVIGYREHGTGFEGLIETANVAKMPRCVLSEQATLDEIIIFMNKEAKINE

SEQ ID NO: 76269 - DNA, 441 bp, Unknown
  Obtained from environmental sample
  misc_feature (1)..(441): n is a, c, g, or t
ttgatttccgaagccgtgtatgccggggtccgggaagcccttttgaagcagaacgggaagctcccggcgcgaaacatcttcgagcggctggaggaacgtggactttcgctccaggctcttttgaggggggctgaacgctccggccgggccgatggcgtagcctttcaggccggttttgaacggctgctcctgacgccccgttataaagccttggtcgaggcggccttcagcctcagcgatgcggccgggatgggccagttaagcgatatttcctctttcaacgattgggctttggccgtggcgggtgagatagccggacggccggtggagaaagtggaaagcgttatttccggcggcccggaactcccggaaatattgggcaccgccttgaatgccctggccaccggcctcaaacagcgcggcctcgtaacggggaaataa

SEQ ID NO: 76270 - protein, 146 aa, Unknown
  Obtained from environmental sample
  misc_feature (1)..(146): Xaa is any amino acid
MISEAVYAGVREALLKQNGKLPARNIFERLEERGLSLQALLRGAERSGRADGVAFQAGFERLLLTPRYKALVEAAFSLSDAAGMGQLSDISSFNDWALAVAGEIAGRPVEKVESVISGGPELPEILGTALNALATGLKQRGLVTGK

SEQ ID NO: 76271 - DNA, 834 bp, Unknown
  Obtained from environmental sample
  misc_feature (1)..(834): n is a, c, g, or t
gtgaaatatgatatttctgaaataataagatgcggagatatggtaaaggatatgggcattctcttggacgctatgcttgaaacgaaaaaggcagggaatctcttntacgagataaccaaaaaatatgaaagccggggcattaaaaacggtcgttacaattacgagctatgcaagaaagcgtatatccagagcgcaaaaataatgcggttgctattcgtttcgccgtcagaaaatccggggttggaagttgcgcatcacgcgaagatagaaattgcgaacaagtttatattgccgaaatcgcaatggttcaaaatctacgatgcgagcagaacgaatgacgaaactgaagggaaaacattgctgtcttatttgaacattaacccaaataccgtaaatgaaagcagtataatgtcctttatcggctgtttttctttcgcgataaacagcttgaaccaattcaggctttatggcaaggaagactttaatgagaaacataataaagagtttaacgaaacgtttgatgaaaaacacaacaagaaattcgggaatgaatataagaaggaatccactggattaagtttagtcttcaaaatgactttttttgcggatgcaataaataaaggcattgtcggcaagaccgttgttgccgagcaatcgtttttcgatgatgaaaataatgataagaatgaaagctatgaaagcaagatattcccgttgccgctatttcgctgcgtttacattgacttgatgaagcataaaatcatatctgtcagtgatagcaaggaaaacagcaatgagcttctagaaaagattaattgcgaattgagcaattga

SEQ ID NO: 76272 - protein, 277 aa, Unknown
  Obtained from environmental sample
  misc_feature (1)..(277): Xaa is any amino acid
MKYDISEIIRCGDMVKDMGILLDAMLETKKAGNLXYEITKKYESRGIKNGRYNYELCKKAYIQSAKIMRLLFVSPSENPGLEVAHHAKIEIANKFILPKSQWFKIYDASRTNDETEGKTLLSYLNINPNTVNESSIMSFIGCFSFAINSLNQFRLYGKEDFNEKHNKEFNETFDEKHNKKFGNEYKKESTGLSLVFKMTFFADAINKGIVGKTVVAEQSFFDDENNDKNESYESKIFPLPLFRCVYIDLMKHKIISVSDSKENSNELLEKINCELSN

SEQ ID NO: 76273 - DNA, 618 bp, Unknown
  Obtained from environmental sample
  misc_feature (1)..(618): n is a, c, g, or t
atggaggctaaaatgctcaatgaaaaatcctgtcatagttccagttgcacaaactgttgtcctaatgtgaaacgccagtgctacaaaaagttccttgataagttgactgttatccaacccaagaaagtagagatgaatatgaattgttgccctcttatgaaatgcccttgccttacgcacgagccatataaaccaacattctcacccgacacattcacagacccgcgagacggcaaagcatacaaaaccatcaaaatcggtgagcaagtgtggatggcggaggatctagcgtttgaacatataaatgcaacccccgcagaacatggtcttcgttatgactgggaaactgcaatgaaggttgtaccactgggttggcatttgcctagctatgctgaatggaaacaactattggattttgttggacatgatgccagcaaattacgagctcaatgctataatggaaagaacacctacggatttacagctttgccatccataaatgcccatagcagttggtggagcagtaccgcacgtatcccagaagactctacgtactacaccgcttataggtgttgtacaggggcgaattgccaatgttgttctaataaacctttgtga

SEQ ID NO: 76274 - protein, 205 aa, Unknown
  Obtained from environmental sample
  misc_feature (1)..(205): Xaa is any amino acid
MEAKMLNEKSCHSSSCTNCCPNVKRQCYKKFLDKLTVIQPKKVEMNMNCCPLMKCPCLTHEPYKPTFSPDTFTDPRDGKAYKTIKIGEQVWMAEDLAFEHINATPAEHGLRYDWETAMKVVPLGWHLPSYAEWKQLLDFVGHDASKLRAQCYNGKNTYGFTALPSINAHSSWWSSTARIPEDSTYYTAYRCCTGANCQCCSNKPL

SEQ ID NO: 76275 - DNA, 891 bp, Unknown
  Obtained from environmental sample
  misc_feature (1)..(891): n is a, c, g, or t
gtgactttcgtcatatacgtacccgcgtttccatacccagatagcaagttttttatattcataacactttttttatatttgattttacaggtacaggaaaacaaatgtacactcagtttcatgaagggtaaaaaaacccatnttctacaagctggtagaaccttaccacgccaacggcctctatggcggctggttgctaaatattggtcaatttatctgctgatgctcccaggtttcctcttttttatcatttaccgttatatccccataggcggccttgtcatggtctttaagaattaccgtattactcggggtatatttgccagcgattggtacggatggcagaatttcatcgatctcttttccgctcccgtattccccatggtaatccgaaataccatctttatcagtctgtataaattaatattgggctttcccgcgcctattatcgttgccctgctgctaaacgaaataaataatgtggcgtttaaaagaaccctccaaacagtcctatatttaccccattttgtttcctggattgtgttggcaggtataatcaacgccctgcttgccccccatacgggcgctattcccatgtttttacaacggactttcggaatccatatagacctcctcatggatcctaataattttgtagggctacttgtaggttctgatatatggaaagaagtaggctggagcagcattatctatttagcttccatcaccagtattgatactgaattatacgaggcagccatagtagacggagccaacagatttcaacaattaattaaaattaccctgccccttcttgttccggttattataaccatgttcctgctccgggttggcaggattcttgacgcggggttgagcaaatatttttag

SEQ ID NO: 76276 - protein, 296 aa, Unknown
  Obtained from environmental sample
  misc_feature (1)..(296): Xaa is any amino acid
MTFVIYVPAFPYPDSKFFIFITLFLYLILQVQENKCTLSFMKGKKTHXLQAGRTLPRQRPLWRLVAKYWSIYLLMLPGFLFFIIYRYIPIGGLVMVFKNYRITRGIFASDWYGWQNFIDLFSAPVFPMVIRNTIFISLYKLILGFPAPIIVALLLNEINNVAFKRTLQTVLYLPHFVSWIVLAGIINALLAPHTGAIPMFLQRTFGIHIDLLMDPNNFVGLLVGSDIWKEVGWSSIIYLASITSIDTELYEAAIVDGANRFQQLIKITLPLLVPVIITMFLLRVGRILDAGLSKYF

SEQ ID NO: 76277 - DNA, 357 bp, Unknown
  Obtained from environmental sample
  misc_feature (1)..(357): n is a, c, g, or t
atggttcgcgccgataatcttcggatcaaacaggtgatatcgaatttagtcgaaaattccatacggtatcgcggtgaaaacgcaccttacaccaaaatcaccatttacgatatgcacgaaaaggttttggtggaagtgtcggataatgggattggcgtttcggaaagcgatataccgcgcatatttgagcggtttttccgagccgacaaagcgcgttcgcgcgaacaaggcggttccggcttgggcttagcgattgtcaaacatatcatcagcgcgcataatcaaaatatttccgtccgaagtacgctcgggcgaggctctacattcgggtttaccttagataaatcaaatgtctaa

SEQ ID NO: 76278 - protein, 118 aa, Unknown
  Obtained from environmental sample
  DOMAIN (4)...(116): Histidine kinase-, DNA gyrase B-, and HSP90-like ATPase
  misc_feature (1)..(118): Xaa is any amino acid
MVRADNLRIKQVISNLVENSIRYRGENAPYTKITIYDMHEKVLVEVSDNGIGVSESDIPRIFERFFRADKARSREQGGSGLGLAIVKHIISAHNQNISVRSTLGRGSTFGFTLDKSNV

SEQ ID NO: 76279 - DNA, 834 bp, Unknown
  Obtained from environmental sample
  misc_feature (1)..(834): n is a, c, g, or t
atgttcgacaaagtgctggatataaacttttgtcatctgcaacaagagccgtccaatgccattcggttgtttataagacgctacgcactggagcataatctcgcattttacgatatgaggacacacgagggatttttgcggaatttgatgatacgctgcaccactacaggcgattggatgcttatcgtgatgtttgcatacgatgaccaagccgccataaatgccttaatgacggcgataaaacaggcatttccgcaaatcacatcgttgatatatgtggtaaatgaaaaattgaacgatacgatatatgatttggacctccaactgtttcacggccaaagtttcatcaccgaagaaatgccggctcacataaacggacaaccaccgttgaaattccgcataggcgccaaatccttttatcaaaccaattccgttcaggccggacatttgtatagaataggcgcagattttgcggattttaaaggccatgaaaccgtttacgacctatataccggcgccggtacaatcgctcaatacgtggcaaagtccgtaaaaaacatagtcggcatcgaatatatcgaatccgccatcgaagacgccaaaatcaatgccaaactcaatcatatcgaaaacacagcattcttcgcaggagatatggttgatgtgctaaacgatgattttgtaaacacgcacggcaagcccgatgtcatcatcaccgaccccccacgcgcaggcatgcacgaaaaagtagtccgacaaattctcaagataatccagacnaggttttatacatcagctgcaattccgccacacaagcacgagatttggcattga

SEQ ID NO: 76280 - protein, 277 aa, Unknown
  Obtained from environmental sample
  misc_feature (1)..(277): Xaa is any amino acid
MFDKVLDINFCHLQQEPSNAIRLFIRRYALEHNLAFYDMRTHEGFLRNLMIRCTTTGDWMLIVMFAYDDQAAINALMTAIKQAFPQITSLIYVVNEKLNDTIYDLDLQLFHGQSFITEEMPAHINGQPPLKFRIGAKSFYQTNSVQAGHLYRIGADFADFKGHETVYDLYTGAGTIAQYVAKSVKNIVGIEYIESAIEDAKINAKLNHIENTAFFAGDMVDVLNDDFVNTHGKPDVIITDPPRAGMHEKVVRQILKIIQTRFYTSAAIPPHKHEIWH

SEQ ID NO: 76281 - DNA, 831 bp, Unknown
  Obtained from environmental sample
  misc_feature (1)..(831): n is a, c, g, or t
atgcagctgatagtcgcggaaaaaccaagcgtggcgagggaactggcgaaggccataggcgtgtcggggaagggcacgggatgcatcgaggacaaggcgaagggcgtgacggtcacatggtgcgtcggccacctcgtcgagcagaaggacccgggcgaggtcagggacgaatggaaggagtgggactggccgctcctgccgatggaccccggcgagttcccgctgaaggcgatacagcagacgaaggaccagtggaaggtggtgtccgcactgatgaagagggccgacgtgaaggaggtcgtctgcgccaccgactccgggcgcgagggggagctgatatttcactactgctacgaactggcgaagtgcaaaaagcccgcgaagaggctctggacgaattctatgacccaggaggcgctggcggaggcgtacggaaagatcgagccgatagagaagtacgccggcctgcgcgacgccgcggtgtgcaggagcgaggcggactggctggtgggcttcaacggcacgcgcgccctctcgctgctcgcggagagaatgttcggcaggggcaggggcggcgcctggacggtcggcagggtggtcacccccacgctggcgatactggtggccagggagagggagataaaggacttcaggccgcgcgactactggaccataaaggcgacgttctcgcacgcgaaggggacgtacgagggcagatggttcaggggcgcagccggggacgcggaagcgcagcagagcgtacccacggaggcggaggctgaggggatactggcgagggtcaggggcgcggcctcggccgatctgacttga

SEQ ID NO: 76282 - protein, 276 aa, Unknown
  Obtained from environmental sample
  DOMAIN (1)...(133): Toprim domain
  misc_feature (1)..(276): Xaa is any amino acid
MQLIVAEKPSVARELAKAIGVSGKGTGCIEDKAKGVTVTWCVGHLVEQKDPGEVRDEWKEWDWPLLPMDPGEFPLKAIQQTKDQWKVVSALMKRADVKEVVCATDSGREGELIFHYCYELAKCKKPAKRLWTNSMTQEALAEAYGKIEPIEKYAGLRDAAVCRSEADWLVGFNGTRALSLLAERMFGRGRGGAWTVGRVVTPTLAILVAREREIKDFRPRDYWTIKATFSHAKGTYEGRWFRGAAGDAEAQQSVPTEAEAEGILARVRGAASADLT

SEQ ID NO: 76283 - DNA, 876 bp, Unknown
  Obtained from environmental sample
  misc_feature (1)..(876): n is a, c, g, or t
atgggagaaactgttcaaacggtggtacgtgccggagggagtggacacggagccgttcaaaaaatggatgtggaaataaggaaaggaaaagggaatgcagctgatagtcgcggaaaaaccaagcgtggcgagggaactggcgaaggccataggcgtgtcggggaagggcacgggatgcatcgaggacaaggcgaagggcgtgacggtcacatggtgcgtcggccacctcgtcgagcagaaggacccgggcgaggtcagggacgaatggaaggagtgggactggccgctcctgccgatggaccccggcgagttcccgctgaaggcgatacagcagacgaaggaccagtggaaggtggtgtccgcactgatgaagagggccgacgtgaaggaggtcgtctgcgccaccgactccgggcgcgagggggagctgatatttcactactgctacgaactggcgaagtgcaaaaagcccgcgaagaggctctggacgaattctatgacccaggaggcgctggcggaggcgtacggaaagatcgagccgatagagaagtacgccggcctgcgcgacgccgcggtgtgcaggagcgaggcggactggctggtgggcttcaacggcacgcgcgccctctcgctgctcgcggagagaatgttcggcaggggcaggggcggcgcctggacggtcggcagggtggtcacccccacgctggcgatactggtggccagggagagggagataaaggacttcaggccgcgcgactactggaccataaaggcgacgttctcgcacgcgaaggggacgtacgagggcagatggttcaggggcgcagccggggacgcggaagcgcagcagagcgtacccacggaggcggaggctga

SEQ ID NO: 76284 - protein, 291 aa, Unknown
  Obtained from environmental sample
  misc_feature (1)..(291): Xaa is any amino acid
MGETVQTVVRAGGSGHGAVQKMDVEIRKGKGNAADSRGKTKRGEGTGEGHRRVGEGHGMHRGQGEGRDGHMVRRPPRRAEGPGRGQGRMEGVGLAAPADGPRRVPAEGDTADEGPVEGGVRTDEEGRREGGRLRHRLRARGGADISLLLRTGEVQKAREEALDEFYDPGGAGGGVRKDRADREVRRPARRRGVQERGGLAGGLQRHARPLAARGENVRQGQGRRLDGRQGGHPHAGDTGGQGEGDKGLQAARLLDHKGDVLAREGDVRGQMVQGRSRGRGSAAERTHGGGG

SEQ ID NO: 76285 - DNA, 966 bp, Unknown
  Obtained from environmental sample
  misc_feature (1)..(966): n is a, c, g, or t
atggggtatctgancgcgtccctgcgaaaaagatacccggaagccaggataatcgcgctccacgctgctgaaccaaaaacgatcccaaatgaaaaccgtcccgacgcgttctggcattcgggaacggaaaacggcctgcgttttttcctggaacgggaaattcccgatattgaagcctcggaaatcaaggtcatcgaatggcggcccgccctggcaatatacggtgaaatttaccgctcgcttttttccgttaccgtggattttatcaaacagatcgacgcctcggcccggaccttgcgtcaattcgggaaaaggtggttcaaaaattttttccgtaatctttgcctgttgtccgaaataatctgccccggcgttttttcatttcccgtaataattaccggagccgggccaagcctggaagatgttcttccggttatccgcaaggagcgcgaaaaggcattgttgcttgcggtttcatcttcggccgccgcgttgacggccgggggtctgaagcccgacatgataataagcacggacggcggcggctggtcccttcttcatctgtacgaatgcgtcagaaacaattacgcagtagtctacgccgtcagcatgatcgcggccctgccttcacagtgcgccagcgccccgcttctgctgattagcgacggaagcctttggcagacgttaatcctgaacgcgctgggaataccgtttgttaccctgccccagcggggcactgtttccgcgtcagccctggatgccgcgtttgccatgacttccggcaaagtgtttgtggccggagtcgatctcgcgcacagggacatacaaacccacgcaaggccgtacagttttgacaggatgtggcgtgaaaaggcgtcaaggacaaatcctttttactcccagagtttttgcgcgatcgggtatgatacgggccgggggcagccactcgtgccgattctgtcatga

SEQ ID NO: 76286 - protein, 321 aa, Unknown
  Obtained from environmental sample
  misc_feature (1)..(321): Xaa is any amino acid
MGYLXASLRKRYPEARIIALHAAEPKTIPNENRPDAFWHSGTENGLRFFLEREIPDIEASEIKVIEWRPALAIYGEIYRSLFSVTVDFIKQIDASARTLRQFGKRWFKNFFRNLCLLSEIICPGVFSFPVIITGAGPSLEDVLPVIRKEREKALLLAVSSSAAALTAGGLKPDMIISTDGGGWSLLHLYECVRNNYAVVYAVSMIAALPSQCASAPLLLISDGSLWQTLILNALGIPFVTLPQRGTVSASALDAAFAMTSGKVFVAGVDLAHRDIQTHARPYSFDRMWREKASRTNPFYSQSFCAIGYDTGRGQPLVPILS

SEQ ID NO: 76287 - DNA, 672 bp, Unknown
  Obtained from environmental sample
  misc_feature (1)..(672): n is a, c, g, or t
ttggatagcttgatgcgtttcaatattttgacgatttttcccgaagtaatcgcgccgtactgcgcggcgtcaattatcggacgggcgcacgccaagaaaatgctagatatcaacatcgtcaatatccgggacttctctgcggacaaacaccataagaccgacgacgagccgttcggcggcgggccgggcatggtcatgctagcgcagccgatttacgatagtatcgcctctctgcggcttccgccccaaagccgcgtagttttgaccagtccgcagggacggccgtggacgcaggcgcttgccaaggaatttgccgccgaggagaatatcacaattatttgcgggcattacgagggtgtggacgaaagagtaatgccgttgattaccgacgagatttctatcggcgattatgttttgactggcggagaattgcctgcgctagttatgctcgacagtattgcgcgtatgctgcccggcgtggtcggcaaagcggaatccgtcgtcaacgaaacattctttgacggcgcgtcttttgaccacccgcattacacgcgccctgcggattttcgcggcttgaaagttcccgaggttctcctcaatggcaatcacaaagccatcgccgcctggcgcaaagaacaagccgaagggaaaagaaaaagggttagggcttag

SEQ ID NO: 76288 - protein, 223 aa, Unknown
  Obtained from environmental sample
  DOMAIN (26)...(223): tRNA (Guanine-1)-methyltransferase
  misc_feature (1)..(223): Xaa is any amino acid
MDSLMRFNILTIFPEVIAPYCAASIIGRAHAKKMLDINIVNIRDFSADKHHKTDDEPFGGGPGMVMLAQPIYDSIASLRLPPQSRVVLTSPQGRPWTQALAKEFAAEENITIICGHYEGVDERVMPLITDEISIGDYVLTGGELPALVMLDSIARMLPGVVGKAESVVNETFFDGASFDHPHYTRPADFRGLKVPEVLLNGNHKAIAAWRKEQAEGKRKRVRA

SEQ ID NO: 76289 - DNA, 363 bp, Unknown
  Obtained from environmental sample
  misc_feature (1)..(363): n is a, c, g, or t
gtggggacaaaagcggcaaaatctgttagtataaagactatggcgcagcttaaaaatttttcagcgtccaccgtgcgcaggtttccgtcttatctccctgtaatccgggatttacagcaggaagggaaagaatttgtctctgccactgtcattgcggatgtattggagcttgaccccatccaggttcgcaaagatctggcgatgaccgggatcgccggaacgcctcaaaaagggtttcctgttgaagatataatttgcgcaattgagcattatctgggctgggattccaccagcgatgccatactggtcggcacgggaaatcttggttcggccctgctcggctnctcggccgatctgtcatga

SEQ ID NO: 76290 - protein, 120 aa, Unknown
  Obtained from environmental sample
  DOMAIN (18)...(67): Putative DNA-binding protein N-terminus
  misc_feature (1)..(120): Xaa is any amino acid
MGTKAAKSVSIKTMAQLKNFSASTVRRFPSYLPVIRDLQQEGKEFVSATVIADVLELDPIQVRKDLAMTGIAGTPQKGFPVEDIICAIEHYLGWDSTSDAILVGTGNLGSALLGXSADLS

SEQ ID NO: 76291 - DNA, 588 bp, Unknown
  Obtained from environmental sample
  misc_feature (1)..(588): n is a, c, g, or t
gtgtcaaccctgcattgcgattacaccgacccactggctctgcacgcgataaagatgataagcgaccacctaatcgattccttcaagggcgataaggaagcgcgggcgataatgcacaacgcccagtgccttgcgggtatggccttctccaatgcccttttgggaatcacgcactctatggcccacaagaccggagcggccttttccggagggcacatcgtccacggcgcggccaacgctatgtacctgcccaaggtgatccaatacaacgccaaagaaagcgctgccgccgaacgttacgcggagattgcccgctttatcgcgctccctgcgcatgatgccggagagggaaccaaatcacttattaatcaaatcaggacgatgaacaaagcgttggacattcctctgtgtatcagagattatgaaggcggcattataggagaacaggagtttcttgaaaaactgcctgcagttgcggctaacgctgtaggtgacgcctgtaccggctccaacccgcgcaaaatcaccccgcccgaaatggagctgcttctcaaagcctgttactacgacacggatataaatttttaa

SEQ ID NO: 76292 - protein, 195 aa, Unknown
  Obtained from environmental sample
  DOMAIN (1)...(180): Iron-containing alcohol dehydrogenase
  misc_feature (1)..(195): Xaa is any amino acid
MSTLHCDYTDPLALHAIKMISDHLIDSFKGDKEARAIMHNAQCLAGMAFSNALLGITHSMAHKTGAAFSGGHIVHGAANAMYLPKVIQYNAKESAAAERYAEIARFIALPAHDAGEGTKSLINQIRTMNKALDIPLCIRDYEGGIIGEQEFLEKLPAVAANAVGDACTGSNPRKITPPEMELLLKACYYDTDINF

SEQ ID NO: 76293 - DNA, 432 bp, Unknown
  Obtained from environmental sample
  misc_feature (1)..(432): n is a, c, g, or t
atgatgaccatgacgcaaaaaatactggcggcgcacgctaataaagaaagcgtgactgcgggacagttaattatggctaacgtcgaccgcgtgctggggaacgacattacctcgccggtggcaatcgaagagttttccaagctcgaaaacgccgcgcccttcgacgcggaaaagattacgctcgtaatggaccatttcgcgccgaacaaggacattaaggcggccgagcaatgcaaaatgtgccgcgacttcgccgcgaaattttcacttccgcacttttacgacggcggcgaaatgggcgtcgagcacgctcttttacccgaaaaaggtctcgtcaccgcgggcgacgtcgttatcggagcggacagccacacatgcacgtacggcgctctcggagcgtttccacgggggctcggccgatctgatccatga

SEQ ID NO: 76294 - protein, 143 aa, Unknown
  Obtained from environmental sample
  misc_feature (1)..(143): Xaa is any amino acid
MMTMTQKILAAHANKESVTAGQLIMANVDRVLGNDITSPVAIEEFSKLENAAPFDAEKITLVMDHFAPNKDIKAAEQCKMCRDFAAKFSLPHFYDGGEMGVEHALLPEKGLVTAGDVVIGADSHTCTYGALGAFPRGLGRSDP

SEQ ID NO: 76295 - DNA, 468 bp, Unknown
  Obtained from environmental sample
  misc_feature (1)..(468): n is a, c, g, or t
atggaaaataacggctatcactatgaggctgcggacgcaagcttcgagcttctgacggcgggagttctcggccgtagaaaaaagttcttcgatttaaaattttttaaaacgataggcgaatcggccgaggcgaacggcgaatatagcgcgtcggctatgataaaagtcgaagtcgacggcaaaacggaaatcaccgcggcgaccggaaagggcccggtaaacgcgctcgaccttgctttacgaaaagctcttaccgtgttttatccttccataggcgccatgcatttgacggactataaggtgcgcgtactcgaacagagcaaaaccacggcggccaaagttcgagtgcttatcgaaagctttgacggtgaaaaaagttggacgacggtaggcgtgtccgaggatattatcgaagctagtttaatcgcgctaaccgactctatagaatataaactaagtaaaaagtga

SEQ ID NO: 76296 - protein, 155 aa, Unknown
  Obtained from environmental sample
  DOMAIN (9)...(152): LeuA allosteric (dimerisation) domain
  misc_feature (1)..(155): Xaa is any amino acid
MENNGYHYEAADASFELLTAGVLGRRKKFFDLKFFKTIGESAEANGEYSASAMIKVEVDGKTEITAATGKGPVNALDLALRKALTVFYPSIGAMHLTDYKVRVLEQSKTTAAKVRVLIESFDGEKSWTTVGVSEDIIEASLIALTDSIEYKLSKK

SEQ ID NO: 76297 - DNA, 867 bp, Unknown
  Obtained from environmental sample
  misc_feature (1)..(867): n is a, c, g, or t
ttgatagcgcgcagaacagccgcaaactgcgttttgcacgtacgcaaggcggctacggtccgtgctttgcccgcacgcgggatgtccgcaagccgtagtttgcatgtgcgcagggcggaggcgacccacgctttgctcctcacacgcaaaatgtccgcaaaccgagatttgcacgcgagcaaagcggccacaacccgcagcctggatgcacgcgaaacaaccagaaacctcgatttgcacacaagcaaagctgccgcgacccgcaacccgcatgcacgcaaaatgtccgcaagccgtagcttgcacatgagcaaagcagccacaacccgcaatccgcatgcacgtgaaacaaccacaagccccgatttgcacacaagcaaagcagccgcaagctgtgatttgattgagcacagaacagccggtatccgtagtttgcacacacgcagggcggaggcggcatgcgctttgcctatacgcagaatgtccgcaagccgtagcttgcacatgagcaaagcggacataagccgtgatttgatagcgcgcagagcagccggaatccgtagtttgcacgtgcgcaaggcggatgcggtccgcgttttgcccgcacgcaaaatgtccgcaaaccttgatttgcacacaagcaaagcggatgtaagctgtgctttgcatgtgcgcaaagcggctacggtccgcgccttgcccgcgcgcaaaatgtccgcaagccttgatttgcacacaagcaaaacggccgtaagccgtgatttgatagcgcgcagaacagccggaatccgtagtttgcacgtacgtaaggcggatgcggcccacgcttgctcacatcagagcgatctcgcgataacgnnnnnntaa

SEQ ID NO: 76298 - protein, 288 aa, Unknown
  Obtained from environmental sample
  misc_feature (1)..(288): Xaa is any amino acid
MIARRTAANCVLHVRKAATVRALPARGMSASRSLHVRRAEATHALLLTRKMSANRDLHASKAATTRSLDARETTRNLDLHTSKAAATRNPHARKMSASRSLHMSKAATTRNPHARETTTSPDLHTSKAAASCDLIEHRTAGIRSLHTRRAEAACALPIRRMSASRSLHMSKADISRDLIARRAAGIRSLHVRKADAVRVLPARKMSANLDLHTSKADVSCALHVRKAATVRALPARKMSASLDLHTSKTAVSRDLIARRTAGIRSLHVRKADAAHACSHQSDLAITXX

SEQ ID NO: 76299 - DNA, 798 bp, Unknown
  Obtained from environmental sample
  misc_feature (1)..(798): n is a, c, g, or t
ttgcgcacaggcatacgcaacgtgggcatgtaccgtatgcaggtgttcgacagcgtaaccacaggtatgcactggcacaggcacaagacaggcgcacgccactttgagcagtacagggcagcaggacaaaaaatgcctgtggcggtggcgcttggcggcgaccctgtgtacgcctactgcgccaccgctccgctccccgacaacgtagatgagtacctgcttgcagggtttttgcgcagcaagcctgtgcagctggtgcgctgcattacgcagcccctcgaagttcccaccgatgcggatattgtaattgagggctacgttgaccctgccgagccgcttgccgtagagggtccgtttggcgaccacacaggcttttactcgcttgaggattactatccgcgctttcacgtaacctgcattacgcaccgcaacaatgccgtttaccctgccaccgtagtgggtattccaccgcaggaagacgcctacattgggcgagcaaccgagcgcatttttttagcgcccattcggattaccatgctccccgaagtggtggatatgcacctgccgtttgagggcgtggcgcacaacatcgccgttgtaaaaattaaaaaggcgtatccgcgacaggcgcaaaaagttgccaacgcgctgtggggcgcagggcaaatgatgctcaacaaaatgctggtagtagttgacgaagaggtgaacttgcaggattacgctgcgctgcgccaatgcttgctgcgcagcttcaaccctgcaaccgatgtttactttggtagcggccccgcttga

SEQ ID NO: 76300 - protein, 265 aa, Unknown
  Obtained from environmental sample
  DOMAIN (1)...(263): 3-octaprenyl-4-hydroxybenzoate carboxy-lyase
  misc_feature (1)..(265): Xaa is any amino acid
MRTGIRNVGMYRMQVFDSVTTGMHWHRHKTGARHFEQYRAAGQKMPVAVALGGDPVYAYCATAPLPDNVDEYLLAGFLRSKPVQLVRCITQPLEVPTDADIVIEGYVDPAEPLAVEGPFGDHTGFYSLEDYYPRFHVTCITHRNNAVYPATVVGIPPQEDAYIGRATERIFLAPIRITMLPEVVDMHLPFEGVAHNIAVVKIKKAYPRQAQKVANALWGAGQMMLNKMLVVVDEEVNLQDYAALRQCLLRSFNPATDVYFGSGPA

SEQ ID NO: 76301 - DNA, 540 bp, Unknown
  Obtained from environmental sample
  misc_feature (1)..(540): n is a, c, g, or t
atgaatcccaggcttttgttccctttggaagagtatcaggcccgcgtaaggcgcgtcaaggaaagcatgcaccgctccggcctggaagtcctcctggtcaccgacccggccaacatgaattacctgagcggttatgacggttggtctttttatgtccaccaaggccttttgctgctcatggaccgggaggagccggtctggttcgggcggatgcaggattcaaacggggcccggctgaccacctggctggccgatgacaacgtccgcggctacgaagaccgctacgttcagtccaacctccgccacccaatggatttcgcggccggcctgttggctgaattcggggcggaaaagcgccggctgggcgtggagatggacagctattacttcaccggccagtgcctggcctcgctcaccgcanatctcccggaggcccggatactcgacgccaacctcctggtcaactgggtgaggcttataaagtcgcccacggaaatagcctacatgcgggacgcggcccgcattgtcgaaaaagcatga

SEQ ID NO: 76302 - protein, 179 aa, Unknown
  Obtained from environmental sample
  misc_feature (1)..(179): Xaa is any amino acid
MNPRLLFPLEEYQARVRRVKESMHRSGLEVLLVTDPANMNYLSGYDGWSFYVHQGLLLLMDREEPVWFGRMQDSNGARLTTWLADDNVRGYEDRYVQSNLRHPMDFAAGLLAEFGAEKRRLGVEMDSYYFTGQCLASLTAXLPEARILDANLLVNWVRLIKSPTEIAYMRDAARIVEKA

SEQ ID NO: 76303 - DNA, 819 bp, Unknown
  Obtained from environmental sample
  misc_feature (1)..(819): n is a, c, g, or t
atgctcaaggcggtcggagacgcgattaaggcggaaaacctgaaaagcaacagggcaattcaatgggggatggggcctgcgggcaacgccgtcagtatatacaccaaccagatatatgccgacgccagaaaatgggtcgccgaggaaatgatagattatgtagtgccgcagaattattatgcccctactgtttatgacacccagctaggtttatggaacggttatatgaacggcactttcgaagctaattatgatccggtcgtaccccgcaggccgagcagggtcaacctgtatatgggccataccctggaaaggataaacagcaacgccaactggaacggcgtcggcgaactgctgaggcggctgactctcaatgagagcggcccttatcccaatgttaaaggcaatgttttctttacttacaatcttttagcggccacaaccggtactttgggcgattccaatgagctggtaaaggcaaaatggaactacccgacgctcgttccccaggcaccctggctgaacaacgtcacgcccactccgccggcgaatgtccaacagaacggcggcgtccttacatggaacgacacgggcaacacgcggtactatgcggtttaccgtgtgcccgtcggttccgttaacgcggtagacgtgattaaggatccccggaacatggttgccagggtttataaggtgccgggtgccgcgcagacatttaccgacaccggcgttaattaccactatatgtacacttacatagtgacctcggtgagtaacgccaatattgagtctgcgccgacggtagcgattaagaattag

SEQ ID NO: 76304 - protein, 272 aa, Unknown
  Obtained from environmental sample
  misc_feature (1)..(272): Xaa is any amino acid
MLKAVGDAIKAENLKSNRAIQWGMGPAGNAVSIYTNQIYADARKWVAEEMIDYVVPQNYYAPTVYDTQLGLWNGYMNGTFEANYDPVVPRRPSRVNLYMGHTLERINSNANWNGVGELLRRLTLNESGPYPNVKGNVFFTYNLLAATTGTLGDSNELVKAKWNYPTLVPQAPWLNNVTPTPPANVQQNGGVLTWNDTGNTRYYAVYRVPVGSVNAVDVIKDPRNMVARVYKVPGAAQTFTDTGVNYHYMYTYIVTSVSNANIESAPTVAIKN

SEQ ID NO: 76305 - DNA, 663 bp, Unknown
  Obtained from environmental sample
  misc_feature (1)..(663): n is a, c, g, or t
ttgggcgcggcgcccatggcttatgtgctttggagccgcttttttgaagcacgaccccgaagaccccctctggcccaaccgcgaccgcttcatcctttcgcccggccacggctcggccctgctttacgcctggctgcacctggccggctacgggttgagcctggaagacctcaaggccttccgccaatggggcagccggacccccggacatcccgaatacggccgcaccgcaggcgtggaagccaccaccggccccttgggacacggcttcgccatgggggtgggcctggccatagcggaaagaatgctggcccagcgcttcaaccgccccaagttcacccttttcgaccaccatgtttacgccctggtttcggacggcgacctgatggaaggggtctccgccgaagcggcctccctggccggaactctcggcctcggccgcctcatttatgtttacgacgacaaccagatgaccatcgaggggcccaccgacctggccttcaccgaagacgtgcgggcccgtttttccgcctatggctggcaggtcatagtggtcacccaaggcgaggatctgggcagcatccagcaagccctggaaaacgcccgggccgagcaggaccgccccagcctggttatggtccgcaccaagctgggggccggtag

SEQ ID NO: 76306 - protein, 220 aa, Unknown
  Obtained from environmental sample
  misc_feature (1)..(220): Xaa is any amino acid
MGAAPMAYVLWSRFFEARPRRPPLAQPRPLHPFARPRLGPALRLAAPGRLRVEPGRPQGLPPMGQPDPRTSRIRPHRRRGSHHRPLGTRLRHGGGPGHSGKNAGPALQPPQVHPFRPPCLRPGFGRRPDGRGLRRSGLPGRNSRPRPPHLCLRRQPDDHRGAHRPGLHRRRAGPFFRLWLAGHSGHPRRGSGQHPASPGKRPGRAGPPQPGYGPHQAGGR

SEQ ID NO: 76307 - DNA, 513 bp, Unknown
  Obtained from environmental sample
  misc_feature (1)..(513): n is a, c, g, or t
gtggatagcccaggttcccatttcgctgcgcaccacgctcaacaggttggcgaccagcaggaaggaccagaaaagcagcagcccggaacgggggatcgggcgtttgatatgcatggcgttccgggaggcggcataaaccagggcaaagaaaattccggcaatcaggcaggccacgcagggcgaggtgagggccagcaggagcagcagcaaacagtccaggcacaaggctgccccggcaacggcaagcgtcagggccggccgccccacgattgccagcagcgcgagaaggccgaagcctgccgtgcctatccaccacacggaaacgcccgcgatggtggtgtcctggtagatggtgcagccggcggtaaagcacaggtcaatggcattgccccaggcgctccaactcgtgaagcccgcgccgagaaggctcaagaaaaaggaaaagggcatgaatcccctgttcggggcggttcgcagcataggatgtctcagggttcagacaggttttgctga

SEQ ID NO: 76308 - protein, 170 aa, Unknown
  Obtained from environmental sample
  misc_feature (1)..(170): Xaa is any amino acid
MDSPGSHFAAHHAQQVGDQQEGPEKQQPGTGDRAFDMHGVPGGGINQGKENSGNQAGHAGRGEGQQEQQQTVQAQGCPGNGKRQGRPPHDCQQREKAEACRAYPPHGNARDGGVLVDGAAGGKAQVNGIAPGAPTREARAEKAQEKGKGHESPVRGGSQHRMSQGSDRFC

SEQ ID NO: 76309 - DNA, 531 bp, Unknown
  Obtained from environmental sample
  misc_feature (1)..(531): n is a, c, g, or t
gtgcaattcacgacgaaccttggctctttcaccgtcgagttggagccgcaggcagccccaaagaccgtcgagaattttttggattacgccaaatcggggttctacaacggaaccacgttccaccgcgtgatcagcaccttcatggtccaaggcggggggtacacgaccaccggcgaagaaaaggcgacaggggggcccatagtgaacgaagccaagcgaacgttcgagatgggcctaaagaacgacaggggcaccatagccatggcgcgcacgcccatccctgacagcgcgacgtgccagtttttcataaacgtggttaacaacgcatttttgaacttccctgggcaggacggggccggctactgcgtttttgggcgcgtggtggatggcatggagaccatagacaaaatcaaggacgtcaaaaccatcatccccagcgacagaccgatcagcccagtggtcatcacggacaccaaagtgacagccccgaaagcccctgccaccccaaaaaactccacgccaaaaaaataa

SEQ ID NO: 76310 - protein, 176 aa, Unknown
  Obtained from environmental sample
  DOMAIN (3)...(161): Cyclophilin type peptidyl-prolyl cis-trans isomerase/CLD
  misc_feature (1)..(176): Xaa is any amino acid
MQFTTNLGSFTVELEPQAAPKTVENFLDYAKSGFYNGTTFHRVISTFMVQGGGYTTTGEEKATGGPIVNEAKRTFEMGLKNDRGTIAMARTPIPDSATCQFFINVVNNAFLNFPGQDGAGYCVFGRVVDGMETIDKIKDVKTIIPSDRPISPVVITDTKVTAPKAPATPKNSTPKK

SEQ ID NO: 76311 - DNA, 819 bp, Unknown
  Obtained from environmental sample
  misc_feature (1)..(819): n is a, c, g, or t
atgggcggtctgttgatagttggctccatgatcatctcgacggttttttggtgcaaactgggcagtggcgtaatatgggttgcgcttctcagccttgtcgggtttgccgcagtcggcgcgtacgacgatgcgaaaaagttactccgcaagcaaaacaaggggctaagcggctggaaaaagatggccgccctcaccatcataagtttgtttgtggcttggctgatactgcactttgatctgaggggggtcgaaactagccgtctctcggtgccattcttcaagaactggcggcccgacattggcatttttctcataccttggatttggctggtgatggttgggacaagcaacgccgtcaacctaacggatggccttgacggcttggccataggcgggattcttattgtgagcgccacattcaccgcgctggcatacgtggtgggacactacggttatgccaactatctatttgtcccatttgtcctaggcgcttccgagttgacagtttttcttggcgccatgggtggcgcatcgttgggattcctgtggttcaatgcttaccctgcggagatttttatgggcgacacaggctcccttggcctcggcggggcacttggcacagtcgcaataatgattcagcaggaattgcttctggtgctggccggcggtcttttcgtgtgggaggctctctctgtgatactccaggtcggttcgtacaaactgcggggcggcaagcgcattttcaagatggctcccttccaccaccatctagagctcagcggactaaaagagacaaaagtggtcatcaggctcggataa

SEQ ID NO: 76312 - protein, 272 aa, Unknown
  Obtained from environmental sample
  DOMAIN (25)...(218): Glycosyl transferase family 4
  misc_feature (1)..(272): Xaa is any amino acid
MGGLLIVGSMIISTVFWCKLGSGVIWVALLSLVGFAAVGAYDDAKKLLRKQNKGLSGWKKMAALTIISLFVAWLILHFDLRGVETSRLSVPFFKNWRPDIGIFLIPWIWLVMVGTSNAVNLTDGLDGLAIGGILIVSATFTALAYVVGHYGYANYLFVPFVLGASELTVFLGAMGGASLGFLWFNAYPAEIFMGDTGSLGLGGALGTVAIMIQQELLLVLAGGLFVWEALSVILQVGSYKLRGGKRIFKMAPFHHHLELSGLKETKVVIRLG

SEQ ID NO: 76313 - DNA, 909 bp, Unknown
  Obtained from environmental sample
  misc_feature (1)..(909): n is a, c, g, or t
ttgagagggataaagagattgagccggttattaaatatcaaacaagagataaagacggcggttcttccaaatgacggaagttcgccgaaagacggcagttcccaatttctaaaaaatataaaagtggaaaatgataaagtagaaattaatgacaaatatattgactatcattatatttcatccgcgtatcaggcaatcaatgattgggtaagagataataaaggaaaatacgacagagacgattttcaatctaaattcaaaaaaaaaacaaaagttatatggtatgaagccgacccaaaagaagacgggcgggatattttttcccgaatcaataaaggaaaaattcctctgacaaacgcggaacttataaaagcgttatttcttaacagttctaattttaaatataacaatgatgaagaactgcgcttaaaacaattacaaatcgcgactgaatgggataatatggaaacggaattgaataatgatgaattttggctgtttataaacaaagaagaaaataataaagaaacccgcattgaatatctttttgaattaatttacggaaaatcatccggcgcggaaaataattattttacttttagggaatttcacaaagatttcaaagacaataccgggaaaactgttgaggaaagctggaagaaaataaagcgctgttttcaaacattgaaatattggtttgaagaccgggaactataccataaaataggttttttaatcacgcttggcaaagatgatgatgtaaaaactttaataaatgaatctcaggataatgaaaaattaacctttataaatttaattaacttaaaaatagaaaaaaagtttgaaaatattaaaatagatgaggtagtatataaaaacagagaaganntgtcaaaagtattctgctga

SEQ ID NO: 76314 - protein, 302 aa, Unknown
  Obtained from environmental sample
  misc_feature (1)..(302): Xaa is any amino acid
MRGIKRLSRLLNIKQEIKTAVLPNDGSSPKDGSSQFLKNIKVENDKVEINDKYIDYHYISSAYQAINDWVRDNKGKYDRDDFQSKFKKKTKVIWYEADPKEDGRDIFSRINKGKIPLTNAELIKALFLNSSNFKYNNDEELRLKQLQIATEWDNMETELNNDEFWLFINKEENNKETRIEYLFELIYGKSSGAENNYFTFREFHKDFKDNTGKTVEESWKKIKRCFQTLKYWFEDRELYHKIGFLITLGKDDDVKTLINESQDNEKLTFINLINLKIEKKFENIKIDEVVYKNREXXSKVFC

SEQ ID NO: 76315 - DNA, 789 bp, Unknown
  Obtained from environmental sample
  misc_feature (1)..(789): n is a, c, g, or t
ttggcggagaatctggatgtagtacagctttatattcaaatttaccgctatatntgcattgacgagtctcaggatntgaacgaagctcagtatcgggttattcaggccctntgcgggagtagcttcaagaatattatgatggtcggcgatgaaaaccaatctatttatgctttcaacggttcaagcagcaagtatatgtccgaactcttcgtcagagatttttcgccgactgtttacacattagacgaaaactttcgctccgctaaacagattatcgaatacgcaaactcattgaatggaagcaacgaagatgtttctcaatactattataacggagaactgaacatttgcaccttcgcaaatgaagcagatgaagctcaacatgttcgcacaaaaatagagcagcttgtcttgaatggtcataaggagattgaaggcgaagtcacttatgagaaaattgcggtaatagctcgaaacaaatatgtcttcgcaagcgtagaaagagaactcactcaggctaacattccttattatatcaagcaaccgcgtttatgtattgcttgtgaatccgactatatggaagcatttgacttaattcttaggttaatcgtaaatccgttagatatatatcacaagcagttgctgcgcaaattgacaaagcggcagatgtcaacagcaggtgacgaaaaaaatgacgattcgcttattaactctttgctagctgaaagtgatttttcttggctaagcgcgtcagttcaaggcattgcacccaatgcgttggaaacttga

SEQ ID NO: 76316 - protein, 262 aa, Unknown
  Obtained from environmental sample
  misc_feature (1)..(262): Xaa is any amino acid
MAENLDVVQLYIQIYRYXCIDESQDXNEAQYRVIQALCGSSFKNIMMVGDENQSIYAFNGSSSKYMSELFVRDFSPTVYTLDENFRSAKQIIEYANSLNGSNEDVSQYYYNGELNICTFANEADEAQHVRTKIEQLVLNGHKEIEGEVTYEKIAVIARNKYVFASVERELTQANIPYYIKQPRLCIACESDYMEAFDLILRLIVNPLDIYHKQLLRKLTKRQMSTAGDEKNDDSLINSLLAESDFSWLSASVQGIAPNALET

SEQ ID NO: 76317 - DNA, 843 bp, Unknown
  Obtained from environmental sample
  misc_feature (1)..(843): n is a, c, g, or t
atgcgtcagtatctgtctgcgttttatatggacgcaaaccgcgacatcgttcaggatttaaggaatcggaagtctttttttgctcgtgtaacatcaggcgcggacctgccggaagaaaagattaaagaaattgaagatcagctaagtagtgtaaacgccatcattgtggagagtattccttctttgactcaaacaaaagacagaatagcggctatcggtagaacgattggctctgcttcaagcaatgttgagattgaaccattgacaagaaaactatccgacctcagcagaggtatggacatagttatgcaggatggcggcgcaagctttccgatttcgcaaaacggctacgggacgcgcagttggatttcgttcttaacacttgcggcattcgttgaaaatcaggcacaaaagataaggacagacaatgccgaagcagagcaatatataatactcacaatggaagaacccgaagctcatcttcacccacaggctcaaaggcaattatttagtcagatccaaaattttatggggcaaaaagtcataagcactcattcgccaaatgttgtagctcattccgctttggctgacgcaatatatttttgcaagcaagacggaaaaactatcgcaaaacgatataagcctgtcgataccgcagaatcagacgatgaaaagatattacgcgaggtaatcaatacgcgtgctgatattctcttttcttcaggcgttatcctatgcgagggaataacagaggaacttgctttgcctatttattttcacgagcattttggctgtgcgccgtatgcgcttggagtaacatcgttaatacggcgggaaagataa

SEQ ID NO: 76318 - protein, 280 aa, Unknown
  Obtained from environmental sample
  misc_feature (1)..(280): Xaa is any amino acid
MRQYLSAFYMDANRDIVQDLRNRKSFFARVTSGADLPEEKIKEIEDQLSSVNAIIVESIPSLTQTKDRIAAIGRTIGSASSNVEIEPLTRKLSDLSRGMDIVMQDGGASFPISQNGYGTRSWISFLTLAAFVENQAQKIRTDNAEAEQYIILTMEEPEAHLHPQAQRQLFSQIQNFMGQKVISTHSPNVVAHSALADAIYFCKQDGKTIAKRYKPVDTAESDDEKILREVINTRADILFSSGVILCEGITEELALPIYFHEHFGCAPYALGVTSLIRRER

SEQ ID NO: 76319 - DNA, 612 bp, Unknown
  Obtained from environmental sample
  misc_feature (1)..(612): n is a, c, g, or t
gtggtgaccataagccgtcctttttatctgggtacgcatgaagtgacccaggaacaatggcgcacgctcatgggcggcaacccgtccggatttaaaggtcggggccacccggttgatcaggtgtcctgggaagatgtgcaggctttcatcgggaaattgaaccggaaggaaggcagccaagggtatcgcctgcccacggaggctgaatgggaacacgcggcccgggccgggagcgatacggcttggtttttcggggacgacccggccgccttggaaggttatgcctggtttgcggaaaattccaaaggcgccactcaaccggtggggaaaaagaaacccaacccctggggcctatatgacatttacgggaacgttgcggaatgggtggatgattggtatgaaaaataccacgccggagaggtgaccgatccgaccgggccggattccggctcctcccggctccaccggggcggcagttgggccagccacgccgatgagagtcagtcctcctggcgcgaaggacgcaactctgcggataccaaaggggttgatatgaacttccggctgttcttctccccaagaaaggaagtttttactgactatcgccaataa

SEQ ID NO: 76320 - protein, 203 aa, Unknown
  Obtained from environmental sample
  DOMAIN (1)...(191): Domain of unknown function (DUF323)
  misc_feature (1)..(203): Xaa is any amino acid
MVTISRPFYLGTHEVTQEQWRTLMGGNPSGFKGRGHPVDQVSWEDVQAFIGKLNRKEGSQGYRLPTEAEWEHAARAGSDTAWFFGDDPAALEGYAWFAENSKGATQPVGKKKPNPWGLYDIYGNVAEWVDDWYEKYHAGEVTDPTGPDSGSSRLHRGGSWASHADESQSSWREGRNSADTKGVDMNFRLFFSPRKEVFTDYRQ

SEQ ID NO: 76321 - DNA, 309 bp, Unknown
  Obtained from environmental sample
  misc_feature (1)..(309): n is a, c, g, or t
ttggatgaggccggggccgcggccgcggcctcctttctgaatatggacgaggccgacttccgccgcctctacctggagccgggaaccgggaatataggccaggaccaggccggctactgccgtctgcgccaagccgagggcctttgccgcatccacctccataagccggggacctgccggctctggccctttctgccccaactcctggcccgggaaagcgccttccaagaggccaagctggcctgcccgggcctcagggcggatttgacgtgggcggaattcaaggccgccggaaaattcgcggaataa

SEQ ID NO: 76322 - protein, 102 aa, Unknown
  Obtained from environmental sample
  misc_feature (1)..(102): Xaa is any amino acid
MDEAGAAAAASFLNMDEADFRRLYLEPGTGNIGQDQAGYCRLRQAEGLCRIHLHKPGTCRLWPFLPQLLARESAFQEAKLACPGLRADLTWAEFKAAGKFAE

SEQ ID NO: 76323 - DNA, 342 bp, Unknown
  Obtained from environmental sample
  misc_feature (1)..(342): n is a, c, g, or t
atgggaaatacaatgaagtacaagggatgccgcgccagagtcgattttgacgaacgcgacaacattctgatcggaaggctaatcgatgttgccgatgatgtcagcttccatgccgagaacgtctccgatttgcggaaagcgtttgagttgtctgttgatgactaccttgaatactgtgaaaagacagggaaaagcccgacaagatcgctgtctggaaaggttgcgctccgccttacgccagaaattcacaagggcgcggtcaccgcagccaaatcggccggcgtcagcctgaacaagcggcttgtcagcgtgattgacagagccatgaaacaagggagttaa

SEQ ID NO: 76324 - protein, 113 aa, Unknown
  Obtained from environmental sample
  DOMAIN (55)...(105): HicB family
  misc_feature (1)..(113): Xaa is any amino acid
MGNTMKYKGCRARVDFDERDNILIGRLIDVADDVSFHAENVSDLRKAFELSVDDYLEYCEKTGKSPTRSLSGKVALRLTPEIHKGAVTAAKSAGVSLNKRLVSVIDRAMKQGS

SEQ ID NO: 76325 - DNA, 432 bp, Unknown
  Obtained from environmental sample
  misc_feature (1)..(432): n is a, c, g, or t
ttggaaaaccaaaaaatagccttgtacaccgtaataggcatgttctgctggcagtatacccctttctatatggttctctacctcgcggcttacggcacaattccggtggagctctatgaggcggccagcatagacggcgcaaagcggagccagtatttctggagaatatcccttcccctgcttcgtcctactgtggcttcgggaatgaccctttcgatcatcggctcgctgaaatactttgaccttgtgtatgtaatgaccggcggaggcccgggagtgtcaacggagctgatggctacatatatgtataaattctcgtttgtccgtttcaatctgggttacggctccacaattgcctcggggatgtttattttgatcaccctggtagcccttataaccatcacgataataaaccggagaacggagctgtaa

SEQ ID NO: 76326 - protein, 143 aa, Unknown
  Obtained from environmental sample
  misc_feature (1)..(143): Xaa is any amino acid
MENQKIALYTVIGMFCWQYTPFYMVLYLAAYGTIPVELYEAASIDGAKRSQYFWRISLPLLRPTVASGMTLSIIGSLKYFDLVYVMTGGGPGVSTELMATYMYKFSFVRFNLGYGSTIASGMFILITLVALITITIINRRTEL

SEQ ID NO: 76327 - DNA, 831 bp, Unknown
  Obtained from environmental sample
  misc_feature (1)..(831): n is a, c, g, or t
ttgatcatagggacagcggggtggagatccggtgggaggccatggagtgacgcgtcgatttacaacaagtcagcacatattatcccaactttataccaaacccaagcctattataaataccttgtttcgggacacgaaatcgggagctttgaattttttatttttctattgacatcacaaatcccatatactatnttattgatagacaaggacgatgtttctatgggaaaccccaaatacgaaaagatgtcaacgcttgtggccgccgtacttgaaaaggacggccccgaagccgcgcttaaccgccttaacgacggtatcgggaaagccccggatctcatcgaggcctatttggtcagaggcgaattgtatatggaaaccggggactccgggaaggctatcaatgattttgaaaaggcgattaacattaaccccggcgaacccgaatcatattttctaagagggtcgttatacgccagatccggcaacgatatagacaaggccatcaatgacttcagcaaagcaatagagcttgacgctaaccatgccggcgcctacactaatcgcgcaaacatgtatttaaaaaagagagactttcagaaagtcgtcagtgactgcgcaaaagccatccaactttcgcctaatagcatggagccatactataatcgagggctcgcttatgcaaataccggtaactttgcgaaggctctcgacgactacaataaagtcattgcgttggcgcctgcagatactaagcaatacgtagaagcgtttgccaaacagcggtttgcttcagtcgcagttgggcaacgtacaagacgctattcatga

SEQ ID NO: 76328 - protein, 276 aa, Unknown
  Obtained from environmental sample
  DOMAIN (183)...(216): Tetratricopeptide repeat
  misc_feature (1)..(276): Xaa is any amino acid
MIIGTAGWRSGGRPWSDASIYNKSAHIIPTLYQTQAYYKYLVSGHEIGSFEFFIFLLTSQIPYTXLLIDKDDVSMGNPKYEKMSTLVAAVLEKDGPEAALNRLNDGIGKAPDLIEAYLVRGELYMETGDSGKAINDFEKAININPGEPESYFLRGSLYARSGNDIDKAINDFSKAIELDANHAGAYTNRANMYLKKRDFQKVVSDCAKAIQLSPNSMEPYYNRGLAYANTGNFAKALDDYNKVIALAPADTKQYVEAFAKQRFASVAVGQRTRRYS

SEQ ID NO: 76329 - DNA, 723 bp, Unknown
  Obtained from environmental sample
  misc_feature (1)..(723): n is a, c, g, or t
atgatcgtcattcttaccggagcgggcatcagccaggaaagcggcatcgccaccttccgcgacagcggcggcctctgggaaaacatacggattgaggatgtcgccacaccccgggcgttcaggaaaaatcccgacatggtgtacgacttctacaacaaccggagaaggcaactgctcagcccggacatcgcgcccaatcccgcgcatttcgccttggcccgccttgaggaaaaaagcgtgacgcccgtgctcgtcgtcacccagaatgtggacaatctgcacgaacgcgccggcgccagaaatctcctccacatgcacggcgaactgctcaaaagccgctgcggcgaatgcggcgccgtgcgccaatgggaacgcgaccttggcgcgaaggatgtatgcccggattgcgggcgcgccggatatctgcggcctcatatcgtgtggttcgaagaaatgcctctgtaccttgagaaaattgacgaagcgttgcgccgctgccgtatctttgcctccatcggcacttcgggcaacgtctatccggcggcgggcttcgcccgcgaagcgcgggcgaacggcgcacacgtggtggaactgaacatggaaccctcgcgcggggcggatgtgtttcacgatggccgctacggacgggccggcacaatcgttcccgcctgggtggatgaggtgctggaagcacaagctgacgccaaaccacaaacagactga

SEQ ID NO: 76330 - protein, 240 aa, Unknown
  Obtained from environmental sample
  DOMAIN (7)...(180): Sir2 family
  misc_feature (1)..(240): Xaa is any amino acid
MIVILTGAGISQESGIATFRDSGGLWENIRIEDVATPRAFRKNPDMVYDFYNNRRRQLLSPDIAPNPAHFALARLEEKSVTPVLVVTQNVDNLHERAGARNLLHMHGELLKSRCGECGAVRQWERDLGAKDVCPDCGRAGYLRPHIVWFEEMPLYLEKIDEALRRCRIFASIGTSGNVYPAAGFAREARANGAHVVELNMEPSRGADVFHDGRYGRAGTIVPAWVDEVLEAQADAKPQTD

SEQ ID NO: 76331 - DNA, 651 bp, Unknown
  Obtained from environmental sample
  misc_feature (1)..(651): n is a, c, g, or t
ttgcgggaaagaagtgggttaagcgatcttttaaacgcctatgaaagccgccagggatacgccggtgtaaacgcgcccctctccggcgtgtacaagaccgggtatcttgtgcagcacctcggctacggcgtaaacgccgcggttcaggcgccgtcgattcttgccgggacgggaataccaacggtgctaatcggaaaagccgccgatattattgaaaatccgggaagaaatattacaggcgtcgataccgaaaccgttcttgccgagacctgcaaagccctggcttctttggagcggggctttgtctgcgttaatgtccaggaaaccgatctcgccggacaccgtgaagatccccaactgtacgcggaaaagttgatcattgcggacgcgggcatcagacagataatgaacgttatgtgcaaagaagatatacttgtagtaaccgcagatcacggaaacgatccgctgatagggcacagccgccacacaagggaaaaaactcccgtccttgcatgggggccttcgcttgaggcgggctttttgggacaaagggacagtctggcggatacgggcgctacagtctgcgattatttcggcgctccggctccggaatcggggaggtcttaccttaaactgctaaagcaaaaatag

SEQ ID NO: 76332 - protein, 216 aa, Unknown
  Obtained from environmental sample
  DOMAIN (80)...(188): Metalloenzyme superfamily
  misc_feature (1)..(216): Xaa is any amino acid
MRERSGLSDLLNAYESRQGYAGVNAPLSGVYKTGYLVQHLGYGVNAAVQAPSILAGTGIPTVLIGKAADIIENPGRNITGVDTETVLAETCKALASLERGFVCVNVQETDLAGHREDPQLYAEKLIIADAGIRQIMNVMCKEDILVVTADHGNDPLIGHSRHTREKTPVLAWGPSLEAGFLGQRDSLADTGATVCDYFGAPAPESGRSYLKLLKQK

SEQ ID NO: 76333 - DNA, 741 bp, Unknown
  Obtained from environmental sample
  misc_feature (1)..(741): n is a, c, g, or t
atgaaatttgattgcatagttgccaatttgccgttcagcaaagataaatgggcatctggtttaattctggcggagaattttttgatcaaaaaaaagattttactattgagcctttcacttgaccgctggcatcgtttgatttggggtgttcctcctgcaagcaagggtgattgggcgtttttattgcatatgattgcaagtatgagcgcaagtggtcgcgttgctgctgtagctccgcacggcgttntgtttcgcggagcgagcgagggtcgtattcgggaagccattgttgagaaaaatttggttgatgctgtaattggtttgcctgagaatcttttttacggcacaagtattcctgcttgtgttattgtttttaaaaaaggcaggaagagtacggatgttttgtttatagatgcttctggtaaagataattatgagaagaataaggcgaagaataaattgcgtggcaaggatataaaaaagattgttgagacttatcgtgcatatttatctgggaataaaaaaaaggcggaggtggaaaaatacagccatattgccaagttgcaggagattatagataatgagtataatttgaatattcctcgctatgttgatacttttgaggaagaggagcagattgatatttcggctgttaatgcggagattgctgatattaaggggaagattgctggggtggaaagggagatggggaagtatttgaaggaattggagttggggtga

SEQ ID NO: 76334 - protein, 246 aa, Unknown
  Obtained from environmental sample
  DOMAIN (2)...(212): N-6 DNA Methylase
  misc_feature (1)..(246): Xaa is any amino acid
MKFDCIVANLPFSKDKWASGLILAENFLIKKKILLLSLSLDRWHRLIWGVPPASKGDWAFLLHMIASMSASGRVAAVAPHGVXFRGASEGRIREAIVEKNLVDAVIGLPENLFYGTSIPACVIVFKKGRKSTDVLFIDASGKDNYEKNKAKNKLRGKDIKKIVETYRAYLSGNKKKAEVEKYSHIAKLQEIIDNEYNLNIPRYVDTFEEEEQIDISAVNAEIADIKGKIAGVEREMGKYLKELELG

SEQ ID NO: 76335 - DNA, 498 bp, Unknown
  Obtained from environmental sample
  misc_feature (1)..(498): n is a, c, g, or t
ttgtttattgcggggggtgacgaacgtgatgatggaggcggtggtctttcaatgacatggcccggctcgcccactatatattacggcgacgaggccgggctgtgcggctggaccgacccggacgaccgccgcccgtatccttggggcgcggaagacgaggctatgttggaactgcatcgggcgctggccgctttgcgcgctgaataccctatgctgcggagcgcgtcggtagaattcctgtacaatgactacgggtttatctcttacgggcgctgggacggacacgggcaggttatcgccgtcgcaatcaacaacaccggctcggcaaaggacgtgatgctgcccgtatggaaagccgggtttgccgggcaggacatgaaacggctgctgtcagtatgcggcgggcgcgtgagccgtgaacagcgaaactgtccggtagatgacggctgcgcgcgcgtgacggttcccggagagagcgcgctggtgctggcggggtaa

SEQ ID NO: 76336 - protein, 165 aa, Unknown
  Obtained from environmental sample
  misc_feature (1)..(165): Xaa is any amino acid
MFIAGGDERDDGGGGLSMTWPGSPTIYYGDEAGLCGWTDPDDRRPYPWGAEDEAMLELHRALAALRAEYPMLRSASVEFLYNDYGFISYGRWDGHGQVIAVAINNTGSAKDVMLPVWKAGFAGQDMKRLLSVCGGRVSREQRNCPVDDGCARVTVPGESALVLAG

SEQ ID NO: 76337 - DNA, 336 bp, Unknown
  Obtained from environmental sample
  misc_feature (1)..(336): n is a, c, g, or t
atggaagccagaagtttttcagactggtacaggggatgcgatatgttcatcagagcaatgacaatcagcgattatgagcaggtttacgtcctatggcgggacacgccggacatggggctgaacagccgcgacgattccatcgacggcatcgcgaaatacctggccaggaatcccaatacttgttttgtcgccgaaaaagacggccgtatcatcggcgctgttttaagcgggcatgacgggcgcaggggattcatctaccatatggctgtggacagcggccaacagcggcgcggcgtcggaaccgcccttgtttccgccactgtgtcccgcccttga

SEQ ID NO: 76338 - protein, 111 aa, Unknown
  Obtained from environmental sample
  misc_feature (1)..(111): Xaa is any amino acid
MEARSFSDWYRGCDMFIRAMTISDYEQVYVLWRDTPDMGLNSRDDSIDGIAKYLARNPNTCFVAEKDGRIIGAVLSGHDGRRGFIYHMAVDSGQQRRGVGTALVSATVSRP

SEQ ID NO: 76339 - DNA, 897 bp, Unknown
  Obtained from environmental sample
  misc_feature (1)..(897): n is a, c, g, or t
atggctgtccagcaggcgatatccaagtcttttaacggaatcagcccggtgacggcaagcgaaatctgcgcgcgggcggacgtatggcctgacattaacgcgggcgctctcaatacggaagagaaaaaccgcctgtaccggggtttccgtcaggtctttgcggctgtcggggaaggcgcgtttgactgccgcgtatatttcagcgggcagcgcaagccggcggatttttcggtgctgccgctggccgtctacacaggttatgctacggaaacatacgcatccccgtctgccatgcttgaggcttattaccggcagcgggacgcggattacagaatcagccagaaaactgccgacctgcggaaactcgtcagcaaccagacggaacgctgcgtcaaaaagcgcatcatgcacgacaaaacgctggatgaaattaaagaccgcgaccaatacagaatatacggggaactgctgacggcgtacctgcattcggtcgaaaagggcgcggaacattttgcggcggaaaacttctacgaaaacggcgcgatatgcgatataccgctggacgccgccctcacccccgtggaaaacgcccagcggtactttaagctgtacaacaagcaaaaacgcgcgttcgcggcgctgcaggaacaaatcaggcaaaacggggaagacctgatatatctggacagtgtttccgccgcgctgcaaaccgtctccagtgaaaacgacatagccgaaatccgcgccgagctggcggaacaggggtttataaaaaaagcccgggcgggcaaaatcgtgggcggggcaaaaaaaagcgccggccggaaaaacaacccgtcaggcggcaaatccaagccgctgcgttttgtttcgtcggacggctctcggccaatctga

SEQ ID NO: 76340 - protein, 298 aa, Unknown
  Obtained from environmental sample
  DOMAIN (1)...(270): Fibronectin-binding protein A N-terminus (FbpA)
  misc_feature (1)..(298): Xaa is any amino acid
MAVQQAISKSFNGISPVTASEICARADVWPDINAGALNTEEKNRLYRGFRQVFAAVGEGAFDCRVYFSGQRKPADFSVLPLAVYTGYATETYASPSAMLEAYYRQRDADYRISQKTADLRKLVSNQTERCVKKRIMHDKTLDEIKDRDQYRIYGELLTAYLHSVEKGAEHFAAENFYENGAICDIPLDAALTPVENAQRYFKLYNKQKRAFAALQEQIRQNGEDLIYLDSVSAALQTVSSENDIAEIRAELAEQGFIKKARAGKIVGGAKKSAGRKNNPSGGKSKPLRFVSSDGSRPI

SEQ ID NO: 76341 - DNA, 762 bp, Unknown
  Obtained from environmental sample
  misc_feature (1)..(762): n is a, c, g, or t
atggatacagagagggggcttatctttatggaaaaagaactcaaattcttgctgtatagtacgccacaggacgatgtaaaaattgatgttgcgataaaagatgagaccatttggcttacacaaaaggctatggccgcgctattcggcacatcgcgcgaaaatatcacaatgcacctaaaaagtgtgtttgaatgcgccgaattacaagaggtttcagtatgtaagaaaatcttactaactgccgcagacggtaagaactataatacccaattttacaacctcgacgcaatcatatccgtcggctatcgtatcaattcaactaaagcgactcaattccgtatctgggcgacaaaaatattgaaagaattcataaccaaaggctttgtgttggatgacgaacgcttaaagcaggggaataccgtttttggaagagattattttcgtgaacttttggaacgaatccgctctattcgagcaagcgaacgccgtatttggcaacagattaccgatattttcgcggagtgtagtatcgactatgacaagaattcgcagattacaaaagatttttacgcaatggtacaaaataaattccactttgccattaccggacaaacggccgccgaaatcatttataccaaagcggacaaaaacaaacaaaatatgggtctgacgacgtggaagaattcgcctaacggaaggattctaaaatctgatgttcttgttgctaaaaatatttacaggaaaaccnaatacgccgtctag

SEQ ID NO: 76342 - protein, 253 aa, Unknown
  Obtained from environmental sample
  misc_feature (1)..(253): Xaa is any amino acid
MDTERGLIFMEKELKFLLYSTPQDDVKIDVAIKDETIWLTQKAMAALFGTSRENITMHLKSVFECAELQEVSVCKKILLTAADGKNYNTQFYNLDAIISVGYRINSTKATQFRIWATKILKEFITKGFVLDDERLKQGNTVFGRDYFRELLERIRSIRASERRIWQQITDIFAECSIDYDKNSQITKDFYAMVQNKFHFAITGQTAAEIIYTKADKNKQNMGLTTWKNSPNGRILKSDVLVAKNIYRKTXYAV

SEQ ID NO: 76343 - DNA, 972 bp, Unknown
  Obtained from environmental sample
  misc_feature (1)..(972): n is a, c, g, or t
atgaatttgatcgtgttggtactggtgatatatacaaaaggtgttgaaacaataacgtacaatatttttagccaaaataaaccggaatatacttatgatataaccaacgaacctagaaacacgcatacatttgatgaaaaaacaaaaaacaaagcgcaaaattggataggaattccaattgctataccaacaggctcacctattggcgtacttagagtcaagaataaattaacaaaagacaaaaggcttattgattttgatatgcttgatgttaatatcttaaaaaatttagcgacaaacattgcgtatcaatataataatgaacaaagattcattaaggaagaagattttgttagaacatctgcacatgaaataaaaaccccgctaacgctacttacaaacgcctccacaatgttgaagtatgcaatctgtgatgaatatggagtaacgacagataatttatctaaggtaatcaaacaaagacttaaagatttagagactatagctttacgtctagcatttgttgcgaaatctaggtcatttgacgcaaaaaaattagttaacaaaataaaagaatcatatgtttttaaagatgttgtaatcccagttatatcattttcaaaggagtacgcaaagagaaacgataaatacatcgatattgacaaggacagcattttacagttaccgcttatactttgtgatccaacctcatcacaaatggcgtttcatattatcattgacaatgccataaagtactcgaagcgaaacggaacaatttttgtatatggagaaaaagaaaaagattattgcanaattatagtaatgtccgacagcatagtaaccattcgaccgaaagaaaaagatgaaatatttcaaaaatactatagaacaaaagaagtcgaagatagaaaatttgatgggtcaggaaataggattgtttctgccaaaagaatatgcgtgaaaataacgtaa

SEQ ID NO: 76344 - protein, 323 aa, Unknown
  Obtained from environmental sample
  DOMAIN (233)...(323): Histidine kinase-, DNA gyrase B-, and HSP90-like ATPase
  misc_feature (1)..(323): Xaa is any amino acid
MNLIVLVLVIYTKGVETITYNIFSQNKPEYTYDITNEPRNTHTFDEKTKNKAQNWIGIPIAIPTGSPIGVLRVKNKLTKDKRLIDFDMLDVNILKNLATNIAYQYNNEQRFIKEEDFVRTSAHEIKTPLTLLTNASTMLKYAICDEYGVTTDNLSKVIKQRLKDLETIALRLAFVAKSRSFDAKKLVNKIKESYVFKDVVIPVISFSKEYAKRNDKYIDIDKDSILQLPLILCDPTSSQMAFHIIIDNAIKYSKRNGTIFVYGEKEKDYCXIIVMSDSIVTIRPKEKDEIFQKYYRTKEVEDRKFDGSGNRIVSAKRICVKIT

SEQ ID NO: 76345 - DNA, 492 bp, Unknown
  Obtained from environmental sample
  misc_feature (1)..(492): n is a, c, g, or t
atgattggcagtcaagggggtacagtgctagcattaaacgaacgattgtgtgaattactaaatcgctgcgtagaagaatacataaaaaccgcagcgccgatttcgtccgcgacaatggcattaaaagacggtaacgaaatgagcccagccaccatccgcaacgacttaaagatgcttgaccaactcggattcctgcgccaaatccatgcaagtagcggccgcgtcccaaccacactcgggtaccaagcctacatcacggcagaccgttccaattcctttgctggcgacctaatcaacgaccttgccgaacttgcgcgccttgctgaacggatagagcgcaaaatccaaggctccggcgcctacccaatccgtacatgcgaaagccaatctcttgaacggcgcaaaaacatctaccgcctactcgaagtcccaaaccttgaaatgagcacactatattcaattataaaggagaaaacgtatgtcggaaagtaa

SEQ ID NO: 76346 - protein, 163 aa, Unknown
  Obtained from environmental sample
  misc_feature (1)..(163): Xaa is any amino acid
MIGSQGGTVLALNERLCELLNRCVEEYIKTAAPISSATMALKDGNEMSPATIRNDLKMLDQLGFLRQIHASSGRVPTTLGYQAYITADRSNSFAGDLINDLAELARLAERIERKIQGSGAYPIRTCESQSLERRKNIYRLLEVPNLEMSTLYSIIKEKTYVGK

SEQ ID NO: 76347 - DNA, 630 bp, Unknown
  Obtained from environmental sample
  misc_feature (1)..(630): n is a, c, g, or t
atggataaaaatccatacataaaatttaaaaggaagcgcccgaaatacttagatagaaagtacttaacatcttatgagctaacaaaaatagaggaaaaagaatttaccattgaacggctaaacttcattcgtgatatgtttctattctgctgctacacaggtttaagctactctgatttacagctgttaaaaccttctaatatagtagaagaaaacggaatgctattcatcaaaacatttagagaaaaaaccaacgaaaaggcggctatatttgtttttgagaaggcgcttctgctgcttgaaaagtacaaaggaaagcgaagtggatactgctttccaagcataagcaaccaacgcttcaacggatacttaaaggaggtttcagacttggcaggagttgataagaatttaaccgtacacatggcgcgtcatacctttgccacaactgtaatgctgatgaacggagcaagtctcgaagttacgcaaaaggcgttaggacacgccaaaatatctaccactgaaatatacgctaaaatggtggatagccgagtggctgctgaaatgggtgttgtagaggaaaagctaaataaaattagagatctatcagggcaaccgcatcaaatttattaa

SEQ ID NO: 76348 - protein, 209 aa, Unknown
  Obtained from environmental sample
  DOMAIN (27)...(186): Phage integrase family
  misc_feature (1)..(209): Xaa is any amino acid
MDKNPYIKFKRKRPKYLDRKYLTSYELTKIEEKEFTIERLNFIRDMFLFCCYTGLSYSDLQLLKPSNIVEENGMLFIKTFREKTNEKAAIFVFEKALLLLEKYKGKRSGYCFPSISNQRFNGYLKEVSDLAGVDKNLTVHMARHTFATTVMLMNGASLEVTQKALGHAKISTTEIYAKMVDSRVAAEMGVVEEKLNKIRDLSGQPHQIY

SEQ ID NO: 76349 - DNA, 402 bp, Unknown
  Obtained from environmental sample
  misc_feature (1)..(402): n is a, c, g, or t
atgaaaatgagcgctcagctggccgcctttcatcctgcggtggcggcctggttcgaaaggacttttgctgcgccgacacagccacagcttctggcgtggccggccatcaagtccggccagcatgtcctcatcgccgcccccaccggctcggggaagaccctggcggcctttctcgccgccatcgatgatctgggtgcgcgagggcttgagcggcgcaggactggccgagggcacccagttggtgtagtctctgccttaaatgacctctccaaggatacccacaaaatgtggagggcgcaattggggacacacggggcgcggggcagaaggttactcgggggaggaatagtgaacaccatcggcgaccaagttgggaggtgtagggctatcgggggacaatga

SEQ ID NO: 76350 - protein, 133 aa, Unknown
  Obtained from environmental sample
  SIGNAL (1)...(15)
  misc_feature (1)..(133): Xaa is any amino acid
MKMSAQLAAFHPAVAAWFERTFAAPTQPQLLAWPAIKSGQHVLIAAPTGSGKTLAAFLAAIDDLGARGLERRRTGRGHPVGVVSALNDLSKDTHKMWRAQLGTHGARGRRLLGGGIVNTIGDQVGRCRAIGGQ

SEQ ID NO: 76351 - DNA, 714 bp, Unknown
  Obtained from environmental sample
  misc_feature (1)..(714): n is a, c, g, or t
atggcgagccgccacaaccttacaactatcgacaactacgcctttcagaactgcacgaacctgacggggcttagcctgccaacaaaccttacaactatcggcaaccaagctttctatggttgcgagagccttacgtcgattacactgcccccggggataagcctcggcaactacgcctttcagaactgcaaggggcttacgtcgattacgctgtccacggggataagcctcggcaactccgccttctccggctgcacgggccttacgtcgatcaccctgccctcaagccttaaaaacatcggcaccaactccttccagaactgcacgggtcttacgtcgatcaccctgcccgaaggaagccttacatccatccctaactacaccttcaacggctgctcaaaacttacatcaattactctgcccacaactgttgcctccatcggcaccaacgccttccagaactgcacgggccttacgtcgatcaccctgccggcaaaggttacatcaatcgccgccaacgccttcaacggctgcacgaaccttacaacgcttaccagcctcaatacaacaccgccaactgtggcgaacgccaacgcatttaccaatgttcccgcaacgatgacgatcaaggttccgacggggagtgtggaaacgtacaagattgccaatatttggagttcccgtgctgtttatatcagcgcaatagaagagtga

SEQ ID NO: 76352 - protein, 237 aa, Unknown
  Obtained from environmental sample
  misc_feature (1)..(237): Xaa is any amino acid
MASRHNLTTIDNYAFQNCTNLTGLSLPTNLTTIGNQAFYGCESLTSITLPPGISLGNYAFQNCKGLTSITLSTGISLGNSAFSGCTGLTSITLPSSLKNIGTNSFQNCTGLTSITLPEGSLTSIPNYTFNGCSKLTSITLPTTVASIGTNAFQNCTGLTSITLPAKVTSIAANAFNGCTNLTTLTSLNTTPPTVANANAFTNVPATMTIKVPTGSVETYKIANIWSSRAVYISAIEE

SEQ ID NO: 76353 - DNA, 729 bp, Unknown
  Obtained from environmental sample
  misc_feature (1)..(729): n is a, c, g, or t
atgcctaatcatcaaatgtcacaaattgaccgcttggccgtggcgctggatgtgccatccgcggcggacgcgctcaaattggcggaatgtctaaaaggaaaggttggcttgctcaaggtgggcctagagttgttctgcgccgaaggcccaaacatcgtgaaggatctgcagcgattcgcgccagtttttttggacttgaagctgcacgacataccaacaacggtcaagcgggccttgggttcggtcttaaagctcgacccgctgctggtcaatattcatgccttgggcggccaagacatgatggcggcggcggcggaaacagtggcgcagcataggcaagtcgggggcagaacgcgccttttggctgtcaccgtgctgaccagcatggacggtgcgtctatgactaagctggggattaacggagacccatcaagcatggtgcttcgcttggccacacttgcaaaggaatctgggtgcgacggggtggtatgctccgcgcaagaatccgcgatgctccgagcgaattgtggcgaatcattcttgcttctcactccagggatacgcccaaggggggcggacgcacaggatcaggcaagggtgatgacaccatcggaagcaatatcggctggctcaacatggattgtcgttggcaggccaatcacacatgccgcagaccccgccgcagctgccgagtccatactgtcggaaatgggaaaggccgatccctga

SEQ ID NO: 76354 - protein, 242 aa, Unknown
  Obtained from environmental sample
  DOMAIN (10)...(233): Orotidine 5'-phosphate decarboxylase / HUMPS family
  misc_feature (1)..(242): Xaa is any amino acid
MPNHQMSQIDRLAVALDVPSAADALKLAECLKGKVGLLKVGLELFCAEGPNIVKDLQRFAPVFLDLKLHDIPTTVKRALGSVLKLDPLLVNIHALGGQDMMAAAAETVAQHRQVGGRTRLLAVTVLTSMDGASMTKLGINGDPSSMVLRLATLAKESGCDGVVCSAQESAMLRANCGESFLLLTPGIRPRGADAQDQARVMTPSEAISAGSTWIVVGRPITHAADPAAAAESILSEMGKADP

SEQ ID NO: 76355 - DNA, 672 bp, Unknown
  Obtained from environmental sample
  misc_feature (1)..(672): n is a, c, g, or t
atggaagccgcctataggaacaaccctgacgaagccctgcatatctggggggggcagccgagggcgcaagggaataacgctgtactctctagggtagacataagagccgccatgacccgcgaagctactgtaacagaccccgatgaaataggagtagacgtagcaaggttcggggacgataacaccgagctataccgtaggaagggcgcaaaaacggtagcccatgaatcctactccaagaaagacaccgtatttgtagcaaatgccgcttggaatatggcagagaaaagcaggaacgtagtgattaaagttgacgataccggcgtaggcggcggagttacagataacctcagaaaattaggagcaaacgtagtacctattaattttaacggcgttcccaaaaataaagttaagtatacaagcgtagccgatgagatgtggtttgaatttcccataaaagagattgcgataccagatgacccaaagcttatggaagagctttctggaaggaagtacgattatgaccatatagggcgtaaaaaagttgaatcaaagaaagattttaagaaacgctatggtagatcgcctgataaggctgacgctttattattggctttttacaaggactacaaacacgggagtagcgtaacaatagggcaattaaggatttaa

SEQ ID NO: 76356 - protein, 223 aa, Unknown
  Obtained from environmental sample
  misc_feature (1)..(223): Xaa is any amino acid
MEAAYRNNPDEALHIWGGQPRAQGNNAVLSRVDIRAAMTREATVTDPDEIGVDVARFGDDNTELYRRKGAKTVAHESYSKKDTVFVANAAWNMAEKSRNVVIKVDDTGVGGGVTDNLRKLGANVVPINFNGVPKNKVKYTSVADEMWFEFPIKEIAIPDDPKLMEELSGRKYDYDHIGRKKVESKKDFKKRYGRSPDKADALLLAFYKDYKHGSSVTIGQLRI

SEQ ID NO: 76357 - DNA, 474 bp, Unknown
  Obtained from environmental sample
  misc_feature (1)..(474): n is a, c, g, or t
ttgcggcacaccgtatccgccagtggtattatattttctggcgctaacccatcatcgacaacactatctatgcttaacataaatccatccctactgtcagaaccaggtgtaaatcagttcccgcctcatgagcccgacgttaatccactcctgtcgcttgaacctggtactaatctgtctccatcatctgagcctgatgttatcccacttccaccgcctgaacctgacttagacccttccctgtcgccacttgaaagcccaaacgccagtccgccttccccgtcgcagccttccgaaggcccaggcgccaagccggccccctccccgtcgcagccctccgagggcccaggcgccaagccggccccctccccgtcgcagccctccgagggaccaggcgccaagccggccccctccccgtcgccaccctccgagggcccaggcgctaagccagccacatcccctccacattcatga

SEQ ID NO: 76358 - protein, 157 aa, Unknown
  Obtained from environmental sample
  SIGNAL (1)...(23)
  misc_feature (1)..(157): Xaa is any amino acid
MRHTVSASGIIFSGANPSSTTLSMLNINPSLLSEPGVNQFPPHEPDVNPLLSLEPGTNLSPSSEPDVIPLPPPEPDLDPSLSPLESPNASPPSPSQPSEGPGAKPAPSPSQPSEGPGAKPAPSPSQPSEGPGAKPAPSPSPPSEGPGAKPATSPPHS

SEQ ID NO: 76359 - DNA, 471 bp, Unknown
  Obtained from environmental sample
  misc_feature (1)..(471): n is a, c, g, or t
gtggcaaggggaaggaacgttcagtatgtggctagctcctgcttaagcctcttactaagcgccagggtatcgctttctcctccggacgatgaggaaatgatggcggggttggcacataaacttcatgaatgtggaggggatgtggctggcttagcgcctgggccctcggagggtggcgacggggagggggccggcttggcgcctggtccctcggagggctgcgacggggagggggccggcttggcgcctgggccctcggagggctgcgacggggagggggccggcttggcgcctgggccttcggaaggctgcgacggggaaggcggactggcgtttgggctttcaagtggcgacagggaagggtctaagtcaggttcaggcggtggaagtgggataacatcaggctcagatgatggagacagattagtaccaggttcaagcgacaggagtggattaacgtcgggctcatga

SEQ ID NO: 76360 - protein, 156 aa, Unknown
  Obtained from environmental sample
  SIGNAL (1)...(25)
  misc_feature (1)..(156): Xaa is any amino acid
MARGRNVQYVASSCLSLLLSARVSLSPPDDEEMMAGLAHKLHECGGDVAGLAPGPSEGGDGEGAGLAPGPSEGCDGEGAGLAPGPSEGCDGEGAGLAPGPSEGCDGEGGLAFGLSSGDREGSKSGSGGGSGITSGSDDGDRLVPGSSDRSGLTSGS

SEQ ID NO: 76361 - DNA, 315 bp, Unknown
  Obtained from environmental sample
  misc_feature (1)..(315): n is a, c, g, or t
ttgaaagcccaaacgccagtccgccttccccgtcgcagccttccgaaggcccaggcgccaagccggccccctccccgtcgcagccctccgagggcccaggcgccaagccggccccctccccgtcgcagccctccgagggaccaggcgccaagccggccccctccccgtcgccaccctccgagggcccaggcgctaagccagccacatcccctccacattcatgaagtttatgtgccaaccccgccatcatttcctcatcgtccggaggagaaagcgataccctggcgcttagtaagaggcttaagcaggagctag

SEQ ID NO: 76362 - protein, 104 aa, Unknown
  Obtained from environmental sample
  misc_feature (1)..(104): Xaa is any amino acid
MKAQTPVRLPRRSLPKAQAPSRPPPRRSPPRAQAPSRPPPRRSPPRDQAPSRPPPRRHPPRAQALSQPHPLHIHEVYVPTPPSFPHRPEEKAIPWRLVRGLSRS

SEQ ID NO: 76363 - DNA, 729 bp, Unknown
  Obtained from environmental sample
  misc_feature (1)..(729): n is a, c, g, or t
gtgaggagagaacctatgggtgaagaatgtgtaacgaaccagatcgagtactttcgcgtttcctgcaaagtggcagattacctgccgtttgataccatcgaggaattccagggaaatttcaaaaagcgaaccaaaaaagaagttgaacaaataatcacctcaattctcaagttcactttttcatttcccttattcgtttggcaaaacaacggtcataactggtgcttggacggtcacggaagaatactcgcggttgtgacgatggcgcggcgttattacgcaatagacagcgaagggaatctttacatcaagaaagaaccgccaccgccaatcccactccttcctgtcgttttcattgaagcggagaacgaagaagaagcgaagcagaaaatgctccggctcaattcccaatacggcactatcgaaattgacggcttccgcgccttcattgatggattgaaaattgattggagtgagcttgcgctgccgaacggcggtttaattcaaatccctgacattttcccgggtgaagccgatcaccgcaccttagcggagcggtttattgttcctcccctgtccgttttccgtgtcgcttctggatattggcagcaacgaaaaaaggcatggatctccctgggaatacagagcgagaaaggcagggatgacggaatgctcaagaatatggcagccctgcgaagaaagccagcgctcggccgatctgatccttga

SEQ ID NO: 76364 - protein, 242 aa, Unknown
  Obtained from environmental sample
  misc_feature (1)..(242): Xaa is any amino acid
MRREPMGEECVTNQIEYFRVSCKVADYLPFDTIEEFQGNFKKRTKKEVEQIITSILKFTFSFPLFVWQNNGHNWCLDGHGRILAVVTMARRYYAIDSEGNLYIKKEPPPPIPLLPVVFIEAENEEEAKQKMLRLNSQYGTIEIDGFRAFIDGLKIDWSELALPNGGLIQIPDIFPGEADHRTLAERFIVPPLSVFRVASGYWQQRKKAWISLGIQSEKGRDDGMLKNMAALRRKPALGRSDP

SEQ ID NO: 76365 - DNA, 876 bp, Unknown
  Obtained from environmental sample
  misc_feature (1)..(876): n is a, c, g, or t
gtgagggcgtggtttttggtgacgcgggcgctaatcacctcttttaccatgcccgcgaataatgttacggtacaggtgacttactgggactcgtacgacgaaacgttcacagatagaagagacgaaaaaccatacacatacggggtggtggagatagggaataggaaatggttggcggaaaacctgaattatgcaaataatgggaattctggttgtatttccgacgaccctaactgtgaacggtatgggagatattataaatgggcggcggcgatggggcttgacgcgaagtataataacgtgaaatggtctagtgaagacggttatgttaaccgtcaaggtgtttgtcctgacggatggcatataccaaattatcaggaatgggcggggttggagattgcggcaggtggaaaggcggaggccggttatcacttgaaaacgacatttggttggatatacaaagtagggactattagacaggttaataatggggtagatacgtatggtttttcggcgatgccggcaagccgcttttcgtatggatcgggtggtaatgatgacgctgggtatgggatatgggttgagaatgaaagtaacgctgataatggagaagtctatacggcgcaactttgggctggaggaatgcacgactatgaatctcacgccagttatttaacgggttacatatatgggggttcttttagtttaagtaaaaatgctagctttaacgtgagatgcgtggcgtataaagatacgctaacgcttacaattaaagacgagggcgccggcggcagtgttacgattttagacgttaaaaacgacgaagaaaaggaagataaaaacggcaaaaagattgtgccgggcaggaaggtttga

SEQ ID NO: 76366 - protein, 291 aa, Unknown
  Obtained from environmental sample
  SIGNAL (1)...(21)
  misc_feature (1)..(291): Xaa is any amino acid
MRAWFLVTRALITSFTMPANNVTVQVTYWDSYDETFTDRRDEKPYTYGVVEIGNRKWLAENLNYANNGNSGCISDDPNCERYGRYYKWAAAMGLDAKYNNVKWSSEDGYVNRQGVCPDGWHIPNYQEWAGLEIAAGGKAEAGYHLKTTFGWIYKVGTIRQVNNGVDTYGFSAMPASRFSYGSGGNDDAGYGIWVENESNADNGEVYTAQLWAGGMHDYESHASYLTGYIYGGSFSLSKNASFNVRCVAYKDTLTLTIKDEGAGGSVTILDVKNDEEKEDKNGKKIVPGRKV

SEQ ID NO: 76367 - DNA, 822 bp, Unknown
  Obtained from environmental sample
  misc_feature (1)..(822): n is a, c, g, or t
atgaaagcaccaggcttgcccgccgatcaacaatttttcgccgatctgttcagcggcctggtgcttaacccgcaactactggggcgcgtctggtttgccagccagcctgcctcgttgccggtgggcagtttatgtattgattttccccgtctggatatcgtgctgcgcggcgaatacggcaatctgctggaagcaaagcagcaacgtttggtggaaggagaaatgctgtttattccggcgcgcgcggctaatttaccggtcaacaacaaaccggtgatgctgttaagcctggtgttcgctccgacctggcttgggttatcgttttacgatagccgcaccacgtcgttgttgcatcctgctcgccagatccagcttcccagcctgcaacgcggtgaaggtgaagcgatgcttaccgccctcacccatcttagccgttcgccgctggagcaaaatatcattcagccgctggtgttaagtttgctgcatctttgccgtagcgtggtgaatatgccgccgggcaattcgcagccgcgcggcgattttctctatcacagcatttgtaactgggttcaggataattatgcccagccgctcacccgcgagagcgtggcgcagttttttaatatcacgcccaatcatctgtcaaaactgtttgctcagcatggaacgatgcgttttatcgagtatgtgcgttgggtgcgaatggcgaaggcgaggatgattttgcagaaatatcatctgtcaattcatgaagtggcacagcgttgcggttttccggatagcgactatttttgtcgcgttttccgcgtcagtttggtctga

SEQ ID NO: 76368 - protein, 273 aa, Unknown
  Obtained from environmental sample
  DOMAIN (185)...(231): Bacterial regulatory helix-turn-helix proteins, AraC family
  misc_feature (1)..(273): Xaa is any amino acid
MKAPGLPADQQFFADLFSGLVLNPQLLGRVWFASQPASLPVGSLCIDFPRLDIVLRGEYGNLLEAKQQRLVEGEMLFIPARAANLPVNNKPVMLLSLVFAPTWLGLSFYDSRTTSLLHPARQIQLPSLQRGEGEAMLTALTHLSRSPLEQNIIQPLVLSLLHLCRSVVNMPPGNSQPRGDFLYHSICNWVQDNYAQPLTRESVAQFFNITPNHLSKLFAQHGTMRFIEYVRWVRMAKARMILQKYHLSIHEVAQRCGFPDSDYFCRVFRVSLV

SEQ ID NO: 76369 - DNA, 402 bp, Unknown
  Obtained from environmental sample
  misc_feature (1)..(402): n is a, c, g, or t
atggcgagggccgagtgccgcaccattgggcacatttcgggggccccggttaatgtgctgggggacggaataaacaagtttttgaatatcatttttttaatgttttcgcatcctggctcggtgattctcatagacgaaatcgaaaatgggtttcactattccttttttccaaagctatgggaaatcatcggaaatgtgtgtcaagaaacaggttgccagattttcgccacgtcgcacagctacgagtgtatagaggctgcgagttgccttgcgtcaaacgaggataaacccgatctgttcagattcatgaggctcgacagaataggtgatgccatagtccccaaggcttatgaaaatgactcttttgaatattccatcagcaatgattgggaagtgagataa

SEQ ID NO: 76370 - protein, 133 aa, Unknown
  Obtained from environmental sample
  misc_feature (1)..(133): Xaa is any amino acid
MARAECRTIGHISGAPVNVLGDGINKFLNIIFLMFSHPGSVILIDEIENGFHYSFFPKLWEIIGNVCQETGCQIFATSHSYECIEAASCLASNEDKPDLFRFMRLDRIGDAIVPKAYENDSFEYSISNDWEVR

SEQ ID NO: 76371 - DNA, 855 bp, Unknown
  Obtained from environmental sample
  misc_feature (1)..(855): n is a, c, g, or t
gtgctgcaaagactttccgccacgcccacatggaccagcggcatggcgctggtggccgaccactggccggcccagcatcgaggcaaggccatgagtacgtgctttgcattcgccaacctcggcgtactcttggggccgccattcgcgggctatgtgtcagaaaattttggcccaagggtcccattcttggtcgcggcggggttggcgttgatggatgcggcactccgagtctggctgttgcaggacaaagaaaaaggggacgctgaagtaatccccttggggcggctgctgaaaaatagggaactatgcctgctggcgggcgtgatggctatgggttcggcactttgggccatgctggagtcggcgcttcccatagactttgattcgaggggctggtcccaaagcctcatagggctttgctttgcctttgccgcgctggcccacacgctcacgtcgccccttgctggggctatggctgataaattcagtagaaagaaaatgatcgtggccggtctgctactgacgacattcctagtacccatccccgcctttgttcaatccgcagtgccgaccttcgccacaatgatgggcattgggctggtggccacgctgatgtcaagccctgtgagtcccgccgtgactgcggcggttgacaggatgggggagggcgggggcggctattcgtctgcgtttgggatgatcaacatgtcatacgcaataggcatgatggtagcccctctgctgggtggcgtaggtgttgacttcatgggcataaaggccagcttgttgctctttggcgcgtgcttcgctgcgtttgcactggtgataaggcggctgctgccacgcgaggcatga

SEQ ID NO: 76372 - protein, 284 aa, Unknown
  Obtained from environmental sample
  DOMAIN (1)...(254): Major Facilitator Superfamily
  misc_feature (1)..(284): Xaa is any amino acid
MLQRLSATPTWTSGMALVADHWPAQHRGKAMSTCFAFANLGVLLGPPFAGYVSENFGPRVPFLVAAGLALMDAALRVWLLQDKEKGDAEVIPLGRLLKNRELCLLAGVMAMGSALWAMLESALPIDFDSRGWSQSLIGLCFAFAALAHTLTSPLAGAMADKFSRKKMIVAGLLLTTFLVPIPAFVQSAVPTFATMMGIGLVATLMSSPVSPAVTAAVDRMGEGGGGYSSAFGMINMSYAIGMMVAPLLGGVGVDFMGIKASLLLFGACFAAFALVIRRLLPREA

SEQ ID NO: 76373 - DNA, 375 bp, Unknown
  Obtained from environmental sample
  misc_feature (1)..(375): n is a, c, g, or t
ttgacgagtatgaggttaccgccggggtggaggacgacgtgccgggcaagaggcctccggagttcggccccatacacgtcgccaagcccggcggccccggcctctacgagcctccgcgcggccagctcacgctcgccgccgacccgccgccgcagacgcccgccgacgaggcgcccggccagctttcgctgccgcctaacgtgcgcccgtacatcccgccgcgtctgtccagacccgccgaacagccgttcgccgcgccgccgcccgcccagagcgcccagcccgccgcgccgcagccgcggttcgcgcccaagcgcacgcccgacgagatcgccgcgatcaaggccgacatccgcgaacttacagaactcgtaa

SEQ ID NO: 76374 - protein, 124 aa, Unknown
  Obtained from environmental sample
  misc_feature (1)..(124): Xaa is any amino acid
MTSMRLPPGWRTTCRARGLRSSAPYTSPSPAAPASTSLRAASSRSPPTRRRRRPPTRRPASFRCRLTCARTSRRVCPDPPNSRSPRRRPPRAPSPPRRSRGSRPSARPTRSPRSRPTSANLQNS

SEQ ID NO: 76375 - DNA, 687 bp, Unknown
  Obtained from environmental sample
  misc_feature (1)..(687): n is a, c, g, or t
ttgggtacaaaattgaaaagtaaaatgataaagaggaaaaccgattactccttaataaaacgcaaactatactcttatgttcttgtcatggtaatagcggctgtcgtgattgcagtatctttgcgccagcttgtgcggggagtagtcggagagtggattgtcggtcttttacaaaacaattttcatttaagagaactggacgccatgagggtatatcaatacgcgatacggaacaatatagatataataatatacgttgcggttgccttttgttttttctttttatgccgaatgttgctctccagctttatggggtattttgacgaggtaaataccgggatagactcgcttattaagagcgaagatacacaaatagaactttccgcggaaatggcctttattgagcaaaagttaaacacattgaaacaaacgcttgaaaaacgtgaacaggacgcaaagctgaccgaacaacgcaagaatgatatggtgatgtaccttgcccatgatataaaaacgccgctgacttctgtcattgggtacttaagcctgcttaacgaagcttctgatatgccgcctgagtcaaaagcanaataccttgatatagcgctggaaaaggctcattggcttgaaaagctcgtggacgaattttttgaaatacgcggtatagctttcaaacgccatcgctga

SEQ ID NO: 76376 - protein, 228 aa, Unknown
  Obtained from environmental sample
  DOMAIN (158)...(222): His Kinase A (phosphoacceptor) domain
  misc_feature (1)..(228): Xaa is any amino acid
MGTKLKSKMIKRKTDYSLIKRKLYSYVLVMVIAAVVIAVSLRQLVRGVVGEWIVGLLQNNFHLRELDAMRVYQYAIRNNIDIIIYVAVAFCFFFLCRMLLSSFMGYFDEVNTGIDSLIKSEDTQIELSAEMAFIEQKLNTLKQTLEKREQDAKLTEQRKNDMVMYLAHDIKTPLTSVIGYLSLLNEASDMPPESKAXYLDIALEKAHWLEKLVDEFFEIRGIAFKRHR

SEQ ID NO: 76377 - DNA, 492 bp, Unknown
  Obtained from environmental sample
  misc_feature (1)..(492): n is a, c, g, or t
gtgatcgcgaggaaccggaaagcgcttgatggcgttgctacagtacagcttccggtatcagagcttgctacaaatgaattcaaaggtgccgggatgataggcgcaatcaatgtacctgctccgggattccagaatgcgaaggtggtaacgctttccgttccgattatttatggaccgcttgtaaaattgcttgaggctggagaaacagagacgcttgatttgagaaatgagatcgttgttaccgataaggacacacacgcgctgctacgtgtaccaaataggtgggtatttaaagggccaataagcaaagccgacccaggaaaaatagaaggggctgcgccgtctgacgctacatttgaaatgcaagtttactatttacatcactggatggatggtaatgacgttgaggaatgggatgtatttaaaatgattcatacggtgaacggaaaagacctattggcggtaacacgacaaaatatccttgttggataa

SEQ ID NO: 76378 - protein, 163 aa, Unknown
  Obtained from environmental sample
  DOMAIN (1)...(161): Phage tail tube protein FII
  misc_feature (1)..(163): Xaa is any amino acid
MIARNRKALDGVATVQLPVSELATNEFKGAGMIGAINVPAPGFQNAKVVTLSVPIIYGPLVKLLEAGETETLDLRNEIVVTDKDTHALLRVPNRWVFKGPISKADPGKIEGAAPSDATFEMQVYYLHHWMDGNDVEEWDVFKMIHTVNGKDLLAVTRQNILVG

SEQ ID NO: 76379 - DNA, 777 bp, Unknown
  Obtained from environmental sample
  misc_feature (1)..(777): n is a, c, g, or t
atgaaggctttggcagcagctacagggccggtaggcttaggcatccttgctgttggtactgcgtgtgttggcattggagtggccatcgatcatattgcaaatcgaggcaaaagagcaatggaagtaacaaaagaaattgcagataacgctcaggagcttgcccaaaaaaccaaagaggtggctgatgcagcggttaaatctggcgaaataggggctgcttcaaaaataaaagaagcggtagccgccgcaaaaatcgcaaaagatgcacaagaaaaattgaaacttggcgatgaacatgctatagcaaatgttggtaaatatgcaaaagaagtcgctgaagcacaaaaagaggttgcaagatatgaaaagaatttagcttctgcgattgaaaaagcgaatgagaacataaaaaacggaaacttacaagctgctgaggatttcgcaaaaattgccgaggcgcaagaaaagaatttaatgaaagcgcgagaaaaatttgagcaagcgagagcaaaagccgatgaggttcaactaagggcgcaagaagcagaaaaaagaagaaccaaagaattacaagatgcgtttgataatggaaaaataacagcagaacaactaaggacaagcgctgctgcgcttgaatctgcatgtaaagcaggagcggcggcgtttaagagcggcatagtgaatgatataggtcggttttttggaacagatgaaatcagtaaaaatctccgcaaaagtagggttcccgaaataaacgctgccaccaggaaagaatga

SEQ ID NO: 76380 - protein, 258 aa, Unknown
  Obtained from environmental sample
  SIGNAL (1)...(23)
  misc_feature (1)..(258): Xaa is any amino acid
MKALAAATGPVGLGILAVGTACVGIGVAIDHIANRGKRAMEVTKEIADNAQELAQKTKEVADAAVKSGEIGAASKIKEAVAAAKIAKDAQEKLKLGDEHAIANVGKYAKEVAEAQKEVARYEKNLASAIEKANENIKNGNLQAAEDFAKIAEAQEKNLMKAREKFEQARAKADEVQLRAQEAEKRRTKELQDAFDNGKITAEQLRTSAAALESACKAGAAAFKSGIVNDIGRFFGTDEISKNLRKSRVPEINAATRKE

SEQ ID NO: 76381 - DNA, 864 bp, Unknown
  Obtained from environmental sample
  misc_feature (1)..(864): n is a, c, g, or t
atggtaagcgggaagacgaagggtccgcccgaaccgccggcgctcacgtttgacaccgatgatatcgccttcggtgatattaaagttcgctgggaagaaaatgacaatgtgacagcttatgaggttaagtatggtgttgccgcgactgtcaccgatgctgatgcaggaaccgctgtggcagcggcaagcgtcaacgagaccggggcgaatatatcgagcctgtctgacgcaaccgagtaccggatatttgtccgggcgcagaacaatattggctggggcgaatggggcaatgctacggtgactaccagggtgccggcattggctaccccggtaattgccatatcccagccggcatggtattcaaatgggacgaattactacggacagttgcaggtacactggacgccggtgcctggggcgacttcttacgaaattgccaggagcacaaccaataattattatgctgcttctggggttactaaactgacacatacgcctacacctgattcagacactacaaccaataaccgcaaccccgccgataacaccctgtaccagattaccggtttgaacaccggttctacctggtatatctgggtaacggccattcgcagttcggatggtgaacggagcctgcacgttgccggatcaacggcaaatgtcccgaatgttgggattgacgcgcggacaaggggtcagcttaaattgcagttgtcggatgtatcgggcgccacaagctacgaagtgttggaaaactcgacaaaagacattaccacggcaacgcccgttgcgcttggcgctaaccgatccgtcacaggacctttggcgatgaaaacaagcgccattactgggtgcgggtcataa

SEQ ID NO: 76382 - protein, 287 aa, Unknown
  Obtained from environmental sample
  DOMAIN (9)...(96): Fibronectin type III domain
  misc_feature (1)..(287): Xaa is any amino acid
MVSGKTKGPPEPPALTFDTDDIAFGDIKVRWEENDNVTAYEVKYGVAATVTDADAGTAVAAASVNETGANISSLSDATEYRIFVRAQNNIGWGEWGNATVTTRVPALATPVIAISQPAWYSNGTNYYGQLQVHWTPVPGATSYEIARSTTNNYYAASGVTKLTHTPTPDSDTTTNNRNPADNTLYQITGLNTGSTWYIWVTAIRSSDGERSLHVAGSTANVPNVGIDARTRGQLKLQLSDVSGATSYEVLENSTKDITTATPVALGANRSVTGPLAMKTSAITGCGS

SEQ ID NO: 76383 - DNA, 840 bp, Unknown
  Obtained from environmental sample
  misc_feature (1)..(840): n is a, c, g, or t
ttgaacaatcccgaatacaatccgttggatcccgatgtgaaaacacgacacctgtcggctgccgaacgaagcgaaatcaacgataaaattcaggatcgggttattcgacaaaacatcaatttcatgaacattcgaaaagaatacaccaataaagatgccaaacagcatttttatgacatcgagaacttcacagcgtcgtattcttactcggggcaaagggcctggaatgtggatgtcaaaaacaacaacaaggatcttcacaaagggggattttcctacgcatacaatatccctgccaaatccgtaacgccattcgccaaaacctctttggccaagcaaaaatcaatggctttcatttcggatttcaatttcagctaccttccgaaatcattttctttcaacaccgaggtcttgcgtgaatttaacgaaaatgaacttcgaaacaaaagtgtttcggatcttatcatcaaaccaacgtatttcaaaaaatttgactggatccgaaattacgatatgaaatgggatttggccaaaagtattcaattcgactacaccgcttcggccattgcctttattgaagagcccatcggaagaatcgacacgcgagaggaacgagattccatctggagaagcattcgcaatttgggaagcttacggaatttcaatcaaacttcgaatttagtgtggattatacccatcaacaaaattccggttttaaactggctttcggcaacagcaagctacaacagtcattaccgatggggaggcgtcatgaatgccaccaaacagttgggaaatcgattgaaacgcccatactcaaaccctttgcgggacgcttga

SEQ ID NO: 76384 - protein, 279 aa, Unknown
  Obtained from environmental sample
  misc_feature (1)..(279): Xaa is any amino acid
MNNPEYNPLDPDVKTRHLSAAERSEINDKIQDRVIRQNINFMNIRKEYTNKDAKQHFYDIENFTASYSYSGQRAWNVDVKNNNKDLHKGGFSYAYNIPAKSVTPFAKTSLAKQKSMAFISDFNFSYLPKSFSFNTEVLREFNENELRNKSVSDLIIKPTYFKKFDWIRNYDMKWDLAKSIQFDYTASAIAFIEEPIGRIDTREERDSIWRSIRNLGSLRNFNQTSNLVWIIPINKIPVLNWLSATASYNSHYRWGGVMNATKQLGNRLKRPYSNPLRDA

SEQ ID NO: 76385 - DNA, 849 bp, Unknown
  Obtained from environmental sample
  misc_feature (1)..(849): n is a, c, g, or t
gtgagacacgtcagcaagcgggctgtcactccaggcgtngacggcgttctttggcaaacgaacgcggaacgaatgcgggctgccatatctcttaataccgatagatattatgcgtctccgacaaaactnttcatcatcagagaatccaccagcaagaaagaacgacgtatacaaatcccgaccgtctttgatcaagcaatgcaaatattatattcgtatgctctcgaccctgtttccgaaacaactgcggacagaacgtcctttgccgctcggcgtcaccgctcgatcgcagatttacatgtctatctaatgcgagcgcttaacccaaatcaaccttacggaatgccattgtacgttgtaaaaacagatgtaaagatgtgctacgcaaatatcagtcacgactggcttagaaaaaatattcccatagatattcatattttaaatcaattcataaatgccggttacgtgttcaaaggggagttctttccggcccgagatgaggacaacggtattccgataggcggggccatctcccctattttggccaacatgacgttagacggagcacaacgagccatatacctcggtctccacggacaggagacgaacattgattacattgacggccagctactgcgctatgccgatgatatgctaataacagcccgatcctaccaaaccaccgaaaaaatcattgcaattctggaagatttccttaaagatcgcggcttgaaattgtccgcagaaaaaacaaagcgtatacccctacagttcgagggatttgattttctatcgcggcgttatcactgtcttcgccgcttagggaatcaaaactctcggccattctga

SEQ ID NO: 76386 - protein, 282 aa, Unknown
  Obtained from environmental sample
  DOMAIN (39)...(263): Reverse transcriptase (RNA-dependent DNA polymerase)
  misc_feature (1)..(282): Xaa is any amino acid
MRHVSKRAVTPGVDGVLWQTNAERMRAAISLNTDRYYASPTKLFIIRESTSKKERRIQIPTVFDQAMQILYSYALDPVSETTADRTSFAARRHRSIADLHVYLMRALNPNQPYGMPLYVVKTDVKMCYANISHDWLRKNIPIDIHILNQFINAGYVFKGEFFPARDEDNGIPIGGAISPILANMTLDGAQRAIYLGLHGQETNIDYIDGQLLRYADDMLITARSYQTTEKIIAILEDFLKDRGLKLSAEKTKRIPLQFEGFDFLSRRYHCLRRLGNQNSRPF

SEQ ID NO: 76387 - DNA, 639 bp, Unknown
  Obtained from environmental sample
  misc_feature (1)..(639): n is a, c, g, or t
atggccgagcggccgaggccggtattgagctgcaaagaaaccctcgcggagattgccggaaaagagaaagaatattccgatctgaaaacggaaatccaggccgctattgtcgaaggccaggaatgggagcttatcgcaaaagcattcggtaaggacggcatccaggccctggaacttgacgcgctcgcgcccggaatttcggagaccgcgaaccggatattggaaagcgcctacggcgacaggttcaagatttctatagaaaccacccgcataggaggcgcggggaaaaagacaaagcagatcgaggatttcgttatcaaggtgattgacagcgaagacggtgaggccgtaaatcttgaggataaatcaggaggagaggcggtttggataaaacgtgctatctatgacgccttcgcggtgatccggaaacggaatacaaactttgcgttccttacctgtttccaggacgagacggacggcgcgttggacagcgcggcaaagacagcttactgccggatgcttgaggcggcacatgcggagagcaaactgaggcatacaatcattatcactcacagcaatgaagtgaaggcgatgattgaacagagaatcgacatggaaaacttaggaggcgcggcgtga

SEQ ID NO: 76388 - protein, 212 aa, Unknown
  Obtained from environmental sample
  misc_feature (1)..(212): Xaa is any amino acid
MAERPRPVLSCKETLAEIAGKEKEYSDLKTEIQAAIVEGQEWELIAKAFGKDGIQALELDALAPGISETANRILESAYGDRFKISIETTRIGGAGKKTKQIEDFVIKVIDSEDGEAVNLEDKSGGEAVWIKRAIYDAFAVIRKRNTNFAFLTCFQDETDGALDSAAKTAYCRMLEAAHAESKLRHTIIITHSNEVKAMIEQRIDMENLGGAA

SEQ ID NO: 76389 - DNA, 375 bp, Unknown
  Obtained from environmental sample
  misc_feature (1)..(375): n is a, c, g, or t
ttgttgaaggatttcgggtcgggtactgagcggaaagccctggggattatcgagacacagggccgggcgcctctgatagaagcggttgattgcgctattaaggcagcccaggtggatattctggccagttattttgtgggaggcggctgcaacgccgtaaccctggtcggtgatgtgggctctttaagggcggcccttgacgccgcccgggctctgatggacagcaagggtgtcagcgggctcacgcatctgataccgaggcttgccgagcaggtatggccgttggcggtaccggcggcggtgcccaggccggtgaataccgcgaaagccagaaaagtgaaagcaaaaagggaaaaagggaatggaactgcgtga

SEQ ID NO: 76390 - protein, 124 aa, Unknown
  Obtained from environmental sample
  DOMAIN (12)...(88): BMC domain
  misc_feature (1)..(124): Xaa is any amino acid
MLKDFGSGTERKALGIIETQGRAPLIEAVDCAIKAAQVDILASYFVGGGCNAVTLVGDVGSLRAALDAARALMDSKGVSGLTHLIPRLAEQVWPLAVPAAVPRPVNTAKARKVKAKREKGNGTA

SEQ ID NO: 76391 - DNA, 558 bp, Unknown
  Obtained from environmental sample
  misc_feature (1)..(558): n is a, c, g, or t
atggaactgcgtgatattgatttgatttctattcaggaaacccgggacttagtggcccttgccaagaaggcccaggctgtttaccgtgaatgcgatcagatcgctattgaccgtatagtggtggcagtcgcggaagcggcggaagccgaggcggttcccttagcgaaactggcaaatgaggaaacaggttttggaaaatgggaagacaaggttatcaagaatctctttgcttcccggaatgtgtacaactatatccgcagcttaaagacggtcggtatcatcaaagaagacacagtgaacggaatcattgagattggcgtacctgtcggggtagtggcgggccttatcccttccacaaacccaacatctacggtgatcttcaaatcccttatcgccctcaaagcaggctgtgccatagtcttctccccacatcccagtgcgaaaaaagcgatcatagcgacagtggatattatccgcgaggtgctggacaagcagggggtttcacatgaccttgtaagcgttataagcaccccaccaaagaggccaccgatgccctga

SEQ ID NO: 76392 - protein, 185 aa, Unknown
  Obtained from environmental sample
  misc_feature (1)..(185): Xaa is any amino acid
MELRDIDLISIQETRDLVALAKKAQAVYRECDQIAIDRIVVAVAEAAEAEAVPLAKLANEETGFGKWEDKVIKNLFASRNVYNYIRSLKTVGIIKEDTVNGIIEIGVPVGVVAGLIPSTNPTSTVIFKSLIALKAGCAIVFSPHPSAKKAIIATVDIIREVLDKQGVSHDLVSVISTPPKRPPMP

SEQ ID NO: 76393 - DNA, 909 bp, Unknown
  Obtained from environmental sample
  misc_feature (1)..(909): n is a, c, g, or t
gtgaagaacttggtcgtcgtggaaatggaaagggtcaggctcctcgccaaggtgtccatagacatagacataaagacgggcggggtctcattttcgctgccggactacgcattgtccagcaaggacaccatcatcgaggactctgtctggcaggagtgcaaggacgacttggtggggagccgggagacctggggcatggcagaaattgggtaccgcccccctcctgagggtgaaaaggcaaccagcgcgaacaggggcaaaatcaaactgacggcgttcaagagcttctgcccgtacaccatggacatcgagtatttcaaggacgcgcgcaagaacttcacattggaagaatggctggacgtgctgctgggggccgtggactacaacgcggctggctaccagggcaacgaagaagtgaagctgacaatgctcacgcgcctgctcccgtttgtggaaaagaggctaaacctgattgaacttgccccaaagggaaccggcaagtcgtatctgttcggcagcgtcagccgcttcggctggctctcgggcggcggtgtgatgagccgcgccaagatgttcttcgaccaaaccaggagggccactggcctagtgtcggggtacgactttgtggtgctggacgaagtccagaccatcaccttcactgacgttgacgaaatgcgtgccgcgctcaagacctacctcgaatctggcgtattcacggtcggcaactatgagggaagggccgaggctggtgtcgtgctatgcggaaacataaagaaggagacgatggacgctgacgggtccataaacatgttcgaggagcttccgaatgtgttccacgagtcggcgctaatagagcgcttccacggctttcataagggctggaatatacccaggatgacagaagaatga

SEQ ID NO: 76394 - protein, 302 aa, Unknown
  Obtained from environmental sample
  misc_feature (1)..(302): Xaa is any amino acid
MKNLVVVEMERVRLLAKVSIDIDIKTGGVSFSLPDYALSSKDTIIEDSVWQECKDDLVGSRETWGMAEIGYRPPPEGEKATSANRGKIKLTAFKSFCPYTMDIEYFKDARKNFTLEEWLDVLLGAVDYNAAGYQGNEEVKLTMLTRLLPFVEKRLNLIELAPKGTGKSYLFGSVSRFGWLSGGGVMSRAKMFFDQTRRATGLVSGYDFVVLDEVQTITFTDVDEMRAALKTYLESGVFTVGNYEGRAEAGVVLCGNIKKETMDADGSINMFEELPNVFHESALIERFHGFHKGWNIPRMTEE

SEQ ID NO: 76395 - DNA, 861 bp, Unknown
  Obtained from environmental sample
  misc_feature (1)..(861): n is a, c, g, or t
ttgcanagcgttgcacggtcatccaaaggggaacggttgcatgtcattacatcgactattgagcaccactctgtgctggacacatgccgcgccttagaggagaccggggcggagatcacgcgcctgccagtggacgcaaacgggcgtgtttccgcaaacgacgctgtggcggccataaggccaaacactaagctcatttctgtgatgctcgccaacaacgaagttgggacattacagcccatcgccgaactgggggaactgctaagggaaagatgcgcaagggacgtgctgctgcacactgatgcagtgcaggctaccgggcacgtccacatagatgtccagaagctcggagtggacttcctcacggcatcgggacacaaattccatggccccaagggttcgggttttttattcatgcgacaaggagtctgcttgcctccctttgtgtttggcggcagtcaggagagaggcctgcgcggaggcacggagaatgttgctgggattgtaggcatgggccgtgccctggcagaaagcgttgaggaaatgaccgagacaacagtcagattggaatccctcgtcgaggcaaccgtaaggctggttagggctgggataccaacaactcgcgtgaactgcgatacagcaaggaaactgtctggcattctaagcctctgtttggagggggcttctggcgaatccttaatgcacctgctggacataaagggcatttgcgtttcgactggctcagcatgcacgtccgaccacgatgagccttcacacgttctgttggccatgggtctgacggaagtgcaagcaaaatccaccatccgcatttcgtacggcagacacactcggccgctctga

SEQ ID NO: 76396 - protein, 286 aa, Unknown
  Obtained from environmental sample
  DOMAIN (3)...(200): Beta-eliminating lyase
  misc_feature (1)..(286): Xaa is any amino acid
MXSVARSSKGERLHVITSTIEHHSVLDTCRALEETGAEITRLPVDANGRVSANDAVAAIRPNTKLISVMLANNEVGTLQPIAELGELLRERCARDVLLHTDAVQATGHVHIDVQKLGVDFLTASGHKFHGPKGSGFLFMRQGVCLPPFVFGGSQERGLRGGTENVAGIVGMGRALAESVEEMTETTVRLESLVEATVRLVRAGIPTTRVNCDTARKLSGILSLCLEGASGESLMHLLDIKGICVSTGSACTSDHDEPSHVLLAMGLTEVQAKSTIRISYGRHTRPL

SEQ ID NO: 76397 - DNA, 738 bp, Unknown
  Obtained from environmental sample
  misc_feature (1)..(738): n is a, c, g, or t
atggcagggattaagacctttgttcaatcagatcttcgcgtaccgccaacagaaaataatcatatcgtgcgtttaggcgatatgatttcgtatgtcgcaggactaaccaaacaggctgtacgggttgtcatgaccagcccgttcgtaggggcatacaatgcaacggcattgactttgactcaggccactcctgcgaatttagtcgtagatgaagtggttctcgccctaggagatcgtgtgctattggtggggcagaacgatcttacccagaacggcatctatacagttacaattttgggtgtggacggggttacgatggctgtactgacccgcgccgaagatttcaacgacagtactgatattattaacggaacaatcgtgcccgtttcgtacggtacggtaaacggcggcacccaatggaaactgactccagccactataccggcgatactggacaccacgaacctcatattcaataaacaagtctctgacactaagcgggtcgtggaactaatatttgatattgagggcgatgataatacgacaagtttcccgcttgctcataatttagcaacattgaatatgactcatgaaatttatgatagcgagactggtgaaacgatagtgacccagtttacgcgtcttgatatgaatacggtacaggtagatttcggtgtaccttctgccgtaggagattacttcacgctaattattcatgcagaggtggagtcatcataa

SEQ ID NO: 76398 - protein, 245 aa, Unknown
  Obtained from environmental sample
  misc_feature (1)..(245): Xaa is any amino acid
MAGIKTFVQSDLRVPPTENNHIVRLGDMISYVAGLTKQAVRVVMTSPFVGAYNATALTLTQATPANLVVDEVVLALGDRVLLVGQNDLTQNGIYTVTILGVDGVTMAVLTRAEDFNDSTDIINGTIVPVSYGTVNGGTQWKLTPATIPAILDTTNLIFNKQVSDTKRVVELIFDIEGDDNTTSFPLAHNLATLNMTHEIYDSETGETIVTQFTRLDMNTVQVDFGVPSAVGDYFTLIIHAEVESS

SEQ ID NO: 76399 - DNA, 684 bp, Unknown
  Obtained from environmental sample
  misc_feature (1)..(684): n is a, c, g, or t
ttgccacgtttgccgtccacatgctggaggcaaggttttaattccatgctgtccccagggatatatctggcgcacaagcccgtcggccaaagcagcttcgacgtggtgagggcattcaagcgcgtggcgcatgaaaacgaccaaaaaaagtgggcgctgggacacgggggaacactggacccttttgccaacggtctgctgctgattctttcgggccaggccacgcgcctgatggagctgattcacccactgccgaaggtctatgaggccgacgtcgaatggggcgcagagactgacacgggcgaccacctggggagcgtccaattcgagggcgacccgcgcggactgacggaagcggcgctgaatgacgcgctggcgccttttctgggatggaccgagcaggttccgccgaccaccagcgcgaagaagattggcggcgaggcagcctacaaaaaggcgcgtaggggggaagtcgtggagatgaagccgtcccgcgtgtacctgcacgaggccgtgtgggtgtcccactccctgccattcaggagccgcctcaaaataatgtgccgtggcggctactacgtgcgcagtcttgccagggacatcggtcgcgctctgggctgcggggcacacctttccagcctgtacagggcgaccatgacctttcgggacctcggccgattctga

SEQ ID NO: 76400 - protein, 227 aa, Unknown
  Obtained from environmental sample
  DOMAIN (40)...(194): TruB family pseudouridylate synthase (N terminal domain)
  misc_feature (1)..(227): Xaa is any amino acid
MPRLPSTCWRQGFNSMLSPGIYLAHKPVGQSSFDVVRAFKRVAHENDQKKWALGHGGTLDPFANGLLLILSGQATRLMELIHPLPKVYEADVEWGAETDTGDHLGSVQFEGDPRGLTEAALNDALAPFLGWTEQVPPTTSAKKIGGEAAYKKARRGEVVEMKPSRVYLHEAVWVSHSLPFRSRLKIMCRGGYYVRSLARDIGRALGCGAHLSSLYRATMTFRDLGRF

SEQ ID NO: 76401 - DNA, 591 bp, Unknown
  Obtained from environmental sample
  misc_feature (1)..(591): n is a, c, g, or t
atgcctgattcattcctttttgagaatatggaacaaactgattgggaacagactcctttaggcgcatcaaacacatcttccaaaaaaagcggaagaaataaaaaaacagaaattcaagacaagctgccggaaaagcttgataaagcgataaaactccctgttcctgacttttcaaaccctcatcgtaaacttacctgccttgaggttgattttcctatagcccaaataaacgctctttcaaatcttgaaggaaacgcaggaaaacccatttatcaaatgtccaaatggtgggcaagaaggcgttcctctgtgttccgttcgcttcttattgcggcggcaacagaagctcccgatgaaactgatgcggccgctaaaaaagtatgggatcattattactgcaatcaccaaaaggccggaagttataaaaacttaaaggtattggattgttttatgggcggtggtactactttggttgaaggctcccgtcttgggatgcanatgaccggcattgacctcaatcccatagcatggttcgtaactaaaaatgaactcgcctgtagtgatcctggacaagtcaggttttttttttaa

SEQ ID NO: 76402 - protein, 196 aa, Unknown
  Obtained from environmental sample
  misc_feature (1)..(196): Xaa is any amino acid
MPDSFLFENMEQTDWEQTPLGASNTSSKKSGRNKKTEIQDKLPEKLDKAIKLPVPDFSNPHRKLTCLEVDFPIAQINALSNLEGNAGKPIYQMSKWWARRRSSVFRSLLIAAATEAPDETDAAAKKVWDHYYCNHQKAGSYKNLKVLDCFMGGGTTLVEGSRLGMXMTGIDLNPIAWFVTKNELACSDPGQVRFFF

SEQ ID NO: 76403 - DNA, 582 bp, Unknown
  Obtained from environmental sample
  misc_feature (1)..(582): n is a, c, g, or t
ttgcggtcagaagcgaaagacttgatcgaagagcatgacggaattgatctctttatcctggatatcatgctcccgcagatttccggcctggggctattaagcctgatccgaaacgatgccaggcacaggaaaaaggcggtcgtcatgctcacggctntgagcgacgaatacacacaaattctcagctttgacagtctggccgacgactacataaccaagcctttttctccgaaagtattggtcaaacatgtagaagccctgctgcgtcgaaccggcaaaacagcggccagcttgactcaaatcggggatatcgctcttgatacagacggttacacagcctttgaaggcaacgagcgcgttccgctgaccttgcgtgaatttgagcttttgaaagttctgatgatgaatcaacacaaagttttgacccgccagcagctccttaattgggcctggggctacgattacttcggcgacgaacggattgttgacgtccatatcaaaaatctgaggaagaagttcaaagcgaacatcatttccacggttaaaggggtgggatacaaagcagaagccagttatgaatag

SEQ ID NO: 76404 - protein, 193 aa, Unknown
  Obtained from environmental sample
  DOMAIN (1)...(85): Response regulator receiver domain
  misc_feature (1)..(193): Xaa is any amino acid
MRSEAKDLIEEHDGIDLFILDIMLPQISGLGLLSLIRNDARHRKKAVVMLTAXSDEYTQILSFDSLADDYITKPFSPKVLVKHVEALLRRTGKTAASLTQIGDIALDTDGYTAFEGNERVPLTLREFELLKVLMMNQHKVLTRQQLLNWAWGYDYFGDERIVDVHIKNLRKKFKANIISTVKGVGYKAEASYE

SEQ ID NO: 76405 - DNA, 672 bp, Unknown
  Obtained from environmental sample
  misc_feature (1)..(672): n is a, c, g, or t
atgtcttacaagattctgattgtcgaagatgaagagaagttagcccgattcttggaattggaactgacccatgaaggctatcaggtggaaaaagcttttgacggaaagcgcgggttggagttagccgaaacccgcgcttttgacctatgcctgcttgatatcctgctgccgaaattgagcggtatggaggtcttgcgccgcctgcgccgggtatccgatgtgccggtgattcttttgacggctaaagatgccgtaagcgataaagtttccgggctggacgccggagccgacgactatataacgaaaccgttcgcggtggaagaactgctggcgcgcatccgcacggcgctgcgcaagaaaggcggcccaacttctgtcttggaagcgggggccttgcgtcttgatttacagagttattctcttacatatgccgaaacccccattgagctgaccaaacgggaatttgatctcctgcaaaccttactggagaacaaagggattgtcctgacgcgggacgtgctgctcaatcgggtctggggctacgattaccttggcgaaaccaatgtcgtcgacgtttacatccgctacctgcgcagcaaaatcgacgacgtttatcaggtgaagctgattcacacagtacggggcgtgggatacgtgattaaagatgactga

SEQ ID NO: 76406 - protein, 223 aa, Unknown
  Obtained from environmental sample
  DOMAIN (145)...(220): Transcriptional regulatory protein, C terminal
  misc_feature (1)..(223): Xaa is any amino acid
MSYKILIVEDEEKLARFLELELTHEGYQVEKAFDGKRGLELAETRAFDLCLLDILLPKLSGMEVLRRLRRVSDVPVILLTAKDAVSDKVSGLDAGADDYITKPFAVEELLARIRTALRKKGGPTSVLEAGALRLDLQSYSLTYAETPIELTKREFDLLQTLLENKGIVLTRDVLLNRVWGYDYLGETNVVDVYIRYLRSKIDDVYQVKLIHTVRGVGYVIKDD

SEQ ID NO: 76407 - DNA, 945 bp, Unknown
  Obtained from environmental sample
  misc_feature (1)..(945): n is a, c, g, or t
ttggaagtactgaagattttacagaaatcatactataataaggtaaagtgcataatcatagacccgccttatatnacggggaatgacagctttatatatcccgacaggtccaaggaaaatctggaagagtacgacgggcgggtaggcgaacgggacgagagcggctatttgatgaaagaggggctgtttaggaaaaatagtaaggaaaacggacactaccacagcaattggctcagtatgatgctgccgaggctgtttttggctcggaatttgatgagggacgatggggtgatttttgtgcatattgacgataatgaggtacataatttgaggatggttatgaatgagattttcggggaagagaactttgcggcgcaaattatatggcaaaaggtatatagtccaagaatggacgttgaaggtttttcaaattcacacgattatattctttgctatgttaagagtcgtatagactcgataaaaaaagaagattttcaacaaaatagcgcccaatttaattttgttgaccctaagacgaagaagaattatagacgtagaagcgttcgaaaagaaggcagtcattcgacacgaagcgaacgtccgaatttattctttgccttaacagcccctgacggaacagagatatatccgataaaacccgatggaacagagggatgttggcgttggagtatggacacctacatcgaaaatctcaatcttgatttggttgagtgggtaaataccgataacggttggcaagtatatgcaaaacaattcttagacgagaatgcaactaaaccaccagaaacattatggtttcataacgaagtcagtcacaatcataatgcgatggaagaattgaaaaaaattctcaatggtaaattattcgatagcccaaagcctaaggaattaataattaagatgttaaaaattctactactataa

SEQ ID NO: 76408 - protein, 314 aa, Unknown
  Obtained from environmental sample
  DOMAIN (15)...(224): DNA methylase
  misc_feature (1)..(314): Xaa is any amino acid
MEVLKILQKSYYNKVKCIIIDPPYXTGNDSFIYPDRSKENLEEYDGRVGERDESGYLMKEGLFRKNSKENGHYHSNWLSMMLPRLFLARNLMRDDGVIFVHIDDNEVHNLRMVMNEIFGEENFAAQIIWQKVYSPRMDVEGFSNSHDYILCYVKSRIDSIKKEDFQQNSAQFNFVDPKTKKNYRRRSVRKEGSHSTRSERPNLFFALTAPDGTEIYPIKPDGTEGCWRWSMDTYIENLNLDLVEWVNTDNGWQVYAKQFLDENATKPPETLWFHNEVSHNHNAMEELKKILNGKLFDSPKPKELIIKMLKILLL

SEQ ID NO: 76409 - DNA, 807 bp, Unknown
  Obtained from environmental sample
  misc_feature (1)..(807): n is a, c, g, or t
atgacagttagaactcgttttgctccaagtcctacgggctttcttcatctgggcggcgcacgcacggctcttttttgctgggcatttgcgcgtcactatcaaggtcaatttattctgcggatagaagatacggatgtggagcgttcaacgcctgaagcggtacaggctattctggatgggatgacatggctggggttggattacgatgaaggaccttttttccagatgcagcacatggatcgctaccgaaccgtgattgaggaaatgctggtcaacggaaccgcttattattgctattgctcacctgaagaattggaagtcatgcgcgaaagacagcgtgctgcgggtgaaaatccgcgatatgacggcacgtggcgtccggagccgggaaaaaccctgccgccggcacctgaaggacgcagtcctgttgtgcgttttaaaaatccactggagggcgaggttatctgggatgatttggtgaaaggaacgatacgcatttccaatcgtgaaatggatgacttgattattgcgagggcggatggtacgccaacgtataatttctgtgtcgttgttgatgactgggatatgcgtattacccacgtgattcgcggtgatgaccatgtcaataatacaccgcgccagattaatattttaaaagcactgcatgcgcctttgcctttatatggtcatgttcccatgattttgggagatgatggtgaaaaattatccaagcgtcatggtgctgtttctgtcatggaatatcctgagcagggttatttgccagaagcgtgtattaaattattctga

SEQ ID NO: 76410 - protein, 268 aa, Unknown
  Obtained from environmental sample
  DOMAIN (2)...(268): tRNA synthetases class I (E and Q), catalytic domain
  misc_feature (1)..(268): Xaa is any amino acid
MTVRTRFAPSPTGFLHLGGARTALFCWAFARHYQGQFILRIEDTDVERSTPEAVQAILDGMTWLGLDYDEGPFFQMQHMDRYRTVIEEMLVNGTAYYCYCSPEELEVMRERQRAAGENPRYDGTWRPEPGKTLPPAPEGRSPVVRFKNPLEGEVIWDDLVKGTIRISNREMDDLIIARADGTPTYNFCVVVDDWDMRITHVIRGDDHVNNTPRQINILKALHAPLPLYGHVPMILGDDGEKLSKRHGAVSVMEYPEQGYLPEACIKLF

SEQ ID NO: 76411 - DNA, 321 bp, Unknown
  Obtained from environmental sample
  misc_feature (1)..(321): n is a, c, g, or t
atggtcatcaccgcgaatcacgtgggtaatacgcatatcccagtcatcaacaacgacacagaaattatacgttggcgtaccatccgccctcgcaataatcaagtcatccatttcacgattggaaatgcgtatcgttcctttcaccaaatcatcccagataacctcgccctccagtggatttttaaaacgcacaacaggactgcgtccttcaggtgccggcggcagggtttttcccggctccggacgccacgtgccgtcatatcgcggattttcacccgcagcacgctgtctttcgcgcatgacttccaattcttcaggtga

SEQ ID NO: 76412 - protein, 106 aa, Unknown
  Obtained from environmental sample
  misc_feature (1)..(106): Xaa is any amino acid
MVITANHVGNTHIPVINNDTEIIRWRTIRPRNNQVIHFTIGNAYRSFHQIIPDNLALQWIFKTHNRTASFRCRRQGFSRLRTPRAVISRIFTRSTLSFAHDFQFFR

SEQ ID NO: 76413 - DNA, 645 bp, Unknown
  Obtained from environmental sample
  misc_feature (1)..(645): n is a, c, g, or t
atggccgagtacattggtggccgcttgttctgggcatcgctgtctgacattattggtcgcaagatgacttactttatattcttcttggttggtgcggtgttgtacgcaagcattccaaccttggctgcgaatctgaacctgatattgttcctgtgtgcggtttgtgtctgtctgacattttatggcggcggttttgcaaccattcctgcgtatttggcagaccttttcggcacccagtatgttggtgcgattcacggacgtctcttaacagcgtggtcaacggctggtcttgtcagcccattaatcattaatgttatccgcgacatgcaaatcagtgcaggggtaccgcgtgcgcaggcatatagtgtgaccctgtatatcatggcaatattcctagtcatcggttttctttgcacgataatggttcgtcctgttcacagcaaatactatatgacagatgaagaattggcggcgtcaaaagccaaattggaagagaaaattgcagcggcacaggaatcgggtacactgccgctccaaaagccaacttcacctattcagttaataggtgcgtggataatcgttggtattcccctggcgtatggtatctggcagactgttcttcaaacagttaagatgtttagataa

SEQ ID NO: 76414 - protein, 214 aa, Unknown
  Obtained from environmental sample
  misc_feature (1)..(214): Xaa is any amino acid
MAEYIGGRLFWASLSDIIGRKMTYFIFFLVGAVLYASIPTLAANLNLILFLCAVCVCLTFYGGGFATIPAYLADLFGTQYVGAIHGRLLTAWSTAGLVSPLIINVIRDMQISAGVPRAQAYSVTLYIMAIFLVIGFLCTIMVRPVHSKYYMTDEELAASKAKLEEKIAAAQESGTLPLQKPTSPIQLIGAWIIVGIPLAYGIWQTVLQTVKMFR

SEQ ID NO: 76415 - DNA, 564 bp, Unknown
  Obtained from environmental sample
  misc_feature (1)..(564): n is a, c, g, or t
atgaacaataatgatcattctgaaaaagtcaagaggctaaatagatggtttgaaaatgccaaaaaaaatttattcttaaacagccaagaaaaagatgattttgataaggcaagaagtgaatggtattttaacggaattgtcattgaccgtaatgagaatgtagaaataaataaagaaagcccatcttgcgagttatgtgagcatgatgatttacgttggcagtttattatcaccaacaaattaaataaaaatgctttgaaagttggctcaacatgtattcaacagtttgatattgttttgatagatgaagtaggttttagctttaggggagatgaaagaaacaagagaatagacaaagcaataaaagagaaaatcgaagtatataatttcaataatgttttggaagcgctaagaactttatggaaaaaagataaagataaaaaaaatcgtcaaataattgaaactgcagccaaacaatggaaaaagaaaaaagattttagtccaaaaatgttatcctttttattatccgaatttgatgagtatggtatcaacattaaaaaatga

SEQ ID NO: 76416 - protein, 187 aa, Unknown
  Obtained from environmental sample
  misc_feature (1)..(187): Xaa is any amino acid
MNNNDHSEKVKRLNRWFENAKKNLFLNSQEKDDFDKARSEWYFNGIVIDRNENVEINKESPSCELCEHDDLRWQFIITNKLNKNALKVGSTCIQQFDIVLIDEVGFSFRGDERNKRIDKAIKEKIEVYNFNNVLEALRTLWKKDKDKKNRQIIETAAKQWKKKKDFSPKMLSFLLSEFDEYGINIKK

SEQ ID NO: 76417 - DNA, 756 bp, Unknown
  Obtained from environmental sample
  misc_feature (1)..(756): n is a, c, g, or t
gtgcttgctgtagcccatgcgcctccactgctgatcagccgggagcagcgcctcgaccttctccaggatcagggcgtggatctgtgcctggaacttcctttcacacccgcgtntgcggcgctctcgcccggagaattcgtgtgtgggacgcttgtgcccctgaatgccagggaactcgtcgtcggccatgatttttccctgggcagggggcggacgggaaattccgccgtgctggccgcccttggcagggaatacggttttgctctggagcgcttggcccccgtgatggcaggcgatgtggtcgtcagttccacccgtgtgcgcgacttgctgtgcgccggacaggtatgggaagcccgcgcgcttctgggccgcttccacagcattgccggcgaggtggttcacggacgcgcggccggggcgggtctcggttttcccactgccaaccttgccgcgcccgtgaacatcctgcccaaggacggagtctacgcctgccggatgcgggttgaagacgccgtttgggccgccgtgaccaacgtgggcgtcaagcccaccttcggcacgcacgagcgcgcggtggaaagttttcttcttgatgcggatctcgatttgtacggaaaacatgttgaactggcctttgtccaacgcttgcgcgacgaacagcgttttgacagccccgaagacctgcgcctgcacatcgcccaggatgtggaactggcccgttcagtgttggcagcgcctgaaacgcgtttgtag

SEQ ID NO: 76418 - protein, 251 aa, Unknown
  Obtained from environmental sample
  DOMAIN (2)...(106): FAD synthetase
  misc_feature (1)..(251): Xaa is any amino acid
MLAVAHAPPLLISREQRLDLLQDQGVDLCLELPFTPAXAALSPGEFVCGTLVPLNARELVVGHDFSLGRGRTGNSAVLAALGREYGFALERLAPVMAGDVVVSSTRVRDLLCAGQVWEARALLGRFHSIAGEVVHGRAAGAGLGFPTANLAAPVNILPKDGVYACRMRVEDAVWAAVTNVGVKPTFGTHERAVESFLLDADLDLYGKHVELAFVQRLRDEQRFDSPEDLRLHIAQDVELARSVLAAPETRL

SEQ ID NO: 76419 - DNA, 357 bp, Unknown
  Obtained from environmental sample
  misc_feature (1)..(357): n is a, c, g, or t
ttgttctggccggcctatacagggcaaacagatacgcagcaaatggcaagggttcaaatgattgacctgcactgccactccagatgctcggatggctccgatgacccgcataacctgccgcgcctcgctgaccttgttgggctgagcgccatagccctgaccgaccatgacacgctgtcagggctggatgattttctggatcagcaaaataatgcctctgcacggcttttgccaggcatagaactaagctgcgtttttttgggccaagacctgcatgtgctggggttgtttattgaccaccgcgacaagctgtttagggagcgggtgggtcctccagagcccccaaaactgcgataa

SEQ ID NO: 76420 - protein, 118 aa, Unknown
  Obtained from environmental sample
  misc_feature (1)..(118): Xaa is any amino acid
MFWPAYTGQTDTQQMARVQMIDLHCHSRCSDGSDDPHNLPRLADLVGLSAIALTDHDTLSGLDDFLDQQNNASARLLPGIELSCVFLGQDLHVLGLFIDHRDKLFRERVGPPEPPKLR

SEQ ID NO: 76421 - DNA, 351 bp, Unknown
  Obtained from environmental sample
  misc_feature (1)..(351): n is a, c, g, or t
atgcccgcaatgcgccacaataaaagtcgggggggccgccacttgtcacgcataaagaggaacgcgcgcgagacagcgatagcgctgcgctacaagacgcagcacccatttttggattctgcgcccaaattggtggccaaggggcaggggaaattggcagagcgcatactggagctggcccaagagcatggcatcccaattcaccaagaccctgacctagcggcggccttggagccgctggacgtggatacgctgatccccccgaacctgttccaggcagtcgccattgttctggccggcctatacagggcaaacagatacgcagcaaatggcaagggttcaaatgattga

SEQ ID NO: 76422 - protein, 116 aa, Unknown
  Obtained from environmental sample
  misc_feature (1)..(116): Xaa is any amino acid
MPAMRHNKSRGGRHLSRIKRNARETAIALRYKTQHPFLDSAPKLVAKGQGKLAERILELAQEHGIPIHQDPDLAAALEPLDVDTLIPPNLFQAVAIVLAGLYRANRYAANGKGSND

SEQ ID NO: 76423 - DNA, 372 bp, Unknown
  Obtained from environmental sample
  misc_feature (1)..(372): n is a, c, g, or t
ttgcagtcaaaacgttctaacgctcgcggcgttcgccgccgcgctttactgcggggcggcaaccgctcaggacaaggccgccgccgtgccggattccgtagccgtcgcgccggattccgggagaggaggcgtcgcggcggcggaggaagcgcccgccgccgtaacgggttccgtagccgtcgcgccggattccgggaacggcggcggcgcggcggaggaggaaacgcccgccgccgtaacggaacaggttgtcgccgccgaggaagaggccaagtcataccgcttggctgtgcatttcgaggcgaacagcctgaatcccacgccgctgtcggctcatttgctcgacagcatgtccgccctgttcgtgcataa

SEQ ID NO: 76424 - protein, 123 aa, Unknown
  Obtained from environmental sample
  misc_feature (1)..(123): Xaa is any amino acid
MQSKRSNARGVRRRALLRGGNRSGQGRRRAGFRSRRAGFRERRRRGGGGSARRRNGFRSRRAGFRERRRRGGGGNARRRNGTGCRRRGRGQVIPLGCAFRGEQPESHAAVGSFARQHVRPVRA

SEQ ID NO: 76425 - DNA, 735 bp, Unknown
  Obtained from environmental sample
  misc_feature (1)..(735): n is a, c, g, or t
atgcaggaacatgagataaaaatgggtcgtgatgcgctttttgatcttctctcgtatcatgggatgctggtacgcaagcgcaaacgtcatgtaaagacgacgtattcgtatcactggcaaaggaagtatcccaatttgattgcagagtttatcccgagccgtcccaatgaactgtgggtaagtgatattacgtattggaagttgggtgatcaggcggtttatttgagtctgattaccgatgcgtattcccgcaagatcgtagggtatcaattatcagaagatctaaatgcctcccaaagtgtgaaagccttaaagaaggcgctatcgggtataggtcaccgcacagtattatcagatcagcttatccatcattcagaccgaggcacgcaatactgcagttcttcgtatgtgacttgtttgcgaaagcatcatattcaaatcagcatgacgcagagcggcgatcccttagaaaacgctatagcagaacgagttaatgggataatcaaggatgaatatttgcttaattatccatgtaaagatctggccggtgcaagaaaatatctagacaaggcggtgtcgttgtacaacaaagaacgcccccatagtagcataggtaatcttactccggagtttgttcataatcaatattatttgataaaagatgaaaaaataaaacgattatggaaaaattattaccaaaaaaagactatctttgcaaatcaaatacaggactaa

SEQ ID NO: 76426 - protein, 244 aa, Unknown
  Obtained from environmental sample
  DOMAIN (51)...(214): Integrase core domain
  misc_feature (1)..(244): Xaa is any amino acid
MQEHEIKMGRDALFDLLSYHGMLVRKRKRHVKTTYSYHWQRKYPNLIAEFIPSRPNELWVSDITYWKLGDQAVYLSLITDAYSRKIVGYQLSEDLNASQSVKALKKALSGIGHRTVLSDQLIHHSDRGTQYCSSSYVTCLRKHHIQISMTQSGDPLENAIAERVNGIIKDEYLLNYPCKDLAGARKYLDKAVSLYNKERPHSSIGNLTPEFVHNQYYLIKDEKIKRLWKNYYQKKTIFANQIQD

SEQ ID NO: 76427 - DNA, 657 bp, Unknown
  Obtained from environmental sample
  misc_feature (1)..(657): n is a, c, g, or t
atggaagtattagatgaaatggggttgcaagacaaagctattggcgttgcacctgtaggctgctcggttttggcttacgaatttatgaatattgatatgcaacaagctgcgcacggacgtgcaccggcattggcaacggctatcaaacgcttattgcccgaaaaaacggtgtttacctatcaaggcgatggcgatttggcggcaatcggtacggcagaaaccattcatgcctgtaatcgtggcgaaaacattgttgtgttttttgtgaataacggcatttatggtatgaccggcggacaaatggcgccgaccacattggccggtatgcaatcttctacatcgccctacggacgcgatgttacaacgatgggagcgccattgaaaattaccgaattggttgcacaattagacggcgtttacatgtgcgcacgtcattccgtacacacaccgggcaatgtgcgtaaattgaaaaaagccgttcgtcaagctttcgaaaaccaagcgaataaaaaaggattatcgtttatagaaatcgtttcaaactgcaattctggttggaaaatgacgccgcttgcagccaacaaatggatggaagaaaacatgttccctgtttatccgctcggcgatattaaaatagatggcaagttagtaaagtaa

SEQ ID NO: 76428 - protein, 218 aa, Unknown
  Obtained from environmental sample
  DOMAIN (18)...(178): Thiamine pyrophosphate enzyme, C-terminal TPP binding domain
  misc_feature (1)..(218): Xaa is any amino acid
MEVLDEMGLQDKAIGVAPVGCSVLAYEFMNIDMQQAAHGRAPALATAIKRLLPEKTVFTYQGDGDLAAIGTAETIHACNRGENIVVFFVNNGIYGMTGGQMAPTTLAGMQSSTSPYGRDVTTMGAPLKITELVAQLDGVYMCARHSVHTPGNVRKLKKAVRQAFENQANKKGLSFIEIVSNCNSGWKMTPLAANKWMEENMFPVYPLGDIKIDGKLVK

SEQ ID NO: 76429 - DNA, 885 bp, Unknown
  Obtained from environmental sample
  misc_feature (1)..(885): n is a, c, g, or t
atgaccgtgttcntgaaccaggggcgggaagcgatagaggagcaggtttccacgtatggcaaagccagcgggtacacggaagattacgcacggactattgagaagctcaataccaccatagacgaggctaaattcgcagcaatgtctttcgccacggcgataacggacaatttcatnttcgattcggcggtaagcgggctgaaggatttgacttccgcattccttgaatggcgcaaggcaagcgcaaccaaagcggagaaagaaaaagccgaatcgctgaaaagcctcacgaaagtcaccgaggaatattaccgaacgcagagcgaattgggttatgccagtaaagaagcgaacgaagctctctcaaaacaaacggatgtctctttcaaagcattcaatcaaggcgcaaccgaagtgcagcgagtgacggcagaactcaaaggacttaaaaatgtgtacactgagtttttgaaaaacggaaacgatgctgcggcaagctcgctggttatggacatcaaaaatatgcaagaacgccttgctgaccttaaaaaggatttaaacaagccgaaaggaaaaacggaaaaaacagccgaggaaatagcagcagagaaagcggcagagaaggcggcggaaaaatacaagagcgagacggagcatttgcaaaactggcttgaaaaattcaaagaatcaaaaatgaccgaaacggagctggctgaagcagcctacaaaaaagaaatcgcaagcttggaagagttgagcaaaagaaagaaaataagcattgacgaccttgctgcttattccaggcaggcaaaaaccgctcttgatgcgaagctggaagatatagaaaagaaaaggctgctctgccgctctgccgatctgtcttga

SEQ ID NO: 76430 - protein, 294 aa, Unknown
  Obtained from environmental sample
  misc_feature (1)..(294): Xaa is any amino acid
MTVFXNQGREAIEEQVSTYGKASGYTEDYARTIEKLNTTIDEAKFAAMSFATAITDNFXFDSAVSGLKDLTSAFLEWRKASATKAEKEKAESLKSLTKVTEEYYRTQSELGYASKEANEALSKQTDVSFKAFNQGATEVQRVTAELKGLKNVYTEFLKNGNDAAASSLVMDIKNMQERLADLKKDLNKPKGKTEKTAEEIAAEKAAEKAAEKYKSETEHLQNWLEKFKESKMTETELAEAAYKKEIASLEELSKRKKISIDDLAAYSRQAKTALDAKLEDIEKKRLLCRSADLS

SEQ ID NO: 76431 - DNA, 759 bp, Unknown
  Obtained from environmental sample
  misc_feature (1)..(759): n is a, c, g, or t
atgtacgatgaccccacgttaatatttatatattgcaaaattgtgaacagaataatcataattgggaacggatttgacttggctcatgggttaaaaacgagttatggagattttataaattggctcaagtctaaaaaaattgggaactcggatgaatacattgaacatatttattcgcccgtatgggatgcttatttagggacaaatacccccaaagtatctgcgtttttaacacgccgtcgcattgaacctgcaaacttgtacgaatttatctccaataataaagaatataaacttatgtataaaaataaatttttagaacatctcataaatgcgcagaatttgaaaaattgggcggatgtagaggaggaatattttagcgaactgaaaattcgtttccataattataaaaaggataaaaacattgattctgtcgtaaggttaaatcgagattttgcacagattaaaaaatatctagaagagtatttgtgcgggcaaaatgaaaaagaaataacaatcaaagagaatttaaaagctagtataacaaaaccatttgatttgagcgataatgttcccgagcctgctgaattggataaagttttatttttaaattttaattatacttcttatgaacatcactatgcaaggtatcgagcgcaaataattcacatacatggcgaattgaaaaacggagaaaacccgattatctttggttatggagatgatgatgatgaaacatgcgaaagaataaaaatataa

SEQ ID NO: 76432 - protein, 252 aa, Unknown
  Obtained from environmental sample
  misc_feature (1)..(252): Xaa is any amino acid
MYDDPTLIFIYCKIVNRIIIIGNGFDLAHGLKTSYGDFINWLKSKKIGNSDEYIEHIYSPVWDAYLGTNTPKVSAFLTRRRIEPANLYEFISNNKEYKLMYKNKFLEHLINAQNLKNWADVEEEYFSELKIRFHNYKKDKNIDSVVRLNRDFAQIKKYLEEYLCGQNEKEITIKENLKASITKPFDLSDNVPEPAELDKVLFLNFNYTSYEHHYARYRAQIIHIHGELKNGENPIIFGYGDDDDETCERIKI

SEQ ID NO: 76433 - DNA, 723 bp, Unknown
  Obtained from environmental sample
  misc_feature (1)..(723): n is a, c, g, or t
ttgtgccttactgataattattggatacaaaaagaaagtgaaaatcttaaatgggataatattaatttttgggataatgattttacccaggaaaaagataatgtgtatttggggcaaccgcctgaaaatattatgctgttacaaagtaaaaatactgaaattacacctaataatgtatctagtggaatgcttccaaaaacatggaaaagaatagacggtgatttgtatatgataaaaggcgctgatacccgtttacaggagccttttaatgaatcagttgtttcacaatttcttgaaaagttgaaaatagaacaggtctcttatgaattatattggcacaaagaacttcccttcagtaaatgtcccatcatgctgaaaaagggggaagaattgatacattctttttatttgaataaaatgagtgaaaaagaaaataacgtttcttattatgaacattatattaaccaatgtgtatcaatgggactttcaaaaaatattcgtaaagatttggaaaacatgatattagttgatttcatgatagctaatactgacaggcattggtcaaatttcggtgttatacgggactctganacacttatagctaaaaagcttgcccctttatatgatcatggtgcctctttttatacaaaatatcatactttaattattccgaatacgctgcaaactttaaaatgcagtcttttaaaatactcaatggcataa

SEQ ID NO: 76434 - protein, 240 aa, Unknown
  Obtained from environmental sample
  misc_feature (1)..(240): Xaa is any amino acid
MCLTDNYWIQKESENLKWDNINFWDNDFTQEKDNVYLGQPPENIMLLQSKNTEITPNNVSSGMLPKTWKRIDGDLYMIKGADTRLQEPFNESVVSQFLEKLKIEQVSYELYWHKELPFSKCPIMLKKGEELIHSFYLNKMSEKENNVSYYEHYINQCVSMGLSKNIRKDLENMILVDFMIANTDRHWSNFGVIRDSXTLIAKKLAPLYDHGASFYTKYHTLIIPNTLQTLKCSLLKYSMA

SEQ ID NO: 76435 - DNA, 582 bp, Unknown
  Obtained from environmental sample
  misc_feature (1)..(582): n is a, c, g, or t
atggtcataggccacgatgtccacccaggctacgcaaagggcaaaatgaccaacgcggtcagggtcgcttcccacatcatcgagtcgcttccccaagaccgcctgccagagacgaccgaggggcgcgagccgtacctgcaccccatagccgtcaatggagacgtcagcagggcagagatcaaatttttggtcagggcgttcaccgaagaagaactgcgagagcgcgaagatgtgcttcgcaaaatcgttgagagcgcaaaggcccgctttcagggtgcaaagatcgaattgacgatcaaagaatcatacagaaatatgtcctaccccatatctaaagaccccaaggttcttgacttcgcgctggaagccgtcacgcgccagggcatcaagccgtccaggaggcccataaggggaggcacggacggggcgcggctttcgttcatggggctgcttacccccaacatctttgctggctctcagtcataccacagcgtacacgaatgggttagcctcgactggatgactaaggccgttgaagtctcgctccaattgctgaatgtgtgggtggaaaaatcaaagtga

SEQ ID NO: 76436 - protein, 193 aa, Unknown
  Obtained from environmental sample
  DOMAIN (2)...(91): Peptidase dimerisation domain
  misc_feature (1)..(193): Xaa is any amino acid
MVIGHDVHPGYAKGKMTNAVRVASHIIESLPQDRLPETTEGREPYLHPIAVNGDVSRAEIKFLVRAFTEEELREREDVLRKIVESAKARFQGAKIELTIKESYRNMSYPISKDPKVLDFALEAVTRQGIKPSRRPIRGGTDGARLSFMGLLTPNIFAGSQSYHSVHEWVSLDWMTKAVEVSLQLLNVWVEKSK

SEQ ID NO: 76437 - DNA, 645 bp, Unknown
  Obtained from environmental sample
  misc_feature (1)..(645): n is a, c, g, or t
atgctgggattagccgcgtatgaccgttcggctgaactgattcggcagataacggattttgtcccgataatgacttcggatcagcgtctggcatattactcttcgcttttggagcctgaaacgccggagcataggacttttttattggaaggactgtctgataaaagccagaccgtgcgggagcgtatcgtaaaccggctccaatattatcaattggacaaagcggatatggaacggctgactgaaacgctgaccactcagaacgccggtctgcgcaaggggatcattacccttttaaacaagcaaaaggaatcgctcatccgtcctgtaatcgaatcactgctgaactccgccaataaaaaccagctgattgccggtgtggaactgctggacgttttttctaaaaacaatccttctttgcaaaacaattataaggacaaaatagccgcgcttacggcaaaagaaaatctttctcaggatgtgtccattcttcttgaaaaggttactccgggcaagcgtgaaatagataattataccgaagaaaacggttacggtttgtacgatccgaacgcggaggtatttgattatgccgttttcgcgtccaaacgcccgaatgtacggtttgtcggcgacaaggaaacttaa

SEQ ID NO: 76438 - protein, 214 aa, Unknown
  Obtained from environmental sample
  misc_feature (1)..(214): Xaa is any amino acid
MLGLAAYDRSAELIRQITDFVPIMTSDQRLAYYSSLLEPETPEHRTFLLEGLSDKSQTVRERIVNRLQYYQLDKADMERLTETLTTQNAGLRKGIITLLNKQKESLIRPVIESLLNSANKNQLIAGVELLDVFSKNNPSLQNNYKDKIAALTAKENLSQDVSILLEKVTPGKREIDNYTEENGYGLYDPNAEVFDYAVFASKRPNVRFVGDKET

SEQ ID NO: 76439 - DNA, 732 bp, Unknown
  Obtained from environmental sample
  misc_feature (1)..(732): n is a, c, g, or t
gtgatcgctttggaaaatctggcaatcacaacaggatatggcgatgctgacaggatgatatgggcgctggaaggcgcaaaaatcgagcagttgcgtcctttgacagagccgcgtataacggggagcggcggaactgaagtttggttaagcataggagacgacggaacgcctgacctgaatatccgcaaaaacggcgcgccgcttaaaacaatgccgaaagaaatagccaaagatccgtatgtatccgaattgaaagaagctgtaaaagaattgcgcgatcagaaacggcgggcaaagaccagttttgaaacggcgatgatttcacgcgccggattcagtgcaacggaactaacgggactgttaaaccatcccgtcttgcgaagcatggcgtcgtcgttggtgtttactaacggagaccgcttgggatttccgatgcttgacggcggcaagccggcgcttattggcgcggatgacaagagtttcccggtaaaagagggcgaacagatcatcatcgcgcatccctacgactttatttcccgaaaatgctggagcgattatcaaaaatatttgtatcacaatgaaattgttcagcccttcaaacaggtttttcgtgaatattatcctataacggaagacgagttaaacgcggtgaatgtgtcacgccggtacgccggaaatcaagtgcagcccaaaaagaccgcggcgctccgaaaacgcgcggctggacggtga

SEQ ID NO: 76440 - protein, 243 aa, Unknown
  Obtained from environmental sample
  misc_feature (1)..(243): Xaa is any amino acid
MIALENLAITTGYGDADRMIWALEGAKIEQLRPLTEPRITGSGGTEVWLSIGDDGTPDLNIRKNGAPLKTMPKEIAKDPYVSELKEAVKELRDQKRRAKTSFETAMISRAGFSATELTGLLNHPVLRSMASSLVFTNGDRLGFPMLDGGKPALIGADDKSFPVKEGEQIIIAHPYDFISRKCWSDYQKYLYHNEIVQPFKQVFREYYPITEDELNAVNVSRRYAGNQVQPKKTAALRKRAAGR

SEQ ID NO: 76441 - DNA, 873 bp, Unknown
  Obtained from environmental sample
  misc_feature (1)..(873): n is a, c, g, or t
gtgacgccgcccgcgagggacggggtaaatgctgccggtatatgggcggcgctgaanatcgcgggcgccgacagggtcttcacggtcggcggcgcgcaggcgattgccgccctcgcctacgggaccgaatcgatcccgaaggtcgataaaataacaggccccggcaacgcgtatgtcgcggaggcaaagcggcaggttttcgggatcgtggggatagacatgatcgcggggccgagcgacatactcgtcgtcgcggacgccggtgccgaccctgcgcttgtcgccgccgatatgctctcccaatgcgagcacggcgaggattcctccgcgatacttttaacggacagtaaggaactggcaaataaggtaagcgcggagatcgacaggcagcttaaagcgctcccccgcgagaaaatcgcgcgggaggccatcgataacaacggcaggataataatcgccggcacgctcggggaggcgttcgggatatcgaacgaaatcgccccggagcatcttgaaatattcttggacgagcctttcaagtatttggacatggttacaaatgcaggctcggttttcctcggcaaaaacaccccggaagcgcttggcgactattacgcagggccgaaccacacgctgccgacctccggtacggcgcggttttcaagccccgtgtcggtcgatgactttgtcaaaagatcatcgtttacgtattattcggcggaagcgcttcacggcgcggcgcccgatatcgtcagctttgccgaaaaagagggcctgcgcgcccacgcgctgtcggtttctaaaagattagggggttactgccgacattctgcgcaaaatggcaaaagttttaaacttcctagacttgggtga

SEQ ID NO: 76442 - protein, 290 aa, Unknown
  Obtained from environmental sample
  DOMAIN (1)...(271): Histidinol dehydrogenase
  misc_feature (1)..(290): Xaa is any amino acid
MTPPARDGVNAAGIWAALXIAGADRVFTVGGAQAIAALAYGTESIPKVDKITGPGNAYVAEAKRQVFGIVGIDMIAGPSDILVVADAGADPALVAADMLSQCEHGEDSSAILLTDSKELANKVSAEIDRQLKALPREKIAREAIDNNGRIIIAGTLGEAFGISNEIAPEHLEIFLDEPFKYLDMVTNAGSVFLGKNTPEALGDYYAGPNHTLPTSGTARFSSPVSVDDFVKRSSFTYYSAEALHGAAPDIVSFAEKEGLRAHALSVSKRLGGYCRHSAQNGKSFKLPRLG

SEQ ID NO: 76443 - DNA, 522 bp, Unknown
  Obtained from environmental sample
  misc_feature (1)..(522): n is a, c, g, or t
gtgtttgaaagccccgacaacggcgtccgctttttctgggtgaagccgtccgacgtcgcgatatatgtcgagcgcggcgcggccgatatcggcgtagccggaaaagatatattactcgaatactctccggacgtctatgagctgctcgacctcgggatcgggaaatgcaggatgtgcgttgccgccgaaaaaggctgcgtttccgacaaccatgaccggacattgcgcgtggctacgaagtttacgaatatcgcgcgcgattattatgggaagctggatcgcgagatagatatcatcaagctgaacggttccatagagctggcgcccctgctgggcctgtccgacgttatcgtcgacctcgtggagacgggcggcacgctgctggagaacaacctcgaacctgtcgaaacgataatggaaatcagcgcgcggctcgtgtcgaacaaggcgagctataaattcaagcacgaagcgataagcaggctgtgcgagaggatcgcgatcacgcttggcaattcataa

SEQ ID NO: 76444 - protein, 173 aa, Unknown
  Obtained from environmental sample
  DOMAIN (14)...(168): ATP phosphoribosyltransferase
  misc_feature (1)..(173): Xaa is any amino acid
MFESPDNGVRFFWVKPSDVAIYVERGAADIGVAGKDILLEYSPDVYELLDLGIGKCRMCVAAEKGCVSDNHDRTLRVATKFTNIARDYYGKLDREIDIIKLNGSIELAPLLGLSDVIVDLVETGGTLLENNLEPVETIMEISARLVSNKASYKFKHEAISRLCERIAITLGNS

SEQ ID NO: 76445 - DNA, 654 bp, Unknown
  Obtained from environmental sample
  misc_feature (1)..(654): n is a, c, g, or t
atggcacgagcagaccgggcaactgaacgcctgggcacggtcatgcactgccttttggagtgcatgtacaagacagcctgctgcctgtggcccgtcatgccggatacggccgccgccatgctgcgccagctcggcctggaagccgaccgggacgcgccgccgcttcgcgatctttccgcagaaccggaacgttggggccggatgcgcccgggccagaaacttgcgaccggctccaacctgttcccgcgcatggagcttccagcgccgcacgtcccgaaaaaaccggccgaggccaacctgaacaaacacgagccggcgcccatgaccgagagcattgcgtttgccgacttccagaagctggacttgcgggtaggcacggtgcttgccgccgaacgtcacccaaatgcggatacgctgctcaagctgacgatcgatctcggcgaggccgcgccgcgccagatcgtctccggccttgcccggcattttgcgccggaggaattgccgggcagacaggtgtgcgtggcggcgaacctcgcgccgcgcacaatccgcggcctggagtcgcagggcatggtgctgaccgccggagcggacgatgcgctctggctgttgaccgtggcagggcaggcgccgccgggaagccgcatcgcctga

SEQ ID NO: 76446 - protein, 217 aa, Unknown
  Obtained from environmental sample
  DOMAIN (122)...(215): Putative tRNA binding domain
  misc_feature (1)..(217): Xaa is any amino acid
MARADRATERLGTVMHCLLECMYKTACCLWPVMPDTAAAMLRQLGLEADRDAPPLRDLSAEPERWGRMRPGQKLATGSNLFPRMELPAPHVPKKPAEANLNKHEPAPMTESIAFADFQKLDLRVGTVLAAERHPNADTLLKLTIDLGEAAPRQIVSGLARHFAPEELPGRQVCVAANLAPRTIRGLESQGMVLTAGADDALWLLTVAGQAPPGSRIA

SEQ ID NO: 76447 - DNA, 717 bp, Unknown
  Obtained from environmental sample
  misc_feature (1)..(717): n is a, c, g, or t
gtggtttataccattaagccgatgtattcctacaatagccagtggtgcgacggagcgcagtttacagcgacggtaacaatatcgcccgatactcctgcgactattaccaggaacgttcccggccaaaccgcacccaacttccgtccgttgtgtgccggcgaagacggcggtaccatcaatattgctactaccgcaccggctacttattcgtttacacgtactattaccagtagcgccgatgttacaacatcaggaacgtcttccggtacattcaataatactaccggcgcagtcattactgtaggttcgtttacgaacaatactaacacgccgcaaacagttacttacgccattacgacgcgatactcagcctcttgcagcgtcagctcgacggttacaatgcttgcaatgccaaacaaagcgcctgtgctcactccgtcggcagcaactatatgctggaacgacggtattactatcggagtgtccggtgcgcagtcatattcttgggtgcggaacgatgatgccggcataactagtgcaacaggcagcggctcgggctcgcaagttgaccccggttcgggcatcaatattacggctacccaatttgataacacgaacaatacaagagcatcggctacttatgtaattacacctatatacataacaacggcagacaacggacgtacctgttccggcgctactgctacggctgtgtaa

SEQ ID NO: 76448 - protein, 238 aa, Unknown
  Obtained from environmental sample
  misc_feature (1)..(238): Xaa is any amino acid
MVYTIKPMYSYNSQWCDGAQFTATVTISPDTPATITRNVPGQTAPNFRPLCAGEDGGTINIATTAPATYSFTRTITSSADVTTSGTSSGTFNNTTGAVITVGSFTNNTNTPQTVTYAITTRYSASCSVSSTVTMLAMPNKAPVLTPSAATICWNDGITIGVSGAQSYSWVRNDDAGITSATGSGSGSQVDPGSGINITATQFDNTNNTRASATYVITPIYITTADNGRTCSGATATAV

SEQ ID NO: 76449 - DNA, 753 bp, Unknown
  Obtained from environmental sample
  misc_feature (1)..(753): n is a, c, g, or t
ttgagcggtggacgctccaagacgccggcgcgggaatccgtgcctgaaatgcagataataataaaagcggactccgtctacgataccgcatacgacaattggtacggaaaaatgtaccgccccgccgcccccactaagcaacccgatgtcgattacgacacagtgaaagctaggatacgcgcgcaacagcaatacttctccaagcgctacagcgcagcttccgaaaaaaatcgaacggctatgttatcagaagccaaaaactatttgatcaacactattggcgacacgattttcccgtattggtacgatactcgatggagtttttacggcgccacccgcactcctagacaaggttctatcgcgtgcgggtactttgttaccaccgtattggccgacgccggatttcaaataccgcacgtcaaatgggcgcaactagcctccgaacccgtaatcgtgaaaatcgccgccgatatcaagcgcttcagcaaccggcctatgtcggaagtcatagagtatctcgacaaaaccggcgacggcctatatatcgtaggattggataaccacatcggatatatctataaatccgacaccacgctgcgcttcgtgcactcaaactactatcaagccgaaatcggcgtgatgtcggaaccgctcgtgggcgacaatccgctgaacaactcaaaataccgaataattggaaaactattgagtacggagatggttaggaattgggtaacgggaacaaaatattag

SEQ ID NO: 76450 - protein, 250 aa, Unknown
  Obtained from environmental sample
  misc_feature (1)..(250): Xaa is any amino acid
MSGGRSKTPARESVPEMQIIIKADSVYDTAYDNWYGKMYRPAAPTKQPDVDYDTVKARIRAQQQYFSKRYSAASEKNRTAMLSEAKNYLINTIGDTIFPYWYDTRWSFYGATRTPRQGSIACGYFVTTVLADAGFQIPHVKWAQLASEPVIVKIAADIKRFSNRPMSEVIEYLDKTGDGLYIVGLDNHIGYIYKSDTTLRFVHSNYYQAEIGVMSEPLVGDNPLNNSKYRIIGKLLSTEMVRNWVTGTKY

SEQ ID NO: 76451 - DNA, 588 bp, Unknown
  Obtained from environmental sample
  misc_feature (1)..(588): n is a, c, g, or t
gtggaaaactccacgaccgcccggcagctcatcgacatggccggcggtataaaggcctccggctttatggatcaggcggtcgtcatccgtccgctcaggatgctgccggacaaattcaactccgccgcgccgcagatgggcgcggtcaggccggaacgcggctcggccgtctccgtcgcctccgcctcacgcgactacgcagtcatccgcctcatactgtacaacgcggacaatgtccttctggaaccgcaagaccagatcatcatccccaaaaaggacagcttcgtctacatcagcgggagcgtcagaacccctggcgcctacctcttcctaccgggaaaggacagccgctactacgtggcccaagccggaggattcagcagcaacgccgacaagtcaaacgtacaggtgttcctcaaatacggcgacgccgtgcagagcatagagccccgttgcattgagcccggcagcgtaatcctcgtgccgtcgtcggtgcagaacaagtttttaacccaggttctgttgccgatcatctccacgctcgccacaacaatcggcgtggggctggcgatttacaattcgaggtag

SEQ ID NO: 76452 - protein, 195 aa, Unknown
  Obtained from environmental sample
  misc_feature (1)..(195): Xaa is any amino acid
MENSTTARQLIDMAGGIKASGFMDQAVVIRPLRMLPDKFNSAAPQMGAVRPERGSAVSVASASRDYAVIRLILYNADNVLLEPQDQIIIPKKDSFVYISGSVRTPGAYLFLPGKDSRYYVAQAGGFSSNADKSNVQVFLKYGDAVQSIEPRCIEPGSVILVPSSVQNKFLTQVLLPIISTLATTIGVGLAIYNSR

SEQ ID NO: 76453 - DNA, 351 bp, Unknown
  Obtained from environmental sample
  misc_feature (1)..(351): n is a, c, g, or t
atggcccgggttaaattattgatttatatcacttttttaaaggaatacaaaaagcaaacaaatgacctggatctgatatatgaaaaaaatgttcgtaaatttttagggaacaagaaaaaagtgaataaagaaattcacaatacacttgaaaaatttcctgaacgtttcggattatacaataacggtataacaattgttgtcaaaaattttgaaaaaaatttaactgtggatactcaatatcatttgatagagccatttattgtaaatggctgccaaacaacaaaaactatttgggaagtaattgatccaacgaggcggttgggaagcacaaaaagcattagagcgaattaa

SEQ ID NO: 76454 - protein, 116 aa, Unknown
  Obtained from environmental sample
  misc_feature (1)..(116): Xaa is any amino acid
MARVKLLIYITFLKEYKKQTNDLDLIYEKNVRKFLGNKKKVNKEIHNTLEKFPERFGLYNNGITIVVKNFEKNLTVDTQYHLIEPFIVNGCQTTKTIWEVIDPTRRLGSTKSIRAN

SEQ ID NO: 76455 - DNA, 876 bp, Unknown
  Obtained from environmental sample
  misc_feature (1)..(876): n is a, c, g, or t
ttgttgacgatgaaatgtcaaatctcactggttttgaccaacatactgggtaatgattatactatttacacggcaaagaacggggtaaatgccattgaaaaagccagggagtatttgcccgatctcattctgcttgatattgtcatgccgggaatggatgggtatgaggttcttgccgctcttaaaaattcggatgatacaaagacaatacccgttatatttatcacagggcttagcagcagcgcggacgaggaaaaaggactttcccttgacgctgcggattacataagcaagcctttcagcgccgaaattgtaaaattgagggtcaggaaccagatccagattgttaaccagcttcgtaccatacagcatctgagcatggtcgatcaacttacaggcatacccaacaggcgcagctttgacgataggcttaccgttgaatggaaacagtcaataagggaatgtcagccaatcagccttttagtattggatattgataaatttaaaacctacaatgatatttacggacaccagcagggtgatgttgttttacagagagtcgcgcagaccattcagcggtctcttaggcgtcctactgattttgctacgcgctggggcggcgaggaatttgccgtgttgctgccgaacacccctttggagggagccctggaagttgccgaacaagtacgcataaatatcgaaaacgagaaaatcttatgcgccgacggttccacccctaaagtgacggtaagcataggcgtgagtacgcaattgcccgttcagggcagccgaaccgagctgtttttttcaatgccgacaaagccctgtacgccgccaaggacgcgggcaggaacaggttgcaggcggcggaaatag

SEQ ID NO: 76456 - protein, 291 aa, Unknown
  Obtained from environmental sample
  DOMAIN (6)...(110): Response regulator receiver domain
  misc_feature (1)..(291): Xaa is any amino acid
MLTMKCQISLVLTNILGNDYTIYTAKNGVNAIEKAREYLPDLILLDIVMPGMDGYEVLAALKNSDDTKTIPVIFITGLSSSADEEKGLSLDAADYISKPFSAEIVKLRVRNQIQIVNQLRTIQHLSMVDQLTGIPNRRSFDDRLTVEWKQSIRECQPISLLVLDIDKFKTYNDIYGHQQGDVVLQRVAQTIQRSLRRPTDFATRWGGEEFAVLLPNTPLEGALEVAEQVRINIENEKILCADGSTPKVTVSIGVSTQLPVQGSRTELFFSMPTKPCTPPRTRAGTGCRRRK

SEQ ID NO: 76457 - DNA, 702 bp, Unknown
  Obtained from environmental sample
  misc_feature (1)..(702): n is a, c, g, or t
gtggcgctttgcgcaaaaacgcccgcaagaacaggacaacgcgcgggaacaggatgccgttgcgatggccgatgccgccgacaaggaaaccaagcccgcccaggaggtcccatgaacgtccgtagtgctgaactcgcgcgcgcaaccaacgaaacgaacatttccctgcgcctcaagctcgacggcaacgggaccacggatatcgccaccggcgttggtctgctggatcatctgctgaccctcaccgcgttctgggccagttttgacttgtacctgcgctgcgagggcgatgcccatattgacggacaccacagcgccgaagatgtcggcctcgtgttgggccaggcgctgcttgaagcgctgggcgacaaagcgggaattgaacgcgtggggcttgcccgcgttcccatggatgaagccctggctgacgtatgcattgacctttcaggacgaggctggctggaatggcgcggcgaagaactgcttccctccgttctgggcggacaggaacgcgacatgtggcgtgaacattacaaggcgctggcttccgcggcccgcatgaacctgcatatttcttttctctacggcaaaaacggacaccaccttctggaatcagccgccaagggtctggggcttgccctgcatcaggccgcgcgccgttccggcagaatgacccgcagcacaaaagggaggctggactaa

SEQ ID NO: 76458 - protein, 233 aa, Unknown
  Obtained from environmental sample
  DOMAIN (70)...(215): Imidazoleglycerol-phosphate dehydratase
  misc_feature (1)..(233): Xaa is any amino acid
MALCAKTPARTGQRAGTGCRCDGRCRRQGNQARPGGPMNVRSAELARATNETNISLRLKLDGNGTTDIATGVGLLDHLLTLTAFWASFDLYLRCEGDAHIDGHHSAEDVGLVLGQALLEALGDKAGIERVGLARVPMDEALADVCIDLSGRGWLEWRGEELLPSVLGGQERDMWREHYKALASAARMNLHISFLYGKNGHHLLESAAKGLGLALHQAARRSGRMTRSTKGRLD

SEQ ID NO: 76459 - DNA, 369 bp, Unknown
  Obtained from environmental sample
  misc_feature (1)..(369): n is a, c, g, or t
ttggacgccgagaaaggccggctgaaaaccaggggctgggtcgccgatgccggacttggcgtggaggaggtcttgccgcgcctggcgagcgacggcgcttcctttctcgtctataccgatattgagcgcgacggcatgcagacaggcgtggcctttgacgcgctggacaggctggcccgcatctctcccctcccgcttattgccgcggggggggtcgccacgctggccgacgtgcaaaaactctatccgctgtcccgacagggcaagctgcaaggcgccataagcggccgcgccctgtacgaaggcacgctggatctggcggaagccatgcgctggatacatgatcaacagaacacgcacgcgcattga

SEQ ID NO: 76460 - protein, 122 aa, Unknown
  Obtained from environmental sample
  DOMAIN (1)...(105): Histidine biosynthesis protein
  misc_feature (1)..(122): Xaa is any amino acid
MDAEKGRLKTRGWVADAGLGVEEVLPRLASDGASFLVYTDIERDGMQTGVAFDALDRLARISPLPLIAAGGVATLADVQKLYPLSRQGKLQGAISGRALYEGTLDLAEAMRWIHDQQNTHAH

SEQ ID NO: 76461 - DNA, 903 bp, Unknown
  Obtained from environmental sample
  misc_feature (1)..(903): n is a, c, g, or t
atgaagttattagtgaccaatagaaaaccggatagctttgagatacaaagcgattggtcgtggctgataaagatggagttccccgcaactatgaccgctctgccgcctccgagcatttccataaacgagcctgcttttggcgagagcaagcctggcacggctgcgataaatgatagcgggagctattcggtcgcaatagagtgggacactgtcggcgaaacattccccgaaggcgtgtcaataggaacattcacattgacggcgaatagcggttataggtggaataccgatgtcgttgttttgaatggcgaaaattatgagggcgaattgagcgatgacggaatgaccttggtttttgagtacgagaccggaaatttgcaagacaatcagttcaccgaccctagagacggcaaagtgtacagaaccgttgtgatgccagatggaaaaacatggatggcggagaatttgaattgggaaggcgcaggcgtttatcataatggtatagaatataataacccctcaccgccgggtaatgcagagccaatcgcaaaagctgggcgtttatacagaaccgtagaagttgtagccccgctgggctggcatattccaagcgttgcagaatggaatgcgttgttcgcagcagttggaggttcttcagctgcggggactaatcttagggctacacatagttggaatgaaaatcgcaatggcacggacacctacggattttctgttttaggagttggttaccgtagcaatacagggtggtttttggattttagttttgctggggtatttatgactacgaatgctgaaaggatcatctttaacttaaacggaaatataacgaaagattcccaagacggtaatcatgganttagtgttcgtgctcactcgcgataa

SEQ ID NO: 76462 - protein, 300 aa, Unknown
  Obtained from environmental sample
  misc_feature (1)..(300): Xaa is any amino acid
MKLLVTNRKPDSFEIQSDWSWLIKMEFPATMTALPPPSISINEPAFGESKPGTAAINDSGSYSVAIEWDTVGETFPEGVSIGTFTLTANSGYRWNTDVVVLNGENYEGELSDDGMTLVFEYETGNLQDNQFTDPRDGKVYRTVVMPDGKTWMAENLNWEGAGVYHNGIEYNNPSPPGNAEPIAKAGRLYRTVEVVAPLGWHIPSVAEWNALFAAVGGSSAAGTNLRATHSWNENRNGTDTYGFSVLGVGYRSNTGWFLDFSFAGVFMTTNAERIIFNLNGNITKDSQDGNHGXSVRAHSR

SEQ ID NO: 76463 - DNA, 903 bp, Unknown
  Obtained from environmental sample
  misc_feature (1)..(903): n is a, c, g, or t
ttgggatatggtggtggtgagcattgcggcggatgtggtgccgattatggtgaaaatcgtgttttggcctattatggattgaaacagattaatactaagcctcgcgcggcgtntgagtcgattttgaaatattcgaatgtcgtcaaaagcagcaaaagtgagtcgaatttgtattttactcgcgaactgacgattacggatttggtctttttaataggtccgcgtattaatgctgcaggacgtatggaaagcggaaaaaacgcggttcgacttttgctgaccgatagcatcgaacgttcggaaatttttgccaaagaaattgacgaatataacaaagaacgcaaactgcttgataccaaagccaccgaagaagccttaacacagtttgattcgggaagaatccctgaaatggcaaaaaccacggttgtttacgaccccaaatggcataaaggcgtgattggtattgtagcctcgcggttgacggaattttattaccgaccgacgattgtgtttaccaaatcgggcgatatgattaccggttcggcgcgctctgtgggcggatttgacgtttattctgctctcgaagcttgcagcgatttaatcgaacattggggcggtcataagtatgccgcaggattatccatcaaggaagaacattttgaagcgttttgcagaagatttgaaagggcggcaaccgagcaattggcggaagattcacttgttccgaaagtggaaattgataccgaattggattttaacgccatcactcgagcattttttgacaatctgaagagatttgcaccgtttgggacgacgaatcccaatccgacgtttgaaacgcgcggtgttgtggatggtggaaattccaaaatcgtcggagtaaaacatctcaaacttccttga

SEQ ID NO: 76464 - protein, 300 aa, Unknown
  Obtained from environmental sample
  DOMAIN (165)...(229): DHHA1 domain
  misc_feature (1)..(300): Xaa is any amino acid
MGYGGGEHCGGCGADYGENRVLAYYGLKQINTKPRAAXESILKYSNVVKSSKSESNLYFTRELTITDLVFLIGPRINAAGRMESGKNAVRLLLTDSIERSEIFAKEIDEYNKERKLLDTKATEEALTQFDSGRIPEMAKTTVVYDPKWHKGVIGIVASRLTEFYYRPTIVFTKSGDMITGSARSVGGFDVYSALEACSDLIEHWGGHKYAAGLSIKEEHFEAFCRRFERAATEQLAEDSLVPKVEIDTELDFNAITRAFFDNLKRFAPFGTTNPNPTFETRGVVDGGNSKIVGVKHLKLP

SEQ ID NO: 76465 - DNA, 603 bp, Unknown
  Obtained from environmental sample
  misc_feature (1)..(603): n is a, c, g, or t
atgcgttaccaaaaaatagattcctacgacccgaaggttactgaaaaattggccgaaaactacaaatccattttgtcgttaatcggcgaagaccccgaacgagaaggacttcgcaactcaccgaaacgaatcgcacaggctctgttgtttttcacacaaggctacgaacaacatccgcaggaaatcattcaatcggccatgtttgaagaagattacagacaaatggtggtggtgaaagacattgagatttattcgctttgcgagcatcacatggttccgtttttcggaaaggcgcatgtggcgtatattcccaatggacgcatttgcggactgagtaaaattccgcgtatggtagaggcttacgcgcggcgtttgcaggtacaagagcggttaactcgccaaatcaaagaatgtttggagcaaacattgaaccctctcggcgtggctgtagtgattgaagctcgacacttgtgcatgagcatgcgcggtgtgcaaaaacaaaattccatcacgacaacttccgacttctcgggcgcgtttcttaaaaatctatccacacgggatgaatttatgcagttgatttcagcagatttaatcaagtag

SEQ ID NO: 76466 - protein, 200 aa, Unknown
  Obtained from environmental sample
  DOMAIN (74)...(178): GTP cyclohydrolase I
  misc_feature (1)..(200): Xaa is any amino acid
MRYQKIDSYDPKVTEKLAENYKSILSLIGEDPEREGLRNSPKRIAQALLFFTQGYEQHPQEIIQSAMFEEDYRQMVVVKDIEIYSLCEHHMVPFFGKAHVAYIPNGRICGLSKIPRMVEAYARRLQVQERLTRQIKECLEQTLNPLGVAVVIEARHLCMSMRGVQKQNSITTTSDFSGAFLKNLSTRDEFMQLISADLIK

SEQ ID NO: 76467 - DNA, 666 bp, Unknown
  Obtained from environmental sample
  misc_feature (1)..(666): n is a, c, g, or t
atggacggccgggtggacgccttggccacaacgcccatccacaaagtatctctggccgaggcgcacatcgactatatcgggcatacggaaattctcgccgcgctggccggtgttcaggacccgctcaccatgttccaggtaaggggactgcgggtgttcttccttacccggcacatgtcgttgcgggaggcatgccggagcatcaccgaagagagggtttaccggtacattcagcgctgctgcggcgcgcttgagcgtctgggcatcagcaggccgcgcatcgcggtggccgggctgaaccctcattgcggcgaacacgggatgttcggcgacgaggaagacatgctcctcgttccggccattgaacgggccaagagggcgggatttgacgcgcacggcccgttgcccgcggattccgtttttcatttcgcgctcggcggggcctgggactgcgtactttccctgtatcacgaccagggacacatcgccaccaagatggtggacttcgatcgcaccgtcgccgtgacgcacggactgccctttttgcgcacatccgtggatcatggtactgcctttgatatagcaggtacgggcaaggccggcgcggtgagcatggtggaggccattcggctggccgcgttatacgccccacagttcagaaagtag

SEQ ID NO: 76468 - protein, 221 aa, Unknown
  Obtained from environmental sample
  DOMAIN (1)...(213): Pyridoxal phosphate biosynthetic protein PdxA
  misc_feature (1)..(221): Xaa is any amino acid
MDGRVDALATTPIHKVSLAEAHIDYIGHTEILAALAGVQDPLTMFQVRGLRVFFLTRHMSLREACRSITEERVYRYIQRCCGALERLGISRPRIAVAGLNPHCGEHGMFGDEEDMLLVPAIERAKRAGFDAHGPLPADSVFHFALGGAWDCVLSLYHDQGHIATKMVDFDRTVAVTHGLPFLRTSVDHGTAFDIAGTGKAGAVSMVEAIRLAALYAPQFRK

SEQ ID NO: 76469 - DNA, 903 bp, Unknown
  Obtained from environmental sample
  misc_feature (1)..(903): n is a, c, g, or t
atggacatggcgctgctgctgcggcccaaggtgatcagcaagcgtattgacagcacgctgcgcggcaacgtgggcggcgaaatagaggccgccctcgcgacgctggatgcgaagcgcaacggcgccctggcgctcgtcgttcccgcgtttccggcctcggggcgtatcgttgttggcggcatcatgctggtcaacggcacaccgcttgaaaaaaccagtatcgccaacgatcccgtaaccccgatttttacctcggccgtgctgcccatcatcgcccggcagaccaagctgcaagggggtctcctccccttgccggccatactctccggcgtggaggcgacccgtagcgccatcatggaactttggcggcggggatgccgcatgatcatcgcggacagcgccacggacgaggacattaccaccgttgccgaagcggtgaaagacgtggattttcccgtcctttcggttgatcccggcccctttacggcggccatggctgtcgcccgcgtgggcgtgccgcaacaggaaagccgtatcctcgccgttgtgggcagcgtgaccgaagcgacgcaacggcagttacaaacgctcgcccttgcccataattgccatttcgtccgcgccgactgtccgctgcttgccaatcccgcaacccgcgaaacggaaatagcgcgtatcgcgccggccatcgccgccgctccggcaaacgccggaatcctcggcatatgcacggcgcaacagccggagcatgtctgtaacctgtacgaactcggcgcacaatacggcctttgccaacatgaaatttctgaaagcatcaacgatgccctggcggaagtcgccctcggcttctgcaaaggaacgacctgcgcctggggggaatatatgtttccggccgcnaagtga

SEQ ID NO: 76470 - protein, 300 aa, Unknown
  Obtained from environmental sample
  DOMAIN (94)...(300): Protein of unknown function, DUF1537
  misc_feature (1)..(300): Xaa is any amino acid
MDMALLLRPKVISKRIDSTLRGNVGGEIEAALATLDAKRNGALALVVPAFPASGRIVVGGIMLVNGTPLEKTSIANDPVTPIFTSAVLPIIARQTKLQGGLLPLPAILSGVEATRSAIMELWRRGCRMIIADSATDEDITTVAEAVKDVDFPVLSVDPGPFTAAMAVARVGVPQQESRILAVVGSVTEATQRQLQTLALAHNCHFVRADCPLLANPATRETEIARIAPAIAAAPANAGILGICTAQQPEHVCNLYELGAQYGLCQHEISESINDALAEVALGFCKGTTCAWGEYMFPAAK

SEQ ID NO: 76471 - DNA, 411 bp, Unknown
  Obtained from environmental sample
  misc_feature (1)..(411): n is a, c, g, or t
ttgcagtttatctacggggggcctatccgcgccaacgaagacccgtctgtaaactggtatccctgccaggttgatcttgagcctttcaggggggagtgggtatacgccgaggaaaccgttacatacgacagccccggcgcgtaccggatcaggcttgtccgtatcagggacatgaaagtcctgctggagtacatctattcgcccgaacagtacaacgagattgatccctttgtgatgttcagaaaagggaattcgtatatccgccccaagttcgggctttaccggcggattctgcacatgacgcctttcggccttcccaatatggatgatccggtaactgaataccgggcggaagataacgaaattgtcgtgctgtacgccgaccttgaaatggacaaacttaaaaaatag

SEQ ID NO: 76472 - protein, 136 aa, Unknown
  Obtained from environmental sample
  misc_feature (1)..(136): Xaa is any amino acid
MQFIYGGPIRANEDPSVNWYPCQVDLEPFRGEWVYAEETVTYDSPGAYRIRLVRIRDMKVLLEYIYSPEQYNEIDPFVMFRKGNSYIRPKFGLYRRILHMTPFGLPNMDDPVTEYRAEDNEIVVLYADLEMDKLKK

SEQ ID NO: 76473 - DNA, 798 bp, Unknown
  Obtained from environmental sample
  misc_feature (1)..(798): n is a, c, g, or t
ttgtacgccacttccgatattgcgactatcgactatcgcgtaaaagaattttcgcctaatcggatatgttatgtagtggacaaacggcagtcgcttcatttcgaacagattttcagggcggtaaaaaaaaccaaaatcgcaccgcaggaattgcttttacagcacgtaggttttgggacggtaaacggagcggacggcaaaccttacaagacccgcgaaggcggagttatgaaactttcggatttgattgattcggtgataaacaaagcgaaagagcgtttggaagaagcgggcttggctgtcggcgaaaacgaaagcgaaaagacaaaaatagccgaaacggtcgggatttcggcgcttaaattcgccgatttgtcaaattatcggctttcggattatgttttcgatttggataaattctgcgcttttgaaggcaaaaccggaccgtatttactttataccgcagtgagaataaagtcgataatccgcaaggcgaaagaggcaaaaatcacgtcgggcgatattttggtcagcgacaacgaccgcgatttgcttttggaaataggacggatgaacgaaacgcttgaatcggcggcggctgagtgttcgccgaattttttatgcgactatatttacggactttcgcaggagttcaaccgattttacaaaaattcgccgattttgcacgaggaaaacgccgctttgcaaagttcgcgtctaaaaatcgccgaaattacgttaaaaactatcgaggtcgtgctgggaattttgggaataaatattccggaacgtatgtga

SEQ ID NO: 76474 - protein, 265 aa, Unknown
  Obtained from environmental sample
  DOMAIN (151)...(265): DALR anticodon binding domain
  misc_feature (1)..(265): Xaa is any amino acid
MYATSDIATIDYRVKEFSPNRICYVVDKRQSLHFEQIFRAVKKTKIAPQELLLQHVGFGTVNGADGKPYKTREGGVMKLSDLIDSVINKAKERLEEAGLAVGENESEKTKIAETVGISALKFADLSNYRLSDYVFDLDKFCAFEGKTGPYLLYTAVRIKSIIRKAKEAKITSGDILVSDNDRDLLLEIGRMNETLESAAAECSPNFLCDYIYGLSQEFNRFYKNSPILHEENAALQSSRLKIAEITLKTIEVVLGILGINIPERM

SEQ ID NO: 76475 - DNA, 789 bp, Unknown
  Obtained from environmental sample
  misc_feature (1)..(789): n is a, c, g, or t
atgggctggcagagaccattgacaccncttttggcaaacagagttttgcaatcgggagtcggcatgagcatggaggaggcgctggcccccaagataattgagctaaaggggggggtcaaggtggcggttttggctaggacagacctttttaacaacaacctgaaccagcggcgcgaccgcacatgggtggctgcgctggacttggacgttgacgaaaaaatcatcaaggaggcccgcgaaagggcagacgcagtgataatcggtgtccattggggcgtagagtatcaggcccagcccagtcagaggcagcgggaggcagccaagcgtttggttgcggcgggagccgacgtgatagtcgggcaccatccacacgtgcttcagccattcgagtgggtggagtccggcgggcgcaagggcgcggtggccttttccttgggaaattttctgagcaaccaggacaggaagtacaatcccagccgccagcccttgggcgatggggatagccgcgatggggcggtgctgtgggtgtctctgaagaaaggcccaaccggggagctagagatcgaagcacacgccgagccaatatggaccgacaacaactgcaacgactatgaggcagggagaagcagcaaaagggtgatccgcgtgatgaacacgcgccccggagcaaggggccaggacatggaagagttgcttgcaaaaagaagggcgcacgcgctgttgaggctcaatggtcttagcgctgtggctaatcctctgccatcagatcagccagcacctgctggatga

SEQ ID NO: 76476 - protein, 262 aa, Unknown
  Obtained from environmental sample
  misc_feature (1)..(262): Xaa is any amino acid
MGWQRPLTPLLANRVLQSGVGMSMEEALAPKIIELKGGVKVAVLARTDLFNNNLNQRRDRTWVAALDLDVDEKIIKEARERADAVIIGVHWGVEYQAQPSQRQREAAKRLVAAGADVIVGHHPHVLQPFEWVESGGRKGAVAFSLGNFLSNQDRKYNPSRQPLGDGDSRDGAVLWVSLKKGPTGELEIEAHAEPIWTDNNCNDYEAGRSSKRVIRVMNTRPGARGQDMEELLAKRRAHALLRLNGLSAVANPLPSDQPAPAG

SEQ ID NO: 76477 - DNA, 609 bp, Unknown
  Obtained from environmental sample
  misc_feature (1)..(609): n is a, c, g, or t
ttggaggtgacggcgatggacgcggctgaaacgattaacgcccttataaatcaaaacggagggtacctaacatctaaggaagcacgagagaacggcgtggaaaacaaaacgctgcagcgtatggtggagcgcgggttgattgagcggattgctcatggattgtatgctggcgctgatgtttttcccgaccctttcttcgttgctcagtatcgttgtcctaaaggcgttctgtcgcatgagacggctttgttcctacatgacctctgtgaccgtgtgccgcttaaattgatgatgacgattccggccggctggaacacgcaaatgctgacggatgatgatattcgatttttttacagcaacccgaagcggatggggcttggcgtttgcgaaactgaaacaacctccggcgtaaaagtgaagttgtatgacgccgagcggacgctttgcgattgcctgcgcagcatcgataagctggacagggatttggtgatcaccggacttaaaagatatgtgaaacgcaaggagaaagacagcgcgaagctgttggagtacgccgccgaccttaaaatccgcgacatggtttacagatatttggaggtgctggtttga

SEQ ID NO: 76478 - protein, 202 aa, Unknown
  Obtained from environmental sample
  misc_feature (1)..(202): Xaa is any amino acid
MEVTAMDAAETINALINQNGGYLTSKEARENGVENKTLQRMVERGLIERIAHGLYAGADVFPDPFFVAQYRCPKGVLSHETALFLHDLCDRVPLKLMMTIPAGWNTQMLTDDDIRFFYSNPKRMGLGVCETETTSGVKVKLYDAERTLCDCLRSIDKLDRDLVITGLKRYVKRKEKDSAKLLEYAADLKIRDMVYRYLEVLV

SEQ ID NO: 76479 - DNA, 765 bp, Unknown
  Obtained from environmental sample
  misc_feature (1)..(765): n is a, c, g, or t
atgaaggtcagtgaggcggggcttgagtccaacatcgtcaaattcttcagcgaaaagcagcaggccgaactcaaaaaacgcatgggcgccgagccgggcgatctgcttctgtttgtggccgatacgcctaaggtcacgaacgacgccctcgcgaatctgcgcgtgaagctcgggcagcggcttgatctgatcgatcccgaaaagatgaacctcctgtgggtggtcgatttcccgctctttgaatacaacccggacgaaaagcgctgggattccgtgcatcaccccttcaccgcgcccaaagccgaggacattcccttccttgacagcgatctcgggcgcgtgcgctccgattcctacgacgtggtcttaaacggcgtagaactgggcggcgggagtatccgtattcacgattccggcctgcaggcaaagatctttaagctcatgggcattacaccggaagacgcggaggtcaaattcggctttctgctggaagcgctcaaattcggcgcgccgccgcacggcggcctcgcgattggctttgaccgcctggtgatgctcctgcagggctgcgcgtcattgcgcgaggtcatcgctttcccgaaaacccaaaagggctcctgcccgatgtccgaagcgccctccgccgtgaccgacgatcagcttanagagctgtatctgcgcaccgccgcgatccccgccggcagcgtgaacgccgcgcataacgcggcttcgagcgggaaaagcagcgcgcaagggcagtcttga

SEQ ID NO: 76480 - protein, 254 aa, Unknown
  Obtained from environmental sample
  DOMAIN (4)...(204): tRNA synthetases class II (D, K and N)
  misc_feature (1)..(254): Xaa is any amino acid
MKVSEAGLESNIVKFFSEKQQAELKKRMGAEPGDLLLFVADTPKVTNDALANLRVKLGQRLDLIDPEKMNLLWVVDFPLFEYNPDEKRWDSVHHPFTAPKAEDIPFLDSDLGRVRSDSYDVVLNGVELGGGSIRIHDSGLQAKIFKLMGITPEDAEVKFGFLLEALKFGAPPHGGLAIGFDRLVMLLQGCASLREVIAFPKTQKGSCPMSEAPSAVTDDQLXELYLRTAAIPAGSVNAAHNAASSGKSSAQGQS

SEQ ID NO: 76481 - DNA, 714 bp, Unknown
  Obtained from environmental sample
  misc_feature (1)..(714): n is a, c, g, or t
ttgcctgaaatcgctaagggaagcggggatgcggccaaggctcttgacacgttgggaatcaatgttaccaacacggacggtactttcaagaacatgaatgacctgttccccgaagtcatcaagaaattgcaaggggtcagtgacgttacgcagagaaatatcttggcgtccgagatattcggcaagaagagcaaggaactcgcgagtatcatgggtatgtcaggcggcgagatggacaaactccgcaaagaagcccacgatctcggcctagtgatgggtgaagacggcctgcaagcggctgaaagtttcaaagcgggcgtagagaagctgaaagagcagatagccgctgtaggcctcgaaatcggaagcaaggtcattccgatactaaacgaaacatttatcccgctcatacagtcgaccctgattcccgccttgaagacagccgcagacgccgtaggcggcctcgccaaggtcttttccgcgttgccctcagagttgcagacggtcacactcggcttaggcggcatagtgaccgccctaggccctattgtcttaggcatcggctcgatggcgggtgtagtgtccaaagctatccctgtgttagcagggttggctaccacgatgggagcggctaccgcaggggctacgggcctaggggccgccctgatgggactcgtaacgggcgtagctctccgcgtggctcggccgatctga

SEQ ID NO: 76482 - protein, 237 aa, Unknown
  Obtained from environmental sample
  misc_feature (1)..(237): Xaa is any amino acid
MPEIAKGSGDAAKALDTLGINVTNTDGTFKNMNDLFPEVIKKLQGVSDVTQRNILASEIFGKKSKELASIMGMSGGEMDKLRKEAHDLGLVMGEDGLQAAESFKAGVEKLKEQIAAVGLEIGSKVIPILNETFIPLIQSTLIPALKTAADAVGGLAKVFSALPSELQTVTLGLGGIVTALGPIVLGIGSMAGVVSKAIPVLAGLATTMGAATAGATGLGAALMGLVTGVALRVARPI

SEQ ID NO: 76483 - DNA, 372 bp, Unknown
  Obtained from environmental sample
  misc_feature (1)..(372): n is a, c, g, or t
atgaacaccactacattttccgagcgcctccgcctgctttccgacaccctgaaagttgagcatcaggttctcgccagggccgggggcgtgtccagggcgacgttttccaactacatccacggcgaaagatttccgcgcatggaaacgctcgccaactggatcgtcaggtacaacgtcaacgccaactggcttatctcgggcctgggcggcatgtttcacgacgagcaggcaacggaagaatccgacgacaaatcggacgatcccgtggtcgaacgcatgcaggctgccgtaaaactcctgaaagacgccaatgccgccgatgaaaccatccagaacgccattcttgccgccctgaaaactcccgacgcataa

SEQ ID NO: 76484 - protein, 123 aa, Unknown
  Obtained from environmental sample
  misc_feature (1)..(123): Xaa is any amino acid
MNTTTFSERLRLLSDTLKVEHQVLARAGGVSRATFSNYIHGERFPRMETLANWIVRYNVNANWLISGLGGMFHDEQATEESDDKSDDPVVERMQAAVKLLKDANAADETIQNAILAALKTPDA

SEQ ID NO: 76485 - DNA, 465 bp, Unknown
  Obtained from environmental sample
  misc_feature (1)..(465): n is a, c, g, or t
atggggccagtttttggaaagagtgcgccttgcaaccccccttggggagatgttgaaaaaagaggttggccagggcgattttcttatcgctccagtttcctaaaatccggcggcgttgcgttgggcgcatggatagcgctggcaaagggcgatgcggcgcaaataaaagccaagatgaattcaattatttatgccagacgcgagagccagccatctgggcgcagcgccggcagcacgttcaaaaatccccctggacacagcgctggaaagctcatcgaaagcgtgggcctaaagggggcgcgcatagggaatgtccaagttagcccaaagcacgccaacttttttgtcaacttgggcgatgcagaaccaaacgactactgggagctgatccaattggcaaaatcaaaggtgcttgaagcccacggcgttgagctagagctagaaatagaagtgtggaaaaaataa

SEQ ID NO: 76486 - protein, 154 aa, Unknown
  Obtained from environmental sample
  DOMAIN (52)...(153): UDP-N-acetylenolpyruvoylglucosamine reductase, C-terminal domain
  misc_feature (1)..(154): Xaa is any amino acid
MGPVFGKSAPCNPPWGDVEKRGWPGRFSYRSSFLKSGGVALGAWIALAKGDAAQIKAKMNSIIYARRESQPSGRSAGSTFKNPPGHSAGKLIESVGLKGARIGNVQVSPKHANFFVNLGDAEPNDYWELIQLAKSKVLEAHGVELELEIEVWKK

SEQ ID NO: 76487 - DNA, 837 bp, Unknown
  Obtained from environmental sample
  misc_feature (1)..(837): n is a, c, g, or t
gtggtagcgggaggaagtaccggtacagcaggcggaataacagcacggggagccggtgtagtaccgggaggaagtgctggtactgcgggcggaatgacggtagcaggagccggtgtggtgccgggaggaagtgccggtacagcaggcggaatgacggtagcaggagccggtgtggtactaggaggaagtactggtacagcaggcggtacgacagagtcgggagacggtgtagtgccgggaggaagtgctggtacagcaggtggaataacggcaccgggagccggtgtagtgccgggaggaagtgccggtacagcaggtggtatgacagagtcgggagcaggcgtcataccgggaggaagtgctggtactgcaggtggaatgacggtagcaggagccggtgtggtaccaggaggaagtgctggtacagcaggaggaatgacggtagcaggagccggtgtggtaccaggaggaagtgctggtacagcaggtggtatgacagagtcgggagctggcgtcgtaccgggaggaagtgctggtactgcaggtggaatgacggcgccaggagccggtgtagtgccaggaggaagtaccggtacagcaggaggaatgacggtagcaggagccggtgtggtaccaggaggaagtgctggtacagcaggtggtacgacagagtcgggagccggtgtagtgccgggaggaagtactggtacagcaggtggaataacggtagcaggagccggtgtggtgccgggaggaagtaccgctacagcaggtggtacgacagagtcgggagccggtgtggtaccaggaggaagtgctggtactgcaggggaatga

SEQ ID NO: 76488 - protein, 278 aa, Unknown
  Obtained from environmental sample
  misc_feature (1)..(278): Xaa is any amino acid
MVAGGSTGTAGGITARGAGVVPGGSAGTAGGMTVAGAGVVPGGSAGTAGGMTVAGAGVVLGGSTGTAGGTTESGDGVVPGGSAGTAGGITAPGAGVVPGGSAGTAGGMTESGAGVIPGGSAGTAGGMTVAGAGVVPGGSAGTAGGMTVAGAGVVPGGSAGTAGGMTESGAGVVPGGSAGTAGGMTAPGAGVVPGGSTGTAGGMTVAGAGVVPGGSAGTAGGTTESGAGVVPGGSTGTAGGITVAGAGVVPGGSTATAGGTTESGAGVVPGGSAGTAGE

SEQ ID NO: 76489 - DNA, 903 bp, Unknown
  Obtained from environmental sample
  misc_feature (1)..(903): n is a, c, g, or t
ttgccccggccacggaacgttttcgcggagcttgtcgatccacagacggggcagaagctctccgcccgatcgaccggaacgaaaaaccgggatgaagccctgctgaaaatagcagagtggcttaaatccggcataccgaccggaagggtacggaagccccggagcctggaaacggcagcagggattgagagcgcccttcgcgccatacggaaagccgatcttaattcggacgacgctttgcggatagtccaggcattaagagatcgagggctgatagacatagccgcggtgaaatccggcaagggatcggttttatttacggagttccttgaggagttttgggactatgacaattccccttacatccgggaaaagcgagctcatgggcaaagcgtaggaaagaggcattgttatgagagcatgagccgctttaatcgttattggcagccgaccttccggggccgcacccttaacagcataacccggcaggacctcaaggatttttccttgtcccttgcagaaggcggcctggccccagcatcggtcaacaagatcatggccgtgggtactaccgccttttcgtgggctttccgggaagggcatattccggcagatccggccgtcggcttggtcaacttctccggagaagcaaagaagcggggagtgctgacaccctcagaagcggaagcccttttcacggcgaagtggaaagacaagcgggcttatgtcgcttccttattggcctgcacaacaggcatgagaagcggggaagtcttggcgatcaagctggaggatattgaaccccggattcttaatgtacggcacagctggagcgattttgacggcctgaaagcgccaaaaaacgggggaggctcgaagggtttcccctgttgcccggagtaa

SEQ ID NO: 76490 - protein, 300 aa, Unknown
  Obtained from environmental sample
  misc_feature (1)..(300): Xaa is any amino acid
MPRPRNVFAELVDPQTGQKLSARSTGTKNRDEALLKIAEWLKSGIPTGRVRKPRSLETAAGIESALRAIRKADLNSDDALRIVQALRDRGLIDIAAVKSGKGSVLFTEFLEEFWDYDNSPYIREKRAHGQSVGKRHCYESMSRFNRYWQPTFRGRTLNSITRQDLKDFSLSLAEGGLAPASVNKIMAVGTTAFSWAFREGHIPADPAVGLVNFSGEAKKRGVLTPSEAEALFTAKWKDKRAYVASLLACTTGMRSGEVLAIKLEDIEPRILNVRHSWSDFDGLKAPKNGGGSKGFPCCPE

SEQ ID NO: 76491 - DNA, 516 bp, Unknown
  Obtained from environmental sample
  misc_feature (1)..(516): n is a, c, g, or t
atgcttttgcaaaaaaaaatccttgttattctcttactcgcctgtgcagcacaggcggcagatgggatgcgcgttgcccatgtggattccaagctgatatttgaaggctataaaggaacaaaaaaagctcaggaagaatacgaccgccaggtggcaaagtgggaacaacaggcaaacttgttgcaaaaagaactaggctttgtaaaagagagattggagaaacagagtttaatgctctcggatgagcagaaaagagagctggaagcggaatatgcccgtagagatacagagctgaaaaaattcatcgaaaaaatttacggcagaaaaggcgaacttttgacagagaacgaaaaggtaagtgccccgataatagccctgataaaaaaggccgtgacggaaatagctctgagcgagggttacgattatgttttggatagagccacaggtgctgtgcttttttggaagagtgaaaacgatttaacccaaaaagtgttggactatttaaatggaaggtga

SEQ ID NO: 76492 - protein, 171 aa, Unknown
  Obtained from environmental sample
  SIGNAL (1)...(19)
  DOMAIN (8)...(169): Outer membrane protein (OmpH-like)
  misc_feature (1)..(171): Xaa is any amino acid
MLLQKKILVILLLACAAQAADGMRVAHVDSKLIFEGYKGTKKAQEEYDRQVAKWEQQANLLQKELGFVKERLEKQSLMLSDEQKRELEAEYARRDTELKKFIEKIYGRKGELLTENEKVSAPIIALIKKAVTEIALSEGYDYVLDRATGAVLFWKSENDLTQKVLDYLNGR

SEQ ID NO: 76493 - DNA, 813 bp, Unknown
  Obtained from environmental sample
  misc_feature (1)..(813): n is a, c, g, or t
gtggtaatcccgaacaaccagcgcctgcgttctttattggaagacgccgccggcaaacggctggaagactttacggcgaaagaccacgagcatctcgcggagaattacgagcgctatctcaggacgggggaagcgccaacgccgtcccttaaagcgctctttaagcggatagcagaagctttaaagcaatttgtaaggaatgggaacgtaagccctgagctgcgggagttctttgacaaaatgcttgcagggcctgacggcgcgatgcttggcggcgaaagcaatgaggcaaagagccgcgcgcgcgtacagacggacaacgagcagcagcgggcattcgcggagatgacaagcgccgagcggatcctccagggcgatttatacaccctgggagagaaagcccaggtgctcttcgctatggcggaaaataattttaagaacgaattggagaaagtcaaaaacggcactatcaatccagggcgcatgatacagacaagcgccgcgccggaagtatacacaaaaaaggggctgcctgattacaccgtttcccttcctgtttccgttataaacaaagctaccacccaacacgcggtagggatggatgttattgaacggcttccggaacttcttaacgcgccggtacttatcctcaaatcgcttacagaccctaaggcgtttattacagtgattgacgccgcggacaatgaaggacggccggtaattgtcgcgcaaagaccgacgctgaaacaaacgaccaatattcttagcatttacgggaaagataatttcgacaggtttattcagaaaatatag

SEQ ID NO: 76494 - protein, 270 aa, Unknown
  Obtained from environmental sample
  misc_feature (1)..(270): Xaa is any amino acid
MVIPNNQRLRSLLEDAAGKRLEDFTAKDHEHLAENYERYLRTGEAPTPSLKALFKRIAEALKQFVRNGNVSPELREFFDKMLAGPDGAMLGGESNEAKSRARVQTDNEQQRAFAEMTSAERILQGDLYTLGEKAQVLFAMAENNFKNELEKVKNGTINPGRMIQTSAAPEVYTKKGLPDYTVSLPVSVINKATTQHAVGMDVIERLPELLNAPVLILKSLTDPKAFITVIDAADNEGRPVIVAQRPTLKQTTNILSIYGKDNFDRFIQKI

SEQ ID NO: 76495 - DNA, 768 bp, Unknown
  Obtained from environmental sample
  misc_feature (1)..(768): n is a, c, g, or t
atggatatattgccttcactattcgatattctttccattaactccacaaatttaaaaaaagttgccagaaatattggtataccgccaaaaacattatctttttataataacaataataaaattcctgcggggcaagatttagagaaaatctgtaattacttagagaaagacctaatgtggctaaaactcaaaatgggtattgttgataatcatattcttactttactatctcaaaatgcggataatattattaatatatctcaaggtactataaaaaaagaaactgaaaaacccaataaaaaaaatgttttaccgaaattcagcaccgatttaggaacactttatcaagatgattgtctaaagatcttaaaccaagtggaagatagcactatagatttaatttttgcagatcctccattcaacctaagtaaaatttatccttcaaatattgatgatcatttaaaggaagaagaatatttagcatggcaagaaaaatggctttttcaatgtattcggattttaaaatacggcggatcattgtatctatggaatttgccaaaatggaatacatacaactcctattttttaaataaatacttaaagtttcgtcactggatttctgttgatattaaatattcattaccgatacaaggaaaattttacccatctcactattcacttttatactacattaaaggtgaaaaagcaaagtcatttcatcccgacagaattccatggaaatttgtcctaaatgccaaactgatttaa

SEQ ID NO: 76496 - protein, 255 aa, Unknown
  Obtained from environmental sample
  misc_feature (1)..(255): Xaa is any amino acid
MDILPSLFDILSINSTNLKKVARNIGIPPKTLSFYNNNNKIPAGQDLEKICNYLEKDLMWLKLKMGIVDNHILTLLSQNADNIINISQGTIKKETEKPNKKNVLPKFSTDLGTLYQDDCLKILNQVEDSTIDLIFADPPFNLSKIYPSNIDDHLKEEEYLAWQEKWLFQCIRILKYGGSLYLWNLPKWNTYNSYFLNKYLKFRHWISVDIKYSLPIQGKFYPSHYSLLYYIKGEKAKSFHPDRIPWKFVLNAKLI

SEQ ID NO: 76497 - DNA, 345 bp, Unknown
  Obtained from environmental sample
  misc_feature (1)..(345): n is a, c, g, or t
atgataggcgggcaaattgtggatattgagtctgaggaaaaatccgttgatttggctacggtggattatattcactatcataaaacagcagctttgatagaagcctcgctggttataggcggtttgctcgcagatgcaaaagaagaggatttgaagcatataagggaatttggcaaagggatagggcttgtctttcagattgtagatgatattttggatatagaaagctcaacggaagagcttggcaaagatgttggttcggatgttaaaaacggcaaagctacttatccggctgttttgggtttagaagcttcaaaacaaaaggtaaaggaactctacaantag

SEQ ID NO: 76498 - protein, 114 aa, Unknown
  Obtained from environmental sample
  DOMAIN (1)...(114): Polyprenyl synthetase
  misc_feature (1)..(114): Xaa is any amino acid
MIGGQIVDIESEEKSVDLATVDYIHYHKTAALIEASLVIGGLLADAKEEDLKHIREFGKGIGLVFQIVDDILDIESSTEELGKDVGSDVKNGKATYPAVLGLEASKQKVKELYX

SEQ ID NO: 76499 - DNA, 708 bp, Unknown
  Obtained from environmental sample
  misc_feature (1)..(708): n is a, c, g, or t
atgcgcagattctcgaccgccgcgagctgcagcgcctcgctgacaagatcgccaaggccaagcggggggacaagccgtgatgctgccgttgatcgtcgaatcggcggcccgcgccacggtgctggccggtttcctctggctggccctgcggctggcgcgggtccgccgcccgcacccgcagaaatcggcctggacggccgtgctgctggcatccctcgccatgccctgtctcatacgcaccgtcacggcgccggtgatccaggcacccgcatacctcctgaccctgtcaccgcaggcgggcgtgacggcgccggcgcacggcgcctggcatctgctcggcacactctacgccctggtcgcggccgccggggccggcagctacctggtgagcctgctgcgcatggcccgggttcgaagccgcgcggaggtgctcgaggcggggtggacgcgcggcctggatgtgcgggtgagccggcgcctgggaagccccgcgaccttcgccgggaccatcctgctgccgcaggagttcaggaagtggagccggcagaccttggatgccgtgatcgcgcacgagcgttcccacgtcctggagcacgattgccaccgcttgtggctcgcgcacctgcatgcacggatcttctggttcaacccggtggcgtggtggttgttgcgccggctcgagagtgtcatcgaggcgagcgccgatga

SEQ ID NO: 76500 - protein, 235 aa, Unknown
  Obtained from environmental sample
  SIGNAL (1)...(21)
  misc_feature (1)..(235): Xaa is any amino acid
MRRFSTAASCSASLTRSPRPSGGTSRDAAVDRRIGGPRHGAGRFPLAGPAAGAGPPPAPAEIGLDGRAAGIPRHALSHTHRHGAGDPGTRIPPDPVTAGGRDGAGARRLASARHTLRPGRGRRGRQLPGEPAAHGPGSKPRGGARGGVDARPGCAGEPAPGKPRDLRRDHPAAAGVQEVEPADLGCRDRARAFPRPGARLPPLVARAPACTDLLVQPGGVVVVAPARECHRGERR

SEQ ID NO: 76501 - DNA, 357 bp, Unknown
  Obtained from environmental sample
  misc_feature (1)..(357): n is a, c, g, or t
atgatggcgagcgtaggccaaactctgtatctgccggccgcgctgaaatttgccgcgcagttagccaagcaaatccaacagcttaaagccgcaggcgtttcgataactacaccggagaaacttctggatagtgccggtaagttattggcgtcgattgacaagaaaaccgccgcgttggaagccgccgccgttaaagccaaggccgcagacgatgtgaccaagcaggctacactggcccgcgatgaagtttttacggcaattaccagcctgcgcagtgatgtagacactctggaagccatcacccccgccggactctggcctgtgccgacttacgcggagatgctgtttaagctgtaa

SEQ ID NO: 76502 - protein, 118 aa, Unknown
  Obtained from environmental sample
  misc_feature (1)..(118): Xaa is any amino acid
MMASVGQTLYLPAALKFAAQLAKQIQQLKAAGVSITTPEKLLDSAGKLLASIDKKTAALEAAAVKAKAADDVTKQATLARDEVFTAITSLRSDVDTLEAITPAGLWPVPTYAEMLFKL

SEQ ID NO: 76503 - DNA, 585 bp, Unknown
  Obtained from environmental sample
  misc_feature (1)..(585): n is a, c, g, or t
ttggcggccaagacgggtttggactggcaaaccgccgcgcgcctggtcaaaaagcttaagcgccgccgtaaaaaagagctatttaagttatgcgttaaaaatatgcagccctgggaccagatgctgcgcgagtttgaactggcggatttgacttttgaactcacggtttccgcaagctgctttgcccagttgaaacgccaccgcatgacgacgcttctggccatggattatgaccccgctttgggtctgcgcctgccgccggtaatcaaagctgtcggcctggagaaagagtttatcaaaacggccgcggccagtgcggaactggcggcggagattaaagcggagattccggcggcggcggattatgttttgacgaacgcgcatcagcggcgcgtgatttgtaaaaccaatctgcgtgaactgtatcatatttcacgcctgcgtgaagacgcgcatgcccagtgggatattcgtgaaattgcggcgcagatgaccgccgctgccaggaaagttttccctttgacggcgtcatttatcggcggcaaagatgcctatccggaactgtataaaaaaatcttaaagtag

SEQ ID NO: 76504 - protein, 194 aa, Unknown
  Obtained from environmental sample
  DOMAIN (15)...(178): Thymidylate synthase complementing protein
  misc_feature (1)..(194): Xaa is any amino acid
MAAKTGLDWQTAARLVKKLKRRRKKELFKLCVKNMQPWDQMLREFELADLTFELTVSASCFAQLKRHRMTTLLAMDYDPALGLRLPPVIKAVGLEKEFIKTAAASAELAAEIKAEIPAAADYVLTNAHQRRVICKTNLRELYHISRLREDAHAQWDIREIAAQMTAAARKVFPLTASFIGGKDAYPELYKKILK

SEQ ID NO: 76505 - DNA, 741 bp, Unknown
  Obtained from environmental sample
  misc_feature (1)..(741): n is a, c, g, or t
atgttgttgatagataaattaacatcagatatacttgaagataaatatttccaagaattatntgagaaatgtttgctcatatcggctatgcacaatttaaaatcacatacaatgcctatattaacagaaaaagagtttaaagacatcttaagatttgcagatattttatccaattcaaaagatacgaatagtcgaaagaagtcgtatcagattattacttttttgaaccacaaatatcacaacgacccgatttataggacgttgtctaagtctgttttttcaaaacttggtaattttcctgcaataggctatttggttaataaaaacaataatttggccgaattaccaatattacatgaaattgaattagaatccaaaaaagtaatacagaaggttccgaattgtaaagatacgttctttacagatgtacagtttgatttattttcaaagcttagcggcagtattgaatatagtttttcaggtccaacatctatgggtaaatctttcataattaaatccttccttaaaatcattatgaaaaataatccacctgaaaatattattatagtcgttccaacacgtgcactaataaaccaattttctatggatttaaaactagaactgaaagaattattggagtactacaaatataaaattttagtaaactcaaatatttctaatattcaaaccattgaaaagtataattacatttttgtattaacaccgagagagacttattag

SEQ ID NO: 76506 - protein, 246 aa, Unknown
  Obtained from environmental sample
  misc_feature (1)..(246): Xaa is any amino acid
MLLIDKLTSDILEDKYFQELXEKCLLISAMHNLKSHTMPILTEKEFKDILRFADILSNSKDTNSRKKSYQIITFLNHKYHNDPIYRTLSKSVFSKLGNFPAIGYLVNKNNNLAELPILHEIELESKKVIQKVPNCKDTFFTDVQFDLFSKLSGSIEYSFSGPTSMGKSFIIKSFLKIIMKNNPPENIIIVVPTRALINQFSMDLKLELKELLEYYKYKILVNSNISNIQTIEKYNYIFVLTPRETY

SEQ ID NO: 76507 - DNA, 582 bp, Unknown
  Obtained from environmental sample
  misc_feature (1)..(582): n is a, c, g, or t
atgcccggcgatgtcatttccttcgattccaatcagcgggaactggtcggaggcgcggtatgcggcaaggcgctggacgatcgcgccgggtgcgtttccctgttatgcgccattgaatatctgggaaaagccgaactggactgcggcgttagcgtgttattctcgtcaatggaagaaggcggcggctggggcgcaaaaaccggagcgtatatcgccgacccgactcacgcaatcgcggttgacgtaacattcgcgtacactcccgattccaagaaagaaaacaccgcggcaatgaacggtggccctgttgtttgttactcgtcattgatgaacaaggaattgaccgacgctctgattgccgtcgcgaaggaaaaggaaatccctcaccagattgaggcgacatccgggcgcacgggaacaaacgccgaccttatcgccgttgtgcgcgcgggtgtccgcacggcgctgatctcgattccgcagaagtatatgcacacgccgattgaagtgcttaccgtggctgatgttgaaaacacgggcaggcttattgcggaatatattaaaaagacgtgnggtaaataa

SEQ ID NO: 76508 - protein, 193 aa, Unknown
  Obtained from environmental sample
  DOMAIN (15)...(189): Peptidase family M20/M25/M40
  misc_feature (1)..(193): Xaa is any amino acid
MPGDVISFDSNQRELVGGAVCGKALDDRAGCVSLLCAIEYLGKAELDCGVSVLFSSMEEGGGWGAKTGAYIADPTHAIAVDVTFAYTPDSKKENTAAMNGGPVVCYSSLMNKELTDALIAVAKEKEIPHQIEATSGRTGTNADLIAVVRAGVRTALISIPQKYMHTPIEVLTVADVENTGRLIAEYIKKTXGK

SEQ ID NO: 76509 - DNA, 543 bp, Unknown
  Obtained from environmental sample
  misc_feature (1)..(543): n is a, c, g, or t
ttgttcgcggaattgcgccatcccatcgccaaagaaggcgtcgttgcgggcttgaccagcaattcccatgaatggagcggcttcggccatgtgtgcctggactaccgcaagcttctttcccggggcgttgcgggcatgcgcgacgaagcggatcggcgcctgcgcgatcttgcgttcacagacccggaatacggcctcaaatcatccttctggcgcgcttgtcttgaagtgtgcgccggcatgctcatctacgcccgccgctaccgcgatctggcgttggaactggccgggcgcgaggagaatccggatcgccggcttgaattgcagcgcatggccgccatgctgganaacgtgccgctcaagccggcgaacacattcagggaaagcgtgcagtccttctggttcctgcaaatcatcccgcagatcgaatcccacggctacttcatcacgcccggggcgcttcgaccaatacatgtgggcatatctagaaaaagatctccgcgccgggcccattgcacaagatggaggccaggaactccttga

SEQ ID NO: 76510 - protein, 180 aa, Unknown
  Obtained from environmental sample
  misc_feature (1)..(180): Xaa is any amino acid
MFAELRHPIAKEGVVAGLTSNSHEWSGFGHVCLDYRKLLSRGVAGMRDEADRRLRDLAFTDPEYGLKSSFWRACLEVCAGMLIYARRYRDLALELAGREENPDRRLELQRMAAMLXNVPLKPANTFRESVQSFWFLQIIPQIESHGYFITPGALRPIHVGISRKRSPRRAHCTRWRPGTP

SEQ ID NO: 76511 - DNA, 948 bp, Unknown
  Obtained from environmental sample
  misc_feature (1)..(948): n is a, c, g, or t
ttgatggccgagtgtcatcagcgcagaggcgcttccaaaagggcggctgataaagatattacctggacacattcaggttcagtttcgtcgctcagcgtaaacacaggcgaaactacagtggcaactttctccgctaataccggcagtgcagttattaccgcgtcagccggaggtaaatcggtacaactgacgataactcttaccgccggagcggctcttgtaaccgacattagtattagcgcgccaagtaccagtattatgtcaggtgctacaccgcaagaaacattgcaatttaccgagagcgttctgccttccggagccacggataaatccgttatctggtctgtatggggtaatagcgccggtactacggctacaacagctgcaaccattgatgccgcttccggactgttgactgcgtccgcaactagtgttgctgctaatactgatgtctgggtttttgccgcagcaaaagacagttccggtgttaagtctacggggacgaagattacagtgaagaaatatgtgccttatcctttagaaaatataaagtggggtactgctgataatctgaataaagcaaaagtggaatatacggtatttgatggaaccgatgctcgattggttatcaccggcgctggaaccatggatggttctaattctaaatgtaatatggtttttgtaaaagttccaaccaaaggtaatgttttttgggctgaggttgatatagacttgaagagaagttctattggtgtaacaggcagcaacaattcanaaattggaattgtggctatcaaaggaaacccttcaggcgcggcagagcacactctaagttattatgtaacttgcattcaaagcgcacttttatctgcgccgcaaagaggtatgatgaatccctggntggggcgctnatggtgctttaggagacatacccaccagcaccagtga

SEQ ID NO: 76512 - protein, 315 aa, Unknown
  Obtained from environmental sample
  misc_feature (1)..(315): Xaa is any amino acid
MMAECHQRRGASKRAADKDITWTHSGSVSSLSVNTGETTVATFSANTGSAVITASAGGKSVQLTITLTAGAALVTDISISAPSTSIMSGATPQETLQFTESVLPSGATDKSVIWSVWGNSAGTTATTAATIDAASGLLTASATSVAANTDVWVFAAAKDSSGVKSTGTKITVKKYVPYPLENIKWGTADNLNKAKVEYTVFDGTDARLVITGAGTMDGSNSKCNMVFVKVPTKGNVFWAEVDIDLKRSSIGVTGSNNSXIGIVAIKGNPSGAAEHTLSYYVTCIQSALLSAPQRGMMNPWXGRXWCFRRHTHQHQ

SEQ ID NO: 76513 - DNA, 636 bp, Unknown
  Obtained from environmental sample
  misc_feature (1)..(636): n is a, c, g, or t
ttgttgaaaaaggtagttgttctcataaatggaaaggaagaaactcttgaaattccagattccgtttctatcccctttcctgtttccgggtctacgcctttttattcgccgcctccgccgccgcagccggcacccacttaccaaccattctcgccaccgtggtcagcgcccgcttacccgcaatatacgccgtcacagccaagacccgcttacccgcaatatgcgccgcagcagccaacacccgcttacccgcaatatgctccgcagcagccaacacccgcttacccgcaatatgctccgcagcagccaacacccgcttacccgcaatatgctccgcagcagccaacgcctgcttacccgcaatatgcgccgcctatgccaccgcctgcagcgtctcctccaccgccgcctgcacctccgcaaccgccgcctgagcctccaccgccaccacctccgccaccgcctacgcgggttattattcctccggcgccgccttcaaggcctatgccgccgccggttcagaccacaagccccgttctaacaatcattcccaccttccggatcctcaaaacgggagatataccgaatacgggtcggcgcgtttgccaccatcgctcttgcgcaaggatgttttga

SEQ ID NO: 76514 - protein, 211 aa, Unknown
  Obtained from environmental sample
  misc_feature (1)..(211): Xaa is any amino acid
MLKKVVVLINGKEETLEIPDSVSIPFPVSGSTPFYSPPPPPQPAPTYQPFSPPWSAPAYPQYTPSQPRPAYPQYAPQQPTPAYPQYAPQQPTPAYPQYAPQQPTPAYPQYAPQQPTPAYPQYAPPMPPPAASPPPPPAPPQPPPEPPPPPPPPPPTRVIIPPAPPSRPMPPPVQTTSPVLTIIPTFRILKTGDIPNTGRRVCHHRSCARMF

SEQ ID NO: 76515 - DNA, 513 bp, Unknown
  Obtained from environmental sample
  misc_feature (1)..(513): n is a, c, g, or t
atggaaaggaagaaactcttgaaattccagattccgtttctatcccctttcctgtttccgggtctacgcctttttattcgccgcctccgccgccgcagccggcacccacttaccaaccattctcgccaccgtggtcagcgcccgcttacccgcaatatacgccgtcacagccaagacccgcttacccgcaatatgcgccgcagcagccaacacccgcttacccgcaatatgctccgcagcagccaacacccgcttacccgcaatatgctccgcagcagccaacacccgcttacccgcaatatgctccgcagcagccaacgcctgcttacccgcaatatgcgccgcctatgccaccgcctgcagcgtctcctccaccgccgcctgcacctccgcaaccgccgcctgagcctccaccgccaccacctccgccaccgcctacgcgggttattattcctccggcgccgccttcaaggcctatgccgccgccggttcagaccacaagccccgttctaa

SEQ ID NO: 76516 - protein, 170 aa, Unknown
  Obtained from environmental sample
  misc_feature (1)..(170): Xaa is any amino acid
MERKKLLKFQIPFLSPFLFPGLRLFIRRLRRRSRHPLTNHSRHRGQRPLTRNIRRHSQDPLTRNMRRSSQHPLTRNMLRSSQHPLTRNMLRSSQHPLTRNMLRSSQRLLTRNMRRLCHRLQRLLHRRLHLRNRRLSLHRHHLRHRLRGLLFLRRRLQGLCRRRFRPQAPF

SEQ ID NO: 76517 - DNA, 486 bp, Unknown
  Obtained from environmental sample
  misc_feature (1)..(486): n is a, c, g, or t
ttggtccggccaggagccgggaaactgtcgaaaagcgccgaaagagcccttcatagacaactggcgggcgtggtcgtgggcagcgtcaattacggcgaggccgacctcatcgtcaccttcctgaccagggaactgggcctcttgagcgccctggcccgctacggccggcgcagccggcggcgcttcggcggcggcctgttgtcgccgggcgccatggcctggtatgatttcaccataaaaccccaatccaccctggccttcgtggaaaaggccgaggaaaacccccgggtccgccgtctgccgcccgacccagtcatcccggccctggccgccttcgccctggaactggtccggggcttcgagaccccccagaatccggctgaggccagtttcagcctcctgggccggcacttaagccccctggcccacgggcccgacaaaaaaccgccccccggacggccttggattttccgcccactaccttaa

SEQ ID NO: 76518 - protein, 161 aa, Unknown
  Obtained from environmental sample
  misc_feature (1)..(161): Xaa is any amino acid
MVRPGAGKLSKSAERALHRQLAGVVVGSVNYGEADLIVTFLTRELGLLSALARYGRRSRRRFGGGLLSPGAMAWYDFTIKPQSTLAFVEKAEENPRVRRLPPDPVIPALAAFALELVRGFETPQNPAEASFSLLGRHLSPLAHGPDKKPPPGRPWIFRPLP

SEQ ID NO: 76519 - DNA, 822 bp, Unknown
  Obtained from environmental sample
  misc_feature (1)..(822): n is a, c, g, or t
atgccccgcccccaaaaggtttattccctgggtcatgggggcaattggggcccattttacgggggggaccttttcaaaaatttgggggggaaaatacaagcgtggtggaagggcgtggacccggattgtgtccggggggacggtttaagttgcccgggctgcccccccccggcccggaaggcgttctctggaggggcatttttcgccatccagaaaaagctgggccggccggggtttttggccggtggccaagccggtggcggccgaggcgccggaggatgggcccaaatgagcggggaacgtttcctggaaacctggcggcgcttgggcgccttggtcttctcccggttggattttaagaagaccggccttgaatccgcggtcatactgcccccggacagggtgcgggaagcggcagaagcgctcctcgcggccggctttttcttggagaccatcaccgcggtggaagtccgggagggcctcctggtcacctacctctacgattcgccgaccgaaccgggccgactggccgtgcggaccctgaccgccagggccgccagcctgcccagtctggccccggtctatccaggcgccgaatggcacgaacgggaggcggccgactttttcggccttctgttcagcgacaatcccaacccggcccccgtgctactgccccccgattttcccgggccgccgcccttgctccgaaccgccggcgaaagcgtggctgccttgggcgacctgaaaatattcggccaggccgaatttttcgacccggcttggcgggccctggccgggcccgccgcggaggcggcctcatga

SEQ ID NO: 76520 - protein, 273 aa, Unknown
  Obtained from environmental sample
  DOMAIN (178)...(244): Respiratory-chain NADH dehydrogenase, 30 Kd subunit
  misc_feature (1)..(273): Xaa is any amino acid
MPRPQKVYSLGHGGNWGPFYGGDLFKNLGGKIQAWWKGVDPDCVRGDGLSCPGCPPPARKAFSGGAFFAIQKKLGRPGFLAGGQAGGGRGAGGWAQMSGERFLETWRRLGALVFSRLDFKKTGLESAVILPPDRVREAAEALLAAGFFLETITAVEVREGLLVTYLYDSPTEPGRLAVRTLTARAASLPSLAPVYPGAEWHEREAADFFGLLFSDNPNPAPVLLPPDFPGPPPLLRTAGESVAALGDLKIFGQAEFFDPAWRALAGPAAEAAS

SEQ ID NO: 76521 - DNA, 558 bp, Unknown
  Obtained from environmental sample
  misc_feature (1)..(558): n is a, c, g, or t
atgaaaaaacgcggcgagttcagcgtccgtctttcctccaaggccacattggaaaccgacatcgcgctgatgctcgagatttacggcgcaagctgggccgacaactgggccttttgtccgatttccgagacggaagtggcgcgccatgtcgcggaactgaaaagcatcctcgaccctgagcttttcgcgctcttttatcaccagggcgaccccgttgcgggcatgttggccctgcctgacttcaacccgctgctcaaagccctgaacggctccttcgggctgagcacgccctggcattacctgcgcacccgcgctgaagtcgccaagggcggccgggtgctgctgttcggcatcaagccgcaataccgcatgaggggtctgccgcttttggtgatggacgtcatgttggagtgcgggcgcagccggcccgccatgcaacggatggaagcgtcctggacgctggaggacaatgagatgatcaaccggctgatcgaagacttcggcggcgagctggacaaacgctatcgcatctatcgccgggagatgcacgatgtctga

SEQ ID NO: 76522 - protein, 185 aa, Unknown
  Obtained from environmental sample
  misc_feature (1)..(185): Xaa is any amino acid
MKKRGEFSVRLSSKATLETDIALMLEIYGASWADNWAFCPISETEVARHVAELKSILDPELFALFYHQGDPVAGMLALPDFNPLLKALNGSFGLSTPWHYLRTRAEVAKGGRVLLFGIKPQYRMRGLPLLVMDVMLECGRSRPAMQRMEASWTLEDNEMINRLIEDFGGELDKRYRIYRREMHDV

SEQ ID NO: 76523 - DNA, 843 bp, Unknown
  Obtained from environmental sample
  misc_feature (1)..(843): n is a, c, g, or t
atggccgccttttccttcacgctgtaccgggggcagcgcgttgccctgacgggccgcaacggttgcggtaaatccgtgctgctgcaagtgatcgccggactgcgggaaaaagccggcggttcgttgcgcatgggtgcgctggtgcgcctcggctatttcagccagcaccagatggagaccttgcgcgcgcagggcacggtgctcggtgaaatccggcggctgagcgatccgcgcacgagtgaggaagaactcatgagcgtgctggggctgtttctgctgggacaaaacttttttgaacgcaaggtggacacgctgtccggcggggaaaaaagccgcctgatcctggccggcctgtttttggcgcgctgcaacttcctggtgctggacgaacccaccaaccatctggatttggaaagccgcgaagcgctcattaccgccctggaggcgtttgaaggcaccctgctcatggtggcgcatgaccgctggctgatctcggcggtggccgaacaggtctggctcctgaacgagcagggtctcaccgtctatgaagacggcttcgaacaatacgacgaagcgcggcgcgcggcgcatagcgccggagacgcccccgggccggcgctttccgcgcgcgatacgcagcgccgcatcaagcgcgaggaagccgaaaagcgcaacgagctttcccggaagacgcggcccatgcaggaagaatatgcccggctggaacaggaactggaggcgctgttcgcggaacagcacgaggtggaaggcaggctggccgacccggaaatctatgccgatgtgtcccgatccaatgaattgctgcggcgtttgccgaaataa

SEQ ID NO: 76524 - protein, 280 aa, Unknown
  Obtained from environmental sample
  DOMAIN (5)...(181): RecF/RecN/SMC N terminal domain
  misc_feature (1)..(280): Xaa is any amino acid
MAAFSFTLYRGQRVALTGRNGCGKSVLLQVIAGLREKAGGSLRMGALVRLGYFSQHQMETLRAQGTVLGEIRRLSDPRTSEEELMSVLGLFLLGQNFFERKVDTLSGGEKSRLILAGLFLARCNFLVLDEPTNHLDLESREALITALEAFEGTLLMVAHDRWLISAVAEQVWLLNEQGLTVYEDGFEQYDEARRAAHSAGDAPGPALSARDTQRRIKREEAEKRNELSRKTRPMQEEYARLEQELEALFAEQHEVEGRLADPEIYADVSRSNELLRRLPK

SEQ ID NO: 76525 - DNA, 873 bp, Unknown
  Obtained from environmental sample
  misc_feature (1)..(873): n is a, c, g, or t
gtggagcgcgtcgatgaggagaccggggaaacaaccgtcgagctggccgcgccggacacatcggatatttatcgcaataaagacggcagcctggagactaaagaatacatatacaccaacgaagatggcagtattaacggtcgtttctatgccgcagaccctcgcattgaggataaagatcaaagcggggaaagtctttacggtttcattaaatataccgaaaacggaaacaccatcaccataaacaatttcgaaatgggaaaaggatacgaaaatctccggcaacaattatatgaccaattcgcggaacggttcgcgggaatggaaatcgtctggaaccccggcgggcagaacctcgccatccgcgaaagccttgtcaaccagaacccgcgcggcccgaaggcggggctgaactattacgagaagggaacggacccgaatataagcgacgaggcccgccaggtcgcccaacggttcacgccgtacatgacaaagagcagcccgctcgaggtagccctcgcggcggaagcgttcaacgcgttctaccggcgccggggggagagcctaagcggagcgatgaaccggctgctgggaaacgtaacaaacgaggcgccggaagctgtgatagccgcgcaaagcgaaagaaaaatagtgaaaggcgccacatggcttgaacagacagccgagggaattaggcgcattgtatacctgaataaaaacgcctccgacgcttcgaccgtgttacacgaaaccagccacgcggtggccaatgatttcacggacgcggaacggcgcatcgcgtctcgcgccctgaacggttacgagttaaaagacggcaccacggtttactttgaggagacgccaccggcttga

SEQ ID NO: 76526 - protein, 290 aa, Unknown
  Obtained from environmental sample
  misc_feature (1)..(290): Xaa is any amino acid
MERVDEETGETTVELAAPDTSDIYRNKDGSLETKEYIYTNEDGSINGRFYAADPRIEDKDQSGESLYGFIKYTENGNTITINNFEMGKGYENLRQQLYDQFAERFAGMEIVWNPGGQNLAIRESLVNQNPRGPKAGLNYYEKGTDPNISDEARQVAQRFTPYMTKSSPLEVALAAEAFNAFYRRRGESLSGAMNRLLGNVTNEAPEAVIAAQSERKIVKGATWLEQTAEGIRRIVYLNKNASDASTVLHETSHAVANDFTDAERRIASRALNGYELKDGTTVYFEETPPA

SEQ ID NO: 76527 - DNA, 780 bp, Unknown
  Obtained from environmental sample
  misc_feature (1)..(780): n is a, c, g, or t
atgacgaatgagaaacaagtaaaaaaagctgtttcaccgcgcntgcaagctaaagccgtcgccaatgcggacgtgctgtttgaacgggcgataattcattcaacgcatgatgatactcacggcagggagaatgtaaggcaaatacatcgcctcggggcgctaatggaggacggcggggaatatgtgcctgttaagctgactgttattgagtatgtccaggatgattacgggaacaggctttatgcgatagaagcggtagacatagaaaaaataaagtccgctggactaatgccacaaactcccggaaacccggaagcctccggcccgatagcggactttaataaaaatctattgcggctgtatgaatttgtcaatacccaagacgcaggaagtaatattcttttccagaccggctggcacggcagcgccgcccgtttcgaccgcttcgacggcagccacatgggagagggagagggaaaccagctttatggctacggccattatttttcaaataagaaagaagtggcggagtggttcaggaaaaaattacaaaagaaagcggacagcaaaggccagacatacaaggtcgatattccagaagaccaccagatgctggactgggacaaaaagctcaacgggcagccggaacagatccaaaaaataattaaacaaaacgcggaacaattatttttagacgaatcgcttccgggaatgaatgaaatgaccggcgggcagatctaccgcgagctgtcggagaaaatgggaaaagcnggcgaataa

SEQ ID NO: 76528 - protein, 259 aa, Unknown
  Obtained from environmental sample
  misc_feature (1)..(259): Xaa is any amino acid
MTNEKQVKKAVSPRXQAKAVANADVLFERAIIHSTHDDTHGRENVRQIHRLGALMEDGGEYVPVKLTVIEYVQDDYGNRLYAIEAVDIEKIKSAGLMPQTPGNPEASGPIADFNKNLLRLYEFVNTQDAGSNILFQTGWHGSAARFDRFDGSHMGEGEGNQLYGYGHYFSNKKEVAEWFRKKLQKKADSKGQTYKVDIPEDHQMLDWDKKLNGQPEQIQKIIKQNAEQLFLDESLPGMNEMTGGQIYRELSEKMGKAGE

SEQ ID NO: 76529 - DNA, 513 bp, Unknown
  Obtained from environmental sample
  misc_feature (1)..(513): n is a, c, g, or t
ttgctgctatccgtcgggctgatacctgaaaacgaactgtccaaaaaaatcggcgtcgccatctcaccgctgaccggcggcgctatggtggacagccggcttgaaaccagcgtgccgggcgtgttntcctgcgggaatgtgctgcatgtccacgacctcgcggacaacgtgactatggaagcgtacactgcggctgtcaatgccgcgcggtttatacggggcgggtatgaacgcggtcagtccgccgctgtggaggcgggatgcggggtgcgttatgtaatgccgtcctcgctgatactgacggcgggacaggactcatttgaactgctgttccgcagcgacggcgtatataggcaggccgctgtcgctgtctacgcggacggcaagaggctggttcacatgaggaaacggatcgtcacgccgggcgagatggagcgcgtcaggataacgctcgggccgcccgttgcgtgtgtgcgcgtttgcgtggaaccttccggcgaggcgaagctatga

SEQ ID NO: 76530 - protein, 170 aa, Unknown
  Obtained from environmental sample
  misc_feature (1)..(170): Xaa is any amino acid
MLLSVGLIPENELSKKIGVAISPLTGGAMVDSRLETSVPGVXSCGNVLHVHDLADNVTMEAYTAAVNAARFIRGGYERGQSAAVEAGCGVRYVMPSSLILTAGQDSFELLFRSDGVYRQAAVAVYADGKRLVHMRKRIVTPGEMERVRITLGPPVACVRVCVEPSGEAKL

SEQ ID NO: 76531 - DNA, 597 bp, Unknown
  Obtained from environmental sample
  misc_feature (1)..(597): n is a, c, g, or t
ttgggcacaccaatttcttcgctgataggctggatggaatatctgagaactcagaatattgatgacagtcatttggtggaaattgaaaaggatataacccgtctgaaagtcatttccgaacggttctcaaaaataggttcagagcctaaaatgacgggacaaaacttagtgaagattgtttacgattcggtttcttatttgcaattccgattatctcaaaaaataaaatttcaagtgaacgaaccgccggataccatgatgctggccagcgtcaatgcgcaattggttgaatgggtatttgaaaatttgatgcgaaacgctgccgatgctatcggtgcaaatgaggggcgcattcaaattgatattaacgaacagtccaaaacgattgtgattgatatttcagataacggtaaaggcattccgcgcaatcaatggaaaaccgtttttgaaaccggatacaccaccaaaaccagaggttggggcttgggattgtcgttgagccgtaggattattaacgattatcacaaaggcaaaatttttgtcaaacattcggttgtcggcgaaggtacgacattccgaattattttcaacaaataa

SEQ ID NO: 76532 - protein, 198 aa, Unknown
  Obtained from environmental sample
  DOMAIN (91)...(198): Histidine kinase-, DNA gyrase B-, and HSP90-like ATPase
  misc_feature (1)..(198): Xaa is any amino acid
MGTPISSLIGWMEYLRTQNIDDSHLVEIEKDITRLKVISERFSKIGSEPKMTGQNLVKIVYDSVSYLQFRLSQKIKFQVNEPPDTMMLASVNAQLVEWVFENLMRNAADAIGANEGRIQIDINEQSKTIVIDISDNGKGIPRNQWKTVFETGYTTKTRGWGLGLSLSRRIINDYHKGKIFVKHSVVGEGTTFRIIFNK

SEQ ID NO: 76533 - DNA, 441 bp, Unknown
  Obtained from environmental sample
  misc_feature (1)..(441): n is a, c, g, or t
ttggtggaaaatgtgccggtggaagtctacggccaaaaaatggcgctgaaaacaattgcggcgatcaatattccggaaaacaaagttatcagcattacgccttatgaccggagcagcgcgccggcgattgaaaaagctatctctatgtcggagctgggtctgacccccaaaaatgagggttcggtgatttacctgcgtttgccggagttaactcaagaccggcgcaaagaactggaaaaagtggccaaaagcgccgccgaggagtgcaagatagccgtccgcaatatccgccgggattttctggaggacgccaaaaagtccggggcttcgcaggatgaaaccaaaggcttgcaggacaaggtgcaaaaaataaccgatgagtacaacgccaaaatagaggatttgctcaagcacaaagaaaccgaaatccgggaaatataa

SEQ ID NO: 76534 - protein, 146 aa, Unknown
  Obtained from environmental sample
  DOMAIN (1)...(144): Ribosome recycling factor
  misc_feature (1)..(146): Xaa is any amino acid
MVENVPVEVYGQKMALKTIAAINIPENKVISITPYDRSSAPAIEKAISMSELGLTPKNEGSVIYLRLPELTQDRRKELEKVAKSAAEECKIAVRNIRRDFLEDAKKSGASQDETKGLQDKVQKITDEYNAKIEDLLKHKETEIREI

SEQ ID NO: 76535 - DNA, 312 bp, Unknown
  Obtained from environmental sample
  misc_feature (1)..(312): n is a, c, g, or t
atgtttacagagaatgaaagacaggccctccaaaaagcggcggaacagggagatgcccaggcgcagacccttttgggactctactattttagtggagaccatgccggacatgactacgcaaaggccgctgagtggttccgcaaagcaggggaacaggggaatgtccaggcgcagttcagattgggacttctgtatttttctgggcagggtgtgtcacaagacaacatgaaggccgccgaatggttcggaaaagcggcacgacagggggaagtaaggcatctgttaaatcggcaacaggctgtacggcaatga

SEQ ID NO: 76536 - protein, 103 aa, Unknown
  Obtained from environmental sample
  DOMAIN (19)...(54): Sel1 repeat
  misc_feature (1)..(103): Xaa is any amino acid
MFTENERQALQKAAEQGDAQAQTLLGLYYFSGDHAGHDYAKAAEWFRKAGEQGNVQAQFRLGLLYFSGQGVSQDNMKAAEWFGKAARQGEVRHLLNRQQAVRQ

SEQ ID NO: 76537 - DNA, 402 bp, Unknown
  Obtained from environmental sample
  misc_feature (1)..(402): n is a, c, g, or t
atggaggtttttatgaatgcacaagagtatctcaaacgcggcattgagtattatgaaaaacaagaggatcagcaggcttatgctgacttcaccgaagcgtaccgccttgatccgaatcttgctgaggcaaaaagatatcttgcgggtttttattataactttggagttgtaaatcatcaaaaaggtgatatagacaaggctatcgagtacttcaaagaagctgcaaagttcgacaggactgatgttcaatattttggagcgcttgccgtagcatatagagaaaaagaggactacgataagtcaattgaagcctggaccggcttaatcgaacttgacaagacaggtcacggctatcattcccgcgctaatgattattatcgcaaatcaaaaaatgccgtttga

SEQ ID NO: 76538 - protein, 133 aa, Unknown
  Obtained from environmental sample
  DOMAIN (7)...(40): Tetratricopeptide repeat
  misc_feature (1)..(133): Xaa is any amino acid
MEVFMNAQEYLKRGIEYYEKQEDQQAYADFTEAYRLDPNLAEAKRYLAGFYYNFGVVNHQKGDIDKAIEYFKEAAKFDRTDVQYFGALAVAYREKEDYDKSIEAWTGLIELDKTGHGYHSRANDYYRKSKNAV

SEQ ID NO: 76539 - DNA, 579 bp, Unknown
  Obtained from environmental sample
  misc_feature (1)..(579): n is a, c, g, or t
atgcgggagtgtccggctgtacccgccgcattgccaaacacggtgaaatgcggtagcagagagcgcctgccccgcgccaaacacgacaaaatgctccgaccgggaagtaccatgcgcacccccctgtctccggccgaccgcttgtgcctgcacatatcccgtctatgggtggtaggccgtgcgcctgtcatgcccggaacctgttcttctgccgtggccctgctgctcgcgccctggctctttcttccgctgggccttgtcgggcgttgcgtgctgctggcggcgctgttcctgttcggcagcctgatcgtcaaccgggcggagcgcgtcctgggcgtcaaagaccccccggaactgtgcctggacgaagtgctcggcatgtggctgacactgacccccttccatgcaccttcgccggggatcatgctcgcggcctttgtgcttttccgcatcttcgacattgcaaaaccctggccggtgaacgcttctgaacactggttgccggggggcttcggcatcatgctggacgatgtggtggcaggttgtatggccatgctcggcgtctggctgctgagctaa

SEQ ID NO: 76540 - protein, 192 aa, Unknown
  Obtained from environmental sample
  DOMAIN (52)...(190): Phosphatidylglycerophosphatase A
  misc_feature (1)..(192): Xaa is any amino acid
MRECPAVPAALPNTVKCGSRERLPRAKHDKMLRPGSTMRTPLSPADRLCLHISRLWVVGRAPVMPGTCSSAVALLLAPWLFLPLGLVGRCVLLAALFLFGSLIVNRAERVLGVKDPPELCLDEVLGMWLTLTPFHAPSPGIMLAAFVLFRIFDIAKPWPVNASEHWLPGGFGIMLDDVVAGCMAMLGVWLLS

SEQ ID NO: 76541 - DNA, 777 bp, Unknown
  Obtained from environmental sample
  misc_feature (1)..(777): n is a, c, g, or t
ttgggatttttccagtggaagggctacggcccgatggactttgtgggcctgggcaattatacaaagatgtttgccgatcctgtttttcacatcggactcaggaacaacctgatgatagtcctcgtttcagtattcggccagataccgctgggaatgctcctggcctacatcctgcaccgcaagatggtcaaacaggtaaacctttttgaaacgctgatcttcctgcccatcactatttcagcggtaattatcgcccaactctggaatcagatattttcacctgtgggcatttttacaagcctagtgagaaccgtcaccggaaaccgggactatataatgacaatcgtagaaaagaaaaattgggctattgtgcctatcatggccgtactcctttggcagcacaccagcctttacatggtgatcttcctggccaacatgcagcggctcccgaattcagtaatcgaatcagcccaactggaaggcgcgggtgagtggactatcttttttcggattgtggcacccatgatgggctacgtgatcttcattaattccgtgctggcaatctcaggcagtttcaagagcttcgacctgatctattccatgacgagaggcggccctgcacattacacggaggttatcgccgtatacatgtataattctaccttcgtacaccagaactacggttacgggagcgcgcttgcgataattattgttgttttctgcataatatcgacgctcttcgccagaatggtatcaaaggccctgaaggtcgaatag

SEQ ID NO: 76542 - protein, 258 aa, Unknown
  Obtained from environmental sample
  DOMAIN (29)...(257): Binding-protein-dependent transport system inner membrane component
  misc_feature (1)..(258): Xaa is any amino acid
MGFFQWKGYGPMDFVGLGNYTKMFADPVFHIGLRNNLMIVLVSVFGQIPLGMLLAYILHRKMVKQVNLFETLIFLPITISAVIIAQLWNQIFSPVGIFTSLVRTVTGNRDYIMTIVEKKNWAIVPIMAVLLWQHTSLYMVIFLANMQRLPNSVIESAQLEGAGEWTIFFRIVAPMMGYVIFINSVLAISGSFKSFDLIYSMTRGGPAHYTEVIAVYMYNSTFVHQNYGYGSALAIIIVVFCIISTLFARMVSKALKVE

SEQ ID NO: 76543 - DNA, 636 bp, Unknown
  Obtained from environmental sample
  misc_feature (1)..(636): n is a, c, g, or t
ttgttagcggattgtgtcgctcaaacgtatgtagatgggatttttgataccctttatgtggataaggacaaagatcttttgatgtatgaattattagaaaaagatgctgataaaaaagaaatagagcaagagttacgaaatatattatacgaagttgactatgaatttgtacccccattatcttatagaaattctacaacgttctcttttggggctaatacaacagatcataataagcctgaaaattatcttagaaatatgctcaatcaagcaataattttaagtaaaaaaaaatctgataatcgaattattggttttatgtcatatattccaaatcattctattgaaactaaaaaccaaagaaacattgtttgttattatatttctacgataggtgtaacaaaaggatggagaggtcatggaataaccaagcaattttacagaatgattgaggaaattgttaaaagacagacgacaagtcactttgtagcgacaagaacttggtccacgaatagaacacacattaaaatattaacgaatctaggttacaaaaatatcttaactattgaaaacgatagaggaaacggcattcatactatttattttgcgaaggaaattattaaggaaaaacaatga

SEQ ID NO: 76544 - protein, 211 aa, Unknown
  Obtained from environmental sample
  DOMAIN (95)...(184): Acetyltransferase (GNAT) family
  misc_feature (1)..(211): Xaa is any amino acid
MLADCVAQTYVDGIFDTLYVDKDKDLLMYELLEKDADKKEIEQELRNILYEVDYEFVPPLSYRNSTTFSFGANTTDHNKPENYLRNMLNQAIILSKKKSDNRIIGFMSYIPNHSIETKNQRNIVCYYISTIGVTKGWRGHGITKQFYRMIEEIVKRQTTSHFVATRTWSTNRTHIKILTNLGYKNILTIENDRGNGIHTIYFAKEIIKEKQ

SEQ ID NO: 76545 - DNA, 702 bp, Unknown
  Obtained from environmental sample
  misc_feature (1)..(702): n is a, c, g, or t
atgtcgaacaagcttgattcgttggaaaaagttctccttatgggtccgggaccgtccatggtgcatggttccgtgtatgcggccatggccaaagacaccatcggccacatggattcttccttcattgcgctgatggatgagatcaaggagcagttgcgtaccctgtgccagaccaggaactcggtcaccctgcccatgtcgggcaccggttcggccggtatggagacctgtttcgtcaatctggtggagccgggcgatacggtactcgtgctgcagaacggcgtgttcggcgtacgcatggccgatgtggccggtcgccttggcgcgaatgtggatgtgctggaatttgaatggggaaccccggtcatcccggacgaggtggccaaggctctgaagaaaaagaaatactcccttgtgtccgtggtgcatgcggaaacctccaccggcgtgtgcaaccccgtggaaaccatcggcaggctggtcaaggagcatggcgcgctctatcttgtggactgcgtgaccagcctcggcggcatagaagtggctctcgaccgctggggcgttgacgcattttacagcgggacgcaaaaatgcctgtcctgccctcccggcctttctcccgtttccttttccgaggcggctgtcgcgaaattgcagaaccgcaagacaaaggtgcccaactggtacctcatctcacgatga

SEQ ID NO: 76546 - protein, 233 aa, Unknown
  Obtained from environmental sample
  SIGNAL (1)...(27)
  DOMAIN (11)...(233): Aminotransferase class-V
  misc_feature (1)..(233): Xaa is any amino acid
MSNKLDSLEKVLLMGPGPSMVHGSVYAAMAKDTIGHMDSSFIALMDEIKEQLRTLCQTRNSVTLPMSGTGSAGMETCFVNLVEPGDTVLVLQNGVFGVRMADVAGRLGANVDVLEFEWGTPVIPDEVAKALKKKKYSLVSVVHAETSTGVCNPVETIGRLVKEHGALYLVDCVTSLGGIEVALDRWGVDAFYSGTQKCLSCPPGLSPVSFSEAAVAKLQNRKTKVPNWYLISR

SEQ ID NO: 76547 - DNA, 681 bp, Unknown
  Obtained from environmental sample
  misc_feature (1)..(681): n is a, c, g, or t
ttgatcggcgagtcaccacaaatttttcaatcgtatgcaaaaaatgacttggaggcaacaactaacctaacatttcgtgcggcaaaattttcatatttgcttttgtttgcagcaataatcccaattttgttgaatatgaatttcatcttgcgtttgtggcttgtaaatgttcccgaatggacggttattttttccaaattgactcttatagggatcttggtaggtgcttcatgttggacttttttgcagccaattactgcatctggaaaaataaagactgaaattttatggggaaatggaatgggaatagcaaatattcttgttgcatatattttaatgcggcagggttattctccagaaactattttatattttccaatatttctttcttttttgcaaacagccgttcgcgttgccctttcttgccgcatactttccttttcatttcgcagtttttggaatcaggttgtatctaaaattttaatagtcacagcaataagtttgcctttgcccattgtcatctctaactatgttaataacttggaagcactgatatttacaacattatcatttgtctttttgttcgtgccaacagcttattttatcgggttagactccgcagaaaaaaaattggctatggcagtgattcagaaaattaaggggaaggtatcatcaaattaa

SEQ ID NO: 76548 - protein, 226 aa, Unknown
  Obtained from environmental sample
  misc_feature (1)..(226): Xaa is any amino acid
MIGESPQIFQSYAKNDLEATTNLTFRAAKFSYLLLFAAIIPILLNMNFILRLWLVNVPEWTVIFSKLTLIGILVGASCWTFLQPITASGKIKTEILWGNGMGIANILVAYILMRQGYSPETILYFPIFLSFLQTAVRVALSCRILSFSFRSFWNQVVSKILIVTAISLPLPIVISNYVNNLEALIFTTLSFVFLFVPTAYFIGLDSAEKKLAMAVIQKIKGKVSSN

SEQ ID NO: 76549 - DNA, 657 bp, Unknown
  Obtained from environmental sample
  misc_feature (1)..(657): n is a, c, g, or t
gtgatgccaaaactatttaaaggaattgaaaaatcaaaattaattttaacagaaggtgttgatgcccttcattttttaataaacttgttagataaattgaatattgatgattttcaagtttttgattatggtggaatatcagaattaacagaatacataaagaatcaatttttaaaggcaaatgcagaaaaattcaatgaagtaaccacattgcttataatgagagattcagaaatctcttctaaatctacaacgcaaagcattaattctagccttaaagcgacaaaattaataaataaggatttacaacctttctgtatagaaaatcagaatgggcgcaatatgggatttatgctattcccagggtatgatgagaataacaatttgtgtgaaaaaggaactttggaaaatctttgccttaaaattttaaaagaccaaaatttaagaaaacacattgaagagtatataaatgatttcaaaaataaaactaatattgaattcaagagagaacataaaaatttattacattcgtctttgtcttttacgaataaatttgtaggattgaaattagcggaagctcttaaagccgagggctatgatttgagttctcaatatctagtaccttttataaatataataaagggtatatatgtttag

SEQ ID NO: 76550 - protein, 218 aa, Unknown
  Obtained from environmental sample
  misc_feature (1)..(218): Xaa is any amino acid
MMPKLFKGIEKSKLILTEGVDALHFLINLLDKLNIDDFQVFDYGGISELTEYIKNQFLKANAEKFNEVTTLLIMRDSEISSKSTTQSINSSLKATKLINKDLQPFCIENQNGRNMGFMLFPGYDENNNLCEKGTLENLCLKILKDQNLRKHIEEYINDFKNKTNIEFKREHKNLLHSSLSFTNKFVGLKLAEALKAEGYDLSSQYLVPFINIIKGIYV

SEQ ID NO: 76551 - DNA, 789 bp, Unknown
  Obtained from environmental sample
  misc_feature (1)..(789): n is a, c, g, or t
atgcgctttatatggcgggcggttcagtgcgccgaaaacacaagccaactacgggaaaccgaaggaatgctgtttggcaatgctttcgggggtaaagtcactaaatcctcaaatatgcgtatgcgtattgaaaacatcaagattgccgcagggccggaggttatgacgcctcacaggaaactgcgtgattatgatggaaaaaacaaagctttcccatctcaggcaataaaaagcgggggtacctttgacgttgttatcgcgagctttggcgatgaggaagagcataagaattttgtgcgtttatttgcgctcacctgtttgctgtacggctttggcaggcgttcgcgcaaaggctttggcaccacggcaataacgggaattgagggaaccggagcgggaataggctatgattggaacagcgcactggacaacttaaacaagctttcaatgttcggcgccaagtatacgttaaacaacgccgaaatcactgtaagcgccaaaaagcccgccgagtatccatatattgaaaacatcagggtcatgggtaacaagccaaacacggcggatattatcgggcaaatcggaatggcaactcataaccatcccggcacggtttttctcgggcagctacgtcctcgcttcgcatcaagcattctgctttccactgtaccatgngagggcgcaaccggaagcaagtaccgttgtatcgttacccgtctgcgctgcacaaagcgctttgaccagaaagcgttggctaatttttatcaggatctangcgggagggtttga

SEQ ID NO: 76552 - protein, 262 aa, Unknown
  Obtained from environmental sample
  misc_feature (1)..(262): Xaa is any amino acid
MRFIWRAVQCAENTSQLRETEGMLFGNAFGGKVTKSSNMRMRIENIKIAAGPEVMTPHRKLRDYDGKNKAFPSQAIKSGGTFDVVIASFGDEEEHKNFVRLFALTCLLYGFGRRSRKGFGTTAITGIEGTGAGIGYDWNSALDNLNKLSMFGAKYTLNNAEITVSAKKPAEYPYIENIRVMGNKPNTADIIGQIGMATHNHPGTVFLGQLRPRFASSILLSTVPXEGATGSKYRCIVTRLRCTKRFDQKALANFYQDLXGRV

SEQ ID NO: 76553 - DNA, 864 bp, Unknown
  Obtained from environmental sample
  misc_feature (1)..(864): n is a, c, g, or t
atgagtcgcagactgcttacgcggtggagcctgtgtacaaggccactacgaccaggtggtgacggccgccatagccgctttcgcgccaaacaggcgcngcatgtcatacaggtgttcgaggtgggcacggccaccatgatggccgccaaaggcgccatccgcccggtgcacgaggtcatggccgcggcagggtcccccctggactcctccgcctttctcccggccattgccagctattacagcaccacagacggcaagctcctctccatgcccttcaactgctccaccaccgtgctctactacaacaaggacgccatgcgcaaagccggactgaacccggacgcattccccgccacctggccggaagtctacgaggcggccaaaaagatcaaagaatccggagcggccaagtacggctttgtttccggctggcaatcctgggtgcagatggagagcttctccacctggcacgacgtgcccttcgccagccgcgagaacggcatggccggcatggacgcccgcctcctgtgcaattcgccgctgcacgtcaagcacatcgcctttctgaaaaagatgatggatgaaggcatcatgacctataccggcagaaagtccgaacccatcaatacctttacaaacggcgaggccgccatcctcaccaattcttctggatcgtacgccgcggtgaagctgggcgccaagtttgactggggcgtggccatgattccctactggcccgatgtggccggcgcgccccaaaacaccgtcatcggcggggccacgctctgggtcatggccggaaatcccaaagaagaagccggaattgcggaatttttcaagttctctcgtgccgatctgtcatga

SEQ ID NO: 76554 - protein, 287 aa, Unknown
  Obtained from environmental sample
  DOMAIN (37)...(286): Bacterial extracellular solute-binding protein
  misc_feature (1)..(287): Xaa is any amino acid
MSRRLLTRWSLCTRPLRPGGDGRHSRFRAKQAXHVIQVFEVGTATMMAAKGAIRPVHEVMAAAGSPLDSSAFLPAIASYYSTTDGKLLSMPFNCSTTVLYYNKDAMRKAGLNPDAFPATWPEVYEAAKKIKESGAAKYGFVSGWQSWVQMESFSTWHDVPFASRENGMAGMDARLLCNSPLHVKHIAFLKKMMDEGIMTYTGRKSEPINTFTNGEAAILTNSSGSYAAVKLGAKFDWGVAMIPYWPDVAGAPQNTVIGGATLWVMAGNPKEEAGIAEFFKFSRADLS

SEQ ID NO: 76555 - DNA, 732 bp, Unknown
  Obtained from environmental sample
  misc_feature (1)..(732): n is a, c, g, or t
ttgcttgaacaaaggagtggctttttttttcagatgaacaaactttttctcatacctgcaaccattggagattcgaatgtttcggatgttttgccggctggttttgctcaacacatcaatacgctgaaaatctttatcgttgaggaattgcgaacggcacgacgttttttgcgaagcgccggttatacccaaaattttgatgaagtaaaatttttggtgttgaatgaacataccgatattcgcgagatagagcattatctggatgcgattcccgaaggctcgattggcttgctttccgaagcaggcgtgccttgtgtggctgacccgggctcggcgattgttgcgatggcgcataaaaaaaatgtccccgttgtgcctttggtgggaccttcttccatacttttagccttgatggcttccggattgaacggacaaaatttttgtttcaacggatacctacccgttgataaaaaagaacgcgaacgaaaattgaaagacttggaacaacaagctattcgagaaaatcaaacgcatatctttatcgaaacaccctatcgaaataatcatctttttgaatccattctcaccgtttgccatccaacgacacgccttgncattgccgcanatatcacgcanacaaacgccattcatcaaacaaaaactgttgctgaatggcgaaaacaaccgatagacttacataagcaaaacgcagtgtttctgattagtttgtaa

SEQ ID NO: 76556 - protein, 243 aa, Unknown
  Obtained from environmental sample
  DOMAIN (14)...(226): Tetrapyrrole (Corrin/Porphyrin) Methylases
  misc_feature (1)..(243): Xaa is any amino acid
MLEQRSGFFFQMNKLFLIPATIGDSNVSDVLPAGFAQHINTLKIFIVEELRTARRFLRSAGYTQNFDEVKFLVLNEHTDIREIEHYLDAIPEGSIGLLSEAGVPCVADPGSAIVAMAHKKNVPVVPLVGPSSILLALMASGLNGQNFCFNGYLPVDKKERERKLKDLEQQAIRENQTHIFIETPYRNNHLFESILTVCHPTTRLXIAAXITXTNAIHQTKTVAEWRKQPIDLHKQNAVFLISL

SEQ ID NO: 76557 - DNA, 555 bp, Unknown
  Obtained from environmental sample
  misc_feature (1)..(555): n is a, c, g, or t
atgaaaaagtacgttccgacatataaaaccaaatatcagaaggaaataattcccgctctgacgaaggaatttggctataccagcgtaatgcaagtgccaaacatcgaaaaaatagtgattaaccagggggttggtcgtcattcagtacaggacaagaaaattatagacacgtctatagccgaactgagcgccatcgccggacagaaagccgtagcaacaacctcgcgaaaggacatctcgaacttcaaattgcgacgcggagttgcagtaggcgttcgagtaacgttacgctcccaccgtatgtatgaatttctcgaacggctaaatgccgtttcacttcctcgtatccgcgacttcaaaggagtttcccgcaaacttgatggaagaagaaactaccgcctccgtatttctgaacaaataatatttccccaaatagacattgaccaagtaaccaaaatgcttggcgtggaaataactttcgtaacgaccgctaaaacagacgaagaagcatacgctttactcagagagtacgggattcctttccaaaaacgataa

SEQ ID NO: 76558 - protein, 184 aa, Unknown
  Obtained from environmental sample
  DOMAIN (28)...(85): Ribosomal protein L5
  misc_feature (1)..(184): Xaa is any amino acid
MKKYVPTYKTKYQKEIIPALTKEFGYTSVMQVPNIEKIVINQGVGRHSVQDKKIIDTSIAELSAIAGQKAVATTSRKDISNFKLRRGVAVGVRVTLRSHRMYEFLERLNAVSLPRIRDFKGVSRKLDGRRNYRLRISEQIIFPQIDIDQVTKMLGVEITFVTTAKTDEEAYALLREYGIPFQKR

SEQ ID NO: 76559 - DNA, 378 bp, Unknown
  Obtained from environmental sample
  misc_feature (1)..(378): n is a, c, g, or t
gtggcctccggctccttcgtgcatcgctatggcatgtacatcaaagagggtgcgcctgtcttgccttatgtggaaacccgcttcaaggacgacgaacggggcaaccccttcgtgacgccgcaggccctgcaagtgctcggcattatgccccagcaggcctatgacgcctgcatgcagctttgctccgccgtgttcgccctggtgtcctccgatatgctctctcgcggccttgcgctctgggatatgcaaatagaactgggtctggacgccgaaggccgcatcatggtcattgacgacatcagccctgactgtatgcgcgtttaccacggcaaacataaagtatccggccctgaactcgggaaattcttcggcttctga

SEQ ID NO: 76560 - protein, 125 aa, Unknown
  Obtained from environmental sample
  misc_feature (1)..(125): Xaa is any amino acid
MASGSFVHRYGMYIKEGAPVLPYVETRFKDDERGNPFVTPQALQVLGIMPQQAYDACMQLCSAVFALVSSDMLSRGLALWDMQIELGLDAEGRIMVIDDISPDCMRVYHGKHKVSGPELGKFFGF

SEQ ID NO: 76561 - DNA, 471 bp, Unknown
  Obtained from environmental sample
  misc_feature (1)..(471): n is a, c, g, or t
ttgccggatgccgcgccgaacatcgtgcagttgttccaggtggatttggaaggcgacggcgtggatgaggtggtgatcgtcgcccggaaccttgtcgggcaggagacgcaggcggtaagccgggaagcggacacgccgccttcctcggggacgggtcttcccggcgcgccgaaaaaaggggactattccctgattctcctgcgtaaggtcataggcggcgaggcgcgcgacatagcgcttgcccgcttcatcgtcctgcaagacgccaggcccggcgacacggattggaagccgcccgtggtgcatgaagtttatcagttcgcggacttgaacggcaacggcgtcatggagatcatcgccggcgcggagtatcgcgacggctccaggtattcggtttacgaaatccgtggcggcgaggcggtgccggtgctcagaaacggctggggataccagagcggtttcacccgctga

SEQ ID NO: 76562 - protein, 156 aa, Unknown
  Obtained from environmental sample
  misc_feature (1)..(156): Xaa is any amino acid
MPDAAPNIVQLFQVDLEGDGVDEVVIVARNLVGQETQAVSREADTPPSSGTGLPGAPKKGDYSLILLRKVIGGEARDIALARFIVLQDARPGDTDWKPPVVHEVYQFADLNGNGVMEIIAGAEYRDGSRYSVYEIRGGEAVPVLRNGWGYQSGFTR

SEQ ID NO: 76563 - DNA, 870 bp, Unknown
  Obtained from environmental sample
  misc_feature (1)..(870): n is a, c, g, or t
atggtccgcgtgctggtcgttgacgacagcattgaaacctgcgacctgctggagctgctgctcgggcaggtgggcggccctggcaagatggaagtggccaaggcaaccacgcccgaaaaggccatcaaactgctggagagtggctcattcgacctgatgttatccgacgtcaaccttgaggcggacagggacggtctggacttgctccgcatagcgaagccgctcggcgttgagaccattctcctcacaggcttcgggactgtggagagggcgctggaggccgtccgcgagggcgcattcgacttcgtatccaagccttggaacaacgaagagctcaagacactcgtaaggcgcgccctgcagctccgcagtgcagatggacgcgcaaaggtcggcggggccaaactccacgctgcggacagcgcgatcataggctccagcccacagatgatggaggtgtacaagaaaatcgcctccctgcagaagagcaggagcacagtcctgatagtaggcgagagcggcaccggcaaagagctggtggccagaacgatcttccagagcagcgacaggaaggacggtccattcgttgcggtaaactgcggctcgctgactgaatccctgctggaatccgagctgttcggtcatgccaagggggccttcaccggcgcggcgggcgacaaaaagggcctcttcgaggaggcgcacggcgggacgatatttctggacgagataggcgaaatcagccccagcttccaagtccgtctgctccgggttctgcaggacggcgaagtccgcagagttggcggcagcaaagccacacgcgtggacatccgcgtattggccgcaacgaacaaggaccgttccagctag

SEQ ID NO: 76564 - protein, 289 aa, Unknown
  Obtained from environmental sample
  DOMAIN (166)...(288): ATPase family associated with various cellular activities (AAA)
  misc_feature (1)..(289): Xaa is any amino acid
MVRVLVVDDSIETCDLLELLLGQVGGPGKMEVAKATTPEKAIKLLESGSFDLMLSDVNLEADRDGLDLLRIAKPLGVETILLTGFGTVERALEAVREGAFDFVSKPWNNEELKTLVRRALQLRSADGRAKVGGAKLHAADSAIIGSSPQMMEVYKKIASLQKSRSTVLIVGESGTGKELVARTIFQSSDRKDGPFVAVNCGSLTESLLESELFGHAKGAFTGAAGDKKGLFEEAHGGTIFLDEIGEISPSFQVRLLRVLQDGEVRRVGGSKATRVDIRVLAATNKDRSS

SEQ ID NO: 76565 - DNA, 648 bp, Unknown
  Obtained from environmental sample
  misc_feature (1)..(648): n is a, c, g, or t
gtgaaaaagaaatatgctcaaaactataataattcggacactattattgacaaatgtgaattcaccgaacatataataaaaaactatgattatattcctgtacctttgtgcccgaattgtaatggcagatttcctaacaggagaatgaggaaaaaaccgcaatatctttgcacaaaatgtcatcaggaatttgatgaacctatatataaaacagccgaggaacttattgaaatgttttatttaggcgaagatgtcgaagatgttcatgataaatgttttatatcaaagaatgaatggaaaaaccagttaaatctaataaaggtgaagtattggctacaaagacaaaaaatcgaaactttattttctgatacaattgagaaagaagcgtttttcctctatttagatgacaatataaaatatctctcatttgcagatacaataacgacttgtagaaaatgtgcgtttaattttgacatgaacaatttggaattatgtcctaaatgtaaaacaaattacaaaggtgttcagtatccaacatgtatccaatgcttaccagaagacaagagaaagaaagcattagaaaaaattgaatctggaaaagcttggcatacaatgcatcaagcgttgggtatcgacttaataatttaa

SEQ ID NO: 76566 - protein, 215 aa, Unknown
  Obtained from environmental sample
  misc_feature (1)..(215): Xaa is any amino acid
MKKKYAQNYNNSDTIIDKCEFTEHIIKNYDYIPVPLCPNCNGRFPNRRMRKKPQYLCTKCHQEFDEPIYKTAEELIEMFYLGEDVEDVHDKCFISKNEWKNQLNLIKVKYWLQRQKIETLFSDTIEKEAFFLYLDDNIKYLSFADTITTCRKCAFNFDMNNLELCPKCKTNYKGVQYPTCIQCLPEDKRKKALEKIESGKAWHTMHQALGIDLII

SEQ ID NO: 76567 - DNA, 516 bp, Unknown
  Obtained from environmental sample
  misc_feature (1)..(516): n is a, c, g, or t
atgaacgaccctctcctggcggtcatttacaagaactacggggccaacccccagaccgtgccctacggggagatatattccgccctgcagctcaagcagttggaaggcaatatccagcctctcttcgcccaccaggagatgagcttctttgaacagcagcggtatttcaccaatcccttcgaaatgcccttcatctccaccgtggcggccaatttgaaatggttcgaggggctgaccccggcccagcgtgaggccatccgcgccgccgcccgtgaggccacccttcacaccattgacgcctccgacagaatcaacgccgagcgccggaaaatgatgctggacaagaggccggaactggtcttttacgaactgacgccggctgaacagaagcccttccgcgacaaggcccccttggtggaggccgagttcgtgaagatggccggcccggaagccctgcgcctgcttaaggccctggccgccgaagtcaaggctttggaagccgccgagaagaagtga

SEQ ID NO: 76568 - protein, 171 aa, Unknown
  Obtained from environmental sample
  misc_feature (1)..(171): Xaa is any amino acid
MNDPLLAVIYKNYGANPQTVPYGEIYSALQLKQLEGNIQPLFAHQEMSFFEQQRYFTNPFEMPFISTVAANLKWFEGLTPAQREAIRAAAREATLHTIDASDRINAERRKMMLDKRPELVFYELTPAEQKPFRDKAPLVEAEFVKMAGPEALRLLKALAAEVKALEAAEKK

SEQ ID NO: 76569 - DNA, 930 bp, Unknown
  Obtained from environmental sample
  misc_feature (1)..(930): n is a, c, g, or t
ttgttggaggagtacgtggctgaaaaagagaaccttacaaaagaacttgcctcggttaaggtgcgccagtatgtgcaggacatcaagcaaactatggcaaagcagcgacctttctacgttgacgacttgggagctttttacgctgacgagcgaggctcggtgcagttcatatttgcggaaacggaaaaagacgcgcttcgcaagtttaacgaggtaacggcgaaatcagctccgactcctgtcagcgtttcctcgtctgacgtggagattgaggcaccgtctgcccccgaagaggtgattacgaaagaaaaggcaaagccgaaaagaaaaacggctgccgctgaagaagaaaaagacgaggaagttattacggtcaagggcaggaaaaaagcagcggtgaagacaacgaggaagaaggaggcaaaggattcaactgcggtatcgaaaacgataattaatgttaacgtaaataccgataaggacgataaggaggaggaggcgaataccgatgaaaagtcaaagcagcttgatgatgccaacagctcgatgcagcggtggatggatgcggtagaaaagcgtaaggggcagcaagcgcaggaagatgactcggatagccctaaagctccgctcacgcacgaggagttggaggcgcaacgccgccgcagagaagaagttgagcgtgcattggcaaggcggcgcaatgaaggcgaaaccatgcgcaaccatgcggtgcaacccgctatatgggaagagcctataatagagcgcagacgaagctcgtatggcgtacttttacttaccatactgtttgcattgatagcggtggctgctgctgcgctttggttttgggaagagcctatgatgtcngaaatccctaacgctttgatggcggacagggagattataacgaccagtttcccacaaagatga

SEQ ID NO: 76570 - protein, 309 aa, Unknown
  Obtained from environmental sample
  misc_feature (1)..(309): Xaa is any amino acid
MLEEYVAEKENLTKELASVKVRQYVQDIKQTMAKQRPFYVDDLGAFYADERGSVQFIFAETEKDALRKFNEVTAKSAPTPVSVSSSDVEIEAPSAPEEVITKEKAKPKRKTAAAEEEKDEEVITVKGRKKAAVKTTRKKEAKDSTAVSKTIINVNVNTDKDDKEEEANTDEKSKQLDDANSSMQRWMDAVEKRKGQQAQEDDSDSPKAPLTHEELEAQRRRREEVERALARRRNEGETMRNHAVQPAIWEEPIIERRRSSYGVLLLTILFALIAVAAAALWFWEEPMMSEIPNALMADREIITTSFPQR

SEQ ID NO: 76571 - DNA, 774 bp, Unknown
  Obtained from environmental sample
  misc_feature (1)..(774): n is a, c, g, or t
ttgtttttccatggtcagatcggccgaggaggagcgctcctcaagagttcaggtccgaggggtcccggcactggcggcgataaacaaatccgacatacaacagccctccgcccgcttcgtctctggcatagaggccaagggttgcgccgtcacagtctgctctgctgtcactggtgctggactggccgaattgagggaggcgatgctgcgcctgctccccgacgaccgccttggctgccgccgcctgctgtcggacctagtgccccccggtcaagtcgcgctgctggtggccccaatagacaaatccgccccaaagggcaggctcatactcccccaggtgatggccctgcgcgacctcctggacggcggcgccctgggtctggtctgccaggcaggcgacctcgctgcagcgctggccagcctgaaagtgccgcccgccatagtcgtcacagacagccaggcctttcgggaagtcgagcagggcgtgccgccaagcgtccctatgacctccttcagcatcctcatggcccgcttccagggcgacctggccgccttggccgaaggcgcccgcgcaatatctggtctcaaagccggcgacagagtcctcatacaggagacctgcacccaccacgccaccgaggacgacataggcaaagtcaagctccccgcttggctcaccaaggcagccggtgcccccctgcgcttcgaccactcctctggaaaagactttcccgacgatatgtccccgtacgcccttgtggtccactgcggtaa

SEQ ID NO: 76572 - protein, 257 aa, Unknown
  Obtained from environmental sample
  misc_feature (1)..(257): Xaa is any amino acid
MFFHGQIGRGGALLKSSGPRGPGTGGDKQIRHTTALRPLRLWHRGQGLRRHSLLCCHWCWTGRIEGGDAAPAPRRPPWLPPPAVGPSAPRSSRAAGGPNRQIRPKGQAHTPPGDGPARPPGRRRPGSGLPGRRPRCSAGQPESAARHSRHRQPGLSGSRAGRAAKRPYDLLQHPHGPLPGRPGRLGRRRPRNIWSQSRRQSPHTGDLHPPRHRGRHRQSQAPRLAHQGSRCPPALRPLLWKRLSRRYVPVRPCGPLR

SEQ ID NO: 76573 - DNA, 909 bp, Unknown
  Obtained from environmental sample
  misc_feature (1)..(909): n is a, c, g, or t
atggtcagatcggccgaggaggagcgctcctcaagagttcaggtccgaggggtcccggcactggcggcgataaacaaatccgacatacaacagccctccgcccgcttcgtctctggcatagaggccaagggttgcgccgtcacagtctgctctgctgtcactggtgctggactggccgaattgagggaggcgatgctgcgcctgctccccgacgaccgccttggctgccgccgcctgctgtcggacctagtgccccccggtcaagtcgcgctgctggtggccccaatagacaaatccgccccaaagggcaggctcatactcccccaggtgatggccctgcgcgacctcctggacggcggcgccctgggtctggtctgccaggcaggcgacctcgctgcagcgctggccagcctgaaagtgccgcccgccatagtcgtcacagacagccaggcctttcgggaagtcgagcagggcgtgccgccaagcgtccctatgacctccttcagcatcctcatggcccgcttccagggcgacctggccgccttggccgaaggcgcccgcgcaatatctggtctcaaagccggcgacagagtcctcatacaggagacctgcacccaccacgccaccgaggacgacataggcaaagtcaagctccccgcttggctcaccaaggcagccggtgcccccctgcgcttcgaccactcctctggaaaagactttcccgacgatatgtccccgtacgcccttgtggtccactgcggtaattgcatgggcgccagacgcgagatgctctcccgcatcaacaagtgcttcgccggcggtgtccccatcaccaactacggcatggccatagcccagtgccttgggatactggatcgcggcatgccgcccttccaggggcagggctga

SEQ ID NO: 76574 - protein, 302 aa, Unknown
  Obtained from environmental sample
  misc_feature (1)..(302): Xaa is any amino acid
MVRSAEEERSSRVQVRGVPALAAINKSDIQQPSARFVSGIEAKGCAVTVCSAVTGAGLAELREAMLRLLPDDRLGCRRLLSDLVPPGQVALLVAPIDKSAPKGRLILPQVMALRDLLDGGALGLVCQAGDLAAALASLKVPPAIVVTDSQAFREVEQGVPPSVPMTSFSILMARFQGDLAALAEGARAISGLKAGDRVLIQETCTHHATEDDIGKVKLPAWLTKAAGAPLRFDHSSGKDFPDDMSPYALVVHCGNCMGARREMLSRINKCFAGGVPITNYGMAIAQCLGILDRGMPPFQGQG

SEQ ID NO: 76575 - DNA, 306 bp, Unknown
  Obtained from environmental sample
  misc_feature (1)..(306): n is a, c, g, or t
atgccgttaataaaagaaacaattgaaggaggttacatccatattgtaaagactatttctgggagtggtagtcaggcacacgaattattaccacatgtacacatggttgattctttgataaaaaggtggttaacaggtacacatcaaggtaaggtatctccaaaatatttaccatactatctggatgaatttgctnttaggtttaataggaaactatcaactttcagaggaaaattgttctatagactaatacaacagtctgtcgaaacagaaccgatgccatataacgacattatcggaaaataa

SEQ ID NO: 76576 - protein, 101 aa, Unknown
  Obtained from environmental sample
  misc_feature (1)..(101): Xaa is any amino acid
MPLIKETIEGGYIHIVKTISGSGSQAHELLPHVHMVDSLIKRWLTGTHQGKVSPKYLPYYLDEFAXRFNRKLSTFRGKLFYRLIQQSVETEPMPYNDIIGK

SEQ ID NO: 76577 - DNA, 609 bp, Unknown
  Obtained from environmental sample
  misc_feature (1)..(609): n is a, c, g, or t
gtgccggccaccttgggctaccggggctcggctcccagatgccagggtaccccggcctccagttgcatttccataaacgaggtcgtggtccacggcattcccgggccgcgggtggtgcttgagggtgacttggtcaaaatagacgtcaccaccatcctcaacggctatttcggcgatacggcccgcactttctgcgtgggcgaggttccggcccgggcccgggccctggccgaggctacggaaaaggccatgtacctgggcataaacgaggtcaaacccggggcccggctgggcgacataggcgcggccattcagaattgcgttgagcccttggggttttccgtggtcgattactttgtgggacacggggtgggccgccagttccacgaagagcccagcgtgccccatttcggcaaacgcggcaccgggctgcggcttagggccggcttggtcttcaccattgaacccatgatcaatgaaggcgtccgcaccgtaaaaatcttggacgacggctggacggccgtgaccacggacggccggctttcagcccaatttgagcataccgtggccgtgacccccgagggctgggaaatcttgacgctcagttga

SEQ ID NO: 76578 - protein, 202 aa, Unknown
  Obtained from environmental sample
  DOMAIN (3)...(201): metallopeptidase family M24
  misc_feature (1)..(202): Xaa is any amino acid
MPATLGYRGSAPRCQGTPASSCISINEVVVHGIPGPRVVLEGDLVKIDVTTILNGYFGDTARTFCVGEVPARARALAEATEKAMYLGINEVKPGARLGDIGAAIQNCVEPLGFSVVDYFVGHGVGRQFHEEPSVPHFGKRGTGLRLRAGLVFTIEPMINEGVRTVKILDDGWTAVTTDGRLSAQFEHTVAVTPEGWEILTLS

SEQ ID NO: 76579 - DNA, 642 bp, Unknown
  Obtained from environmental sample
  misc_feature (1)..(642): n is a, c, g, or t
ttggattatcgcggngagtcaagcgggcaccagaccagtgtgcgccgcgcgctggacgcgctgggcatccccggcgtcatcacggcggatccggcggtattgcgcgaagccaagggccttattttccccggtgtgggcgctgcgggccaggccatgcgtaacctgcgggaatccggcctggaccttgcgctgcgcgaggccgtggccgcccgcaagcccctgctcggcatctgcctgggctgccagattcttctggattccagcgatgaagacaatattacccgtacgctcggtctggttcccggcgcttgccgccgttttgatcccgcgttgcgcgatcagagcggcctgcccatccgcattccgcacatgggctggaacggcctgctccccaagcgtcccagcccgcttctgcgggatgtgcctccggacgcccaattttacttcgtccacagctattatgtggaatgcccggctgacttgaccatcgccacctcggtctatggccgggaattctgcgccgtttacggacgcgacgggctgtgggcctgccagtttcatccggaaaaaagcggccggcccggcctgcggatgctgaaaaacttttatgcctattgcgcggagaacactcatgctgagtaa

SEQ ID NO: 76580 - protein, 213 aa, Unknown
  Obtained from environmental sample
  DOMAIN (1)...(189): Peptidase C26
  misc_feature (1)..(213): Xaa is any amino acid
MDYRGESSGHQTSVRRALDALGIPGVITADPAVLREAKGLIFPGVGAAGQAMRNLRESGLDLALREAVAARKPLLGICLGCQILLDSSDEDNITRTLGLVPGACRRFDPALRDQSGLPIRIPHMGWNGLLPKRPSPLLRDVPPDAQFYFVHSYYVECPADLTIATSVYGREFCAVYGRDGLWACQFHPEKSGRPGLRMLKNFYAYCAENTHAE

SEQ ID NO: 76581 - DNA, 756 bp, Unknown
  Obtained from environmental sample
  misc_feature (1)..(756): n is a, c, g, or t
ttgttgcagggcggccaccatccggatttgccgctgagtcggcacacggaactcntgagctggatgcgggcgtgttggcccgcgctgcacatccatgccttttccccgccggaaatcgtgttttgggcgaagcgtgaaggctgttccacgcgggaggtcattctccgcctcaaggaggcgggcctgcattccatccccggcggcggcgcggaggttctggcggacgaggcgcgccggaaggtatcgcccaataaatgcagtacggcggaatggctgggcgttatggaagaagcccacggcctcggcctcaaaaccaccgcgaccatgatgttcggccatgaggaagaaaaccggcaccgcctggatcacctcttcgccctgcgggagttgcaggacaggacgcagggctttaccgccttcatcccctggaccttccagccggcgcataccgctatcgcgcgtccgccggagacggcacccgcctatctgcgcctgcttgccgtttcgcggctggtgctggacaacatccccaacatccagtcctcctgggtgactatggggccgcaaaccgcacagctcgcgctttttttcggggccaacgacttcggctccctgatgatcgaggaaaacgtggtcgccgccgccggggtgcgcttttgcctgcaacgcgaggaaatgcacaggattatccgggcggcgggctttgaacccgcgcagcggaacatgaggtacgaacctgtgggggcatcagcctga

SEQ ID NO: 76582 - protein, 251 aa, Unknown
  Obtained from environmental sample
  misc_feature (1)..(251): Xaa is any amino acid
MLQGGHHPDLPLSRHTELXSWMRACWPALHIHAFSPPEIVFWAKREGCSTREVILRLKEAGLHSIPGGGAEVLADEARRKVSPNKCSTAEWLGVMEEAHGLGLKTTATMMFGHEEENRHRLDHLFALRELQDRTQGFTAFIPWTFQPAHTAIARPPETAPAYLRLLAVSRLVLDNIPNIQSSWVTMGPQTAQLALFFGANDFGSLMIEENVVAAAGVRFCLQREEMHRIIRAAGFEPAQRNMRYEPVGASA

SEQ ID NO: 76583 - DNA, 408 bp, Unknown
  Obtained from environmental sample
  misc_feature (1)..(408): n is a, c, g, or t
gtgggggaaacaatgaaacacgacccaaaggcaggtctttacatgataggcgtggtcgccgctaggtatgagatacacccgcagacactgcgcctgtatgaaagggagggcctgctgcgcccaagccgcacggttggcaagacacgcctctacagcgacgaggacatggagcgcctagagttcatactaagtctcacgcgtgacctggggataaacctggccggggtcgacgtgatactgaacctgcgtgaccagatgcagagcgcgcaggccgacatgctggccatgctggaccgatacgaatcgctgctgaggacgcacaacatagagccgccggaatcacccgtaaagccgccccccgccggcgggctggtcaaactgcccaaccgggggatcaggaaaccatag

SEQ ID NO: 76584 - protein, 135 aa, Unknown
  Obtained from environmental sample
  DOMAIN (15)...(51): MerR family regulatory protein
  misc_feature (1)..(135): Xaa is any amino acid
MGETMKHDPKAGLYMIGVVAARYEIHPQTLRLYEREGLLRPSRTVGKTRLYSDEDMERLEFILSLTRDLGINLAGVDVILNLRDQMQSAQADMLAMLDRYESLLRTHNIEPPESPVKPPPAGGLVKLPNRGIRKP

SEQ ID NO: 76585 - DNA, 342 bp, Unknown
  Obtained from environmental sample
  misc_feature (1)..(342): n is a, c, g, or t
atgaaaaaacttctcacagccgttttgcttttctccgtggccgccgccgctttcgcccaaggtgcgccagacgccgctgaagccgccgagcacgctgccaacgctgttggagcagtggccgataacgctggcttctttggcaaatacttggcacacctgtccctggccattgccgccgcaggatgcggactggggcaagggaagggcgttgtagccgcttgcgaaggcattgcgcgaaatccgcaggccgcangggccatcaggacgacgatgatcatcggcttggcgctcatcgaggcactggtcatctatgttctagtggcagcattcgccatcaagtaa

SEQ ID NO: 76586 - protein, 113 aa, Unknown
  Obtained from environmental sample
  SIGNAL (1)...(19)
  DOMAIN (47)...(113): ATP synthase subunit C
  misc_feature (1)..(113): Xaa is any amino acid
MKKLLTAVLLFSVAAAAFAQGAPDAAEAAEHAANAVGAVADNAGFFGKYLAHLSLAIAAAGCGLGQGKGVVAACEGIARNPQAAXAIRTTMIIGLALIEALVIYVLVAAFAIK

SEQ ID NO: 76587 - DNA, 339 bp, Unknown
  Obtained from environmental sample
  misc_feature (1)..(339): n is a, c, g, or t
atgttgaacatccaaaccaagcaggaaggcaccacttcggtgctatcggtcaaaggcaagctgaattttgaagtcaccacgcagcttagggaaacaatcaaggagatcatagcctccgagcagccaaagctcttggtcgtaaacctagaaggaacgtcgttcattgactcatcgggccttggccttttggtggcggcgaggagcagcattgacaagataaatggccgcctgcatctttgctgcctgcccggccaagtaaaaaaaatattcgatcagacgaacctgaccaactttttcagcattttcccgaccgagcaagacgcactgcacggcaattga

SEQ ID NO: 76588 - protein, 112 aa, Unknown
  Obtained from environmental sample
  DOMAIN (3)...(108): STAS domain
  misc_feature (1)..(112): Xaa is any amino acid
MLNIQTKQEGTTSVLSVKGKLNFEVTTQLRETIKEIIASEQPKLLVVNLEGTSFIDSSGLGLLVAARSSIDKINGRLHLCCLPGQVKKIFDQTNLTNFFSIFPTEQDALHGN

SEQ ID NO: 76589 - DNA, 552 bp, Unknown
  Obtained from environmental sample
  misc_feature (1)..(552): n is a, c, g, or t
atggagaccatgatggcgagactctgggaaaacccaaaaaggcaaaccgagggcatcgtcgcggactataccgccgccgaggacgcgcttctcgataatcatctcgtgcttgaggatctcatcaccaacgccgcccacgcgcgtatgctcgccgagcgcgggtatctgaacgccggggaatgccgcgccatactggacgcgctcgcgcggatccatgccgcctggcaaaacggcgattttacggtttccgccgccgatgaggacgtccatacaaaaattgagaatgaggtcacccagtccatcggcgaaccgggcaaaaagatgcacaccggtgcgcagccgcaacgatcaggtgctgaccgatctgcggctctatctgcggcggcgccttgcctcgctggcgctcctttccgctcgtctcgcgtcggattttcacgattttgcgcagcgcgccgctcagtttgccatgcccggctatacccacatgcagcgcgccatgccgtcgtctgcggcgctttgggcgggcgcctttgccgaggccctcgcggatga

SEQ ID NO: 76590 - protein, 183 aa, Unknown
  Obtained from environmental sample
  misc_feature (1)..(183): Xaa is any amino acid
METMMARLWENPKRQTEGIVADYTAAEDALLDNHLVLEDLITNAAHARMLAERGYLNAGECRAILDALARIHAAWQNGDFTVSAADEDVHTKIENEVTQSIGEPGKKMHTGAQPQRSGADRSAALSAAAPCLAGAPFRSSRVGFSRFCAARRSVCHARLYPHAARHAVVCGALGGRLCRGPRG

SEQ ID NO: 76591 - DNA, 918 bp, Unknown
  Obtained from environmental sample
  misc_feature (1)..(918): n is a, c, g, or t
ttgntnnnccaagtacagattcggcacgagctctcatatgaccactatgcaagtggtaaaggatatggggcttgggattacctagggaatacatttgaatcaaatggcagttggataaatggcactaccgtgaacgcttacgaaaccgcttggggcagccctacaatcaccaaagccatgatagacggctacaaaaatgcgggttttaaaacagttcgcattccagtggcatggtcaaatttaatgaccgacagtgcgcgcggaggttcctacaccataagcaccgcattgctaaaccgcattgacgaggtggttaattgggtactcgcagacaatatgtatgccattgtaaatattcactgggatggaggatggtggagcagattcccaaacgattctgccgagtgcatgaaccgatatacaaaaatgtggactcaaataagcaataagtttaaagacaaaagcggttatcttgtttttgaatcccttaatgaagaaggagtttgggatgatgtgtggaatcagtatagtggttctggaaataaaacgagggcttatggactgttgaatgccataaatcaaaaattcacagacttagttcgcgcttctggtagtaacaacgccactcgccatctcttgattgccggatacgcaactaacattgacctcacgcgagatgcggcgttcaaaatgccaacggatgcgcaaaaccgcagagccgtatccgtgcattactacgacccattcggtttcactcatttggagaaagacgagtcttgggctgcagcgcgctggacatggggaactactgcggattacaacgatntgaacagtgctctggacaagatgaaaacgacttttgtgaacaataacattccggttattattgccgaatatggcgtggcaaaaaaagtttag

SEQ ID NO: 76592 - protein, 305 aa, Unknown
  Obtained from environmental sample
  DOMAIN (29)...(305): Cellulase (glycosyl hydrolase family 5)
  misc_feature (1)..(305): Xaa is any amino acid
MXXQVQIRHELSYDHYASGKGYGAWDYLGNTFESNGSWINGTTVNAYETAWGSPTITKAMIDGYKNAGFKTVRIPVAWSNLMTDSARGGSYTISTALLNRIDEVVNWVLADNMYAIVNIHWDGGWWSRFPNDSAECMNRYTKMWTQISNKFKDKSGYLVFESLNEEGVWDDVWNQYSGSGNKTRAYGLLNAINQKFTDLVRASGSNNATRHLLIAGYATNIDLTRDAAFKMPTDAQNRRAVSVHYYDPFGFTHLEKDESWAAARWTWGTTADYNDXNSALDKMKTTFVNNNIPVIIAEYGVAKKV

SEQ ID NO: 76593 - DNA, 414 bp, Unknown
  Obtained from environmental sample
  misc_feature (1)..(414): n is a, c, g, or t
atgccggaggaaagaaataaacagcgcataaaagactttgagtacgaggcaactttctttgtagaagccgtaacaagaggattcggaaaatggaaaaacggttggctcatgttttcaaacatgatgttctgtctttgcaatacaagaaaaccctggaacatgttttaccgtatgtttccgatacaagtcaatcaaaacaaatgtacgatctgtggaaggtgtgtgaggaactgtcctaccggagctgttaaattggataacttatctaaatttccacaaattgataaagatttatgccaatcttgtcagcgctgtataggattttgccctcaacatgccatagaggttcccaataagccggctgtacaatatacatgcatgagctatgacgagtttaaagatttcggcgggtaa

SEQ ID NO: 76594 - protein, 137 aa, Unknown
  Obtained from environmental sample
  DOMAIN (92)...(115): 4Fe-4S binding domain
  misc_feature (1)..(137): Xaa is any amino acid
MPEERNKQRIKDFEYEATFFVEAVTRGFGKWKNGWLMFSNMMFCLCNTRKPWNMFYRMFPIQVNQNKCTICGRCVRNCPTGAVKLDNLSKFPQIDKDLCQSCQRCIGFCPQHAIEVPNKPAVQYTCMSYDEFKDFGG

SEQ ID NO: 76595 - DNA, 537 bp, Unknown
  Obtained from environmental sample
  misc_feature (1)..(537): n is a, c, g, or t
atggcaacggaattagagagcaaaatggaaaaagctatagaagccacgaaccgtgaatttgctagactgagaaccggacaagcctccccagccatgttaaacgatgtaaaagtggaatactacggcaccccaacccctatatcccagctcgccacggtaaaagtacccgaacccagaatgttattggtaaccccttgggaaaaacaattcgttgaccctatatgcaaagccattttagctgcaaacctgggcttgaatccatctaaggaaggcgacagcgttcgcatcgcaatgccaatcctaaccgccgagcgcaggcaagagctggtgaaaatggcaaaaaaacacgcggaagatggccgcacagccataagaaatatacgccgcgaagcaaacgatgtagtaaaaaagaacaaggaactgccagaagacgaatctaaaaagcaaatggagaacattcaaaaaacaacggataaatatatagagatgatagacaccgcgcttgcagaanaagaggctgatatattgaaggtttaa

SEQ ID NO: 76596 - protein, 178 aa, Unknown
  Obtained from environmental sample
  DOMAIN (15)...(176): Ribosome recycling factor
  misc_feature (1)..(178): Xaa is any amino acid
MATELESKMEKAIEATNREFARLRTGQASPAMLNDVKVEYYGTPTPISQLATVKVPEPRMLLVTPWEKQFVDPICKAILAANLGLNPSKEGDSVRIAMPILTAERRQELVKMAKKHAEDGRTAIRNIRREANDVVKKNKELPEDESKKQMENIQKTTDKYIEMIDTALAEXEADILKV

SEQ ID NO: 76597 - DNA, 567 bp, Unknown
  Obtained from environmental sample
  misc_feature (1)..(567): n is a, c, g, or t
gtgtttggccccaccggtgtgggcgtgctgtatggcaaagccgaggcgatcgcggatttgccgccggtcaactacggcggttcgatggtggaatccgtcaccatggaaacatccacctttttgccgccgcccatgaagtttgaagccggtacccaaatggttaccgaagccatcggcttggcggcggcgttaaactggctgaccgagttgggctgggaaaacgttcaagcgcacgagcgcgagatgaccgaagaactcctcaaaatcgcagaaattccaggcatcaacatcatcgggccaaaagacgcgcgtgaccgcatcgccctggtcagctttaccgtggatggggtacacccacacgatgcggggcaggttttagacgatgccggcatcgccgtgcgcgtgggccaacattgcgcccaacccatccaccggcgcttgcacgcaccccagggcactgtccgtgccagcgccgcaatctacaacacagtagaagaagtagctaagttccgcgaagccttagaaaaagtccgccctttctttggcttggcaggttcggtagagtag

SEQ ID NO: 76598 - protein, 188 aa, Unknown
  Obtained from environmental sample
  DOMAIN (1)...(170): Aminotransferase class-V
  misc_feature (1)..(188): Xaa is any amino acid
MFGPTGVGVLYGKAEAIADLPPVNYGGSMVESVTMETSTFLPPPMKFEAGTQMVTEAIGLAAALNWLTELGWENVQAHEREMTEELLKIAEIPGINIIGPKDARDRIALVSFTVDGVHPHDAGQVLDDAGIAVRVGQHCAQPIHRRLHAPQGTVRASAAIYNTVEEVAKFREALEKVRPFFGLAGSVE

SEQ ID NO: 76599 - DNA, 465 bp, Unknown
  Obtained from environmental sample
  misc_feature (1)..(465): n is a, c, g, or t
gtggctggcccggcccctggccctgtggggcttctgcgccttgaaggacggccggaccgtggaggtggtcttcggggaagacccccgggacccggtcctgaccgtgccggacctcctgccccacctggaccgcaaggtccagcgggaaaaaaagatgggcgaagccatcgtggcggaaaagatgaacctcttggccgccgccctgcccattggggagcccgaggccaaggaccgcctgaaactggccgtcctgaaaatccttcacgaccgctggggcctctcggaagaggatctcatttcctcggaattggagattgtcccggccggcccggcccgggaagtgggcttggacggcgccctcctgggcggttacggccaggacgaccgactgtcggtcttcgccgccctctccgcgctcttggccggcccggcgccccggcggcccaccctggtcataatctatga

SEQ ID NO: 76600 - protein, 154 aa, Unknown
  Obtained from environmental sample
  misc_feature (1)..(154): Xaa is any amino acid
MAGPAPGPVGLLRLEGRPDRGGGLRGRPPGPGPDRAGPPAPPGPQGPAGKKDGRSHRGGKDEPLGRRPAHWGARGQGPPETGRPENPSRPLGPLGRGSHFLGIGDCPGRPGPGSGLGRRPPGRLRPGRPTVGLRRPLRALGRPGAPAAHPGHNL

SEQ ID NO: 76601 - DNA, 771 bp, Unknown
  Obtained from environmental sample
  misc_feature (1)..(771): n is a, c, g, or t
atgaaacacgcctatatcctattgccaacttcaaacggagttccattggagaacgtatcagcgggcattttagaaacattgagcaaaagaaatctcaaggtcgcaaaattcgtcccttttggaactggcggagtgcctttcgcagaaatcagaaatgcgcttatatccgactgcgagcaagtgattatggaacttttggtggacaagtttctaaggatattttccaagcacgatgttgttatagttgaaggcatttctgaacctgaaattttttataaaagagaactccacaaaatgctcacttccgctatggatgcaagcgtaattttggtggcaaaagctggcaacaaacccattgacgacttaataggcgaaatttccgttgaagagcattttcataaaaacgctaatgcctttatggctggctgtgtatttttaaatgtacccgaagatggtgaagctgaattgagagccgcgtgcaaaaacagcgatttgccagcacttggctttgtgcacggcggcgaaaacccaagcaaagaagccgttgttgctggcattgaagaggaaccctgggaacacatactcaaagaagaacgcgaacacagaatgagcccgccggaattcagatatttcctcataaaaaaagctcanaaatccanagcgagaatagttttgcccgaaggctccgagcctagaaccgtacgtgcggcaatactcgcactccanaggcaantagccattcccaatacgctggcaaaagagcagatgtga

SEQ ID NO: 76602 - protein, 256 aa, Unknown
  Obtained from environmental sample
  misc_feature (1)..(256): Xaa is any amino acid
MKHAYILLPTSNGVPLENVSAGILETLSKRNLKVAKFVPFGTGGVPFAEIRNALISDCEQVIMELLVDKFLRIFSKHDVVIVEGISEPEIFYKRELHKMLTSAMDASVILVAKAGNKPIDDLIGEISVEEHFHKNANAFMAGCVFLNVPEDGEAELRAACKNSDLPALGFVHGGENPSKEAVVAGIEEEPWEHILKEEREHRMSPPEFRYFLIKKAXKSXARIVLPEGSEPRTVRAAILALXRQXAIPNTLAKEQM

SEQ ID NO: 76603 - DNA, 735 bp, Unknown
  Obtained from environmental sample
  misc_feature (1)..(735): n is a, c, g, or t
atgaaatatataaaaatgaaacagagttcaataaagaggagaaagaatttgaataattccacagagaagctttactatacagatcctttcttaacagaatgtaaagcgacggtaataaacaagcggaatgaaaatgagatatgtttagataaaacagttgcatatcctgagggaggtggtcaaatatcggacatcgggtttttatgttacgataatgaaaaaataccatttcatgatgtacgaaaggggctagggagaatattttctgtttctgattttccaacaataaatgttgatacacctgtttatcatattgttcaagaagaaaattttgatagattctcaataggtcaagaagtaaccgtaaagattgtcgttgagcgaagaataaagacaacccttcatcatagcgctttacatttagcacttatgtttgctattcaattaagacctgatttgtatagtcgtataaaggggtgcagtataacagaagaacatggtaggcttgacttctctttgtttgaacgattcaccgaaagtgatttagcttatataaatgaaaatttactaaaaattattcaagcttctgttccaatcgttgtatatccgcatactaatgaaagggaagcatggttttggaaatgtcaggattttatatgcccatgcgggggtactcatgttactagttcagaacaaatagggtatgctactgtaaaacgaaaaggtcttggttaa

SEQ ID NO: 76604 - protein, 244 aa, Unknown
  Obtained from environmental sample
  misc_feature (1)..(244): Xaa is any amino acid
MKYIKMKQSSIKRRKNLNNSTEKLYYTDPFLTECKATVINKRNENEICLDKTVAYPEGGGQISDIGFLCYDNEKIPFHDVRKGLGRIFSVSDFPTINVDTPVYHIVQEENFDRFSIGQEVTVKIVVERRIKTTLHHSALHLALMFAIQLRPDLYSRIKGCSITEEHGRLDFSLFERFTESDLAYINENLLKIIQASVPIVVYPHTNEREAWFWKCQDFICPCGGTHVTSSEQIGYATVKRKGLG

SEQ ID NO: 76605 - DNA, 891 bp, Unknown
  Obtained from environmental sample
  misc_feature (1)..(891): n is a, c, g, or t
ttgcgccgcttgacctgcgctttcgcgcttgcggccatcatcgccggcctttcgggcgtatggcagttcgcgaccggagcggatctgatcaccggaacgccgccctacaggacaggcgggacagactttgtgccgggcgagttcgcctccctgcgcggctttcgcctgaccgggccgctgtccacctaccgcgtcggcaactacatggcgctcatcggcctgccggcctgcgggctctttctgctgtggcccgacaagcctgtcatccgccaccccgccgcgcgggcggttctgaccggctgtctgctcgctccggccgtgtttttgtggctggccgcccagacccgttccggctacctggccgcagccggcggcttgtttgccgcctggctgctgtttttccggccccgctggcagcttgcgctcacgatcacgctggccggggtcttgcttgtcgccctagggcctgagcgcgtgtctctcgcccatgccctggctgatgaacggcgctcgatctggagtacggcctggcagtgttttctggcgcatccctggttcggcgccggcgccgaaacctatcccgaagtctgcgccgccctgggcatcacccatttgagcacgggccatcccgtgcctccccatccgcacaatatctacctgcaatggctggttgacgggggagtgatcggctgcggcgtctttcttctgttcgccgccggcctgactatctggagcgcccggaccatccgccggggtttgcgcgccggcccctctcaggcaatcttctggcggcttaccgccttgttttgggccggctggttcggctatctgatcaacgggcttgcggcgcacggctttaccgcaccggtgggtttccntcggccgatctga

SEQ ID NO: 76606 - protein, 296 aa, Unknown
  Obtained from environmental sample
  SIGNAL (1)...(26)
  DOMAIN (163)...(232): O-Antigen Polymerase
  misc_feature (1)..(296): Xaa is any amino acid
MRRLTCAFALAAIIAGLSGVWQFATGADLITGTPPYRTGGTDFVPGEFASLRGFRLTGPLSTYRVGNYMALIGLPACGLFLLWPDKPVIRHPAARAVLTGCLLAPAVFLWLAAQTRSGYLAAAGGLFAAWLLFFRPRWQLALTITLAGVLLVALGPERVSLAHALADERRSIWSTAWQCFLAHPWFGAGAETYPEVCAALGITHLSTGHPVPPHPHNIYLQWLVDGGVIGCGVFLLFAAGLTIWSARTIRRGLRAGPSQAIFWRLTALFWAGWFGYLINGLAAHGFTAPVGFXRPI

SEQ ID NO: 76607 - DNA, 807 bp, Unknown
  Obtained from environmental sample
  misc_feature (1)..(807): n is a, c, g, or t
ttgttgggcgggcgcgattgggatgaccgaatagagcttttgctttttgataagttcgccgaagagacgggtatcgacacaaattcaaacgccacgataaaaaccatgcttcgcggtatgtctgaaggcgtaaaaaaacagttgtccgcaatgcaatcaacaaatgtcaccgcctctatccctgattttggttccgcgtccgtctccataaccagaagcgaatttgaagaaaaaaccacggacttaatcgacaggacaggggctctttgccaggcggtaatagcggaagcgggagtaagcacacaggacataaccgacatactattggttggcggttcgacgcgaatgccgcaggtttctcaatttatacagaacttgtttggcaaaaaaccaattacgcatgtgaatccggatgaagctgtcgccctgggcgcggcaattcagtcctctaaagaaaacgaatcgtatgtgacgcttgctgtacaagtggcaaaaaacggcaagaaagttacggatcgccgcagtacgggattgagttcacatgcggccgttaagccctctcagaaactctccggtatcggcttgctgacattaagggagtccacagctcatgctatgggcataatcgcgataagccccgatagtacgaaatatatcaatgatattataattccggctaatcatccccgccctgttcgtgtcgccaaagcgtttgcgttttataccgcagctcgcggtacaaatgaaatggagatttacgttctgcagggggacaaagaaatccgcttgacaacctataccatataa

SEQ ID NO: 76608 - protein, 268 aa, Unknown
  Obtained from environmental sample
  DOMAIN (2)...(267): Hsp70 protein
  misc_feature (1)..(268): Xaa is any amino acid
MLGGRDWDDRIELLLFDKFAEETGIDTNSNATIKTMLRGMSEGVKKQLSAMQSTNVTASIPDFGSASVSITRSEFEEKTTDLIDRTGALCQAVIAEAGVSTQDITDILLVGGSTRMPQVSQFIQNLFGKKPITHVNPDEAVALGAAIQSSKENESYVTLAVQVAKNGKKVTDRRSTGLSSHAAVKPSQKLSGIGLLTLRESTAHAMGIIAISPDSTKYINDIIIPANHPRPVRVAKAFAFYTAARGTNEMEIYVLQGDKEIRLTTYTI

SEQ ID NO: 76609 - DNA, 471 bp, Unknown
  Obtained from environmental sample
  misc_feature (1)..(471): n is a, c, g, or t
gtggcaagacctttggacatcttggcctcggcagtgccgctgggtcaggccataggccgccttggttgcttggcggctggttgctgctacggcgcgttctgcgaaatgccgtgggccattgtgttccacgacctcgatgccgcccgcttcggtgtgccgctggaaatccccctgcaccctgcccaaatgtatttctgcctctccaacttgctcattgccgccgctctgtttttcttcaggcgattcaggaagttccctggtcaactggccgcgctgtacttcgccctagaaggcctgttccgcataatccttgaaacatggcgaggcgactacgacaggggcttctggctcggtatctcttggctttccactggccgcctgacgggcatgttgtttatcctgattggcactggtatctggctctggtatggacgaagggcggaacaaaagaccagtgaaccacggcaatga

SEQ ID NO: 76610 - protein, 156 aa, Unknown
  Obtained from environmental sample
  DOMAIN (1)...(146): Prolipoprotein diacylglyceryl transferase
  misc_feature (1)..(156): Xaa is any amino acid
MARPLDILASAVPLGQAIGRLGCLAAGCCYGAFCEMPWAIVFHDLDAARFGVPLEIPLHPAQMYFCLSNLLIAAALFFFRRFRKFPGQLAALYFALEGLFRIILETWRGDYDRGFWLGISWLSTGRLTGMLFILIGTGIWLWYGRRAEQKTSEPRQ

SEQ ID NO: 76611 - DNA, 504 bp, Unknown
  Obtained from environmental sample
  misc_feature (1)..(504): n is a, c, g, or t
atgcccgacaatttgaagcaaaagttaatcatcattaccggttcgccctgtgtaggtaaaaccgctgtggcggaaagcctctttgagtcatacgaaaactgcgcctatttcgacggagactgggcatggtgtgttaatccattttcgattagcgaccctcgattgcgtaacggcgataaaaccatgtctttcgcgctgtctacttatttgaactcaaatttcgattatgttattttctcttctgtagtggtactcggtgaagatatcagggaagccatattgaaagacattaccgcagagaattacatgacaattgcttttacactaacatgctccgaaaatacgctgattgagcgccataaaaaacgcggtgacaatacagacgtatcgttttactggttaagattaaaaccccatcccggcgattatgttatcaatactgataacaaaacaataacgcaaattgttggagaaataaaacgcattgtagatgaatgttcctaa

SEQ ID NO: 76612 - protein, 167 aa, Unknown
  Obtained from environmental sample
  misc_feature (1)..(167): Xaa is any amino acid
MPDNLKQKLIIITGSPCVGKTAVAESLFESYENCAYFDGDWAWCVNPFSISDPRLRNGDKTMSFALSTYLNSNFDYVIFSSVVVLGEDIREAILKDITAENYMTIAFTLTCSENTLIERHKKRGDNTDVSFYWLRLKPHPGDYVINTDNKTITQIVGEIKRIVDECS

SEQ ID NO: 76613 - DNA, 864 bp, Unknown
  Obtained from environmental sample
  misc_feature (1)..(864): n is a, c, g, or t
gtggaagttttgatgctgtttattcatttgacaaacggtcaaacacctcgagaactcaagcgttccgaactttcaaatgccttgccgaatgcagcggccgtcatccaaacgttagtcaaaaaacaaatctttgaactcgttgaaaaaacggaaacacgcctcgaaacttcatattccacacacgaacttggacaaatccaattttccgacgaacaacagaacgctttcaacgctattcaaaatcatttccaaagcaagaacgttgcactcctgcacggcataaccggcagtggaaaaaccgaaatctacatcaaattgattgaacaggccataaacagtggaaaacaagtgctgtatctcttgcccgaaattgcactgacgtcgcaaattatttatcggttgcaaaagtatttcggtgagaaagtcggtgtttatcattccaaattcaacgaacaagagcgtgtcgaagtgtggcaacgggtgatggataaaggcgaaaagcggtttcagattattttgggcgcgcgttcggccatctttttgccgttcgatcatttgggattggtgattgtggacgaagaacacgaaacgtcgttcaaacagtacgaccctgccccacgctacaacgctcgcgatgccgcgatttacttagccaatctgcaccaagccaaaaccattttgggctcggcaacgccctctatcgaaagttatttcaacgcacaaaccggaaaatacggtttggtcgaacttctgaaacgttacggaaatacaaacttgccgaccatccgcattgccgacctcaaacaggaaacacgcgaaaagaccatgcacgcgcatttttcgtccctgctngatgaagaatga

SEQ ID NO: 76614 - protein, 287 aa, Unknown
  Obtained from environmental sample
  DOMAIN (65)...(234): Type III restriction enzyme, res subunit
  misc_feature (1)..(287): Xaa is any amino acid
MEVLMLFIHLTNGQTPRELKRSELSNALPNAAAVIQTLVKKQIFELVEKTETRLETSYSTHELGQIQFSDEQQNAFNAIQNHFQSKNVALLHGITGSGKTEIYIKLIEQAINSGKQVLYLLPEIALTSQIIYRLQKYFGEKVGVYHSKFNEQERVEVWQRVMDKGEKRFQIILGARSAIFLPFDHLGLVIVDEEHETSFKQYDPAPRYNARDAAIYLANLHQAKTILGSATPSIESYFNAQTGKYGLVELLKRYGNTNLPTIRIADLKQETREKTMHAHFSSLLDEE

SEQ ID NO: 76615 - DNA, 933 bp, Unknown
  Obtained from environmental sample
  misc_feature (1)..(933): n is a, c, g, or t
ttgcctggaaaaagggctggcgttcaagccacagtgcggtgggggccgcgccaagagaggggggggagcgtcctgggaaatccccgctgtatttttgcgcttccggcttgtgtgcgggcaatgctgcgcttttgccattggctttggaccataaaacgcctcctgccgcgcatgggcgctctccgtccggcgccgggcacaagcaccattgccacctatttcccgaacatcgattccgatctcgcccggacggggcgttttcgttcccggtattgggaaagtctgcacgatgcccttgcgccggaagcgggggagcggcacagcgtgaactggctgtttatccactttcccgcgccgcaaagtttgcggcagtgcatcgggcttgtgcgggaatttcggttccaagggcgggatggagccagttttcattacctggaggaatttttgggctggggggatatatggattgcctgtcggcgttatgcgcggctttttctcaactctttgcgcatacaaagaatggtgcgcgcctattttcgcctccacggctcggatatggatttctggcccggtttgggggctgcctatatcgagtccttccggggctggcgcgccctggagcgttgttttcagcgccaggcatgcatccgctatgtcgagtggtgcggcgcgcaaaaatggacgatttttcccatggaaaactgtccttgggagcgcatgctgacccaggccgtgcatgaggccggggcggggcctgtgtatggaacgcagcattccacgatccgcgccgcggatttccggtattttgacgaccagcgaaccttgcgggatgcggagtgccgctgttttcagcctgaccgcatctacgtcaacggacagggcgccatggacgaaatgctggctgccggatatgcgccggaacctcggccataa

SEQ ID NO: 76616 - protein, 310 aa, Unknown
  Obtained from environmental sample
  misc_feature (1)..(310): Xaa is any amino acid
MPGKRAGVQATVRWGPRQERGGSVLGNPRCIFALPACVRAMLRFCHWLWTIKRLLPRMGALRPAPGTSTIATYFPNIDSDLARTGRFRSRYWESLHDALAPEAGERHSVNWLFIHFPAPQSLRQCIGLVREFRFQGRDGASFHYLEEFLGWGDIWIACRRYARLFLNSLRIQRMVRAYFRLHGSDMDFWPGLGAAYIESFRGWRALERCFQRQACIRYVEWCGAQKWTIFPMENCPWERMLTQAVHEAGAGPVYGTQHSTIRAADFRYFDDQRTLRDAECRCFQPDRIYVNGQGAMDEMLAAGYAPEPRP

SEQ ID NO: 76617 - DNA, 516 bp, Unknown
  Obtained from environmental sample
  misc_feature (1)..(516): n is a, c, g, or t
gtgcccagcaaagccgtggataaattgaaaacgctttgccagtcgcttgcaggcaaaaacgccgttgttataggcaatggatggatgggaaagcttgtagcggaattgctaatttatgaaaatgcaaacgtgacggtcaccttgcgagaaaacaaaaaaggatttatgcaaattcctaacggagcaagtacgataaattataatgagagatacaaagtgattgaacaggcggatatagtaatcagtgccacaacaagccctcatttcacgctttgccataaagaacttaccagcttaacacaactaccgagtatcattgtggatttggcggttccaagagacgttgagccttttatcaaggaaattcccagtcttgcactattgactatagatgacatatctagcgaaagccgagctcttcctgctgaaagtattttgatgatagatgatattatcggggagcatatcaaaaaatattatcactggtttgagtttaagagagaaaatgtagcgtga

SEQ ID NO: 76618 - protein, 171 aa, Unknown
  Obtained from environmental sample
  DOMAIN (1)...(136): Shikimate / quinate 5-dehydrogenase
  misc_feature (1)..(171): Xaa is any amino acid
MPSKAVDKLKTLCQSLAGKNAVVIGNGWMGKLVAELLIYENANVTVTLRENKKGFMQIPNGASTINYNERYKVIEQADIVISATTSPHFTLCHKELTSLTQLPSIIVDLAVPRDVEPFIKEIPSLALLTIDDISSESRALPAESILMIDDIIGEHIKKYYHWFEFKRENVA

SEQ ID NO: 76619 - DNA, 456 bp, Unknown
  Obtained from environmental sample
  misc_feature (1)..(456): n is a, c, g, or t
atgatcagatcggccgagtttggggatctctgtcggcaatttgtcctgaacggcgctgaatttctgatcaatacaacaaatgactactggtcaaggagcatccagtcgcaggagcagcacgcctctatggccattctgcgcgcgatagagaaccgccggtatatggttcgcgccgccaataccggggttacctgcgtcattgacgcttggggacggatgcagtcgcgtttaccaaatcatacggtgggcattctggacgccaatatttcgcttatgcgcggatacgggcagaccgtatatacacggcatggtgattttctgggcatagcgggagcgtatctcggcggtctggcacttgcgcttggctttatgctgatcatatacaggatcatacgtttgctttatcgggctgcagtacgctgttttaaaagatcatctcgggatgagctggcgtaa

SEQ ID NO: 76620 - protein, 151 aa, Unknown
  Obtained from environmental sample
  misc_feature (1)..(151): Xaa is any amino acid
MIRSAEFGDLCRQFVLNGAEFLINTTNDYWSRSIQSQEQHASMAILRAIENRRYMVRAANTGVTCVIDAWGRMQSRLPNHTVGILDANISLMRGYGQTVYTRHGDFLGIAGAYLGGLALALGFMLIIYRIIRLLYRAAVRCFKRSSRDELA

SEQ ID NO: 76621 - DNA, 342 bp, Unknown
  Obtained from environmental sample
  misc_feature (1)..(342): n is a, c, g, or t
atgcctgtaccagcccctcgcnntattnctcagggaaggaacggacaatacttcgaacgccacaagaccgtgcatgaccggcttgtctatggtctggacgccttgggcttcaaaatgtacgtcaaggaaggctcccgcctgcccatgctcaacaccgtagtgccgccccccggcgtggatgaggcgaaactgcgcaagcaactgcgcgaggaacatatgattgaggtgggcaacggccttggtccgctggccggcaagattatccgcatcggcctgatgggcgaaacagcccgccgggagaatgtgaaccgcctgctggccgcgctgcgcgactgcctctga

SEQ ID NO: 76622 - protein, 113 aa, Unknown
  Obtained from environmental sample
  misc_feature (1)..(113): Xaa is any amino acid
MPVPAPRXIXQGRNGQYFERHKTVHDRLVYGLDALGFKMYVKEGSRLPMLNTVVPPPGVDEAKLRKQLREEHMIEVGNGLGPLAGKIIRIGLMGETARRENVNRLLAALRDCL

SEQ ID NO: 76623 - DNA, 570 bp, Unknown
  Obtained from environmental sample
  misc_feature (1)..(570): n is a, c, g, or t
atgaacagatttttgctgttttttctgctaaccttgccgctgttttttttctgctcgtgcaaagaaaaaacggtgcctgaaaaagtggttagcttatggatttttaacaatacccctaaacctttagacgacatgaataaaatcctgaaagattttcacgtagaaaatcctgggataaaagtagaagtcacaattttggattggggtagcggtttttcaaaaatagtgttggcggcggcaactcgcaacggtcccgatatcatacaagttccttcaacttgggctgcatctttaaccgacataggtgcgcttatgccgttggattccgttgtccagatttggggaaacccaaatttattcatagcgggttcaagggaaacaatgcggccaaaaaattccactagtataacatcgcttccgtggtttttggatgtgcgccctttttactataataaaaaagtcttaaattccattgaaatagatccaacttcaataaaatcaagagatgattttgtacatattttgcaaaaaataaaagattccaaaatgtctatcaacaacaaagtatag

SEQ ID NO: 76624 - protein, 189 aa, Unknown
  Obtained from environmental sample
  SIGNAL (1)...(22)
  misc_feature (1)..(189): Xaa is any amino acid
MNRFLLFFLLTLPLFFFCSCKEKTVPEKVVSLWIFNNTPKPLDDMNKILKDFHVENPGIKVEVTILDWGSGFSKIVLAAATRNGPDIIQVPSTWAASLTDIGALMPLDSVVQIWGNPNLFIAGSRETMRPKNSTSITSLPWFLDVRPFYYNKKVLNSIEIDPTSIKSRDDFVHILQKIKDSKMSINNKV

SEQ ID NO: 76625 - DNA, 894 bp, Unknown
  Obtained from environmental sample
  misc_feature (1)..(894): n is a, c, g, or t
atgacagattggccgagtatttttgaaatgatcccgctctatggcaccgggttttatggcggagtgaacttgaaaattaaggctttagatgccaatgagggcgataataaactgtcgctggatgcttcggccatctttggtcgcaaaaatagctatcgctactggtatgccgatgcaaagatgaagttcacccccggcatcccgattttttcaggcctggaaatcaatggcttttcaggtggcgtatcgcaacgaatgtcgctggccggcgccggtttcaaccatccgttttgcaagtcgggcatcaactatgtgcccgattcgtccaccatgatgctaatcaaggcgggcaccatgtttcgcacctccggcaaggatgtgttttcgggcaatctgggcttggagatagcctttaatcaaacttacggcatccggtatatcaatctgaacggcagcggaaaaattgccgcaaatattccgggatcggaagatttggccagtatcgaacgaagtttgcatagctttacctcttcgcccgaagcggccaaagcctttcatgaaaatgaatgcaatgcgggaaccaattccggcaacatatccgttacggccaatttaaccatgaattttgacaagaaggagtttaccggaaaattcgaagcctatgttcaaacgccgtttatcaaaggcatcggcaccggcggcaaaatgggagaagtggatgtctattttagtcaaagtcaatggtttattaaagccggtacgccggaccaccgattgggcttggaattgggtgttgcctctctgagcgtagaagccaatgcgtatttgatggccggccacaacctgccggctatgccgccgccaccgccggaagtgacccggatttttgggtaa

SEQ ID NO: 76626 - protein, 297 aa, Unknown
  Obtained from environmental sample
  misc_feature (1)..(297): Xaa is any amino acid
MTDWPSIFEMIPLYGTGFYGGVNLKIKALDANEGDNKLSLDASAIFGRKNSYRYWYADAKMKFTPGIPIFSGLEINGFSGGVSQRMSLAGAGFNHPFCKSGINYVPDSSTMMLIKAGTMFRTSGKDVFSGNLGLEIAFNQTYGIRYINLNGSGKIAANIPGSEDLASIERSLHSFTSSPEAAKAFHENECNAGTNSGNISVTANLTMNFDKKEFTGKFEAYVQTPFIKGIGTGGKMGEVDVYFSQSQWFIKAGTPDHRLGLELGVASLSVEANAYLMAGHNLPAMPPPPPEVTRIFG

SEQ ID NO: 76627 - DNA, 915 bp, Unknown
  Obtained from environmental sample
  misc_feature (1)..(915): n is a, c, g, or t
atgctgattaatgaggctggcgatgaggcggcaagaaaggccatgtctgcggacggtctgctaatcatagcccacgacacgactcacatagactacagcgggctcaacgtggatggcatagggatgaacgcgaccggcgaggaaacgaaaggcttccttctgcacagcagccttgccctcacggaggctggggttcctcttgggattctgtcgcaaagcatctggacgagggaatgcgtcaagggaaatgacagctgcaaaaggcggcaactgccgatagaagaaaaggagagcaacaaatggcttgagagcctccatgcaagccggtctgcccttcccgaaggcatccgcagcgtgtccgtgtgcgaccgcgaggcagacatatacgagctgctgtgcacaatggatgggcaaagccatgattatgtggtgcgctcgtcttacaacaggaagctttgcgatggaaccctgctggagagaaaaatcggaattcagccagttctcgctagatacgaatacgaggttcgcagggttcacgaggctcacccaaagcggatggcgggcatggcattgcgcgcttgcgaggtagagatgcgccgccccgatgcgcaaacaaagctcgcatatcccggcagtctcaagctgaatgcggtatcggcaagagaggaaacgccgggaatcgccgagaaagacagggtaagctggacgctgctcacttccctngcgatagacagcgtagaaaacattatgaggatacttgatatctacaaactccgatggaagatagagagatttcattacgttctcaaaagcggatgcggagtggaaaagaagcagctcaaaacagtccattccctcaaaatatgctcgcgtttttctccatcgtggcgtacaactgctttggctcaaatatga

SEQ ID NO: 76628 - protein, 304 aa, Unknown
  Obtained from environmental sample
  misc_feature (1)..(304): Xaa is any amino acid
MLINEAGDEAARKAMSADGLLIIAHDTTHIDYSGLNVDGIGMNATGEETKGFLLHSSLALTEAGVPLGILSQSIWTRECVKGNDSCKRRQLPIEEKESNKWLESLHASRSALPEGIRSVSVCDREADIYELLCTMDGQSHDYVVRSSYNRKLCDGTLLERKIGIQPVLARYEYEVRRVHEAHPKRMAGMALRACEVEMRRPDAQTKLAYPGSLKLNAVSAREETPGIAEKDRVSWTLLTSLAIDSVENIMRILDIYKLRWKIERFHYVLKSGCGVEKKQLKTVHSLKICSRFSPSWRTTALAQI

SEQ ID NO: 76629 - DNA, 804 bp, Unknown
  Obtained from environmental sample
  misc_feature (1)..(804): n is a, c, g, or t
gtgctcttgcagattcgggtcgccccgctcagcgaagatcgtgtgctgttgctcgctgacgaccgcacggaagccaagcgcgtcgaagcgattcgccgcgattttgtcgtcaacgtgtctcatgagctgaagacaccggtcggcgcgatccagttactagccgagaccatcgaagatgccgcagacgacccagatgcggtgagacgcttcacgaagcgcttgggcatcgagtcgcgacgcttatcggctctcgtccaggagatcatcgagctgtcacgcgtccaagcgacgagcgctgtcaacgatgtgcgcaccgtgactgtcgctgacattgttgccgaggcagtcgatcgagcgcagacgcaggccgccgcgaagaatattgtcatcacggcatcaggcggggacgaagccctcgtttatggtgaccacgacctgctcgtccaggccgtccgcaacctacttgacaatgcggtcgcctattcgaacccgaacacgagggttggtgtcggagtaacggagcgtgacggcctcgtctccctcaccgtcgtcgaccagggcatgggaatcagcgccagcgatcaggagcgcattttcgagcgcttttatcgggctgatccggcgcgctcacgcgataccggtggtacggggttggggctatccattgtcaaacatgtcatcgccgatcatggtggcgatatttctgtctggtcgacgccgggtaagggcagcacgttcacggtgcgtctccctgccgccgacacgcaacccccgcagccactatcggaggacactcccgcatga

SEQ ID NO: 76630 - protein, 267 aa, Unknown
  Obtained from environmental sample
  DOMAIN (31)...(97): His Kinase A (phosphoacceptor) domain
  misc_feature (1)..(267): Xaa is any amino acid
MLLQIRVAPLSEDRVLLLADDRTEAKRVEAIRRDFVVNVSHELKTPVGAIQLLAETIEDAADDPDAVRRFTKRLGIESRRLSALVQEIIELSRVQATSAVNDVRTVTVADIVAEAVDRAQTQAAAKNIVITASGGDEALVYGDHDLLVQAVRNLLDNAVAYSNPNTRVGVGVTERDGLVSLTVVDQGMGISASDQERIFERFYRADPARSRDTGGTGLGLSIVKHVIADHGGDISVWSTPGKGSTFTVRLPAADTQPPQPLSEDTPA

SEQ ID NO: 76631 - DNA, 531 bp, Unknown
  Obtained from environmental sample
  misc_feature (1)..(531): n is a, c, g, or t
atgaaagtgccgcagaacgccatactggacgcgaatgaaattttgtccgagaacatccccgccggaaaggttattttcattccgggcggaaaaatggacgccaatgagttaaaccgcgcaatcaagcggcctgtcattgaaaagatgatttatcctgtgagcaatagaaggatcacttcaggctatggctggcgtgaagacccggtcaacccggtggccggacagatgacttttcacagggctgtggatttggccggcaagatgggggatcccgttaaggcggccatgaaggggacggtgctgcatgtcgataacaaccgcaatttgggaaatttcatcatccttaagcacgacgaataccagaccctgtacggccatctttcggctgtttcggtgaaaaaaggggacgcagtcagccaggggcaggtaatcggcaaggtaggcgaaaccgggtatactacggggccccatctgcattttgaggtttttcgtaacggagcccgcataaacccgcttgaaatattgagatag

SEQ ID NO: 76632 - protein, 176 aa, Unknown
  Obtained from environmental sample
  DOMAIN (77)...(171): Peptidase family M23
  misc_feature (1)..(176): Xaa is any amino acid
MKVPQNAILDANEILSENIPAGKVIFIPGGKMDANELNRAIKRPVIEKMIYPVSNRRITSGYGWREDPVNPVAGQMTFHRAVDLAGKMGDPVKAAMKGTVLHVDNNRNLGNFIILKHDEYQTLYGHLSAVSVKKGDAVSQGQVIGKVGETGYTTGPHLHFEVFRNGARINPLEILR

SEQ ID NO: 76633 - DNA, 549 bp, Unknown
  Obtained from environmental sample
  misc_feature (1)..(549): n is a, c, g, or t
atgtatttgtttacggctgggatggacataggcctgacggggcttcaggccgcccaaaacgccatcaacgtcaccgggcaaaatattaccaacatcaacacgcctgggtacgcccgccagagggtgaacctcgaaacaggctacgcgcttcagatcaacacgctccagtttggtctgggcgtcaacgcaaagcagattcaggcaatcagggaccacttcctggatatgcagttgacgcagaccatcacgcggcaggccggcacacagacgcgctacgagggcgtcgaaaacgtcgcggcgttgttcatggagaatggcgagtccggctttggcatcgagttgcagcgtttcttccaggcatttgaagaactggccgccagacccgaagacgacgcggtgagaaccaacgtcgtgacaagggcgcagacgtggatcacgggcatgaaggcgcgttactccatgatagaggaaaaacgcgccgaggcaaacaagtcggtgggcagcatctccgtcgaagtcaacacacttgctgcccagatagcaaggtga

SEQ ID NO: 76634 - protein, 182 aa, Unknown
  Obtained from environmental sample
  DOMAIN (8)...(38): Flagella basal body rod protein
  misc_feature (1)..(182): Xaa is any amino acid
MYLFTAGMDIGLTGLQAAQNAINVTGQNITNINTPGYARQRVNLETGYALQINTLQFGLGVNAKQIQAIRDHFLDMQLTQTITRQAGTQTRYEGVENVAALFMENGESGFGIELQRFFQAFEELAARPEDDAVRTNVVTRAQTWITGMKARYSMIEEKRAEANKSVGSISVEVNTLAAQIAR

SEQ ID NO: 76635 - DNA, 336 bp, Unknown
  Obtained from environmental sample
  misc_feature (1)..(336): n is a, c, g, or t
atgcggatgggttcaaaaaccggatgccatcaaatgaacgacagaagtttctcctttaagggttttcaatttccaatctgcgccagatgcaccggtttactgcttggtcaaatcaccgggttaatcctttcgttttttttcattaaatacgatataaggcttcttctttgtcttgccgtgttttcaacgctgctgcttggggcggacggcatcggtcagttaaaaaaattatggatgtcaacaaatacaaggcgttttattaccgggattttatgcgggaattttgttattatattttttataaaactgattgttacattggtgacttgcatctaa

SEQ ID NO: 76636 - protein, 111 aa, Unknown
  Obtained from environmental sample
  misc_feature (1)..(111): Xaa is any amino acid
MRMGSKTGCHQMNDRSFSFKGFQFPICARCTGLLLGQITGLILSFFFIKYDIRLLLCLAVFSTLLLGADGIGQLKKLWMSTNTRRFITGILCGNFVIIFFIKLIVTLVTCI

SEQ ID NO: 76637 - DNA, 573 bp, Unknown
  Obtained from environmental sample
  misc_feature (1)..(573): n is a, c, g, or t
atgagcgaacttgcgcaacaaattgaagcaattttgtttttagcgggcgacggattatcggtgaaatatatcgccgaaaagatgtttttgcaccctgaatgcgttattggggctttgcgtgaaattaatgataaatacagcgatgacagcggtattcatttggtcaaatataacggcaattatcaattcgctacaaatcccgatgttgccgatgcggttgcgaatgttttgaatcccgtgcgggaaaagaaccttacgcgtgccgcaatggaaaccatggcgattgtggcgtacaagcagcctgtgacgaaacttgaaatcgatgaaatccgcggcgtggcaagcgattattccgtcaatattttgttgcaaaataatcttatcgaagttgttgggcgaaaggacgcattgggtaaaccgttgttatacgggactacggacgaatttttaaaacgatttgaacttgacgctattgataaattgccaagttacgaagatttgttggataaattaaaaaccgttgcgacgaactttgatttatatgaaagtgcaaaatcaggggcgggggtgtaa

SEQ ID NO: 76638 - protein, 190 aa, Unknown
  Obtained from environmental sample
  DOMAIN (6)...(164): Putative transcriptional regulators (Ypuh-like)
  misc_feature (1)..(190): Xaa is any amino acid
MSELAQQIEAILFLAGDGLSVKYIAEKMFLHPECVIGALREINDKYSDDSGIHLVKYNGNYQFATNPDVADAVANVLNPVREKNLTRAAMETMAIVAYKQPVTKLEIDEIRGVASDYSVNILLQNNLIEVVGRKDALGKPLLYGTTDEFLKRFELDAIDKLPSYEDLLDKLKTVATNFDLYESAKSGAGV

SEQ ID NO: 76639 - DNA, 600 bp, Unknown
  Obtained from environmental sample
  misc_feature (1)..(600): n is a, c, g, or t
ttgggcatacagagcgtcgaagaagccgcctgtgttcttgcatggcaattcttttatccgaatcaggagattccgctcatcgttcagttgatcggtgatatggatatatggagattcagttttggcgagaactccgtaaatcttaattacggtctggagttatgcgatattcttcccacggctccattctggaaggagtatcttcgaccggaattaacgatgcgcgatctggaaccaatcctcgcgccgggacgcgccgtcaatgcctacgagaccaagcgccgcgcgagactgattcgggagtacgcctacgagacaagcatcgcggggcataaggccgttgcctgtaatctgcgcggcaattccgcgatgtttggcgagctcgaaaagagatatgctatctgcattgcctatatgtttgacggtgaacgctatcacatatcgctgtataccgcgcgcaatgatatcgatgtttcgaagatatgcgcgcagtacggcggaggcgggcacgccaaggccgccggattttttaccgataccctgccctggtccctgggcgggaagaggctgcgccgcagcgacgcaagggacagcggataa

SEQ ID NO: 76640 - protein, 199 aa, Unknown
  Obtained from environmental sample
  misc_feature (1)..(199): Xaa is any amino acid
MGIQSVEEAACVLAWQFFYPNQEIPLIVQLIGDMDIWRFSFGENSVNLNYGLELCDILPTAPFWKEYLRPELTMRDLEPILAPGRAVNAYETKRRARLIREYAYETSIAGHKAVACNLRGNSAMFGELEKRYAICIAYMFDGERYHISLYTARNDIDVSKICAQYGGGGHAKAAGFFTDTLPWSLGGKRLRRSDARDSG

SEQ ID NO: 76641 - DNA, 870 bp, Unknown
  Obtained from environmental sample
  misc_feature (1)..(870): n is a, c, g, or t
atgtttgaagctctgatctgggatcgcaaagcgcctttccattatctcctggccgtggagagccattacgggcaaaactggatcatggaagacccttatgaaaaatgggtggaacagatcacgccctttgaccggcatctcttcggcgccgcgcgccattacagattgtttgaaaaaatgggggcgcatctgattgagcaggacgggcgcaagggggtgtacttctcggtatgggcgccgaacgccgcgcgcgtcagcctggtgggcaatttcaataactgggacgggcgcaaggacgcgatggaacttttgcacgacgtcggtgtgtgggtgctgtttaagccgggtatgtgcgaaggggatatctacaaatacgaaatcaaaacccgtgacgggcgtatcctgatgaaggccgacccctacgccttcgccgccgagctcaggccggagaccgcctccgtggtgcatgagcttggaaaatacgcctggaacgatcaggattggctcacctggcgcgccgccgacgattttctctcccgcccgatatccatgtacgaggtgcattttggatcctggcggcgcaaggacggcggcgcttttttaagctaccgcgagtttgccgacagcctcattccttatgtcaaggatctgggcttcacccatatcgagctcatgccgatcgaggaacatccctttgacggctcatggggctaccaggtcacgggctatttcgcgcccacctcacgctacggcaaaccggacgatctcaaatattttattgagcgctgccatcaggagggcatcggcgtgatcctcgactgggtgcccgcgcattacccccaagacgcgcacggcctcgcggaattttga

SEQ ID NO: 76642 - protein, 289 aa, Unknown
  Obtained from environmental sample
  DOMAIN (59)...(142): Isoamylase N-terminal domain
  misc_feature (1)..(289): Xaa is any amino acid
MFEALIWDRKAPFHYLLAVESHYGQNWIMEDPYEKWVEQITPFDRHLFGAARHYRLFEKMGAHLIEQDGRKGVYFSVWAPNAARVSLVGNFNNWDGRKDAMELLHDVGVWVLFKPGMCEGDIYKYEIKTRDGRILMKADPYAFAAELRPETASVVHELGKYAWNDQDWLTWRAADDFLSRPISMYEVHFGSWRRKDGGAFLSYREFADSLIPYVKDLGFTHIELMPIEEHPFDGSWGYQVTGYFAPTSRYGKPDDLKYFIERCHQEGIGVILDWVPAHYPQDAHGLAEF

SEQ ID NO: 76643 - DNA, 312 bp, Unknown
  Obtained from environmental sample
  misc_feature (1)..(312): n is a, c, g, or t
atggcagtttcctacaaggattattatcaggttctgggggtggatcgctccgcgtccgaggcggagatttccaaggccttcaaaaagctggcccgcaagcatcacccggacctcaacgcgggcaacgcccaggccgaggaaaagttcaaagaggccaacgaggcctatgaggtgctcaaagacccggaaaaacgcaagctctacgatcagttgggccataactggaagcacgggcaacagttccagggcgcgccgggcttcgagaacatgcagttaccttcggcggcggcggaaattcggtctcgtccataa

SEQ ID NO: 76644 - protein, 103 aa, Unknown
  Obtained from environmental sample
  DOMAIN (7)...(69): DnaJ domain
  misc_feature (1)..(103): Xaa is any amino acid
MAVSYKDYYQVLGVDRSASEAEISKAFKKLARKHHPDLNAGNAQAEEKFKEANEAYEVLKDPEKRKLYDQLGHNWKHGQQFQGAPGFENMQLPSAAAEIRSRP

SEQ ID NO: 76645 - DNA, 468 bp, Unknown
  Obtained from environmental sample
  misc_feature (1)..(468): n is a, c, g, or t
atgcacatcagcttgctgcgccatgaggacggcgggcaggtattccgcgatcacttcaggttcagcgcgccccacgagcaatccttcgacttcggcgagttcaccttcatgcggccctgcgtaacggccataggctgctgccacctgctcacgcgcaaagccatggacgaggacggcccctttgacatccgcttttccnccagccagagcgacgacgtggatcacgacatgcgcgcctgtctggccggacgtatgccgatctacaacggccacctgcgcgtgctgcacaagcgcagcaccggctaccacaaaacgcgcgagcgccgcggccgggcgagtgccgtgggcaactggtacaagcttcaggcctcgtatagcgaagaggaagcaacgcgcatctgcgagctggatcaaaggacgatgtgggaagatctgcaacagcggcttgagatcatccgcgaaacatag

SEQ ID NO: 76646 - protein, 155 aa, Unknown
  Obtained from environmental sample
  misc_feature (1)..(155): Xaa is any amino acid
MHISLLRHEDGGQVFRDHFRFSAPHEQSFDFGEFTFMRPCVTAIGCCHLLTRKAMDEDGPFDIRFSXSQSDDVDHDMRACLAGRMPIYNGHLRVLHKRSTGYHKTRERRGRASAVGNWYKLQASYSEEEATRICELDQRTMWEDLQQRLEIIRET

SEQ ID NO: 76647 - DNA, 750 bp, Unknown
  Obtained from environmental sample
  misc_feature (1)..(750): n is a, c, g, or t
atgaagtttcccaaaactactcccgtaaaaatcgtcgtaatcggagcgggcggaacgggcggttacgtaataccgcatatctaccgtatctgtttcgcggcggagcgtttaacgcgcgtcgtcgtgtgcgacggcgacattgtggagcaaaaaaacctaatccgccagaattttgtattacaagacgtaggcgaaaacaaagcgaaagtgttagccgagagatacgcggcggcgtttggaatcgaggcggaatacgtcccgcggtttatcgaggacgaggaaacgctgatggaactaataaagccggaaagaatgcaggaatacccgattatttacagcagaacaatccttatcggagccgttgacaacaaccgttcgcggcaaatctgccataacgcttttaagaagtcggagaacttggtatacattgactccggcaacggcgaaagcacggggcaggtcgtatgcggaatacgtcaaaaaggaaaaacgctgtacaagcccgtatgttcggtttatccggatatgcttgaaacttccgatttactgccgacggaaatgtcgtgcgccgagcgggcggtatccgcgccgcagtcggtaacggctaacttaatggcggcgacggcggtgacttcgttcctgtacaaccttttaataaggggcgaattgacttcaaggcgggtgactttctcggcgaaacaagtcaatatgcgcgcggaaatatcggcgcgtacagtcaagactgcttag

SEQ ID NO: 76648 - protein, 249 aa, Unknown
  Obtained from environmental sample
  DOMAIN (7)...(158): ThiF family
  misc_feature (1)..(249): Xaa is any amino acid
MKFPKTTPVKIVVIGAGGTGGYVIPHIYRICFAAERLTRVVVCDGDIVEQKNLIRQNFVLQDVGENKAKVLAERYAAAFGIEAEYVPRFIEDEETLMELIKPERMQEYPIIYSRTILIGAVDNNRSRQICHNAFKKSENLVYIDSGNGESTGQVVCGIRQKGKTLYKPVCSVYPDMLETSDLLPTEMSCAERAVSAPQSVTANLMAATAVTSFLYNLLIRGELTSRRVTFSAKQVNMRAEISARTVKTA

SEQ ID NO: 76649 - DNA, 702 bp, Unknown
  Obtained from environmental sample
  misc_feature (1)..(702): n is a, c, g, or t
ttgtctgtggttcgggaatggggcgtcggctcaaaacgcgcggaacggacgttcctgctcgaatcgttaaaatatctgacgtcaggcggcgtattggtctacattataccgtactaccgcttaaccgtagatatatgctctatacttgccgagaacttcgacgatattatggtttacaaatttgccgacggcgaatttaaaaagtacaggcaaattgtcgttttcggcaggctgaaacagcgcgataccgccgacgcgggcgaactgacgcggttgtcgcttaatcccgatacgattgcgccgattgcggaactgcaagcgaacagctacccgctgcccgaaaaggaaacggcggtaagactgttcaaaggcgcggagtttaacgtaaacgagcttgcggcgcagttaagacagtcaaacagcctaaaattattgtttgacaaaagcaaaatcgactctctgcaccgcaatccgctgttaccgcttaaaatcggacaaatagggttaatcggcgggagcgggctgatgaacggcttaatcgagtgcggcgagccgcacattatcaaaggcagaatctttaaggaaacggtcgtaacgcggtcggacgacgcggcgcacggaattatagaaatccgcgaagtcacgtcaaacactatggcatttaacgtgctgacggcggacggaattaaacggctggcttaa

SEQ ID NO: 76650 - protein, 233 aa, Unknown
  Obtained from environmental sample
  misc_feature (1)..(233): Xaa is any amino acid
MSVVREWGVGSKRAERTFLLESLKYLTSGGVLVYIIPYYRLTVDICSILAENFDDIMVYKFADGEFKKYRQIVVFGRLKQRDTADAGELTRLSLNPDTIAPIAELQANSYPLPEKETAVRLFKGAEFNVNELAAQLRQSNSLKLLFDKSKIDSLHRNPLLPLKIGQIGLIGGSGLMNGLIECGEPHIIKGRIFKETVVTRSDDAAHGIIEIREVTSNTMAFNVLTADGIKRLA

SEQ ID NO: 76651 - DNA, 519 bp, Unknown
  Obtained from environmental sample
  misc_feature (1)..(519): n is a, c, g, or t
gtgaaagcgtatttttcctacatcgccgccgccacagggcaaagcgtcgaaaccgtgctgatgctgtttaacaacaactactcagccagccgcgccaccctcatcctcacatggcgcatagccgaacagcgcaggtgggaaatggactactacgtcctcggccccatctacgaaatgtggctcgccgaagaaatcgccgccggcagggtaagcgcgccgggatggcaagacccgcgcctgagagccgcgtggacggcgcaccgcttcaacgggctgagtatgcccgtgatcgaccccgtgaagaccatgcaggcggcgaagatggctcttgaagtaagcgcgacgacccttgaggacaccgcgcaggaatacaacgattccgactttgaggcgaactgtattaaaaacagggaaggctaccagaacctgccgaagccgccgtggaatcttgacggcgacaaaaagcccggaaggaatgaaaacgaagaggatagcaaaaaagacgaaaacagcgcttga

SEQ ID NO: 76652 - protein, 172 aa, Unknown
  Obtained from environmental sample
  misc_feature (1)..(172): Xaa is any amino acid
MKAYFSYIAAATGQSVETVLMLFNNNYSASRATLILTWRIAEQRRWEMDYYVLGPIYEMWLAEEIAAGRVSAPGWQDPRLRAAWTAHRFNGLSMPVIDPVKTMQAAKMALEVSATTLEDTAQEYNDSDFEANCIKNREGYQNLPKPPWNLDGDKKPGRNENEEDSKKDENSA

SEQ ID NO: 76653 - DNA, 723 bp, Unknown
  Obtained from environmental sample
  misc_feature (1)..(723): n is a, c, g, or t
atgggcgtaggcaaaaattatcggacgtggagcattttgtacaagagcatactcggcgcgacagacaacgaattttcgggcgcgtggcaaaagttaagggaatgggcggcggaaacggaactgaccttcacccgcgaagacggcgtgcggttatggccgcagataatcggcatagactcaggcgaccagcccgaaacggtgtaccgcttctgcgagacattcgggcggcgcgtattcccgattaaaggcttcggaaaaatgacggcgagaaaaaacgaaaaaggcgacctgccgttcgggtttaagaaataccgccccgcgaaacttgacaacagcgacaaccgcgtgctggaaattaacacctggcattacaaaggcaacttatactcatacctcaaagtcgagcgcaaaaataccgagccgcaaaactggggcttctgcgccttcccccgcgactaccccgacgaatacttcgccatgctgaccggcgaggaaaagcgcatggacggcagctaccacccgatacgcccccgcgtggaggctttggactgccgcgtgtacaatctcgcgctgtcggatttttacctcgagtcccagcttcaggactggaaggcgcattggaaaaacaagggcgtaggggtgatcgggctgcaaaaaatagacactatgtacgtgctggactttatcgaaggcagcccgaatttttcctatccgatggcttga

SEQ ID NO: 76654 - protein, 240 aa, Unknown
  Obtained from environmental sample
  misc_feature (1)..(240): Xaa is any amino acid
MGVGKNYRTWSILYKSILGATDNEFSGAWQKLREWAAETELTFTREDGVRLWPQIIGIDSGDQPETVYRFCETFGRRVFPIKGFGKMTARKNEKGDLPFGFKKYRPAKLDNSDNRVLEINTWHYKGNLYSYLKVERKNTEPQNWGFCAFPRDYPDEYFAMLTGEEKRMDGSYHPIRPRVEALDCRVYNLALSDFYLESQLQDWKAHWKNKGVGVIGLQKIDTMYVLDFIEGSPNFSYPMA

SEQ ID NO: 76655 - DNA, 759 bp, Unknown
  Obtained from environmental sample
  misc_feature (1)..(759): n is a, c, g, or t
gtgggtcttgatacaaacgggactattccaaaatccgatattgactttttgagcaatctggaattcggcacccgtcaaaataagcctctctacatcgttgccaataaagcccagttaaaaacaaaagatgacatagaaaacatactggataaatttgaagagacgcttgatgattttgatatttcctatgccggtatatcggcgtacaattccatgaaaaaagaactgcacgccagccggaaaagcgatatttatgaatttcttgccgggcataacaagccgagcaaaaaatacgctgaattaaagggaatgttacatgacgtattcaagcaatatgtgggaaaagttcatgaagacgacgaagaaaagaataccaaacgcaaggaagtaaaaacgctgttgttaaacgcttttgaaggcgggaatatcggccttgacgacacttccagtaaattggaggaaggcttgaataaattactgcgttattttcaatcaaaagaagatttagataaacgtatacagcgggttaccatgacaagggataaattcatggcttgcctggataaattttgtgacgctatgggtattgagcgtaaagaagaacgattttgtacaaattgcggcgatccgattgaaggtaatagaactcgatgtaaaaaatgttctacaagtgaagcaagattctgccaacacagcggaanagaaattatncagaanaatgccgtattttgcgctgaatgcggcgagaagttgtattga

SEQ ID NO: 76656 - protein, 252 aa, Unknown
  Obtained from environmental sample
  misc_feature (1)..(252): Xaa is any amino acid
MGLDTNGTIPKSDIDFLSNLEFGTRQNKPLYIVANKAQLKTKDDIENILDKFEETLDDFDISYAGISAYNSMKKELHASRKSDIYEFLAGHNKPSKKYAELKGMLHDVFKQYVGKVHEDDEEKNTKRKEVKTLLLNAFEGGNIGLDDTSSKLEEGLNKLLRYFQSKEDLDKRIQRVTMTRDKFMACLDKFCDAMGIERKEERFCTNCGDPIEGNRTRCKKCSTSEARFCQHSGXEIXQXNAVFCAECGEKLY

SEQ ID NO: 76657 - DNA, 399 bp, Unknown
  Obtained from environmental sample
  misc_feature (1)..(399): n is a, c, g, or t
atgagagtgagtatgaaaaaagattttaatatagaattaaaacggcagtctatacaagatttacttgactctagaaaaaaccaagaagaaaaaaatgttctgggacaattttcaacccccaaattattagcagattcaattttaaaagttgctctttcgtatattaatagtgaagaaataagatttcttgatacttctattggaacaggagtatttttttcatcattaattaatctttgtaataaaaaaaatatagaatatgcttgtggatatgaaattgataaacattacgcaattcctgcaattgaattatggaaaaatgaaaagatcaattattttgtaggtgatttttttgattttgtacctcctaaaaataatgaaaaatacaatattatgtag

SEQ ID NO: 76658 - protein, 132 aa, Unknown
  Obtained from environmental sample
  misc_feature (1)..(132): Xaa is any amino acid
MRVSMKKDFNIELKRQSIQDLLDSRKNQEEKNVLGQFSTPKLLADSILKVALSYINSEEIRFLDTSIGTGVFFSSLINLCNKKNIEYACGYEIDKHYAIPAIELWKNEKINYFVGDFFDFVPPKNNEKYNIM

SEQ ID NO: 76659 - DNA, 300 bp, Unknown
  Obtained from environmental sample
  misc_feature (1)..(300): n is a, c, g, or t
atggatacatctattggttatgtaaatatacccgttgatattgtaataaaaccattgaataataataaacccgtacttattgaagcaaaatcggcaggtgattttactaatgtaaataaaagacgtaaagaagaagctcaaaaaatgtcccaactacgtaatacatacggaaataatattaattttattctatttttatgtggttattttgatacaggatatttaggttatgaagctgcagaaggtattgattggatatgggaacattcgattaatgatttggaatattttttatcatga

SEQ ID NO: 76660 - protein, 99 aa, Unknown
  Obtained from environmental sample
  misc_feature (1)..(99): Xaa is any amino acid
MDTSIGYVNIPVDIVIKPLNNNKPVLIEAKSAGDFTNVNKRRKEEAQKMSQLRNTYGNNINFILFLCGYFDTGYLGYEAAEGIDWIWEHSINDLEYFLS

SEQ ID NO: 76661 - DNA, 417 bp, Unknown
  Obtained from environmental sample
  misc_feature (1)..(417): n is a, c, g, or t
ttgagcgccataagaaccgaggagttcaaagacctcgaacccgagattgtggaggtaatggagcgcgcgcacggcatctccatggacgcccccataacgagcatgcgccaagaggacgacagcgtcaagaccatgcaagatgtcttgggcgaagacccggagcaggacgaggacagcatgcgcaaggagctgaacgaggcgctcaacagcgtgctgcagttcgtgtccggcagggaggagcggatactgcgcatgtactacgggctgaacttctccaagcagtttacgctggaggagatagggcacgagttgaatttgacgcgcgagcgcgtaaggatcatcagggataggtcgctgcgcaaactgatgcagaacccggcgtcgcgtgaaaagctcagcccgtttttcacggcgtaa

SEQ ID NO: 76662 - protein, 138 aa, Unknown
  Obtained from environmental sample
  DOMAIN (71)...(124): Sigma-70, region 4
  misc_feature (1)..(138): Xaa is any amino acid
MSAIRTEEFKDLEPEIVEVMERAHGISMDAPITSMRQEDDSVKTMQDVLGEDPEQDEDSMRKELNEALNSVLQFVSGREERILRMYYGLNFSKQFTLEEIGHELNLTRERVRIIRDRSLRKLMQNPASREKLSPFFTA

SEQ ID NO: 76663 - DNA, 840 bp, Unknown
  Obtained from environmental sample
  misc_feature (1)..(840): n is a, c, g, or t
ttgggatgcgagctgcaacaggcggcggcggattttccgcaactgtcgtttatatatgccgatgtggatgagttggacattagaaaaggcgacgatgtgcgtcagtttatggaactgcaccggcctgcgttcattgtcaatgcggcggcatacacagcggtggacaaggccgaagacgaacgcgacgcagctgtgctggtcaatgccgtagctgtcggaaaccttgtaaaagcagcgtttgaagtgaatgcatatttgttgcacatttctaccgattatgtgttcgacggcaagaaaaaaacgccatacgtagagaccgacacggtaaacccgatgtcggcctacggatacacgaagcttgaaggcgagcaggcagtagcttcctacaacaaaggaatgacggtgcgtaccgcatggctctactcgtccggcggcaacaattttgtaaacaccatgctgcgtctgggcgcagagcgtgcggaactgaacgtggtcaacgaccaacatgggtcgcctacttatgccgccgatttagcccgcgccctgttgcaaataatcgctaaaataacggcgcaacctaaagtgtttgtccccggcatttaccactacaccaacgaaggcgtgtgcacgtggtgcgactttgctaaacgcattatgcaactgggacgccgctcctgcaaggtgttgccgtgcgaaacggccgactatcctaccaaagcgcaccgcccgcaatacagcgtgttgagtaaagaaaaaatcaaacagacctacggaattgccatccccacatgggaagacgcattaacccgttgttttgaaaaaataaataatattaaatag

SEQ ID NO: 76664 - protein, 279 aa, Unknown
  Obtained from environmental sample
  DOMAIN (1)...(199): NAD dependent epimerase/dehydratase family
  misc_feature (1)..(279): Xaa is any amino acid
MGCELQQAAADFPQLSFIYADVDELDIRKGDDVRQFMELHRPAFIVNAAAYTAVDKAEDERDAAVLVNAVAVGNLVKAAFEVNAYLLHISTDYVFDGKKKTPYVETDTVNPMSAYGYTKLEGEQAVASYNKGMTVRTAWLYSSGGNNFVNTMLRLGAERAELNVVNDQHGSPTYAADLARALLQIIAKITAQPKVFVPGIYHYTNEGVCTWCDFAKRIMQLGRRSCKVLPCETADYPTKAHRPQYSVLSKEKIKQTYGIAIPTWEDALTRCFEKINNIK

SEQ ID NO: 76665 - DNA, 507 bp, Unknown
  Obtained from environmental sample
  misc_feature (1)..(507): n is a, c, g, or t
ttggattcaggggatatccaggctggccgcttcgctgacctcggcggtggagggcttgaagccgcccgcctcaaagacggtgtggggggcctattaccaggataccaactacacccaagccggagccgaagacaaggcccgcctggtttccgccgcggcggccgctcatcctggcgccttggccgtggacctgggggccaacacgggaatcttcagccggcttttggccccgcatttcaccacggtcctggccgccgacctggacccggtggccgtggacaatcattatctccatttgaaggccaaggggccgggcaacattctgccgctcttgcaggatttggccaacccttccccctccctgggttgggccgaagaggagcgggattctttttcccggcgggtaaaggccgatttcatatcagccctggctctggtccatcacttggtcttcagcgccggcctgcccttggccaagatcgccgactatttggcccgcctccttga

SEQ ID NO: 76666 - protein, 168 aa, Unknown
  Obtained from environmental sample
  misc_feature (1)..(168): Xaa is any amino acid
MDSGDIQAGRFADLGGGGLEAARLKDGVGGLLPGYQLHPSRSRRQGPPGFRRGGRSSWRLGRGPGGQHGNLQPAFGPAFHHGPGRRPGPGGRGQSLSPFEGQGAGQHSAALAGFGQPFPLPGLGRRGAGFFFPAGKGRFHISPGSGPSLGLQRRPALGQDRRLFGPPP

SEQ ID NO: 76667 - DNA, 672 bp, Unknown
  Obtained from environmental sample
  misc_feature (1)..(672): n is a, c, g, or t
gtggagggcttgaagccgcccgcctcaaagacggtgtggggggcctattaccaggataccaactacacccaagccggagccgaagacaaggcccgcctggtttccgccgcggcggccgctcatcctggcgccttggccgtggacctgggggccaacacgggaatcttcagccggcttttggccccgcatttcaccacggtcctggccgccgacctggacccggtggccgtggacaatcattatctccatttgaaggccaaggggccgggcaacattctgccgctcttgcaggatttggccaacccttccccctccctgggttgggccgaagaggagcgggattctttttcccggcgggtaaaggccgatttcatatcagccctggctctggtccatcacttggtcttcagcgccggcctgcccttggccaagatcgccgactatttggcccgcctccttgatgactccggctgcctgcttctggaatttgtccccctggaagattcccaggtgaggcgcttgctgtccgcccgggagcatgtcttccccgaatataatctctcaggctgtctggaagccttcagccgccatttcatcttgcaatctcaatacgccatcagggaaagcccgcgcaccctcctggtttggctaaaaaagggagctcccgtatga

SEQ ID NO: 76668 - protein, 223 aa, Unknown
  Obtained from environmental sample
  DOMAIN (47)...(159): Methyltransferase domain
  misc_feature (1)..(223): Xaa is any amino acid
MEGLKPPASKTVWGAYYQDTNYTQAGAEDKARLVSAAAAAHPGALAVDLGANTGIFSRLLAPHFTTVLAADLDPVAVDNHYLHLKAKGPGNILPLLQDLANPSPSLGWAEEERDSFSRRVKADFISALALVHHLVFSAGLPLAKIADYLARLLDDSGCLLLEFVPLEDSQVRRLLSAREHVFPEYNLSGCLEAFSRHFILQSQYAIRESPRTLLVWLKKGAPV

SEQ ID NO: 76669 - DNA, 846 bp, Unknown
  Obtained from environmental sample
  misc_feature (1)..(846): n is a, c, g, or t
ttgggaacaagcgtggctccgtaccgcgaatacggccagaccttcggttcggcgttccgggacaagacgatcattttggaaaccctgatacttttggggggttccgatgaggatgccaaaaacctttttgagcaagtgtcgaataccctttcggcggacggctggctttccacccaggaaacatcctttgccctaagggcagccatgctttttatgcagggcgcgggtcaggggggagcccgaaacggagaactaacggtggagtattcatttggagcagggaacggacggaattccgccagctttagttcccagacaacccagatttccctggggaaacctcccggcgcgtccggcgctttctccgtcaagaatgtttcggcctcgccggtttatgcccgcattgccgtgcgggggctccctgaagaagggaaggaacagcccctttcaaacggcctcagtcttgcggttgaataccgcaccgattccggagttgtgaacgccgcttcgctcaatcccggagccgacatgacggtacaggttaccgttaccaatacccgccgggtcaaagtggaaaatatagccctggttcaccagcttcccgcatcatgggaaatcattaacgaccggattggggcggaaggacaatcttcatcttcttcctttgattaccaggatattcgggacgatcgggttatgacctactttagcctggaaccaggcgcgtcaaagaccgtttccgtgcgggtaaacaacacatacgggggaaggtacttcccgtcggccattcatgcctatgccatgtacgatgaatctacggcggccctgattccgggggtgaggtag

SEQ ID NO: 76670 - protein, 281 aa, Unknown
  Obtained from environmental sample
  misc_feature (1)..(281): Xaa is any amino acid
MGTSVAPYREYGQTFGSAFRDKTIILETLILLGGSDEDAKNLFEQVSNTLSADGWLSTQETSFALRAAMLFMQGAGQGGARNGELTVEYSFGAGNGRNSASFSSQTTQISLGKPPGASGAFSVKNVSASPVYARIAVRGLPEEGKEQPLSNGLSLAVEYRTDSGVVNAASLNPGADMTVQVTVTNTRRVKVENIALVHQLPASWEIINDRIGAEGQSSSSSFDYQDIRDDRVMTYFSLEPGASKTVSVRVNNTYGGRYFPSAIHAYAMYDESTAALIPGVR

SEQ ID NO: 76671 - DNA, 300 bp, Unknown
  Obtained from environmental sample
  misc_feature (1)..(300): n is a, c, g, or t
ttgccccggaggaaaagccctatgccgaaactgcatcaagccgcccaggcggggacgctggaatcgtccgacatcctggtgaacattgctccggccgtgagcggcgccggaattacgctgcaactggtcagccccaccatgcggcagtatggggaacacatcaggagcatcatcctcggcgtcctgcgagagtgcggcgtgaaggatgcggcgattgacgccaacgacaagggcgcggtggacttcgttattgaagcccgcgtgaagaccgcgattcagcgcgcgatggaagcgtcgtag

SEQ ID NO: 76672 - protein, 99 aa, Unknown
  Obtained from environmental sample
  DOMAIN (8)...(99): Citrate lyase, gamma subunit
  misc_feature (1)..(99): Xaa is any amino acid
MPRRKSPMPKLHQAAQAGTLESSDILVNIAPAVSGAGITLQLVSPTMRQYGEHIRSIILGVLRECGVKDAAIDANDKGAVDFVIEARVKTAIQRAMEAS

SEQ ID NO: 76673 - DNA, 327 bp, Unknown
  Obtained from environmental sample
  misc_feature (1)..(327): n is a, c, g, or t
ttgcaggagaccattatgcaggaaaaacaggaaaagctccgccgcacggtcatgtatgcagccggcaacaacgccgccctgttgcgtgacgcgggaatttacggcgccgacagcatcatctacgatgtggaagattccgtttccgtttttgaaaaggacagcgcccgccaattggtgtttcatgcgcttacccgcatgaggcgcacctgcgaggtgggagtgcgcatcaaccacatcagcaccccttggggacacaaggatctggaagtcctgctgcccgcgaagccggactatatccgcctgcccaagggcgaaagcggcgactaa

SEQ ID NO: 76674 - protein, 108 aa, Unknown
  Obtained from environmental sample
  misc_feature (1)..(108): Xaa is any amino acid
MQETIMQEKQEKLRRTVMYAAGNNAALLRDAGIYGADSIIYDVEDSVSVFEKDSARQLVFHALTRMRRTCEVGVRINHISTPWGHKDLEVLLPAKPDYIRLPKGESGD

SEQ ID NO: 76675 - DNA, 762 bp, Unknown
  Obtained from environmental sample
  misc_feature (1)..(762): n is a, c, g, or t
atgccggccgcggtatggaacacgcgggctactcaaagaaggctcgccatgcagctcgagcgggcgcgtttcggtcgccaccgtttcttgttgcgcgatatgatgctgcgcgacaagataacggcctccatgggcatcggcggcattgtgggtcccttctgcgatctgctggacgagggcctgatccggacgctnttcgacacccagagttttgacgatcgcaccatccaatccctgcgcgacaaccccaaacaccaggaatacgactgcggtttctacgccaacccctggaacaaggcgaccatggtcaattctctggattatgtggtgctgggcgctacggaaatggacgttcattttaacgtcaatgtgcttaccgattccaacggcattatgatgggcgcggtgggcggacatcctgacgccgccgccggggccaaatgcaccatcattaccgcgccgcttctgcgcggacggctccccatggtcacggacgcggtacagaccatatgcacacccggcgaagtcgtggatgtggttattacggaccgcggcgtggccgtcaatcccggacgcaaggatttgctggacaacctgaagggttcgggtttgccgctcaagaccatagaggaactgcgggatttgtcttatgaactggcgggctgcaagcccgaagcgctggaattctccgacgagatcacgggtgtggtcgagtaccgcgacggcacggcgctggatgttgtccgcagacctgtgggatag

SEQ ID NO: 76676 - protein, 253 aa, Unknown
  Obtained from environmental sample
  DOMAIN (4)...(251): Citrate lyase, alpha subunit (CitF)
  misc_feature (1)..(253): Xaa is any amino acid
MPAAVWNTRATQRRLAMQLERARFGRHRFLLRDMMLRDKITASMGIGGIVGPFCDLLDEGLIRTLFDTQSFDDRTIQSLRDNPKHQEYDCGFYANPWNKATMVNSLDYVVLGATEMDVHFNVNVLTDSNGIMMGAVGGHPDAAAGAKCTIITAPLLRGRLPMVTDAVQTICTPGEVVDVVITDRGVAVNPGRKDLLDNLKGSGLPLKTIEELRDLSYELAGCKPEALEFSDEITGVVEYRDGTALDVVRRPVG

SEQ ID NO: 76677 - DNA, 687 bp, Unknown
  Obtained from environmental sample
  misc_feature (1)..(687): n is a, c, g, or t
gtgctatccaggtcaaaaagaatatactttatagaagggtgcatactgcatcctaacaggaaaggagttttcatgaaaatagtgataaccgacgatcgttttggacaaaacaaggaagaaaggcggatattttccgatgcggagctccttgtagcggattgccatactgaagaagaactgatccgctcctgtgccggggcagacggagtcctcttgaaccaggcccccatgactggcaaggttatcaaaaccctggataagtgccaggttatttcccggtacggcataggctatgacaatgttgatctgttggcagcggaagaagccgggatatgggtaaccaatgtccccggctactgttccgaagaagttgcggaacatactttagggctcctcctttcctgcgttagggctattccggaaaaagaccgggaaatccgctccggcgcatggaacatcaaccggcccatcaggcgtatgtccggccgcgtcttagggatcgtcggtttcggtaccacaggcagggcgttctgggaaaaagttcagggctttgcgttcagccgcatcctggtggcagatccccggggggaagccaagcttgccgcgctacgaaaagcccgcgccggcggccatctttttaacactacccagatggtatcctttgaagagctgctcccgccaaagtga

SEQ ID NO: 76678 - protein, 228 aa, Unknown
  Obtained from environmental sample
  DOMAIN (129)...(224): D-isomer specific 2-hydroxyacid dehydrogenase, NAD binding domain
  misc_feature (1)..(228): Xaa is any amino acid
MLSRSKRIYFIEGCILHPNRKGVFMKIVITDDRFGQNKEERRIFSDAELLVADCHTEEELIRSCAGADGVLLNQAPMTGKVIKTLDKCQVISRYGIGYDNVDLLAAEEAGIWVTNVPGYCSEEVAEHTLGLLLSCVRAIPEKDREIRSGAWNINRPIRRMSGRVLGIVGFGTTGRAFWEKVQGFAFSRILVADPRGEAKLAALRKARAGGHLFNTTQMVSFEELLPPK

SEQ ID NO: 76679 - DNA, 774 bp, Unknown
  Obtained from environmental sample
  misc_feature (1)..(774): n is a, c, g, or t
ttgactgtgaccgccccttccagctcaagcgtagctgcaagcagcagcgcaggtcagagtagtagcagtgttgcaagcaaccagagcagctcaagtgctgccgtcacgctaacttgcactttgcctacaacatcaccgaccgctggaaccgcagttaatgcacagacacaaagaagttacctgaaatgcagcaatacaaatgtggctcccactaccggtaaccctacgtggaatggaactccgagggcacctatttctggtaccacgtgggcagctgcagacaattatacaggtattaccgtgactgcaaattgcggaactggtgctgcagcaagtgttaccggtagttgcggcaatataaccatcgtagggacacaggcaagcagcagcagcgtagcgccgagcagctcaagtgcaccaccagtcacccagagcagcaacagcggtgggggcgatggcagctatactgtgtccattgacttcaatagtaataatctgaacgctgccacttggtctcctcaattgtcgagtaacgttgaatatactgtcactagcataggttctacatgcaataatgttaaattcgatacaaaatatcatagtaatgcaccgacaaaaacttctgttaaagtcaatagcggctctcctgtggaatgtacagattcaaataataattgctcaaatttaaatttaaatccaaaacctaaagtcggtgacaaattgaccgttgtaaatgcggaagaactagcanagatgtggtgtagcaattggtga

SEQ ID NO: 76680 - protein, 257 aa, Unknown
  Obtained from environmental sample
  SIGNAL (1)...(25)
  misc_feature (1)..(257): Xaa is any amino acid
MTVTAPSSSSVAASSSAGQSSSSVASNQSSSSAAVTLTCTLPTTSPTAGTAVNAQTQRSYLKCSNTNVAPTTGNPTWNGTPRAPISGTTWAAADNYTGITVTANCGTGAAASVTGSCGNITIVGTQASSSSVAPSSSSAPPVTQSSNSGGGDGSYTVSIDFNSNNLNAATWSPQLSSNVEYTVTSIGSTCNNVKFDTKYHSNAPTKTSVKVNSGSPVECTDSNNNCSNLNLNPKPKVGDKLTVVNAEELAXMWCSNW

SEQ ID NO: 76681 - DNA, 603 bp, Unknown
  Obtained from environmental sample
  misc_feature (1)..(603): n is a, c, g, or t
atggaacaattgaccttcgaaaaaaaacataaggaacgancgttttatcttcaacgcatgttagggattgcgttgttgagcattttgctgttggtgacgggtattttggtgtatattcatgtccaaaaaagaaaattagagaaaacgtataaaattttggtatccaaaaatattgaaatcgtcgaactgcaagacaatccgcacaaaaccgataagaaaaagtacgaaaaaagcgcgctgaccgatgatttgcaacggaaacttttagataaaatcttagccgttatggacaacgaaaccattattttcgattcggaatttacgctggatgacttggccgaattggtgaagtccaaccaactgtatatttctcaggccataaacctcggattgggaaagaatttccgctccctgttaagcgaataccgtatccgtaaagcgcaacgcttattgtcagaccctgataaagccgccaaatacaccattgaatcggtggccaaccaaatcggcttcaaatcgcagagcgcatttcgcaaagcctttaaagacatcaccggtgtcaatccaaacttttatttgaaatctctgctggaagataaataa

SEQ ID NO: 76682 - protein, 200 aa, Unknown
  Obtained from environmental sample
  DOMAIN (146)...(194): Bacterial regulatory helix-turn-helix proteins, AraC family
  misc_feature (1)..(200): Xaa is any amino acid
MEQLTFEKKHKERXFYLQRMLGIALLSILLLVTGILVYIHVQKRKLEKTYKILVSKNIEIVELQDNPHKTDKKKYEKSALTDDLQRKLLDKILAVMDNETIIFDSEFTLDDLAELVKSNQLYISQAINLGLGKNFRSLLSEYRIRKAQRLLSDPDKAAKYTIESVANQIGFKSQSAFRKAFKDITGVNPNFYLKSLLEDK

SEQ ID NO: 76683 - DNA, 312 bp, Unknown
  Obtained from environmental sample
  misc_feature (1)..(312): n is a, c, g, or t
gtgggcctggtgaggctccggctgtggcggcccttcccggtggaggaattccgggtggccgtggccggggccaagaacctggccgtggttgaccgggccatgatcctgggcttccccgaaggcccggtggccacggaaataagggctcttttgtatcatgagaagaacaagccccaaatgaccaacttcgtcctggggctgggcgggcgcgatgtccagcgcgaccacttcaaatatatcgtggacaaggttatggaactgggggcctccgggcgccagggccgctatgagatggtgggggtgctggaatga

SEQ ID NO: 76684 - protein, 103 aa, Unknown
  Obtained from environmental sample
  misc_feature (1)..(103): Xaa is any amino acid
MGLVRLRLWRPFPVEEFRVAVAGAKNLAVVDRAMILGFPEGPVATEIRALLYHEKNKPQMTNFVLGLGGRDVQRDHFKYIVDKVMELGASGRQGRYEMVGVLE

SEQ ID NO: 76685 - DNA, 378 bp, Unknown
  Obtained from environmental sample
  misc_feature (1)..(378): n is a, c, g, or t
atgtcaggcgacggcaagccgttaaacgcgacggcaagcgatccgcaggttccggcggcgaggcagattttgtttgaagccaacgacgcggacgcttcgacgattaaagacgcggcagagtggcgtatgctccgtattgaattggaggcactgagcgtgaattttcctgtgagcgactggttcgacggtaacggcaaactgtggaagccgaacaccatcgtgaccgccaaagcgccggtgctggacatacccgacgagaaaaactacgtcgtcaaaaacgtggaattcgcgtggacggcgagcgagcggtcggcgcagttgacgctggttccgccgttaaaggtcgaaggcggcaaattgaaggtgggggtgaagtga

SEQ ID NO: 76686 - protein, 125 aa, Unknown
  Obtained from environmental sample
  misc_feature (1)..(125): Xaa is any amino acid
MSGDGKPLNATASDPQVPAARQILFEANDADASTIKDAAEWRMLRIELEALSVNFPVSDWFDGNGKLWKPNTIVTAKAPVLDIPDEKNYVVKNVEFAWTASERSAQLTLVPPLKVEGGKLKVGVK

SEQ ID NO: 76687 - DNA, 690 bp, Unknown
  Obtained from environmental sample
  misc_feature (1)..(690): n is a, c, g, or t
ttgagcgtagagagatggaaattgattttagagtctatattatccgtagcggggttgttaggcgggatgatgctcgcgtatctatgcgtaatggacataggattatcaactgatctattaggaataataaccgtattttctctattctcatggctagggataggagtcggaggcaatttaagaatacttaaatttgaaactcaccgttgggtttacgcttatcgcgcatcccgtcaagacggcgtttctttcgtgacggcgcttggatacactctctttctttggtgtttgtacgggtcggttaaattattgattagatctttagccgggccgataatccctattattaaaatcagagaatactatgggaatatgcaaatcgccagatcgtatataccaggtgcggatacgtctaaaaaatctgcgaaccgccgcgcacatacactgccggccccaaaacacgtcgatcaatcacccgcacaaagcgcttcatcacccgcacaaagcgcttcatcacctgtacaaagcgctgcgtcaccgatacaaagcgttgcatcaccggtacaaagcgtcgcgccaccggtacaaagcgttgcatcaccggtacaaagcgtcgcgccacccgcacaaagcgtcgtgtctcccgtgcaagcgcgctacccgacaacgattacccggcgccggtattaa

SEQ ID NO: 76688 - protein, 229 aa, Unknown
  Obtained from environmental sample
  misc_feature (1)..(229): Xaa is any amino acid
MSVERWKLILESILSVAGLLGGMMLAYLCVMDIGLSTDLLGIITVFSLFSWLGIGVGGNLRILKFETHRWVYAYRASRQDGVSFVTALGYTLFLWCLYGSVKLLIRSLAGPIIPIIKIREYYGNMQIARSYIPGADTSKKSANRRAHTLPAPKHVDQSPAQSASSPAQSASSPVQSAASPIQSVASPVQSVAPPVQSVASPVQSVAPPAQSVVSPVQARYPTTITRRRY

SEQ ID NO: 76689 - DNA, 660 bp, Unknown
  Obtained from environmental sample
  misc_feature (1)..(660): n is a, c, g, or t
gtgcgggcaaaaaaactgacgctaggccgctccataatgtcaaaccgcctatgggacgtcaagggtcgctattgggtcggcagcgcgccagagaccgttttgccggatatcgccgtgatgctctttatcgacggctccggttccatgcaaggggcgaaaaaagccaacgccatattcgcgtcggtggttctatgcgaggtattggagaaaaacggcgtgactttcgccgtggtcgagcataggggcgactacaacggcggtgtggatattaacgttctgcggccctttaaagctaaatcgcaagacaaatacaacattctaaagtgcgacgcctacggcggcacacgcgatggactgacgcttttatgggcaaaggattattttaagaagcacacctacgcggaaaaacgcctgctgatagccataacggacggcttgccggacgacaaagattatgaaccgccggtatcgttgcaagacgccaaagcgtcggtcgccgtgcttaaaaaagccgggatagagaccgtcgcgctggcgcttgtgaatgataactacgaactctcggccgtagagacgatatacgacagcatcgccctatgcggcaacgcggaagagctgcctagcaaggtcatggaggttgtcggcaaggttctgaggtga

SEQ ID NO: 76690 - protein, 219 aa, Unknown
  Obtained from environmental sample
  misc_feature (1)..(219): Xaa is any amino acid
MRAKKLTLGRSIMSNRLWDVKGRYWVGSAPETVLPDIAVMLFIDGSGSMQGAKKANAIFASVVLCEVLEKNGVTFAVVEHRGDYNGGVDINVLRPFKAKSQDKYNILKCDAYGGTRDGLTLLWAKDYFKKHTYAEKRLLIAITDGLPDDKDYEPPVSLQDAKASVAVLKKAGIETVALALVNDNYELSAVETIYDSIALCGNAEELPSKVMEVVGKVLR

SEQ ID NO: 76691 - DNA, 873 bp, Unknown
  Obtained from environmental sample
  misc_feature (1)..(873): n is a, c, g, or t
gtggcggcggatgggatccccaaccgcccctggcataaggcggctatggcaaatcccgataaaaccctgatagttgacccctatgtggacgcggaaaccggccagctcgtgattactatttcccggactgtccgggaccttcgcggcgtcatcgtcggagtgcttgcggttgacgtgtttcttgacaagcttaaggaaattgtactcagagaaaaaatcaccgatgatgggtccacggttttgatagattcagacgggctttatgtcctgcatcctgatataacctatgtgctggaaaaaaacctgtttgacgaaagaaaagagcttaacaggacaaggatcctcagcggcaatatgaacgtagagttccgcggggacacctatatcgcgtcctcgccggtccaggggacggagtggtattttgtttccatcggttctttgagtaccctgaaggccgattcccgccgtttgctggggtttgttactataatagcgctgggcatcgcggggttttccgcgctgattgccctgattctaagccgttccctcaccatgcccttcaagcggcttgtatcaaattttgagattatttcaaaaggagaccttaccgcttccacgccggattactcgtcccgggaagcgtccgccctgtcaagcgggtttaattactttgcgggcggaatcagttcgctggttaaaaacatcaaggacgcggcggggtacatgggaaaggtggcgaaagacctttccctgtccattgctgaaaacagcaggaacattaccgtggtaaaggatggggttgattctatcagaaccgatgtaggaagggagaataactccattgcccaaaatgaatccgcggtcaccaagtaa

SEQ ID NO: 76692 - protein, 290 aa, Unknown
  Obtained from environmental sample
  DOMAIN (161)...(230): HAMP domain
  misc_feature (1)..(290): Xaa is any amino acid
MAADGIPNRPWHKAAMANPDKTLIVDPYVDAETGQLVITISRTVRDLRGVIVGVLAVDVFLDKLKEIVLREKITDDGSTVLIDSDGLYVLHPDITYVLEKNLFDERKELNRTRILSGNMNVEFRGDTYIASSPVQGTEWYFVSIGSLSTLKADSRRLLGFVTIIALGIAGFSALIALILSRSLTMPFKRLVSNFEIISKGDLTASTPDYSSREASALSSGFNYFAGGISSLVKNIKDAAGYMGKVAKDLSLSIAENSRNITVVKDGVDSIRTDVGRENNSIAQNESAVTK

SEQ ID NO: 76693 - DNA, 729 bp, Unknown
  Obtained from environmental sample
  misc_feature (1)..(729): n is a, c, g, or t
ttggcgccggaccagaacaaccgtctcctccgagccttggacggcgaaagggtcaaaggggaactggcctgggtcttccccggctcgggcaaccattaccacggcctgggccggcggctggccatgtccttcccccacctcatgggccgcctggaagaccaggtcggccacttggccgaccatttccaaagcgcggttttctggggagcccagcctcgggaggccacccccctccaggccattttggggcaggtctccttcggccttttgggcgccgaagtgctggccgacttcaacatccgcccccaggcggtcctgggctattccctgggagagaccacggccctcttggccaccggggcctggaccgaccgggaggccctctgcgacgacctggtcaaatcaacccttttcaccaaggaactggccggcccctccctggcggcccgacgctatttccgctggccggccgaccggcccttcaaatgggtcacgggcgtcctctccaagccggccgccgaaatccgggccgccctggcccgcctctccgaaccttgggctggccgggttttcctattgtcggtcaacgcccccggcgaaagcgtggtgggcggcgaggagggcgcggtgcggacccttgtccagtccctggggagcagcctgagtcgcattggagggcgtggccgcggtccacaaccccaccgggccctcggccgatctgatccttga

SEQ ID NO: 76694 - protein, 242 aa, Unknown
  Obtained from environmental sample
  misc_feature (1)..(242): Xaa is any amino acid
MAPDQNNRLLRALDGERVKGELAWVFPGSGNHYHGLGRRLAMSFPHLMGRLEDQVGHLADHFQSAVFWGAQPREATPLQAILGQVSFGLLGAEVLADFNIRPQAVLGYSLGETTALLATGAWTDREALCDDLVKSTLFTKELAGPSLAARRYFRWPADRPFKWVTGVLSKPAAEIRAALARLSEPWAGRVFLLSVNAPGESVVGGEEGAVRTLVQSLGSSLSRIGGRGRGPQPHRALGRSDP

SEQ ID NO: 76695 - DNA, 978 bp, Unknown
  Obtained from environmental sample
  misc_feature (1)..(978): n is a, c, g, or t
gtgatgacggcctggatattcttaaccgctaggaacaaatgccccgagacgaagaaaacaatatccagttggcggatgtcctgggccccgcgcgggcggaaaaacgggcctgaagagcctgggcgaccgcttctgtccgaaatacggcgggctctccgaggcccggccgacctgagccatcctggcccggggcttcgcggaccttctggaactgctcaaaaaggcccgggcccgcttaaggggcgacaaccagcccttggcgccggaccagaacaaccgtctcctccgagccttggacggcgaaagggtcaaaggggaactggcctgggtcttccccggctcgggcaaccattaccacggcctgggccggcggctggccatgtccttcccccacctcatgggccgcctggaagaccaggtcggccacttggccgaccatttccaaagcgcggttttctggggagcccagcctcgggaggccacccccctccaggccattttggggcaggtctccttcggccttttgggcgccgaagtgctggccgacttcaacatccgcccccaggcggtcctgggctattccctgggagagaccacggccctcttggccaccggggcctggaccgaccgggaggccctctgcgacgacctggtcaaatcaacccttttcaccaaggaactggccggcccctccctggcggcccgacgctatttccgctggccggccgaccggcccttcaaatgggtcacgggcgtcctctccaagccggccgccgaaatccgggccgccctggcccgcctctccgaaccttgggctggccgggttttcctattgtcggtcaacgcccccggcgaaagcgtggtgggcggcgaggagggcgcggtgcggacccttgtccagtccctggggagcagcctgagtcgcattggagggcgtggccgcggtccacaaccccaccgggccctcggccgatctga

SEQ ID NO: 76696 - protein, 325 aa, Unknown
  Obtained from environmental sample
  misc_feature (1)..(325): Xaa is any amino acid
MMTAWIFLTARNKCPETKKTISSWRMSWAPRGRKNGPEEPGRPLLSEIRRALRGPADLSHPGPGLRGPSGTAQKGPGPLKGRQPALGAGPEQPSPPSLGRRKGQRGTGLGLPRLGQPLPRPGPAAGHVLPPPHGPPGRPGRPLGRPFPKRGFLGSPASGGHPPPGHFGAGLLRPFGRRSAGRLQHPPPGGPGLFPGRDHGPLGHRGLDRPGGPLRRPGQINPFHQGTGRPLPGGPTLFPLAGRPALQMGHGRPLQAGRRNPGRPGPPLRTLGWPGFPIVGQRPRRKRGGRRGGRGADPCPVPGEQPESHWRAWPRSTTPPGPRPI

SEQ ID NO: 76697 - DNA, 600 bp, Unknown
  Obtained from environmental sample
  misc_feature (1)..(600): n is a, c, g, or t
ttgatgcggtttaacagggagaaatatatgcgctttgcaaaatctgtggaaaaattacgcgccagcgagattagacaactgatgaagacagcgggagacccgtctgtcatttctttttcgggcggaatgcccaacggcgacctgtttcccgtggaagttatggacgaaataacaaaaaatttatcgcccgccgcaaaaaaagcggcctttcaatacgggcctacggacggttttcccgcgcttaaagagtcgctgggcgaatatctgaaagaaagaggcatgaatttggacgaaaacgccttgatgataacgaccggcgcgcagcaggcgataaatcttatagcanaggcgctaatagacccgcaggacaggatacttaccgaagacccgtcgtttataggcgcgctggcggcgtttaattcttacgacgcacgcatagacggcgtggcgctcgacgacgagggaatagacgtgtccgcactgaaatcggcggctttacagggagattttccaagtttttatacgtcatcccgtattttcagaatcccgctggtacgattatatcgccggcgcgcaaagaacagctgctgcgcacgatag

SEQ ID NO: 76698 - protein, 199 aa, Unknown
  Obtained from environmental sample
  misc_feature (1)..(199): Xaa is any amino acid
MMRFNREKYMRFAKSVEKLRASEIRQLMKTAGDPSVISFSGGMPNGDLFPVEVMDEITKNLSPAAKKAAFQYGPTDGFPALKESLGEYLKERGMNLDENALMITTGAQQAINLIAXALIDPQDRILTEDPSFIGALAAFNSYDARIDGVALDDEGIDVSALKSAALQGDFPSFYTSSRIFRIPLVRLYRRRAKNSCCAR

SEQ ID NO: 76699 - DNA, 852 bp, Unknown
  Obtained from environmental sample
  misc_feature (1)..(852): n is a, c, g, or t
gtggcagacaacggaaacccggcccctgctccgcaagttatagcctatggcggcaagatagttataccgcccattatggacagaaccgggtatggttttgacggttggtacacagacacgaattatactgtacaatgggatttttataacgatactgttaccgccaatccaaccaccctgtacgccaaatggtttgagattcggcattacactgtccggtttaacgcggacggaggaagcccggcccccgctgatcaagttattaccgacggcagcacagcggttatgccgccagccatgagcaaagacgattccggttttagcgggtggtacaccgatgaaacatatgccacactatggaacttttctaccattgtttctgataatattaccctgtacgccaggtgggtcgtaactccaaaattcactgtcaaatttgatgcggatgcaggaagcccggctcccgctgatcaaatcattgcatcagacggtatggtagtcatgccgcctgccatgaacaaaacgaatcctgtttccggttccagttatggttttggcggctggtttaaagacgatggttctgaatggaattttgataccgataaagtcagcggtaatattacactacacgccaagtgggttgaacctcccgtattttacaccggaacattcaatacgaacaatccggatcccactataacaataccaggtcaatatataattgaaaacggaaaaattgnagagccccttatcattaccatgaaacaccccggttattctttccccgggtgggataccgatgataacaaactctggaaatttcccggcagaatttgggggataaagaaatga

SEQ ID NO: 76700 - protein, 283 aa, Unknown
  Obtained from environmental sample
  misc_feature (1)..(283): Xaa is any amino acid
MADNGNPAPAPQVIAYGGKIVIPPIMDRTGYGFDGWYTDTNYTVQWDFYNDTVTANPTTLYAKWFEIRHYTVRFNADGGSPAPADQVITDGSTAVMPPAMSKDDSGFSGWYTDETYATLWNFSTIVSDNITLYARWVVTPKFTVKFDADAGSPAPADQIIASDGMVVMPPAMNKTNPVSGSSYGFGGWFKDDGSEWNFDTDKVSGNITLHAKWVEPPVFYTGTFNTNNPDPTITIPGQYIIENGKIXEPLIITMKHPGYSFPGWDTDDNKLWKFPGRIWGIKK

SEQ ID NO: 76701 - DNA, 483 bp, Unknown
  Obtained from environmental sample
  misc_feature (1)..(483): n is a, c, g, or t
gtgaccggccccatagcggtcgaaggggcggcccccggtgatgttcttaaagtggaagtgatcgcgcttgaaccccgcgttccgtatggcgtgatatccaatcgccattacttaggcgccttgcccggcgaatttcccgaagggccgaaaagtgagaaggacgccagccctgccgcgccggaaaagtaccacaatgtttccatcttcacgccggtggagcgccggggggatcgctggtacggcatcctggaatccggcggaaaacgaattgccttcccgctcagtccgtttcttggcctcatggggacgaccccaaatacgggagagagctggaactccattccgcccactcgtatcggaggcaatattgatatcaacgagttaggagtcggctcgaccttgtatctcccggtggagtgcctggagctctgttttacgttggggatccccattttcttcagggtgaccgcgaagtggctttga

SEQ ID NO: 76702 - protein, 160 aa, Unknown
  Obtained from environmental sample
  misc_feature (1)..(160): Xaa is any amino acid
MTGPIAVEGAAPGDVLKVEVIALEPRVPYGVISNRHYLGALPGEFPEGPKSEKDASPAAPEKYHNVSIFTPVERRGDRWYGILESGGKRIAFPLSPFLGLMGTTPNTGESWNSIPPTRIGGNIDINELGVGSTLYLPVECLELCFTLGIPIFFRVTAKWL

SEQ ID NO: 76703 - DNA, 327 bp, Unknown
  Obtained from environmental sample
  misc_feature (1)..(327): n is a, c, g, or t
gtgcctggagctctgttttacgttggggatccccattttcttcagggtgaccgcgaagtggctttgaccgccctcgaaggcgctctgcgcgggacgtttcgcctcacctactcaaaaaaggattcccgaaaatcccccaaacccatgcgaacaattggagatgcctttccccaaacgagcgtttctggattctggtcggttggaaaaaacctcaatgaacccttgaaaaaatcgttcgaaactccaaaactttcctcgccaaaaaatttggtcctgaaaccccacccgggtttaagcccaatcaaaaacccgcccccggaattataa

SEQ ID NO: 76704 - protein, 108 aa, Unknown
  Obtained from environmental sample
  misc_feature (1)..(108): Xaa is any amino acid
MPGALFYVGDPHFLQGDREVALTALEGALRGTFRLTYSKKDSRKSPKPMRTIGDAFPQTSVSGFWSVGKNLNEPLKKSFETPKLSSPKNLVLKPHPGLSPIKNPPPEL

SEQ ID NO: 76705 - DNA, 672 bp, Unknown
  Obtained from environmental sample
  misc_feature (1)..(672): n is a, c, g, or t
ttgggaaaaatagaatctgccgttcaaacttatgagaaaattgattctgataatgaattagaacaaaaaataaaagcaataaatgaacgaatttttgctttacatcaaattgttaatgaagaggaaattaagaataaactaaatagtgtattgcgatatattgaaaaagaagcaaacaaaattgtttctacgctagatgttgaacgaccagaggatcctatagaatttatagttaatgatcttacaatttgtgtaaaaaatatttctggacgagatgattacctttgggaaataggtagtgcatcaaattggctgtcttatcatattgcgatttttttagcatttcagaaatactttcagggacgtggtaaaatatcaattcccaattttattgtatttgatcaaccaagtcaggtatatttcccacaagttctagctcatagaaattctcgactaaaagatgatgaaaagctaaatgacgaagacaaggaagctgttaaaaagatatttttagcattttcaaattatattaatgatacaaatggaaaaattcagatactcgttatggagcacgccgataaagatgtatggggtgacattgaaaatattcatcttgtaaaacgatggcgaggaaacaacgagaaattaataccatcagaatggatagattaa

SEQ ID NO: 76706 - protein, 223 aa, Unknown
  Obtained from environmental sample
  misc_feature (1)..(223): Xaa is any amino acid
MGKIESAVQTYEKIDSDNELEQKIKAINERIFALHQIVNEEEIKNKLNSVLRYIEKEANKIVSTLDVERPEDPIEFIVNDLTICVKNISGRDDYLWEIGSASNWLSYHIAIFLAFQKYFQGRGKISIPNFIVFDQPSQVYFPQVLAHRNSRLKDDEKLNDEDKEAVKKIFLAFSNYINDTNGKIQILVMEHADKDVWGDIENIHLVKRWRGNNEKLIPSEWID

SEQ ID NO: 76707 - DNA, 804 bp, Unknown
  Obtained from environmental sample
  misc_feature (1)..(804): n is a, c, g, or t
atgcccggaaacccagagcgggcaagaagaagcgcttcaggcgcgtctgagggccgggaagctgtaatcgtgcggaaagcggatgtgtccgtaatcgctcttgacgatacgctggacgcgtaccgttacgatctgccagaagaacgcatcgccaagcatccgggcgaacgcggcgcctcccgcctcatgctgctcgcgcggggcaaggggcacacgcaccatatgttcgtggaactgcccgaattgttgcccgccggcgctttgctggtggccaacaattcgcgtgtgctcccagcccgcctgatggggcgtcgttccacaggcggaacgatcgcctgtctcctgctcacccccttgccgctgatccaaactgtggttgaagggactctatgcgcggccgaggttgacgctctgctcaacccggcccggccggcccggccgggtttccgcttcatgctggacggcggattttccgcgactgttctggaaaaaggcgcattcggacactgccgcctgcgcctggagtggacaggcgatctgcaaagcctggtggaacgccatggtcatctgcccctgccgccctatatgcggcgcgaagccggcgaaagcgaccgccatcgatatcagaccgtatacgcccgcatggacaaaaccggcagcgtggccgcgcccaccgccgggctgcacttcaccgcggccatgcgcgagcgtttgctggatcgcggctttgcctggactgaagtcaccctgcacgtgggctatggcaccttcagcccgagtgcgcgagcgcaccctcggcgctaa

SEQ ID NO: 76708 - protein, 267 aa, Unknown
  Obtained from environmental sample
  DOMAIN (36)...(261): Queuosine biosynthesis protein
  misc_feature (1)..(267): Xaa is any amino acid
MPGNPERARRSASGASEGREAVIVRKADVSVIALDDTLDAYRYDLPEERIAKHPGERGASRLMLLARGKGHTHHMFVELPELLPAGALLVANNSRVLPARLMGRRSTGGTIACLLLTPLPLIQTVVEGTLCAAEVDALLNPARPARPGFRFMLDGGFSATVLEKGAFGHCRLRLEWTGDLQSLVERHGHLPLPPYMRREAGESDRHRYQTVYARMDKTGSVAAPTAGLHFTAAMRERLLDRGFAWTEVTLHVGYGTFSPSARAHPRR

SEQ ID NO: 76709 - DNA, 621 bp, Unknown
  Obtained from environmental sample
  misc_feature (1)..(621): n is a, c, g, or t
atgaggattgatgaccaaatgacgatgacgaccaccttgacaatagttctctccatcaaagccggggttctgattggactttggataggctggaaaaacggaaaagcaaaaggcgaaagcagaacaaggaaggatttggaacccaagctgcgggatgcggcggaccgtttgaaagacttggatagaaccatcgaacaccaaaagcagataggcgaaatgcaaatccaagagatggctaaagccaatagtgatctacagcagcgtttgcaggattccaaagaggaagcaagggggctcgccgcagaactggcttcagcaaaaaacagggtgacagggctggaggccatttcagctaaagacaaagaagccatggacgcggaacgcaagcagctactggagtataaggatgaaaccaagggccttagggcagaattggccgccgcaaaagagagggcaagcgaattggaggttgtttcagcaaaggacaaagatgtttttgatgcagagcgcaagcagttcgaagacctgcgggccaaattcagcgcagaatttgaaaatttggcaaaccacatatttgagcaaaagacgtcaccttccaaacccaaagcagggatgggctaa

SEQ ID NO: 76710 - protein, 206 aa, Unknown
  Obtained from environmental sample
  misc_feature (1)..(206): Xaa is any amino acid
MRIDDQMTMTTTLTIVLSIKAGVLIGLWIGWKNGKAKGESRTRKDLEPKLRDAADRLKDLDRTIEHQKQIGEMQIQEMAKANSDLQQRLQDSKEEARGLAAELASAKNRVTGLEAISAKDKEAMDAERKQLLEYKDETKGLRAELAAAKERASELEVVSAKDKDVFDAERKQFEDLRAKFSAEFENLANHIFEQKTSPSKPKAGMG

SEQ ID NO: 76711 - DNA, 813 bp, Unknown
  Obtained from environmental sample
  misc_feature (1)..(813): n is a, c, g, or t
gtggtggtggcccaaggattgaaatgtgggccaagcccggggtcatcttgcgccggggggggggcgggtctggggagggcatttctgcacggagccctgggggacgggtgcttgagggcgctgctgagacccggggacaaattgagggtggggaaaacggcggatgtcatcagtcccgatgatggctccgttttggcgaagctctgngtggaaggcaaccttgncgaaggctcgaaagtcataaggctgtccggggacgcgccattcgactgggatagggtggactcctttggtctgctgccgcttccgccatacattaagagacaggccgacgccggcgacgatgagcgctaccagacgacattccgttccaaagagggcgaggccgtggccgcgcccaccgcaggcctccacttcacacccgacctcattcggcgactgaagcaaaaaaactgcctgtggctgcccatacgcctccacgtcggtctgggcacgttcagacccatgacggccgaggacattgagggacatgccatgcacgaagaggcctatgaaataccggaagaaacggcgcgcacggttcaagaggtcctcgcggagaggtcaagagacatccttgccataggcacaacatctttgaggacactggaggcggcctggggcgacccgaccagcggcggcgcggcgcggcgcggctccacgaggatattcatccgaccagggcacaggataagcacggccgaccaccttatgacgaacttccatttgcctgaaagcaccctgttcgtgcttgtgtccgcgctgtggggctag

SEQ ID NO: 76712 - protein, 270 aa, Unknown
  Obtained from environmental sample
  DOMAIN (1)...(171): Queuosine biosynthesis protein
  misc_feature (1)..(270): Xaa is any amino acid
MVVAQGLKCGPSPGSSCAGGGAGLGRAFLHGALGDGCLRALLRPGDKLRVGKTADVISPDDGSVLAKLXVEGNLXEGSKVIRLSGDAPFDWDRVDSFGLLPLPPYIKRQADAGDDERYQTTFRSKEGEAVAAPTAGLHFTPDLIRRLKQKNCLWLPIRLHVGLGTFRPMTAEDIEGHAMHEEAYEIPEETARTVQEVLAERSRDILAIGTTSLRTLEAAWGDPTSGGAARRGSTRIFIRPGHRISTADHLMTNFHLPESTLFVLVSALWG

SEQ ID NO: 76713 - DNA, 675 bp, Unknown
  Obtained from environmental sample
  misc_feature (1)..(675): n is a, c, g, or t
gtgaattacgattccgtgcgggccaaagtccgcagcaaaagccgcgaaacgggcgtgaaagccgacgtgctgtacaggcgtttcctgctcgaacggttcatagcccgaatcgccgcgtccaatcatggcgatagcgtgatcatcaaaggcggcatactcttgtcggccattgccggaatcgacatgcgctcgacccgcgacctcgacgcgaccattcgcggcaagaacctgacggtcaacgacctcgtaaacatcgtgaaagacgtaatcgcggttgacgggggcgatggcgtggcgttcgagtttacccgcgccgacgagatcgtcatcgacggcaattacccctgttgccgaatccacctgcgcgcgttgttcggcactatggatgagcgtgtcggcatcgacgtgacgactggcgattttatcaccccgcgtgaaattgaatttggtttcccgacgctgctgggtgatgaaaaaatcccgatattggcgtatacgctcgaaacggtgcttgcggaaaaaaccgcagccatgcttgaccttggcgtgttcaacacaagggcaaaggatttttacgacatacacctcatcacggcgttgcaaagcgacgggattgacaaattcggtttttgccgacgctttgcaaaacacgctccgcaaccgcggcaagtctaa

SEQ ID NO: 76714 - protein, 224 aa, Unknown
  Obtained from environmental sample
  misc_feature (1)..(224): Xaa is any amino acid
MNYDSVRAKVRSKSRETGVKADVLYRRFLLERFIARIAASNHGDSVIIKGGILLSAIAGIDMRSTRDLDATIRGKNLTVNDLVNIVKDVIAVDGGDGVAFEFTRADEIVIDGNYPCCRIHLRALFGTMDERVGIDVTTGDFITPREIEFGFPTLLGDEKIPILAYTLETVLAEKTAAMLDLGVFNTRAKDFYDIHLITALQSDGIDKFGFCRRFAKHAPQPRQV

SEQ ID NO: 76715 - DNA, 762 bp, Unknown
  Obtained from environmental sample
  misc_feature (1)..(762): n is a, c, g, or t
atgtataacatattagtcacaggcggcgccggttttatcggttcaaacttatgtgaggccatgttagacatcggtcataatgtggtctgtttggataatttcgcgaccggaaagcgtgaaaacatccgtacctttatggataatccgagatttaagctaattgacggcgatattcgtaatttatcggattgtcaaaaagccgtcaacggtgttgattatgtattgcatgaggccgcacttggctcggttcctcgttcaattaaagaacctaccgaaaccaatgatgtgaatatcggcggatttatgaatatgctgattgcggccaaagatgccaaagttaaacggtttatttacgcgtcatcctcgtccgtctacggcgatttagaaacgcttccaaacgtggaagatatgattggaaaaccgcgttctccttatgccgtgacaaaatatgcaaatgagctttatgcgaatgtttttttcagaacccacggattggagtatattggattgcgctattttaatgttttcggccgtcgtcaagatgctcatagcgtttatgcggcggtcattccgttattcgtgaaacaatttattaaccatctatcaccggttattaacggcgatggagaacgttcgcgtgattttacatatattgataatgtaatccaaatgaatttattggcgttagaaacaacaaatgtaaatgccgtgaataccgtgtacaacaccgcgtatggtgaaaaaacgacgctgattcattga

SEQ ID NO: 76716 - protein, 253 aa, Unknown
  Obtained from environmental sample
  DOMAIN (4)...(249): Polysaccharide biosynthesis protein
  misc_feature (1)..(253): Xaa is any amino acid
MYNILVTGGAGFIGSNLCEAMLDIGHNVVCLDNFATGKRENIRTFMDNPRFKLIDGDIRNLSDCQKAVNGVDYVLHEAALGSVPRSIKEPTETNDVNIGGFMNMLIAAKDAKVKRFIYASSSSVYGDLETLPNVEDMIGKPRSPYAVTKYANELYANVFFRTHGLEYIGLRYFNVFGRRQDAHSVYAAVIPLFVKQFINHLSPVINGDGERSRDFTYIDNVIQMNLLALETTNVNAVNTVYNTAYGEKTTLIH

SEQ ID NO: 76717 - DNA, 897 bp, Unknown
  Obtained from environmental sample
  misc_feature (1)..(897): n is a, c, g, or t
ttgtttggcatttttggcagcatagcgttttttgcaaaaaacgctttctattccataatagctaaaatcactggcaaaaaacaggaaagattctcctgcgatttggcaatttttagcgaaggcaaaatgtactggatttatttcaaagatgtagtggaagaattgataaggagaaaaatcaaatttacatactatacaatggacatgaacgaccccgctctggatttacatgattttagcaatgcaaacgaagatttttcaaacttcaaagtaaaattcgtgggcgaaggcaataagggctattctgccataagcaatttaaaagaaaaaaacattctggcaacaacgccaaatataggaagccctggttatcccgtgaaaaaacctaagaactgcaaaaatttaatacacatcttccactcattaggaattggctacaaaaaaggcgggctggataattacgacactattctgttgcatcaaagcaattttgcaaatttgtttgaaaataaaaaagttatcctcgccggtttgccatatttagattctcttattgagagagtaagctctttgcaaaataaaacggatggtaaaactgttttagttggaagcacctggaacaaacacggctgtttgcgaacttatgggagcaaatttatcaaagatttgtcaaatgcaggttttaatgttatagttcgcccacacccctattcatacaagtttgaaaaagattttatagagaatttgcaaaaggaattaccaggcattgtttttgacagacaaatagacaatttgcagtgtttgtctcangcagatattctcatttccgatatcagcggagtttcgcttgatttttatttttgctttgataggccagttattttctctgggatgtga

SEQ ID NO: 76718 - protein, 298 aa, Unknown
  Obtained from environmental sample
  misc_feature (1)..(298): Xaa is any amino acid
MFGIFGSIAFFAKNAFYSIIAKITGKKQERFSCDLAIFSEGKMYWIYFKDVVEELIRRKIKFTYYTMDMNDPALDLHDFSNANEDFSNFKVKFVGEGNKGYSAISNLKEKNILATTPNIGSPGYPVKKPKNCKNLIHIFHSLGIGYKKGGLDNYDTILLHQSNFANLFENKKVILAGLPYLDSLIERVSSLQNKTDGKTVLVGSTWNKHGCLRTYGSKFIKDLSNAGFNVIVRPHPYSYKFEKDFIENLQKELPGIVFDRQIDNLQCLSXADILISDISGVSLDFYFCFDRPVIFSGM

SEQ ID NO: 76719 - DNA, 570 bp, Unknown
  Obtained from environmental sample
  misc_feature (1)..(570): n is a, c, g, or t
atgtggacgctgactgcctctgcgggcgctgccgcgacaccctttcaggcatcgaggagaaacggcgctatgcgtaagaaaattcgactgttaggctgtcttagtctcattggcgctgttgttttgctcgatcaggtttcgaaagccgcgatggttgagcgtctgtcgaccgaggggccgatcactgtaatcgaaggctacttcgattttgtgctcgcgtacaataggggcgccgcgttcggttttctggacacggctggcggctggcagcgctatttcttgttggcctttgccttaggcgtttcgatctggctgcttcggatgctttacaattccccgaatcgcccgctgttttgcttgtcgatttcaatgatcgtcggcggggcgatcggcaatttgatcgaccgcgttcgaatcggcgcggtcgtcgatttcatcgactggcatattggcgatgctcactggccggtttttaacgttgccgacatcggcatttcggtaggcgttaccctgctgttgctcgacgccttcctagcgacgcggagagccgcttcaaaggaaggccgatga

SEQ ID NO: 76720 - protein, 189 aa, Unknown
  Obtained from environmental sample
  SIGNAL (1)...(19)
  DOMAIN (31)...(185): Signal peptidase (SPase) II
  misc_feature (1)..(189): Xaa is any amino acid
MWTLTASAGAAATPFQASRRNGAMRKKIRLLGCLSLIGAVVLLDQVSKAAMVERLSTEGPITVIEGYFDFVLAYNRGAAFGFLDTAGGWQRYFLLAFALGVSIWLLRMLYNSPNRPLFCLSISMIVGGAIGNLIDRVRIGAVVDFIDWHIGDAHWPVFNVADIGISVGVTLLLLDAFLATRRAASKEGR

SEQ ID NO: 76721 - DNA, 915 bp, Unknown
  Obtained from environmental sample
  misc_feature (1)..(915): n is a, c, g, or t
atgaaaggcatgttctacattgaggcgattcggcaccttcgaaagaactcggccccaaaggaagcatttcggtgcatgtcacgcttatcccatatttggacgcaagcgggcgaaattaaaacaaaaccgacgcaaaacagcgtccgcgacataaaccaaatgggtgttttccccgacatagtcgtctgccgcacaagcgcaaatgttacgcttgatgacgaaacgcgtgaaaagatcgcgatgttttgtaaccttgacgggcccgaaaatgttattcataataaggattgccgctctatttacgaggtacctgttattttgaaagctcagaagcttgacgacattgttctgcgggaacttgggataaaagcacccgccgacaatcttacggactggaaaaaaatggttaaggatatgcttggcgattctgaacgtaaaaccacaccgaaaatcgtcgcaatcgtcgggaaatatgttgaagtgcccgacgcctacatttccgtcaccgaagccgttaaacatgcgggcctcaaatgcggatgcagtgtaaatgtcaaacttgtcgacgcggaagccatcgaaaaaaacggagtcgaatccacaatcaacggggttgacggtataattgttcccggaggcttcggaaatcgcggcattgaagggaaaatcgcggcagcaaaatatgcgcgcgagagcaagattccttacctcggactgtgtctaggtatgcaaatcgcggtcatcgagtttgcgcgcaatgtagcaggtttaaaaggcgcgcacacggcagaaattgacccgaaaacaccacacccggtcatcaacatcatggagagccaaaaaaaagttcacgaaaaaggcgggacgatgcggttagggctttatgattgtacgctctcggccaatctgtcatga

SEQ ID NO: 76722 - protein, 304 aa, Unknown
  Obtained from environmental sample
  DOMAIN (160)...(304): Glutamine amidotransferase class-I
  misc_feature (1)..(304): Xaa is any amino acid
MKGMFYIEAIRHLRKNSAPKEAFRCMSRLSHIWTQAGEIKTKPTQNSVRDINQMGVFPDIVVCRTSANVTLDDETREKIAMFCNLDGPENVIHNKDCRSIYEVPVILKAQKLDDIVLRELGIKAPADNLTDWKKMVKDMLGDSERKTTPKIVAIVGKYVEVPDAYISVTEAVKHAGLKCGCSVNVKLVDAEAIEKNGVESTINGVDGIIVPGGFGNRGIEGKIAAAKYARESKIPYLGLCLGMQIAVIEFARNVAGLKGAHTAEIDPKTPHPVINIMESQKKVHEKGGTMRLGLYDCTLSANLS

SEQ ID NO: 76723 - DNA, 774 bp, Unknown
  Obtained from environmental sample
  misc_feature (1)..(774): n is a, c, g, or t
gtgtccggtgatatttctatacccattaacggtggcaatacgtttggttcagtcaagaaaataaccgtgaacttggagggtagcggaacgctttccttatccggtgacggtaatttgctgagcgtgggtgccggacagatggttagtgttataggaacattgaatttgagcggacgtaataacaataccggctctgtggttgtgattgacagcggcggaacgttccgcatggccggtaacgccgcgataactagtaatattgtgaatggcgatggcggtggagtgcttgtcagatccggtgaatttattatggatgaaagctcttcaatgtcgggcaattccgccaaaggcagcggcgggggggtgtttgtttacaatggtgaattcgcgatgcatggtagcgctaaagtgtcgggtaacactgccaacaacggcggcggcggtgtgtatgttgaaagcggaaagtttgtaatgactgactcagcaatggtttcgaataataccgtttggttaggtggcggggtatatgtcggttcaacaggaacgtttgttatgcagggtaacgctaaggtgtcaggcaataccgcctatcggcaagggggtggtgcgtattttgttggcaaagattttataatggaaggaaaaccctgtggtaatccaccaattcccccgcccacaagaaagcgatgtgtaattcgctggcaaaaccttttttttggcgttaccgaattaaagtacaggccaaaacccccaggtattggggggcggggttaa

SEQ ID NO: 76724 - protein, 257 aa, Unknown
  Obtained from environmental sample
  misc_feature (1)..(257): Xaa is any amino acid
MSGDISIPINGGNTFGSVKKITVNLEGSGTLSLSGDGNLLSVGAGQMVSVIGTLNLSGRNNNTGSVVVIDSGGTFRMAGNAAITSNIVNGDGGGVLVRSGEFIMDESSSMSGNSAKGSGGGVFVYNGEFAMHGSAKVSGNTANNGGGGVYVESGKFVMTDSAMVSNNTVWLGGGVYVGSTGTFVMQGNAKVSGNTAYRQGGGAYFVGKDFIMEGKPCGNPPIPPPTRKRCVIRWQNLFFGVTELKYRPKPPGIGGRG

SEQ ID NO: 76725 - DNA, 810 bp, Unknown
  Obtained from environmental sample
  misc_feature (1)..(810): n is a, c, g, or t
atgtcctgcatgtatccccggctgttgcttctcgcgattcttgccgccctgccgctgtgcttcgccgcgcccggcaagccgcaagccgccgctccggattcgctgcaagagatgttgggcggtggccctcccccggcggaactcgctccgcctcctcctaaaaatccgttcaaggaagctctcaggcgttccgcgccttttatcgaatttgacgaaaaacccatgcagcccatgcgccccttgggcgcatggggtgatccgccgggcaaacccctgcccatgaccgggcaaggcatccaaagcccgcgcgcgccgcatgtccccacgccaaaagatcccaaaacaccggaagctcccaaggcacccctcgtatctcccatgcggaacagtaccgcgggcgcttcgcccgcacccgtcgcgcccgcgagccgggaagccaaagatgcgcaaaaaaagccggacctgtccgaaatgatcggacaaatgatcatggtgggcttcaacggttcggacttgcgggagaaagacccgcttctggccgccatccaggccgggcgggcgggcaatattctcctgtttgaacgcggccctgccggcccgaagaacatcgaatcccccgcccaactgcgtctgctgacggcgcgcctgcaaaaggccgcgccgcgtccgctttttatcgccgtggagcaggaggggggcagagcgcaagcgttgacgcccgaacgaggctttgaaggcggtccggcggctgccgtgctcggcagccgcgatccggacgccacccgcctggccgcccgccgtatggtctga

SEQ ID NO: 76726 - protein, 269 aa, Unknown
  Obtained from environmental sample
  SIGNAL (1)...(22)
  misc_feature (1)..(269): Xaa is any amino acid
MSCMYPRLLLLAILAALPLCFAAPGKPQAAAPDSLQEMLGGGPPPAELAPPPPKNPFKEALRRSAPFIEFDEKPMQPMRPLGAWGDPPGKPLPMTGQGIQSPRAPHVPTPKDPKTPEAPKAPLVSPMRNSTAGASPAPVAPASREAKDAQKKPDLSEMIGQMIMVGFNGSDLREKDPLLAAIQAGRAGNILLFERGPAGPKNIESPAQLRLLTARLQKAAPRPLFIAVEQEGGRAQALTPERGFEGGPAAAVLGSRDPDATRLAARRMV

SEQ ID NO: 76727 - DNA, 840 bp, Unknown
  Obtained from environmental sample
  misc_feature (1)..(840): n is a, c, g, or t
gtggcgtccggatcgcggctgccgagcacggcagccgccggaccgccttcaaagcctcgttcgggcgtcaacgcttgcgctctgcccccctcctgctccacggcgataaaaagcggacgcggcgcggccttttgcaggcgcgccgtcagcagacgcagttgggcgggggattcgatgttcttcgggccggcagggccgcgttcaaacaggagaatattgcccgcccgcccggcctggatggcggccagaagcgggtctttctcccgcaagtccgaaccgttgaagcccaccatgatcatttgtccgatcatttcggacaggtccggctttttttgcgcatctttggcttcccggctcgcgggcgcgacgggtgcgggcgaagcgcccgcggtactgttccgcatgggagatacgaggggtgccttgggagcttccggtgttttgggatcttttggcgtggggacatgcggcgcgcgcgggctttggatgccttgcccggtcatgggcaggggtttgcccggcggatcaccccatgcgcccaaggggcgcatgggctgcatgggtttttcgtcaaattcgataaaaggcgcggaacgcctgagagcttccttgaacggatttttaggaggaggcggagcgagttccgccgggggagggccaccgcccaacatctcttgcagcgaatccggagcggcggcttgcggcttgccgggcgcggcgaagcacagcggcagggcggcaagaatcgcgagaagcaacagccggggatacatgcaggacatgtactccccgctcaggccgacacccggcaggcgatccccggtctggcccggcagatga

SEQ ID NO: 76728 - protein, 279 aa, Unknown
  Obtained from environmental sample
  misc_feature (1)..(279): Xaa is any amino acid
MASGSRLPSTAAAGPPSKPRSGVNACALPPSCSTAIKSGRGAAFCRRAVSRRSWAGDSMFFGPAGPRSNRRILPARPAWMAARSGSFSRKSEPLKPTMIICPIISDRSGFFCASLASRLAGATGAGEAPAVLFRMGDTRGALGASGVLGSFGVGTCGARGLWMPCPVMGRGLPGGSPHAPKGRMGCMGFSSNSIKGAERLRASLNGFLGGGGASSAGGGPPPNISCSESGAAACGLPGAAKHSGRAARIARSNSRGYMQDMYSPLRPTPGRRSPVWPGR

SEQ ID NO: 76729 - DNA, 471 bp, Unknown
  Obtained from environmental sample
  misc_feature (1)..(471): n is a, c, g, or t
atgaaatacgcgagcacagcaatcaacaacggacttgaaatagcggtggtggtattgccgcttgaaacagtgccgatgtttgacccggcgaacccgccacaagccaacacgtacggggtgccggacaacgtggaagtgggatgggtgcgtaaccaagacggctcatggagcccgccgccgccgcccacctttgaagagcagcaggcccagctagaccgcgccgtgaggcaaaggcttgattcattcgcgtggactaggggctatgacggcatcttggccgcgtgttcctacgcactcagccaagacccgcaattcaggatggaaggcgaatactgcgttgaggcccgcgacctgacatggcgcagcttttacgcgatcatggcggacgtgcaaaacgaacagcggcccatgccgacggcgagtgaactgatggccgaactgcccgcgctggcatggccgggaggtgagtaa

SEQ ID NO: 76730 - protein, 156 aa, Unknown
  Obtained from environmental sample
  misc_feature (1)..(156): Xaa is any amino acid
MKYASTAINNGLEIAVVVLPLETVPMFDPANPPQANTYGVPDNVEVGWVRNQDGSWSPPPPPTFEEQQAQLDRAVRQRLDSFAWTRGYDGILAACSYALSQDPQFRMEGEYCVEARDLTWRSFYAIMADVQNEQRPMPTASELMAELPALAWPGGE

SEQ ID NO: 76731 - DNA, 573 bp, Unknown
  Obtained from environmental sample
  misc_feature (1)..(573): n is a, c, g, or t
atgaaagacactaccgagattcgttggcacggccggggagggcagggcgccaagaccgccgcttgnttggtgncggatgcggcgattgccacgggcaaggtagcgcaggcttttccggaatacggcccggaacggatgggcgcgccggtcaaggcttttaaccggatttccgatcaggaaatacgtgttcactgtgcggttgagcatccttcgattatcttagttctggacgagaccctgattgagtcggtcaatgttctggagggcgtgccggagaccggtgtaattattatcaattccgaaaagaccgccgatgattaccggaaaaaacttaacttcaaaggtcaggtgcatacggtaaatgcttcgggtatcgcgctgaaaaatatcggcctgaacaaaccgaatacaccgatgctgggcgcgctggtggctgcgaccgggatattagattatgcaaaaatgattgaggacaccgcgcacaaattagagaaaaaatttaagaataaaccggaagttatcgagggcaatgtcaaagcgattaaggatgcctacgaggaggtaaagaaataa

SEQ ID NO: 76732 - protein, 190 aa, Unknown
  Obtained from environmental sample
  DOMAIN (13)...(186): Pyruvate ferredoxin/flavodoxin oxidoreductase
  misc_feature (1)..(190): Xaa is any amino acid
MKDTTEIRWHGRGGQGAKTAAXLVXDAAIATGKVAQAFPEYGPERMGAPVKAFNRISDQEIRVHCAVEHPSIILVLDETLIESVNVLEGVPETGVIIINSEKTADDYRKKLNFKGQVHTVNASGIALKNIGLNKPNTPMLGALVAATGILDYAKMIEDTAHKLEKKFKNKPEVIEGNVKAIKDAYEEVKK

SEQ ID NO: 76733 - DNA, 861 bp, Unknown
  Obtained from environmental sample
  misc_feature (1)..(861): n is a, c, g, or t
gtgccgaaagggaaagacggcaaacccgatcatcacaaggcgaaaacgggcgacgatcttaccgactttgtaaacaataaattatttccttaccttaagaaatttaagacaagcgccgaaagcgccgccactatcgaatacaaaatcggcgaaattttcagcgaattaaaaaaccgtttgcaaagcggttataatctgcgagaagtaattacccttgtcgattcattgcgttttctcacgcacgccgaaaaacacgagatgagccatctttatgaaagcaaaataaaaaacatgggcaacgcgggacgaaacggcggcgaatattacaccccacgaccattgattacagctatcgtaaaagtcgtaaacccgaaaatcggcgagaaaatttacgacggcgcttgcggctcggcgggttttttgtgcgaggcgtttaattatcttaaatcgggcaagtcgctttcttcaaaagaaacggaaatattgcaaaaacattctttttacggcaaggaaaagaaatcgttagcctacatcatcggcattatgaatatgattctgcacggcgtagaagctccgaacattatacacaccaatacgcttgccgaaaatcttgccgacatacaggaaaaagaccgctataacgtggttcttgcaaatccgcctttcggcggcaaggaaagagccgaagtacagcaaaactttcccgtanaaacaggagagaccgcatcgctctttttacagcactttataaaaattttgaaaagcgggcggaagagccgacatagtaataaaaaacacatttttaagcaataccgacnacgccaccgttgccatacgcaaacatttattggaaagctgtaa

SEQ ID NO: 76734 - protein, 286 aa, Unknown
  Obtained from environmental sample
  DOMAIN (82)...(285): N-6 DNA Methylase
  misc_feature (1)..(286): Xaa is any amino acid
MPKGKDGKPDHHKAKTGDDLTDFVNNKLFPYLKKFKTSAESAATIEYKIGEIFSELKNRLQSGYNLREVITLVDSLRFLTHAEKHEMSHLYESKIKNMGNAGRNGGEYYTPRPLITAIVKVVNPKIGEKIYDGACGSAGFLCEAFNYLKSGKSLSSKETEILQKHSFYGKEKKSLAYIIGIMNMILHGVEAPNIIHTNTLAENLADIQEKDRYNVVLANPPFGGKERAEVQQNFPVXTGETASLFLQHFIKILKSGRKSRHSNKKHIFKQYRXRHRCHTQTFIGKL

SEQ ID NO: 76735 - DNA, 564 bp, Unknown
  Obtained from environmental sample
  misc_feature (1)..(564): n is a, c, g, or t
atgcgaggattcacgccgtcggtattttcgctgatcccgaagctcgtggaacgtgccggtacaaacaataaaggatcgatcaccgcgttctatacggttctcgtggagggggacgatgtgatcaacgatcccgtcgcggacgccgcgcgcgggcatctggacgggcatatcgtgctctcgcgcgatctcgcgatgaaaaatcactatcccgcgattgatattccgggatcgatctcgcgcgtcatgatcgatcttgtgaatgaaaagcatattcagaacgcgaacagcctgcgcgagatgattaaggtatggcgggacgcggaggatcttatcaatattggggcatacgcgcgcgggtcgaatccaaaaatcgatcaggctattgcaatgcaaaacgatatcaatcaatatctgcgtcaggggatatttgagacttcgagcatagatgaatcggctgctcaattggcggcgctctttaaccggggaatcgcggcgaagatacgcgcgcctaaggccgcgtccaagactgcgcccaagggcgcgctgagcggcgcgcgccgatag

SEQ ID NO: 76736 - protein, 187 aa, Unknown
  Obtained from environmental sample
  DOMAIN (1)...(79): ATP synthase alpha/beta family, nucleotide-binding domain
  misc_feature (1)..(187): Xaa is any amino acid
MRGFTPSVFSLIPKLVERAGTNNKGSITAFYTVLVEGDDVINDPVADAARGHLDGHIVLSRDLAMKNHYPAIDIPGSISRVMIDLVNEKHIQNANSLREMIKVWRDAEDLINIGAYARGSNPKIDQAIAMQNDINQYLRQGIFETSSIDESAAQLAALFNRGIAAKIRAPKAASKTAPKGALSGARR

SEQ ID NO: 76737 - DNA, 456 bp, Unknown
  Obtained from environmental sample
  misc_feature (1)..(456): n is a, c, g, or t
ttgttttcgccgacgcaaattgctaaatgtttaaaacaanagaggtgcattatggtagtggaaaatatttttgacccgaattacaaagctcgcggagcgtattctcacgcgaagaaaatagatattggcaatagttatttgatttttgtgtccggtgttcaatgtccaaaagatgacaagcatcgcgtaattacggatgatgttgccgaacagacacgcttggtatttcaagacatccaaaaaagattgagccttgccggagcaagtttggataatgttgtaaaagctgtgatatacctgaccgatatgaaatatttcgatattgtgtcgcctattcgtggggaatacttcaaaaattccatgcctgtatcaacgatggtagaagtgagcagaatgacgcgtgatggagcaaagattgagattgaagttaccgccttgttgaacaagaacggctga

SEQ ID NO: 76738 - protein, 151 aa, Unknown
  Obtained from environmental sample
  DOMAIN (22)...(147): Endoribonuclease L-PSP
  misc_feature (1)..(151): Xaa is any amino acid
MFSPTQIAKCLKQXRCIMVVENIFDPNYKARGAYSHAKKIDIGNSYLIFVSGVQCPKDDKHRVITDDVAEQTRLVFQDIQKRLSLAGASLDNVVKAVIYLTDMKYFDIVSPIRGEYFKNSMPVSTMVEVSRMTRDGAKIEIEVTALLNKNG

SEQ ID NO: 76739 - DNA, 954 bp, Unknown
  Obtained from environmental sample
  misc_feature (1)..(954): n is a, c, g, or t
atgattcagattttttacaacgatctggaaggggccaggatcgattttaccggcgggaatttggaagtagtttccggtagtacgaaaaacgtggtcatttccagcggatcttccgcgatagttgttgaagggcaggcaaacctgaataaaagccaggaaggattcagcctttcggttgtagaagggcaggccagctatgacggagcaaaagttgagtcgggagagatccttgcggtgaaccaaagcggagagcgcagtgccatacccgccattgccatgacctccttcggttcttctgcccggtttgtgaccgagccgggaagatctgtatccgtcgtcttttcctggagcacttctaactttaagcccgatacccatgtgatcgtcgaagtagccatggatcggggctttacccgtatcgtggggaccagggatataagaggcgccgtcaccacttccatttccatggaaagcggcagttactggtggcgggtgtatccggctaacggcggcagcgtggaaccggtaaataccatgtacccctacggtactctggacgttgttcccgccgaaaaggtggttcttttttatcctgcccgagcggcggaatttatcggttcagccgatacaccagttcccttttcctggtctgccgtggcgggcgcttcgtcataccaggtggacatttccgccaacgcgaatatgagcggtccaaaggtatcccgccgtgtggaagaaaattatataacccagaccggcctgggaaacggccgctggtactggcgtatcaccccgatttttccaagctggattaaaggttccgttcctccctccgggataagcgatttttccatagtccagggcaggcccgtcctgaatgaggccgttctgaccttccccaacagaacgaaagatctacctcatactgccgnccaaggctcctgtggtcaatga

SEQ ID NO: 76740 - protein, 317 aa, Unknown
  Obtained from environmental sample
  misc_feature (1)..(317): Xaa is any amino acid
MIQIFYNDLEGARIDFTGGNLEVVSGSTKNVVISSGSSAIVVEGQANLNKSQEGFSLSVVEGQASYDGAKVESGEILAVNQSGERSAIPAIAMTSFGSSARFVTEPGRSVSVVFSWSTSNFKPDTHVIVEVAMDRGFTRIVGTRDIRGAVTTSISMESGSYWWRVYPANGGSVEPVNTMYPYGTLDVVPAEKVVLFYPARAAEFIGSADTPVPFSWSAVAGASSYQVDISANANMSGPKVSRRVEENYITQTGLGNGRWYWRITPIFPSWIKGSVPPSGISDFSIVQGRPVLNEAVLTFPNRTKDLPHTAXQGSCGQ

SEQ ID NO: 76741 - DNA, 903 bp, Unknown
  Obtained from environmental sample
  misc_feature (1)..(903): n is a, c, g, or t
atgtcgcatgcggccgatccttcggggcgtgtcgccgcgatgtgtccctcctcgcggcgcggattcagcccggccgcttccagcagcttccaggcggcatccgccgcctttccggcaggccagacgccgaaaattctggctgttcctccgatcagggcggggaacatcaggaaggtgacggccatggtcagatccatgaacagtttgccgctgtcgggcatgtgcagcaaaggcttgtccacggcctcaaagtgcaggcttgcgccatcgcgccgcggcgcggcgcctgccagctccagaatgtccagggcttcttccagcacggacgcggcagccgggtgcgcggccagatgcacctccaccggccggcttctgggcgcgcaggccagccccaggcacagggcgagggccgcgtccgcttcgatcccggcgggcacggccacatgttccggaagaatgccggaagcttccaagcgggccggcaggccgtcctggcctggaatgatggaggtaaaacgcgcgccgactgccggcagaaaatggcgcaggggcgaaagatcggccagtttgagcgcgctttcccccatgattttgaggcggcaggggcggacggccatgctgaacagcagcagaagaaaattgagcatatcgccgccgatgtgcacggcgcgatcaagcagggctttgtccgcgttgcctgccggcccatactccggcaagcacaacaggcggccgtcttcttcccagcgcaacgatggccggaagtggttgaagccctttgacaggtttaccagcggatcattgatccgcacggggcgcagttcgagcgggctgcccgaaatttgcgacagggcgcccaggatgcgggtgcgctggcagtcgagggggcagggcagggtgtaa

SEQ ID NO: 76742 - protein, 300 aa, Unknown
  Obtained from environmental sample
  misc_feature (1)..(300): Xaa is any amino acid
MSHAADPSGRVAAMCPSSRRGFSPAASSSFQAASAAFPAGQTPKILAVPPIRAGNIRKVTAMVRSMNSLPLSGMCSKGLSTASKCRLAPSRRGAAPASSRMSRASSSTDAAAGCAARCTSTGRLLGAQASPRHRARAASASIPAGTATCSGRMPEASKRAGRPSWPGMMEVKRAPTAGRKWRRGERSASLSALSPMILRRQGRTAMLNSSRRKLSISPPMCTARSSRALSALPAGPYSGKHNRRPSSSQRNDGRKWLKPFDRFTSGSLIRTGRSSSGLPEICDRAPRMRVRWQSRGQGRV

SEQ ID NO: 76743 - DNA, 627 bp, Unknown
  Obtained from environmental sample
  misc_feature (1)..(627): n is a, c, g, or t
ttggaaatgagccagatcgaatccctcgaatggcctgacatccggcaaaaggccgccattgtcctcggcttttcctgcggcttgcgcaggggcgagatcagagccttgcggtggaggcatgttgaccttgaagcaaatattatcagagtctgcgagaattatactgacgatgacgggctgaaggaaccaaaggccggatctttcaggcttatccctatcttcggcactgtcctcgatattctagccgagcttaagcgaaccaatccgtatggaggcgagccggaagactttgtgcttcccaacgttgaacggggcaagcccttagcggcaatcactatcaagaggggctttacgcggattatggatgcaatcgggattggcaaggatgccagggaaaagcggaacttgtctttccactcgatgcgccattccttcgtaacaagggcaagggaagccggattgcctgattttgtagtctctgccctttcaggccatcggactactcaaatggttgagcattattcgcaccagaccatgactgccgtggaatctgccaggggatcgcttgaagcggcgtttacacaagccaatcaagctaaggacagcgttcaatatgccaagcaataa

SEQ ID NO: 76744 - protein, 208 aa, Unknown
  Obtained from environmental sample
  DOMAIN (3)...(184): Phage integrase family
  misc_feature (1)..(208): Xaa is any amino acid
MEMSQIESLEWPDIRQKAAIVLGFSCGLRRGEIRALRWRHVDLEANIIRVCENYTDDDGLKEPKAGSFRLIPIFGTVLDILAELKRTNPYGGEPEDFVLPNVERGKPLAAITIKRGFTRIMDAIGIGKDAREKRNLSFHSMRHSFVTRAREAGLPDFVVSALSGHRTTQMVEHYSHQTMTAVESARGSLEAAFTQANQAKDSVQYAKQ

SEQ ID NO: 76745 - DNA, 510 bp, Unknown
  Obtained from environmental sample
  misc_feature (1)..(510): n is a, c, g, or t
atgatattatttcacggctcaaatttggaaattgacaaaatagattnaaattattgcagacctacaaaagacttcggaaaaggattttatacaacagagctagaagagcaagctgtaaatatggcaaaacgaactattcgcatattcggtggaaaaccttntgttacaaagttttctattgatgacaaggaatttgaaaattgcaatatccttcagaaaatatttgatactcctacaaatgaatgggctttatttattataaataataggaacagaaattttaccaatattgccagtttggagtgtaatttggataacaagtacggcatcgtcagaggaccagtagcaaatgatgatataagattgctttttgatttatttgatgataaaatcataaccatagaagaattaacaaaaagattagagcacaaagaactcacaagtcaaatttcttttcataccgatgaggctgtaaaattgctaaaaaaaataggagcttatggtttatga

SEQ ID NO: 76746 - protein, 169 aa, Unknown
  Obtained from environmental sample
  misc_feature (1)..(169): Xaa is any amino acid
MILFHGSNLEIDKIDXNYCRPTKDFGKGFYTTELEEQAVNMAKRTIRIFGGKPXVTKFSIDDKEFENCNILQKIFDTPTNEWALFIINNRNRNFTNIASLECNLDNKYGIVRGPVANDDIRLLFDLFDDKIITIEELTKRLEHKELTSQISFHTDEAVKLLKKIGAYGL

SEQ ID NO: 76747 - DNA, 753 bp, Unknown
  Obtained from environmental sample
  misc_feature (1)..(753): n is a, c, g, or t
ttgaaagccatgagcgccggcgacatattccccgcccggcgcgaagaatgcgagccgggcgaggacggcaaggcgcagggcgaatatcaggcgttgtggcaaacctttgtagccggtctgaaagaaattccggccgcgcaccgccggtactggcctctctggctggatcactttgattcgttgtggctgaccgcgacccatgccgtgccggcggccacagccttcaatgtgcggccggatgtttctctgtacgatcacagcaaggcgaccgccgcgctggccgtggccctgtggcgctatgccgtggccgccggcgcggatgactcgaaaagccttgcggcgttgcaatacagggacggagaaaagccctttctcctgatccagggggattttttcggcattcaggatttcatttttgccgagggcggcgagacgaatcgtcaggccgccaaaatacttcgcggacgctcatttcaggtttcgctgtttatggaattggccgccctgcggctgctggaactgctggaactgccgtcaaccagccagattaccaatgccgccggaaaattcatgattgtggccccccatacggaagagagcatatcccgtttgcatcgggcacaacaggagttcgacgcctggtttgtccggcaaagctttggcatggccggtatcggtctggcctggcaggcggcgggttgcggtgattttcgcgggcgaaagcggattttccgccctgatgctcggccataa

SEQ ID NO: 76748 - protein, 250 aa, Unknown
  Obtained from environmental sample
  misc_feature (1)..(250): Xaa is any amino acid
MKAMSAGDIFPARREECEPGEDGKAQGEYQALWQTFVAGLKEIPAAHRRYWPLWLDHFDSLWLTATHAVPAATAFNVRPDVSLYDHSKATAALAVALWRYAVAAGADDSKSLAALQYRDGEKPFLLIQGDFFGIQDFIFAEGGETNRQAAKILRGRSFQVSLFMELAALRLLELLELPSTSQITNAAGKFMIVAPHTEESISRLHRAQQEFDAWFVRQSFGMAGIGLAWQAAGCGDFRGRKRIFRPDARP

SEQ ID NO: 76749 - DNA, 336 bp, Unknown
  Obtained from environmental sample
  misc_feature (1)..(336): n is a, c, g, or t
atgatggccgagatggcgacnnatgcccttttgctttcgcagcttcgcaacagtttggttatgcaaggtgatgtgtttggaaaaagcactcaaacaataaaccagttttattctggaatgctcggacaactcggcactgaacgcaatgctgctggtgcaggtctaaatacccgtgcctttgccttgcaacaacttatggttcgtcaaaatgaagttatgggagtaaatttagacgaagaaatagcaagcctaattcaatatcagcacacatatcaggcaagtgcgcgttatttaacaactataaatactatgctggaaacattactcaatatgtaa

SEQ ID NO: 76750 - protein, 111 aa, Unknown
  Obtained from environmental sample
  DOMAIN (73)...(111): Domain of unknown function (DUF1078)
  misc_feature (1)..(111): Xaa is any amino acid
MMAEMATXALLLSQLRNSLVMQGDVFGKSTQTINQFYSGMLGQLGTERNAAGAGLNTRAFALQQLMVRQNEVMGVNLDEEIASLIQYQHTYQASARYLTTINTMLETLLNM

SEQ ID NO: 76751 - DNA, 429 bp, Unknown
  Obtained from environmental sample
  misc_feature (1)..(429): n is a, c, g, or t
atgcatcagccgctttttatccactggactgagcacaatgatacgggccttgccctgatcgatgagcaacaccgcggcatagtttccatcatcaatactttttattacctgatgagcctgagaacagacaacaagctgctgtatgcatgcatcagcgaaacaatgaaaacgtattcccgcatccacttcattaccgaagaagccctgctggaagcggcgggatacaatgattttgaaaagcataaagccctgcacagagatctcctccacgaaatagaaaacattgaatatcacggcattatggacaatgacgccnagcccctgctggactttctgaaaaaatggtggattgagcatatcaaccagcaggatcagctgtatgtgccgtgcctgcgcatgcatgatacggccgtgcatggacgcaagtaa

SEQ ID NO: 76752 - protein, 142 aa, Unknown
  Obtained from environmental sample
  misc_feature (1)..(142): Xaa is any amino acid
MHQPLFIHWTEHNDTGLALIDEQHRGIVSIINTFYYLMSLRTDNKLLYACISETMKTYSRIHFITEEALLEAAGYNDFEKHKALHRDLLHEIENIEYHGIMDNDAXPLLDFLKKWWIEHINQQDQLYVPCLRMHDTAVHGRK

SEQ ID NO: 76753 - DNA, 306 bp, Unknown
  Obtained from environmental sample
  misc_feature (1)..(306): n is a, c, g, or t
atgcggctggacttcatccgcgccgtcaccaaggccctgaacgaagtggacgcggcccgtttcgcctgcatccaggccaggctcgcggtagccaacacggacgaaaaataccgctatgatcaggaaatcacccgctactaccggcagcgctgggatcttggcgccggggatctggccgatctcttgcgggccatgaacaccgaggcttcgtcccgtctggctctgttgggcagccgctacgatcagatccgctacgaaaacctgctgttcaaagccctggccggcaggtacacgaaaacgccatga

SEQ ID NO: 76754 - protein, 101 aa, Unknown
  Obtained from environmental sample
  misc_feature (1)..(101): Xaa is any amino acid
MRLDFIRAVTKALNEVDAARFACIQARLAVANTDEKYRYDQEITRYYRQRWDLGAGDLADLLRAMNTEASSRLALLGSRYDQIRYENLLFKALAGRYTKTP

SEQ ID NO: 76755 - DNA, 552 bp, Unknown
  Obtained from environmental sample
  misc_feature (1)..(552): n is a, c, g, or t
atgggaatggtgctatttaccatgttcttcaatggcggaatgatccccaattatcttctggtaaggaatttgggcatctacaataccgtctgggcgcttatattacccggtagccttagcgctttttatcttatactgatgaaaaactttattcagacttccatccctgtttccctggaagaagcggcgagggtagacggtgccaatgaaatcagaatactgttttctgttattgtacctcttttaaaacccgcaatcgcgaccatggttattttctgcgcggttaattactggaacaattatttttcctcaatgctgtatattgccgacagaaaactctggcccctcattctggtactacgcgaactcgtggttgaaaataccgattcggtgaatccggtaacgttgatgctggcggcgcaggaaagaagccacccgttcaccctgaaaatgtcggccattattattgtaattacgccaatactggtcgtttaccctttcatgcaaaaatattttattaagggaattaatttgggagctatcaaagaataa

SEQ ID NO: 76756 - protein, 183 aa, Unknown
  Obtained from environmental sample
  misc_feature (1)..(183): Xaa is any amino acid
MGMVLFTMFFNGGMIPNYLLVRNLGIYNTVWALILPGSLSAFYLILMKNFIQTSIPVSLEEAARVDGANEIRILFSVIVPLLKPAIATMVIFCAVNYWNNYFSSMLYIADRKLWPLILVLRELVVENTDSVNPVTLMLAAQERSHPFTLKMSAIIIVITPILVVYPFMQKYFIKGINLGAIKE

SEQ ID NO: 76757 - DNA, 771 bp, Unknown
  Obtained from environmental sample
  misc_feature (1)..(771): n is a, c, g, or t
ttgcgaagatcgattttatcgctcccttccgccctggcggagaaatgggacaacgttggcctgatggtcggccatccccagtgggagatacgacgcttggcgattgcactggaccctctgcctgaagcgatggatgaggcctttcgcaaggggtgtcaggctttactttcccaccatcccctttttttcaagcctgtccaaaatttggatttatcctcgagcataggccaaacaattcaaaaggcagtcaagatggagatggccgtgatgtcggcgcacacgaactgggacagcgcggagagcggagtgagccgaaccctggccaaacggctcaagctcggcgcgatcgttcccctggctcaatccgaggaaggtgtgggcggtatgggcgcagtgggagatttgtccgagcccgagcccctgcccgtaagggaatttctcgacaagctgaaaaaggtgtggaacctgacgaggctcgactactacgggcccgcggaccgcagcgtactgcgagtgggtctgtgtgggggctccggaggaagcctgtggcctgccgccctggcgatgaaggcggatatttacgtcacggcggacatgaaataccacgatattctggactgtacccgggcgtgtctgtcggtcgccgtcgccgaccacgcggagatggaaagcccgaccctggtcgaactggcgcgttaccttgccgctcagggagaattggaggtcatgctgctcgactaccgggcgctcaataccccattgcgtttataa

SEQ ID NO: 76758 - protein, 256 aa, Unknown
  Obtained from environmental sample
  DOMAIN (8)...(247): NIF3 (NGG1p interacting factor 3)
  misc_feature (1)..(256): Xaa is any amino acid
MRRSILSLPSALAEKWDNVGLMVGHPQWEIRRLAIALDPLPEAMDEAFRKGCQALLSHHPLFFKPVQNLDLSSSIGQTIQKAVKMEMAVMSAHTNWDSAESGVSRTLAKRLKLGAIVPLAQSEEGVGGMGAVGDLSEPEPLPVREFLDKLKKVWNLTRLDYYGPADRSVLRVGLCGGSGGSLWPAALAMKADIYVTADMKYHDILDCTRACLSVAVADHAEMESPTLVELARYLAAQGELEVMLLDYRALNTPLRL

SEQ ID NO: 76759 - DNA, 381 bp, Unknown
  Obtained from environmental sample
  misc_feature (1)..(381): n is a, c, g, or t
gtgaaaaggctatgcgaaaactttctgttcccaaaaggtttggcagttatggccactgatgccatacgcaaaatccacgccgaaaacatcaaacaacgtgcattcaaagaagagaaactcaaactcgaagcccaaaaactcggtgaaacaatttccgttttgacggtgaaagttggtgcaaaagccggcacatcgggcaaaatcttcggttcggtaaacgctattcaaatcgccgaagccttgaaggctcaacacaacattgacctcgaccgcagaaaaatttctgttgatgacatcaaagaagtcggcgcttacaaagcgaaagctaatttgcatcgcgaagtaaaagtggaatttggcgtcgaagtaattgcagaataa

SEQ ID NO: 76760 - protein, 126 aa, Unknown
  Obtained from environmental sample
  DOMAIN (41)...(126): Ribosomal protein L9, C-terminal domain
  misc_feature (1)..(126): Xaa is any amino acid
MKRLCENFLFPKGLAVMATDAIRKIHAENIKQRAFKEEKLKLEAQKLGETISVLTVKVGAKAGTSGKIFGSVNAIQIAEALKAQHNIDLDRRKISVDDIKEVGAYKAKANLHREVKVEFGVEVIAE

SEQ ID NO: 76761 - DNA, 438 bp, Unknown
  Obtained from environmental sample
  misc_feature (1)..(438): n is a, c, g, or t
atgatgaaacggtggcccaaagagtttgaacgcatgattaaaatcaaagatacaacagccattntgatgcaaccgatgttgtcgggtatcgagttgtttgccggtgtgaattttgaacccaaattcggacacctcattctttgcggacttggcggtattttcatcgaagtattgaaagacgttcaaaacggattagccccactcaccgcagccgacggccaagcgatgattgaaaaattgaacggctacaaaatcctgcaaggcgttcgcggacaagcgggtattccgattgaccaattcgccgaaattgttgcagggttgtcgcggttagtcgctgttgcgcccgaaatcaaggaaatggatttgaacccgctcttggcatcaccgcaaaaggtggtggctgttgacgcacgaattcgaatagagaaattaaactaa

SEQ ID NO: 76762 - protein, 145 aa, Unknown
  Obtained from environmental sample
  misc_feature (1)..(145): Xaa is any amino acid
MMKRWPKEFERMIKIKDTTAIXMQPMLSGIELFAGVNFEPKFGHLILCGLGGIFIEVLKDVQNGLAPLTAADGQAMIEKLNGYKILQGVRGQAGIPIDQFAEIVAGLSRLVAVAPEIKEMDLNPLLASPQKVVAVDARIRIEKLN

SEQ ID NO: 76763 - DNA, 786 bp, Unknown
  Obtained from environmental sample
  misc_feature (1)..(786): n is a, c, g, or t
atgcaccttaccggtgaaaacaccaaggaaaacatcgctatggcggcgtggcacgattatattcaaccgctggagtggcatacgttttattccgtcatagaccaaaagctgttatggagctacgtggaatttttcccgctgctgcaggaaaaaaccgaaaaatcataccacgccacgccaaccggcaacaacacattcgacgaatcatttgcgcaataccgcaatttcgacctgatgcataatgccactgcttttcttgcgacattacgctacaaccagcctaaaaatgaggattttccggattattacagaactttaagagtggaagactggacaagcaatacggagattttgaggtatccttatatgtttttgcagaacattctgtccgtagaacgcacgctgggttcgcggccttctcaagaggatttaatgtctatcgccaaaaatgatactatcaaaggcgaaatatttttaacctacattctcccgggaatcaaagaacttccgaagatgcaggtagccaatgaacaatacgaacaatacgttgttaccgaagaccaaaaaaggcgtttcgagcaacatgtagagcggattaccaaactgcacattgcacaaggtgtcggaaaacccggacataactttacttatctgaataagaacgggaaaaaggtgtctttttctgatttcaaagacaaggtggtgtatattgatgtatgggcaacatggtgtgcgccatgccgcgcagaacaaccacatttgaaaaaagtggaagagcatttntaa

SEQ ID NO: 76764 - protein, 261 aa, Unknown
  Obtained from environmental sample
  misc_feature (1)..(261): Xaa is any amino acid
MHLTGENTKENIAMAAWHDYIQPLEWHTFYSVIDQKLLWSYVEFFPLLQEKTEKSYHATPTGNNTFDESFAQYRNFDLMHNATAFLATLRYNQPKNEDFPDYYRTLRVEDWTSNTEILRYPYMFLQNILSVERTLGSRPSQEDLMSIAKNDTIKGEIFLTYILPGIKELPKMQVANEQYEQYVVTEDQKRRFEQHVERITKLHIAQGVGKPGHNFTYLNKNGKKVSFSDFKDKVVYIDVWATWCAPCRAEQPHLKKVEEHX

SEQ ID NO: 76765 - DNA, 348 bp, Unknown
  Obtained from environmental sample
  misc_feature (1)..(348): n is a, c, g, or t
ttggccgagtatgcggcactggacgaattgtacaaaaaataccaagccgacaaggtgttgcttacggaagacatgaaacagcgtcgtgaaaacgatattattaccaaagaaaaagaagtcaaagaattgcaacgtaaatactttggtgaagacggcacactgagcaagaaaaaagatgagttgtttaagcctattcaggagaaaattacgacggctgtaaaagagttggccacacaagacggttatcatgtgatttttgacacgtcggccaacccttccatgattttcacggcgccgcgttacgacctgagcgataaagtacttgagaaaatgggatataaaaattaa

SEQ ID NO: 76766 - protein, 115 aa, Unknown
  Obtained from environmental sample
  DOMAIN (1)...(112): Outer membrane protein (OmpH-like)
  misc_feature (1)..(115): Xaa is any amino acid
MAEYAALDELYKKYQADKVLLTEDMKQRRENDIITKEKEVKELQRKYFGEDGTLSKKKDELFKPIQEKITTAVKELATQDGYHVIFDTSANPSMIFTAPRYDLSDKVLEKMGYKN

SEQ ID NO: 76767 - DNA, 555 bp, Unknown
  Obtained from environmental sample
  misc_feature (1)..(555): n is a, c, g, or t
atgaaacattttagtaaattttttgcaattattttgttggcaagtcttgccggcaatgcttcggcgcaggattttaaattcggccacatcaatctttcggagttgattatgttaatgcctgaacgcgattcggcacaagctaaactggaagcttatggcaaggaactggaggagcaggtggaagcgatgcaggtggagtataacaacaagctgaatacctaccggagtaaagaagctacgtggacagccgctatcctcgaacagaaacagcgcgagttagtggaaatgcaacaacgcattgaagtatttcaaagcactgcacgggaggattttcagcggatgcaagcaacgctactgcgtccggtaatggacaaagcgaacaatgccattagtaaagtaggtaaaggaaatgggtttacgtacatttttgacctcagcaacggctcgatacccttctttaatccggcgcanagtgttgatgtattgccattagtgcgtgtagagttgaaaattccggccgacaaaaaagtacctgttgctgctgcctccagataa

SEQ ID NO: 76768 - protein, 184 aa, Unknown
  Obtained from environmental sample
  SIGNAL (1)...(22)
  DOMAIN (9)...(170): Outer membrane protein (OmpH-like)
  misc_feature (1)..(184): Xaa is any amino acid
MKHFSKFFAIILLASLAGNASAQDFKFGHINLSELIMLMPERDSAQAKLEAYGKELEEQVEAMQVEYNNKLNTYRSKEATWTAAILEQKQRELVEMQQRIEVFQSTAREDFQRMQATLLRPVMDKANNAISKVGKGNGFTYIFDLSNGSIPFFNPAXSVDVLPLVRVELKIPADKKVPVAAASR

SEQ ID NO: 76769 - DNA, 435 bp, Unknown
  Obtained from environmental sample
  misc_feature (1)..(435): n is a, c, g, or t
ttggttagcgttttagatgttgagcaattgctgctaccggaatcatcgggttcggcggcatcgtcactgtcagatgggtcagtgggttcagagccatcatcgccatccgcggctgctataaccggctcctcaacttcagcaccaacaataacaccgtcgataacatcgtcaatcacggcgcctgtctcttcagaatcatccgaattgtccacaagctgcaagccgtcatcctcatcgccaacggtaggcacctcttcagcagaatcatcgctagattcagcctcaccgtcatcgtcggcaaccaccgtaattgtttccccggtaataaaacctgcggccacggcaacgaacgatggcgcgggcaaaaattcaacatcaacagcagcacttgctggcgtggcggggcaagccggcaagaactcaggggaaacgtga

SEQ ID NO: 76770 - protein, 144 aa, Unknown
  Obtained from environmental sample
  misc_feature (1)..(144): Xaa is any amino acid
MVSVLDVEQLLLPESSGSAASSLSDGSVGSEPSSPSAAAITGSSTSAPTITPSITSSITAPVSSESSELSTSCKPSSSSPTVGTSSAESSLDSASPSSSATTVIVSPVIKPAATATNDGAGKNSTSTAALAGVAGQAGKNSGET

SEQ ID NO: 76771 - DNA, 753 bp, Unknown
  Obtained from environmental sample
  misc_feature (1)..(753): n is a, c, g, or t
atgaatcctccgtatcagaaaataaacaccaacacgatatataaaaacgtgttacacgatatttccattgatactgtcaatacatatagcgcgtttatagctattggaataaaaatgctggctgataacggcgtattgacagccatagttccacgcagtttttgtaatgggctttattttcttccttttagacggctgttgtacgataataccgctataaaacacctccacatttttgagtcgcgtaaggacaatttcaaggaagaaaatgtgctgcaagagaatattatcatagtcctcaagaaaaccaaagataaaagcggaaatgtaacggtctcctattccaaagaaaaacaattctccgagtttcttgaaaaggatgtaacacctgatgatgttataaataccaatgatactcagtattttatatcaataccaaaccttaaccaaaaaagcgaaaatatacctttgacatatacgcataaggaattgggatttgaaatatcaacagggccggtggttgattttcgagtaagagaaaaattaaagtatgatacaagtggcgttcctttgttatacgcggttcatatcangaaccgtaaaataacgtggccagttgattctaaaaagccaaataccatacttcttgatgaatatgaaaaaacaaagatttgtttcaaaaagggttattatatcctattgaaacgtttacttccaaagaggagaaacaccggatacaggcaacgctgttaa

SEQ ID NO: 76772 - protein, 250 aa, Unknown
  Obtained from environmental sample
  misc_feature (1)..(250): Xaa is any amino acid
MNPPYQKINTNTIYKNVLHDISIDTVNTYSAFIAIGIKMLADNGVLTAIVPRSFCNGLYFLPFRRLLYDNTAIKHLHIFESRKDNFKEENVLQENIIIVLKKTKDKSGNVTVSYSKEKQFSEFLEKDVTPDDVINTNDTQYFISIPNLNQKSENIPLTYTHKELGFEISTGPVVDFRVREKLKYDTSGVPLLYAVHIXNRKITWPVDSKKPNTILLDEYEKTKICFKKGYYILLKRLLPKRRNTGYRQRC

SEQ ID NO: 76773 - DNA, 462 bp, Unknown
  Obtained from environmental sample
  misc_feature (1)..(462): n is a, c, g, or t
atggcgtcgccgttagacagtgtcaggccgcttattgaggcggcggtcgtcggtcagggcatggaactgtttgacgctcgttttttcggctccgggtctcggtccgtgttgcgcgttactatagataaggcgggcggggttaccgtcgccgactgcgagcgggtcagttccgcgattggaacgctgctagacgaacagaattttttcggcgggcggccttacacgctcgaggtatcgtcgccgggaattgacagactgctcaagacggagcgggacttcgctaggattgccggcagggaggcggtgttgaatttgggcgtcgcggtgggcggaaagcgtactatccgcggcgttatcgcgggttgtgaggatgggacaattactattgatataggcaccgaatctgtgcgagtaccccttgccgacgtcgtcagcggcagggaggagcttaagttcgggtaa

SEQ ID NO: 76774 - protein, 153 aa, Unknown
  Obtained from environmental sample
  DOMAIN (11)...(148): Uncharacterised BCR, YhbC family COG0779
  misc_feature (1)..(153): Xaa is any amino acid
MASPLDSVRPLIEAAVVGQGMELFDARFFGSGSRSVLRVTIDKAGGVTVADCERVSSAIGTLLDEQNFFGGRPYTLEVSSPGIDRLLKTERDFARIAGREAVLNLGVAVGGKRTIRGVIAGCEDGTITIDIGTESVRVPLADVVSGREELKFG

SEQ ID NO: 76775 - DNA, 309 bp, Unknown
  Obtained from environmental sample
  misc_feature (1)..(309): n is a, c, g, or t
atgaagaagaagacgaacaaggaggcgctcaagacggcggagattgtcgagtcgcttagggcggtgactaaagagaagagcatcggcatggagatggttctcgagacgttgcgggacgcgcttgtcaccgccgcgaagaagtttttgggaacgccggtgtttgttgaagctaaggtggaccgcgagaaggggacgatagaggtctacacgcggcagacggtggttgaagtcgtggaggacgcggagcgtcaaatctcgcttgccgacgcaggggagatggagacgacatcgccgtccgcgaggagctga

SEQ ID NO: 76776 - protein, 102 aa, Unknown
  Obtained from environmental sample
  DOMAIN (14)...(101): NusA N-terminal domain
  misc_feature (1)..(102): Xaa is any amino acid
MKKKTNKEALKTAEIVESLRAVTKEKSIGMEMVLETLRDALVTAAKKFLGTPVFVEAKVDREKGTIEVYTRQTVVEVVEDAERQISLADAGEMETTSPSARS

SEQ ID NO: 76777 - DNA, 867 bp, Unknown
  Obtained from environmental sample
  misc_feature (1)..(867): n is a, c, g, or t
ttgtnnnnnnnncttatcgccgaatcaggttcgggaataatgaattattctggcggcgatatacgcggcattcaaggttcagggattgccaattttacaggcggcaatacgcgcggacttcaaggcgccgggattgtaaattattcaggaggcaatgcccaatgggtgcaaggggccgggattgcaaatatcgccataggcgatgttcacggcattcaaggatcgggtattgccaattatgccgggggcactgttaacggtttgcagggttccggtattgccaatttcgccggaggtactgttaacggtttacagggttccggtattgccaattatgccggcggtactgttaacggtttacaaggcgcgggcattgccaattatgccggcggcttgcggggcgtccagggaggactggtaaatataatcggaaaggatcaagacggcacgctgggcgtgcaattggggctggttaacatatccagatccgagaacgtttttcctgtcgggcttgtcaatatagtaaagaacggcatactccatccgtctgtttatatcgacgatatgctcttcagcaatataggctttcgcagcggcacaaaaaatttctacgtattgatgagcgtcggtgtaggcggggatgatcataccgggttccccttttacgccggcgcattagacaggtatatcgtttccagggcggggatcggctatgaaatacccataggcaaggcgtttattgacattgacgcgtccacgggccatatctggaaattgaacacggaaatgaattccagtttggcctggaaagtcggctttaatgatcataatgacgacttaggcacgtttgccttcaactgcgcctga

SEQ ID NO: 76778 - protein, 288 aa, Unknown
  Obtained from environmental sample
  misc_feature (1)..(288): Xaa is any amino acid
MXXXLIAESGSGIMNYSGGDIRGIQGSGIANFTGGNTRGLQGAGIVNYSGGNAQWVQGAGIANIAIGDVHGIQGSGIANYAGGTVNGLQGSGIANFAGGTVNGLQGSGIANYAGGTVNGLQGAGIANYAGGLRGVQGGLVNIIGKDQDGTLGVQLGLVNISRSENVFPVGLVNIVKNGILHPSVYIDDMLFSNIGFRSGTKNFYVLMSVGVGGDDHTGFPFYAGALDRYIVSRAGIGYEIPIGKAFIDIDASTGHIWKLNTEMNSSLAWKVGFNDHNDDLGTFAFNCA

SEQ ID NO: 76779 - DNA, 795 bp, Unknown
  Obtained from environmental sample
  misc_feature (1)..(795): n is a, c, g, or t
gtggaagaactcagcccaccggtagaatttgatgacgctccgacgcttacccttgccgcaggtgagaagaagatcacctatacctttaccgcctctgacccggtagcggatagctatgatatacactatagcgaaggaagtgacgtggatgagacatatcttatgacatccggcactgtgatcgcaaacgtaagcagtgacggtgaaataaccggactgacaagcggtacaacctacagtgttattgtagtggcaaaattagacggctatcctgatactgcttcaaataaggatacggcaacgccctacgggttcactaacgcgccgtcactgagcctttcactgggtggcagtggtgaaatcaactacaccattaccccctcggacccggcagcggaaagctacaccatatactacaaagctggaaccgacttaactgctgaggctattaagggggataatgtaactaaaacagtaacaccgcccaccttaaccggcactatcaccggtctgatcaatggcacaacgtacagtttcgtcgtaacggcgaccaacacttctgacggtggctggacctccattgattcgacagtggaaacggcaacacccaatggtttcactgccccgccgtcgattgcccttgtaccgggttcctctgctacagaacttgcctacaccattaccgcctcgacccgggagcggataactacaccatatactacgncaacaggaccgacttatctgtggcctcagttaaaagagatggtacaagtgtttctaacatccccaacttaa

SEQ ID NO: 76780 - protein, 264 aa, Unknown
  Obtained from environmental sample
  misc_feature (1)..(264): Xaa is any amino acid
MEELSPPVEFDDAPTLTLAAGEKKITYTFTASDPVADSYDIHYSEGSDVDETYLMTSGTVIANVSSDGEITGLTSGTTYSVIVVAKLDGYPDTASNKDTATPYGFTNAPSLSLSLGGSGEINYTITPSDPAAESYTIYYKAGTDLTAEAIKGDNVTKTVTPPTLTGTITGLINGTTYSFVVTATNTSDGGWTSIDSTVETATPNGFTAPPSIALVPGSSATELAYTITASTRERITTPYTTXTGPTYLWPQLKEMVQVFLTSPT

SEQ ID NO: 76781 - DNA, 516 bp, Unknown
  Obtained from environmental sample
  misc_feature (1)..(516): n is a, c, g, or t
gtgacgaatctgacgcgatcgtcttacgcgggacagcagcggtacggcacaatagtctggtctggggatataagcgcgaattgggatacgctacgtaaacaggtaccggcagggctcaattttactgttacaggctgtccgtactggacttttgatataggcgcgttttttgtcggtggaaacaaaccgcaagcgcactggaaagcatggttccgcgacggtgattataacgacggctgcaatgatatgggataccgggagttgtatactcgatggcttcaagccggggttttcatgcctatcttccgctcccacggtacagatacgccccgcgagccatggcgtttcggtaatcccggcgaaccgttttacgattcgatcttaaaattcatcaagctccgttacgcgctcatgccttatatttactcccttgccgcgagcgtgtatttcgacgacgctacaatgttaaagcctttgttgtctgactacctacccgagggataccaggtgacataa

SEQ ID NO: 76782 - protein, 171 aa, Unknown
  Obtained from environmental sample
  misc_feature (1)..(171): Xaa is any amino acid
MTNLTRSSYAGQQRYGTIVWSGDISANWDTLRKQVPAGLNFTVTGCPYWTFDIGAFFVGGNKPQAHWKAWFRDGDYNDGCNDMGYRELYTRWLQAGVFMPIFRSHGTDTPREPWRFGNPGEPFYDSILKFIKLRYALMPYIYSLAASVYFDDATMLKPLLSDYLPEGYQVT

SEQ ID NO: 76783 - DNA, 483 bp, Unknown
  Obtained from environmental sample
  misc_feature (1)..(483): n is a, c, g, or t
ttgctgagatttgagttaaatttaaaagtcgagatgtgttctgacgaaagtgaaaaggaagaaaggctttgggagataatcgccgaacatcctaatgaaaagatactgatctatctatatcggaaaagaggagaacgtggcgttataggtttatgtaatacggcaattcaaaaaggactacgggccttagagtttcacggggatatgggagccaaagaacgacaagatgtaattgacaaaattcgaagtaattcgcacaatattgttttcgcaaccaacgcatttggcatgggaatagatattcatgatattagggttgttattcactatatgctccctgaatcaatagaacaatattatcaagaggttggtagagccggaagagatggtagagaggcaatgtcatatttgctttattcgagaaaaaacattgaaattcgtaaaaaacattttattgataaggncgtttccaacagaagatga

SEQ ID NO: 76784 - protein, 160 aa, Unknown
  Obtained from environmental sample
  DOMAIN (54)...(130): Helicase conserved C-terminal domain
  misc_feature (1)..(160): Xaa is any amino acid
MLRFELNLKVEMCSDESEKEERLWEIIAEHPNEKILIYLYRKRGERGVIGLCNTAIQKGLRALEFHGDMGAKERQDVIDKIRSNSHNIVFATNAFGMGIDIHDIRVVIHYMLPESIEQYYQEVGRAGRDGREAMSYLLYSRKNIEIRKKHFIDKXVSNRR

SEQ ID NO: 76785 - DNA, 339 bp, Unknown
  Obtained from environmental sample
  misc_feature (1)..(339): n is a, c, g, or t
atgaacattcagattttcgggaaagcgaagtgctttgacaccaaaaaagccgagcgttatttcaaagagcgcggcgttaagtttcagtcaatcgatattttgcaaaaagggttcagcaaaggcgagcttaactccgttatcgccgcaataggcattgacgggcttatttccctcgccgcgcaaaacctctcggaataccacctgtttaagcacttgaccgacgaggccaagcccgacaagctgcttgaatgtcccgccctgttaaaaacgccgattgtccgcaacgggaaaagcgcgacagcgggctattgccccgacgtgtggaaaggctgggagtga

SEQ ID NO: 76786 - protein, 112 aa, Unknown
  Obtained from environmental sample
  DOMAIN (6)...(112): ArsC family
  misc_feature (1)..(112): Xaa is any amino acid
MNIQIFGKAKCFDTKKAERYFKERGVKFQSIDILQKGFSKGELNSVIAAIGIDGLISLAAQNLSEYHLFKHLTDEAKPDKLLECPALLKTPIVRNGKSATAGYCPDVWKGWE

SEQ ID NO: 76787 - DNA, 816 bp, Unknown
  Obtained from environmental sample
  misc_feature (1)..(816): n is a, c, g, or t
ttgtattttcacaatgtcccgttgatggatattatcaagcaatacggaacgcctttaaaaattagttatttacccaaaataagcacacaaattcagcgagccaaacgcttgtttaatgttgctatggctaaggtcgattatcaaggtgagtacaattattgctattgcacgaaaagttcgcatttttcatttgtattggaagaggccttgaaaaatgatattaatatagaaacatcatcggcattcgatattaacttgattaacgagcttcacgaacagggcaagattaccgacaaggatattcatatcatttgcaacggttttaagcgtccgcaatacatcgaaaacattgccgaactcattaacaaagggtttcacaacaccattcccattatagataataaggaagaaatggatttgttggaggccaatattcacgaaaaatgtaaaatcggcattcgtattgctactgaagaagagccgatgtttgagttttatacgtcgcgtttgggcttgcggttcaatgatattgtcgatttttacatcaaacgcatcanacgaagtaagtttgaagtgaagatgttgcacttcttcatcaacaccggaattaaagatacggcacactattggaacgaacttttccaggcggtaaacgtctattgcgaactgaaaaaagtatgtccttccttatcggcactgaacatcgggaggggctttccattcaaaaactcgttggcttttcactatgattacgaatatatcgcggaagaaataatcgccccaattcaacaagtttgtaatcacatggagtggtaa

SEQ ID NO: 76788 - protein, 271 aa, Unknown
  Obtained from environmental sample
  DOMAIN (28)...(268): Pyridoxal-dependent decarboxylase, pyridoxal binding domain
  misc_feature (1)..(271): Xaa is any amino acid
MYFHNVPLMDIIKQYGTPLKISYLPKISTQIQRAKRLFNVAMAKVDYQGEYNYCYCTKSSHFSFVLEEALKNDINIETSSAFDINLINELHEQGKITDKDIHIICNGFKRPQYIENIAELINKGFHNTIPIIDNKEEMDLLEANIHEKCKIGIRIATEEEPMFEFYTSRLGLRFNDIVDFYIKRIXRSKFEVKMLHFFINTGIKDTAHYWNELFQAVNVYCELKKVCPSLSALNIGRGFPFKNSLAFHYDYEYIAEEIIAPIQQVCNHMEW

SEQ ID NO: 76789 - DNA, 375 bp, Unknown
  Obtained from environmental sample
  misc_feature (1)..(375): n is a, c, g, or t
ttggtttacaccatcggacagcgcaagggtttgagattgagtggcggaccttggttttgtgtgagaaaggatattgaaaacaacgtgatttatgcctctcgcggctacgacccagaaacgcaatatggcaaaaccgtgcatttgcaaggatttcagtttatcaccaaagacccttggggcgatttttccgacgaaaaagaggtcatgttcaaaattcgccacacgcctgagtttactcacggcaaactccgcaaaaacggcgatatttacacgattgaatccgacgacaaaattcaaggcattgctgcagggcaatttggcgtgatttacgatgaacaggcgcggctgtgtttggggagtggagtgattgtttag

SEQ ID NO: 76790 - protein, 124 aa, Unknown
  Obtained from environmental sample
  misc_feature (1)..(124): Xaa is any amino acid
MVYTIGQRKGLRLSGGPWFCVRKDIENNVIYASRGYDPETQYGKTVHLQGFQFITKDPWGDFSDEKEVMFKIRHTPEFTHGKLRKNGDIYTIESDDKIQGIAAGQFGVIYDEQARLCLGSGVIV

SEQ ID NO: 76791 - DNA, 771 bp, Unknown
  Obtained from environmental sample
  misc_feature (1)..(771): n is a, c, g, or t
atggtgggcgagttcgccgccggcgccgatgcggccggcaagctggccgtgcatttgcgcatggacgtggaacagcttcaggcatggcagggcgcggccacgcgcgcgggcggctccgcggacggactcgccggcgccgttgcctccctgaacggcaagctggatgaagttcgccgcaccggcggcggggaagcggcgggcgtactttggcaactcggcgtacaggcgacggacagccagggcaagctgaaaggcacgggggatatgctgctggccctgtccgacaggttccagaagctgaaccaggtgcaggcgctgcacttcggccagaagctcggcctggatgaaggcactatcgcgctgctgtcgaaagggcgcgccgctgtggaggatatgctcaagcggcagaaggaacttggcgtctataccaaaaaagacgccgaggacgcgcgcaaatacaacaacgtcatggccgatgtgcgccagagcatgggggctgtcgccgccgtcatcgcgcgggcgctgttgcccatgttcacgtccttcggcgatggcttgaccgctgtcgccgggcaggtgcgcaaacaccagaatctgataacgggggtcctcatcgcgctttcgcttgtcctgggagtgctggcggtcaaaagcggcataagcctcccgccgttcctgcgtttttgcgccgtcgtcctggggctcgccgcgccccttcccgtaatctacgaagatgggcaagccttttcgggacggcccgggacaccatga

SEQ ID NO: 76792 - protein, 256 aa, Unknown
  Obtained from environmental sample
  misc_feature (1)..(256): Xaa is any amino acid
MVGEFAAGADAAGKLAVHLRMDVEQLQAWQGAATRAGGSADGLAGAVASLNGKLDEVRRTGGGEAAGVLWQLGVQATDSQGKLKGTGDMLLALSDRFQKLNQVQALHFGQKLGLDEGTIALLSKGRAAVEDMLKRQKELGVYTKKDAEDARKYNNVMADVRQSMGAVAAVIARALLPMFTSFGDGLTAVAGQVRKHQNLITGVLIALSLVLGVLAVKSGISLPPFLRFCAVVLGLAAPLPVIYEDGQAFSGRPGTP

SEQ ID NO: 76793 - DNA, 441 bp, Unknown
  Obtained from environmental sample
  misc_feature (1)..(441): n is a, c, g, or t
ttgttttgggggccctggcatccaagaaggacgcccatggcaaagaggccagggggtggccctttttttccccgttggggaagggaagggcgggaggcagctccccgacagggatgttttatcattgtggcgggggggctggaaatcgagacccctcctgcgaacttggccctgatagccgccctttgcttccagggcaacgggaggctgcttaggcacaagtgcgtgtttgtcgaagaggttggtctgacggggagggtgaggccagtcccgcagctgnaactaaggctccaagaatcggggcgcctaggcttgaaatgtgccgtgccccccgcattaagcgagccaaaaaaaatgnggctggatatgttcctagaaaanagcgtcgagaggctgaaaacaaagccatggctggaaaaaatcgctgatgtggacaattga

SEQ ID NO: 76794 - protein, 146 aa, Unknown
  Obtained from environmental sample
  misc_feature (1)..(146): Xaa is any amino acid
MFWGPWHPRRTPMAKRPGGGPFFPRWGREGREAAPRQGCFIIVAGGLEIETPPANLALIAALCFQGNGRLLRHKCVFVEEVGLTGRVRPVPQLXLRLQESGRLGLKCAVPPALSEPKKMXLDMFLEXSVERLKTKPWLEKIADVDN

SEQ ID NO: 76795 - DNA, 585 bp, Unknown
  Obtained from environmental sample
  misc_feature (1)..(585): n is a, c, g, or t
gtgcttaatcatatgatagagatgcagtcttttgaacgcaaaggcaaagctgtgactaatttcgaaggaactatgccgccaaaagaatcagatatggctgtacaaacctttaaggatccatacctattcgactttatcggtacggcccaggcccggcgtgaagcagaagtcgagcgggcattagtagaacacatggaaaagttcctgctggaattagggcaaggttttgcatttgttgggcggcaagtccatttagaagtgggtggcgatgatttctatattgatttattgttttatcatctaaagttacgctgttatattgttgtagaactgaaagcccgcgatttcaaacccggagatgtgagccagttaaatatgtaccaaaatgtggtcaatgatgttatgcgtcatcccgatgataaaccgactattgggctccttttagtcaaaggaaaaaaccgcacagttgtagaatattcgctcgctggatatacaaaccctatncgtgtatcaaactggcaaaaccactttacgaaaatcatgcagatgatattaggtccaaccctcccacgatngaagagatag

SEQ ID NO: 76796 - protein, 194 aa, Unknown
  Obtained from environmental sample
  DOMAIN (2)...(192): Protein of unknown function (DUF1016)
  misc_feature (1)..(194): Xaa is any amino acid
MLNHMIEMQSFERKGKAVTNFEGTMPPKESDMAVQTFKDPYLFDFIGTAQARREAEVERALVEHMEKFLLELGQGFAFVGRQVHLEVGGDDFYIDLLFYHLKLRCYIVVELKARDFKPGDVSQLNMYQNVVNDVMRHPDDKPTIGLLLVKGKNRTVVEYSLAGYTNPXRVSNWQNHFTKIMQMILGPTLPRXKR

SEQ ID NO: 76797 - DNA, 765 bp, Unknown
  Obtained from environmental sample
  misc_feature (1)..(765): n is a, c, g, or t
gtgattcggtacgtgtataacggcacggacgggaagttcttcggattgtacagagacttcacgcagactttcgctgtcgtccagaagcctttgacggacagaagcatcactgttaccgtaactcagattccgggtgcgggcgggcagtattccggcgccgctatcggcccgatgagagtcgaacttaaagacggttctagggatatgatgctgaccaatgacttcacgtggacgtcggcgaataccaatatcgaggcgggttcgcatgatgtgactatcacggggacagggccgtacaccgggacgaggactgcgcagtacaaaatcgaaaagctggaaatcgtcgcggctaacggaacggcgtctttctcaaaaacctacgacgggactacggctgtgacggttcccgacgcgggccccggcatcgtgttcgagacgaaggctcgcgggacgactatcgcgtcgccgatggcggctctcgtttacggcacggactacactatcgagaatcttaagtacaacaccgccgacgtcgggaccaacaaaacggttaccggcacggtgaaactcgtcgcgggaagcacagcggcggaaaactactcgcttacaagcggcagcctgactttcaccaatcaggttatcacgaaggcggctccgtccgcggcgttcctcgtgaccactcccaagttcaacgacgcgggcgtgatcaacaagctgtacgacggcnaggctcaaaacctgactctcgcttggaggccggcgtga

SEQ ID NO: 76798 - protein, 254 aa, Unknown
  Obtained from environmental sample
  misc_feature (1)..(254): Xaa is any amino acid
MIRYVYNGTDGKFFGLYRDFTQTFAVVQKPLTDRSITVTVTQIPGAGGQYSGAAIGPMRVELKDGSRDMMLTNDFTWTSANTNIEAGSHDVTITGTGPYTGTRTAQYKIEKLEIVAANGTASFSKTYDGTTAVTVPDAGPGIVFETKARGTTIASPMAALVYGTDYTIENLKYNTADVGTNKTVTGTVKLVAGSTAAENYSLTSGSLTFTNQVITKAAPSAAFLVTTPKFNDAGVINKLYDGXAQNLTLAWRPA

SEQ ID NO: 76799 - DNA, 489 bp, Unknown
  Obtained from environmental sample
  misc_feature (1)..(489): n is a, c, g, or t
atgctatgggacggcaggggcaattcgggcaaactcgcgcaaagcggcgcgtcctatacgatagagggaagcgctaccgattatttcggcaatacgggaacctcggagccgctgcacattgatgttgacctcctgatgttcaaggacaaacgcggtatcaagatggtcatatcggatatagaggtagactcggcggaggtattcccgccggggagccccaattttcaccttgcggatatagtgcgacagtaccccgggtacgggatcgttatagaggggcataccgacaacaccggcgacgatgcgcataaccgcgatttatccgagcggcgcgcgatggcggtggcgcggcatctggaacgcagtggtatcgagcggacgcgcttaactgtccgtgggctgggaaaatcgcatccggcggcgagcaatgccaccggggaaggccgcgcccaaaaccgccgcgtggagatatttttggtgaaggaataa

SEQ ID NO: 76800 - protein, 162 aa, Unknown
  Obtained from environmental sample
  DOMAIN (61)...(153): OmpA family
  misc_feature (1)..(162): Xaa is any amino acid
MLWDGRGNSGKLAQSGASYTIEGSATDYFGNTGTSEPLHIDVDLLMFKDKRGIKMVISDIEVDSAEVFPPGSPNFHLADIVRQYPGYGIVIEGHTDNTGDDAHNRDLSERRAMAVARHLERSGIERTRLTVRGLGKSHPAASNATGEGRAQNRRVEIFLVKE

SEQ ID NO: 76801 - DNA, 744 bp, Unknown
  Obtained from environmental sample
  misc_feature (1)..(744): n is a, c, g, or t
atgggtctgaatccgcaaaagcaaccattcacgctccaatcggccagagtccaaaatagtaatgaaccagacatccagttgaacaacgtcattgttgtcataaagggcaacgaccccgatctatgcaatgagtacattgtcatcggcgcacacttagaccatttggggactaggccaggccagggcggagccaagccgactatattctatggtgccgatgataatggcagcggaagcgtggcattgattgagttggtgaggcactttcagaagaatcccccggctaggtcactcgttttcatccatttctcgggcgaagaatgggggcttttgggcagcaagcactgggtggcaaacccaacggttgacatcaagtcagttagattcatggccaatttggacatgataggccgcttcgacaatgaaaaagccgtgctgacctttacagcgatggggatgggtgccaaggacatcgagagggcaaaagacctggccccagaaggttttacgattgaggccgaccgtggcacgtcggtattcgctcaagcatctgaccatgcgccatttgcttcaaaggcatccccacttgttttttgtttacgggcatccaccccgactatcacaaggcgacngacaccatcgaaaaaattaactttggtgggcttgccactatcgccaagtttgccatttctctcgttactgagtatggccacagcgcaaaagtccccaaaattcagccagtag

SEQ ID NO: 76802 - protein, 247 aa, Unknown
  Obtained from environmental sample
  DOMAIN (44)...(223): Peptidase family M28
  misc_feature (1)..(247): Xaa is any amino acid
MGLNPQKQPFTLQSARVQNSNEPDIQLNNVIVVIKGNDPDLCNEYIVIGAHLDHLGTRPGQGGAKPTIFYGADDNGSGSVALIELVRHFQKNPPARSLVFIHFSGEEWGLLGSKHWVANPTVDIKSVRFMANLDMIGRFDNEKAVLTFTAMGMGAKDIERAKDLAPEGFTIEADRGTSVFAQASDHAPFASKASPLVFCLRASTPTITRRXTPSKKLTLVGLPLSPSLPFLSLLSMATAQKSPKFSQ

SEQ ID NO: 76803 - DNA, 444 bp, Unknown
  Obtained from environmental sample
  misc_feature (1)..(444): n is a, c, g, or t
atgatgaaaacaaggagggtaaatagtatgcgcggaatagataagctccaccccgtagtacaagtagcggcgcagcgcctcttggtgctttgcgaagaaaagggctatcctataaagataactgatacgcgacggacggaggccgaacagaacgccatacccgccgcaaataccaacgccaagtacccgaatagcttccataattggggccttgcctttgatttcattcgtgccgacgccggttctaaaggccgggaatgggacaacagcgacaaatactttgacagggtaggtgaaatagggaagtcctgcggcctgacttggggcggtgatttcaagaaactaaagggcgatttcgggcactttcaagatgataagcacggaactatccaagcgctcatttcacgctggcaaacgcccgatttcttcataaaatcatggtga

SEQ ID NO: 76804 - protein, 147 aa, Unknown
  Obtained from environmental sample
  DOMAIN (13)...(96): D-alanyl-D-alanine carboxypeptidase
  misc_feature (1)..(147): Xaa is any amino acid
MMKTRRVNSMRGIDKLHPVVQVAAQRLLVLCEEKGYPIKITDTRRTEAEQNAIPAANTNAKYPNSFHNWGLAFDFIRADAGSKGREWDNSDKYFDRVGEIGKSCGLTWGGDFKKLKGDFGHFQDDKHGTIQALISRWQTPDFFIKSW

SEQ ID NO: 76805 - DNA, 543 bp, Unknown
  Obtained from environmental sample
  misc_feature (1)..(543): n is a, c, g, or t
ttgagcaatccgaggccattgagcaacccaaggccaagaaccagcctaaaaacctttttgccaaaaaggtgggaagtaataatgcaccggtggacgaatgaagaaattgagtggctccgcgctaatgtaggcggagtcgcctatactgatctacttgcaaaatttaatcaccattttaagtgtgatttaaatttatggcaacttcggggagccataggctattataaaatacctccgaatgctaaatggaaatggccaaagggtgatgaaaaatggccagaacattggaagccacgcggaggcaacacgaggtttaaaaagggtcatactgggtatggaacaaggccacccggtacggtacggttacttcacgatggttacctacagataaatgtcggcgcaggtaaatgggtttatttacaccgtgtaatatacgagggtattaatggccctataccaaagagccatagggtaattttcggcgatggggataaaacaacctatccacatcaaatctactatgcgtatctnactcacaaatag

SEQ ID NO: 76806 - protein, 180 aa, Unknown
  Obtained from environmental sample
  misc_feature (1)..(180): Xaa is any amino acid
MSNPRPLSNPRPRTSLKTFLPKRWEVIMHRWTNEEIEWLRANVGGVAYTDLLAKFNHHFKCDLNLWQLRGAIGYYKIPPNAKWKWPKGDEKWPEHWKPRGGNTRFKKGHTGYGTRPPGTVRLLHDGYLQINVGAGKWVYLHRVIYEGINGPIPKSHRVIFGDGDKTTYPHQIYYAYLTHK

SEQ ID NO: 76807 - DNA, 432 bp, Unknown
  Obtained from environmental sample
  misc_feature (1)..(432): n is a, c, g, or t
atgccatcctttggcggcaatattgaacccagcgatattttttccggcgaggcggacatcattctctgcgatggctttgtcggcaatatcttcatcaaactctgcgagggcgtagggcggcatatgcagcgtcttattcgcggaccgcgccgccgctttttttccggatcaaaaaaaaagaagcattccgcgcctgcggagaacgcggcgcatcgcatcatcctcaggaatctcaaaaaatttaccgattccgagcgctacggcggttcgcctttgctggggctcaaggggatagtgctcattgggcatgggcaggcgcgcggaaacgcgatctacaacgcaatcgccaacgcgctcatgctgcatgacgcaaaactcatagaagaaatgaataattattttatggataccccgcagcatgaaaaagcttag

SEQ ID NO: 76808 - protein, 143 aa, Unknown
  Obtained from environmental sample
  misc_feature (1)..(143): Xaa is any amino acid
MPSFGGNIEPSDIFSGEADIILCDGFVGNIFIKLCEGVGRHMQRLIRGPRRRFFSGSKKKKHSAPAENAAHRIILRNLKKFTDSERYGGSPLLGLKGIVLIGHGQARGNAIYNAIANALMLHDAKLIEEMNNYFMDTPQHEKA

SEQ ID NO: 76809 - DNA, 714 bp, Unknown
  Obtained from environmental sample
  misc_feature (1)..(714): n is a, c, g, or t
atggagaaggcgcggtatatgatggatgacgcgctcaactttggcgcgatgcttgtcgcaaaggggtatgtggacggtatggttggcggcgcggcgcacgcgaccgccgatatgctgcgcgccgcgattacggttgtaaaaccggcgcccggaatatcgacggtttcctcatgtttcgcgatgatagtcccgaactgccaatacggcgccggcggcgcttttatctattcagattgcggcgcggttcccaatcccaaccccgcgcagctcgcggatatcgccatcgccgccgccgggtcctgccgcaaactccttggggtagagccggttatcgccatgctcgccttctccaccaagggcagcgcgagcgatccgactgtggataaggttatcgaggccacccggcttgccaaagagaaagcgccggatctgatcatcgacggagaactgcagggcgacgccgctcttgttccgagtgtcggtcaatacaaggcgcccggttcaaacgtggccggacgcgcgaataccctcatctttccggacctcaacgcgggcaatatcgcgtacaagcttacggagcgtctcacggggggcgaggcttatggaccgctgatccaggggctcgcgcggcctgtcaatgatctctccaggggctgcaaggcangcgatatcgtgaacgtagccatcatcacacangtgcaggncatggcgtga

SEQ ID NO: 76810 - protein, 237 aa, Unknown
  Obtained from environmental sample
  DOMAIN (1)...(232): Phosphate acetyl/butaryl transferase
  misc_feature (1)..(237): Xaa is any amino acid
MEKARYMMDDALNFGAMLVAKGYVDGMVGGAAHATADMLRAAITVVKPAPGISTVSSCFAMIVPNCQYGAGGAFIYSDCGAVPNPNPAQLADIAIAAAGSCRKLLGVEPVIAMLAFSTKGSASDPTVDKVIEATRLAKEKAPDLIIDGELQGDAALVPSVGQYKAPGSNVAGRANTLIFPDLNAGNIAYKLTERLTGGEAYGPLIQGLARPVNDLSRGCKAXDIVNVAIITXVQXMA

SEQ ID NO: 76811 - DNA, 417 bp, Unknown
  Obtained from environmental sample
  misc_feature (1)..(417): n is a, c, g, or t
ttggtgtccaacggtattttttaccggaacgccgacaatctgaaaatcaccgccgcagtcggtatgaatgtgacggttcagcccggcacagcgtggatcaatggctatcattactcgaacacaacgccgctggacttgcctgtcaccaccgcaaacggcgtaaatccgcgaatagaccgtgtgattttacgctgggacaatgtgggacgttcgatttatctggtgataaaggctgggattcccgccccgacgccgattcctcccgaactgacccgcaacggcgatgtttgggaattagctctggcaaatatatntgtcggcaagggtgcgttgtccgtcagtgccgacgcaatcagcgatttgcgccttgtaacagaggtttgcggacttgtaattcgctgggtatggcgtttatga

SEQ ID NO: 76812 - protein, 138 aa, Unknown
  Obtained from environmental sample
  misc_feature (1)..(138): Xaa is any amino acid
MVSNGIFYRNADNLKITAAVGMNVTVQPGTAWINGYHYSNTTPLDLPVTTANGVNPRIDRVILRWDNVGRSIYLVIKAGIPAPTPIPPELTRNGDVWELALANIXVGKGALSVSADAISDLRLVTEVCGLVIRWVWRL

SEQ ID NO: 76813 - DNA, 828 bp, Unknown
  Obtained from environmental sample
  misc_feature (1)..(828): n is a, c, g, or t
gtgatccaatacgtctgcccgggcgttcaggctggaagccgcttcgccgccgacgtagacagggcgtgcgcgaacatatcgaggatgacgcgcttcggtcgggaggcgggcgcggcgggcgtcctgaacacgaactggggcgactgcggccacatcaatctgccggcgaattcctaccacggtttagccttcggcgcggcgcattcgtggaacggggaggcagagagcggtattagtaccgatgatttcgacaaacgtttttcactcttgcaatggtggataacctacgataacggtagtttgggtcaactcctaagagaattaggcggactaagttcctaccatttcggcaacctctacgcgtgggttattgataaacagtgcatctggtacaaggaggaggatgtcaaaaccgccgactcgcaaacgttatatgccaaagccgtaagggcggcgaagatagcgatagaactaagtaggatagggtgcgactcgctggtaatcgacatggcaatcgacgcagaaccggaattacccggcccgcgcgtcatggtaatggacggctatatgtataacgagttctcagagtacgtctggtcagccgaggccaccgcttggctgctgtcgcttcttatcgccaagaaaaagtacgagtacaagcaagatgtggaaattgtccccataaagtcgtcggaacggtttaatgtggaagttatccgggaggctgtctccatagagccgtcggccctgattaataacggaaaaaaactattagaacgcttaaagaacgatggcggacaacgcccgaacgtccgattctcgcgataa

SEQ ID NO: 76814 - protein, 275 aa, Unknown
  Obtained from environmental sample
  misc_feature (1)..(275): Xaa is any amino acid
MIQYVCPGVQAGSRFAADVDRACANISRMTRFGREAGAAGVLNTNWGDCGHINLPANSYHGLAFGAAHSWNGEAESGISTDDFDKRFSLLQWWITYDNGSLGQLLRELGGLSSYHFGNLYAWVIDKQCIWYKEEDVKTADSQTLYAKAVRAAKIAIELSRIGCDSLVIDMAIDAEPELPGPRVMVMDGYMYNEFSEYVWSAEATAWLLSLLIAKKKYEYKQDVEIVPIKSSERFNVEVIREAVSIEPSALINNGKKLLERLKNDGGQRPNVRFSR

SEQ ID NO: 76815 - DNA, 729 bp, Unknown
  Obtained from environmental sample
  misc_feature (1)..(729): n is a, c, g, or t
ttgcgcggtaaccgacgcagacgcacggcaaacggagaaaaaccgcttctgagcggacttgtgaaatgttttgactgcggacacaatttgacatattgctatcaggggttgggcgaacatcgtgtgacaatttttatntgcggtatgtaccgctcatccgactgtttgaacacacgcccgtgttcgcggcattttatcaaagtcgccgaccttgaaaaattggttcttatgaaaatacaggaaacggtcaatctcgcgaggaacgataaaagagagttcgcacgggtagtttacaattcggcgaacaaggatgcggcgaaagaaatcaaatccaagaccgccgaactttccagagcggaaacacgaatcggagaactcgaccgttacattaccaaaatttacgaggacaatgtaaacgggaaattgtcagacgagcggtttcaaaaaatgatgtgcggctacgaaacggagcaaaaagacctcgcggcaaaagtagaaacgctccgctttgaaattgatgagctgaaaagcaaaagtgccaacatcgacagttttatgaaattggtggcgcggttcgatgagataacggaactaacggacgaggtggcgaggacgtttatcgacagaatcgaagtccacgaacccgtgccgaaaccgggcaggcaacgctcctacgagtcgcaacaagtagatatctacttagcttatatcgggcagtggggggagtga

SEQ ID NO: 76816 - protein, 242 aa, Unknown
  Obtained from environmental sample
  misc_feature (1)..(242): Xaa is any amino acid
MRGNRRRRTANGEKPLLSGLVKCFDCGHNLTYCYQGLGEHRVTIFXCGMYRSSDCLNTRPCSRHFIKVADLEKLVLMKIQETVNLARNDKREFARVVYNSANKDAAKEIKSKTAELSRAETRIGELDRYITKIYEDNVNGKLSDERFQKMMCGYETEQKDLAAKVETLRFEIDELKSKSANIDSFMKLVARFDEITELTDEVARTFIDRIEVHEPVPKPGRQRSYESQQVDIYLAYIGQWGE

SEQ ID NO: 76817 - DNA, 636 bp, Unknown
  Obtained from environmental sample
  misc_feature (1)..(636): n is a, c, g, or t
ttgaacgacctgctccttaagctggtgcatattgaaagcgcggtggccgtttatgaaaaatacggagaggggcggaacaaggcgctggttttcgccgtctccatagaacacgccaagaaactggccgaggctttcaaccgggccgggcacccggcggcggcggtgcactcgcaaatgtccggccgggcggggatactggccgatttcgaggccggcggcttgaaggttttgataaatataggcgtcttgaccgagggatgggacagcccggcggtggatttgattctattgtgccggccgaccaagtccccggccctgtttgtgcagatggtcggccggngttcccggccgcatcccggcaaaaaggattttctggtgctggatttggcggagaatttcaaancccacggcgacccgggcgaccccgcggtcgtcgttccggtcggggggggcggcgacccgcccctacagacctgcccaagctgccggggcttattagcggccctcgacctcacctgccccgattgcgggcataggtgggaagtgaagctgggcgatataagcaggccccgaacttggcaaagtcaagccgcccaattccacgaacaggctgctcaactgggacggcggaaataa

SEQ ID NO: 76818 - protein, 211 aa, Unknown
  Obtained from environmental sample
  DOMAIN (44)...(118): Helicase conserved C-terminal domain
  misc_feature (1)..(211): Xaa is any amino acid
MNDLLLKLVHIESAVAVYEKYGEGRNKALVFAVSIEHAKKLAEAFNRAGHPAAAVHSQMSGRAGILADFEAGGLKVLINIGVLTEGWDSPAVDLILLCRPTKSPALFVQMVGRXSRPHPGKKDFLVLDLAENFKXHGDPGDPAVVVPVGGGGDPPLQTCPSCRGLLAALDLTCPDCGHRWEVKLGDISRPRTWQSQAAQFHEQAAQLGRRK

SEQ ID NO: 76819 - DNA, 945 bp, Unknown
  Obtained from environmental sample
  misc_feature (1)..(945): n is a, c, g, or t
gtggacgataaagacatggcacgcggcaaaacacgcaaaaaagcagtggtcagtgatcagtggttattgatcggtgaaaagtgggcggtaaaacagccggagttattgccgcaattgccgccgcacaataagtcgggcgacggcggcgggtatgtcggcgcgtccggacgccggtcgatgctgacgtggaacgcgcctaattcgactgcggacggcgctatccttccggcgctcaggacgctgagagaccgcacacgcgaccttgaacggaacagtccggcggcgcatggcacgctaaaggcgatggtcaacggagttatcggcgcgggtttgcgtgtgagatcggccattgaccgggatatgttggggctgtcagaagaccaggcgaaggaatggcaggcgaatgcggaacaggaatttcgattgtgggcggaatcaaagcactctgatttcatgggacagttgaatttcaacggccttcaaaggctcgcgtattattcgcaaaaaacctccggcgattgttttgtgttgatgccgtgggcggagaggccgggcgtgccgtatgatttgcgcctgcagcttatagaggccgaccgtgtgtgcaatccgctggatatgccggacagcgaagagattgccggcggaattgagcgcaacaaggaaggtattccggtagcgatatatatccggacgccgcatccgggaatgtcatcttacatgcaatcgtttccgccgaaatggaagcgcgtgccatattacggacggcgtaccggacggcggaatgttttgcatctgattgacattgaccgtattgggcagagccgcggactgcctatgctgtctccggttatcgaaacattaaagcagataaccaaatacacggaagcggaattagcggcggcagtagttaatggaatgctgtcggtgttatctcggccgatctga

SEQ ID NO: 76820 - protein, 314 aa, Unknown
  Obtained from environmental sample
  DOMAIN (54)...(314): Phage portal protein, lambda family
  misc_feature (1)..(314): Xaa is any amino acid
MDDKDMARGKTRKKAVVSDQWLLIGEKWAVKQPELLPQLPPHNKSGDGGGYVGASGRRSMLTWNAPNSTADGAILPALRTLRDRTRDLERNSPAAHGTLKAMVNGVIGAGLRVRSAIDRDMLGLSEDQAKEWQANAEQEFRLWAESKHSDFMGQLNFNGLQRLAYYSQKTSGDCFVLMPWAERPGVPYDLRLQLIEADRVCNPLDMPDSEEIAGGIERNKEGIPVAIYIRTPHPGMSSYMQSFPPKWKRVPYYGRRTGRRNVLHLIDIDRIGQSRGLPMLSPVIETLKQITKYTEAELAAAVVNGMLSVLSRPI

SEQ ID NO: 76821 - DNA, 396 bp, Unknown
  Obtained from environmental sample
  misc_feature (1)..(396): n is a, c, g, or t
atgtggctccgttacaccgcagccggttttctgataatccaaccggaggatgatcttcaccggattgtcgatgctctattggaaaccggctacagcgaagatttttgtgtttctccggactttgattttgtttttattgcccggttgatgaaagccggatttttggtgatgtcttcaaaaatagtcgatccggaagctgaaaatgatgcggagtattttatcctcctgcccaaattgcacctggttcggtctgttctgtttttcgaccgcttgcacataaaaaaatccataaagcggcatctgagccgttttgaacttcgtcccgatgcggattttgattacatccttgaccggtgtatacaggtacacggagatgactggttaactccgccttga

SEQ ID NO: 76822 - protein, 131 aa, Unknown
  Obtained from environmental sample
  misc_feature (1)..(131): Xaa is any amino acid
MWLRYTAAGFLIIQPEDDLHRIVDALLETGYSEDFCVSPDFDFVFIARLMKAGFLVMSSKIVDPEAENDAEYFILLPKLHLVRSVLFFDRLHIKKSIKRHLSRFELRPDADFDYILDRCIQVHGDDWLTPP

SEQ ID NO: 76823 - DNA, 315 bp, Unknown
  Obtained from environmental sample
  misc_feature (1)..(315): n is a, c, g, or t
atgtccatgtccaaaacccttgctcccgggtcttcgatttccgaggccgggcttgccgaactgacgcggctcgcccgcgtgggctttgagcctgaggagcgcgcggacttgtcgcgccagctcgcttccattttggagtatgtcgagatcctgaacagtattgacacgacaggcgttgcgccgatgtattcgcccggcgaacacgcggcgccgcttcgtccggatgaagccgcctcctccttgagccgcgacgatctgtttgccaacgcgcccgaagcaggcaacggcttttttgtcgttcccaagattgtgtaa

SEQ ID NO: 76824 - protein, 104 aa, Unknown
  Obtained from environmental sample
  DOMAIN (29)...(100): Glu-tRNAGln amidotransferase C subunit
  misc_feature (1)..(104): Xaa is any amino acid
MSMSKTLAPGSSISEAGLAELTRLARVGFEPEERADLSRQLASILEYVEILNSIDTTGVAPMYSPGEHAAPLRPDEAASSLSRDDLFANAPEAGNGFFVVPKIV

SEQ ID NO: 76825 - DNA, 717 bp, Unknown
  Obtained from environmental sample
  misc_feature (1)..(717): n is a, c, g, or t
ttggctatgacattggatgaagtattattgcctgaaaatataatagagctcaagtccagagacaaagccatggccattatggagcttgccgccgttctcgggagtaagcacccgacactggatacaaagcaggtagccgcccgcattcaggacaaggaagcgctcttcagctccgtcatccgcaacggggtcgccatgccccatatccatatcccgatggatgagcccatactgatcgcgattggccgcagccataagggcgtggattttctcggcgacggacgacagtttgtgcatcttgtggttctgctgatcaccagacccgatatgcccgaggtgcatcttgaggtattgcgcgaaatcgcgctgctgtttgacagtgaaaaaacgcttaacgcgctcaaggaagcgccgggcaccgcagacctgaaacggctcctgattggcaaaaaaagccgcccaagcgcaaacgcccccaaacgccacagcatagacgaaaccataaccgatctccttatcgagcatagcgcaaagatcgcccgcgagctcagcatcaataccatattcatcaactgcgattcgctgcagtcaatcgacaagctgagcgttctgcaaggaaataccgccgacagccgactgcgggtaatccccgtattcaaaagaacaggctccggaggaatttcaaaaagcatatcccgattttttgcaattgcctga

SEQ ID NO: 76826 - protein, 238 aa, Unknown
  Obtained from environmental sample
  DOMAIN (7)...(150): Phosphoenolpyruvate-dependent sugar phosphotransferase system, EIIA 2
  misc_feature (1)..(238): Xaa is any amino acid
MAMTLDEVLLPENIIELKSRDKAMAIMELAAVLGSKHPTLDTKQVAARIQDKEALFSSVIRNGVAMPHIHIPMDEPILIAIGRSHKGVDFLGDGRQFVHLVVLLITRPDMPEVHLEVLREIALLFDSEKTLNALKEAPGTADLKRLLIGKKSRPSANAPKRHSIDETITDLLIEHSAKIARELSINTIFINCDSLQSIDKLSVLQGNTADSRLRVIPVFKRTGSGGISKSISRFFAIA

SEQ ID NO: 76827 - DNA, 537 bp, Unknown
  Obtained from environmental sample
  misc_feature (1)..(537): n is a, c, g, or t
atgatcatgtcggatatggctcaattctttagtcttgacaatccaacctttgaagaaaattttcattccaacggccaagcgtattggtatgcttcagaatttatccattggctggggtacaaagaatattcccccaccatgccgccgataaacaaagcaatgtccgtctgtataagcatacccaccataataacagccgaccatttcagggaagaagtacgctttttagatggtaaaaacataaaagatttcaaactttcccgtttcgcttgctatctcgtatcaatgaacgctgatataaaaaaatcgcaagttgctaaagctcaagcctatttcgcagctttcgcggcagccgtccaagagtacattcgtacttcagaagacattgaacgtgtccccttgcggaaagaaattagtgaatgggagaaatctctttcttccactgcgaaaacagccggcgttgaacgctatgactatttttccnataaaggtatatgggcctctacaatatgccaatccataagattagagaattaa

SEQ ID NO: 76828 - protein, 178 aa, Unknown
  Obtained from environmental sample
  misc_feature (1)..(178): Xaa is any amino acid
MIMSDMAQFFSLDNPTFEENFHSNGQAYWYASEFIHWLGYKEYSPTMPPINKAMSVCISIPTIITADHFREEVRFLDGKNIKDFKLSRFACYLVSMNADIKKSQVAKAQAYFAAFAAAVQEYIRTSEDIERVPLRKEISEWEKSLSSTAKTAGVERYDYFSXKGIWASTICQSIRLEN

SEQ ID NO: 76829 - DNA, 363 bp, Unknown
  Obtained from environmental sample
  misc_feature (1)..(363): n is a, c, g, or t
gtggttcagcgccataagtttcttttcaagttcggtcgactaccggacaagcgacgagcgcggcctcggcgcggcggcgtccagcgccacgaccgtcggcgcgctgagcatcggctacatccgcggcgacgtcgccgccgccgtgggtctgagtatgttggaagaccgcatttgggtcggcagcgactacagcgcgttcgctctgagcctcgggctcggctacaaaatgttagacggcaggctgaacctcggcgcggcgtggatgaacgctctcgcgtggagccgcgggttcgccggcgaagagtcgcgttggagcgacggccgcgttccggtcttcgcccgcgccggagcggcgtggactga

SEQ ID NO: 76830 - protein, 120 aa, Unknown
  Obtained from environmental sample
  misc_feature (1)..(120): Xaa is any amino acid
MVQRHKFLFKFGRLPDKRRARPRRGGVQRHDRRRAEHRLHPRRRRRRRGSEYVGRPHLGRQRLQRVRSEPRARLQNVRRQAEPRRGVDERSRVEPRVRRRRVALERRPRSGLRPRRSGVD

SEQ ID NO: 76831 - DNA, 816 bp, Unknown
  Obtained from environmental sample
  misc_feature (1)..(816): n is a, c, g, or t
atgggcaagacgctcccgcaagctctttttcaaagtgatctctcctctcgctctttcaaacggcgcttgtattataccgcactccgcgtaccggcgtgcttagttttatgtaaatgttatcaccgcatgataccggaggaacgcacattgaaagaagggttctggggatttttttggacacaggtcctgggcgcgctcaatgacaacctttataaaatggcgatgatcgtgtggataacctttgaggcgcatgatttcggtgagtttacgcgcaacacgctggttatcgtagcctccggcgtatacatcctgcccttctttcttttttccgcaaccgccggctggctcgccgatcgctatcccaaggatctggttatccgctggacaaagatcgcggaaatcttcatcatgcttgcgggcgctttcgcgttcatgctcgaatccattccggcgctgatgatcgtactctttttcatgggcgcgcaatcggcgttcttcagccccgcaaaatacggtatagtcccggaactctgcgcgtccgaaaaactcatgcgcgcaaacggccttataggcatgggcaatctcttcgccctgctcgcgggaacactcggcggaatatttttgggcttattcgacaaactcatatacgccgcgattgccgtgcttcttgtcgccatcgtgggctacctcacaagcacccgcatcccgaaactgcccgcgcgcgcgccggagctgacgagagaaggcgatctctttcaggagacatttacaggctgcgcgacattaagcgtatgccgctcatatttccatttttga

SEQ ID NO: 76832 - protein, 271 aa, Unknown
  Obtained from environmental sample
  misc_feature (1)..(271): Xaa is any amino acid
MGKTLPQALFQSDLSSRSFKRRLYYTALRVPACLVLCKCYHRMIPEERTLKEGFWGFFWTQVLGALNDNLYKMAMIVWITFEAHDFGEFTRNTLVIVASGVYILPFFLFSATAGWLADRYPKDLVIRWTKIAEIFIMLAGAFAFMLESIPALMIVLFFMGAQSAFFSPAKYGIVPELCASEKLMRANGLIGMGNLFALLAGTLGGIFLGLFDKLIYAAIAVLLVAIVGYLTSTRIPKLPARAPELTREGDLFQETFTGCATLSVCRSYFHF

SEQ ID NO: 76833 - DNA, 420 bp, Unknown
  Obtained from environmental sample
  misc_feature (1)..(420): n is a, c, g, or t
gtggcggaagtgcgccatatcctgaccaagcacggcgcctcgctcggcgagagcggctgcgtcggctggatgttgnagcgcaagggcgtcatacccctggataaggcgaagtacgccgaggaagccgtgatggaagccgcgctcgaagccggggccgacgacgtgcaggatcaagacgatacctgggccgtgcataccgcgccggcggatttcaacaccgtgcgcgaggcgcttgaaagcgccggggtggaaatgctttccgccgaattttccctgatccccgccaatgccgtcagcgtggacgcggagacgggcagaaagctcatcaagctcatggatgctctggacgacaacgatgacgtgcagaaaacccacgccaacttcgacttgcccgaagaacttctggcggaactcggctag

SEQ ID NO: 76834 - protein, 139 aa, Unknown
  Obtained from environmental sample
  DOMAIN (2)...(129): Domain of unknown function DUF28
  misc_feature (1)..(139): Xaa is any amino acid
MAEVRHILTKHGASLGESGCVGWMLXRKGVIPLDKAKYAEEAVMEAALEAGADDVQDQDDTWAVHTAPADFNTVREALESAGVEMLSAEFSLIPANAVSVDAETGRKLIKLMDALDDNDDVQKTHANFDLPEELLAELG

SEQ ID NO: 76835 - DNA, 468 bp, Unknown
  Obtained from environmental sample
  misc_feature (1)..(468): n is a, c, g, or t
atgacacaagangaaattgatacntacgaaaatttaatgttactttgtccacaacatcacataatgatagacagcgatcntcagttttttgggagtgattacctaaaaaaagtgaaagaagaacatgaaaatcgaattctgaccatcacatccataccgaaagggcaaataactagaatggtgtcatatattgcatcaattgatggttattgtccggaacataattcgttattgtttagacaagcagtagttaggaataaccaatatccacaacagtatggcgttatagaactaaacaattctaaagcggactatgagccaacgcaagaatattatcagattagagcagatgaattatcaaaatcagttcgtgaacgtatgagcgtaataactaaaaaagaagttatctcactttttccttttggtttacaaccncctgctcatcaaacttggaacattgttaagtga

SEQ ID NO: 76836 - protein, 155 aa, Unknown
  Obtained from environmental sample
  misc_feature (1)..(155): Xaa is any amino acid
MTQXEIDTYENLMLLCPQHHIMIDSDXQFFGSDYLKKVKEEHENRILTITSIPKGQITRMVSYIASIDGYCPEHNSLLFRQAVVRNNQYPQQYGVIELNNSKADYEPTQEYYQIRADELSKSVRERMSVITKKEVISLFPFGLQPPAHQTWNIVK

SEQ ID NO: 76837 - DNA, 480 bp, Unknown
  Obtained from environmental sample
  misc_feature (1)..(480): n is a, c, g, or t
atggccgaggaatgctaccataggacggattacattttcccgaaaagaagcngttaccngggtgaaaattgtcatttttaccctgcacttagtctaaaaaatgtaaaagaagacgggcagatactcttaaccgagatagaaaattaccctgcttctgaaccgttaaaaggcgattattttacccgggagagcgatgtacttttaagactgaatgcgccttatacatcgggttttatttccaaaaaggagacaggcttacttgtaccatcacactttgccattatacggacaaaagagaaaattgatcctcgctatctgcgttggtggttgtcaaaaaaaagaaaatggttttataaagttgcaagcggtgggacaatgatgggtactatcagttccggctatgttgcacagatgccattcgaaccgccgccattagaaaaacaacggaagataggagaaatgcttgaattattanaatag

SEQ ID NO: 76838 - protein, 159 aa, Unknown
  Obtained from environmental sample
  DOMAIN (27)...(159): Type I restriction modification DNA specificity domain
  misc_feature (1)..(159): Xaa is any amino acid
MAEECYHRTDYIFPKRSXYXGENCHFYPALSLKNVKEDGQILLTEIENYPASEPLKGDYFTRESDVLLRLNAPYTSGFISKKETGLLVPSHFAIIRTKEKIDPRYLRWWLSKKRKWFYKVASGGTMMGTISSGYVAQMPFEPPPLEKQRKIGEMLELLX

SEQ ID NO: 76839 - DNA, 447 bp, Unknown
  Obtained from environmental sample
  misc_feature (1)..(447): n is a, c, g, or t
gtgcgcttggcctgcgacacgcatctgccgctttgcgccgcatcagcggcgatgcgntcgctgggtcttccgcagccactgacggcacaggcatncgctcttcagccccccctgaacttccgacccggcacgatagttctggatgtgccntgctccggtcttggggtgttggcgaccagaccggatattcgccgccacggaacggaacgacaacttcaggaattcgtccgaacccaggcggccatgctggaggcagcccatgccgaaccggctgccggcggacatatcgtctacatcacctgcacgcaaaatccggcggagaatgaggaacagattcgcgcctttctcagtcgtcatcccaaggtggaacttgccggggaatggaacagcccggccggggacatgcggctgggaggcatgtacgccgccttgttggtgaaagcttag

SEQ ID NO: 76840 - protein, 148 aa, Unknown
  Obtained from environmental sample
  misc_feature (1)..(148): Xaa is any amino acid
MRLACDTHLPLCAASAAMRSLGLPQPLTAQAXALQPPLNFRPGTIVLDVPCSGLGVLATRPDIRRHGTERQLQEFVRTQAAMLEAAHAEPAAGGHIVYITCTQNPAENEEQIRAFLSRHPKVELAGEWNSPAGDMRLGGMYAALLVKA

SEQ ID NO: 76841 - DNA, 597 bp, Unknown
  Obtained from environmental sample
  misc_feature (1)..(597): n is a, c, g, or t
atgaaagcttccgaactttcccttgacctggcggcgcgcctgcgtaacaagcgcgtactcattctgggcgatgtcatgcttgaccagtacctgttcggcgatgcggagcgcatttcgcctgaggcgccggtgccggtcatccgtctggaacaggaacgttgttatttgggcggcgccggcaacgtggcccgcaacgtgaaggcgttgggcggcagggccagcttggtgggtatagccggagacgacgatgccgggcacctgcttcaggaaatattgcggcaggaagacattgacgcctatctgcccctttgccccggcagagtgactacccggaagacccgcgtgttggcccgcaaccagcagatgttgcgccttgaccgcgaaaagagttgccccctgaaagccgnnagagaacgcctgcttctggatcgcctggggccgctggcggcaaacatgaagcgctttatctctccgactacgaacagggtcttgtccgtacctccctttagggaaacccctgcgccgccattgctgaaaaacccttcccccaacccgcttcttggggttcgtgggaatccccgccccccaaaaaaataa

SEQ ID NO: 76842 - protein, 198 aa, Unknown
  Obtained from environmental sample
  misc_feature (1)..(198): Xaa is any amino acid
MKASELSLDLAARLRNKRVLILGDVMLDQYLFGDAERISPEAPVPVIRLEQERCYLGGAGNVARNVKALGGRASLVGIAGDDDAGHLLQEILRQEDIDAYLPLCPGRVTTRKTRVLARNQQMLRLDREKSCPLKAXRERLLLDRLGPLAANMKRFISPTTNRVLSVPPFRETPAPPLLKNPSPNPLLGVRGNPRPPKK

SEQ ID NO: 76843 - DNA, 318 bp, Unknown
  Obtained from environmental sample
  misc_feature (1)..(318): n is a, c, g, or t
gtggtgcaattcgtgatggtcaatatctatttttggctggtcgcgcgcatgttgtccttcaactacctgcacaatctgctgcatcagcttgcctcgcccgccgtgctgctcggccttgccctgatcagccgggaaagcactctcatgctgccgcccgccttggcgacgggcctcgcgcgttttttcctttcgggcgtgctgtattccctgctgacggcgctgtgcctgcttgccgtgccgcagatcgcgggctgctcccggcaggatttgtatgacatcgccgggcgcatgtggcgcaatatgccctgggggcgatga

SEQ ID NO: 76844 - protein, 105 aa, Unknown
  Obtained from environmental sample
  misc_feature (1)..(105): Xaa is any amino acid
MVQFVMVNIYFWLVARMLSFNYLHNLLHQLASPAVLLGLALISRESTLMLPPALATGLARFFLSGVLYSLLTALCLLAVPQIAGCSRQDLYDIAGRMWRNMPWGR

SEQ ID NO: 76845 - DNA, 414 bp, Unknown
  Obtained from environmental sample
  misc_feature (1)..(414): n is a, c, g, or t
atgatccgcaaggcgcgggccgtcgagctgatgcagggcaacctgcccgtccccgcggtgcagcgtgtgctcgggcactcaagccccaatctcaccacggcccgcatttcctttgcggaagacgacatccgccgggtgacccgccggcacatggaacgggagtccggcagaaaaaccagcgcgcggaacagctttttcggtaaggtgcattcgctgatcgcgggggaggtgcaaagcctcgtccggatcgttacgacggacgggggcgcgctcagcgccatcgtcaccaataccagcgcggagcatctgggcctcaaacccggcaggccgctgtccgcggaaatcaaagcgccctggctggtcctggaacggcacgacgccacgggatgcagcagtcttgagaacccgccgtga

SEQ ID NO: 76846 - protein, 137 aa, Unknown
  Obtained from environmental sample
  DOMAIN (59)...(122): TOBE domain
  misc_feature (1)..(137): Xaa is any amino acid
MIRKARAVELMQGNLPVPAVQRVLGHSSPNLTTARISFAEDDIRRVTRRHMERESGRKTSARNSFFGKVHSLIAGEVQSLVRIVTTDGGALSAIVTNTSAEHLGLKPGRPLSAEIKAPWLVLERHDATGCSSLENPP

SEQ ID NO: 76847 - DNA, 783 bp, Unknown
  Obtained from environmental sample
  misc_feature (1)..(783): n is a, c, g, or t
ttgacccatatagggcttattacggtggtatttaccactttcacggaacgcagggagccgtcaagcgttacgcttaacagaatccgcgaccgtgtcgggacggttgcgggtacggagataacagtcgagaaggaggctatggggccgccggtgggcagtcccgtaagcatagagatagcgggccccgatgttgatatgctggggacaattgcgtcagggataaaggatcatataagaaacgttccgggtcttgttgacttaaaagacgattatatcaaatccaaaccggagatacgcgtaatggttgaccgtgaaaaagccgcgttgctggggctgtccacatacacaatttcaaacgcggtgaaaggggctatttccggcatgaaggtaggcgtttaccgcgaaggggatgacgaatacgacataatagtcaggctgcccgaagaaaaacgcaaaactgtagatgatattaaaaatttgcagataccgtcaaaaacaggcgcgtatattccgctgtccagcgttgccgaagtggatttgtcggcggggttcggcaggattgcccgcattgacttcaaacgggtggttaacgtgaccgcccacgcggacggcagaagcggcatggaggtggcaaacgatgttaaaaaactgctctccctctatcaacttcctgacgactacaggataaggttcaccggcgaagatgaagaacagcaggaagcgagcgcttttctttcaaaggcttttttaatagcgatcttcctcctcctcatggttctctga

SEQ ID NO: 76848 - protein, 260 aa, Unknown
  Obtained from environmental sample
  misc_feature (1)..(260): Xaa is any amino acid
MTHIGLITVVFTTFTERREPSSVTLNRIRDRVGTVAGTEITVEKEAMGPPVGSPVSIEIAGPDVDMLGTIASGIKDHIRNVPGLVDLKDDYIKSKPEIRVMVDREKAALLGLSTYTISNAVKGAISGMKVGVYREGDDEYDIIVRLPEEKRKTVDDIKNLQIPSKTGAYIPLSSVAEVDLSAGFGRIARIDFKRVVNVTAHADGRSGMEVANDVKKLLSLYQLPDDYRIRFTGEDEEQQEASAFLSKAFLIAIFLLLMVL

SEQ ID NO: 76849 - DNA, 576 bp, Unknown
  Obtained from environmental sample
  misc_feature (1)..(576): n is a, c, g, or t
atggagataaatgagggggagcttatcgcggtaacgggcccctccggggtaggcaaatccaccctgatgcatataataggcggacttgagcgtcccagcgcgggggaggtgctgttccgcggaaaaaacatctatggttacagcggcgcggaactggacagataccggaacagcaatgtggggtttgtttttcagtttcactatctgctggatgatttttccgctttagagaatgttacaattcctgcccttttggcgggcaaagataaaaaagaggcgcaggcgcgcgctgcggagcttcttgagacagtagggcttaaagatagggtttcacactatccgaaagagctgtcaggaggggaacagcaaagggttgccgtagctcgggcgctgatgaacagccccacggtaattttggctgacgaacccaccggcaacctcgaccgcgcaaacagccttgcagtgcaggaacttcttttcaatctgataaacaccggagtaaccgttataatcgtaacacacgacgcggagctgtcggaacggtgcgggcgcataattaagctggaaaaagtgtaa

SEQ ID NO: 76850 - protein, 191 aa, Unknown
  Obtained from environmental sample
  DOMAIN (6)...(191): ABC transporter
  misc_feature (1)..(191): Xaa is any amino acid
MEINEGELIAVTGPSGVGKSTLMHIIGGLERPSAGEVLFRGKNIYGYSGAELDRYRNSNVGFVFQFHYLLDDFSALENVTIPALLAGKDKKEAQARAAELLETVGLKDRVSHYPKELSGGEQQRVAVARALMNSPTVILADEPTGNLDRANSLAVQELLFNLINTGVTVIIVTHDAELSERCGRIIKLEKV

SEQ ID NO: 76851 - DNA, 576 bp, Unknown
  Obtained from environmental sample
  misc_feature (1)..(576): n is a, c, g, or t
atgtattattttttactgataagcaaagtagatttgcttgaaaaggcagttggtggcgggcaacctaatataagccaaattataatcaaaaacgaacctttcttgaaagtaccacttgctgaacaaaaggttatagccgcatttcttgacactcaatgtagaaaaattgattccattattactgaactggaacagcagatagaaatcctcaagcagtacaaaacatccctcattactgaaactgtaacaaaggggctaaataagaatgtaccaatgaaaaacagtgggatagattggatagggaaaataccggctcattgggaagttaaaccaacaaaatatatacttgagtcaaaccaagagacattaaaagaatctacccaagctgattatacttttaaatatattgatattggttcagtagattttgataaaggtataatcaattatgaggaaatgagctttgagacttcaccttctcgagcgaggcggatagttaaaaaaggagatacaattatatcaacggttcgtacatatctaaaagcaatagctcgtatgaagaagatagagatataa

SEQ ID NO: 76852 - protein, 191 aa, Unknown
  Obtained from environmental sample
  misc_feature (1)..(191): Xaa is any amino acid
MYYFLLISKVDLLEKAVGGGQPNISQIIIKNEPFLKVPLAEQKVIAAFLDTQCRKIDSIITELEQQIEILKQYKTSLITETVTKGLNKNVPMKNSGIDWIGKIPAHWEVKPTKYILESNQETLKESTQADYTFKYIDIGSVDFDKGIINYEEMSFETSPSRARRIVKKGDTIISTVRTYLKAIARMKKIEI

SEQ ID NO: 76853 - DNA, 360 bp, Unknown
  Obtained from environmental sample
  misc_feature (1)..(360): n is a, c, g, or t
atgaagcgctgcntgcgttgctatgcctgccgcaacgcctgtcccatgtgcgtgtgccgcgacttctgcgtagcggaaagccgcgacccgcactggctgacgcaggaagacacggtgggcgaaaaacttttcttccaggtcatccacgccatgcatctggccgggcgttgcacgggctgcggccaatgcggccgcgcctgcccggtttccattcccattctggccctgcgccagcacttgggcaagattgtgggcgagcttttcgacggctacaaggcgggcatgcatcccgaggcgacgccgccgctgctcggctacgaggtggaagaaaagcatatccatgagagggaatggaaatga

SEQ ID NO: 76854 - protein, 119 aa, Unknown
  Obtained from environmental sample
  DOMAIN (50)...(73): 4Fe-4S binding domain
  misc_feature (1)..(119): Xaa is any amino acid
MKRCXRCYACRNACPMCVCRDFCVAESRDPHWLTQEDTVGEKLFFQVIHAMHLAGRCTGCGQCGRACPVSIPILALRQHLGKIVGELFDGYKAGMHPEATPPLLGYEVEEKHIHEREWK

SEQ ID NO: 76855 - DNA, 522 bp, Unknown
  Obtained from environmental sample
  misc_feature (1)..(522): n is a, c, g, or t
gtggccgggcacctcgcccccgaccaattcgcccggtcctggccgcccggcttcgacccggccaagtacgaaattcacggggcggcggtccatatcccggtccgcgaaggcgaccggttcgacctcggcggccgaagctttgaaatcctggccacccccggacactcgcccgacagcctcatgcttttcgacagcgaaaactccatcctcctgaccggggacaccttttacccggccgccctctatgcccacctggactccggggacggcctggcctcggatttccaggcctaccgggcgaccatgaaccgcctggcccgcgattacggccgggtgcgctttctctattgcagccacaacgaaccgctccagcccggcgcgaaactgggccaggccgcggcggccttcgaggcggtcgcggccgggaaacagcccttccgcgaatacgcccgcggcctgcggcgctacgacttcgatggtttcgccctagtggcggagcccaataaaatcattaaccactaa

SEQ ID NO: 76856 - protein, 173 aa, Unknown
  Obtained from environmental sample
  misc_feature (1)..(173): Xaa is any amino acid
MAGHLAPDQFARSWPPGFDPAKYEIHGAAVHIPVREGDRFDLGGRSFEILATPGHSPDSLMLFDSENSILLTGDTFYPAALYAHLDSGDGLASDFQAYRATMNRLARDYGRVRFLYCSHNEPLQPGAKLGQAAAAFEAVAAGKQPFREYARGLRRYDFDGFALVAEPNKIINH

SEQ ID NO: 76857 - DNA, 372 bp, Unknown
  Obtained from environmental sample
  misc_feature (1)..(372): n is a, c, g, or t
atggctctccaagccttacaagacctattcagacgccaccgtgaaagggcaacaggccactggcgcattggcgatggcagctcccgcactgtgtactttgattctggagacatcgtattcgcgtccagcaccttccccgccgacaggctgactgctgtgatggtggagcagggcaagctcacccaggcgcagatggatcatgccctcgtcaacctcaagcctggcatgtcggtagggaaaaacctcatagagatgggtttcatcacgcagagggacttgctggacatggctaggctccaagtagagaagatagtctggtctgcgatgctttccagtgaggcccccgcattgaagacatctcggccgatctga

SEQ ID NO: 76858 - protein, 123 aa, Unknown
  Obtained from environmental sample
  misc_feature (1)..(123): Xaa is any amino acid
MALQALQDLFRRHRERATGHWRIGDGSSRTVYFDSGDIVFASSTFPADRLTAVMVEQGKLTQAQMDHALVNLKPGMSVGKNLIEMGFITQRDLLDMARLQVEKIVWSAMLSSEAPALKTSRPI

SEQ ID NO: 76859 - DNA, 396 bp, Unknown
  Obtained from environmental sample
  misc_feature (1)..(396): n is a, c, g, or t
atgacagccatggacgacgactgcaacaccgccgccgccattggccacatgttcgtcgccatccgcctgctcaaccgggtgttggacgacaagaagctcaagaccacgcacgcggccaggctgttctgtcaggcgctactcggcgccgcacggcgctgggacgcgattcttggcgcgctgggcgccgaacccgttgcgttcctggaacgcctgcgcgccgccaaagccaagcgccgccgcatcgatctgaacaaggtgcaggcgctcatcctggaacggcaagaagcacgcgctcaaaaaaacttcagccgggctgacgccgcgcgcggtgaactgctgcggcttggcgtcgaaatccgcgacacgccggagggaacggcatgggacattgcctga

SEQ ID NO: 76860 - protein, 131 aa, Unknown
  Obtained from environmental sample
  misc_feature (1)..(131): Xaa is any amino acid
MTAMDDDCNTAAAIGHMFVAIRLLNRVLDDKKLKTTHAARLFCQALLGAARRWDAILGALGAEPVAFLERLRAAKAKRRRIDLNKVQALILERQEARAQKNFSRADAARGELLRLGVEIRDTPEGTAWDIA

SEQ ID NO: 76861 - DNA, 657 bp, Unknown
  Obtained from environmental sample
  misc_feature (1)..(657): n is a, c, g, or t
ttgtttccggattcccgctgccccatattgctggcgctgatgctgaccgagttcagccacgcggcttacaagcgggtcgtgcagacggtatcgtatatgccntatttcatttccacggtcgtcatctgcggcatactcaaggagtttctttcttacgacggactgttcgggaaaatcgccggaattttgttcggcagcagcccgcagaactacctgggcaacccggcttatttccgcccgatactgattgcctcggacatctggcagggaataggttggaactccataatatacctggcggcgctggcgggggtggacgtcgagctgtacgattcggcaaagctggacggcgcgggcaggctggcgcagattatccatatcacgctgccgggcatactgccgacaatcatggtgctgatgatactgagcgtgggcaacatactgtccattgagtccgacaagatactgctgctgtattcgccgcagacatacgagacggccgacgtgataggcacttacatatacaggcgggggattgtcaactcccagtacggctacagcactgcaatagggcttatgaacacgctggtcaacatactgctgctggtgtgcgccaacggcatcagccgcaaggcgaccggcgagagtctttggtag

SEQ ID NO: 76862 - protein, 218 aa, Unknown
  Obtained from environmental sample
  SIGNAL (1)...(21)
  misc_feature (1)..(218): Xaa is any amino acid
MFPDSRCPILLALMLTEFSHAAYKRVVQTVSYMPYFISTVVICGILKEFLSYDGLFGKIAGILFGSSPQNYLGNPAYFRPILIASDIWQGIGWNSIIYLAALAGVDVELYDSAKLDGAGRLAQIIHITLPGILPTIMVLMILSVGNILSIESDKILLLYSPQTYETADVIGTYIYRRGIVNSQYGYSTAIGLMNTLVNILLLVCANGISRKATGESLW

SEQ ID NO: 76863 - DNA, 312 bp, Unknown
  Obtained from environmental sample
  misc_feature (1)..(312): n is a, c, g, or t
atgttgacttcatcaagtacggcgacgtcctcaccttcatgctcgacggcgtcacctacggcgacaaccgcagcgttgcctccggcggcaccaacgccaccccctgggacgccgccaccggctccaagctcaagggcggcaagtacgacgtcaccaaggtcgtgcggcccctgctgtccaggccctatccaattctgggccatgacgaagacgccgcccgcgactacaccggccctgtcttcgtcgccggccagaacgtcgatggctccgagatcggctacgaagaaggcgggacgaccagcatctacgtag

SEQ ID NO: 76864 - protein, 103 aa, Unknown
  Obtained from environmental sample
  SIGNAL (1)...(24)
  misc_feature (1)..(103): Xaa is any amino acid
MLTSSSTATSSPSCSTASPTATTAALPPAAPTPPPGTPPPAPSSRAASTTSPRSCGPCCPGPIQFWAMTKTPPATTPALSSSPARTSMAPRSATKKAGRPAST

SEQ ID NO: 76865 - DNA, 396 bp, Unknown
  Obtained from environmental sample
  misc_feature (1)..(396): n is a, c, g, or t
atgacagattggccgagcggccgagctgtttttctggagcaaattttttttaaactccgcaaggcgggtcttgttagttctatccggggtcctgggggaggtttcaattttacccgtcctttggacaaattaactgttaaggagattttagatgcttcaggggaagatataaatctttctttctgcgacaagcatagtgaatcatgcgaaagattcggctactgcttaagtcatttagtttggcttgatctcactaagataatacatagctactttgcacagttgaccttggcttctattatggaaaaatataataattttttgagtaccgatcccaagggagccgccatggtagggcaggaaacgcaaaacaagctccccataagtcaaaaataa

SEQ ID NO: 76866 - protein, 131 aa, Unknown
  Obtained from environmental sample
  DOMAIN (1)...(92): Transcriptional regulator
  misc_feature (1)..(131): Xaa is any amino acid
MTDWPSGRAVFLEQIFFKLRKAGLVSSIRGPGGGFNFTRPLDKLTVKEILDASGEDINLSFCDKHSESCERFGYCLSHLVWLDLTKIIHSYFAQLTLASIMEKYNNFLSTDPKGAAMVGQETQNKLPISQK

SEQ ID NO: 76867 - DNA, 570 bp, Unknown
  Obtained from environmental sample
  misc_feature (1)..(570): n is a, c, g, or t
ttgccggcntttggctttttttcccgcggccgttgnggtcggcgccgtttgggcttccgtgcccgttncggcggttttggtcggcgcccgtttttnngcgggcgctcccttgggggtggcgggtttccgttgtcntgccgtggttttccctcgcggcgggtttttgcgggcttccggggggggttggggggtcccctttttcgcttggggggggttcttttcggggggggccccggcgggggggtttttttcggtttttcggcgggctcggttttttccccccttgggggggggtttgttggggccggtttggggggtttgggctgcgggggcttgggcccgggtttcggccgggccttggggggggtcgccnttttttcgggggttgtttcggcctttttgggggggggcccccccgggtggtttcgccccccgggggctttttttttttggggtttttccttttttttttngnnntttncccccccntnnnnnnnnnnnnnnnnnnncnnnnnngggggggggggggggggtacacgggacggcgctggcgatatggattccgcttaa

SEQ ID NO: 76868 - protein, 189 aa, Unknown
  Obtained from environmental sample
  misc_feature (1)..(189): Xaa is any amino acid
MPAFGFFSRGRXGRRRLGFRARXGGFGRRPFXXGRSLGGGGFPLSCRGFPSRRVFAGFRGGLGGPLFRLGGVLFGGGPGGGVFFGFSAGSVFSPLGGGFVGAGLGGLGCGGLGPGFGRALGGVAXFSGVVSAFLGGGPPGWFRPPGAFFFWGFSFFFXXFXPPXXXXXXXXXGGGGGGTRDGAGDMDSA

SEQ ID NO: 76869 - DNA, 561 bp, Unknown
  Obtained from environmental sample
  misc_feature (1)..(561): n is a, c, g, or t
gtgtcacgatggaacagtctatgcccaaaaggcatggaatttcaccaaggtgcgctcaagttcacggagaacgattttgacgtggccatagagggcaatgcctttttctctgttatgaccaacgaaggcatccgggtcacgcgggacggacgcttcaccttgggtcccaacgggacgctgacgaccattgacggcttccccgtactaggcacaaatggcccaatcaacattgaccccaatggacccaagcccacctttacaaaagagggggaaatccaccaaggcaacgagttcttggggcagctgcaactgaaggcctttgaggacaccaggcccctgttccgaacaggcgcggggcgctacgatgccagcgaggctaccgagggccccatctatggaagcgttgtgcagggctaccaagagcagagcagcgttgacatggccagtgccatggtcgagatgatacgcctaaaccgcctatttgaaatgagccagaaagtggcaagcactttgaccaatgacctagacaccaaaagcctgaccatcggcgctggtcaataa

SEQ ID NO: 76870 - protein, 186 aa, Unknown
  Obtained from environmental sample
  misc_feature (1)..(186): Xaa is any amino acid
MSRWNSLCPKGMEFHQGALKFTENDFDVAIEGNAFFSVMTNEGIRVTRDGRFTLGPNGTLTTIDGFPVLGTNGPINIDPNGPKPTFTKEGEIHQGNEFLGQLQLKAFEDTRPLFRTGAGRYDASEATEGPIYGSVVQGYQEQSSVDMASAMVEMIRLNRLFEMSQKVASTLTNDLDTKSLTIGAGQ

SEQ ID NO: 76871 - DNA, 309 bp, Unknown
  Obtained from environmental sample
  misc_feature (1)..(309): n is a, c, g, or t
gtgaccaaagaacaggcaagtttcacctatgcatccgaggccgacctgttgaacatggccttgttcgggaaaacagcccagcaatggcgcaaggaaaatcctaaagaaaaaggcaatatgcgcgattgtgctacgcttgagcagttgattgttctcagcaatcttgagagtatcaacgcgttgctcatcagccggaaaatctcgcagagtgaccggcttattcagttgaacaatgtggctataacgcaaatgaaatctttgcttggcaatcagcacatacaaacaatagccgctcttgatacaaaatag

SEQ ID NO: 76872 - protein, 102 aa, Unknown
  Obtained from environmental sample
  misc_feature (1)..(102): Xaa is any amino acid
MTKEQASFTYASEADLLNMALFGKTAQQWRKENPKEKGNMRDCATLEQLIVLSNLESINALLISRKISQSDRLIQLNNVAITQMKSLLGNQHIQTIAALDTK

SEQ ID NO: 76873 - DNA, 699 bp, Unknown
  Obtained from environmental sample
  misc_feature (1)..(699): n is a, c, g, or t
ttggtgctgctggacgcaatggccgcccattctgtcaggcatttcatattttccagcacggccgccacctacggcgaccctgagtattcacccatagatgaggcacacccccaaaagccagtcaacgtgtacggatactcaaagttgctggtggagggcgcacttaaatggatatccgaaattcatggcatgtcgtgtgtgtgcctaaggtatttcaacgctgcgggctgctctgaaaatttgggagaggatcacagccccgaaacgcacttgataccgctggcgctggacgttgctatggggaaggcgccgtctctaaagctctttggcacagactacccaacgccagatggaacttgcgtcagggactacgttcatgtggccgaccttgcagacgcgcatctgttggcactaaagaaaatctctggcagcgaggttcctctaagattggcgtacaacttggggaatggccgcggattcagcgtcagggaagtgatagagacagcccgccgtgtgacgggccatccgataccagtgatagaagagcctaggcgcctaggcgacccggccgtgctagtggcgtccagcgaaaagataaaggccgatttgggctgggagccaaagtacccaagtttggaaagcatcatcaaaagcgcttgggcatggcggaaatcccatccaaaagggtacggcaaatga

SEQ ID NO: 76874 - protein, 232 aa, Unknown
  Obtained from environmental sample
  DOMAIN (1)...(155): NAD dependent epimerase/dehydratase family
  misc_feature (1)..(232): Xaa is any amino acid
MVLLDAMAAHSVRHFIFSSTAATYGDPEYSPIDEAHPQKPVNVYGYSKLLVEGALKWISEIHGMSCVCLRYFNAAGCSENLGEDHSPETHLIPLALDVAMGKAPSLKLFGTDYPTPDGTCVRDYVHVADLADAHLLALKKISGSEVPLRLAYNLGNGRGFSVREVIETARRVTGHPIPVIEEPRRLGDPAVLVASSEKIKADLGWEPKYPSLESIIKSAWAWRKSHPKGYGK

SEQ ID NO: 76875 - DNA, 618 bp, Unknown
  Obtained from environmental sample
  misc_feature (1)..(618): n is a, c, g, or t
gtgcggcctgaacgtcgcgcacagcgaaaccgccaaaatcggcggcagagatgtcctgtggtgaaacgatttgaccgcgaacacacgacggacggattcttacggcacagaatgttcagcgcattgacggctttgcaaagcgatgacagcccgacgagtcgcgacaagtggtcgtatgttgcgctggcggaagagttgcggcgtttcggcgttgcgccaaaggaagacgcgaaagaactttttatgcgtatggtattcaatgccttgattacgaacaatgacgaccacccgcgtaatcacgcatttatcgcgacggaaggcaataattggcggctgtcgcccgcatatgaccttacgcccgcgccaatggtcgcgcaggagcggcgcgatttggcgatgattgccggttcgcgcggccgctgggcgaataaaaagaacctgttgtcggaatgcgggcgatttttgttggagccagcgcacgcggaatccataattgacactatggcagaagtagtaaaaaaagattggtatgcaaggatgcgggcggcgggagtatccgaaacggactgcgagaaactccgccctgcatttgtttatgatggattttggacggaataa

SEQ ID NO: 76876 - protein, 205 aa, Unknown
  Obtained from environmental sample
  DOMAIN (35)...(117): HipA-like C-terminal domain
  misc_feature (1)..(205): Xaa is any amino acid
MRPERRAQRNRQNRRQRCPVVKRFDREHTTDGFLRHRMFSALTALQSDDSPTSRDKWSYVALAEELRRFGVAPKEDAKELFMRMVFNALITNNDDHPRNHAFIATEGNNWRLSPAYDLTPAPMVAQERRDLAMIAGSRGRWANKKNLLSECGRFLLEPAHAESIIDTMAEVVKKDWYARMRAAGVSETDCEKLRPAFVYDGFWTE

SEQ ID NO: 76877 - DNA, 645 bp, Unknown
  Obtained from environmental sample
  misc_feature (1)..(645): n is a, c, g, or t
gtggccagcaatgccatcaacgccgtgtggggcacgctcttcctgctctcggtgctgaacgtgatgggcgtgagcgttggtcccctgctgcagggtgcctctattttgggtatggtgctgggcttcggggcgcaggcgttggtcaaggacgtgctgtcgggcatcttcatgctaatcgaggaccagtacggtgtcggcgacatcatcaacatagacaacgccaacgtgggcaccgtggagcgcatgacgctgcggataacgatgctgcgggactcggagggtcgggcgcactacatccccaacggcacaatctcgcgggtggtggtgctttcaaaagattttgcccgtgccatggttgacttcgaggtgggtctcgattacgacgcggacaaggtggcggcgctgctgcgagacattggtgccgagatgcagcgcgacatgcccgaaattctgctggagccaaccgacgtcaaggggatagagaccattggcccatcctgctatacaattcgtacactgacaaagtgcgctagggcctgccagtgggacgtcgccagggagtaccgcaggcgggtgctggccaggttccgccaagtgggcataaagacgccagcgcagacagtcgtggtgaagaacggcgattag

SEQ ID NO: 76878 - protein, 214 aa, Unknown
  Obtained from environmental sample
  SIGNAL (1)...(23)
  DOMAIN (4)...(204): Mechanosensitive ion channel
  misc_feature (1)..(214): Xaa is any amino acid
MASNAINAVWGTLFLLSVLNVMGVSVGPLLQGASILGMVLGFGAQALVKDVLSGIFMLIEDQYGVGDIINIDNANVGTVERMTLRITMLRDSEGRAHYIPNGTISRVVVLSKDFARAMVDFEVGLDYDADKVAALLRDIGAEMQRDMPEILLEPTDVKGIETIGPSCYTIRTLTKCARACQWDVAREYRRRVLARFRQVGIKTPAQTVVVKNGD

SEQ ID NO: 76879 - DNA, 678 bp, Unknown
  Obtained from environmental sample
  misc_feature (1)..(678): n is a, c, g, or t
ttggttataatagacgatttgggttccgcgttggtgtttatgtttatcactctggtcatgcttttttcggcgggagtgagtttgtggtacttcctgggatttgcggcaacggtaaccgccgttttcccgcttatatttccgtttatgccggaatatcagcggaaaagaatactgtacggcttcaatcccgaacttgaccctgtggatacgggctggcaggcgcttatgtcaagggacgctatcggttccggaggagctttcgggaaaggatatcagcagggacccgttactcagagcggcagacttgccgcgcagcgtaccgactttgtattttccgtagccggagaggaacttggtttcgtcggatgtcttataataataattctgattgcgcttatcatcataaggatattcggtatatcgcttaaaactttgcagtcgcagaatatgaactcgtttatatgcgtgggagtttacgcaatgtttatggctcaaactatggaaaatataggaatgtgtattgccgttctgccggtagtgggaataacgcttccgttcgtcagttacggaggctcgtcgctgttgagctgttatattgcgctcggacttgtgcaaagcgtatattcgggcagaaataagtattattttgaaagaaatgaaaatctgagtaacttttaa

SEQ ID NO: 76880 - protein, 225 aa, Unknown
  Obtained from environmental sample
  DOMAIN (1)...(213): Cell cycle protein
  misc_feature (1)..(225): Xaa is any amino acid
MVIIDDLGSALVFMFITLVMLFSAGVSLWYFLGFAATVTAVFPLIFPFMPEYQRKRILYGFNPELDPVDTGWQALMSRDAIGSGGAFGKGYQQGPVTQSGRLAAQRTDFVFSVAGEELGFVGCLIIIILIALIIIRIFGISLKTLQSQNMNSFICVGVYAMFMAQTMENIGMCIAVLPVVGITLPFVSYGGSSLLSCYIALGLVQSVYSGRNKYYFERNENLSNF

SEQ ID NO: 76881 - DNA, 843 bp, Unknown
  Obtained from environmental sample
  misc_feature (1)..(843): n is a, c, g, or t
gtgcgaaattccccaaatattatgtcaaacggcaatgttcccaaaatgtggtttaaaaaagaaggccgattatatttaataaaaggaagcgaaggttttctgttccaggaaccttttaatgaagctgctgtttcacagtatcttgataaagttaatatattgcatgtgcagtattctctggatactctgaaaggaaggccgttcagcatttgtgaaaacatgcttgaaaaaggcgaagaattaatacctgcgtattatatatgtcctgttgctaaatatgaaaatagaaatattacgtataatgaatacatacaagcctgctgccatacgggcttgaatgaggataaaacaaggaaagaactggacaatatgctgataattgattatataattgcaaatttagacagacattggtttaatttcggggttatacgcgacgcagaaacgcttcgtattaaaaggttggcacccttatatgaccacggtctggctttgttcgcgaaagtttttactcaagatatagcggaaactgcaagcgatgttgaatcatcaagttttaatgattatttgcgtgaaaatttaaagatggtgcaaaatacgtctcttctggaaaatacgcatattggggatttatccggtatatatgaaaaaatacaggagaaaagcctgctgatagatgcggacagaatanaattgacttcaaaaaacatagaattacgtatacatgaaatanaggattatttcggctttaaaaagaacgggttacgccccatgncatgcgtaaaatatgaaaatagcgtaaagtacaatggtcaaaatatattttccggaacatatatatga

SEQ ID NO: 76882 - protein, 280 aa, Unknown
  Obtained from environmental sample
  DOMAIN (81)...(160): HipA-like C-terminal domain
  misc_feature (1)..(280): Xaa is any amino acid
MRNSPNIMSNGNVPKMWFKKEGRLYLIKGSEGFLFQEPFNEAAVSQYLDKVNILHVQYSLDTLKGRPFSICENMLEKGEELIPAYYICPVAKYENRNITYNEYIQACCHTGLNEDKTRKELDNMLIIDYIIANLDRHWFNFGVIRDAETLRIKRLAPLYDHGLALFAKVFTQDIAETASDVESSSFNDYLRENLKMVQNTSLLENTHIGDLSGIYEKIQEKSLLIDADRIXLTSKNIELRIHEIXDYFGFKKNGLRPMXCVKYENSVKYNGQNIFSGTYI

SEQ ID NO: 76883 - DNA, 600 bp, Unknown
  Obtained from environmental sample
  misc_feature (1)..(600): n is a, c, g, or t
atggactgccttttccaatttatgagacgcctggctgtcgtcgccgttaccgccgttaccgttatctgcctgccgtcatacggggacgacgcggctaaagcgttgcatgagcggcggaatgacgccgtttttacgtacactggcgatgtattgcgtttcgctataccggcatcggcgctaggatattcccttatcataaaagataccgacggcgtaaaggagtgggccttgtcggtcggctccgcggcggttcttacggaggggctgaaatacgcgatcggcaggccgaggccctaccaggaacccaacgagcgaggcctctcttttccctccggccatacggctatggcgtttgccggcgcaacctattggcaacggcggtacgggtgggaaatcggcatccccgcctacgtattggctgccacggtcgggtattcccgcatttggtcgggcagccactattggtcggacattgttgccggggcggccataggtattgcgttcccgtacatttttacaaaaccttatgaaaaagtacagatcaacgtaagcgccgaaccggatggcgggggcagtataagtttctcctttcggttttga

SEQ ID NO: 76884 - protein, 199 aa, Unknown
  Obtained from environmental sample
  SIGNAL (1)...(28)
  DOMAIN (71)...(181): PAP2 superfamily
  misc_feature (1)..(199): Xaa is any amino acid
MDCLFQFMRRLAVVAVTAVTVICLPSYGDDAAKALHERRNDAVFTYTGDVLRFAIPASALGYSLIIKDTDGVKEWALSVGSAAVLTEGLKYAIGRPRPYQEPNERGLSFPSGHTAMAFAGATYWQRRYGWEIGIPAYVLAATVGYSRIWSGSHYWSDIVAGAAIGIAFPYIFTKPYEKVQINVSAEPDGGGSISFSFRF

SEQ ID NO: 76885 - DNA, 570 bp, Unknown
  Obtained from environmental sample
  misc_feature (1)..(570): n is a, c, g, or t
atggtcgtcggagtcccgaatacgggaaagtcgacgcttattaacgcactcgcggggaagaagaagactatgacgggcgacaagccgggcgtgacgcgggcgaagcaatgggtgaccgccgaaaacggcgtcgaggttttggacacgccgggcgcgcttcttccgtctatagaaaagcaggagttggcacgtgaccttttttatatcgggagcattaagccggaaatttttgacaataccaagctttgtttggggctaatcgagaagctgaaggccgccgcgccgaaaaggttggcggagagatatgggctgggcggcgagaatcgcgggacggcggaaagtggggaaaacaaggaaaacggcggcgaaggcaaggctgggcaagggcttaaggacatgtcggagggtgaaattttagaggcggtcgcgaaaaagcggggctgtcttttaaagggcggagaaaccgacctagataaggcggcggttttgattttagaggattatagaagagggcggctgggggcgatatgtctggagaggccgccaatggcaggcgaggaaaatttatga

SEQ ID NO: 76886 - protein, 189 aa, Unknown
  Obtained from environmental sample
  DOMAIN (1)...(105): GTPase of unknown function
  misc_feature (1)..(189): Xaa is any amino acid
MVVGVPNTGKSTLINALAGKKKTMTGDKPGVTRAKQWVTAENGVEVLDTPGALLPSIEKQELARDLFYIGSIKPEIFDNTKLCLGLIEKLKAAAPKRLAERYGLGGENRGTAESGENKENGGEGKAGQGLKDMSEGEILEAVAKKRGCLLKGGETDLDKAAVLILEDYRRGRLGAICLERPPMAGEENL

SEQ ID NO: 76887 - DNA, 693 bp, Unknown
  Obtained from environmental sample
  misc_feature (1)..(693): n is a, c, g, or t
atggaacaaaatatcgtttccgcgtctgaaaagcggcttgaagaatacaaaaatgcccaggctgaggcattcaggcagttaaacagccttgccgatgacgcggccggcatggaagcggaattgcgggcttccatgaaagatgcaatagacagggtcaactcagactttgccgaatttcagaaagaatcaggcgcggccagggaagcggtggcggtcggattcgatgagcaggcccgttcgctcaggctggaactggacaacctggacaaagaagtcgatgggcttaggcagcaggctattggcaaagtttcggaaaaacttaaggactttgaggacagttttaccgcagagcttgccaggcgcagggcggaaacagaacgccaatttgccgaattcagcgcgcttgcggcaaaacagcacggcgaactggatgcgtccctcagaaatcaggaaaaggaatacagcaccgttcttgccgaacttaaagagaaatcaggcgcggccctcaagcagcagcaagaccagcttagcgccgccataaaacaggaacgggacacaataaacgccgcaatgcttcagcaacaagatgatcttaacgccgcggttacggggctaaaagaaaaatccggcgcggcccctcaacagcagcaagaccagcttagcgccgccataaacaggaacgggacacaataa

SEQ ID NO: 76888 - protein, 230 aa, Unknown
  Obtained from environmental sample
  misc_feature (1)..(230): Xaa is any amino acid
MEQNIVSASEKRLEEYKNAQAEAFRQLNSLADDAAGMEAELRASMKDAIDRVNSDFAEFQKESGAAREAVAVGFDEQARSLRLELDNLDKEVDGLRQQAIGKVSEKLKDFEDSFTAELARRRAETERQFAEFSALAAKQHGELDASLRNQEKEYSTVLAELKEKSGAALKQQQDQLSAAIKQERDTINAAMLQQQDDLNAAVTGLKEKSGAAPQQQQDQLSAAINRNGTQ

SEQ ID NO: 76889 - DNA, 711 bp, Unknown
  Obtained from environmental sample
  misc_feature (1)..(711): n is a, c, g, or t
gtgagtcctccacccactgacgccaagcctgcgtccggcactactgaaaccgcctccgacgcatcccagacgcttcccaaggttcagttggacattgacgatgcgcctttcctgcgggagaaggcgccggaaccgccgcctcccgcgcccaaggaggaagagagcgcccccgaaccgctggaagtcgcccctccgcccgacgctgaaagcaaaccccgaagcaaaaagaaaatcctcatcatcgttgctgtgctgctgatcctgctcctggccggcggaggcggagccgtgtggtggttcaagctacgtaagccgcccccgccgcccccgccgccggtcaaaccgcaagtgatagttgtgccgtccacccccccggacagcggccccccggacaacctcgtttcttttgctccgttctggatggaactgatgggggactccccgcgcaacaaagacaaaatctttttcctggtctgcaaatttaccgccatcgccaaatccgagcccgcgcttcaggaggcgcaaagcaaaaccaccatcctccgcgacgccctgtatttttatttgaaaaacaagagctatgaattcctgacgaatgccgacaatacgcaagtcatcaaaaatgaccttgtctccgtcatcaacggctacctgaccgggaacaacaaagtggacgacgtgctttttgaacgctatgtttccactaaatga

SEQ ID NO: 76890 - protein, 236 aa, Unknown
  Obtained from environmental sample
  DOMAIN (75)...(235): Flagellar basal body-associated protein FliL
  misc_feature (1)..(236): Xaa is any amino acid
MSPPPTDAKPASGTTETASDASQTLPKVQLDIDDAPFLREKAPEPPPPAPKEEESAPEPLEVAPPPDAESKPRSKKKILIIVAVLLILLLAGGGGAVWWFKLRKPPPPPPPPVKPQVIVVPSTPPDSGPPDNLVSFAPFWMELMGDSPRNKDKIFFLVCKFTAIAKSEPALQEAQSKTTILRDALYFYLKNKSYEFLTNADNTQVIKNDLVSVINGYLTGNNKVDDVLFERYVSTK

SEQ ID NO: 76891 - DNA, 825 bp, Unknown
  Obtained from environmental sample
  misc_feature (1)..(825): n is a, c, g, or t
gtgcgtgcgagtcatcccggcaatatccggaaattcagcgaccaagtcaaagaaattacccaggccgccacggatcacggcaccagcttgcgcatcgggattaatgccgggtcgttaacgcccgaagtcatggccaaatatgggaaagctaccccggaagctctagtcgaggcggcgttgcgggaagcagcgctatttgaagagcacggcttccacgacttcaaaatttctgtaaaacaccacgacccggtaattatggttaaagcttatgagttgctgtccgaagccggggattggccgctccacctgggggtgaccgaagccggcccagtgttccagggcactatcaagtcagccaccgcattcggggcgctcctgagcaaaggtattggcgacaccatccgggtttccctgtccgccccgccagtcgaagaagtcaaagtcggcatcgccatcctgcagtccctcaacctacgggaacgcaaactggaaattgtcagttgtcccgggtgcggacgcgctcaagtagatgtctggagcctagccgaccaggtgactgccgggttagagggaatgaacgtccccttacgggtcgcggtcatgggttgcatcgtcaacgggcccggggaagcgcgggaggccgacttgggcgtagccagcggtaacggcaagggccaaattttcattaagggtgaagtcattaagacggtacccgagtccgaaatcgtggataccctgctcgctgaatcagccaaactggcggcgcanatggaagcgacggaaacnactagtcccgaggtttcccgtattccgtccactcactaa

SEQ ID NO: 76892 - protein, 274 aa, Unknown
  Obtained from environmental sample
  DOMAIN (1)...(258): GcpE protein
  misc_feature (1)..(274): Xaa is any amino acid
MRASHPGNIRKFSDQVKEITQAATDHGTSLRIGINAGSLTPEVMAKYGKATPEALVEAALREAALFEEHGFHDFKISVKHHDPVIMVKAYELLSEAGDWPLHLGVTEAGPVFQGTIKSATAFGALLSKGIGDTIRVSLSAPPVEEVKVGIAILQSLNLRERKLEIVSCPGCGRAQVDVWSLADQVTAGLEGMNVPLRVAVMGCIVNGPGEAREADLGVASGNGKGQIFIKGEVIKTVPESEIVDTLLAESAKLAAXMEATETTSPEVSRIPSTH

SEQ ID NO: 76893 - DNA, 627 bp, Unknown
  Obtained from environmental sample
  misc_feature (1)..(627): n is a, c, g, or t
atgaaaaaacaaatccactccctactcatagcctcagcccttttggccatagctgtgctgggtgcattgtcatgcagcagcagcggcggctccgagccgtttttcccaaccgagcccaacgtggccgtggaacgcatctcgctcgaaccgaaaacgctttccctcgaagcgacagaacagaaatccatcagggcctcaatcgagcccagcaacgccaccagcaagaccatctcttggacgagcagcgacacccgcgtggccacggtggccccgtccaccggcgccaccgtgacggtgacggccgtggacggaggcaccgctacgatcacggccatggtgccgggcggcaatggccgcaccctgacggccacctgcgtcgtgacggtgaaagttccagtggctggcctgaccatctcgcccccctccctgacgctggtctccaccgactccatccccaaccccacaggcaccttgaccgccatggtggtcccctccaatgcaacggacccggagttgcagccatggatatccggcaacccatcggtcgtcagagtcgcccccggcccacccccaacacatgcacagtcaccgccgttggcaacggcacggcccccgtctgggccgtga

SEQ ID NO: 76894 - protein, 208 aa, Unknown
  Obtained from environmental sample
  SIGNAL (1)...(24)
  DOMAIN (42)...(123): Bacterial Ig-like domain (group 2)
  misc_feature (1)..(208): Xaa is any amino acid
MKKQIHSLLIASALLAIAVLGALSCSSSGGSEPFFPTEPNVAVERISLEPKTLSLEATEQKSIRASIEPSNATSKTISWTSSDTRVATVAPSTGATVTVTAVDGGTATITAMVPGGNGRTLTATCVVTVKVPVAGLTISPPSLTLVSTDSIPNPTGTLTAMVVPSNATDPELQPWISGNPSVVRVAPGPPPTHAQSPPLATARPPSGP

SEQ ID NO: 76895 - DNA, 900 bp, Unknown
  Obtained from environmental sample
  misc_feature (1)..(900): n is a, c, g, or t
ttgatcagatcggccgagggggacgggactactccgccattaaacactaatggcaatgttgggccccgcgccaattccgaagaagactctatagaaggaatttatgtttccccaaatggcaatgacacttcggcaacaggttcaatcgacgcgccttataaaagtatcaatgccgctttggcagccgccgaaccaggcgatactatagtactgcgaggcggtacatatcgcgagggaattaatgtccgcgttcgaaaaccaaatatcaccataaagtccgcaaaaggcgaatgggcggttattgaccttactacatacaattcagggcataatgaagattctggggtttatttcgatgttgattcgtcaggcggtaaattacaatctgtcgaagtgaagggtggattttatgcggtcgctttagaaaccagatgggattggggagaagccaatcgtgccggagcatccaatattatcattgaagattgcagactgcacgattcaagatacgatgtagttaaaataaaacctaattgcgataacgtcacaattcgctataacgaaatatataattctgggcaggcctttgccggcaggcctaaaaacggggaagataacgctgaaggcattgataatgtcaatggcgacaatatgaaagtacagaacaactatattcatgatatttgttcgaacgcgatttacgccaaaggcggcgcggccgatgcgttaattgaaaacaacctcattgaacgcgcatacggaggcggggttctcgttggctttgataccagtccggaattttttgatcttacagtgaatccgcagtactacgaaaatatcaggggcgttgtcccgcataatctgatcattagcactggttgggagggtattggtttataa

SEQ ID NO: 76896 - protein, 299 aa, Unknown
  Obtained from environmental sample
  misc_feature (1)..(299): Xaa is any amino acid
MIRSAEGDGTTPPLNTNGNVGPRANSEEDSIEGIYVSPNGNDTSATGSIDAPYKSINAALAAAEPGDTIVLRGGTYREGINVRVRKPNITIKSAKGEWAVIDLTTYNSGHNEDSGVYFDVDSSGGKLQSVEVKGGFYAVALETRWDWGEANRAGASNIIIEDCRLHDSRYDVVKIKPNCDNVTIRYNEIYNSGQAFAGRPKNGEDNAEGIDNVNGDNMKVQNNYIHDICSNAIYAKGGAADALIENNLIERAYGGGVLVGFDTSPEFFDLTVNPQYYENIRGVVPHNLIISTGWEGIGL

SEQ ID NO: 76897 - DNA, 900 bp, Unknown
  Obtained from environmental sample
  misc_feature (1)..(900): n is a, c, g, or t
gtganccttgaagaaccggatacgagggagttcgctcaaaaatatccgcgggacttcttcaaaaattattcgggcgacctgataatagacgaggttcagcgtgtgcccgagttattaagttatgtgcaggttatagcggatgacgctaaccgcaaagggcaatttatccttaccgggtctcaccagccgcagctgaaagcgaatatttcccagtcgcttgcgggacgtaccgctatgatttcgcttttgccgctgacaattgctgagctaagcggcggcggcattacgctggatcgggacgaatatatctataaaggatttttgccccgtatttacaatgagtctcttacaccgaaatatttgtatcaaaactattacgcgacttatgtggaacgcgacgtcagacaactcataaacgtggccaatcaaaattcatttgagcgctttattaaacttttggccgggcggatagggcaattaataaatctgaattctttagcctgcgatgtgggcgtatcgcaaccgacccttagttcatggatatctatattggaggcaagtttcattatcttcaggcttccgtgttattttgtcaattttggaaagcgggttataaaaaccccgaagctctactttaccgatgtaggtttagccgcttctttgcttgaaatagagagtccgagtcaagtattcagagaccctcttgtagggaacttatttgaaaatatgattgtcgccgatgtgctcaaaactatgtacaataacgggaagaattcaggaatctactatttccgcagccaaagcggtctggaggtggatttgattctgagcagagggcgggagctgattccgatagaaattaaatccggggcgacgttgatacggcctcggccaatctga

SEQ ID NO: 76898 - protein, 299 aa, Unknown
  Obtained from environmental sample
  misc_feature (1)..(299): Xaa is any amino acid
MXLEEPDTREFAQKYPRDFFKNYSGDLIIDEVQRVPELLSYVQVIADDANRKGQFILTGSHQPQLKANISQSLAGRTAMISLLPLTIAELSGGGITLDRDEYIYKGFLPRIYNESLTPKYLYQNYYATYVERDVRQLINVANQNSFERFIKLLAGRIGQLINLNSLACDVGVSQPTLSSWISILEASFIIFRLPCYFVNFGKRVIKTPKLYFTDVGLAASLLEIESPSQVFRDPLVGNLFENMIVADVLKTMYNNGKNSGIYYFRSQSGLEVDLILSRGRELIPIEIKSGATLIRPRPI

SEQ ID NO: 76899 - DNA, 819 bp, Unknown
  Obtained from environmental sample
  misc_feature (1)..(819): n is a, c, g, or t
atgctcgctttgtggcagggaaacgttacatctgatgaaaatgttgttttaaatcaaattaactcaaatgcaaaacaagcattaagacgtgccggcaaatcagagttgtccagtagcctccgtgttgatcccgaaaataatgatttgtcggttaaagcatgggaaattattgaaatacttaataaattaaatataagaagttttctccatgaacatgattatctgggacaattatacgaaactttttttagattcactgggggaaatacaataggtcaatattttactcctcggcatattatcaattttttatgtgaactggttgaagtatcaaataaagatatcgttttagatccggcatgcggtaccggcggatttttaattggtgttattaatcgcatggtaaccacatcaaaaaagacttatgaagatgttgttgaattaattaaaaacaacctttttgggatagaatcagagccggcgacagccgcactgtgtattaccaatatgattttacgaggcgacgggaaaagcggtattgttaaaggtgattgttttaaaatggcttcatatcccggcaaggaagttgactttgtattaatgaatcccccgtttcctcataaaaaaactgatacgccgcctactgattttattgacagaggattaaatcaattaaaaaacagaggcatattangagtaattattccttatgccttgctggttagaaaaaaagaatggcatgaaaaaattttacaaaacaacagtattggtcttatagcaactttaccttttgatttatttaatcctatgccaatataa

SEQ ID NO: 76900 - protein, 272 aa, Unknown
  Obtained from environmental sample
  DOMAIN (98)...(262): Putative RNA methylase family UPF0020
  misc_feature (1)..(272): Xaa is any amino acid
MLALWQGNVTSDENVVLNQINSNAKQALRRAGKSELSSSLRVDPENNDLSVKAWEIIEILNKLNIRSFLHEHDYLGQLYETFFRFTGGNTIGQYFTPRHIINFLCELVEVSNKDIVLDPACGTGGFLIGVINRMVTTSKKTYEDVVELIKNNLFGIESEPATAALCITNMILRGDGKSGIVKGDCFKMASYPGKEVDFVLMNPPFPHKKTDTPPTDFIDRGLNQLKNRGILXVIIPYALLVRKKEWHEKILQNNSIGLIATLPFDLFNPMPI

SEQ ID NO: 76901 - DNA, 765 bp, Unknown
  Obtained from environmental sample
  misc_feature (1)..(765): n is a, c, g, or t
ttgtcgggaaaaaatgaagcggcggctgtaaaacttttagacgacggcatttatcgtttcccgtcaacggtaaaaacagggacgcagattcggttaaatattgataatagcggactgccaaagggcagtactatgaacacttatgcgttttacaccaactcgcaaaatgcaaaagcggttaagatcgccaataacgagtggataagaagcgatggctcagtaaagccggagaatatagttattttatattcacgctcccccattgatattgattctttgctcaccacttttgacagacagaaagatgatattccatcccgtctttcccgtattataggaaaagattttattttgtttggcaactcaaaatatgagtattcttccatgcagataaaggcaaattttatgaatcaaaaatcagtcgctggaatgatactctcggtaagtttcgataccgaagaaaaacctataaaagacatagtacgtatcaaaggagggacgtttacaatggggagtcccgcctccgaagagtggcatcaggatgacgaacaacagcgggttgttagcgtaaaagatttttatttaggtgtcgtggaggtgaccgtcgccgacttcaacgcatttgttacgganaccggctataaaactacggctgaaaaaaacggtaaaagttatttctttaattatttaaccgatgaaattgaagagcgaaatggaatgaattggcgaaatcccggttttactcaggaagtaatcacccggtag

SEQ ID NO: 76902 - protein, 254 aa, Unknown
  Obtained from environmental sample
  misc_feature (1)..(254): Xaa is any amino acid
MSGKNEAAAVKLLDDGIYRFPSTVKTGTQIRLNIDNSGLPKGSTMNTYAFYTNSQNAKAVKIANNEWIRSDGSVKPENIVILYSRSPIDIDSLLTTFDRQKDDIPSRLSRIIGKDFILFGNSKYEYSSMQIKANFMNQKSVAGMILSVSFDTEEKPIKDIVRIKGGTFTMGSPASEEWHQDDEQQRVVSVKDFYLGVVEVTVADFNAFVTXTGYKTTAEKNGKSYFFNYLTDEIEERNGMNWRNPGFTQEVITR

SEQ ID NO: 76903 - DNA, 822 bp, Unknown
  Obtained from environmental sample
  misc_feature (1)..(822): n is a, c, g, or t
atggcgaggcggtcgactccattggcgttccgacttactataacttcggcgtttacgcttatcttgtctacagggattatatctcaatgcaatanttggtttccgcacacctcctccggttatgctggttccgttactttttcttcttttgttgatgtttctgagtcttccggttatgtctacaatagcactgtttgccgtcattttagttctgctggcaattcttccactgcgtgtcgtgttgattttcctgctaacagcgttggtgagtttaatgttgaggcttgcgttgaggattacgcaagatgtgtgcagcctacttgcgctcgcattgctcctatctcttgcggtcctgattcagaaggtggctcctccggttcgggcggtggcggttcgtctggctccacgggtggcgatggcgatggtggcaattcctccggctctggcggtgatcctggcggtgatggtggtggttccgccggttcttcttcccctagcggtggcggtggttcttctccttccggtggtgatggcggtgaccctaacggcaatgatactacgggcacgggcggttgcaagaatttgaataattgtgactggtctaaatatgagtatcagctcaagcaaattggcgttgctcagaggactttggatagccttagaattttgtttgagtggatgaagtataaaagccatgaggatagtcttctgacggctttgcgttggtctatggacactacacgccaatccaagcttgtncatcttgccgagacattgaacggcatagtttttaataattgggttgaccagaagaacttatga

SEQ ID NO: 76904 - protein, 273 aa, Unknown
  Obtained from environmental sample
  SIGNAL (1)...(19)
  misc_feature (1)..(273): Xaa is any amino acid
MARRSTPLAFRLTITSAFTLILSTGIISQCNXWFPHTSSGYAGSVTFSSFVDVSESSGYVYNSTVCRHFSSAGNSSTACRVDFPANSVGEFNVEACVEDYARCVQPTCARIAPISCGPDSEGGSSGSGGGGSSGSTGGDGDGGNSSGSGGDPGGDGGGSAGSSSPSGGGGSSPSGGDGGDPNGNDTTGTGGCKNLNNCDWSKYEYQLKQIGVAQRTLDSLRILFEWMKYKSHEDSLLTALRWSMDTTRQSKLVHLAETLNGIVFNNWVDQKNL

SEQ ID NO: 76905 - DNA, 465 bp, Unknown
  Obtained from environmental sample
  misc_feature (1)..(465): n is a, c, g, or t
atgctggttccgttactttttcttcttttgttgatgtttctgagtcttccggttatgtctacaatagcactgtttgccgtcattttagttctgctggcaattcttccactgcgtgtcgtgttgattttcctgctaacagcgttggtgagtttaatgttgaggcttgcgttgaggattacgcaagatgtgtgcagcctacttgcgctcgcattgctcctatctcttgcggtcctgattcagaaggtggctcctccggttcgggcggtggcggttcgtctggctccacgggtggcgatggcgatggtggcaattcctccggctctggcggtgatcctggcggtgatggtggtggttccgccggttcttcttcccctagcggtggcggtggttcttctccttccggtggtgatggcggtgaccctaacggcaatgatactacgggcacgggcggttgcaagaatttga

SEQ ID NO: 76906 - protein, 154 aa, Unknown
  Obtained from environmental sample
  SIGNAL (1)...(20)
  misc_feature (1)..(154): Xaa is any amino acid
MLVPLLFLLLLMFLSLPVMSTIALFAVILVLLAILPLRVVLIFLLTALVSLMLRLALRITQDVCSLLALALLLSLAVLIQKVAPPVRAVAVRLAPRVAMAMVAIPPALAVILAVMVVVPPVLLPLAVAVVLLLPVVMAVTLTAMILRARAVARI

SEQ ID NO: 76907 - DNA, 603 bp, Unknown
  Obtained from environmental sample
  misc_feature (1)..(603): n is a, c, g, or t
ttgcgcaaaagcggagacctgacggaagacatcaccggcaacggcgcgttccccgcgctgctggagcagttggatctcggcacgctggaaatttcccgtctgggcgaaggacacgtctatgacccggaacgccacgaaccgcccggcgccgcagcggaacgcgatgccttccggcaggactttcccgaaatgttcaagctggccctgaccctgcaccgcctgacggacatcccgctgctcaagccggaatgctggaacgtgctgcttgccgaattggcggaagaaatccggaacaatgcctattccctgcacggcaccaccaaaaacgtgcgcgaacgctgtctcgccaagggcttgccgctcaccgggcgcgatgtcgcctggctgctcggcacccttggacagggcggctgccgcctgcgcgaacgccgcgacctttctcggcgggaactgggcaaggcgcttttgctcggcatgcagaccctgtgccgtagcgcccaactgcaccttgagcagcaggaactgcaactgctgatggaatggctgctccccaaaacggggccggcccgcagcgaacaggaacaggcgaacactcccgcctga

SEQ ID NO: 76908 - protein, 200 aa, Unknown
  Obtained from environmental sample
  misc_feature (1)..(200): Xaa is any amino acid
MRKSGDLTEDITGNGAFPALLEQLDLGTLEISRLGEGHVYDPERHEPPGAAAERDAFRQDFPEMFKLALTLHRLTDIPLLKPECWNVLLAELAEEIRNNAYSLHGTTKNVRERCLAKGLPLTGRDVAWLLGTLGQGGCRLRERRDLSRRELGKALLLGMQTLCRSAQLHLEQQELQLLMEWLLPKTGPARSEQEQANTPA

SEQ ID NO: 76909 - DNA, 762 bp, Unknown
  Obtained from environmental sample
  misc_feature (1)..(762): n is a, c, g, or t
gtgcggttactgcgaacatcagcttttttgaatgatagaaaggaagtggatttaatggattgttttttgataaggcattgtatttggaatgaggaatctcaacaagatagcacgtatcagtttgtgaaagaggctatcgaaaaatatggatatgttgtcaattttgattttaaggtaattaaagacgaaattgatgaatttcaggaagaaattaaagaagaaacaaaatttgtaaaggatacaaaagttactgaattaaacttaatgtatggcgattattatgaaattctcaatccaattagtcaatatgataatttaattaagcaatctgattttaataatttaaacaatcaaaagcaatatgtaaggttgtattatcataggacttcttggaaccaagttgagggtaatcagacacattacatcagaaaaggtaactcaaagtttagtatttttattgatgataaagaatacaagcttagaactacaacgaagggcgaaaaacgacaggaaacaaaaaaacctaacgaatacacagagtctgcttgggatgaaaaggtaactggttatttaaaatatacaggtgacggaaaagaaaaaatagaacagtatcgagatagggatttaaaacacattcgtgaaaatttgtttgtaagtcctgaattggcaaatattgtggaagttcacataacagaaaccataaaaaagattgataagattgaggtggatatcaagaaaattcaaaacgactataaaaattga

SEQ ID NO: 76910 - protein, 253 aa, Unknown
  Obtained from environmental sample
  misc_feature (1)..(253): Xaa is any amino acid
MRLLRTSAFLNDRKEVDLMDCFLIRHCIWNEESQQDSTYQFVKEAIEKYGYVVNFDFKVIKDEIDEFQEEIKEETKFVKDTKVTELNLMYGDYYEILNPISQYDNLIKQSDFNNLNNQKQYVRLYYHRTSWNQVEGNQTHYIRKGNSKFSIFIDDKEYKLRTTTKGEKRQETKKPNEYTESAWDEKVTGYLKYTGDGKEKIEQYRDRDLKHIRENLFVSPELANIVEVHITETIKKIDKIEVDIKKIQNDYKN

SEQ ID NO: 76911 - DNA, 630 bp, Unknown
  Obtained from environmental sample
  misc_feature (1)..(630): n is a, c, g, or t
atgggactgtcgctggccgtgactgcgggcgtgtcgtggttgctgatccgcggtgggttgctccgctatctgataaaccctgccggcgacgggtacaatgcgctaggatatttggttatgctcgcgcctctcggcatagtccttttcatgtcgttctcacgcagcatcagcgcgaggggcactaaaatcggcctctactccatagccgcgctcatgggcatgagcgtttccctcatggccttatacgccggagtgcacaacaccttccaggcgttcctcatcactagtgctgtgtttggggccatgtctatctacggatataagaccgacgcggaccttaccaaaatgggaagcatactcatgatggcggtgatgggactcttcatagtgtccatcgtggggcttttcaccggcggcgtggggatttggttcagctacgcggttgtgggcgtgttcacgcttctgataccctttaatgtccagcagataaagggcatctactccataaccggcgggcagggcgagatcgcggacaaggcggccgtgcattgcgctctgtcgctatatctcaacttcatcaacatcttcataagcctcatgaggatactcggctcaagcgacaggagatag

SEQ ID NO: 76912 - protein, 209 aa, Unknown
  Obtained from environmental sample
  DOMAIN (1)...(207): Uncharacterised protein family UPF0005
  misc_feature (1)..(209): Xaa is any amino acid
MGLSLAVTAGVSWLLIRGGLLRYLINPAGDGYNALGYLVMLAPLGIVLFMSFSRSISARGTKIGLYSIAALMGMSVSLMALYAGVHNTFQAFLITSAVFGAMSIYGYKTDADLTKMGSILMMAVMGLFIVSIVGLFTGGVGIWFSYAVVGVFTLLIPFNVQQIKGIYSITGGQGEIADKAAVHCALSLYLNFINIFISLMRILGSSDRR

SEQ ID NO: 76913 - DNA, 744 bp, Unknown
  Obtained from environmental sample
  misc_feature (1)..(744): n is a, c, g, or t
gtgagaaatttagtcgccataatccttctcttccttcccgcgctcgccgacgcgaaggtgtcgatgcttgagtattcggcgcggttnttgggcgtgccgtatgccgcgagtccgctgggcgaaggttcgccggacgcttacgatcccgacccgctgatccggttcgacgcgtttgattgccagacctatgtcgaaaccatgctggcgcgcggcgacgaagagaccctgaacgaaatccgctatgcgggcgggctgccgcatttccaccgccggcaccactttaccgatatgtggttgcggggcaacaaatctcggctttccgacatcacagaggccatgtcgttgatggcgctaggcaagcccgtgagccggcgcgagggcgtgatagacgaggccgagtggttcatgaaaatccaccggcaggcggtcaaccgtgccgcgcggtatgtcgttaccccgtatatcccgcgcgaggaaatcctctcgcatcggcagaaattcgcggacgcggtggccgagccgatggtggtgctgttcgtgttcaaggatttttctgtgattgaaaaactcggtacggaccttcatgtcgcgcacatggggctgctgttcccgtccggcgacggagtgaccttgcgccacgcttcaagcgcgcagggcaaggtggtcgatacggactttttcacgtatctcgatcggctgccgccgagctatataggcgcgcagatcctctcgattaaggagtag

SEQ ID NO: 76914 - protein, 247 aa, Unknown
  Obtained from environmental sample
  SIGNAL (1)...(16)
  DOMAIN (24)...(243): Protein of unknown function (DUF1460)
  misc_feature (1)..(247): Xaa is any amino acid
MRNLVAIILLFLPALADAKVSMLEYSARXLGVPYAASPLGEGSPDAYDPDPLIRFDAFDCQTYVETMLARGDEETLNEIRYAGGLPHFHRRHHFTDMWLRGNKSRLSDITEAMSLMALGKPVSRREGVIDEAEWFMKIHRQAVNRAARYVVTPYIPREEILSHRQKFADAVAEPMVVLFVFKDFSVIEKLGTDLHVAHMGLLFPSGDGVTLRHASSAQGKVVDTDFFTYLDRLPPSYIGAQILSIKE

SEQ ID NO: 76915 - DNA, 666 bp, Unknown
  Obtained from environmental sample
  misc_feature (1)..(666): n is a, c, g, or t
ttgaaaatactgcgggtgaacttttcagggaaaacttttagtatcgcttanaatgaggacgcaaaaactttagcgtcttttatgtatgattgcgggcatattcattcggaaatgcttattgcgtcgatagaaaggattttaaaagatacgggaaatacttatcgagatatagataaatttgcggtttctaccggtccgggaagttttaccggcataagagtagggatgactgccgttaaaactatggctcaaagtttaaacaagcctgttgtcgcggtagacactcttacgattcttgaaaaatcttttgtcgatataaaaggcgttaaacttgtcgctgctatcgacgctttaagaaatgaaatatatgtcaaaggcgaaagcggaattgtaattaaaaactcagatgattttatagttgagaacaaaaaatacaaaaataaaattataataataggcgacgctgcaataatatataaagacaaatttgctaagtatttaggggatttgagcgtttctctcccgccggctttcaacattcctaaggcttccgttttggctgttcttgcgcagcattacaaatcttgcccattttcaaaagtccggccgatttatgtcagacgttcttgggctgaagaatcaaaacctgttgccgtgtcacgctga

SEQ ID NO: 76916 - protein, 221 aa, Unknown
  Obtained from environmental sample
  DOMAIN (22)...(215): Glycoprotease family
  misc_feature (1)..(221): Xaa is any amino acid
MKILRVNFSGKTFSIAXNEDAKTLASFMYDCGHIHSEMLIASIERILKDTGNTYRDIDKFAVSTGPGSFTGIRVGMTAVKTMAQSLNKPVVAVDTLTILEKSFVDIKGVKLVAAIDALRNEIYVKGESGIVIKNSDDFIVENKKYKNKIIIIGDAAIIYKDKFAKYLGDLSVSLPPAFNIPKASVLAVLAQHYKSCPFSKVRPIYVRRSWAEESKPVAVSR

SEQ ID NO: 76917 - DNA, 591 bp, Unknown
  Obtained from environmental sample
  misc_feature (1)..(591): n is a, c, g, or t
atgnaacgtaatcttcccgcaaattattatttatttaaaaacattataagtaatggtcttaaggatattaccataacagggacatgccttgaatatggccttttggaaggttgcttgtcagaaaatgcgaatacaaaaccttgtacaaattacggcttggcaaaggatacgctaagaaaatttgttgaaactctgcaaaataattatccttttgtttataaatggttgcgtcttttctacccttatggagagggacaacaaaaaaaatcactttgggggcaaatgcaagacgcaatatcaacaaacgcaaaagaaattaatatgtcgccaggggagcaattgcgagattttttccctattgaaaaagcggctgagtatattgtgtctgtggccattcaggatgaaattaccgggataatcaattgttgtagcggaaaaccgatgtcagtacgccggtttgctgaaaaattttttgaacaacgcagttatccaataaagctgaaccttggctactattcttattcccggcatgagccattggctttttggggagataacagtaaacttttgaaaatcatggatgacaaatga

SEQ ID NO: 76918 - protein, 196 aa, Unknown
  Obtained from environmental sample
  misc_feature (1)..(196): Xaa is any amino acid
MXRNLPANYYLFKNIISNGLKDITITGTCLEYGLLEGCLSENANTKPCTNYGLAKDTLRKFVETLQNNYPFVYKWLRLFYPYGEGQQKKSLWGQMQDAISTNAKEINMSPGEQLRDFFPIEKAAEYIVSVAIQDEITGIINCCSGKPMSVRRFAEKFFEQRSYPIKLNLGYYSYSRHEPLAFWGDNSKLLKIMDDK

SEQ ID NO: 76919 - DNA, 447 bp, Unknown
  Obtained from environmental sample
  misc_feature (1)..(447): n is a, c, g, or t
gtgccgccgcatctcgccgcggagactgccgcctttgtccgcaatccgggcaaggatgaagcgggctggctcaagtatacgctccgcaaggacgacacctttgccagcgtctccaaccgcaccggcgtgcctgttgacgaactgcgccgggtcaaccgcgtgggcgaactcaaggccggcaaggcgctgcgcattccacgcagcgatccctcggcattcccgctcatggccgcttccccgccgcctgccgcggccgggccttcggccgtcccggcgctttcgggaaacacgccgaaaatcctcacctacacggtgcagccgggcgatacggtgtgggccatcgcccgcaagttcgacgtggatccagatgccctcctgcgcgccaacaacctgacccgcaacgccacgatccgccccggcgacaccgtacgcgtgatcctgaattga

SEQ ID NO: 76920 - protein, 148 aa, Unknown
  Obtained from environmental sample
  DOMAIN (26)...(66): LysM domain
  misc_feature (1)..(148): Xaa is any amino acid
MPPHLAAETAAFVRNPGKDEAGWLKYTLRKDDTFASVSNRTGVPVDELRRVNRVGELKAGKALRIPRSDPSAFPLMAASPPPAAAGPSAVPALSGNTPKILTYTVQPGDTVWAIARKFDVDPDALLRANNLTRNATIRPGDTVRVILN

SEQ ID NO: 76921 - DNA, 378 bp, Unknown
  Obtained from environmental sample
  misc_feature (1)..(378): n is a, c, g, or t
atggccgaggagatgcacattgagcacatccccggcgacgtaattgaggttgactgggctggtactaccgcaagctttatcgaccgagacagtagcgagctagtcgacgtgtttgttttcgtggctgttctcccgtacagcgggtacgcatacgccgaaggcttcacggatcaaaagcaagaggcttggacggttgcgcatatcaacgcattcgcctattttggtggtgtggggaaaaagctggtccccggacaacttgaaaacaggtgtggtgaaaaatactcgttcggaaatgatcctaancaaggcgtacccagacttggcagagcattacggcacggccataatgcccacacgatcccgcaggctcgtgaatag

SEQ ID NO: 76922 - protein, 125 aa, Unknown
  Obtained from environmental sample
  misc_feature (1)..(125): Xaa is any amino acid
MAEEMHIEHIPGDVIEVDWAGTTASFIDRDSSELVDVFVFVAVLPYSGYAYAEGFTDQKQEAWTVAHINAFAYFGGVGKKLVPGQLENRCGEKYSFGNDPXQGVPRLGRALRHGHNAHTIPQARE

SEQ ID NO: 76923 - DNA, 843 bp, Unknown
  Obtained from environmental sample
  misc_feature (1)..(843): n is a, c, g, or t
gtgctagacgcttgccgtgttcccccaggtaaaagtggcggtcgcggagcgggtgacacctccagagttataaaaaatgttcctaatgttcctgcggatatgcttattatttattcaacagcttcgggaacaaaagcttatgatggtgatggtacaagaaacagtccatttactgaagcttttttagcaaatattaaatctacagaaccattagttttaatgatgagtcatgttacgtctcggacattatcattaacccaacaaaagcaacgtccttattttaactcaagcatgggaagtgaaaatgcatattattctttaaatattaaatctaaccctaatccgaaccctaaccctaatcctaacccgaaccctaatcctaacccgaaccctaaccctaatccgaaccctaacccaccaattgccggactgaattatgaaaatatatcagataatattgttattacagggtatacaggaacttctcaaacacttgtaataccttcaagtattcaaaatttacctgtaacaatgattgcggaaaaagcgtttgaaaaaaacaaaacattaacaagtataacaattccttcatcggtaacagttattggtgatagtgcttttgaatcttgcagtaatttaacaaatataacaatcccttcatccgtaatatttattggaaaatgggcatttagtagaactaatttgtcaagcattaccattccttcatcagtaacaacaattagttcttatactctttctagttgtgataatttaacaagtatttacattccttcatcagtaacattaatagaaaatggtgcattttctaattgtggaaattga

SEQ ID NO: 76924 - protein, 280 aa, Unknown
  Obtained from environmental sample
  misc_feature (1)..(280): Xaa is any amino acid
MLDACRVPPGKSGGRGAGDTSRVIKNVPNVPADMLIIYSTASGTKAYDGDGTRNSPFTEAFLANIKSTEPLVLMMSHVTSRTLSLTQQKQRPYFNSSMGSENAYYSLNIKSNPNPNPNPNPNPNPNPNPNPNPNPNPNPPIAGLNYENISDNIVITGYTGTSQTLVIPSSIQNLPVTMIAEKAFEKNKTLTSITIPSSVTVIGDSAFESCSNLTNITIPSSVIFIGKWAFSRTNLSSITIPSSVTTISSYTLSSCDNLTSIYIPSSVTLIENGAFSNCGN

SEQ ID NO: 76925 - DNA, 501 bp, Unknown
  Obtained from environmental sample
  misc_feature (1)..(501): n is a, c, g, or t
ttggactatgtcccggcgcccgtaggctacttggttgacagggtgtatgccgacaaggcgcttcccttgctggaggcacatggcgtgcatgcgctgcctggcgcacagcgccccaaaaatgaagcgctgctgtatttccacgagacagagaggaaagtggcccaaggggcgtaccaaggggtgataaccctctcgttgggcggggcttggaagccggaactgccagcgcggcgggctgcctacgcttgggagccagaggacttagacaatgcgctatatgtccccattgaccagccgatgggtaagctggcgttttatctgttggatccaagggctccagacggactggtgttttggggatttttccactccagctatatgcgcgggcctggaatgtggggcgaagggccaaggcagcccatactggcggttggcgtcaaggccgcaggccagccaacagacgccaaccaaaagtcagcaccccaaatagaggagcattaa

SEQ ID NO: 76926 - protein, 166 aa, Unknown
  Obtained from environmental sample
  misc_feature (1)..(166): Xaa is any amino acid
MDYVPAPVGYLVDRVYADKALPLLEAHGVHALPGAQRPKNEALLYFHETERKVAQGAYQGVITLSLGGAWKPELPARRAAYAWEPEDLDNALYVPIDQPMGKLAFYLLDPRAPDGLVFWGFFHSSYMRGPGMWGEGPRQPILAVGVKAAGQPTDANQKSAPQIEEH

SEQ ID NO: 76927 - DNA, 540 bp, Unknown
  Obtained from environmental sample
  misc_feature (1)..(540): n is a, c, g, or t
atgagtaacgtagccggcatactcctctgttttgctattgcgctgccttcgtggtatctggggagggtattccccctcatgggcggccccattaccgctattcttgcgggtatgctgatttcattgctgctgccgaaactgttaaaaatcaaattcggtaaaggtttttcgtttgccgagggagtcaagtttacctcaaaaaaggcgctgcaatattcgattgttcttcttggctttgagatgaatttatttgttatcctgcaagtcggcagtatgtctcttgtgatcatgggctttacttttgtaacggtatttatcgcggcgtttttctcaggaaaaatgcttaaactttcagggaacaccacggtgctcatcggagtgggtacttccatctgcggcggctcggcaatagcagcggttgcgccgattatccgcgcggaagatgaggatgtcaccagggcgatttcaacgattttcctgtttaacataatcgctgtttttgtttttcctcgtattgggccgcgtactgggaatggatga

SEQ ID NO: 76928 - protein, 179 aa, Unknown
  Obtained from environmental sample
  SIGNAL (1)...(28)
  DOMAIN (5)...(179): Conserved hypothetical protein 698
  misc_feature (1)..(179): Xaa is any amino acid
MSNVAGILLCFAIALPSWYLGRVFPLMGGPITAILAGMLISLLLPKLLKIKFGKGFSFAEGVKFTSKKALQYSIVLLGFEMNLFVILQVGSMSLVIMGFTFVTVFIAAFFSGKMLKLSGNTTVLIGVGTSICGGSAIAAVAPIIRAEDEDVTRAISTIFLFNIIAVFVFPRIGPRTGNG

SEQ ID NO: 76929 - DNA, 561 bp, Unknown
  Obtained from environmental sample
  misc_feature (1)..(561): n is a, c, g, or t
ttgaactccatccggatgcggctcccaaacgggttcatgccgataagttcgcccttgcgtttgcccatgtcctcgataatcgacccgacgcagtcttccggcacgtcgatgataagttggtcgatgggttcctgtttccgcccgtcgacctccttgtacaggacgcgcggcatactgacctggaactcgaaaccctcgcgcctcatgttctcgattaggaccgaaaggtgcatctcgccccggccgctgacccggaaggcctcgcttgtgtccgcctcggccacccggatgcttacatccttgatggtttccttgaacaggcggtcgcgaaggtgccggcttgtcacaaacttgccctccttacccgcgaacgggctgtcgttgacggaaaacgtcatttcgacgcttggctcggtgattttgacgaatgggaggggttccggggtgttggggtcgcagatggtgtccccgatggtgacgccctggacgcccgcgacgcaaacgatgtcgcccacgcccgcctctgggaccgaaatccgggtcaggccctcgaactggtag

SEQ ID NO: 76930 - protein, 186 aa, Unknown
  Obtained from environmental sample
  misc_feature (1)..(186): Xaa is any amino acid
MNSIRMRLPNGFMPISSPLRLPMSSIIDPTQSSGTSMISWSMGSCFRPSTSLYRTRGILTWNSKPSRLMFSIRTERCISPRPLTRKASLVSASATRMLTSLMVSLNRRSRRCRLVTNLPSLPANGLSLTENVISTLGSVILTNGRGSGVLGSQMVSPMVTPWTPATQTMSPTPASGTEIRVRPSNW

SEQ ID NO: 76931 - DNA, 348 bp, Unknown
  Obtained from environmental sample
  misc_feature (1)..(348): n is a, c, g, or t
atgaaagtaattgtatttggttcggcggctgaagcaaaaggtaaaataacacgtcatcccagtgggaaaacaatatttgaaattgccgatattgttgttgactcttgcgtgccggtagttgatgcttcggtggtgttgaaaaatcatcaggacaaaataggtccggtatcgactttgggttttgttactcttgtgtggatgaccatcacgacctgcgccgaaatattagcagaccgcggcgtgaaactcttcatccatccatcgcacaacgtgcctggcgacacaaccgctcacgaacgtttggacgcttgcctcgccgaatataaacgaagagtagcgagcatttaa

SEQ ID NO: 76932 - protein, 115 aa, Unknown
  Obtained from environmental sample
  misc_feature (1)..(115): Xaa is any amino acid
MKVIVFGSAAEAKGKITRHPSGKTIFEIADIVVDSCVPVVDASVVLKNHQDKIGPVSTLGFVTLVWMTITTCAEILADRGVKLFIHPSHNVPGDTTAHERLDACLAEYKRRVASI

SEQ ID NO: 76933 - DNA, 750 bp, Unknown
  Obtained from environmental sample
  misc_feature (1)..(750): n is a, c, g, or t
atgtccgttaatgagattctctccggcatgaacagtgaggatatcaaagttcctttggcggtagggaaagccattccaaaaatagaagcgttgatagaccgtatcgttgaacggttgcctgttggcggtcgtgttttttatcttggcgcaggcacaagtgggcgacttggcgtgctcgacgcttcggagatacctccgacttatggcgtcagagatgtaattataggtctgatagcaggcggcgacactgccttacggcggtcggttgaacatgcggaagacgaccgcgaaaaagcatggcaggaactgcaagagttcaatatcggtaaaacggatactgttatcggcatagcagcatcaggcactacgccatacgtaataggcgcggtagaaaaagcccgcgaaaacggactgctcaccggttgtatcacctgtaatccggaatcgccattagccaaggctgccgagtacccaatagaaattgtagtgggtcctgagtttgtaactggcagcacgcgcatgaaatcgggaacggctcanaaacttgtgctgaatatgatttctactactttgatgataaagattggacgtgtaaaaggaaacaaaatggtaaatatgcaattagccaacaataaattggtaaaccgtggcacacgtatgcttatggaagaattgggcataccagaagacgccgccagagaattgctcttgaagcatggttcggtaaaaaaagcgatggaatctatntga

SEQ ID NO: 76934 - protein, 249 aa, Unknown
  Obtained from environmental sample
  misc_feature (1)..(249): Xaa is any amino acid
MSVNEILSGMNSEDIKVPLAVGKAIPKIEALIDRIVERLPVGGRVFYLGAGTSGRLGVLDASEIPPTYGVRDVIIGLIAGGDTALRRSVEHAEDDREKAWQELQEFNIGKTDTVIGIAASGTTPYVIGAVEKARENGLLTGCITCNPESPLAKAAEYPIEIVVGPEFVTGSTRMKSGTAXKLVLNMISTTLMIKIGRVKGNKMVNMQLANNKLVNRGTRMLMEELGIPEDAARELLLKHGSVKKAMESX

SEQ ID NO: 76935 - DNA, 696 bp, Unknown
  Obtained from environmental sample
  misc_feature (1)..(696): n is a, c, g, or t
ttgacaatacgcatgagaaaagctatgctatgcgacaggatgcacttgggggagggcaatatggacaggcgtcttgacgacacaaagcgttccattggggtccatgggcttcaggacatggaaaaaaaagtactccttgaaaaatttcagcagcatggcggagagattataaaggaaaaagctctgcccaatcagacgcccatacgcagcaaccggcagccgggcgctctgatacgcccaaccgaaacagccgcgcgcgggacatcgcctgccgctcccgcgcgaaaagcgccgccatcccgcccggtacaaccggccgccgacagcaagcaatatgacacatcgggtcatgctttcgagcgcctctctctgtggttccgctccatgaccggcagcgtcatgaaaagcggcggctatctctcgccgagttttttcaatttcctgcacaacaaggcgcaatccaagcttgtgaatctaagccttctggttttacctctggcgcacgccgcgtcggcattgcgcgcccaggtacagtccgaattggataaactcggagactaccattttgagtatttgctgcgtctggacaatatctacgacgagaccctgttccgtcaaatcgacctgtatgatccaaaaaatccgccgaaggtacagctcaaatccatcaaaaaacctctctctcggccgatctga

SEQ ID NO: 76936 - protein, 231 aa, Unknown
  Obtained from environmental sample
  misc_feature (1)..(231): Xaa is any amino acid
MTIRMRKAMLCDRMHLGEGNMDRRLDDTKRSIGVHGLQDMEKKVLLEKFQQHGGEIIKEKALPNQTPIRSNRQPGALIRPTETAARGTSPAAPARKAPPSRPVQPAADSKQYDTSGHAFERLSLWFRSMTGSVMKSGGYLSPSFFNFLHNKAQSKLVNLSLLVLPLAHAASALRAQVQSELDKLGDYHFEYLLRLDNIYDETLFRQIDLYDPKNPPKVQLKSIKKPLSRPI

SEQ ID NO: 76937 - DNA, 834 bp, Unknown
  Obtained from environmental sample
  misc_feature (1)..(834): n is a, c, g, or t
gtgcttgatttggcttactgtttgggcgaggacaagggttcaaggtgtaacggagcgattatcgacgggaaattagagccgattgaccggaaattatttaacaacgaaaccgtcgatttgctgaccagtaccgattccaagcccgacgttgaatggctttcgatagccagaaccccaaaggcgaaaatggcgataaaaaaacgcctgcgtcaaaacgaaatcgacgaaaaaacaaatcaggcttttaatctgttgataaacgcctacgattttctcaaagacccgatttcgtttaacggatacaagaagaatatattgaaatatttcgggttgcaggaagaaaaagcgctttacgacaagatatattccggcgaggtgacaaccgacgatattctgtctttcacaatgactatgacgaaagaacttccgcatacgggaaaaacgactcaatttataaaaagcaaacgtacgcagcacatgttatttataaattctttgaaaaattccaacaccattcgtacggcgatttgctgcaatccgattccgggcgacaagattataggatttcgcaccaacggcgaccgcggaataagcgtccatcgggcggattgccctaacgcgcttctttttgcggacgatatagaccgggttatttattgcgattgggctgccggcagcaacttgggggtgtttacggaagagattactattcttgggattgacaaagagaatattcttttggacgtattaaagatttttgccgacaaaagggttaaatacagttatttggatttttacaaaggcaacggcgtcgcgaggatacttgtaaaatag

SEQ ID NO: 76938 - protein, 277 aa, Unknown
  Obtained from environmental sample
  misc_feature (1)..(277): Xaa is any amino acid
MLDLAYCLGEDKGSRCNGAIIDGKLEPIDRKLFNNETVDLLTSTDSKPDVEWLSIARTPKAKMAIKKRLRQNEIDEKTNQAFNLLINAYDFLKDPISFNGYKKNILKYFGLQEEKALYDKIYSGEVTTDDILSFTMTMTKELPHTGKTTQFIKSKRTQHMLFINSLKNSNTIRTAICCNPIPGDKIIGFRTNGDRGISVHRADCPNALLFADDIDRVIYCDWAAGSNLGVFTEEITILGIDKENILLDVLKIFADKRVKYSYLDFYKGNGVARILVK

SEQ ID NO: 76939 - DNA, 699 bp, Unknown
  Obtained from environmental sample
  misc_feature (1)..(699): n is a, c, g, or t
ttggaaagatttaacgattccgagagagaatttgaaaatagaatttcacaggctgaggacagacacactttgattatcaatgaatatcatgagcagataacgcggcttgaatcggacaaaaaattggtgcttgacgcagagaaaagagttgcggacgtcagaaaattactcgatgcgcttaaacaggaaatggaacatatttcgctgcgtagcggaaaaattgaggccattgatgttaaaatcgctcacatcgacacggtaatttcgagtatggaattcaagattgacgctattgacaaaggaaatgaaagaattgacaaggctaacgaaaaaatgagcactttgtctgatatgatttctgaaataaacgttgatatttcgactttggaagagcatttgaaattagtaaacgaagccaaggacaaatccgacacggcgattgaatgcatagaaaaaatagaaaacagaatcggcgttttgcacgggaaagaaaaacaggtttcggaaattgaaagcaacatcggcaaattatcgcttttggcggacgatgtaaatgctaaaatttccatactcaaaaacgacgaanaagagattatgaaagcagtagaaaaagcgggcgaattgagattcctgctcggagaagtcgaaagcaagatttcggaattgagaaaggaaaaagaagccattgtcaataaatga

SEQ ID NO: 76940 - protein, 232 aa, Unknown
  Obtained from environmental sample
  misc_feature (1)..(232): Xaa is any amino acid
MERFNDSEREFENRISQAEDRHTLIINEYHEQITRLESDKKLVLDAEKRVADVRKLLDALKQEMEHISLRSGKIEAIDVKIAHIDTVISSMEFKIDAIDKGNERIDKANEKMSTLSDMISEINVDISTLEEHLKLVNEAKDKSDTAIECIEKIENRIGVLHGKEKQVSEIESNIGKLSLLADDVNAKISILKNDEXEIMKAVEKAGELRFLLGEVESKISELRKEKEAIVNK

SEQ ID NO: 76941 - DNA, 585 bp, Unknown
  Obtained from environmental sample
  misc_feature (1)..(585): n is a, c, g, or t
atgcaaaatatgccggatgcggaggttttggacaacggcgttataaccatattcaatccggcgacgaaatcgaagaaagtcgccgaaaaaatcgcaaaaaatgtagagggggtcgctttaactctgccggttaagccattgaaagaccgagtttcttcaaaatcgcgcgaaatggtcgaaatttccgattttcttgaagaattcggacgaaaatccgccatgaaacgcggaatcggcgttcatgaacggcttcaattccttgatttggcaggggacgacgaattggcggcgaaaataaaaagccgtcccgacatcgcgcggttttgggcggagggcgcgcgcgccgaagttccgattgccggatggatcggcgaccagttttattcattcagaatcgacaggatggtcattgacggcgaccggcttgtatttttggactacaagaccgacgggacgcggaatctgcgcgcggaatatgttttgaaaatgagaaaatacgccgcgctgttatccaagatttacccaaataaaaaaattacgggacacatcctgtggctttgcgattgggagttggaagaagtatga

SEQ ID NO: 76942 - protein, 194 aa, Unknown
  Obtained from environmental sample
  misc_feature (1)..(194): Xaa is any amino acid
MQNMPDAEVLDNGVITIFNPATKSKKVAEKIAKNVEGVALTLPVKPLKDRVSSKSREMVEISDFLEEFGRKSAMKRGIGVHERLQFLDLAGDDELAAKIKSRPDIARFWAEGARAEVPIAGWIGDQFYSFRIDRMVIDGDRLVFLDYKTDGTRNLRAEYVLKMRKYAALLSKIYPNKKITGHILWLCDWELEEV

SEQ ID NO: 76943 - DNA, 612 bp, Unknown
  Obtained from environmental sample
  misc_feature (1)..(612): n is a, c, g, or t
atgataatcccctcaaaattccagctttccattgctggcaccgtgctcgccttgttagtttcctgctcggatttccctgaaataccatattcagaaagaataacaatatcaagtagcgaaaacacatcaagcagcgaaaaggcatcaagcagtgaaaacctatcaagtagcgaaaaggcatcaagctccagctccgcactcacattcaaagacaaaagagacaatgctacatatacatacatggaaatagctggagaggcatggatgtcgcaaaatctgaacttcgcttccatgggtgtatgttacgataatctggaaagcaactgcaagacgtatggcaggctatatacattggaagaggcaaaagaagcttgcccctccgattggcatttgccaaccaacaaagaatggaatgctgttggtttggctgaccttgccgctctgcacggcggatacagaaacggcacggcactttctgcaatagacatcattagtaactactggtggtcttttgagggttattattatagcataatcggcaatgaaatggactccgaagaagattcgccagaagcacttaattccgtccgttgcgtgagggataaaaaatga

SEQ ID NO: 76944 - protein, 203 aa, Unknown
  Obtained from environmental sample
  misc_feature (1)..(203): Xaa is any amino acid
MIIPSKFQLSIAGTVLALLVSCSDFPEIPYSERITISSSENTSSSEKASSSENLSSSEKASSSSSALTFKDKRDNATYTYMEIAGEAWMSQNLNFASMGVCYDNLESNCKTYGRLYTLEEAKEACPSDWHLPTNKEWNAVGLADLAALHGGYRNGTALSAIDIISNYWWSFEGYYYSIIGNEMDSEEDSPEALNSVRCVRDKK

SEQ ID NO: 76945 - DNA, 792 bp, Unknown
  Obtained from environmental sample
  misc_feature (1)..(792): n is a, c, g, or t
ttgggtaaagcttatgaatattcaggaaaagaaaatgcggcttttgatgcgtattataaggctgtgtggaatgatcattggaaaagccaagggtatcttaagctggcccagatttcctgccgaagaaaaaattttgaaaaaggtattgaatatagcaaagaagcgctttatgccaattacagaaatttccaggccagaaatgtcctaactattgtatatcatcacctggggaagcggcaggaagcggaaaagattattcaagaaactttaggttttgatcctttgaacactgttgctatcagggagaaatcgttactttcaaacgatccccgtgtgcgggaagacctgccggctgtacttggaaatgaccctcataatacgctttcactggctttgtcctatggagaacttggtttttatgaagatgcggtaataataattcgggattatctctccaggactgacctgccatattgtatggtatattattatcttgctttttttcttgaaaagcagaataaccctgaagcgcataaaacctggatgcaggcatccacggcggatagcagttattgctttcccaattcattggaagattatctggtactgtgtgaagcagtcaaaattaatccgaaagatgcaaaagcttattattatttgggatgtttcctatatgataaaaaacgctattctgatgccaaaaacatgtgggaaaggtctgctgaactgaacagttcttttcctgggtgtcatcgtaatttagctttgtattacgcanacaagggaaaataa

SEQ ID NO: 76946 - protein, 263 aa, Unknown
  Obtained from environmental sample
  DOMAIN (214)...(247): Tetratricopeptide repeat
  misc_feature (1)..(263): Xaa is any amino acid
MGKAYEYSGKENAAFDAYYKAVWNDHWKSQGYLKLAQISCRRKNFEKGIEYSKEALYANYRNFQARNVLTIVYHHLGKRQEAEKIIQETLGFDPLNTVAIREKSLLSNDPRVREDLPAVLGNDPHNTLSLALSYGELGFYEDAVIIIRDYLSRTDLPYCMVYYYLAFFLEKQNNPEAHKTWMQASTADSSYCFPNSLEDYLVLCEAVKINPKDAKAYYYLGCFLYDKKRYSDAKNMWERSAELNSSFPGCHRNLALYYAXKGK

SEQ ID NO: 76947 - DNA, 309 bp, Unknown
  Obtained from environmental sample
  misc_feature (1)..(309): n is a, c, g, or t
atgcgggcgcaaaggggggatgccatgcacattagtccacaggctgttgaaaaaatttccgaattcatttcaggctatgacgatcccaaggtgcgtatcgcccaagtgactgtgggcgggggctgttgcgccaagatgcggctcggggtcacgctggaagaggatgtggaagacgaggacgaactttttgtcgttgacgggatttccttcgtcattgacagggcgttgaaggaaggtctcggcgagatcgtcgtggatttttctccggatcagggtatcgtggtgcgcggcacaccctccggcgcgtaa

SEQ ID NO: 76948 - protein, 102 aa, Unknown
  Obtained from environmental sample
  DOMAIN (9)...(98): Iron-sulphur cluster biosynthesis
  misc_feature (1)..(102): Xaa is any amino acid
MRAQRGDAMHISPQAVEKISEFISGYDDPKVRIAQVTVGGGCCAKMRLGVTLEEDVEDEDELFVVDGISFVIDRALKEGLGEIVVDFSPDQGIVVRGTPSGA

SEQ ID NO: 76949 - DNA, 795 bp, Unknown
  Obtained from environmental sample
  misc_feature (1)..(795): n is a, c, g, or t
atggaggagcctatggagttcggtcatgtgcgtcttgatcacacggacagtatcgccgtcattaccgtggatcgccccaaagttctcaatgccgtggatcggcagaccgtaagcgaattgcaggccgcttttgatttattgctggccgacaaggaggttcgggtcattgtgctcaccggagccggcgataaggcttttatctccggtgcggacatttatgacgaagtcaccatggatgctgatgatgcgtatgtgttcagccgtcgaggacaccgcctgagcgagaccattgagcgcggtcccaaaccggttatcgcggcgatcaatgggtattccttgggaggcggcatggaacttatgctggcctgtgatttgcgcatcgcggcggatacagcccgctttggcctgcccgaagtcacgctgggcacaacctgcggtttcagcggcacaacccggctgccccggctggtaggccggaccaaggccaaggaaatgctgctgcttggcgaaatcatggatgccgccgaagccctgcgttgcggtttggtcactcgtgttgtgcccggagcccggcttatggacgaaaccatgaaaattgcccgcagaatttccggtttcagcgcgttttccgtgactatgagcaagcgcttggtggactggagcatggatgcgccgcttgatgtggcctctcagttggaaagcgccgtattctccatggccggaatggggcatgacaaggccgaaggcatgcaggccttcattgacaagcgcccgcctcagttcacggataggtga

SEQ ID NO: 76950 - protein, 264 aa, Unknown
  Obtained from environmental sample
  DOMAIN (19)...(188): Enoyl-CoA hydratase/isomerase family
  misc_feature (1)..(264): Xaa is any amino acid
MEEPMEFGHVRLDHTDSIAVITVDRPKVLNAVDRQTVSELQAAFDLLLADKEVRVIVLTGAGDKAFISGADIYDEVTMDADDAYVFSRRGHRLSETIERGPKPVIAAINGYSLGGGMELMLACDLRIAADTARFGLPEVTLGTTCGFSGTTRLPRLVGRTKAKEMLLLGEIMDAAEALRCGLVTRVVPGARLMDETMKIARRISGFSAFSVTMSKRLVDWSMDAPLDVASQLESAVFSMAGMGHDKAEGMQAFIDKRPPQFTDR

SEQ ID NO: 76951 - DNA, 450 bp, Unknown
  Obtained from environmental sample
  misc_feature (1)..(450): n is a, c, g, or t
atgctccagtccaccaagcgcttgctcatagtcacggaaaacgcgctgaaaccggaaattctgcgggcaattttcatggtttcgtccataagccgggctccgggcacaacacgagtgaccaaaccgcaacgcagggcttcggcggcatccatgatttcgccaagcagcagcatttccttggccttggtccggcctaccagccggggcagccgggttgtgccgctgaaaccgcaggttgtgcccagcgtgacttcgggcaggccaaagcgggctgtatccgccgcgatgcgcaaatcacaggccagcataagttccatgccgcctcccaaggaatacccattgatcgccgcgataaccggtttgggaccgcgctcaatggtctcgctcaggcggtgtcctcgacggctgaacacatacgcatcatcagcatccatggtgacttcgtcataa

SEQ ID NO: 76952 - protein, 149 aa, Unknown
  Obtained from environmental sample
  misc_feature (1)..(149): Xaa is any amino acid
MLQSTKRLLIVTENALKPEILRAIFMVSSISRAPGTTRVTKPQRRASAASMISPSSSISLALVRPTSRGSRVVPLKPQVVPSVTSGRPKRAVSAAMRKSQASISSMPPPKEYPLIAAITGLGPRSMVSLRRCPRRLNTYASSASMVTSS

SEQ ID NO: 76953 - DNA, 783 bp, Unknown
  Obtained from environmental sample
  misc_feature (1)..(783): n is a, c, g, or t
gtgctgatacaaccgccggtttactatcccttccgcaactgcgtgcgcgataacggccgggtcctggtcacgaaccccctcgtttatgacgagggcggatacaccgttgattttgaggattttgagcgtaaaataaaggactgtcgagttaaaatgttcatcctctgcaatccgcacaaccccgtggggcgggtgtggacccggaaggaactcgcgtcgatgaatgaaatatgcgggcggcacggggtgatcatcatatctgatgagatccattgcgactttgtctggcccgggcatacgcatacctgcctggccgccttaaacgaaaacgccgtcataaccacggcgcccagcaagaccttcaacctggccgggctgcagatagccaacatctttgtaagaaacaagaccctgcgcgacaagctgaaaaccgaaatcaaccgcagcggatacagccagttgaacacgctggggctggtggccggccgaagcgcctatgccaaaggcggcgcctggctggcggcccttaaatcttatctggaggagaatatccgcttcacccgcgcctttttaaaggagcggctgccccaaatcaggctcgttgaaccggaggggacctacctgctctggctggatttctcggcttacggactcacccaagccgaactcgaccaccgcgtgacggaccaagccaaactctggctggacagcggaacgatgttcgggccggagggtgaaaacttccaacgcgtcaacatagcctgcccgactcggccgatctga

SEQ ID NO: 76954 - protein, 260 aa, Unknown
  Obtained from environmental sample
  DOMAIN (1)...(260): Aminotransferase class I and II
  misc_feature (1)..(260): Xaa is any amino acid
MLIQPPVYYPFRNCVRDNGRVLVTNPLVYDEGGYTVDFEDFERKIKDCRVKMFILCNPHNPVGRVWTRKELASMNEICGRHGVIIISDEIHCDFVWPGHTHTCLAALNENAVITTAPSKTFNLAGLQIANIFVRNKTLRDKLKTEINRSGYSQLNTLGLVAGRSAYAKGGAWLAALKSYLEENIRFTRAFLKERLPQIRLVEPEGTYLLWLDFSAYGLTQAELDHRVTDQAKLWLDSGTMFGPEGENFQRVNIACPTRPI

SEQ ID NO: 76955 - DNA, 336 bp, Unknown
  Obtained from environmental sample
  misc_feature (1)..(336): n is a, c, g, or t
ttgaaacgcgaatggccccgcaagcagaatttaatttccggcaaagaccttgccacgctgttggagtacatggacagcctggtaaagccggtgttatggaagagaggcggcgcatccagagacaagagagaactgggtttcctcggcctgttcaccgacggcgagggcaattactggctgcgatcctcgcggggctaccacaccagtctcaacgaaagcctggcaagccttgaggcgctgattgatgaaatgggcgacagtgttgatgtcagcgttaagcatacggtgaatcaaacatacaggcggctgtcggagcaggtaacaggtaacaattaa

SEQ ID NO: 76956 - protein, 111 aa, Unknown
  Obtained from environmental sample
  misc_feature (1)..(111): Xaa is any amino acid
MKREWPRKQNLISGKDLATLLEYMDSLVKPVLWKRGGASRDKRELGFLGLFTDGEGNYWLRSSRGYHTSLNESLASLEALIDEMGDSVDVSVKHTVNQTYRRLSEQVTGNN

SEQ ID NO: 76957 - DNA, 309 bp, Unknown
  Obtained from environmental sample
  misc_feature (1)..(309): n is a, c, g, or t
ttgtttttgatgaatacaaaagacgcttctgaaatcggagaactaattaatattggagtaggtgctgacttaaccataaaggaattagctgaattaattagcaaaattgtatatgccgatgagcagggtaagcactgtgaaatagaatgggatacttccaaaccaaatgggactccgcgtaaacttcttaatgttgataaattatcgtctttgggctggaaagcaaaaaccagtttaaaagatgggattggcattgcgtatcaggattttttgaaacaacaaaaaaaagtcaggcgtaatgaaagttaa

SEQ ID NO: 76958 - protein, 102 aa, Unknown
  Obtained from environmental sample
  misc_feature (1)..(102): Xaa is any amino acid
MFLMNTKDASEIGELINIGVGADLTIKELAELISKIVYADEQGKHCEIEWDTSKPNGTPRKLLNVDKLSSLGWKAKTSLKDGIGIAYQDFLKQQKKVRRNES

SEQ ID NO: 76959 - DNA, 495 bp, Unknown
  Obtained from environmental sample
  misc_feature (1)..(495): n is a, c, g, or t
ttgagtatggagagcgcggaacctcgttttattctgccctccctgtcgtggaacgatgatgagaaaaccctccgttatgaagtaataattgaaaaggaaacaaatgaaggataccggcaagtgttacggagatttaccgatgtgtcttttatcaacgtttttctgcaaccgggcaagtatcgttaccgggttatcccctataattttctcaaccgtgtcgataaggaatcagtttcagactggaaagattttgatgtcatccccacttataaaccggaactgtatgatttttccccgtctgttttttatgtagataagagcataaaacatgagcttgtccttatcggaaaaaacatagacaccgataccagaatatatctgcgtcccattggcagcgtggctattgtcgccgatgaagtaaatatcattgcccctgttgaaaaaaagtcaataaagacggcagcgtcatggttttatttgacaatagccaattga

SEQ ID NO: 76960 - protein, 164 aa, Unknown
  Obtained from environmental sample
  misc_feature (1)..(164): Xaa is any amino acid
MSMESAEPRFILPSLSWNDDEKTLRYEVIIEKETNEGYRQVLRRFTDVSFINVFLQPGKYRYRVIPYNFLNRVDKESVSDWKDFDVIPTYKPELYDFSPSVFYVDKSIKHELVLIGKNIDTDTRIYLRPIGSVAIVADEVNIIAPVEKKSIKTAASWFYLTIAN

SEQ ID NO: 76961 - DNA, 810 bp, Unknown
  Obtained from environmental sample
  misc_feature (1)..(810): n is a, c, g, or t
ttgaagcggctttctggaaccttaaccgccggcggtagctccatgcttgaccacattaaaaatttccgggccgccctgggcttcctgagcctgattcccatcggccggggcgcggccctcaccccggaacagttcggccgtctgcccgccttataccccttggtcggcctggtcttcgggctggccttgggccttttggggtttacggccgggaaaatactgcccccggacctgaacgccctgatcctggtcgtcttcctggtggccatgaaccggggttttcacttggacggcctggccgacgccgccgacgcccttctctcccaccgctcccaggctgaaaaattgcgcatcctgaaagacagccgccagggcaccttcggcgttttggccataaccttaagcatcatcataaaaatccaactcttgggccatctcctgccggccgccccctggctccccttcctctggccggcctggggccgcctgggcgcctcggcggtggccggcttaagccgctacgtgggggaagaaaccggcttgggccgcttcatggtggagaggtccggcccccgggaactgggcctggccgccctgttcaccttcgcccccagcctcctggccggccccccggcccttctctccgccgccgcggccctcttgttcggcctggccctggttccgctctggcatnaggccttgggcggcgtcaccggcgaccttttgggcgccagcatagaactgaccgaaattttcaccctgctctttttttatttcatacactttttttatttcgcgcaaccgggctga

SEQ ID NO: 76962 - protein, 269 aa, Unknown
  Obtained from environmental sample
  DOMAIN (22)...(257): Cobalamin-5-phosphate synthase
  misc_feature (1)..(269): Xaa is any amino acid
MKRLSGTLTAGGSSMLDHIKNFRAALGFLSLIPIGRGAALTPEQFGRLPALYPLVGLVFGLALGLLGFTAGKILPPDLNALILVVFLVAMNRGFHLDGLADAADALLSHRSQAEKLRILKDSRQGTFGVLAITLSIIIKIQLLGHLLPAAPWLPFLWPAWGRLGASAVAGLSRYVGEETGLGRFMVERSGPRELGLAALFTFAPSLLAGPPALLSAAAALLFGLALVPLWHXALGGVTGDLLGASIELTEIFTLLFFYFIHFFYFAQPG

SEQ ID NO: 76963 - DNA, 588 bp, Unknown
  Obtained from environmental sample
  misc_feature (1)..(588): n is a, c, g, or t
atggacacggacgcaatacccggaaccggcggaacaccgttagacgatttagacgcgcttgcggatgttatacgcaatgacggcctagtcgatgtaacaaccgcaattttcggcgatcaagcatggaaagattttataaggaataagtgggtgcgcgaaaacttgaaaaaagacgttttgaacatgggcgcgcttaatccgcaaatagtcaacctcggcggaaaacgtatgggctatattgattatggggcttaccgttatttactttatacatataacgcccgctataatccgtggggcgatgcaaacacaaaaacaaaatttgttgatcctaacaatgttatattattgcccgatgttgccgatcttgatttccggcgcgttttcggcggcatacccaccgttagaaccgacactacctttgatcaaattttcggaaccgataaaacgcaaatcggcggagaatatgacataaggccgcgcgttttctggagtgatgacaacgaaacgtttatagccgaaattaaatcccggcccttaatgttgccggtcagcgtcaaccgttatggttgtatgagagtagcttaa

SEQ ID NO: 76964 - protein, 195 aa, Unknown
  Obtained from environmental sample
  misc_feature (1)..(195): Xaa is any amino acid
MDTDAIPGTGGTPLDDLDALADVIRNDGLVDVTTAIFGDQAWKDFIRNKWVRENLKKDVLNMGALNPQIVNLGGKRMGYIDYGAYRYLLYTYNARYNPWGDANTKTKFVDPNNVILLPDVADLDFRRVFGGIPTVRTDTTFDQIFGTDKTQIGGEYDIRPRVFWSDDNETFIAEIKSRPLMLPVSVNRYGCMRVA

SEQ ID NO: 76965 - DNA, 759 bp, Unknown
  Obtained from environmental sample
  misc_feature (1)..(759): n is a, c, g, or t
atgatctccggctgcctgattgttctggtgaccgcgattggctttcgctccttccgtacggcgctggttgtgctgataccgctctttgtgggtatgacatggggcttcgcctttatcccgagtacggttacgagtctcaacctcattaccgcttttctgataatcattctcaccggtatgggtatagattacgccatccacctggtcaagcgggtggagcaggagatgttcgagaagcccttccctgaggcgctcgcggcggcctaccgtaacacggggccttcggtgctggtctccggatttacgaccgcttttgcgctctccattctctcggtatcgagttttcgcggtttctcggaattcggcatcatcagcgccatagttctcgcgtgcatactcgcttccatgtgtgtgtgtatgccgccgatgctggttgtcgcgcaccgttttggttttatccgcgcgcgcgatcaccgcagcgagaaggctgtagtcctttcgcgccgccggacaattttttctcttgttttgatggggatatgtctggttattggcgcaagcgggctgcggtttgacgcgagtttcaggaatctcgaatttgatcgcagcatgatcgccggcctgcatgaaacggatgcggcgaaggacgcgcgggagtcaagaaaggtacacagcaaggtctattcgagtaccttttctcccggggcaatttttttggcggatgataccgaaaatcttgatcgcctcctgaaattttga

SEQ ID NO: 76966 - protein, 252 aa, Unknown
  Obtained from environmental sample
  misc_feature (1)..(252): Xaa is any amino acid
MISGCLIVLVTAIGFRSFRTALVVLIPLFVGMTWGFAFIPSTVTSLNLITAFLIIILTGMGIDYAIHLVKRVEQEMFEKPFPEALAAAYRNTGPSVLVSGFTTAFALSILSVSSFRGFSEFGIISAIVLACILASMCVCMPPMLVVAHRFGFIRARDHRSEKAVVLSRRRTIFSLVLMGICLVIGASGLRFDASFRNLEFDRSMIAGLHETDAAKDARESRKVHSKVYSSTFSPGAIFLADDTENLDRLLKF

SEQ ID NO: 76967 - DNA, 498 bp, Unknown
  Obtained from environmental sample
  misc_feature (1)..(498): n is a, c, g, or t
gtgatggttgattacgcgcacactcccgacgctctggaaaaactgttgtccacagggcgcgacctgctggctccgggcgggcggctgcatgtcctctttggttgcggcggggacagggacaggacaaaacgccccatcatggcctcggccgtcgttgcgggtggggcggatgtcatttggcacacttccgataacactaggggtgaagaccctgaaagaatcttggacgacgccgccgcagggattccaccggaaatcatcaaagaccctaagcgctaccaccgaatcagcgaccgggcactggctgtcaaagaagccatagccgcctgccgccccggggacttacttctattagcgggaaaggggcacgagccatatcaggacataatggggacaaagcacccatatagtgacagactggccgctgaagcggcactgaatggcgaagagattccaaggccgtgggcgttgaaagagaaacgcgagggccgcacatga

SEQ ID NO: 76968 - protein, 165 aa, Unknown
  Obtained from environmental sample
  DOMAIN (1)...(75): Mur ligase family, glutamate ligase domain
  misc_feature (1)..(165): Xaa is any amino acid
MMVDYAHTPDALEKLLSTGRDLLAPGGRLHVLFGCGGDRDRTKRPIMASAVVAGGADVIWHTSDNTRGEDPERILDDAAAGIPPEIIKDPKRYHRISDRALAVKEAIAACRPGDLLLLAGKGHEPYQDIMGTKHPYSDRLAAEAALNGEEIPRPWALKEKREGRT

SEQ ID NO: 76969 - DNA, 546 bp, Unknown
  Obtained from environmental sample
  misc_feature (1)..(546): n is a, c, g, or t
gtgtacagnttcgtcgtgggcgcattcgtctaccgggaactttccgtcaaggatgtctacgtctgcatgtacagcgcggccattcccgcggccatggtcatgctgatcatcggctgcgcccagggcatgggatggatcatggccacagagcaggtgccggccaagatcgcgcagttcgtggcccagtacacggacacgaagttcatgctgctgctcatcatcaacatcattctgctgctggtaggctgcgtgatggagctcaatgcctcgatcatcatcctggggccgatctttttgccgctcatcctcaaattcggcgtggatcccatccacttcggcgtgatcatggtggtgaacatgaccatcggcctgctcacgccgcctttgggcgtcaatctgttcgtggccaacggcctgtgcaaggaagtcgcattcagaaatgtcgtgcagaaggtgattcccatgctcatcgccctgatcgcggcgctgatgatcatcacctacgtgccgcccatttctttgttcattgccaacctgcttggctga

SEQ ID NO: 76970 - protein, 181 aa, Unknown
  Obtained from environmental sample
  DOMAIN (1)...(173): DctM-like transporters
  misc_feature (1)..(181): Xaa is any amino acid
MYXFVVGAFVYRELSVKDVYVCMYSAAIPAAMVMLIIGCAQGMGWIMATEQVPAKIAQFVAQYTDTKFMLLLIINIILLLVGCVMELNASIIILGPIFLPLILKFGVDPIHFGVIMVVNMTIGLLTPPLGVNLFVANGLCKEVAFRNVVQKVIPMLIALIAALMIITYVPPISLFIANLLG

SEQ ID NO: 76971 - DNA, 843 bp, Unknown
  Obtained from environmental sample
  misc_feature (1)..(843): n is a, c, g, or t
gtgtctgaaggagtaaaacagatacataataataattacgcgtatcgaattaatattcaaaaagacgatgaatttcgtccggtttgtgaagcctttaacgaaatggcggcaagattggaaacatcgaccgcggagaggcagaaagaagaggcaaaccgcagggagctcattgccggcatatcccatgatcttcgtacacccttgacatcaataaaagggtatcttgaaggaattgaaaccggagttgcttccactcttgaaatgcaaaaacaatatttttccattataacaagtaaaaccgctgaattggaacatatcatcgaacaattattcctcttttcaaaacttgacatggacgaatttcccctcaatatgcggaatgttgatattgtcagttctatctcggatataatagaggatactatatctgaatacgcggttcgcggtcttgctatacagcttgctaaaatgccggagggcgcgtttgttttagccgatactctctggctgcggaatgtaattattaatatttttgaaaacagcgcaaaatataaaacaaaagagcaaggacaaatggagataagcgccgtactgacggatgattttattttgttttattttcttgataatggaccgggcgtaccggcggatactttatcgaaactattcgatgtgttctaccgtacagatccttcccggaataagaaaggttccggcctcggtcttgccataagcgcaaaaatcattgaacgtatgggtggcagtatacatgcggagcttcccgcttcaggaggacttgccattgtaatcaaaatgccattgctgccggggaaagccctgtaa

SEQ ID NO: 76972 - protein, 280 aa, Unknown
  Obtained from environmental sample
  DOMAIN (52)...(119): His Kinase A (phosphoacceptor) domain
  misc_feature (1)..(280): Xaa is any amino acid
MSEGVKQIHNNNYAYRINIQKDDEFRPVCEAFNEMAARLETSTAERQKEEANRRELIAGISHDLRTPLTSIKGYLEGIETGVASTLEMQKQYFSIITSKTAELEHIIEQLFLFSKLDMDEFPLNMRNVDIVSSISDIIEDTISEYAVRGLAIQLAKMPEGAFVLADTLWLRNVIINIFENSAKYKTKEQGQMEISAVLTDDFILFYFLDNGPGVPADTLSKLFDVFYRTDPSRNKKGSGLGLAISAKIIERMGGSIHAELPASGGLAIVIKMPLLPGKAL

SEQ ID NO: 76973 - DNA, 600 bp, Unknown
  Obtained from environmental sample
  misc_feature (1)..(600): n is a, c, g, or t
atggcaaaagcgtatgaccgcgacggcggaaccgccggtactgccgccggcttgcgtgacgtgtatatccgtcacggcataaaccttacccgttattccacgtatgaggcccgaaagctgttagacatactggacaccgcaaacacgcagataatgggcattatcacaaaggcgaaagcgatagagacgaaggagaaataccgcagggtcgcggcggagatagggcgcgtgacgaaagagtgcggtgagcagcttaacgggcgggttgaggctgactttaaggagcttgctgaggctgagacggcttttaccgcgaaggcgttacgcggtgcgggcgtgaaaacagattttgagcttccatccgcggcgaagatatggtcggcggcgagttttgggacttatgcgggatatagtaccaaagagacctatgacagctatctggacaaactgagcggcgacctgttcaaaacatgggacgcaaatgtccgcgccggatacttggcaggacttaccgcaaaacaaataaaccgcactgttctgggttcggttaacggcttagaaccgggacaaatgcagggcttacgcagatcgctgaaatga

SEQ ID NO: 76974 - protein, 199 aa, Unknown
  Obtained from environmental sample
  misc_feature (1)..(199): Xaa is any amino acid
MAKAYDRDGGTAGTAAGLRDVYIRHGINLTRYSTYEARKLLDILDTANTQIMGIITKAKAIETKEKYRRVAAEIGRVTKECGEQLNGRVEADFKELAEAETAFTAKALRGAGVKTDFELPSAAKIWSAASFGTYAGYSTKETYDSYLDKLSGDLFKTWDANVRAGYLAGLTAKQINRTVLGSVNGLEPGQMQGLRRSLK

SEQ ID NO: 76975 - DNA, 387 bp, Unknown
  Obtained from environmental sample
  misc_feature (1)..(387): n is a, c, g, or t
ttgaacatcaacgccgattctgtggccggggccctggccggagctttgaaggccgaaaaactcatcctcctgaccgacgtggaaggggtgctggaccaggccgggcggctcctggagcgcctgtccctcgcggagatcgagaagctcaagcgtgagggcgccgtctacgggggcatgattcccaagctcgagggcgtgggcgaggccctggccgccggctgccggggggtgtatatcgttgacggccggcggccccacgccctngctcctggaactcttcaccgaccagggctgcggcacggccataaccttatagagcctcctggcgcaggccggctgatttttttaagtggcggtaacataaaaaaatgtccaatcgggaaataa

SEQ ID NO: 76976 - protein, 128 aa, Unknown
  Obtained from environmental sample
  misc_feature (1)..(128): Xaa is any amino acid
MNINADSVAGALAGALKAEKLILLTDVEGVLDQAGRLLERLSLAEIEKLKREGAVYGGMIPKLEGVGEALAAGCRGVYIVDGRRPHALAPGTLHRPGLRHGHNLIEPPGAGRLIFLSGGNIKKCPIGK

SEQ ID NO: 76977 - DNA, 558 bp, Unknown
  Obtained from environmental sample
  misc_feature (1)..(558): n is a, c, g, or t
atgagctttcctgcttgggataccgaccttttcctgctcctgaacggactgcactgcgcagttatggacacggtaatgtggtacatgagtaaaatcagcgtgttcacgccgctgttcgtgtaccttctctacctgttttatcggcggttgggctggcggcgtttcctgctcatgtttgcaggcgttgcgctgtgcgtgctgcttgccgatagaatttcaagcggttttttcaagccctttttcgagcgtctgcgccccacgcacgccttgggcgatgttgtgcatacggtgcgcggctatcgtggcggacgtttcgggttcgtttcatctcacgcagcgaacatatttgcggtagcggtgtacacgctgctcatttttcgccgcaggtggtacaccatatttatgctgagcctcgcgctgctcgtatcgtacagccgtatctatctcggcgtgcattatccgctcgacattgcttgcggtggtgcgctgggggcagctgtcggctttcttgtagcgcagctttaccgcctttcggcaaaaaaaatcccccacctttag

SEQ ID NO: 76978 - protein, 185 aa, Unknown
  Obtained from environmental sample
  DOMAIN (55)...(180): PAP2 superfamily
  misc_feature (1)..(185): Xaa is any amino acid
MSFPAWDTDLFLLLNGLHCAVMDTVMWYMSKISVFTPLFVYLLYLFYRRLGWRRFLLMFAGVALCVLLADRISSGFFKPFFERLRPTHALGDVVHTVRGYRGGRFGFVSSHAANIFAVAVYTLLIFRRRWYTIFMLSLALLVSYSRIYLGVHYPLDIACGGALGAAVGFLVAQLYRLSAKKIPHL

SEQ ID NO: 76979 - DNA, 624 bp, Unknown
  Obtained from environmental sample
  misc_feature (1)..(624): n is a, c, g, or t
gtggtggccgtcgctaaactgaccagtcgcgtgctgctgatttgtgatgcgacccacgcgctgccaatccaggtgctgcgcaacgatatccgcgtaattgcagccggtaacggttgtacggatgatttgcagcttgagcatctgccggcgaatacggatattcgtgttggtgatgtgctggtgacttccggtctgggcggtcgtttcccggaaggctatccggtcgcggttgtctcttccgtaaaactcgatacccagcgcgcttatactgtgattcaggcgcgtccgactgcagggctgcaacgtttgcgttatctgctgctgctgtggggggcagatcgtaacggcgctaacccgatgacgccggaagaggtgcatcgtgttgctaatgaacgtctgatgcagatgatgccgcaggtattgccttcgccagacgcgatggggccaaagttacctgaaccggcaacggggatcgctcagccgactccgcagcaaccggcgacaggaaatgcagctactgcgcctgctgcgccgacacagcctgctgctaatcgctctccacaaagggctacgccgccgcaaagtggtgctcaaccgcctgcgcgtgcgccgggagggcaatag

SEQ ID NO: 76980 - protein, 207 aa, Unknown
  Obtained from environmental sample
  DOMAIN (2)...(113): rod shape-determining protein MreC
  misc_feature (1)..(207): Xaa is any amino acid
MVAVAKLTSRVLLICDATHALPIQVLRNDIRVIAAGNGCTDDLQLEHLPANTDIRVGDVLVTSGLGGRFPEGYPVAVVSSVKLDTQRAYTVIQARPTAGLQRLRYLLLLWGADRNGANPMTPEEVHRVANERLMQMMPQVLPSPDAMGPKLPEPATGIAQPTPQQPATGNAATAPAAPTQPAANRSPQRATPPQSGAQPPARAPGGQ

SEQ ID NO: 76981 - DNA, 345 bp, Unknown
  Obtained from environmental sample
  misc_feature (1)..(345): n is a, c, g, or t
atgaaggagatgtacggcaggcttgtaaaaaccctttcgaagggctacaaacagcgctttggccttgccgctgcgctggtcggcgctcccgaagtatttgtgttgnacgaaccaactgtcggccttgatcctgcccaaataatcgagattcgcaatctgattgcggcgctgggcagagccgctacggttattttttcatcccacattctttcggaggtgcagaccctttgcaacagggttattgtgcttcacgaaggccgcatagcagccgacctgggacaggatcagatacaggaatccctggaaaaaacttttatcgatctggtaaaaggggcgggacaatga

SEQ ID NO: 76982 - protein, 114 aa, Unknown
  Obtained from environmental sample
  DOMAIN (1)...(86): ABC transporter
  misc_feature (1)..(114): Xaa is any amino acid
MKEMYGRLVKTLSKGYKQRFGLAAALVGAPEVFVLXEPTVGLDPAQIIEIRNLIAALGRAATVIFSSHILSEVQTLCNRVIVLHEGRIAADLGQDQIQESLEKTFIDLVKGAGQ

SEQ ID NO: 76983 - DNA, 780 bp, Unknown
  Obtained from environmental sample
  misc_feature (1)..(780): n is a, c, g, or t
ttgctatttgcggcttttagtttgcctgcacagaatttttcgacctattttgaaccattgcggttgcgagtaaatttgttgctggcaggcgatgccgaacatcaaagcgtgtatattgaaagcctgcatgcagagccgtactggggcggttccactaaaaatttagtagatgcgtttaactatggcgagtattgttacaaagtatatggtgcagacagccaattaatttattcgcgcggcttcaatacgttgttttccgaatggcgtactaccgacgaggcgcggcgcgtggcgcgtgcaatgcccgtttcgctgacattgccgatgccgaagtctgaagtgcgccttgaaatatttgagcggattaaagaaacgggcgagtggaagccgttgttttcaacgttgctcaatccgcgcgacaagcaaattcgccgcgataaaccgaatgattataaagtaacgcagttggtaaacaacggcgaaccgtcccgaaaagtagatattgtgtttattgccgaaggttacacagctgccgaaatggacaaatttcgcaccgacgccgaacgctttgccggttatctgttcgagtttgaacctttccgcggacgtcgcaacgactttaatatctgggcgcttgaaagcccatcggccgagtcggggccggacattccgcatcaggacgtttggcgcagtacggttgccgatgcaactttttttactttcggtattgaccgttaccttacagcgcccaaccataccaagctttgcgagttggcgtga

SEQ ID NO: 76984 - protein, 259 aa, Unknown
  Obtained from environmental sample
  misc_feature (1)..(259): Xaa is any amino acid
MLFAAFSLPAQNFSTYFEPLRLRVNLLLAGDAEHQSVYIESLHAEPYWGGSTKNLVDAFNYGEYCYKVYGADSQLIYSRGFNTLFSEWRTTDEARRVARAMPVSLTLPMPKSEVRLEIFERIKETGEWKPLFSTLLNPRDKQIRRDKPNDYKVTQLVNNGEPSRKVDIVFIAEGYTAAEMDKFRTDAERFAGYLFEFEPFRGRRNDFNIWALESPSAESGPDIPHQDVWRSTVADATFFTFGIDRYLTAPNHTKLCELA

SEQ ID NO: 76985 - DNA, 552 bp, Unknown
  Obtained from environmental sample
  misc_feature (1)..(552): n is a, c, g, or t
atgtttacctttgcaccaagaaaaattaaaatgaaggacgcactgacaataataagcgaacgcacgagcgtgcgtgcatacaccggcgaggccgtcagcaacgaactggtagaaaagttgttacgcgccgccatggccgctccttcgagcaaaaacaggcaaccgtggcattttgtggtcattatcaatcggttgacgctggatttactggccgcgcggttaccctatgccaaaatgctggaaacggcgcccttggcagttgccgtctgcggcgacacgaccgtgcataccggcgacgcagctccaagctggataatggactgttcggcagcttcggaaaatttgctgttagccgcagaggctctgggacttggcgcagtttggacaggcgtattcccctacgaagaccgcacggcggcggtgcgcgaagtgttactcctgccgccccacattgtgccgctcaacgtaatagccatcggacgtccggcgaaagccgaaccgattaaaacaagggaaaccctcggccaatctgatctcgtnngannnaaatag

SEQ ID NO: 76986 - protein, 183 aa, Unknown
  Obtained from environmental sample
  DOMAIN (18)...(161): Nitroreductase family
  misc_feature (1)..(183): Xaa is any amino acid
MFTFAPRKIKMKDALTIISERTSVRAYTGEAVSNELVEKLLRAAMAAPSSKNRQPWHFVVIINRLTLDLLAARLPYAKMLETAPLAVAVCGDTTVHTGDAAPSWIMDCSAASENLLLAAEALGLGAVWTGVFPYEDRTAAVREVLLLPPHIVPLNVIAIGRPAKAEPIKTRETLGQSDLVXXK

SEQ ID NO: 76987 - DNA, 345 bp, Unknown
  Obtained from environmental sample
  misc_feature (1)..(345): n is a, c, g, or t
ttgatgaaaaaaattcggtcgaaccggctgtttcctttgctgttattgttcacgccattgttatcgtttgtcatagagccgcttacggcgcggttgcccattcccgaagcatggcaggaagtgtttgccaatgcctttcaaataaactttccttttttttttctgacaacagtcattgtcgctccgttgtttgaagagtggctgtgtcggggcgtaatattgcgcaaattactgaaacacaacacccctactatagccattgttttatcggcgttcatttttgctgttatcaatcttaatctgtggcaggcgtttcggccttgtcttcggctattgctgggctag

SEQ ID NO: 76988 - protein, 114 aa, Unknown
  Obtained from environmental sample
  SIGNAL (1)...(24)
  misc_feature (1)..(114): Xaa is any amino acid
MMKKIRSNRLFPLLLLFTPLLSFVIEPLTARLPIPEAWQEVFANAFQINFPFFFLTTVIVAPLFEEWLCRGVILRKLLKHNTPTIAIVLSAFIFAVINLNLWQAFRPCLRLLLG

SEQ ID NO: 76989 - DNA, 984 bp, Unknown
  Obtained from environmental sample
  misc_feature (1)..(984): n is a, c, g, or t
atgatggccgaaaggccgcaaatccattcctttgggttccttatggtcttcatggacaatgagctgcatacgccggagagcattgttattctcgtttctcattacggctcaatgtacgaaattgatccaaaacagagctggtcgatcattgaggaacgcatgaatgagcttaaactgaaaggagagtttgcggcttccatatcgagagatgcccaaacatccattgaaaccctcattggcggtatgcgtccggacgaattgatcgccctcaccaacattgatgtcaaaaccaaaacggaacatctgcttgccgtaacgcttgccaagccgctcaccgacaaaaatgtgactattgaatcctccatcgaagatgtcacaagagaacaaatgatgaccgtcaagcaggagcgcgagaaacgcagcagtgacaaggccgccgccgatgctcccgaaccgatgcccaccggggatggtctgtttaatgttgaagagggcgccgtagtactgaacgtcaacctcgttctctcgccggtttccggtattcccatctttgaattaaaacccggcgaaaaaatcatggtcaagatcgacccggcgtccaagcgaggctcctattttattgatttactgggcgccaaacgcgacaacgatatcctgcccgtgcctgcaaccgtcaatgaaatacgcatcggcaaggccaatgagaatatcattctggttaaaatcggcgaaggcatatacggacgggtaagcgaaacggaaaaagtcaagatcaagcgctttgacccgggggtggacggcaaaacggcggcgaatatgcagcaaaacatccaggctgcaggactcaaaaaacaggcggcgagtaccgatatcggcggaagcgaaggcggatcgaataagctgcaatggctcctgtatgcgnngcgcttatcattttcgcatgctcttgctgatcatcacgtctatgtaaaaaggatgttctga

SEQ ID NO: 76990 - protein, 327 aa, Unknown
  Obtained from environmental sample
  misc_feature (1)..(327): Xaa is any amino acid
MMAERPQIHSFGFLMVFMDNELHTPESIVILVSHYGSMYEIDPKQSWSIIEERMNELKLKGEFAASISRDAQTSIETLIGGMRPDELIALTNIDVKTKTEHLLAVTLAKPLTDKNVTIESSIEDVTREQMMTVKQEREKRSSDKAAADAPEPMPTGDGLFNVEEGAVVLNVNLVLSPVSGIPIFELKPGEKIMVKIDPASKRGSYFIDLLGAKRDNDILPVPATVNEIRIGKANENIILVKIGEGIYGRVSETEKVKIKRFDPGVDGKTAANMQQNIQAAGLKKQAASTDIGGSEGGSNKLQWLLYAXRLSFSHALADHHVYVKRMF

SEQ ID NO: 76991 - DNA, 777 bp, Unknown
  Obtained from environmental sample
  misc_feature (1)..(777): n is a, c, g, or t
atgccgtatgacggggtttggttaaaaatgcaggatattgcccttgatgtgcattgcacgcccgaaggcagactgaggattgtgtatggtttttcaacgaatgttattgattttaacgtaaatgtaaacgataagtcgattccggttcattttgaaggagaagcgccgaggcaaagtctgtttgttttgggtaaaaaaattttagaggtcagggaattttctccgcatcttgtgctcgataccgtactcggggaaatgagcagagacagcagagaactctttggcgatattgagattcagggcaagcccagtacggtagctctggctttttgcgcgcgggacgaatcacagagcctgcccggcatggtctttgtccgatatcccgagttttatgagagatgcaaggaaattttggataagaatcaagacgtaaccattatggataatcttgagaacatctggggtaatgaagattttatcgctgtctcgcctatctgttcaaatgacggtgtgcccaccgggctggtatgttttgaggtcttcaagcctatttttgctgaattgcaaaacaggcttatccgatccatgttcgtgattggattcccgattctcgtgcttgcgtactgtatttcgtatgttcagggtcagcggcttatccggccggtgcggaaactgcagcgggctatgcatgagcttatgcaaggcgattttttcacgcggatcagcctgggaaaagtggatgaatacgcggatctcgccgcgagctttatctcatga

SEQ ID NO: 76992 - protein, 258 aa, Unknown
  Obtained from environmental sample
  DOMAIN (196)...(258): HAMP domain
  misc_feature (1)..(258): Xaa is any amino acid
MPYDGVWLKMQDIALDVHCTPEGRLRIVYGFSTNVIDFNVNVNDKSIPVHFEGEAPRQSLFVLGKKILEVREFSPHLVLDTVLGEMSRDSRELFGDIEIQGKPSTVALAFCARDESQSLPGMVFVRYPEFYERCKEILDKNQDVTIMDNLENIWGNEDFIAVSPICSNDGVPTGLVCFEVFKPIFAELQNRLIRSMFVIGFPILVLAYCISYVQGQRLIRPVRKLQRAMHELMQGDFFTRISLGKVDEYADLAASFIS

SEQ ID NO: 76993 - DNA, 921 bp, Unknown
  Obtained from environmental sample
  misc_feature (1)..(921): n is a, c, g, or t
atgatggccgaggggcacatggtcggcgcgatcggttcggcgtcggcgggcggcagggacatttcccttatatcgcacggaaaaggcgcggcgctggtgggtgacgcggcgttcgccatcaaccctccgggaagcggcaagtacttgatccagagcgacagcgtcgcggttaagactaccggtaccggtaccaacggggaagtgcagatcgggtcgccgctggccggtgtgggcggtgttctgactatcaacgcttggaccacggcgacgacggctgtgctggccgcggccggtacgtcatctatcgaggcagagaatattactgtcataggcgttggaaacagcggcgcgtccaagaatatcgtcatcaactccaagagcaaggcggtgttgtcggctgtaggcgaaattaaagttgaagaggcgcagatagatcactccgccgcgacggggactgtgggcgccacggtgttttcgagcgcgaccggcaacgttacgttggagaaggtggttgtaaccaacggaaccgcgaccggcaacgtcgcgggcaggattgtggaagccggcggcacgatcacgattaagggcggaaagttttcccccgcgggcgacagcaaaggcgtggccgtttctacggacaagacggtgctcatagagggcgctaagataacatccgccggaacagcggcgtcggcgggcgggtacgtcgtagccggcagcactgtgacggttaagtcgagtccttcagactcggcggtcgtcgcgtggtccggttcgggcgcggcggtcggcggtatatacgctacgcagagcgttagcgttacaacggataaacttgttcaggtggaagtccgtgttgctggcgcgggcgtcggtatcgacgtgtgggctgagaccgtgattccttcggcggggaagtga

SEQ ID NO: 76994 - protein, 306 aa, Unknown
  Obtained from environmental sample
  misc_feature (1)..(306): Xaa is any amino acid
MMAEGHMVGAIGSASAGGRDISLISHGKGAALVGDAAFAINPPGSGKYLIQSDSVAVKTTGTGTNGEVQIGSPLAGVGGVLTINAWTTATTAVLAAAGTSSIEAENITVIGVGNSGASKNIVINSKSKAVLSAVGEIKVEEAQIDHSAATGTVGATVFSSATGNVTLEKVVVTNGTATGNVAGRIVEAGGTITIKGGKFSPAGDSKGVAVSTDKTVLIEGAKITSAGTAASAGGYVVAGSTVTVKSSPSDSAVVAWSGSGAAVGGIYATQSVSVTTDKLVQVEVRVAGAGVGIDVWAETVIPSAGK

SEQ ID NO: 76995 - DNA, 570 bp, Unknown
  Obtained from environmental sample
  misc_feature (1)..(570): n is a, c, g, or t
gtggagcgcataaaggccggactgccggaattgccgcttgcccgccgtgctcggttcaagaaagagttctctctttcggattacgatgcgaacgagttgacctgtgaacgtgaggttgccgactatttcgagcgtgtggcgcacgcatgtggcgacggaaagatggccgcgaactggatcctgtccgaactctttgcgcaccttggtaaacgcagcttgggaataactgagagtcctgtcgcgcccgatggtttggcggaactaatttctctcataaaggacgaaactataagcggcaagatagcgaaggatgtgctggtcgccatgttcgaggagggcaagggcgcacgtgcgatagtagaggcgaggggtctaaggcaaatcaccgataccggtgcgatagaggccgcggcggacgaggtgataaaaaattccccttcgcagcttgccgaatataaatcgggcaaggttgcgctcttcggttggttcgtggggcaggtcatgaagactatgcgtggtcaagcctcgcctgacgccgtgaacaaaatcctaaagactaagctggggtaa

SEQ ID NO: 76996 - protein, 189 aa, Unknown
  Obtained from environmental sample
  DOMAIN (41)...(188): GatB/Yqey domain
  misc_feature (1)..(189): Xaa is any amino acid
MERIKAGLPELPLARRARFKKEFSLSDYDANELTCEREVADYFERVAHACGDGKMAANWILSELFAHLGKRSLGITESPVAPDGLAELISLIKDETISGKIAKDVLVAMFEEGKGARAIVEARGLRQITDTGAIEAAADEVIKNSPSQLAEYKSGKVALFGWFVGQVMKTMRGQASPDAVNKILKTKLG

SEQ ID NO: 76997 - DNA, 681 bp, Unknown
  Obtained from environmental sample
  misc_feature (1)..(681): n is a, c, g, or t
atgcccgtctgggaaggctccgtagtgggcggcatccgcttcggtcgccacggggtgtgcggtcaggcccctgcacccaagcccaaggtcgagaagcccaagcctgagaagcccgagccgaaggtcgaggtcaagcctgagaagcccaagcccgagccgaaggtcgagaccaagccagagccgaagccagaacccaagcaggagccgaaggtcgaggccaagccagaacccgtggtcgaggtcaagccagagccgaagccagagcccaagaaagaaccccagattgtcgagatcgaaggcatcaggatacacttcatcacaaacgactccagcagtgccgaggccaacaacaggacaatagtgaagacttgggtcgccaagtacaagagcgtcgttgaccccaaggacttggtggtcactggtcatgcagacaagaggggctcgcacgcgcacaacatggcactctccgtccgtagggcgaacacactggctggatacttgaggtcagagggcatcaatatccccgccgccaatgtgcagggcaggagctgggacgagccgatagccgacaacgacacccaacagggcttggcaaagaaccgccgcgctgagctgggcgtgaacagccccaaatacaagatcaagtccatgatggaaggcaacatagtgggcctcaagtaa

SEQ ID NO: 76998 - protein, 226 aa, Unknown
  Obtained from environmental sample
  DOMAIN (105)...(201): OmpA family
  misc_feature (1)..(226): Xaa is any amino acid
MPVWEGSVVGGIRFGRHGVCGQAPAPKPKVEKPKPEKPEPKVEVKPEKPKPEPKVETKPEPKPEPKQEPKVEAKPEPVVEVKPEPKPEPKKEPQIVEIEGIRIHFITNDSSSAEANNRTIVKTWVAKYKSVVDPKDLVVTGHADKRGSHAHNMALSVRRANTLAGYLRSEGINIPAANVQGRSWDEPIADNDTQQGLAKNRRAELGVNSPKYKIKSMMEGNIVGLK

SEQ ID NO: 76999 - DNA, 357 bp, Unknown
  Obtained from environmental sample
  misc_feature (1)..(357): n is a, c, g, or t
gtgaccaccaagtccttggggtcaacgacgctcttgtacttggcgacccaagtcttcactattgtcctgttgttggcctcggcactgctggagtcgtttgtgatgaagtgtatcctgatgccttcgatctcgacaatctggggttctttcttgggctctggcttcggctctggcttgacctcgaccacgggttctggcttggcctcgaccttcggctcctgcttgggttctggcttcggctctggcttggtctcgaccttcggctcgggcttgggcttctcaggcttgacctcgaccttcggctcgggcttctcaggcttgggcttctcgaccttgggcttgggtgcaggggcctga

SEQ ID NO: 77000 - protein, 118 aa, Unknown
  Obtained from environmental sample
  SIGNAL (1)...(20)
  misc_feature (1)..(118): Xaa is any amino acid
MTTKSLGSTTLLYLATQVFTIVLLLASALLESFVMKCILMPSISTIWGSFLGSGFGSGLTSTTGSGLASTFGSCLGSGFGSGLVSTFGSGLGFSGLTSTFGSGFSGLGFSTLGLGAGA

SEQ ID NO: 77001 - DNA, 870 bp, Unknown
  Obtained from environmental sample
  misc_feature (1)..(870): n is a, c, g, or t
ttgatcagatcggccgagagtatcgcgctggggctgctgccgctggcactttcggtcggctgcgacaaggggccgtcggaagaggagataatcgccaagtacgaagcgcagaaggccgagcaggaaagggtggccaagctggaggccgagctgaccgaaatgaaggagcagcaggccgccgacaacgccgaggcacagaaggccaaggacgcgcagattgccgcgctcacaaagcagatgaatgcccaaaagctgagggccgaccaagcagccaaggaggccgaggccgccaaggagcgcaggtctggcaggggcaggggtcaaggcgaggatggccagcaagtggccagaccctccgtggtaaccgtcccgcagggtacgaagttgaccgtgacactttcgacccccatcaccaccgaagccaatgtgggcgatccgtggagcggacagttggtctcggacgttgtggttgacggtcagaccatctggaaggcaggcgcgcgcgcggctggcacggtcagtgccagcacgcccgccggtcgcctcgccaacggcgagggcatacttgctatcaggctcaccgaggtcggcggcgctgcgattgacggcggcaactacgccgtgcagggcgacgcccagggttcgaggaacgcgaaggtcatcgccaccacgaccgcgctgggtgccatcgccggctacctctccagcaaaaacaacaagcaagaccacgcccttggcggcgcggccttaggcgccgcggcaggcaccgcactggccgctgggactgccaccactgttatcactattcccgcctccaccgcgatcaacttccagctcccctccgaagagcgcgtggtggttaggaactaa

SEQ ID NO: 77002 - protein, 289 aa, Unknown
  Obtained from environmental sample
  SIGNAL (1)...(20)
  misc_feature (1)..(289): Xaa is any amino acid
MIRSAESIALGLLPLALSVGCDKGPSEEEIIAKYEAQKAEQERVAKLEAELTEMKEQQAADNAEAQKAKDAQIAALTKQMNAQKLRADQAAKEAEAAKERRSGRGRGQGEDGQQVARPSVVTVPQGTKLTVTLSTPITTEANVGDPWSGQLVSDVVVDGQTIWKAGARAAGTVSASTPAGRLANGEGILAIRLTEVGGAAIDGGNYAVQGDAQGSRNAKVIATTTALGAIAGYLSSKNNKQDHALGGAALGAAAGTALAAGTATTVITIPASTAINFQLPSEERVVVRN

SEQ ID NO: 77003 - DNA, 915 bp, Unknown
  Obtained from environmental sample
  misc_feature (1)..(915): n is a, c, g, or t
atggctcgtgtaaaaactgctattgatgctgttattgctaaagatgtttacgttattatagattggcattcgcacagtgcccatgtagacccagataatgccattgagttttttacagctatggcgcaagattacggcagtaaagaccacgtgatttttgaaatttacaatgaaccaaaatgtgcaaacggtgcagacactgattggtgtgatgatggaaactggactacttgggcacaaataaaaacctatgcggagaaaattatccccgtaattcggagtaacggaggagcgaatagtttaattttggttggaacgccatatttctccgcagcagttgcttccgctaatgggaattatttaagtgataacaatgttggctatgtgttccatttttatgcgcaatctcataaaatgaatgatggcgcaccccccagttggagtaggacatattcagacggcgtaacaactgtgctaaatgcaggcaagccggtatttataaccgaatatggaacaacaaacgcggacggtggaggtggggctaattacaatagccacgatgccacaagttccaatgcttggcatacatttatggatacacacaaaatctcttctgctgcatggagcgttaacgataaacgcgaaggttcctcattctttggcacgggttccacttttaatatgagtagctgggataacacaagttctatgactgcttctgggcaatatattttcaacaaactcagaacttatgccaattccgctccgtggcgtagcggttccggcggtggtggcggcggcagctcaagcagtggcggcgggggcagttccacaaggtgcaaagatacacaaaaccgcgattatttttgccagtgggaaaccaggatgctatgcgatagatccagcgttcgatga

SEQ ID NO: 77004 - protein, 304 aa, Unknown
  Obtained from environmental sample
  DOMAIN (1)...(218): Cellulase (glycosyl hydrolase family 5)
  misc_feature (1)..(304): Xaa is any amino acid
MARVKTAIDAVIAKDVYVIIDWHSHSAHVDPDNAIEFFTAMAQDYGSKDHVIFEIYNEPKCANGADTDWCDDGNWTTWAQIKTYAEKIIPVIRSNGGANSLILVGTPYFSAAVASANGNYLSDNNVGYVFHFYAQSHKMNDGAPPSWSRTYSDGVTTVLNAGKPVFITEYGTTNADGGGGANYNSHDATSSNAWHTFMDTHKISSAAWSVNDKREGSSFFGTGSTFNMSSWDNTSSMTASGQYIFNKLRTYANSAPWRSGSGGGGGGSSSSGGGGSSTRCKDTQNRDYFCQWETRMLCDRSSVR

SEQ ID NO: 77005 - DNA, 627 bp, Unknown
  Obtained from environmental sample
  misc_feature (1)..(627): n is a, c, g, or t
atgggtttggaaagcggggcgggttacaggacaacttccattgatagtgtggcaataaaccaagggaatatgccgccggtcacaatgacccgcaaaggggtcagccaggtcgggaacctggatccctatattctgaacgaggctgaaaccatcggcattcaggggggcatatacacgcggcccgaaacggacgcggggaacggaatggttgtcacctccattgataccggcgactggcttgccgtgtacggcgttgatttcggcagcgccggggccacgagattcaccgccagggtgcgttcccccggtacgcccggctatgtcggggcgatagagctgcggcttgatcctgaaggggacggtataacggcggataacggcaaccttaccggtaccaataaagcggggataaaagacggggaagtgataggccgcctccagattagtgctaagagcggggaagagggcaaatacggcattgtaacgatagatttggataaaactgttactggcgtgcataacctggtctttgtgttctacagtagcttgggcgttaaaccggagaccgttatccccgacaccaggcacaaaaacggctttgaattcgaccaatggcagttcttctag

SEQ ID NO: 77006 - protein, 208 aa, Unknown
  Obtained from environmental sample
  DOMAIN (47)...(187): Carbohydrate binding module (family 6)
  misc_feature (1)..(208): Xaa is any amino acid
MGLESGAGYRTTSIDSVAINQGNMPPVTMTRKGVSQVGNLDPYILNEAETIGIQGGIYTRPETDAGNGMVVTSIDTGDWLAVYGVDFGSAGATRFTARVRSPGTPGYVGAIELRLDPEGDGITADNGNLTGTNKAGIKDGEVIGRLQISAKSGEEGKYGIVTIDLDKTVTGVHNLVFVFYSSLGVKPETVIPDTRHKNGFEFDQWQFF

SEQ ID NO: 77007 - DNA, 393 bp, Unknown
  Obtained from environmental sample
  misc_feature (1)..(393): n is a, c, g, or t
gtgggggtcgtgtgttcggccagggtctcacgggcggcacccagacgcagtngagctccttccccgtcaagaccacngacttcatcttgctcttgggccgaagagcgcggcttcttcggcgtgctgctggccctggccctgttcggcatattcctgagtcgcgtcctggccgtgggcagaaacgccaagacattgggcgaaagctacttttgcagcggcgcggcatttctcttgggtctaaacatcttcgtgaacatagccatggcagtgggcagcctgcccaacaagggcatggtcctgcccttcttcagctacggcggcagcagcacggtcagctacttcttgggcatctgcgtcgtcatgggcgcggcctacagggcaaaggtgctgtag

SEQ ID NO: 77008 - protein, 130 aa, Unknown
  Obtained from environmental sample
  misc_feature (1)..(130): Xaa is any amino acid
MGVVCSARVSRAAPRRSXAPSPSRPXTSSCSWAEERGFFGVLLALALFGIFLSRVLAVGRNAKTLGESYFCSGAAFLLGLNIFVNIAMAVGSLPNKGMVLPFFSYGGSSTVSYFLGICVVMGAAYRAKVL

SEQ ID NO: 77009 - DNA, 444 bp, Unknown
  Obtained from environmental sample
  misc_feature (1)..(444): n is a, c, g, or t
gtggctcatgtccttcggcaacttcatgagctccacggtctattaccaactgggcctgctcgtggccctgatagtcttcgccaggtggctcacctcgtccgagcgcggcggaagggcgctggaaagggccctgctcgcggtgcccaggctgggcaccctctaccgcatgtaccacagcagcgtgttcacacgcaccatcagcgtcctgctgtccggcggcctgcccgtgctgcaggcgctggaggtcatccagcggaccagcagctcgcaccgcatgaagacaaagctgtacacgataatcgagaccgtccgcgccggcggcgccctgcaccaggcgctggaccgcgccaagatgctggacccactggcggtcgagatggcccgcgtcggcgagcagagctcctccctgccggagatgagaaccactcgccactctcgcgataa

SEQ ID NO: 77010 - protein, 147 aa, Unknown
  Obtained from environmental sample
  misc_feature (1)..(147): Xaa is any amino acid
MAHVLRQLHELHGLLPTGPARGPDSLRQVAHLVRARRKGAGKGPARGAQAGHPLPHVPQQRVHTHHQRPAVRRPARAAGAGGHPADQQLAPHEDKAVHDNRDRPRRRRPAPGAGPRQDAGPTGGRDGPRRRAELLPAGDENHSPLSR

SEQ ID NO: 77011 - DNA, 705 bp, Unknown
  Obtained from environmental sample
  misc_feature (1)..(705): n is a, c, g, or t
atgatgttcggtgcggcagtcggtgcggtgggcagcggctggctctcctttaaactcgggcgcaaaaagagcctgatgatcggcgcaattttgtttgttgccggttcgctgttctctgcggctgcgccaaacgttgaagtactgattctttcccgcgttctactggggctggcggtgggtgtggcctcttataccgcaccgctgtacctctctgaaattgcgccggaaaaaattcgtggcagtatgatctcgatgtatcagttgatgatcactatcgggatcctcggtgcttatctttctgataccgccttcagctacaccggtgcatggcgctggatgctgggtgtgattatcatcccggcaattttgctgctgattggtgtcttcttcctgccagacagcccacgttggtttgccgccaaacgccgttttgttgatgccgaacgcgtgctgctacgcctgcgtgacaccagcgcggaagcgaaacgcgaactggatgaaatccgtgaaagtttgcaggttaaacagagtggctgggcgctgtttaaagagaacagcaacttccgccgcgcggtgttccttggcgtactgttgcaggtaatgcagcaattcaccgggatgaacgtcatcatgtattacgcgccgaaaatcttcgaactggcgggttataccaacactaccgaacaaatgtggggggaccgttga

SEQ ID NO: 77012 - protein, 234 aa, Unknown
  Obtained from environmental sample
  DOMAIN (1)...(231): Sugar (and other) transporter
  misc_feature (1)..(234): Xaa is any amino acid
MMFGAAVGAVGSGWLSFKLGRKKSLMIGAILFVAGSLFSAAAPNVEVLILSRVLLGLAVGVASYTAPLYLSEIAPEKIRGSMISMYQLMITIGILGAYLSDTAFSYTGAWRWMLGVIIIPAILLLIGVFFLPDSPRWFAAKRRFVDAERVLLRLRDTSAEAKRELDEIRESLQVKQSGWALFKENSNFRRAVFLGVLLQVMQQFTGMNVIMYYAPKIFELAGYTNTTEQMWGDR

SEQ ID NO: 77013 - DNA, 648 bp, Unknown
  Obtained from environmental sample
  misc_feature (1)..(648): n is a, c, g, or t
ttggcgaagggtatcaatagtttttctcaggcgaaagccgcggcggtaaaagtccacgctgacgcgcccggtacgttttattgcggatgtaaaattaactggcagggcaaaaaaggcgttgttgatctgcaatcgtgcggctatcaggtgcgcaaaaatgaaaaccgcgccagccgcgtagagtgggaacatgtcgttcccgcctggcagttcggtcaccagcgccagtgctggcaggacggtggacgtaaaaactgcgctaaagatccggtctatcgcaagatggaaagcgatatgcataacctgcagccgtcagtcggtgaggtgaatggcgatcgcggcaactttatgtacagccagtggaatggcggtgaaggccagtacggtcaatgcgccatgaaggtcgatttcaaagaaaaagctgccgaaccaccagcgcgtgcacgcggtgccattgcgcgcacctacttctatatgcgcgaccaatacaacctgacactctctcgccagcaaacgcagctgttcaacgcatggaacaagatgtatccggttaccgactggaagtgcgagcgcgatgaacgcatcgcgaaggtgcagggcaatcataacccgtatgtgcaacgcgcttgccaggcgcgaaagagctaa

SEQ ID NO: 77014 - protein, 215 aa, Unknown
  Obtained from environmental sample
  DOMAIN (6)...(210): Endonuclease I
  misc_feature (1)..(215): Xaa is any amino acid
MAKGINSFSQAKAAAVKVHADAPGTFYCGCKINWQGKKGVVDLQSCGYQVRKNENRASRVEWEHVVPAWQFGHQRQCWQDGGRKNCAKDPVYRKMESDMHNLQPSVGEVNGDRGNFMYSQWNGGEGQYGQCAMKVDFKEKAAEPPARARGAIARTYFYMRDQYNLTLSRQQTQLFNAWNKMYPVTDWKCERDERIAKVQGNHNPYVQRACQARKS

SEQ ID NO: 77015 - DNA, 345 bp, Unknown
  Obtained from environmental sample
  misc_feature (1)..(345): n is a, c, g, or t
atgcatatcgctttccatcttgcgatagaccggatctttagcgcagtttttacgtccaccgtcctgccagcactggcgctggtgaccgaactgccaggcgggaacgacatgttcccactctacgcggctggcgcggttttcatttttgcgcacctgatagccgcacgattgcagatcaacaacgccttttttgccctgccagttaattttacatccgcaataaaacgtaccgggcgcgtcagcgtggacttttaccgccgcggctttcgcctgagaaaaactattgatacccttcgccaacgccggggccgaaaaatgctgcgctcagtaccaccgcagcaatag

SEQ ID NO: 77016 - protein, 114 aa, Unknown
  Obtained from environmental sample
  SIGNAL (1)...(26)
  misc_feature (1)..(114): Xaa is any amino acid
MHIAFHLAIDRIFSAVFTSTVLPALALVTELPGGNDMFPLYAAGAVFIFAHLIAARLQINNAFFALPVNFTSAIKRTGRVSVDFYRRGFRLRKTIDTLRQRRGRKMLRSVPPQQ

SEQ ID NO: 77017 - DNA, 879 bp, Unknown
  Obtained from environmental sample
  misc_feature (1)..(879): n is a, c, g, or t
atggccgagtctccctgtccgcatcattcgtcccagtcaaacagcggcggctgggttgcctttgcgtctgcgccagggaatgacgcagccggctcccacggggcatcggcggcaaatggacctggtggcggcatgtccggcgggagccagcggatggcgggaattgtctcaagaccttgcagaaacacaagcgcaccttcccgcgatggcacagcgggcacgcgcagttgcgccacaggcgggtctgacagcagtgtcgccaatgcccgtggaaagatggcccttgaagacagtgggctaacctttcttggatctgtggctatcccaggggtgaaggacggcggggcaggggggagcggcaatgcgtccctccacggcataccgaggctgaatgcctgctcaccgagcattgcagcgattctctggtcagcggaaacaccgacgcagacagcgcacttcagcttgtcctctagactaccccgcagtccagctacatccgaggccagctcctcccacgacctgccaacctgcgtgtattcccacccgcccgtcagcgccagcctccacgccgccctgcgccgctggaacaggacggccccgggccaagctccggcaccgatgcgatggctcatcgcccgctcaattttcccctgctcgtcctccagcgcaagcgcgagggccttgacatcaatgtgcttcaccgccggcgcgggcaccgtagccacgccccacatggctccgcatgtgcagccgtctgtgtcctctggcacgtatccaatccccggcagcgaccagccgccccgcaactgcgggacccatccgaagtgccccttgcgccaccgcgcaccgatgtcgccgtcgggcagcgctggcgcgtga

SEQ ID NO: 77018 - protein, 292 aa, Unknown
  Obtained from environmental sample
  misc_feature (1)..(292): Xaa is any amino acid
MAESPCPHHSSQSNSGGWVAFASAPGNDAAGSHGASAANGPGGGMSGGSQRMAGIVSRPCRNTSAPSRDGTAGTRSCATGGSDSSVANARGKMALEDSGLTFLGSVAIPGVKDGGAGGSGNASLHGIPRLNACSPSIAAILWSAETPTQTAHFSLSSRLPRSPATSEASSSHDLPTCVYSHPPVSASLHAALRRWNRTAPGQAPAPMRWLIARSIFPCSSSSASARALTSMCFTAGAGTVATPHMAPHVQPSVSSGTYPIPGSDQPPRNCGTHPKCPLRHRAPMSPSGSAGA

SEQ ID NO: 77019 - DNA, 729 bp, Unknown
  Obtained from environmental sample
  misc_feature (1)..(729): n is a, c, g, or t
atggcttactacgcctcaagtcccttgtatttgctgtcaattttattcccaaaagaatatctgcgggaatttatgatgataataacggctgtaaaaattgcatgcgcaggacttttcttttcaatttatctcagaggtatatacaatcacgattatttaagaaaatcgggcgatctaaaatatgagaagagccattgtgaaacaagcgttggtctcgtgctgcttggcttttcggttctatacgcgctgtgcgcttatatgacaggttattactggtgtttattctttttggactgtgcggctctgcttccgctgataattctggggcttgagagactgatagattctagcgggtttaaattgtatgcgataagcttgggcattgccgcgctcgccaatcattataccgcgatatttgtctgcgaatttatattgttatattattttgtgttatattttgttaagcttgatgaaaaatttagtttcattaaatttgtgaaaaaatcttttaaggttttagcggcttcgctgataggattgggacttgccgcgtgcatactggcgccgacttattattggtttggaaacacgggaaattccgggacgggattcaataagactgtcgattcgtataacagcttgatagatatattcacaaatttattaccgggcggaaagccgaatacgcgcctaatgcctcctaaaggactgccgaactcggccatctga

SEQ ID NO: 77020 - protein, 242 aa, Unknown
  Obtained from environmental sample
  misc_feature (1)..(242): Xaa is any amino acid
MAYYASSPLYLLSILFPKEYLREFMMIITAVKIACAGLFFSIYLRGIYNHDYLRKSGDLKYEKSHCETSVGLVLLGFSVLYALCAYMTGYYWCLFFLDCAALLPLIILGLERLIDSSGFKLYAISLGIAALANHYTAIFVCEFILLYYFVLYFVKLDEKFSFIKFVKKSFKVLAASLIGLGLAACILAPTYYWFGNTGNSGTGFNKTVDSYNSLIDIFTNLLPGGKPNTRLMPPKGLPNSAI

SEQ ID NO: 77021 - DNA, 840 bp, Unknown
  Obtained from environmental sample
  misc_feature (1)..(840): n is a, c, g, or t
ttggtaagcaagaaaaaatttgagacttcggaaaaagggcgtattagtgctgaagaacaagtgaaaacgttgaccgcaacagttgacgaaaaaaacaaaaaaattgcggaattggaaacagaaattgcggaattgaaaacaacaatctctggtatggaaagtaaaatatcgacgcttggcgcagatacctcccgtttgagcaaaaatatccgtgagatgcagaaggttttgacctcaaaaatgagtcaaaaagatcaattggatgccctgctcaaaagtcaaagagaaacccttgccgaacgtgagcgaacaatcaacgaactgaaagaaataatacaaaaacaaaccgacatggtaaacaacctgctaaaacaggtaaacgaagcgctgaccggtttcagttccgacgaattgacagtaaaaatgcaagacggcaaagtatatattgcaatgtccgacaaattactgttcaaatcgggtagcgcagacgttgacaatcgcggcaaacaagctctcgcaatgcttgccaacgtattgattaaacagcctgaaatagatattttcatcgaaggacacacagacaatttaccaatacgaacagcccggtttaatgataattgggatttgagcgtactccgcgctacatcggtagttcgcattcttacaacagaatataaagtaaatccgttgcagattataccgtcaggacgtagcgaattcttccctgttgccgataactcaattctcgacggacgctcgaaaaacagacggacagagattatcctgtcgccaaaactcgataaactgttccaaatgttgaatgacactcaaaaaatgtaa

SEQ ID NO: 77022 - protein, 279 aa, Unknown
  Obtained from environmental sample
  DOMAIN (156)...(256): OmpA family
  misc_feature (1)..(279): Xaa is any amino acid
MVSKKKFETSEKGRISAEEQVKTLTATVDEKNKKIAELETEIAELKTTISGMESKISTLGADTSRLSKNIREMQKVLTSKMSQKDQLDALLKSQRETLAERERTINELKEIIQKQTDMVNNLLKQVNEALTGFSSDELTVKMQDGKVYIAMSDKLLFKSGSADVDNRGKQALAMLANVLIKQPEIDIFIEGHTDNLPIRTARFNDNWDLSVLRATSVVRILTTEYKVNPLQIIPSGRSEFFPVADNSILDGRSKNRRTEIILSPKLDKLFQMLNDTQKM

SEQ ID NO: 77023 - DNA, 777 bp, Unknown
  Obtained from environmental sample
  misc_feature (1)..(777): n is a, c, g, or t
gtgatcatngtaattatttttattgccatatttgcgcctttaatcgcgccatacgccccggaaaccattgacctgaaaaacatgaacaaagggcctatggaaggacacttgctgggaaccgactcgttgggacgggatcttctttcgcgtataatatacggttccagggtgtctttgctggtgggcattattacagaatgtatagcggtgccgctgggagtcgttcttggagctatcgcgggctattacggcggtaaaatagacgccgttatctcccgcattattgaaaccatggcgtcctttccgtttatattgtttgccatggttcttatgtatgtcctgggcaagggcctggttgctgtttttatagcccttggaatcatcgggtggataggccttgcccgtttaataagagggcagataatccagttgaaagaacgggaattcgtggaagcggcgagggcggcaggcgcgtcggatttcgcgataatttttaagcatcttatacctaactgcctttcaacgataattgttgttataacccttgatattcccgatgatatcgtgtacgaagcgactttaagctttataggcttgggcgtccaaccgccaatgccaagctggggcagtatccttgccgaggcgatgaagtatatgcgccaaaaccccggctattgcatttatccggggcttgcgctgatgttcctggttttaatgttcaacactttaggcgacggcttgcgggacgcgctggatccaaagctgaataacctatag

SEQ ID NO: 77024 - protein, 258 aa, Unknown
  Obtained from environmental sample
  DOMAIN (55)...(257): Binding-protein-dependent transport system inner membrane component
  misc_feature (1)..(258): Xaa is any amino acid
MIXVIIFIAIFAPLIAPYAPETIDLKNMNKGPMEGHLLGTDSLGRDLLSRIIYGSRVSLLVGIITECIAVPLGVVLGAIAGYYGGKIDAVISRIIETMASFPFILFAMVLMYVLGKGLVAVFIALGIIGWIGLARLIRGQIIQLKEREFVEAARAAGASDFAIIFKHLIPNCLSTIIVVITLDIPDDIVYEATLSFIGLGVQPPMPSWGSILAEAMKYMRQNPGYCIYPGLALMFLVLMFNTLGDGLRDALDPKLNNL

SEQ ID NO: 77025 - DNA, 813 bp, Unknown
  Obtained from environmental sample
  misc_feature (1)..(813): n is a, c, g, or t
atgaaaacaaaagggtcatggcatacaaaagactggaaagaaagacgaaaacaggtaattaaagataaatgcgaacaatgcggcggtacagtaaatctaaccttgcaacatcaatcgcancctgacaaatacaataaatactatcttgacgcatatatgcactttcacggcattttcattgaagaaaattcaaataaccttaacaatttggttacaaaagaagatattttatactatattgagaatacaccacgcgaaaaatactccatgtgtcctaaatgtggagggggttattatacaagaaggagagaaccgcgccttgtttgcaataggtgtaaatatgaatttgataaaccaataatcaaacttttgccagaatacattgatgatttatatagcgattttgatatagcctctatagacaaacccgcaaatgcgccgggtgatagaaaagtaaagcactttttgctttattctgaaatacagcaaaaaatagcaaaagaaaaaattaagcaaagggtgaaagataaatatcaatcggcaatagataaaaaggcaatgattgattatttagacgcaacaattcagtatttatcttttgaagacacaataacgctttgcagaaaatgcgcctttagccaagacaaaacaggtagagatttatgtccagtatgcaagataagatataaaccggtacaatatgaaacctgtgtggattgcctgccagacggagaacgaaaaaatcagattaaagagtattacgaattcgttaaagaaatgaatgaaatggaaaaggcattaggtattgattaa

SEQ ID NO: 77026 - protein, 270 aa, Unknown
  Obtained from environmental sample
  misc_feature (1)..(270): Xaa is any amino acid
MKTKGSWHTKDWKERRKQVIKDKCEQCGGTVNLTLQHQSXPDKYNKYYLDAYMHFHGIFIEENSNNLNNLVTKEDILYYIENTPREKYSMCPKCGGGYYTRRREPRLVCNRCKYEFDKPIIKLLPEYIDDLYSDFDIASIDKPANAPGDRKVKHFLLYSEIQQKIAKEKIKQRVKDKYQSAIDKKAMIDYLDATIQYLSFEDTITLCRKCAFSQDKTGRDLCPVCKIRYKPVQYETCVDCLPDGERKNQIKEYYEFVKEMNEMEKALGID

SEQ ID NO: 77027 - DNA, 531 bp, Unknown
  Obtained from environmental sample
  misc_feature (1)..(531): n is a, c, g, or t
ttgtacgaccgtggcgagggcgtccccaaagacgccgagcaggccgtcttctggtggcgcgaagccgccgagcaaggaaacgccgaagcgcagaacaatctcggcgggttgtatgaaagcggcgaaggcgttccaaaagacgccgaacaggccgtcttctggcgccgcgaagccgccgagcagggcaactccgccgcgcagttcaatcttggcgggtcgtattatcgcggcgaaggcgtcccaaaagatgccaaacgggccgcctattggttccagaaagccgcggagcaaggcgatcccgatgcgcagttcaatctcggctggttgtattacctcggcgaaggcgtcaaaaaggatctcgttttggcataccagtggtttagcttggcggctcggtctgacgaaccaagcgttcgcgactcggccaccgacgcgcgaggccggttgagccagaaaatgagcgccaagcagatcgccaaagccgaaaagatggttgacgccttcgttccgaaaccggagaaagcgcactaa

SEQ ID NO: 77028 - protein, 176 aa, Unknown
  Obtained from environmental sample
  DOMAIN (100)...(135): Sel1 repeat
  misc_feature (1)..(176): Xaa is any amino acid
MYDRGEGVPKDAEQAVFWWREAAEQGNAEAQNNLGGLYESGEGVPKDAEQAVFWRREAAEQGNSAAQFNLGGSYYRGEGVPKDAKRAAYWFQKAAEQGDPDAQFNLGWLYYLGEGVKKDLVLAYQWFSLAARSDEPSVRDSATDARGRLSQKMSAKQIAKAEKMVDAFVPKPEKAH

SEQ ID NO: 77029 - DNA, 369 bp, Unknown
  Obtained from environmental sample
  misc_feature (1)..(369): n is a, c, g, or t
atgccgctggccatgcagatttggaacacataccgcaaccgcgcccttgcctattggctgcaaagcaacggggtaaatatcatcccaaacgtgcgatggggggacgagcgcacgtttgactttgcctttgaagggctgcccattggtgggacgttcgcagttgggacaaacggttgtatccaaagcaaagaaaaccgccaccacttcaaggcggggctgtccaagatgctcgaactgctgaaacccgatgcgattgtaaactattactaccaatcaaaagacatttttgaggaatgcgaagagcgtggaatcaaggtcgtaacgctagaccattggcccgcctccaggaagaaagggcatggtggatga

SEQ ID NO: 77030 - protein, 122 aa, Unknown
  Obtained from environmental sample
  misc_feature (1)..(122): Xaa is any amino acid
MPLAMQIWNTYRNRALAYWLQSNGVNIIPNVRWGDERTFDFAFEGLPIGGTFAVGTNGCIQSKENRHHFKAGLSKMLELLKPDAIVNYYYQSKDIFEECEERGIKVVTLDHWPASRKKGHGG

SEQ ID NO: 77031 - DNA, 330 bp, Unknown
  Obtained from environmental sample
  misc_feature (1)..(330): n is a, c, g, or t
atgatcgccgagacgcggttgcgcattctgctgcgcgggttgcgggcggtttccgattttgaatatgaattccagttggcgctgatgaaccgcaggttgcggcgcgaaatccagacggtttttctgatgacggattaccaatggctgtacatcagttccaccatcgtcaaagccgcggccagcctgggagggaatgtccacggactggtgccgggctgcgtggaacgcggcctgcaaaagaaatacgcccttggcggggcggacaaggcccctcccctcctcgatcccgcggcggaggaagggacgccgcccggaaagaagcatgcctga

SEQ ID NO: 77032 - protein, 109 aa, Unknown
  Obtained from environmental sample
  misc_feature (1)..(109): Xaa is any amino acid
MIAETRLRILLRGLRAVSDFEYEFQLALMNRRLRREIQTVFLMTDYQWLYISSTIVKAAASLGGNVHGLVPGCVERGLQKKYALGGADKAPPLLDPAAEEGTPPGKKHA

SEQ ID NO: 77033 - DNA, 873 bp, Unknown
  Obtained from environmental sample
  misc_feature (1)..(873): n is a, c, g, or t
atgcggcttatcttgaccttttggccccgggaagggattgagaatgtccgcttgaccggcggagagccgatgctcttgcgggacctggccgaatacctgccnttgccaaagcgaaagggcttctccacacccttgaacaccaacgccctcttgtttaacccgcgccaattcaaagacctctggcccaacctggatattctgaaaatatctctgccggccnccacccccgaaaccatggccgccctagggcagccgcccgaggcttgggaaaagaagctggaagccggagccctggccgcggcttatcaagtgcgggtcgaatttctcacccccatgctccccttggctgttgaaaaatttgacgagttcaagcggctcttggaccctctgccttctttcggttggctgcctttgcgggccgaaccggccccgggccgccgctgcccgatcagccggccggagatggccagcctcatcgaaaaaataaggcgcttgcgccatgaggaacgctgggccgacctgcaagtctatctggccgtgcccttctgccttctgccctcgcccgaggaaggtgtgcctctgcttcatggccgccggggctgcgggcctttcagcagcctggtggtcgaaccctccggccggctgttccgctgctattcccgacgccgggctcttaggcccgccgaaggcttgaaggcagcggcctggcgggcggcttgggctgattttgaaaccctgccggaactgtgccgacgctgcccggtggtctaccactgcctggggggctgccgctgccgggcggccctcacccccgaaggctttgattatctggccgacccggcccaggcggcccgctgggtgggggaagcctga

SEQ ID NO: 77034 - protein, 290 aa, Unknown
  Obtained from environmental sample
  misc_feature (1)..(290): Xaa is any amino acid
MRLILTFWPREGIENVRLTGGEPMLLRDLAEYLPLPKRKGFSTPLNTNALLFNPRQFKDLWPNLDILKISLPAXTPETMAALGQPPEAWEKKLEAGALAAAYQVRVEFLTPMLPLAVEKFDEFKRLLDPLPSFGWLPLRAEPAPGRRCPISRPEMASLIEKIRRLRHEERWADLQVYLAVPFCLLPSPEEGVPLLHGRRGCGPFSSLVVEPSGRLFRCYSRRRALRPAEGLKAAAWRAAWADFETLPELCRRCPVVYHCLGGCRCRAALTPEGFDYLADPAQAARWVGEA

SEQ ID NO: 77035 - DNA, 798 bp, Unknown
  Obtained from environmental sample
  misc_feature (1)..(798): n is a, c, g, or t
atgattactgcttatatggagtttttcatgcccagggtgtccataatcgccgaagcgggcgtcaaccacaacggcaatcccggcttggccttcaagcttgtagatgcggcccgcacggccggtgccgatgtggtcaagtttcaagtcttcaaggcggaggctgtggccagcacgcaggctcccaaggccggataccagatgcacaccacaaatgcggcggaatctcaactggacatgttacgccgcctggagcttgcgcccgatgtgtttcgtgaacttgccgattactgccgaaaacagggcctcctgtttctggcgacgcccttcgatcacggctcaatagccattctggccgacatgcaacttgaaatggtcaagataccttccggcgaaatcaccaatctgccgtatttgcgcaaaatcggcgcgttgggttgggaaataatgctttcaacgggcatgagcaccctggacgaagtgagagatgctttgcgggttctggaagccgccggctcctcccgcgggcggatcacgctcttgcactgcacaaccgaatatcccgccccggtgaatgaagtgaacctgcgcgccatgctgaccatgcgcgaggcatttccagaggtcaagggagtgggttattccgaccataccgccggaatcgccgtatccatagcggccgttgcgctcggcgcgacggtcattgaaaagcatttcactttggacaaaaacatggaaggcccggaccatanggccagcttggaaccggatgaactgccgccctggtgcgcgggttcgtga

SEQ ID NO: 77036 - protein, 265 aa, Unknown
  Obtained from environmental sample
  DOMAIN (33)...(264): NeuB family
  misc_feature (1)..(265): Xaa is any amino acid
MITAYMEFFMPRVSIIAEAGVNHNGNPGLAFKLVDAARTAGADVVKFQVFKAEAVASTQAPKAGYQMHTTNAAESQLDMLRRLELAPDVFRELADYCRKQGLLFLATPFDHGSIAILADMQLEMVKIPSGEITNLPYLRKIGALGWEIMLSTGMSTLDEVRDALRVLEAAGSSRGRITLLHCTTEYPAPVNEVNLRAMLTMREAFPEVKGVGYSDHTAGIAVSIAAVALGATVIEKHFTLDKNMEGPDHXASLEPDELPPWCAGS

SEQ ID NO: 77037 - DNA, 708 bp, Unknown
  Obtained from environmental sample
  misc_feature (1)..(708): n is a, c, g, or t
ttgcgccgaacttcctccggttggggggtatattgcatgaaagacattcttgtggtcgctgtacacccggatgacgagaccttgggttgcggcggcacattcttgcgccacagcgcgcagggcgattccatacactggttgctcctgacggcagccacacgggaggccggtttttccgaagaagccggacataaccagcagaggttcatcgcggcggtcagcgcggcatatccgtttttttccgtgcatcagtggggctttcccgctgcgcgtctggatgccgtgccgcagtcccagctcgtgggggaaatttccgccgtcataaagaaaatccgcccccatacaatctatctccctttctttaacgacccgcacagcgatcaccgttatgcgttttccgccgcctacagttgcacaaaagcgtttcgatacccctcggtccgccgcatcctgatgatggaaaccccctcggagacggattacgccccggctttgcccggaagcgcttttgttcccaatgtttttatagatataagcgcgcactgcggacggaaaaaagaaattcttgctttgtccgcggaagaaatagcggaacatcctttcccccgcacccttgccggtatagaggccctggctctcttcagggggggggggggggcaggcagctattatgcggaagcctttatgctgcttaaggaacggatctga

SEQ ID NO: 77038 - protein, 235 aa, Unknown
  Obtained from environmental sample
  DOMAIN (17)...(136): GlcNAc-PI de-N-acetylase
  misc_feature (1)..(235): Xaa is any amino acid
MRRTSSGWGVYCMKDILVVAVHPDDETLGCGGTFLRHSAQGDSIHWLLLTAATREAGFSEEAGHNQQRFIAAVSAAYPFFSVHQWGFPAARLDAVPQSQLVGEISAVIKKIRPHTIYLPFFNDPHSDHRYAFSAAYSCTKAFRYPSVRRILMMETPSETDYAPALPGSAFVPNVFIDISAHCGRKKEILALSAEEIAEHPFPRTLAGIEALALFRGGGGAGSYYAEAFMLLKERI

SEQ ID NO: 77039 - DNA, 561 bp, Unknown
  Obtained from environmental sample
  misc_feature (1)..(561): n is a, c, g, or t
atgctcgacatgatgatggtgatcccgcggtcgcgcacgtcgcgcaccaattgcatgccggcttgcgcttcggtcggggtcaggccggtcagcatttcgtccagcagcagcacccgcggctcgatggccaaggcgcgggccacttccaggcgacgtttctcgggcggagtgagcgaatgggccggtgtatcgacacggggaccgaggccacaaaactcgatcacctcaacggcgcgcgccatggcagcgcgggttcgcgcaacgcgggcgaacgcgccgaccatcacattctccagcaccgtcatggaatcgaagctgcggacgacctggaaggtgcgaccgatgccggcgcgcgtacaggcaaccgccccaaggcccgagatcagccggccctccagcaggatttcccccgcgtcgggcgtctcggcgccggcgatgcacgcgaacaaagtgctcttgccggcgccgttcggtccgatcaggccgaggatttcgccgcttgcgacatcgaacgtaacatcgacgttggcagcgatacggccaaatgacttgcttacctga

SEQ ID NO: 77040 - protein, 186 aa, Unknown
  Obtained from environmental sample
  DOMAIN (32)...(70): Protein of unknown function (DUF1602)
  misc_feature (1)..(186): Xaa is any amino acid
MLDMMMVIPRSRTSRTNCMPACASVGVRPVSISSSSSTRGSMAKARATSRRRFSGGVSEWAGVSTRGPRPQNSITSTARAMAARVRATRANAPTITFSSTVMESKLRTTWKVRPMPARVQATAPRPEISRPSSRISPASGVSAPAMHANKVLLPAPFGPIRPRISPLATSNVTSTLAAIRPNDLLT

SEQ ID NO: 77041 - DNA, 375 bp, Unknown
  Obtained from environmental sample
  misc_feature (1)..(375): n is a, c, g, or t
gtgcgcgtatttcccagcaggatggcagcgcgggcgatcagcggcgcgatcttcggctccggcggagccctctatgcgcagtacatcggcttcattgaccccgagagtgcactggggctgtcgctgtcggtgttgatagcactgccggcggttgtgggcggggtgngcacattatgggggccactgctcggggccgccgtgctgataccggcgcagcaactctcggccgcctggctcggcaacgcagggaacggcatcgatctgatgttctatggtgcgttgatcgtcgtcctcgcgctggcacgaccgcaggggttgatcagcttgttcgggatgacgcgcaaggtgcgccgcgaggcggtcggtgatgcctga

SEQ ID NO: 77042 - protein, 124 aa, Unknown
  Obtained from environmental sample
  SIGNAL (1)...(26)
  misc_feature (1)..(124): Xaa is any amino acid
MRVFPSRMAARAISGAIFGSGGALYAQYIGFIDPESALGLSLSVLIALPAVVGGVXTLWGPLLGAAVLIPAQQLSAAWLGNAGNGIDLMFYGALIVVLALARPQGLISLFGMTRKVRREAVGDA

SEQ ID NO: 77043 - DNA, 831 bp, Unknown
  Obtained from environmental sample
  misc_feature (1)..(831): n is a, c, g, or t
atgactcagacggatttgccgctttttgggtgcatgaggcggacaaaatttgccgaaggcatccgtcaggccgaggaaatggagaagattgtacgttcgcatccgtgcaacatcatgatttcctatataaacgaacctttcccgaacgcgaacaatgagccgcaccgccacatgacccgtgaggagcttacggactttttaagggcgtgtgattcgattgtaaaactgaataaccctgaccgcgtgatcaagcatatagacggcgattacgatcccccgggcgataactttccagataaccattgttataccatgtggtataacgggcatgggattgacaccgggaaactgcataaaggttactggctgccgaccgccccggggtggtattacggttgcggcgagtacggtgccgaaggactggatttttccgatctcatgtatcatcgttaccccgcgcaatggctggtcgagccttttgatcccaacaatattcccggcgcgcaaaccggcaatttccattattttttttatgatacccaggaatcactgcatgactggatcagtgaaagccaaacctatcaggcattcgccacgaggctgatgaccgaagccttccgccgcgatgcccggatggtatcaagcgcgattcatctatttatcgacgcgtggcctgccggttggatgaaaaccatcatggactgcgagcgtaatccccagcccgcgtatttcgcctaccggaacgcccctggaccgctcatgctgtcgcctcgtacagatcgctttacgtattatgtgaacgagaccataatattgaaacctatcttgtaa

SEQ ID NO: 77044 - protein, 276 aa, Unknown
  Obtained from environmental sample
  misc_feature (1)..(276): Xaa is any amino acid
MTQTDLPLFGCMRRTKFAEGIRQAEEMEKIVRSHPCNIMISYINEPFPNANNEPHRHMTREELTDFLRACDSIVKLNNPDRVIKHIDGDYDPPGDNFPDNHCYTMWYNGHGIDTGKLHKGYWLPTAPGWYYGCGEYGAEGLDFSDLMYHRYPAQWLVEPFDPNNIPGAQTGNFHYFFYDTQESLHDWISESQTYQAFATRLMTEAFRRDARMVSSAIHLFIDAWPAGWMKTIMDCERNPQPAYFAYRNAPGPLMLSPRTDRFTYYVNETIILKPIL

SEQ ID NO: 77045 - DNA, 522 bp, Unknown
  Obtained from environmental sample
  misc_feature (1)..(522): n is a, c, g, or t
gtggggctgcgggcatcggcatccaaagaatttgttgcctcgtgcgaaagcgatgtgctgaatacggtttccatgctgatattaaacattttgtcttccgatgttacaggatacggcgatgtaatatcgcataatgcgaaagaaaacaccgttaagctgtcaagctgcggttttgttccctttgattacagcgataaagacaatcgcaaaataaccaattttatgccccaccccggctttaccggaatacaatgctctttttgtcccaagccgggagtaataaccgcaatgcgcctgatcgaagaaaaagacggttaccatatcctgtattttacaggcgacgggctggaaaccccgttgcgtcaggaatatatgcctgcgattgatataaaggtcagggggcaattggacaacctgataagaaattacgcgggccagcattttgccttttgctacggtgatctgtccgcggaaattgaagcgcttgcggccattttgaaaattaaagttatcaaggtatga

SEQ ID NO: 77046 - protein, 173 aa, Unknown
  Obtained from environmental sample
  DOMAIN (29)...(172): L-fucose isomerase, C-terminal domain
  misc_feature (1)..(173): Xaa is any amino acid
MGLRASASKEFVASCESDVLNTVSMLILNILSSDVTGYGDVISHNAKENTVKLSSCGFVPFDYSDKDNRKITNFMPHPGFTGIQCSFCPKPGVITAMRLIEEKDGYHILYFTGDGLETPLRQEYMPAIDIKVRGQLDNLIRNYAGQHFAFCYGDLSAEIEALAAILKIKVIKV

SEQ ID NO: 77047 - DNA, 717 bp, Unknown
  Obtained from environmental sample
  misc_feature (1)..(717): n is a, c, g, or t
atgaaagttccnttagtcgccatctgtgggcgccccaacgttgggaagtccaccctgttcaacaggatcacgcgcagccgtgcagccttggtgcatgacctgcctgggatgaccagggatcgctcttatgggcgggtggtttgcatggacaattcgggcgagcctaccgaggtatttgacatcatagataccggcggtctcgactttgaaggcgacgacgttatcacgcagggcataactcgcatggcggaaggggccctaaatgaggcgcatgtaattctgctgatggttgacggccattcgggctttacaacgggcgacgcagaaatcgcccaaagggtaatccacatgggcaagccagccatgctggtggtgaacaaactcgacggcatgaggggcggggccccagacggggccttttacgagctaggtttcgagagcgtccacttggtcagctccgcccacggcgctggggtgccagatttgctggaatctgtgctggcggccctgccattccaccgtacgccagaagaggcggacgagcatgacaaatcggatgaactgcgcttcgccatcatcggtaggccaaatgtgggcaagtcgagcctaaccaactgccttttgggttttgagcgcagcttggttagcgaagtggcggggacgacaagggacgcggtgacaccatattcaagcgcggtgacaaggtctatcgcctaa

SEQ ID NO: 77048 - protein, 238 aa, Unknown
  Obtained from environmental sample
  DOMAIN (6)...(129): Dynamin family
  misc_feature (1)..(238): Xaa is any amino acid
MKVPLVAICGRPNVGKSTLFNRITRSRAALVHDLPGMTRDRSYGRVVCMDNSGEPTEVFDIIDTGGLDFEGDDVITQGITRMAEGALNEAHVILLMVDGHSGFTTGDAEIAQRVIHMGKPAMLVVNKLDGMRGGAPDGAFYELGFESVHLVSSAHGAGVPDLLESVLAALPFHRTPEEADEHDKSDELRFAIIGRPNVGKSSLTNCLLGFERSLVSEVAGTTRDAVTPYSSAVTRSIA

SEQ ID NO: 77049 - DNA, 732 bp, Unknown
  Obtained from environmental sample
  misc_feature (1)..(732): n is a, c, g, or t
gtgggttacctcgccttcaatgtgcgttccgcgaaatgcaggaataaagacctgcgccaggcccttgtgtattcgctaaataaaaaggacattctggaagtcaactatgtttcggagaattattcatacatagctgaatcgtttctcccgcgcgccgctacgttcttcaccacggatttgccagacctcagccagaatctgaataaggccagggagctggccgcaaaggcgggcgccgggaacaccacactcgtgcttgcctattccagcagcaacagcgcgatggagccgcaggccatagtgatacagcagcaggccaaggccgccggaataaacatcgagcttaagccgatggatgccgccgcatataacgaacagctctacacaaaaatgaaccccgatttcgacctgtacatgggcggctacataatgacctacgacccgaacggctacgcccagttgttcgtcagcaacgcctccgccaactacatgggctataacaaccccaaagtagacgagctgtttgccgcaggcggcattgaaaaaaatacggcgaaacgcaagtcgatttacgaggagctgcaacgggtcatcgcggaggactgcgcgttcgtcccgcttacggagaacaagcgcatactcgcgattaactccgcggtaggcggagttgaggaagcctcgctgataccgatattcagttttgaagatatgtccaaactgtattttaaatga

SEQ ID NO: 77050 - protein, 243 aa, Unknown
  Obtained from environmental sample
  misc_feature (1)..(243): Xaa is any amino acid
MGYLAFNVRSAKCRNKDLRQALVYSLNKKDILEVNYVSENYSYIAESFLPRAATFFTTDLPDLSQNLNKARELAAKAGAGNTTLVLAYSSSNSAMEPQAIVIQQQAKAAGINIELKPMDAAAYNEQLYTKMNPDFDLYMGGYIMTYDPNGYAQLFVSNASANYMGYNNPKVDELFAAGGIEKNTAKRKSIYEELQRVIAEDCAFVPLTENKRILAINSAVGGVEEASLIPIFSFEDMSKLYFK

SEQ ID NO: 77051 - DNA, 459 bp, Unknown
  Obtained from environmental sample
  misc_feature (1)..(459): n is a, c, g, or t
atgcacacgctgggccgcgagggcattttcgcggatctggtatggcatctgtcttgcccgtgctcagtgcttatgttcgcgttcctgccggatcagatacggtatatccgcgcgtccggcatacgcgagctggcgcaggagtatgtaatcgtgcagcgctcctacggagcgggcgcgtttgagctgctggtcaaacatgtgatgcgtaacgccatgctcccgatggtaacacttatggggatgagcctgccgatgatagtaaccggcgctttcgtcactgaatccatattcgcgtggccgggcgtcggatcgtatttcgtcagagcgatcaggggttccgattaccctgtcgtcatgggcattttactgctcagttcgacgctcgtgatcctcgggaacctgatatccgatgtgctgtacggcctgatagacccgcgcatccgtcttgggaagagctga

SEQ ID NO: 77052 - protein, 152 aa, Unknown
  Obtained from environmental sample
  DOMAIN (8)...(149): Binding-protein-dependent transport system inner membrane component
  misc_feature (1)..(152): Xaa is any amino acid
MHTLGREGIFADLVWHLSCPCSVLMFAFLPDQIRYIRASGIRELAQEYVIVQRSYGAGAFELLVKHVMRNAMLPMVTLMGMSLPMIVTGAFVTESIFAWPGVGSYFVRAIRGSDYPVVMGILLLSSTLVILGNLISDVLYGLIDPRIRLGKS

SEQ ID NO: 77053 - DNA, 732 bp, Unknown
  Obtained from environmental sample
  misc_feature (1)..(732): n is a, c, g, or t
gtgtttaaaggcggcgcaacaggctgtaagggcattgtcattgacgatccgagtgatacatgggggcacggggtcgttgattttaccaaaaattcaaaaatggataaatatacctatattacccgtggagaaatcggaacgttcggtaagacgacgatgagtgtcattgaaaatggcccgttacgcgcagccattcgtgttcaaagcgctttcggcaattccgatatgaccatagattggttattgacagccggttcacggaacatcgaagcacgtgtaacgctcaactggcgtgaaaagatgaaattactcaaattctctttccctgtggatgtcgaggcatcaaaagccacctatgaagtaccgtatggcgtgattatccgtaaaacgattggcgaagaagatcccggtcagcgctggtttgacctgaccggtcaacggggcgccgacgcttacggattgacgattttcaacgatgccaaatacggttacagcatccatgacagcgacatgcgcattaccgttacccgttcggcgccgtatgcgtatcatgctcccgatgaggtgccgaatgacaaaagctacatgcaggatcagggtattcaaacgtttcggatgttgcttgtgccccacaaggacagctggcaggatatcaacgcgccacgcattgccgaagagtttatttcgccgcctgttgtcgttatcagggatacncgggaacgctctcgataa

SEQ ID NO: 77054 - protein, 243 aa, Unknown
  Obtained from environmental sample
  DOMAIN (10)...(236): Glycosyl hydrolases family 38 C-terminal domain
  misc_feature (1)..(243): Xaa is any amino acid
MFKGGATGCKGIVIDDPSDTWGHGVVDFTKNSKMDKYTYITRGEIGTFGKTTMSVIENGPLRAAIRVQSAFGNSDMTIDWLLTAGSRNIEARVTLNWREKMKLLKFSFPVDVEASKATYEVPYGVIIRKTIGEEDPGQRWFDLTGQRGADAYGLTIFNDAKYGYSIHDSDMRITVTRSAPYAYHAPDEVPNDKSYMQDQGIQTFRMLLVPHKDSWQDINAPRIAEEFISPPVVVIRDTRERSR

SEQ ID NO: 77055 - DNA, 522 bp, Unknown
  Obtained from environmental sample
  misc_feature (1)..(522): n is a, c, g, or t
gtggaagtggcccgcgacatcgccggcagcttcaaccacctctacggcgaaaccttcgttctcccggaacccctgatcgatgaaaacctggccaccattcccggcctggacgggcggaagatgagcaagagctacgacaatgcccttgatatcttcattccccgcgaggaactgaaaagccgggtcatggccatagtcaccgatacccgggccgtctcggatatcaaagacccggataactgcaacctcttcgccctctaccgcctgttctccaccgcccgggaactggaagaactgcgcgggcgctaccttaagcccggccttaaatactccgaagtgaaaaaggaactcatcgaccgcatctggaaccatttttccccccaccgggaaaagcgggccgaactgatgaaagacccggataccattcgcgatatcctgaaagccggcgcggaaaaggccagattaagggccgagaagaccatggccgaggttcgggccaaggtcggactcaaatatttatag

SEQ ID NO: 77056 - protein, 173 aa, Unknown
  Obtained from environmental sample
  misc_feature (1)..(173): Xaa is any amino acid
MEVARDIAGSFNHLYGETFVLPEPLIDENLATIPGLDGRKMSKSYDNALDIFIPREELKSRVMAIVTDTRAVSDIKDPDNCNLFALYRLFSTARELEELRGRYLKPGLKYSEVKKELIDRIWNHFSPHREKRAELMKDPDTIRDILKAGAEKARLRAEKTMAEVRAKVGLKYL

SEQ ID NO: 77057 - DNA, 429 bp, Unknown
  Obtained from environmental sample
  misc_feature (1)..(429): n is a, c, g, or t
ttgacccttatcgtcatcatatgctatgacgcaagaagcaatgatagcaaggaggaggtgtgtatgcacaagatttttttgattttggttttgcttgtgggcttggcaggatgcgtagcaacacccgttgcccccgataggcccgtgcgaatcatgccagcggaggcagaggcacaattcggccctattcctgcgaattatcaggatattgtatctgggcatataagagagtctttgattgaccctgaatcggcgcgcttcgattttgaatcgaagccaaacccccagtcaaacggctggtatggcctcgtgcaggtcaatgccaaaaaccgcatggggggttacaccggaaagcaggaatatgaatacctcatcaagcatggcgagattattcattcccgcaggacttaccgagaaaaatatcgttag

SEQ ID NO: 77058 - protein, 142 aa, Unknown
  Obtained from environmental sample
  misc_feature (1)..(142): Xaa is any amino acid
MTLIVIICYDARSNDSKEEVCMHKIFLILVLLVGLAGCVATPVAPDRPVRIMPAEAEAQFGPIPANYQDIVSGHIRESLIDPESARFDFESKPNPQSNGWYGLVQVNAKNRMGGYTGKQEYEYLIKHGEIIHSRRTYREKYR

SEQ ID NO: 77059 - DNA, 735 bp, Unknown
  Obtained from environmental sample
  misc_feature (1)..(735): n is a, c, g, or t
gtgaacgtgaaacggcgccgtctccatattccaaaccggcccgttctcgtccgcgccctcctccattatcgccgccaaagtccggcccacgccgattccataacagcccataatcgggtgcgtccgatcgccgtccgcgttcgcgaacgcaaggttcatcgacgtcgaatatctgtcgcccagctgaaaaatatttccgatttctatgccgcgtttttccgtcatcttcgcgccgcatttcgggcacgtcgcgtcgtcgccgtcaatcaattccttgttcgtgttgaatccgcacccgcaaaggtaaatcgtgtcctcgccgatgtccgaaaccacctgaaactcgtgcgcgaccttgccccccatcgcgcccgtggacgacgcgaccgacacgacgttcctgagtccgcatcgtttgaaaatcttcgcataagcgtcgaggcagcggtcatagtatttttccaaatccccctgagtcgcgtgaaacgagtatccgtccttcattataaattcgcgggtgcgtatcaggccggcgcgcgcgcgaagttcgtcgcggaatttcgtctgaatctgataaaccataaacggcagttggcggtacgaacccaaaatcgttttgacaaagtcgacgaccacctcctcgtgcgtaggattcaaaacatagtccgcgccgccgcgccccttgaattttgcaagcgaatcaaacgaatcatagcggccggattcaatccataa

SEQ ID NO: 77060 - protein, 244 aa, Unknown
  Obtained from environmental sample
  misc_feature (1)..(244): Xaa is any amino acid
MNVKRRRLHIPNRPVLVRALLHYRRQSPAHADSITAHNRVRPIAVRVRERKVHRRRISVAQLKNISDFYAAFFRHLRAAFRARRVVAVNQFLVRVESAPAKVNRVLADVRNHLKLVRDLAPHRARGRRDRHDVPESASFENLRISVEAAVIVFFQIPLSRVKRVSVLHYKFAGAYQAGARAKFVAEFRLNLINHKRQLAVRTQNRFDKVDDHLLVRRIQNIVRAAAPLEFCKRIKRIIAAGFNP

SEQ ID NO: 77061 - DNA, 402 bp, Unknown
  Obtained from environmental sample
  misc_feature (1)..(402): n is a, c, g, or t
atgcaacgagtcaccatcacgcttgatgacgatttactggagacgctggacagcctgagccagcgtcgtggttataacaaccgttccgaagctatccgcgacattctgcgtagcgccctggcgcaagaggccacccagcagcacggcacgcaaggtttcgcggtgctgtcgtatgtgtatgaacacgaaaaacgcgacttagccagccgcattgtctccacccagcatcatcaccacgacctctccgttgccacgctgcatgtgcacatcaaccacgacgactgtctggaaatcgccgtgttgaaaggtgacatgggtgacgtgcagcattttgccgatgacgttatcgcccagcgcggcgtgcggcacgggcatttgcagtgcttgccgaaggaagattga

SEQ ID NO: 77062 - protein, 133 aa, Unknown
  Obtained from environmental sample
  DOMAIN (3)...(42): Ribbon-helix-helix protein, copG family
  misc_feature (1)..(133): Xaa is any amino acid
MQRVTITLDDDLLETLDSLSQRRGYNNRSEAIRDILRSALAQEATQQHGTQGFAVLSYVYEHEKRDLASRIVSTQHHHHDLSVATLHVHINHDDCLEIAVLKGDMGDVQHFADDVIAQRGVRHGHLQCLPKED

SEQ ID NO: 77063 - DNA, 804 bp, Unknown
  Obtained from environmental sample
  misc_feature (1)..(804): n is a, c, g, or t
atggaaaaatcttttgggcagaagcgcataggtgttttggattctggcgtaggggggcttactgttctaaaggagcttgagcgccttctgcctgcggaaaatatggtctattttggcgacagcgcaaactgcccctacggcaaccgcactaaggaagagatattgaaacttaccctttcgatgctggactttttacaaaaccaggaggtaaagatagtagccatcgcctgtaacactatttcttctttaatagacgggtatcgggatcgttacgattttcctattgtgagcattattgaagcggcctgcgaacatatcgcggaacagaagcttgcccaggtgggggtttttgccacggtgtttaccatccagggaaagctttatgaaacgcttatccggcaactaagcccaggtacgcttgtatacggccgatccagccgtacccttgcggagctcgtggatcaagggcattttgacgatcccgcaacgggcgaggaagtccgggcgtttctggactcgttgttgacagagcatccggaagtaacgcatattgcgcttgggtgcacgcactatcctattgtgttggatatgtttcagcgcatggcacccaacgtaaccttcatcaacccggcgctggaacaggcgaaaacggtgcagagagttctggaggagcggggcgcgttggcttcaggcccagaggagaagcacgagatttataccagcggctctacccaactgtacgcggatattcttaaacggctggaaattcgcagggctgtggaactgcacagcaaaaaaatatag

SEQ ID NO: 77064 - protein, 267 aa, Unknown
  Obtained from environmental sample
  DOMAIN (9)...(223): Asp/Glu/Hydantoin racemase
  misc_feature (1)..(267): Xaa is any amino acid
MEKSFGQKRIGVLDSGVGGLTVLKELERLLPAENMVYFGDSANCPYGNRTKEEILKLTLSMLDFLQNQEVKIVAIACNTISSLIDGYRDRYDFPIVSIIEAACEHIAEQKLAQVGVFATVFTIQGKLYETLIRQLSPGTLVYGRSSRTLAELVDQGHFDDPATGEEVRAFLDSLLTEHPEVTHIALGCTHYPIVLDMFQRMAPNVTFINPALEQAKTVQRVLEERGALASGPEEKHEIYTSGSTQLYADILKRLEIRRAVELHSKKI

SEQ ID NO: 77065 - DNA, 360 bp, Unknown
  Obtained from environmental sample
  misc_feature (1)..(360): n is a, c, g, or t
gtgcccgggcggggaaacgcagacgatattctgcacggactgaaaaagggccttttcgtaaagcgaatgggcggcgggcaggttgacacagttacgggtaactttgtcttccaagtggttgaaggctattgggttgaagatgggcagatttcccaccaagtaaaaaacgccacgctggcaggttgcgggccagaagtgctaaagcaactggaaaaaattggagacgacctaaaacatttcgacataggcacctgcggcaaagacgggcagggcgcccctgtttcggacgcccagccgaccatactctgccccgcgctggtggtggggggcacggcccacgcgcccgacctttcggcctaa

SEQ ID NO: 77066 - protein, 119 aa, Unknown
  Obtained from environmental sample
  misc_feature (1)..(119): Xaa is any amino acid
MPGRGNADDILHGLKKGLFVKRMGGGQVDTVTGNFVFQVVEGYWVEDGQISHQVKNATLAGCGPEVLKQLEKIGDDLKHFDIGTCGKDGQGAPVSDAQPTILCPALVVGGTAHAPDLSA

SEQ ID NO: 77067 - DNA, 861 bp, Unknown
  Obtained from environmental sample
  misc_feature (1)..(861): n is a, c, g, or t
gtggacagcggtcggtttgagtcgtcaaatagcgctgtttattcgaccggcggcggtaaaattgttaagggagaattcaaaggcggttccggttatgcggtttatactgtcggtaatattctcgtgtacggcggtctgtttgagtcgcgaaataccggagtttattcacatggcgctgtgaaaattgctaatggagaattcaaaggcggttccggttatgcggtttatgcaggtggcgatcttgatgtgagcagtggcgagttcgagtcgtctaatacggctgttatgtcaaagagcaacttaaagattactgacggaaagttcaaaggcggttccggtaatgcggtttatacagatggtgatcttaacttgagggatggctggtttgagtcgcgaaataccgcggtttattcacaaggcgctatgaagattggcggaggagtattcaaaagcgataccggatacgctgtttacgctctaggcggtcttgacgtggcggacggtaattttgaatcgtcgagaaccgctgtttattcaaaggctgattgtaaaattgccaaaggagacttcaatggcggttcaggccatgcggtttatgttctcggtaatcttgacgtgaacggcggaaagtttgtgtcgtcgaataacgctgtttattcggaaaaaaagtttaatattgtcaatggagtgtttgaaagcggttccggttacgcgcttacggtgtcaggcgacggcaaaatagacggtggtaaatttgagacaagaaaaggcggtacggcgctggaagtaaaggaaagtatgttctcatttcaggcaaagcggaatttattaacaaatcaagcgataatgccacaattatga

SEQ ID NO: 77068 - protein, 286 aa, Unknown
  Obtained from environmental sample
  misc_feature (1)..(286): Xaa is any amino acid
MDSGRFESSNSAVYSTGGGKIVKGEFKGGSGYAVYTVGNILVYGGLFESRNTGVYSHGAVKIANGEFKGGSGYAVYAGGDLDVSSGEFESSNTAVMSKSNLKITDGKFKGGSGNAVYTDGDLNLRDGWFESRNTAVYSQGAMKIGGGVFKSDTGYAVYALGGLDVADGNFESSRTAVYSKADCKIAKGDFNGGSGHAVYVLGNLDVNGGKFVSSNNAVYSEKKFNIVNGVFESGSGYALTVSGDGKIDGGKFETRKGGTALEVKESMFSFQAKRNLLTNQAIMPQL

SEQ ID NO: 77069 - DNA, 630 bp, Unknown
  Obtained from environmental sample
  misc_feature (1)..(630): n is a, c, g, or t
gtgtccatatccgtgctgctggaccagaagatcacctacgagatgaacgcaaaaggccaccacgaattgaagcccgtggcatggacccaaggagagctggacaagttcaagaacctagtgatcgggtcggcggggatagacagcgcgaggggcgacacggtgacggttgacagcctgagctttgccccgaccatagacctcgtggaagaggacgccgccagacggcagcggatgatggacttgatcaaaatattggcgccattcgtcatcatcctgctaactttgattgggtggggaatctacaagttcatcactagaccgaggccagagcctgaaccagaacttgagccagagcctgaggaagaagagataatagaggagatagaggaagaagaggaagaggaagaagaagaggaagaggaactgccgcctccgcctccgccaacggtggaagacgtgaaacgcaagatggcgcaggcggtaatagacgaaaccgagtccccggaggcgatccagcgggaggcgatgaaacaacaaatcaccgagttggtggtgaccgacccagagaacgcagcgtcgctggttcgcacatggttgctagacgacaacgctagtggagctaagaagtaa

SEQ ID NO: 77070 - protein, 209 aa, Unknown
  Obtained from environmental sample
  misc_feature (1)..(209): Xaa is any amino acid
MSISVLLDQKITYEMNAKGHHELKPVAWTQGELDKFKNLVIGSAGIDSARGDTVTVDSLSFAPTIDLVEEDAARRQRMMDLIKILAPFVIILLTLIGWGIYKFITRPRPEPEPELEPEPEEEEIIEEIEEEEEEEEEEEEELPPPPPPTVEDVKRKMAQAVIDETESPEAIQREAMKQQITELVVTDPENAASLVRTWLLDDNASGAKK

SEQ ID NO: 77071 - DNA, 516 bp, Unknown
  Obtained from environmental sample
  misc_feature (1)..(516): n is a, c, g, or t
atggtgtggtactcttccatcacctcgtcggcgacttcgggcatcacatgcttggtcagcgcgatttccttggaaatcgcctgtatctcgtcttcctcgaggtacttgaatatgctcgatgccacctcgtcgccgagggtcaccatcaggactgctgctttttgggctccggaaaatttggacatttacttcttagctccactagcgttgtcgtctagcaaccatgtgcgaaccagcgacgctgcgttctctgggtcggtcaccaccaactcggtgatttgttgtttcatcgcctcccgctggatcgcctccggggactcggtttcgtctattaccgcctgcgccatcttgcgtttcacgtcttccaccgttggcggaggcggaggcggcagttcctcttcctcttcttcttcctcttcctcttcttcctctatctcctctattatctcttcttcctcaggctctggctcaagttctggttcaggctctggcctcggtctagtgatgaacttgtag

SEQ ID NO: 77072 - protein, 171 aa, Unknown
  Obtained from environmental sample
  SIGNAL (1)...(21)
  misc_feature (1)..(171): Xaa is any amino acid
MVWYSSITSSATSGITCLVSAISLEIACISSSSRYLNMLDATSSPRVTIRTAAFWAPENLDIYFLAPLALSSSNHVRTSDAAFSGSVTTNSVICCFIASRWIASGDSVSSITACAILRFTSSTVGGGGGGSSSSSSSSSSSSSSISSIISSSSGSGSSSGSGSGLGLVMNL

SEQ ID NO: 77073 - DNA, 636 bp, Unknown
  Obtained from environmental sample
  misc_feature (1)..(636): n is a, c, g, or t
gtggtgggcggctacacgctgggcgggatacccttccccaacgcggccgcaaacggggccctcgacgccgcgacggtcaggctgangcgggcnttcatggcggatgggggcacggtcacggcgacggttcacctgttcgagggccgcgtggcgggcgtggagccgacgcacaccgaggtcagggtgcaggtcaagagcctgctggaaatcatcgacgccaagtggccaaggaacctgtaccagcccacatgcgcccatcaactatacgggcagggctgcggcgtgaaccgcgccgcctatcaggtcagcggcgtggcgaccggcggagaccgctcgtcaatcacatgggccacgggaatgccagccggctactacgacagcggcgttatagccgtcaccagcggccgcaacgtcggcgcccgccgaatggtcaagacctccccgataacggggctgacagtcgcgctgccgttcacgtatcccatccaggccggcgacgcgttcacgctttccccaggctgcacaaagaccaacgcaagggcggcgggcgaggcgcggccaagctgcaccgagtacgcaaacacggcgaggttcaggggcttcccctgggtgcccaagccagagacagcgaggtag

SEQ ID NO: 77074 - protein, 211 aa, Unknown
  Obtained from environmental sample
  misc_feature (1)..(211): Xaa is any amino acid
MVGGYTLGGIPFPNAAANGALDAATVRLXRAFMADGGTVTATVHLFEGRVAGVEPTHTEVRVQVKSLLEIIDAKWPRNLYQPTCAHQLYGQGCGVNRAAYQVSGVATGGDRSSITWATGMPAGYYDSGVIAVTSGRNVGARRMVKTSPITGLTVALPFTYPIQAGDAFTLSPGCTKTNARAAGEARPSCTEYANTARFRGFPWVPKPETAR

SEQ ID NO: 77075 - DNA, 537 bp, Unknown
  Obtained from environmental sample
  misc_feature (1)..(537): n is a, c, g, or t
ttggacgaaccctttccccttgccgggttttttagggaaaacggaataagccacgcgctagtcattgccggtgacccggaacctggcaagccggacaaaacggagaacaatcacactattaagtttataaaaaaaataaagacggaactgccggagctggaaatttacgccggctttgacccctatagaaccaatatacgatacgaactggattaccttgcggccaaggaagaagcaggggccgcaggctttatgagccagcctttttttgatctcaggcttttggagctttacgctgaatacctggaggggaaaagcgttttttggggaatatcgccggtgctgtccgaaagcaccaaacactattgggaatccagaaaccgcgctctttttccgcgttctttcctgccggatctctactggaacataaactttgccagggaggcgatggattactgtaaacataacaattttaacctgtaccttatgccgatgaaaacggacataaaaacctatctgtcaggcatatggccatag

SEQ ID NO: 77076 - protein, 178 aa, Unknown
  Obtained from environmental sample
  misc_feature (1)..(178): Xaa is any amino acid
MDEPFPLAGFFRENGISHALVIAGDPEPGKPDKTENNHTIKFIKKIKTELPELEIYAGFDPYRTNIRYELDYLAAKEEAGAAGFMSQPFFDLRLLELYAEYLEGKSVFWGISPVLSESTKHYWESRNRALFPRSFLPDLYWNINFAREAMDYCKHNNFNLYLMPMKTDIKTYLSGIWP

SEQ ID NO: 77077 - DNA, 705 bp, Unknown
  Obtained from environmental sample
  misc_feature (1)..(705): n is a, c, g, or t
gtgttgatggcgcagcaggcagggttcaagaatatttcggttgacnttatttacggtcttcctcaaatgacgcgggaacgatggcgcaccaacgtagaaacggcgttttcattaaacattcagcacctttcggcttacgcgctgtcggttgaggagcgcacgccttttggcgtacagcagcgcaaaggcaagctgtttttacctacggaaaatgaggttgccgaacaaagccaactgcttgatgaactaagcgcacagcatggttttacgcgctacgagatttcaagcttttgctgtgagggatttttttcgcagcacaacaccgcgtactggcagcaaaaaccgtacattggggttggagcagcggcgcactcgtacaacggcgcacagcggcacagcaacgttgccaacaatacgctgtacttggagcgagtgaacggcggtgaaaattttttcgaggttgaaaatcttacccaagagcagcagtataacgagtatatttttacaggtttgcgcaccatgtggggaataaatttgagctatatgaggcaagttttcgacaaaaggctgtgcgaacactgcctgcaaaatgccaagaaacatattgatagtaagcgaattatgctcgttggcgaggtgttaataattccgcaaagcagatggttgatagccgatagcatcatagtggacttgatttgggtgtag

SEQ ID NO: 77078 - protein, 234 aa, Unknown
  Obtained from environmental sample
  DOMAIN (108)...(222): HemN C-terminal region
  misc_feature (1)..(234): Xaa is any amino acid
MLMAQQAGFKNISVDXIYGLPQMTRERWRTNVETAFSLNIQHLSAYALSVEERTPFGVQQRKGKLFLPTENEVAEQSQLLDELSAQHGFTRYEISSFCCEGFFSQHNTAYWQQKPYIGVGAAAHSYNGAQRHSNVANNTLYLERVNGGENFFEVENLTQEQQYNEYIFTGLRTMWGINLSYMRQVFDKRLCEHCLQNAKKHIDSKRIMLVGEVLIIPQSRWLIADSIIVDLIWV

SEQ ID NO: 77079 - DNA, 369 bp, Unknown
  Obtained from environmental sample
  misc_feature (1)..(369): n is a, c, g, or t
ttgatgaaaaaactttacgcgttaagaggagcggttcagtgtgaaaacacagaggacgatatttgccgccaaatcggcttgatgtacgatgaattgcttaatttaaacaagctggaagaaagcgatattgtttccgtaatgttttccgtaacggatgatctttccgctattaacccatgtaccgctttaagaaaaagcggcagggcggaggagcttgcccttttttcgacacaggagccgaaaattaaaaattctcttgaaagggttgtaagagttataattcattgttatcttgaagaaggcgtaaaagcaagtcatgtctatcgcaatggggcggaagttttacgccccgacagggtaaaaaaatga

SEQ ID NO: 77080 - protein, 122 aa, Unknown
  Obtained from environmental sample
  DOMAIN (7)...(120): Chorismate mutase type I
  misc_feature (1)..(122): Xaa is any amino acid
MMKKLYALRGAVQCENTEDDICRQIGLMYDELLNLNKLEESDIVSVMFSVTDDLSAINPCTALRKSGRAEELALFSTQEPKIKNSLERVVRVIIHCYLEEGVKASHVYRNGAEVLRPDRVKK

SEQ ID NO: 77081 - DNA, 504 bp, Unknown
  Obtained from environmental sample
  misc_feature (1)..(504): n is a, c, g, or t
ttgcgagaggggaacgtgcacgtcgaggacaacgccactctgggcggcatggttgccgtaccgcaatttttgcgtatcggcaaactcgccatgattggcggctactcgcgtttgtttcaggatgtcccgccgtttatgctcgccgagggcaatcccgccgaagtgtattcgattaacaaagttggtttacgccgcaatccgcagctcgtcccgcccgagcttgtgccggttattaaagacgcctacaaaattatttaccgcgacggcaaaaatatctcccaggcggtggacgcggtgcgcgcgcaatgtgtaatcaacggcgaagtgcccgcgcaaatcgtttacttgctggattttctacagagcgccaaaaaaggcatcagccgcagcgcgcagaaacagcgcgatttgctgcaaagcgaacacagcggcctgcccgaaaccctgcccttttttcagaaaatggcggcggcttttaccaagaaaaatttacggtctgcctaa

SEQ ID NO: 77082 - protein, 167 aa, Unknown
  Obtained from environmental sample
  misc_feature (1)..(167): Xaa is any amino acid
MREGNVHVEDNATLGGMVAVPQFLRIGKLAMIGGYSRLFQDVPPFMLAEGNPAEVYSINKVGLRRNPQLVPPELVPVIKDAYKIIYRDGKNISQAVDAVRAQCVINGEVPAQIVYLLDFLQSAKKGISRSAQKQRDLLQSEHSGLPETLPFFQKMAAAFTKKNLRSA

SEQ ID NO: 77083 - DNA, 849 bp, Unknown
  Obtained from environmental sample
  misc_feature (1)..(849): n is a, c, g, or t
ttgactctttatatggcgatgttttatattcttgtgnttatggaacgaacaaacgatgctgacaagcgcaatcttatagagattgaagaacgtattctcgacgaccttatggccgacagccccgccatgaaaaaggtgctgcgcatagccatgaagatcgcgccgacctcctccaccgtgctcatcggcggcgagagcggtacgggcaaggagttctttgcgcgtatcattcaccgccactcgctgtgcggcggcggacgctttgtggcggtaaactgcggggccgtacccgataccctgtttgagagcgaatttttcggctacaagaagggggcgttcacaggcgccgaccgcgacaaaccggggcttgtggaggaggcgcacggcggcaccctcttccttgacgaggtcggcgagttgtctctacccgctcaggtcaagctcctgcgcttcctccaagaacgcatgttccgcagcgtaggcgataccgctctgcgccccgtagacgtgcgcgtggtcgccgccacaaacaaagacctgcgcaaactcatggaaaaaggggagtttcgggaagacctcttcttccgcctaaacgtcttccacctgcacctgccgcccctgcgcgaacgcaaggagacgattccaaacctcgtaagcctattcgtgcaccgctacaaccaaatactgggcaaaaacgtaacgcgtttctctaaaacggcggagagcctaatatcagcctacaattacccgggaaacatccgggagcttgagaacatcatcgaacacgccgtggtgatggccgaggaaaacgaaatcacggaacgcgatttgccggagtctatgtcataa

SEQ ID NO: 77084 - protein, 282 aa, Unknown
  Obtained from environmental sample
  DOMAIN (36)...(257): Sigma-54 interaction domain
  misc_feature (1)..(282): Xaa is any amino acid
MTLYMAMFYILVXMERTNDADKRNLIEIEERILDDLMADSPAMKKVLRIAMKIAPTSSTVLIGGESGTGKEFFARIIHRHSLCGGGRFVAVNCGAVPDTLFESEFFGYKKGAFTGADRDKPGLVEEAHGGTLFLDEVGELSLPAQVKLLRFLQERMFRSVGDTALRPVDVRVVAATNKDLRKLMEKGEFREDLFFRLNVFHLHLPPLRERKETIPNLVSLFVHRYNQILGKNVTRFSKTAESLISAYNYPGNIRELENIIEHAVVMAEENEITERDLPESMS

SEQ ID NO: 77085 - DNA, 357 bp, Unknown
  Obtained from environmental sample
  misc_feature (1)..(357): n is a, c, g, or t
atgaatattgagcaagttcgcgagtattgcattggtaaagtgggcgtaacggagggctttccgtttgacgacaccgcgctggtgtttaaggtgtgcaacaagatgtttgcgctgcttggcatagacagcggctggcttaacctgaagtgcaaccccgataaggcgattgagctgcgcgagcaattttctgaggttacgcccggctaccacatgaacaagcagcagtggaacaccatacagctggagggctcgctacccgacaggctcatttgcgaatggattgacgactcgtacaaccttgtcgcagcaaagctgactaaggcgcaacaggcaacgctgaagatcgctaacgaataa

SEQ ID NO: 77086 - protein, 118 aa, Unknown
  Obtained from environmental sample
  DOMAIN (10)...(102): Protein of unknown function (DUF419)
  misc_feature (1)..(118): Xaa is any amino acid
MNIEQVREYCIGKVGVTEGFPFDDTALVFKVCNKMFALLGIDSGWLNLKCNPDKAIELREQFSEVTPGYHMNKQQWNTIQLEGSLPDRLICEWIDDSYNLVAAKLTKAQQATLKIANE

SEQ ID NO: 77087 - DNA, 489 bp, Unknown
  Obtained from environmental sample
  misc_feature (1)..(489): n is a, c, g, or t
atgccgctgggcgtgggctaccatacgcctatcgttattccgtttgtgaacggtagcgacaaaaacaactacaaaattatgctgtccgtaggaaaacgttgggagttaagcgaccgtacgctgcctacaggcaagctaatagatttgacgtcagaggaggcattgctgcgtaccacaggcattaatccgttgggcaaggcattggaaagcgcatttactaatgcgcccatggctgttgacggcaagccatacagcggtgcggtgctaactcacgagccaagcggtctgcgcgtgttttacgaggtggataaggaggttaaggattggacgctgtggaacaacggcggcgatgcaggttacatttgccccgaaccgcaaacgtgggctattaacgcgcccaacctcaaactgcccgccgagcaaacaggatttcaatttttgatgccaaaagcggcatggagttctgtgagcaaggtgtatgtgaagtag

SEQ ID NO: 77088 - protein, 162 aa, Unknown
  Obtained from environmental sample
  misc_feature (1)..(162): Xaa is any amino acid
MPLGVGYHTPIVIPFVNGSDKNNYKIMLSVGKRWELSDRTLPTGKLIDLTSEEALLRTTGINPLGKALESAFTNAPMAVDGKPYSGAVLTHEPSGLRVFYEVDKEVKDWTLWNNGGDAGYICPEPQTWAINAPNLKLPAEQTGFQFLMPKAAWSSVSKVYVK

SEQ ID NO: 77089 - DNA, 936 bp, Unknown
  Obtained from environmental sample
  misc_feature (1)..(936): n is a, c, g, or t
ttgggtgcagatgacaccgaatacgtacgcgccgtaacccgcaaaaccntggtagcagcagtagccagggtgaaacgccccgggatcaaattcgactctatacccgtttngaacggtggccaaggaataggtaaatccacgttgattgcccggttggggcgcggctggtactcagacagcttgagcatcgcggatatgaaagataaaactgcttccgagaagctccaaggtaattggttattggaggtttccgagatggctggtatccgcaaaatggatgttgaaacagtcaaagccttcgcatcccggattgacgaccaataccgacccagctatggccgggtggtagaaaatcacccaaggcagtgcatcatcatcggcaccaccaacagcgacggcggattcctacgcgacctaaccggcaaccgcagattctggccagtacgcgtaacaggtcacggcaccagccgcccctgggacttaaccgaaaccgacgtacagcaaatctgggccgaagccatcaccgcctacgatacgggtgaagagttattcctcgctggcaacctcgccgacatcgctgcggacgagcaacgcgacgcaatggagaccgacgaccgcgaaggtgtggtcgccgcctacctagacctgctgctaccagcagaatgggaacagatggacatccaccagcgccgcgaatacctacgcgacccagatggcccaaccagcccaacgggcatagctcgccgtgacgtggtgtgcaatatggagatttgggtcgagtgcttcgaaaaaccgcgcgaggccatccggaaaactgactcctacgaaattgaggccatcatcaaatcaattggtggttggcaacgctacaccggcaccgtaaccggcaaacgtaacctgcggcattgcggcctcggccgattctgtccttcgtaa

SEQ ID NO: 77090 - protein, 311 aa, Unknown
  Obtained from environmental sample
  DOMAIN (1)...(179): Virulence-associated protein E
  misc_feature (1)..(311): Xaa is any amino acid
MGADDTEYVRAVTRKTXVAAVARVKRPGIKFDSIPVXNGGQGIGKSTLIARLGRGWYSDSLSIADMKDKTASEKLQGNWLLEVSEMAGIRKMDVETVKAFASRIDDQYRPSYGRVVENHPRQCIIIGTTNSDGGFLRDLTGNRRFWPVRVTGHGTSRPWDLTETDVQQIWAEAITAYDTGEELFLAGNLADIAADEQRDAMETDDREGVVAAYLDLLLPAEWEQMDIHQRREYLRDPDGPTSPTGIARRDVVCNMEIWVECFEKPREAIRKTDSYEIEAIIKSIGGWQRYTGTVTGKRNLRHCGLGRFCPS

SEQ ID NO: 77091 - DNA, 342 bp, Unknown
  Obtained from environmental sample
  misc_feature (1)..(342): n is a, c, g, or t
gtggacagggttcttgttacagcgcctccggctttaatcccattggctacaaggctttgtaacgtgggaggtattgtcagctttataggcattgattacggagaaggcgcaatgttcacattggattccaatgtggttcacttcaacaagctccaaatacgggcatcacacgcgtctccggccctttactttccgttgtgcctggacttaatcaaaacgggcgcagtccctgtggaagaactgatcactcaccggttcccgcttgaaaatatacaaaatgccattacagatttccgttctgatcgtaaaaatggcattaaggcaataatggtaagggagtaa

SEQ ID NO: 77092 - protein, 113 aa, Unknown
  Obtained from environmental sample
  misc_feature (1)..(113): Xaa is any amino acid
MDRVLVTAPPALIPLATRLCNVGGIVSFIGIDYGEGAMFTLDSNVVHFNKLQIRASHASPALYFPLCLDLIKTGAVPVEELITHRFPLENIQNAITDFRSDRKNGIKAIMVRE

SEQ ID NO: 77093 - DNA, 591 bp, Unknown
  Obtained from environmental sample
  misc_feature (1)..(591): n is a, c, g, or t
gtgatttatttttacgatgaagatgaggaaatacttttagaatattatcgccgctatctggaatttcagcttaattggctggagaagtgcgtcgccaggactgattatgagtcttatgtcataggatgttcatattcctgcaactcgcttctgggagcgaaattgtggagaaagtgggataagccgtatataggaaaaatagcaggtnttcttcatgatcgcggaaagcttctgcacattcattttcacggtaaatgcatggaaacgattgaagatttcgcggagataggcatagattgtgtctgcccgttcgagagaccgccgggcggagatgttgcgggctctgaaggccttgcagatatacggaaacgcctcaacgaaagagtgacactaaacggaaacatccacacagttgagacattaatacggggtacctcatctgacgtccgaagggaaatagacgagcttactgccgcctttgcggacagcgcccggctgatcatcggcacaggcgaccaggttggatatgaaacgaaagatgaaaatatcacagaaatgattagttacgggaagaaacaaagggtgaaataa

SEQ ID NO: 77094 - protein, 196 aa, Unknown
  Obtained from environmental sample
  misc_feature (1)..(196): Xaa is any amino acid
MIYFYDEDEEILLEYYRRYLEFQLNWLEKCVARTDYESYVIGCSYSCNSLLGAKLWRKWDKPYIGKIAGXLHDRGKLLHIHFHGKCMETIEDFAEIGIDCVCPFERPPGGDVAGSEGLADIRKRLNERVTLNGNIHTVETLIRGTSSDVRREIDELTAAFADSARLIIGTGDQVGYETKDENITEMISYGKKQRVK

SEQ ID NO: 77095 - DNA, 654 bp, Unknown
  Obtained from environmental sample
  misc_feature (1)..(654): n is a, c, g, or t
ttgcgggacgtttatccggggctttgcataattgcggggaacgtggcgacggcggcgggcgcgctttaccttgaagaatgcggcgcaagcgtggtgaaggtgggcatagggcccggttcgatttgcacgacgcgtgcggtgacgggctgcggcgtgccgcagctgtttgcgatttacgacgcggcgcgggcgcttgggggccggattgcggtgattgcggacggcgggataagggagtcgggggatataacgaaggcgcttgcggcgggggcggcggcggttatgctggggtcggttttggccgcgacgaaggagacgccgggcgacgtgataaagattggggataagaaatacaagggctatcgcgggatgggttcgattccggcgatgacgcacgggtcaaaggaccggtacggccagggcgaaataaacgacgcaaaaaaacttgtgcccgagggggtggaggcgctggtgccttataagggcggcgtggacgagatactgtataagatggcgggcggattaagatccgggatgggtatggtgggggcgaaggatttgcgggcgctttgggaacgtgcggagtttatgaagattacgccggcggcggtgcttgaaagccgcgtccacagcgtgcagcaaatcggcaattaa

SEQ ID NO: 77096 - protein, 217 aa, Unknown
  Obtained from environmental sample
  SIGNAL (1)...(18)
  DOMAIN (1)...(210): IMP dehydrogenase / GMP reductase domain
  misc_feature (1)..(217): Xaa is any amino acid
MRDVYPGLCIIAGNVATAAGALYLEECGASVVKVGIGPGSICTTRAVTGCGVPQLFAIYDAARALGGRIAVIADGGIRESGDITKALAAGAAAVMLGSVLAATKETPGDVIKIGDKKYKGYRGMGSIPAMTHGSKDRYGQGEINDAKKLVPEGVEALVPYKGGVDEILYKMAGGLRSGMGMVGAKDLRALWERAEFMKITPAAVLESRVHSVQQIGN

SEQ ID NO: 77097 - DNA, 756 bp, Unknown
  Obtained from environmental sample
  misc_feature (1)..(756): n is a, c, g, or t
atgctgcgcaagcacatcaaaatagagcctctgcgctggtattaccactgcgaccgcctgggcattctcgtctggcaggacttcgtctcaggcggcggcccctacggcaagttcgtcacgcagttcctgccctttttgggcctgaatatgcacgacagacggatataccgcggcttcgggcggcgcagtgcggtcggcagggtagtcttcaaacgcgacatggagcgcaccgtccacctgcttcaaaacgccgtgagcctctccgtgtgggttcctttcaacgaaggctggggccagtttgactcaaggcttattacggacaggcttcgctccctcgacaacacccgcttaatcgatcacgcaagcggctggcacgatcagaaatacggcgacttcgccagccgccacgtctatttcaaaccgttccgcctaaagagcgacccaatgcgccgcgttcaggcgctgactgagttcggcggctacagtctgcccgccgggcgcgccccgtccgacaacccgttcggctaccgcatgttcagcggcaaacaggagtataacgcagcccttaggcagttgtacgaaacggaagtaatccccgccgttgacagcggcctttccgcgtcagtctacacccagctaagcgacgtggaggatgagattaacggcctcttcactttcgaccgcgccgagttaaaggcggacgagcagacggttcaggaaattaaccggaagatacacgagagaattaacccgtaa

SEQ ID NO: 77098 - protein, 251 aa, Unknown
  Obtained from environmental sample
  misc_feature (1)..(251): Xaa is any amino acid
MLRKHIKIEPLRWYYHCDRLGILVWQDFVSGGGPYGKFVTQFLPFLGLNMHDRRIYRGFGRRSAVGRVVFKRDMERTVHLLQNAVSLSVWVPFNEGWGQFDSRLITDRLRSLDNTRLIDHASGWHDQKYGDFASRHVYFKPFRLKSDPMRRVQALTEFGGYSLPAGRAPSDNPFGYRMFSGKQEYNAALRQLYETEVIPAVDSGLSASVYTQLSDVEDEINGLFTFDRAELKADEQTVQEINRKIHERINP

SEQ ID NO: 77099 - DNA, 900 bp, Unknown
  Obtained from environmental sample
  misc_feature (1)..(900): n is a, c, g, or t
ttggccgagaatcaggtacagactcagcataattacgagtcggcatattattcgctgcgtcccggttgggcagaacagaagccggcagtttactgggacgcaatatgcgatgttacaaggcgtttgaaaaatgaggcgcaggattgctggaataacattattgcagtaacaatttcgacaatacgcgacacctgcatttgcgtggacaaggacgggaaaccgttaagagactttattgtatggctggacaaacgtcaatgtaaagtaaaaaaaactctccccttattatactcaatgattttttccctaataagaatgaaagataccgtgaacctgcaaaggaaaatatccgcttgtaactggatcatggaaaatgaacctgagatttgggagaagactcataaattcctttttatttccggttacttgaattttatgctgacaggaaaactgattgattctgtagcgaacatgatagggcatataccgttcaacagcaaaacccgtaaatggatgggtaagggagagcttaaccgtttcatatttgatgttgaaattgaaaaattgacggaggttgttgagccgggggagatacttgggtatataaccgaagatgccgccaacgctacaggaattccaaaaggactgcctcttatcgcgacaggttcggataaaggctgtgaaactctcgggctctcctgtctgaagccggacagcgcgtcaatcagtttcgggactaccgcgacaattcaatttacaatagacaaatatatggagccgcttccgtttattccggcatatcccgcggtgcttaaaaatcaatacaatcctgaagtgcaggtgtacagagggtactggcttatctcgtggtttaaaaaagatttgccgcncaagaattga

SEQ ID NO: 77100 - protein, 299 aa, Unknown
  Obtained from environmental sample
  DOMAIN (2)...(231): FGGY family of carbohydrate kinases, N-terminal domain
  misc_feature (1)..(299): Xaa is any amino acid
MAENQVQTQHNYESAYYSLRPGWAEQKPAVYWDAICDVTRRLKNEAQDCWNNIIAVTISTIRDTCICVDKDGKPLRDFIVWLDKRQCKVKKTLPLLYSMIFSLIRMKDTVNLQRKISACNWIMENEPEIWEKTHKFLFISGYLNFMLTGKLIDSVANMIGHIPFNSKTRKWMGKGELNRFIFDVEIEKLTEVVEPGEILGYITEDAANATGIPKGLPLIATGSDKGCETLGLSCLKPDSASISFGTTATIQFTIDKYMEPLPFIPAYPAVLKNQYNPEVQVYRGYWLISWFKKDLPXKN

SEQ ID NO: 77101 - DNA, 717 bp, Unknown
  Obtained from environmental sample
  misc_feature (1)..(717): n is a, c, g, or t
atgcgctttgaaatactggtggaggatcaatccggtcaaagagccttggaaaagctggttccaaaaatcattgaaactaggcggcataccgtcaacttgtatgcctataaggggatcggccacattccaagaaatttgacgtcacctccaaatgccaaaatacaaacccttctgcacaacttgccgagcctgcttcgagcatacggcaaaacttacgccgcccaaggtgttcaggccgcggtcattgtggtatgcgatctcgacgctcgcgacaaaagaacctttctcaacgaattgtcgtctgttttacagacctgcaatccccgaccgcgaacccgcttttgcttggccattgaagagggcgaagcctggctacttggggatattcccgcaatcaaggccgcgtacccccaagccaaggactctgtgctgaacagctatgtcaatgattccatttgcggcacttgggagcgtttggccgatgccgtatatccacgtggacacagcgcgctcaaagccaagggttggcaggctgtgggcacggcaaagtcgcaatgggcggtgaaaatcactcctcacatggcggtggataggaatgcttcgccgagttttatggattttcgggatcaattaaggaacctcgccggtgtatctaggaaatttcgccggagcatccggcgcatccggctgaaagttatgcgacgcagcagcatttga

SEQ ID NO: 77102 - protein, 238 aa, Unknown
  Obtained from environmental sample
  misc_feature (1)..(238): Xaa is any amino acid
MRFEILVEDQSGQRALEKLVPKIIETRRHTVNLYAYKGIGHIPRNLTSPPNAKIQTLLHNLPSLLRAYGKTYAAQGVQAAVIVVCDLDARDKRTFLNELSSVLQTCNPRPRTRFCLAIEEGEAWLLGDIPAIKAAYPQAKDSVLNSYVNDSICGTWERLADAVYPRGHSALKAKGWQAVGTAKSQWAVKITPHMAVDRNASPSFMDFRDQLRNLAGVSRKFRRSIRRIRLKVMRRSSI

SEQ ID NO: 77103 - DNA, 867 bp, Unknown
  Obtained from environmental sample
  misc_feature (1)..(867): n is a, c, g, or t
gtggacacctcccgcgtggccttggcgctcgcccgcgcccggctcatgggcgcgcggtatccgtactactttctggccgattcccccgaagggcaaaagaaagaggcggagatcagcaaaaccgagccgtcctccaaacccgcttacggcaagatcagccacggtttcgtctatgagcgcgtcccgcacattaccctcaaatccatcgccaacaacgcggaaatagacgtgatctgggacaagtggcaggcaaaactcgaacccctgcgggcgcaactcaatgccgcccgcaaaatttcctgggaagaatgggaaatcccgcgcgaggcggaaacttcctggccagaggccgtgaagaaaatccacgcgtcctggtggcaggcccgcatagcgcgccagaaagagatagacgcctccatcgcggccaaggccgataccgaatacctttatgacaagccctatgtggacgccaagaaggtgcgcgtggccgggccgtttacggtagagagcctttccccgcaccgcatgctgatgctcgacgaacacgacgagatcattgatcccttggagcgggcaacgcaggaaggaggcaaggacttcacctccatgatcctggaggaattgaaaaccgccggggtacagcaggcgaacaaggcggacaggattctcttcaccagcctcaaaccctggccgggccgctatgtcaacggcgagggcgtgtacgaagaaggcgagaaggagcgccgggcagcaatcttcatcggcccggaattcggcagcgtggcgcgggccgatttggtcgccgccgccagggaggcatcggatgcggactttgacgcgctgatcgcctgcgctctgccgatctga

SEQ ID NO: 77104 - protein, 288 aa, Unknown
  Obtained from environmental sample
  misc_feature (1)..(288): Xaa is any amino acid
MDTSRVALALARARLMGARYPYYFLADSPEGQKKEAEISKTEPSSKPAYGKISHGFVYERVPHITLKSIANNAEIDVIWDKWQAKLEPLRAQLNAARKISWEEWEIPREAETSWPEAVKKIHASWWQARIARQKEIDASIAAKADTEYLYDKPYVDAKKVRVAGPFTVESLSPHRMLMLDEHDEIIDPLERATQEGGKDFTSMILEELKTAGVQQANKADRILFTSLKPWPGRYVNGEGVYEEGEKERRAAIFIGPEFGSVARADLVAAAREASDADFDALIACALPI

SEQ ID NO: 77105 - DNA, 813 bp, Unknown
  Obtained from environmental sample
  misc_feature (1)..(813): n is a, c, g, or t
ttggatcttggtgtcaaacctcaaagtaacgctggttcccggtctgactatcgggacgacgaactagtacggctttgggaaagctatgaccacctcctgaatcggttaaatatcgcgcgccgtcaggaagaacagatgagtatgctccatatgcaggcggagtttgacgcgctccaggcccaaatgaacccgcatttcctttacaatgtgcttaacgtcatttcccatcggggagttctaaaccgcgatgaaaccatatgcgagatatgtgaaaggcttgcatccatgctgcgctactccgcgggaatatcccagcggcttgtacccataagagaagaattggattaccttaatcattacctattcctgcttaaaacccgctacagggacaaacttgtctattcactggatatagccgacgaaacaaaggatcagatgattccaaaaatagttctacagcagcttgttgagaattccattacccatggtttttccgaaacatccggtgtcatgcagataaatgtccatggttttaccgaaggtaattcttggcttatggagatcagcgataacggctgcggttttagcgaagacgatatcaacagcctcaacagaaaaatggaaaagatagccgacgcgctgaaccgggggcaattcgccctgaatgtcggaggcatggggctgctcaatatatacgccagatttgtcattctatttggaagcgatgtagtatttcgcattgttaacatggactccggcggggcaaaagtaataattggagctttcatgaagtacaggaatataactgtatga

SEQ ID NO: 77106 - protein, 270 aa, Unknown
  Obtained from environmental sample
  DOMAIN (143)...(264): Histidine kinase-, DNA gyrase B-, and HSP90-like ATPase
  misc_feature (1)..(270): Xaa is any amino acid
MDLGVKPQSNAGSRSDYRDDELVRLWESYDHLLNRLNIARRQEEQMSMLHMQAEFDALQAQMNPHFLYNVLNVISHRGVLNRDETICEICERLASMLRYSAGISQRLVPIREELDYLNHYLFLLKTRYRDKLVYSLDIADETKDQMIPKIVLQQLVENSITHGFSETSGVMQINVHGFTEGNSWLMEISDNGCGFSEDDINSLNRKMEKIADALNRGQFALNVGGMGLLNIYARFVILFGSDVVFRIVNMDSGGAKVIIGAFMKYRNITV

SEQ ID NO: 77107 - DNA, 696 bp, Unknown
  Obtained from environmental sample
  misc_feature (1)..(696): n is a, c, g, or t
ttggttatagggaaatcccgaattgttctttccggagaagatgtaaatccgttgggaacactacccccattaaattttgacaagaatctcgcgtattaccttaaagagaacagaagctgcaaaataaaggagctgctccacgagctgctggaattctgtgaaaagaccgatgccccgcagttcctggcggaagaagagctgcgatcatttttggagcaggtacggcgtggaagggcagaggggaacagtacgcctccagaggacagtgtcgaataccttgttgatgacgccttttattacgcgacaagttacggggatctggaaaagaatctgctgtatatactggaaaaactgctccccgacagggaacagggaattaacaaaattgatacccctgagtttttcgatttgattgaggagtttgtaaaaaacaagcttgccgaaccgctctcacttcagcagagctgtattcacttcgggatttcccagacctacatgtcgaggttattcagaaagtacacggggctctcgtttaacaactatcttacgcgcagccgtattgaaaaggccaaacagtacctttctagtggaaacactctgataaaagaagccgccagcttgactggttttagcgatcagttttatttcagcaaggtctttaaatccctcaccggccagtctccctcggaattataa

SEQ ID NO: 77108 - protein, 231 aa, Unknown
  Obtained from environmental sample
  DOMAIN (189)...(231): Bacterial regulatory helix-turn-helix proteins, AraC family
  misc_feature (1)..(231): Xaa is any amino acid
MVIGKSRIVLSGEDVNPLGTLPPLNFDKNLAYYLKENRSCKIKELLHELLEFCEKTDAPQFLAEEELRSFLEQVRRGRAEGNSTPPEDSVEYLVDDAFYYATSYGDLEKNLLYILEKLLPDREQGINKIDTPEFFDLIEEFVKNKLAEPLSLQQSCIHFGISQTYMSRLFRKYTGLSFNNYLTRSRIEKAKQYLSSGNTLIKEAASLTGFSDQFYFSKVFKSLTGQSPSEL

SEQ ID NO: 77109 - DNA, 522 bp, Unknown
  Obtained from environmental sample
  misc_feature (1)..(522): n is a, c, g, or t
atgggaaccaagaaagaaatcggcaaagtcattacaggcatagtgagagacatgatggaaagggtgatgaacaaagtgttgagagaggatccattcatccccgaacagcaccatgccaaaaagccgatatacgctgctttggtgcctgatgaaatttttaaggggtctcatttcgagcgacgcttcacgaccccatttggcagtgtttgggaaaaactggccgtggctgtggcgtctgcgcaacatggcaattgcacgcaagggaaggcgattgcgggaaatatcaaagaaggccgtttgagaagaatacaggaagtcttgaacaaccttgagcacccgaccagcggcaatgacagcaagcgccccaattgggacaaagaactcgcttacatcctttctggaggcgaccagccaatccctgcgaccgtgatttgcgacatatatattgacagcaaaaaacagggaaaaaatattcattcgagctcaaggcccctttgcctaacagcgaccaaactaaagtga

SEQ ID NO: 77110 - protein, 173 aa, Unknown
  Obtained from environmental sample
  misc_feature (1)..(173): Xaa is any amino acid
MGTKKEIGKVITGIVRDMMERVMNKVLREDPFIPEQHHAKKPIYAALVPDEIFKGSHFERRFTTPFGSVWEKLAVAVASAQHGNCTQGKAIAGNIKEGRLRRIQEVLNNLEHPTSGNDSKRPNWDKELAYILSGGDQPIPATVICDIYIDSKKQGKNIHSSSRPLCLTATKLK

SEQ ID NO: 77111 - DNA, 825 bp, Unknown
  Obtained from environmental sample
  misc_feature (1)..(825): n is a, c, g, or t
ttgatggccgagggaaaactgccctgtccgagcgcgttctattctatcgacagttattgcaatccctggcacatccccttcgggcatgcctttgatgtggtcttcaccgcccagaaggattatgtggagctttttgcccaatgtggcattcccgtcttctggctgccgctgttcttttgttccgcgcggcctcattatctggagcaggccagggacattcccgttgtgttcgtgggcaacatcggggcgcggaataatccgggccgcaagccgtttctggaatccttccgcaggatgcaccccctggttatcaccagcggcgattatgtgccgcttttcaaccgcagccatatcgcgctgaaccagacggctgtcggagagatcaatttccgctgcttcgaggctctggcctgcggcgcggcgttgctgatggaagaatgctccaacggcatgcgggacttgtttatccccggcgaacatattttgccgacctatgcgcgtggcgatgcccggcaggcggcggcgagggccgaagcggccctgggcgatccggcggcgcttgcgcgtatcgccagacagggccgggaactggtggagcaaaaacacagcgatgttcaccgcgcggcggagattttgcgcgtgatgacgccactgctgcgcgatgccccgcatctgcgccgtctgctgccggaaaacgtgcggcgccgcggcgcgctgctcgccagtgcgtatgtttttcttgccgccgaactcgatcagccgtgccatgcgccgcacagggatttgttcctgcgcctcgcgcgttcgcttgaacacgcggcgtaa

SEQ ID NO: 77112 - protein, 274 aa, Unknown
  Obtained from environmental sample
  misc_feature (1)..(274): Xaa is any amino acid
MMAEGKLPCPSAFYSIDSYCNPWHIPFGHAFDVVFTAQKDYVELFAQCGIPVFWLPLFFCSARPHYLEQARDIPVVFVGNIGARNNPGRKPFLESFRRMHPLVITSGDYVPLFNRSHIALNQTAVGEINFRCFEALACGAALLMEECSNGMRDLFIPGEHILPTYARGDARQAAARAEAALGDPAALARIARQGRELVEQKHSDVHRAAEILRVMTPLLRDAPHLRRLLPENVRRRGALLASAYVFLAAELDQPCHAPHRDLFLRLARSLEHAA

SEQ ID NO: 77113 - DNA, 663 bp, Unknown
  Obtained from environmental sample
  misc_feature (1)..(663): n is a, c, g, or t
atgacctgcaacagaccgtcaagctgtttcgcacngctacgacaaggtggccgacacggtggccaggggcggcaagtgctgttcatcggcaccaagcgccaggcgcaggaatcgtttgccgccgaagccgaacgcgccggacaataccatgtgacgaaccgctggatgggcggcacgctcaccaacttcaccacgatccagaagagcgtggaacgcctgaagaagcttgaaggcatgttcgccgacggttccgtcaaccgttatcagaagaaggaaattttgagcctgcaacgcgaaatggacaagctcaacctgacgctgggcggcatcaaggatatggagcgtctgccccagcttgccttcatcattgatcccaatcgggaagaaatcgcggtcaaggaatgccgcaagctcggcatccccattgttgcgattaccgataccaactgcgatcccgatgtcattgactatgttattcccggcaatgatgacgccatccgcgcgatcaagctttttgtgaccgcgttttcggaagcctgcatggaaggcgaggccgtcaggaaggacggcaaaggcaatgccgaggacgcgttgaaaagagccgcccaggccgaggcgtccgcgatggaagccggggacgccggagtagaggccgctgaataa

SEQ ID NO: 77114 - protein, 220 aa, Unknown
  Obtained from environmental sample
  DOMAIN (9)...(184): Ribosomal protein S2
  misc_feature (1)..(220): Xaa is any amino acid
MTCNRPSSCFAXLRQGGRHGGQGRQVLFIGTKRQAQESFAAEAERAGQYHVTNRWMGGTLTNFTTIQKSVERLKKLEGMFADGSVNRYQKKEILSLQREMDKLNLTLGGIKDMERLPQLAFIIDPNREEIAVKECRKLGIPIVAITDTNCDPDVIDYVIPGNDDAIRAIKLFVTAFSEACMEGEAVRKDGKGNAEDALKRAAQAEASAMEAGDAGVEAAE

SEQ ID NO: 77115 - DNA, 648 bp, Unknown
  Obtained from environmental sample
  misc_feature (1)..(648): n is a, c, g, or t
atggcgttttttgggcggcattcacagcgcgcgcgacgcgctgattttattgccgccgcgaacgatttgggccttcgggtcaatggagattttatatatggctttccgaatcaaaaagttaaagacgtcgaaaaattatgcgaaaaaataaacgccgcgggacttaaatcagcgtcgctctacgaactgacgccggaggtcggaacgccgctcggaaatataatgccgatttcggaaaaattgtcggcggaaatgtatggggcgattcagcggacactgaaacttcaacgatatgaggtgtcgaattacggcgacccgtgccgccacaatatgaacgtctgggcgggcgaagaatatataggggtcggcgaatcggcggcgggacggattgtcaaaaacggcaaatggtttgagacgaaaatcaccggcggcaaaatcataacgggcgaattgaccgacacagaacgcgcgattgaaatgacaatgacgggccttcggacaaaatggggcgcgaaagtttcgcccgtcataaatttggattttgtgaacgcgaacccggcatactttacgctttgcaaagggcgccttagaatgaccgactttgggattatgattcttgacactttgctgccgaaattaataacataa

SEQ ID NO: 77116 - protein, 215 aa, Unknown
  Obtained from environmental sample
  misc_feature (1)..(215): Xaa is any amino acid
MAFFGRHSQRARRADFIAAANDLGLRVNGDFIYGFPNQKVKDVEKLCEKINAAGLKSASLYELTPEVGTPLGNIMPISEKLSAEMYGAIQRTLKLQRYEVSNYGDPCRHNMNVWAGEEYIGVGESAAGRIVKNGKWFETKITGGKIITGELTDTERAIEMTMTGLRTKWGAKVSPVINLDFVNANPAYFTLCKGRLRMTDFGIMILDTLLPKLIT

SEQ ID NO: 77117 - DNA, 354 bp, Unknown
  Obtained from environmental sample
  misc_feature (1)..(354): n is a, c, g, or t
gtgcatcctctcgagtttcttgatgttcctctcgatctcctccatgacgtcttcgggcaccttcagcttggccaatcttgcgcggaagccttcgatttcctcgctcagttcgttgccctcgcccagttctacctgtatggccttgagttgctggcgcaggtagtactcccgctggctcttgtccatttcgcccctggcttccatggtgatcttctgctgtatctccagaagctctatctcgcgcagcagcagctcatgtattttcttgaggcggccaaatgtatcggagatttcgaggatgtcctgcatctgctcggacttgaggtccaagttcgaggccaccagatccgctag

SEQ ID NO: 77118 - protein, 117 aa, Unknown
  Obtained from environmental sample
  misc_feature (1)..(117): Xaa is any amino acid
MHPLEFLDVPLDLLHDVFGHLQLGQSCAEAFDFLAQFVALAQFYLYGLELLAQVVLPLALVHFAPGFHGDLLLYLQKLYLAQQQLMYFLEAAKCIGDFEDVLHLLGLEVQVRGHQIR

SEQ ID NO: 77119 - DNA, 396 bp, Unknown
  Obtained from environmental sample
  misc_feature (1)..(396): n is a, c, g, or t
ttgaactcggtcagaccgnccattgccgacacggatctcgtcatccggattgcggacgtgacaggcaacgcggtgttctaccctgtggatatcgagagaacccggatggaagttctggcggtgcgcgcgccggacggcagcgtgcgcacggcgttcaacacctgccaggcatgttacggctccggcaaggctttcttcaagcaggcgggcacagtgctggtttgccagaactgcgggcagcgttttcgcatgggtcaggtcggggtgcaggccgggggctgcaacccgatgccgatttttcctcagaatacgagggtgacggatacaagcatcattattcccagggaatttttgcaagaagccaggagtatctttgcccagtggcaaagggattga

SEQ ID NO: 77120 - protein, 131 aa, Unknown
  Obtained from environmental sample
  misc_feature (1)..(131): Xaa is any amino acid
MNSVRPXIADTDLVIRIADVTGNAVFYPVDIERTRMEVLAVRAPDGSVRTAFNTCQACYGSGKAFFKQAGTVLVCQNCGQRFRMGQVGVQAGGCNPMPIFPQNTRVTDTSIIIPREFLQEARSIFAQWQRD

SEQ ID NO: 77121 - DNA, 390 bp, Unknown
  Obtained from environmental sample
  misc_feature (1)..(390): n is a, c, g, or t
ttgtggtcaggccggacgaaacggcgaaaaaaggggcaaaggcggcaaaggcggcaaaaggggcgcccgcagcaacggaacccgcagcaacggaacccgcaactgcggaacccgcagcaacggaatccgcagcaacggaacccgcagcgacggaacccgcaactgcggaacccgcaactgcggaacccgcagcgacggaacccgcagcgacggaacccgcaactgcggaacccgcagcggcggaacccgcaactgcggaactcgcagcggcggaacccgcaactgcgggatatctgtttttcccgggctgccagttgggcgcgtccgaccccagatatgtatccgatacctatcagcgtatgctggaaccgtatccggatacggcgctga

SEQ ID NO: 77122 - protein, 129 aa, Unknown
  Obtained from environmental sample
  misc_feature (1)..(129): Xaa is any amino acid
MWSGRTKRRKKGQRRQRRQKGRPQQRNPQQRNPQLRNPQQRNPQQRNPQRRNPQLRNPQLRNPQRRNPQRRNPQLRNPQRRNPQLRNSQRRNPQLRDICFSRAASWARPTPDMYPIPISVCWNRIRIRR

SEQ ID NO: 77123 - DNA, 405 bp, Unknown
  Obtained from environmental sample
  misc_feature (1)..(405): n is a, c, g, or t
gtgcgccgcagcagtccaccatcagcgccgtatccggatacggttccagcatacgctgataggtatcggatacatatctggggtcggacgcgcccaactggcagcccgggaaaaacagatatcccgcagttgcgggttccgccgctgcgagttccgcagttgcgggttccgccgctgcgggttccgcagttgcgggttccgtcgctgcgggttccgtcgctgcgggttccgcagttgcgggttccgcagttgcgggttccgtcgctgcgggttccgttgctgcggattccgttgctgcgggttccgcagttgcgggttccgttgctgcgggttccgttgctgcgggcgccccttttgccgcctttgccgcctttgccccttttttcgccgtttcgtccggcctga

SEQ ID NO: 77124 - protein, 134 aa, Unknown
  Obtained from environmental sample
  misc_feature (1)..(134): Xaa is any amino acid
MRRSSPPSAPYPDTVPAYADRYRIHIWGRTRPTGSPGKTDIPQLRVPPLRVPQLRVPPLRVPQLRVPSLRVPSLRVPQLRVPQLRVPSLRVPLLRIPLLRVPQLRVPLLRVPLLRAPLLPPLPPLPLFSPFRPA

SEQ ID NO: 77125 - DNA, 618 bp, Unknown
  Obtained from environmental sample
  misc_feature (1)..(618): n is a, c, g, or t
atgctgcaaacgcgggggctgacgctgcggccgctggcgtacgaacgcgagcgcacgctttgctgcggtgggggcgggcaatacatgctcgcgatccccggcatggcagcggaagcggcggccaacatcgcggtgatggaggatacgatctatgttacctattgcgtgaactgccgggaggcgctggcagaaaccggaaagcccatcctgcacgtgctggacatcctactggggatcaacggcccgggcagaaggccccccacgcacaccatgcgccgggagaaccgcgaggcgcttatgctggggatggtggggatggccggcaaggcgctgcgccctgcgcaagaacgccctgcgcaagaaaaaaaaccgccgcttttcctcgacgattacttgcgcgacaaattgagcagggactggatcctggaagacgatatccgggatctcatcctgtattgcgaaacgcacaaccgcaaagtcgtcagccagtccacgggcgcattcgtcggccatatccgccgggggcacctgacgcgctgggcagagtacaggcccgaaggggagggctacaggctgtacaacgcatacgcccacaaagtgcagatagacgaatcctga

SEQ ID NO: 77126 - protein, 205 aa, Unknown
  Obtained from environmental sample
  misc_feature (1)..(205): Xaa is any amino acid
MLQTRGLTLRPLAYERERTLCCGGGGQYMLAIPGMAAEAAANIAVMEDTIYVTYCVNCREALAETGKPILHVLDILLGINGPGRRPPTHTMRRENREALMLGMVGMAGKALRPAQERPAQEKKPPLFLDDYLRDKLSRDWILEDDIRDLILYCETHNRKVVSQSTGAFVGHIRRGHLTRWAEYRPEGEGYRLYNAYAHKVQIDES

SEQ ID NO: 77127 - DNA, 369 bp, Unknown
  Obtained from environmental sample
  misc_feature (1)..(369): n is a, c, g, or t
atggggcggcaagcgcgaccggaaactatggggcggcaagcgcgaccggaaactatggggcggcaagcgcgaccggataccaaggggcggcaagcgcgaccggaaactatggggcggcaagcgcgaccggagacaaaggggcggcaagcgcgaccggaaactatggggcggcaagcgcgaccggataccaaggggcggcaagcgcgaccggataccaaggggcggcaagcgcgaccggaaactatggggcggcaagcgcgaccggagacaaaggggcggcaagcgcgaccggataccaaggggcggcaagcgcgaccggaaactatggggcggcaagcgcgaccggagacaaaggggcggcaagcgtaa

SEQ ID NO: 77128 - protein, 122 aa, Unknown
  Obtained from environmental sample
  misc_feature (1)..(122): Xaa is any amino acid
MGRQARPETMGRQARPETMGRQARPDTKGRQARPETMGRQARPETKGRQARPETMGRQARPDTKGRQARPDTKGRQARPETMGRQARPETKGRQARPDTKGRQARPETMGRQARPETKGRQA

SEQ ID NO: 77129 - DNA, 789 bp, Unknown
  Obtained from environmental sample
  misc_feature (1)..(789): n is a, c, g, or t
atgcgtaaatatctctctacagccctcctagccctgtccttgtcccttgcctcgctctcatgcagcggctccaaagacacccccgctcctgcgggcccacagacaatccccgtcgccagcatatccctcgacagaaccaccatcaccaacgacgtcaccaagcaggagaagctgatacccacactccagccccagaacgctaccaataagacagtcacatgggccaccagtgacgacaccagggcaagggtggacgacagcggcctagtcaccatcgtcggctcaggcagagccaccataaccgccaaagcaggtgacaagacagccacctgcgaagtgaatggcatcgggcctgacctttatgttgtatcagccaacaactcactcgaacttaggggcctgtacaaaaacggcttcaagcagagcggttacgaaggggcagtactctcggatattattgtatctgtagatgatgtctatgtggctgctgcaacggacggctacgcttactggaaaaatggtgtcccgcatctcgacctaatgggcaaatgggtaatcccacaaactgttattgccgtctcaggcaacgatgtttacacaggtagctacgagtcggcttcacgcccaaactacccctataataaggtggcaaaattctggaagaatggggtcgagcagcagctagactggtatgacggctgtgagccttttgcagtctattccatcgccgtgtcaaacaggcgatgtctatgtggctggaggcgttcaaaggcagggctacggcactga

SEQ ID NO: 77130 - protein, 262 aa, Unknown
  Obtained from environmental sample
  SIGNAL (1)...(23)
  DOMAIN (37)...(113): Bacterial Ig-like domain (group 2)
  misc_feature (1)..(262): Xaa is any amino acid
MRKYLSTALLALSLSLASLSCSGSKDTPAPAGPQTIPVASISLDRTTITNDVTKQEKLIPTLQPQNATNKTVTWATSDDTRARVDDSGLVTIVGSGRATITAKAGDKTATCEVNGIGPDLYVVSANNSLELRGLYKNGFKQSGYEGAVLSDIIVSVDDVYVAAATDGYAYWKNGVPHLDLMGKWVIPQTVIAVSGNDVYTGSYESASRPNYPYNKVAKFWKNGVEQQLDWYDGCEPFAVYSIAVSNRRCLCGWRRSKAGLRH

SEQ ID NO: 77131 - DNA, 570 bp, Unknown
  Obtained from environmental sample
  misc_feature (1)..(570): n is a, c, g, or t
gtgatggttgataactttatccgcttcgccgagccagtaaaactgaaatcggataagcgcgtaattgcggttaccgttacgccgtttatcactgattgcacgggcaccatttgggttaccgatattcagtttcaggagggtgagaagctcaccggctacgtccaacattcgaccacgatgttgaccgattcgggtaatgcgccgaggtttcagaatggggttatccgctccggcgcaaccgccatcctgttcaacactggcggcaccaccgccgggctggacatttacctttacccgaatgcagcgatggcggcgggtgcgattgaggtagcgcagggcggaggctcccaccgttgccggttcaaagctgccgcgcagccgggtgatgagttcgcgcttttggcggagcggcgtgaatgcctccgtaatggccagcccactccgaaatccggcttctaccagtatgtcgcggcgtatgacagcaagcatcaaatcaagctagaaccgcataagtcggccaaggtgctgctcgaatacacggaaatgaacgggagtgaggtgacccaataa

SEQ ID NO: 77132 - protein, 189 aa, Unknown
  Obtained from environmental sample
  misc_feature (1)..(189): Xaa is any amino acid
MMVDNFIRFAEPVKLKSDKRVIAVTVTPFITDCTGTIWVTDIQFQEGEKLTGYVQHSTTMLTDSGNAPRFQNGVIRSGATAILFNTGGTTAGLDIYLYPNAAMAAGAIEVAQGGGSHRCRFKAAAQPGDEFALLAERRECLRNGQPTPKSGFYQYVAAYDSKHQIKLEPHKSAKVLLEYTEMNGSEVTQ

SEQ ID NO: 77133 - DNA, 465 bp, Unknown
  Obtained from environmental sample
  misc_feature (1)..(465): n is a, c, g, or t
atgcgagctgctgcgttgggtgaagggtgggtgtatgagccgtatgaggctttcgacgtgcgtatgcccgacggcaccaccacncaatacgggcgcataaaccgcagcggggtggtgtgggataacgaattcgaagttttcaccttgcagaacaatgtcgaagaactatccaccagaagtgatgacatttcaatggattacgacttctaccattcagcggttctgccaatcccgtgtaatgctgaataccaggccacttttatccctagagatattaacgtttggtgttcccgcctattcctcggcgatagcgaggggttcggcatcgtctactaccaagacgtagattccctggtctattgggcaaaccaagctgcctaccgctggaacctgcgcggcttcgccttatggtcgctaggccaagaagacctccgcgtttgggaggcgctacctaaacaggtttag

SEQ ID NO: 77134 - protein, 154 aa, Unknown
  Obtained from environmental sample
  misc_feature (1)..(154): Xaa is any amino acid
MRAAALGEGWVYEPYEAFDVRMPDGTTTQYGRINRSGVVWDNEFEVFTLQNNVEELSTRSDDISMDYDFYHSAVLPIPCNAEYQATFIPRDINVWCSRLFLGDSEGFGIVYYQDVDSLVYWANQAAYRWNLRGFALWSLGQEDLRVWEALPKQV

SEQ ID NO: 77135 - DNA, 549 bp, Unknown
  Obtained from environmental sample
  misc_feature (1)..(549): n is a, c, g, or t
atgaatgggtatgttcaaggcgacccgatgctgtgcatcggttgccgcacctgtatgatcgcctgcgtggtcgcccatgagggcaagcgcatttttgaaatcgacccggacggctacgactttcatcccaagctcagcgtggtcaagacctggtccgtgagcgtgccggtgcagtgcaagcactgtgagaacccggcctgcctctctgtctgccgctccgaggccatcagccgccaaggcgaaacggtggtgcttgaccgggaaaaatgcatcgggtgcaaatcctgcgccgaagcctgccccttcggggccatccaaatggtgaccttgggcttcagcgggaccaacccggacggaacgcccaaggtggtggccaacaagtgcgacctgtgcccgaacgaaaccagggggccctcctgcgtccgggtctgccccaccgaatgcctccggctggtcaaggaggacgacttgaatgccttggtgaaaaacaagcgccagggttcggtgaacctggcggtccaagcagcccaagccgcccagaccgcctga

SEQ ID NO: 77136 - protein, 182 aa, Unknown
  Obtained from environmental sample
  DOMAIN (83)...(106): 4Fe-4S binding domain
  misc_feature (1)..(182): Xaa is any amino acid
MNGYVQGDPMLCIGCRTCMIACVVAHEGKRIFEIDPDGYDFHPKLSVVKTWSVSVPVQCKHCENPACLSVCRSEAISRQGETVVLDREKCIGCKSCAEACPFGAIQMVTLGFSGTNPDGTPKVVANKCDLCPNETRGPSCVRVCPTECLRLVKEDDLNALVKNKRQGSVNLAVQAAQAAQTA

SEQ ID NO: 77137 - DNA, 381 bp, Unknown
  Obtained from environmental sample
  misc_feature (1)..(381): n is a, c, g, or t
atgtgcagcgcgcgggaaatcgacgacattaatattttacaggccagcatgctggcgatgaaacgggcggttgacgcattggccgtgcggccggatatggtcttggtcgacgggaacagggtgccggagggcgtcgcggggcgcgcgattgtggggggcgacgcgaaatccatgtcgattgccgccgcgtcgattatcgccaaggttacgcgcgaccgcattatggacgggttggcgcgggaattcccgcagtacggatgggacaggaacgcggggtacccgaccaaggagcatttggcggcgcttgaaaaacacggcgcgacaatccaccaccgcaaaacctacgccccggtgcggaaggtcattgcgggcggggattaa

SEQ ID NO: 77138 - protein, 126 aa, Unknown
  Obtained from environmental sample
  DOMAIN (1)...(118): Ribonuclease HII
  misc_feature (1)..(126): Xaa is any amino acid
MCSAREIDDINILQASMLAMKRAVDALAVRPDMVLVDGNRVPEGVAGRAIVGGDAKSMSIAAASIIAKVTRDRIMDGLAREFPQYGWDRNAGYPTKEHLAALEKHGATIHHRKTYAPVRKVIAGGD

SEQ ID NO: 77139 - DNA, 792 bp, Unknown
  Obtained from environmental sample
  misc_feature (1)..(792): n is a, c, g, or t
gtgagcggaatgcccgggctggctgtacccattgaggagggcggcatgggttttgactttcgcatgagcatgggcgtagccgacttttggataaaaacgctcaagacaaaaaaagacgaggagtggcacgttggcgatatgttctatcagctgaccaacaaacgccacgatgagcgcaccatatcgtacgccgagtgccacgaccaagctatggtgggcgacaagactatcatcttttggctcattgacaaggaaatgtacacaggcatgagcgtgtttgagccgaacatggtggttgaccgcggcgttgcgctgcacaagctcattcgcatggcatcgctctccaccgccggtgacggctacctttgctttatgggcaacgagtttggtcaccccgagtggattgactttccgcgcgagggcaacggctggagctaccactacgcccaccgccaatggcgtttagccgatgacaccaacctgcgctaccgctttttgcaggagtgggacaaggctatggttacgctggcaaaaaaggaaaaaatattcagccgccgcccctttgccatagtgcagaacacaggcgaccaaacgctcatcttcaagcgcggcgacatactctttgccttcaacttcaaccccacgcaatcctttaccaactatggctttgagattgatgcaggtaggtacaaaatgctgctcaacagcgacagcaaagagttcggcggctttgcccgcgttgatgaaaaaactccacacttcaccgtttttgaaaacagtaaaatatgctga

SEQ ID NO: 77140 - protein, 263 aa, Unknown
  Obtained from environmental sample
  misc_feature (1)..(263): Xaa is any amino acid
MSGMPGLAVPIEEGGMGFDFRMSMGVADFWIKTLKTKKDEEWHVGDMFYQLTNKRHDERTISYAECHDQAMVGDKTIIFWLIDKEMYTGMSVFEPNMVVDRGVALHKLIRMASLSTAGDGYLCFMGNEFGHPEWIDFPREGNGWSYHYAHRQWRLADDTNLRYRFLQEWDKAMVTLAKKEKIFSRRPFAIVQNTGDQTLIFKRGDILFAFNFNPTQSFTNYGFEIDAGRYKMLLNSDSKEFGGFARVDEKTPHFTVFENSKIC

SEQ ID NO: 77141 - DNA, 525 bp, Unknown
  Obtained from environmental sample
  misc_feature (1)..(525): n is a, c, g, or t
gtgagggtgctaaaaaagctggccccggagatagcgaagatgggcggcatcaggtttctggcccctggcagggtttaccgaaaggacgagatagaccccacgcacagcccaatgttccatcaagttgagggaatgttggtcgggcgcaacattggtatgcaccatttgaaaggtacgctggactacgccatgaaggagcttttcgggccagccgccgatatccgctttagacccagctacttcccgttcgtggaacccggctgcgaagttgatgtgcgctgcccgctctgctttggcgatggctgcaggatatgcaaaggctctggctgggtggagattctgggcgcagggctcgtccacccgaatgtgctaaagtacgccggcataagcagcagcgaatggagcggctttgctttcggcatgggcgtagagcggatagccatgatggtcagccaaacccccgaccttcgcttgttttttgaaaatgacttgaggttcttggcctccatgggaggactgggctga

SEQ ID NO: 77142 - protein, 174 aa, Unknown
  Obtained from environmental sample
  DOMAIN (1)...(170): tRNA synthetases class II core domain (F)
  misc_feature (1)..(174): Xaa is any amino acid
MRVLKKLAPEIAKMGGIRFLAPGRVYRKDEIDPTHSPMFHQVEGMLVGRNIGMHHLKGTLDYAMKELFGPAADIRFRPSYFPFVEPGCEVDVRCPLCFGDGCRICKGSGWVEILGAGLVHPNVLKYAGISSSEWSGFAFGMGVERIAMMVSQTPDLRLFFENDLRFLASMGGLG

SEQ ID NO: 77143 - DNA, 816 bp, Unknown
  Obtained from environmental sample
  misc_feature (1)..(816): n is a, c, g, or t
atgcctgagatgtttcaaattaagctggccatatcccgccgactcgcgcatctgggcttttaccaagttgtcacccatggctttgtcggcccagacgcggatgcggggtttgcaaagagcgcggcccaagggcgcactttgctaaatccgctgggggcggaatacagcgtcatgcgcggctcgctactgcccagccttagggacgttgcggaagccaacctgagaaacggaaccaaggacgtgcggctgttcgagatagcccctgttttcgacagcggtcccaacggtcccaccgagactgcgaagctgggccttgtatgggccggggccattggaggcgaagacccgctcaccccatgccgccccgtgatggtggcggacttgatagctgcggcaaccgacataggcgtttcgggggagccaatagtttctgagcttgggccgcaggtgtttgggttggaaatcccgctgggcgcactcggccagaagccagaaaaaattattcccacgttcaggccgttcagccgccacccagcagtcacaagggatttgtcgctactggccccgctagagcaaagctacggagtggttggacaggcaattgccggagtccttgaatccagcccaatacagagcgtcaggtgcgtgaacgtctttaaggacaaaaaactcattgaagagggcaaacaggcttggcttgtcaggctgaggttccaggcgatggacaggactctgacgggcgcggaagtggaaaattgggtaacgatgcaattgaagcggcaaaggcattggcgccgcgtgcgctcggccatctga

SEQ ID NO: 77144 - protein, 271 aa, Unknown
  Obtained from environmental sample
  DOMAIN (175)...(267): Ferredoxin-fold anticodon binding domain
  misc_feature (1)..(271): Xaa is any amino acid
MPEMFQIKLAISRRLAHLGFYQVVTHGFVGPDADAGFAKSAAQGRTLLNPLGAEYSVMRGSLLPSLRDVAEANLRNGTKDVRLFEIAPVFDSGPNGPTETAKLGLVWAGAIGGEDPLTPCRPVMVADLIAAATDIGVSGEPIVSELGPQVFGLEIPLGALGQKPEKIIPTFRPFSRHPAVTRDLSLLAPLEQSYGVVGQAIAGVLESSPIQSVRCVNVFKDKKLIEEGKQAWLVRLRFQAMDRTLTGAEVENWVTMQLKRQRHWRRVRSAI

SEQ ID NO: 77145 - DNA, 546 bp, Unknown
  Obtained from environmental sample
  misc_feature (1)..(546): n is a, c, g, or t
gtggaagatgaaaataataaatatcagctaataaatgttgaagcgggcgaacgcttaaatatggcagatattattttacaattcaagcgaaagcgtaagaatcaaagcactgttaccggatttgttgatgtcaaggcaatcagtaatgatattgaaggaagcggcaaatcgccaaatataacttcatttgcaagaatacgtactgaatatattaaggatcctgattatctttttattatattatccataaaacataaagtttattgtaaaagagacaatacttccaacatggtattcggtataatggaagtggttgattttaacgcgtatgatttaaagtttttatctaaaaatgacataagttataatcctgctcttggtagcggacaattacaagttagagacatccattatgttacaaaagaaattaggactacttgggaattttgtcaaatactggatgaaaaatgtatcgcgtctcgtaaagggtattatgaatggttaaggtatgcggtacaaaatcattggataaaggatgaaggatga

SEQ ID NO: 77146 - protein, 181 aa, Unknown
  Obtained from environmental sample
  misc_feature (1)..(181): Xaa is any amino acid
MEDENNKYQLINVEAGERLNMADIILQFKRKRKNQSTVTGFVDVKAISNDIEGSGKSPNITSFARIRTEYIKDPDYLFIILSIKHKVYCKRDNTSNMVFGIMEVVDFNAYDLKFLSKNDISYNPALGSGQLQVRDIHYVTKEIRTTWEFCQILDEKCIASRKGYYEWLRYAVQNHWIKDEG

SEQ ID NO: 77147 - DNA, 396 bp, Unknown
  Obtained from environmental sample
  misc_feature (1)..(396): n is a, c, g, or t
ttggaacttgagataaccgaacagacggcgattaaggaccttggctatacgattaagacaatggaggaattaaaggaaattggcgttacattttctttagatgactttggaacgggatattcgtcgcttaatttccttaaaatactgccaattaattcacttaagatagacaaggttttcatagattccatgatgagcaacaatgtggacaagactataacggaagcatttatcaagatggcacaagttcttgacatggtggtagtggcagagggagttgaacttgaagaacaagacaagtttctccagatgataaaatgcaatatagcgcaagggtacctgtacagcaagccggtgttggcggaagaggcacttgagatactgaggaagtcgtag

SEQ ID NO: 77148 - protein, 131 aa, Unknown
  Obtained from environmental sample
  DOMAIN (1)...(118): EAL domain
  misc_feature (1)..(131): Xaa is any amino acid
MELEITEQTAIKDLGYTIKTMEELKEIGVTFSLDDFGTGYSSLNFLKILPINSLKIDKVFIDSMMSNNVDKTITEAFIKMAQVLDMVVVAEGVELEEQDKFLQMIKCNIAQGYLYSKPVLAEEALEILRKS

SEQ ID NO: 77149 - DNA, 831 bp, Unknown
  Obtained from environmental sample
  misc_feature (1)..(831): n is a, c, g, or t
atgtttacaagaaacaaatggtttgtagtgggccttgcctttgcggtcgctctggcgtttgccattgttcttactacctgcgatgaattaggttataaggcggagtctgctgtaagcgttgttgacgcggcggtgccggtaataacaaaacaacctgtatccggtatatataacctgggcgaagacgcggaaataacggtggaattaacggtggaagccgaggttgatgatgaaggcgagctaagttaccaatggtatttctccgatgacgcgcgatacgcggaaggcgaaggtgatgaacttgagggcgccacagaggcgaccctcgaattaaaacttgaagagggattgtatcagttttatgtaattgtaaccaacaccaatgatatggtaaacggcgttacggaagcgtccgtaaaaagcgatctgatccgcgttaccattaacgatcccggaaacgccccctacccggatattaccggggaaccgaccggcatcgcttatgactttgttgaaggcgaaacgataacgccggataagctttccgtaaccgtgtcggcgccggaaaatggcgtattgtcgtatcaatggtactcttcaaccacttttcccacagacaatgataaaggagatagaatagaaggcgcaacagagaaagaatatcagccgccggaaattgaggccgaaggaaccacgtactactatgtcgtcgtcaccaatacctggaatgaggcgccaagacgtaaagtgtcagttgtcaccagttccccggcggccatctcggtggttacaactaacgcaaccatcacgatcaatacctcggccatctga

SEQ ID NO: 77150 - protein, 276 aa, Unknown
  Obtained from environmental sample
  SIGNAL (1)...(21)
  misc_feature (1)..(276): Xaa is any amino acid
MFTRNKWFVVGLAFAVALAFAIVLTTCDELGYKAESAVSVVDAAVPVITKQPVSGIYNLGEDAEITVELTVEAEVDDEGELSYQWYFSDDARYAEGEGDELEGATEATLELKLEEGLYQFYVIVTNTNDMVNGVTEASVKSDLIRVTINDPGNAPYPDITGEPTGIAYDFVEGETITPDKLSVTVSAPENGVLSYQWYSSTTFPTDNDKGDRIEGATEKEYQPPEIEAEGTTYYYVVVTNTWNEAPRRKVSVVTSSPAAISVVTTNATITINTSAI

SEQ ID NO: 77151 - DNA, 594 bp, Unknown
  Obtained from environmental sample
  misc_feature (1)..(594): n is a, c, g, or t
atggccgcggccgaggttctggtccaggaccgggacgtgcccccgccgctcctggagaaattcctgagcaccatccacaagaacgccaaaaggctggacgccctgcttgaggacctcatctttctccacaagctggaaagcctggccgtggccgaggttccggcgaccgacctggaggagatgctgtcggaaatcaaggacctcatcgacccccagggcaaggaagtgctttacgatttcgacgccggccaggccggcgttcacgccgcccacctgttgagcctcctgaccaacctcataaccaacgcgctgaagtattccgccggcgcgaccgtcagggcgacggtgcggaaaagggaaaacaccctggtcatccaggtggcggacgaggggccgcccataccggccggggagagggaacgcatcttcgagcgtttttattcgctgtcggaatccaggaacaggcgccagtccggctccggcctgggcctggccatcgtcaagcacatagcccggcaataccgcggccgggtcgcggtttccgacaatgaatattccggcaacaccttcagcgtcgccctggttgaaaaatag

SEQ ID NO: 77152 - protein, 197 aa, Unknown
  Obtained from environmental sample
  DOMAIN (87)...(197): Histidine kinase-, DNA gyrase B-, and HSP90-like ATPase
  misc_feature (1)..(197): Xaa is any amino acid
MAAAEVLVQDRDVPPPLLEKFLSTIHKNAKRLDALLEDLIFLHKLESLAVAEVPATDLEEMLSEIKDLIDPQGKEVLYDFDAGQAGVHAAHLLSLLTNLITNALKYSAGATVRATVRKRENTLVIQVADEGPPIPAGERERIFERFYSLSESRNRRQSGSGLGLAIVKHIARQYRGRVAVSDNEYSGNTFSVALVEK

SEQ ID NO: 77153 - DNA, 720 bp, Unknown
  Obtained from environmental sample
  misc_feature (1)..(720): n is a, c, g, or t
gtgaaaacggcgggcacgccgancgtgcccggttcgttcaacgtctttctgatcaaacacggcaaagaacgctttctggtggataccggcaacggcgccntgatccccggaagaaacggacaactgccgctctgtctgaaagaggcccaaaccgccccgtcggcngtcggcaagatttttatcacccacctgcacggcgaccacatcggcggactggtcgcaaacggcgcgcccgccttccccaaggcgaaggtgtatgtggccaaggccgagtacgactattggacgaatgacgagtccgtgcaaaaggccccggaaggcaggcgcggactgttcacgcttgtccgggatgtgttgcgcgttctggaacggaataagctgctggtctttttcacgccgggcgaggtggtcgcccccggcatcgccggtgtagatctccccggccacacgccggggcatacgggcttcatgctcagttccagggacaaaaaactgttctttatcggggacttggtacacggcgagctgttgcagatgccccgcccggacattacctttgatttcgatgtggatcaggccatggccaaggcaacgcgcctgcgcgtgttcaagcagatcgcggcggagaagacgcccgtcgcggcggcgcatttgcccttcacgggcatcgggcttgtgcgggccgagggtgagggatacaagctggaagcgctgaaatag

SEQ ID NO: 77154 - protein, 239 aa, Unknown
  Obtained from environmental sample
  DOMAIN (12)...(217): Metallo-beta-lactamase superfamily
  misc_feature (1)..(239): Xaa is any amino acid
MKTAGTPXVPGSFNVFLIKHGKERFLVDTGNGAXIPGRNGQLPLCLKEAQTAPSAVGKIFITHLHGDHIGGLVANGAPAFPKAKVYVAKAEYDYWTNDESVQKAPEGRRGLFTLVRDVLRVLERNKLLVFFTPGEVVAPGIAGVDLPGHTPGHTGFMLSSRDKKLFFIGDLVHGELLQMPRPDITFDFDVDQAMAKATRLRVFKQIAAEKTPVAAAHLPFTGIGLVRAEGEGYKLEALK

SEQ ID NO: 77155 - DNA, 462 bp, Unknown
  Obtained from environmental sample
  misc_feature (1)..(462): n is a, c, g, or t
atgtatgaaacaagttatcatatgaataaattcgacgaacttctcaatatcatggacaagctccgcgcgggctgtccgtgggataaggcgcaaaccctcgaatctttgcggtatctcacgattgaagagacctacgaactttccgatgcaatcatcaacaacgatttggacgaaataaaaaaagaactcggcgacctgctccttcatgttgtattctacgccaaaatcggcgaagaaaaaaaagcattcacaatcgacgatgtgttggaaggcctcaatcaaaagctaatctcacgacatccgcatattttttcgaatgtgaaagccgaaacgtccgacgatgtgaaagccaattgggaagccatcaaacttaaagaaaaaggtcgaaaaaccgttttggaaggcgtgccgaaaagtttaccagccatggtgaaagcgacgaatcagaaagcgggcgcataa

SEQ ID NO: 77156 - protein, 153 aa, Unknown
  Obtained from environmental sample
  DOMAIN (31)...(104): MazG nucleotide pyrophosphohydrolase domain
  misc_feature (1)..(153): Xaa is any amino acid
MYETSYHMNKFDELLNIMDKLRAGCPWDKAQTLESLRYLTIEETYELSDAIINNDLDEIKKELGDLLLHVVFYAKIGEEKKAFTIDDVLEGLNQKLISRHPHIFSNVKAETSDDVKANWEAIKLKEKGRKTVLEGVPKSLPAMVKATNQKAGA

SEQ ID NO: 77157 - DNA, 402 bp, Unknown
  Obtained from environmental sample
  misc_feature (1)..(402): n is a, c, g, or t
atgnaaatttgtaataacacaaccgaaaattttgttttgctcggcgacagtaacgatgctgcaaacgctgaaacgattgtcaattctaccggaaaccatgtattcaatgcttgcggactgttaaatttaaatcaatccgcaaccgttgttcaacacgcaaaacatctcatttcaggcgacacaggattgatgcacatcgcagcagcattgaaaaaaccggttgtctccgtatggggcagtacggttcccgaattcggcatgtacgcctattttccgaaagggttggaacatctgagcaaaatcgttcaagtcgaaaacttgccatgccgtccttgctcaaaactcggttataaacagtgtccgaaagggcattttaaatgtatgaaacaagttatcatatga

SEQ ID NO: 77158 - protein, 133 aa, Unknown
  Obtained from environmental sample
  misc_feature (1)..(133): Xaa is any amino acid
MXICNNTTENFVLLGDSNDAANAETIVNSTGNHVFNACGLLNLNQSATVVQHAKHLISGDTGLMHIAAALKKPVVSVWGSTVPEFGMYAYFPKGLEHLSKIVQVENLPCRPCSKLGYKQCPKGHFKCMKQVII

SEQ ID NO: 77159 - DNA, 525 bp, Unknown
  Obtained from environmental sample
  misc_feature (1)..(525): n is a, c, g, or t
atggattttcttcaactcgcccaagaaaggtattccgtgcggcaatatgcttccacccccgtggaagaggaaaaattgcaaaaaattttggaagccgggcgtgtcgcgcccacagcggcgaactgccagccgcagcgttttcttgttgtcacggcgcgagaaggtcttgccaaactcggcgaagcggccggcatccacggcgctccgctggcgatagtcgtatgctgcctgaaggacaaagcctggaaaaggccccaagacggacattccatggtggatattgacgcgaccatcgccacaacgcatatgatgcttcaggcttggtcggaagggatcggttcctgctggatcacctggtttgatccggcgggggtgcgtagcgcattttctttgccggataatgtcattccggtgaacatccttgcgcttgggtatgccgagggacagaaacaaagcccgtgccgccatcaacagcaacgcattccccttgccgatatggtatggagagaaagtttgaagctatag

SEQ ID NO: 77160 - protein, 174 aa, Unknown
  Obtained from environmental sample
  DOMAIN (7)...(145): Nitroreductase family
  misc_feature (1)..(174): Xaa is any amino acid
MDFLQLAQERYSVRQYASTPVEEEKLQKILEAGRVAPTAANCQPQRFLVVTAREGLAKLGEAAGIHGAPLAIVVCCLKDKAWKRPQDGHSMVDIDATIATTHMMLQAWSEGIGSCWITWFDPAGVRSAFSLPDNVIPVNILALGYAEGQKQSPCRHQQQRIPLADMVWRESLKL

SEQ ID NO: 77161 - DNA, 588 bp, Unknown
  Obtained from environmental sample
  misc_feature (1)..(588): n is a, c, g, or t
atgaaaaagccgataccattattttttgtaatatttttatttatgttttcgatactttctgtggcgcaggaattacccgcagaacctgaaacaggagagccttctataggtgaaagttctgcggcggcagtcggcgctaatcctatgaaagaaattaaagatgagattctgaatgaaacaggcgtggaaggagttttaacggaaaacagggcggggacagaaaaaaatgagtctgttattgatacgccgaaagaagacgataaacaatttattcaaagaatagcgagcgttataataattattgcatctctggcggcgctgatttggcttatatggtttttattcagcctgttaacaagaaaaatagatgattggggtaatgaaaaaataaaaccgcttgtaataagaaagctgaaacttcttacaacaaagcagattatttccgtaattcacgctttattgcgattattaaaatattttataactatctttatactttttcttacagtgccgctggcttttagttttttcccctcaacaagggaacttgcatcaacaatattcagtcatattttaacgccctgttaa

SEQ ID NO: 77162 - protein, 195 aa, Unknown
  Obtained from environmental sample
  SIGNAL (1)...(22)
  misc_feature (1)..(195): Xaa is any amino acid
MKKPIPLFFVIFLFMFSILSVAQELPAEPETGEPSIGESSAAAVGANPMKEIKDEILNETGVEGVLTENRAGTEKNESVIDTPKEDDKQFIQRIASVIIIIASLAALIWLIWFLFSLLTRKIDDWGNEKIKPLVIRKLKLLTTKQIISVIHALLRLLKYFITIFILFLTVPLAFSFFPSTRELASTIFSHILTPC

SEQ ID NO: 77163 - DNA, 363 bp, Unknown
  Obtained from environmental sample
  misc_feature (1)..(363): n is a, c, g, or t
atggcagtaacagaagaacttttgactataaaggaagcaagcgactgggcgacagagtatacccgaaaaacagttacggtctccaatatttcgtatctcatccaatatgggcgaattaaaaaaattggcgacaacgggtctgtcaaaatcgccaagcaagatctggttaattactacaaatcatacaacggacaccgcgagatatcatggaaaaatcaactcgggagtgatttaaactgggctttatcgtttgatcaatacaaagaagctgaaacgacaaagcatgtacaccgtttacatccatataaaggcaaatttattccacagcttgttgagtattttttggacagcccatacggataa

SEQ ID NO: 77164 - protein, 120 aa, Unknown
  Obtained from environmental sample
  misc_feature (1)..(120): Xaa is any amino acid
MAVTEELLTIKEASDWATEYTRKTVTVSNISYLIQYGRIKKIGDNGSVKIAKQDLVNYYKSYNGHREISWKNQLGSDLNWALSFDQYKEAETTKHVHRLHPYKGKFIPQLVEYFLDSPYG

SEQ ID NO: 77165 - DNA, 405 bp, Unknown
  Obtained from environmental sample
  misc_feature (1)..(405): n is a, c, g, or t
atgctgcgccgggtggcaaagaaatataaaagccaggcgcttgaagcggatgccctgcattttgccagcgacatctggtcttcatcggtcgtgcttgtcggacttggcgcaacatggctgtcgcaacaacttgcccccgcacatcccctgcgcccctggcttacgcacgcggatgcttttgcggctctcacggtagcctgcatcgtgcttcacgcttgttacacgcttgccaaaaaagccattgacggcctgatggatcacgaccagggcgaagaangccgacgcatccggcaatatctcgcggacgtgccgggaattgcgcatgtgggtcgggtgcgtagccgcgtcagcgaaccgatcattttgtggatctcacatccgaatgaacgcggatcttgggcttga

SEQ ID NO: 77166 - protein, 134 aa, Unknown
  Obtained from environmental sample
  misc_feature (1)..(134): Xaa is any amino acid
MLRRVAKKYKSQALEADALHFASDIWSSSVVLVGLGATWLSQQLAPAHPLRPWLTHADAFAALTVACIVLHACYTLAKKAIDGLMDHDQGEEXRRIRQYLADVPGIAHVGRVRSRVSEPIILWISHPNERGSWA

SEQ ID NO: 77167 - DNA, 516 bp, Unknown
  Obtained from environmental sample
  misc_feature (1)..(516): n is a, c, g, or t
ttggggttttccgtttcgccgggaattccgggggttttgggacaaggcggttcggggcgtttaacggcgcttggggttgcgctggtttgggacaagccggagtctccacgtgttgagcggcctgagcagatggaagaattgaagaaaactgtcgcacgtgtgacaagcgcaagcggttgcctcgacgaaaccgaacgcgccgtctacgctcaagtacgtgaaatatttactgtacgcaataaggtggcctgcacctcttgcgcctactgcatgccgtgcccgtccggggtgagcatccccgccatcttccagttatacaacgacatggctctgtttgacgactggttttataccgcgactcaatacaacaatctcgcggtcgcgggagcgcatgccgaactctgcgcaaaatgcgggcagtgcgcggaacaatgcccgcagcgtctgccgataccggaaaaacttcaagaagcgcatgcaatttttcaacccttgcgtgagaaggtattaagataa

SEQ ID NO: 77168 - protein, 171 aa, Unknown
  Obtained from environmental sample
  DOMAIN (128)...(151): 4Fe-4S binding domain
  misc_feature (1)..(171): Xaa is any amino acid
MGFSVSPGIPGVLGQGGSGRLTALGVALVWDKPESPRVERPEQMEELKKTVARVTSASGCLDETERAVYAQVREIFTVRNKVACTSCAYCMPCPSGVSIPAIFQLYNDMALFDDWFYTATQYNNLAVAGAHAELCAKCGQCAEQCPQRLPIPEKLQEAHAIFQPLREKVLR

SEQ ID NO: 77169 - DNA, 387 bp, Unknown
  Obtained from environmental sample
  misc_feature (1)..(387): n is a, c, g, or t
atggactctcccaacaggaacggtatgagacacatgcgcgccatagtcgccctcgtttgcacagtccacgcgctgctcttctgcgccccgcttgcagcgcagcagaagcagcgggtggccatcctggagccatacggcaaccaggcggtgacgaccatgaacaagaggaacgtcattggggcgctcagggaaatcctcgtcgaaacggggaaatacacgaccatagaccgcggcagcattgacaggatcatggaggagcagcgtttccagagaagcgcgttctcagaccccgaaaaggccaagcggctgggcaagctgctgggggcggacgccatctgtgtcacagacctgttcagcgcggcgggggaattcacattgagaccctga

SEQ ID NO: 77170 - protein, 128 aa, Unknown
  Obtained from environmental sample
  misc_feature (1)..(128): Xaa is any amino acid
MDSPNRNGMRHMRAIVALVCTVHALLFCAPLAAQQKQRVAILEPYGNQAVTTMNKRNVIGALREILVETGKYTTIDRGSIDRIMEEQRFQRSAFSDPEKAKRLGKLLGADAICVTDLFSAAGEFTLRP

SEQ ID NO: 77171 - DNA, 327 bp, Unknown
  Obtained from environmental sample
  misc_feature (1)..(327): n is a, c, g, or t
atgtacattataaacaataataaaaaacttgcggctttcttgccgcaatatgtaatgaacataaaaggagcggtagtaatgccagaaatcagcgttttttatgggatccgagtgacaatgaatttcaaagatcatgctccccctcatatacatgcagcatatggtgaatacgaagcgctttataacataaaagatttattactgatcaaaggaaatttaccgaataaagcgcagttcttagtattggaatggatggagcaatatcaacaagaactcttacgcatgtgggaagatgaatcaatacatcggttaccgccactggtataa

SEQ ID NO: 77172 - protein, 108 aa, Unknown
  Obtained from environmental sample
  misc_feature (1)..(108): Xaa is any amino acid
MYIINNNKKLAAFLPQYVMNIKGAVVMPEISVFYGIRVTMNFKDHAPPHIHAAYGEYEALYNIKDLLLIKGNLPNKAQFLVLEWMEQYQQELLRMWEDESIHRLPPLV

SEQ ID NO: 77173 - DNA, 390 bp, Unknown
  Obtained from environmental sample
  misc_feature (1)..(390): n is a, c, g, or t
gtggagaggcggttaaatactgcggaagtggcggccttgtatcaaatatctccacggaccctacgctattatgaagaagttgggattatgaaaagtcatcgtaaaactgattcaaaatatcgtgagtatgaccgagaacaatgcgaacggttagaggttatacttttactccgccgtctttcctttagtgtaaaaatgattgtaaagctgttgcatggtgacgctgcacattttcgaactgtacttcacgaaaaaattgcagacagcagtaaaaagctattagaagtacgggaaaccgaccgtttgttgtgtgatttggcaacggaattagcacataaaccaattgttgcattaaacgctgttgccatcttgagcagataccaattataa

SEQ ID NO: 77174 - protein, 129 aa, Unknown
  Obtained from environmental sample
  DOMAIN (6)...(43): MerR family regulatory protein
  misc_feature (1)..(129): Xaa is any amino acid
MERRLNTAEVAALYQISPRTLRYYEEVGIMKSHRKTDSKYREYDREQCERLEVILLLRRLSFSVKMIVKLLHGDAAHFRTVLHEKIADSSKKLLEVRETDRLLCDLATELAHKPIVALNAVAILSRYQL

SEQ ID NO: 77175 - DNA, 621 bp, Unknown
  Obtained from environmental sample
  misc_feature (1)..(621): n is a, c, g, or t
atgaataaaattttgctaatctcgttaattcttattcagaccgtattctcgcaaacccagtccgcagaccagattttgaaccaagcgaattcattgtataacaacggtcgctatgcacaggcaattttgctttatcgcaaagcggaggagagaggcgcaaaccccgttgctaccagtttcaataccgcaaacagcctctttcagctcaacaaattcccagaagcggcggcggcgtatcgcaaggcggtgaatttttcggatggggaatttgcgcccgcactttctaatttggcggcggtgctttacagaataggtgaatacccggagagcatcgctatgtatcgcagggcattgagtttagacccgagcaacgcttccgcctggatttatttggcggaggcttatcaaaaaacaggcgataatgcaggggctttgcaagcattggaaaaagctaggcaaatagaccctcaagacatctccctcgtttaccagcaaagcgagatacatatagcgatggaagaatttgaagccgctgtaaatttggttcgggatgggtacgcaaaaaatcctgaagaaacggattttctaatatacttaggcgacattcacaggtttgaataa

SEQ ID NO: 77176 - protein, 206 aa, Unknown
  Obtained from environmental sample
  SIGNAL (1)...(21)
  DOMAIN (62)...(169): Bacterial transcriptional activator domain
  misc_feature (1)..(206): Xaa is any amino acid
MNKILLISLILIQTVFSQTQSADQILNQANSLYNNGRYAQAILLYRKAEERGANPVATSFNTANSLFQLNKFPEAAAAYRKAVNFSDGEFAPALSNLAAVLYRIGEYPESIAMYRRALSLDPSNASAWIYLAEAYQKTGDNAGALQALEKARQIDPQDISLVYQQSEIHIAMEEFEAAVNLVRDGYAKNPEETDFLIYLGDIHRFE

SEQ ID NO: 77177 - DNA, 873 bp, Unknown
  Obtained from environmental sample
  misc_feature (1)..(873): n is a, c, g, or t
atggaagcgccgccgtgggatctgatagtgttcgacgaggcgcaccacctaacggccctgcgccacagcggcagaaaggtgaaaaagacagaaaactacaagctgggcgaggcccttggagggcgcaccagggacatcttgatgctttcggccacgccgcaccaaggggatcactttaggttctggatgctgacgcagttgctggatccggggcttttctgcgacccggccgacatggtggaaaaccgccacaggctaaaccaaatgatgatccgacggacaaaggcggacgcctgccggcccgacggctcgcccctgtttgcgcggcgccaggtgacaacagaatctagcatgatgtcagccgaggaaaggtttttttacgacaagctgcgcgactacctgatggacggcttcaacctggcccgccgccagggcaaccagggccgcgcgctgggctttttgatggttatattccaaaaaatcgcggccagcagctttgcggcggtgcgccgcacgcttagaaaacggttgcttgcgctgacgctgcacgaatcgctgctgcgggacaaggctctggatgccgagggccgcgagcagttgctgtatgaagcgcgggagatgatacacaacgacatgggcctgccccgcgacaatctgggccgcatcgaggccgaccgcattttggccgacatgaagtttaggcttgcaaaaaaactggacgaggaaaggctggaacaggcggcggacaaccttggcgcggaaaggcttgccctggaattcgaggacgccgcccccatcgcggtgagcctggcgctgcccaaagagcgcgagcgcatacgcgaattctcgcggccagcccgcaactctcgataa

SEQ ID NO: 77178 - protein, 290 aa, Unknown
  Obtained from environmental sample
  misc_feature (1)..(290): Xaa is any amino acid
MEAPPWDLIVFDEAHHLTALRHSGRKVKKTENYKLGEALGGRTRDILMLSATPHQGDHFRFWMLTQLLDPGLFCDPADMVENRHRLNQMMIRRTKADACRPDGSPLFARRQVTTESSMMSAEERFFYDKLRDYLMDGFNLARRQGNQGRALGFLMVIFQKIAASSFAAVRRTLRKRLLALTLHESLLRDKALDAEGREQLLYEAREMIHNDMGLPRDNLGRIEADRILADMKFRLAKKLDEERLEQAADNLGAERLALEFEDAAPIAVSLALPKERERIREFSRPARNSR

SEQ ID NO: 77179 - DNA, 648 bp, Unknown
  Obtained from environmental sample
  misc_feature (1)..(648): n is a, c, g, or t
gtgcagctaatgaaagagttgaatgatgaattaacaagcattaacttaataaagacgcagtcaaagaaagaactgaaaaaaacaaagtccgagcgtacagcggcaattgttctgggaataatctgtacgatgatctctattattgttggactttcggcacacagcgacatggaaaattcttattattccatgagatcgcaatacaatcaggtaaaatctaactatgataaattacttgccgagcatgaggcgttaaaaagcttctggaaaatcaatgtaacatcaatcaaggttgggaatacagataaagactaccgttggcttaccaacccgggggaaccgctgtcttcagcgcagatgaggtacttagcgcctgttattaccttaaactcaaccgtcagtgaagatgcaacattttatgtaaaaattatcaatccttatggaactctttttaatgattcttcgatttccccaaatgggtttacttattccacaacaactcgaataaatagcggttccaatcagtcgcttaatttatctggctggggaaatagtgaatccagtatttatatggcaggtacatggacggttgaagtttggtacaacgacgtatgcctgaaatcggaaaaaattgtaattggacagtag

SEQ ID NO: 77180 - protein, 215 aa, Unknown
  Obtained from environmental sample
  misc_feature (1)..(215): Xaa is any amino acid
MQLMKELNDELTSINLIKTQSKKELKKTKSERTAAIVLGIICTMISIIVGLSAHSDMENSYYSMRSQYNQVKSNYDKLLAEHEALKSFWKINVTSIKVGNTDKDYRWLTNPGEPLSSAQMRYLAPVITLNSTVSEDATFYVKIINPYGTLFNDSSISPNGFTYSTTTRINSGSNQSLNLSGWGNSESSIYMAGTWTVEVWYNDVCLKSEKIVIGQ

SEQ ID NO: 77181 - DNA, 702 bp, Unknown
  Obtained from environmental sample
  misc_feature (1)..(702): n is a, c, g, or t
atgggcgagcgggggcggcgcgtccaccacagcccggactcttactggcaatcggccctgcaggctggctggctcccggtcaagtatgacgagggcgcattggacgagctgctgccgtgcgaggttcgcaaggtcgccaacggcgagatcaacctgcacgggaacaagtattattcaaagggccttgaggagtggcacgggctggaggtttcagtggcgtttgacccatgcagcgcggagcgcgtgtgggtgcgcgaccagaaaggcaacttcattggcgaggccgcgctggacgggaacaagggcgactacttctccgagtcattcagagaaaaagccaatgacgggcgcaacgccgccgccatccgccgcgcccagcaaaagacggcgcaaaagatgggcattgatacaaagggcctgtcgctggaggcggtggcggacgccatatcgcagggcatggggggcgggcccatttttggggtctccgcgccggacatggacgaggagcagcgggaggccataagggagcggcttgcaagggcatccgcgccgctggaggcccccaaagacaaatacatccgcctcctgcgcgatggggcgcggagcggcgaggacgttgattttatgggcgagtttgaaacatctgacgagggccgcgccataaagcggttctattccaaacacatagcanaggccgaatag

SEQ ID NO: 77182 - protein, 233 aa, Unknown
  Obtained from environmental sample
  misc_feature (1)..(233): Xaa is any amino acid
MGERGRRVHHSPDSYWQSALQAGWLPVKYDEGALDELLPCEVRKVANGEINLHGNKYYSKGLEEWHGLEVSVAFDPCSAERVWVRDQKGNFIGEAALDGNKGDYFSESFREKANDGRNAAAIRRAQQKTAQKMGIDTKGLSLEAVADAISQGMGGGPIFGVSAPDMDEEQREAIRERLARASAPLEAPKDKYIRLLRDGARSGEDVDFMGEFETSDEGRAIKRFYSKHIAXAE

SEQ ID NO: 77183 - DNA, 912 bp, Unknown
  Obtained from environmental sample
  misc_feature (1)..(912): n is a, c, g, or t
ttgaccggagtttactgccttgagattaccgaagcttcgccattgcccagtatggatcagacccaggatatgattaccgaagaagttttttcggcctacggaattcctgaatacctggacaagctcccaaaaaaaattgcccgttgctccgaaattgtgggatacgtaacggaaaattgtgcggctaaaacaggactgaaagcgggaacgccggtggtgggaggattggcggatgttgttgcttccgttgtatcagttggcgtaaccgacgaaagcaagtggggtattattgttggaacttggggtattaacgcttttgtaaaacagcagcccattgcttcgccggatattttcatgctttttcactattgtattgacggcttatgggaattcatggaaggcagttccacatccgccacgaatctggaatggtttattgattgttttttggacagggagaaagaagaacacatttatgtaaaatgcaaccagcttgtggaacaggcgccgtggaaagattcaattattttcctgccgttcctctacggaaccaatgttaacctggatgcgaagtctgcttttattgggcttaggggaaaccacacccccgcttccatggtcagggctatctatgaaggggtggttttctgtcactggtatcatcttgaaaagcttacaaaattcgctcccatgcccaaagtgatccgtatggccggcggcgccgcccggtcaaagacctggatgcagctgttcgccgatatccttggggtaagggtggaagttcccgaagcggaagaattgggcgctttgggggccgccatgctcgccggagtgggagttggagcctacaaggacgtggttgagtcggtaacgcctgtaccaaaatcaggtcctctatctcggccgatctga

SEQ ID NO: 77184 - protein, 303 aa, Unknown
  Obtained from environmental sample
  DOMAIN (88)...(301): FGGY family of carbohydrate kinases, C-terminal domain
  misc_feature (1)..(303): Xaa is any amino acid
MTGVYCLEITEASPLPSMDQTQDMITEEVFSAYGIPEYLDKLPKKIARCSEIVGYVTENCAAKTGLKAGTPVVGGLADVVASVVSVGVTDESKWGIIVGTWGINAFVKQQPIASPDIFMLFHYCIDGLWEFMEGSSTSATNLEWFIDCFLDREKEEHIYVKCNQLVEQAPWKDSIIFLPFLYGTNVNLDAKSAFIGLRGNHTPASMVRAIYEGVVFCHWYHLEKLTKFAPMPKVIRMAGGAARSKTWMQLFADILGVRVEVPEAEELGALGAAMLAGVGVGAYKDVVESVTPVPKSGPLSRPI

SEQ ID NO: 77185 - DNA, 366 bp, Unknown
  Obtained from environmental sample
  misc_feature (1)..(366): n is a, c, g, or t
atgtttttgaattttgcccgacagcgatttacggcaatggccgtgggcgtggtttccgccgaagtactgcggctgggactggaacaaaatttgtatcaggggtttatggttaaaatcggccgggtcgctgccggtctgctcctgtacagcgagcttaatccgcagacggccatcgtgcattttgaattgatagatgaagcttatgacggcatagcgcagtttatgaataatcatctgggtaagattttgtccggcaagtataaatttatcaaccgcgagcaggatttgggtataccgggcttgcgtaaatccaagctgtcctacaatccgtatcggttggtcaaaaaatatgccgtaaggttttga

SEQ ID NO: 77186 - protein, 121 aa, Unknown
  Obtained from environmental sample
  misc_feature (1)..(121): Xaa is any amino acid
MFLNFARQRFTAMAVGVVSAEVLRLGLEQNLYQGFMVKIGRVAAGLLLYSELNPQTAIVHFELIDEAYDGIAQFMNNHLGKILSGKYKFINREQDLGIPGLRKSKLSYNPYRLVKKYAVRF

SEQ ID NO: 77187 - DNA, 864 bp, Unknown
  Obtained from environmental sample
  misc_feature (1)..(864): n is a, c, g, or t
atgggagatatttttgtaataaaaaataaacagataactcaaagcatgaaaaataaaattgcaaagatagtccgtgtcgatatcgacgataatggtcagttatatttttggaacatttataattttgagcatataccggtggaagtcatcagtcatatttatcagtattttatggaaaaagatcagggggcaatatttacccccatacttctggtaaatttaatgctggatcaggctataccgctggaaagaattaaagggaatgaaaaaatatttgatccaacctgtggatcgggtatttttcttgtttcagcgttccggcgtttgatttatgttaatcaacaaaaaaacaaggattggcttactccacagacgcttatagaactattaaaaaattctatcttcggagttgaattacaggaagaagcagctcatatcacttcttttagcctggcgttagctgtatgtgatgccttaaaaccggatataatttggcgggaattaaaatttgaaaaaacagtagggcataatatttttatcggtgattttggcgaaaggggaaaagacgcatttaaagcaagcagatctgatactggttttgatattattttaggtaatgctccgtttataaaaaaactaacccctgctattattgaagacttaagtaaaagcaacaaaactatacctgataaacaattagcgtattatgtattagttgccagcagtgaaaaatatctttctgaatccggtaaaatatgcatgattcagccttatggatttttatataacgcacagacagtatcgatgcgttgtaatttttttaataattttacagttaataaaattcttgatttgtttcaataa

SEQ ID NO: 77188 - protein, 287 aa, Unknown
  Obtained from environmental sample
  misc_feature (1)..(287): Xaa is any amino acid
MGDIFVIKNKQITQSMKNKIAKIVRVDIDDNGQLYFWNIYNFEHIPVEVISHIYQYFMEKDQGAIFTPILLVNLMLDQAIPLERIKGNEKIFDPTCGSGIFLVSAFRRLIYVNQQKNKDWLTPQTLIELLKNSIFGVELQEEAAHITSFSLALAVCDALKPDIIWRELKFEKTVGHNIFIGDFGERGKDAFKASRSDTGFDIILGNAPFIKKLTPAIIEDLSKSNKTIPDKQLAYYVLVASSEKYLSESGKICMIQPYGFLYNAQTVSMRCNFFNNFTVNKILDLFQ

SEQ ID NO: 77189 - DNA, 795 bp, Unknown
  Obtained from environmental sample
  misc_feature (1)..(795): n is a, c, g, or t
gtggcgcacgtcgaggcgggactgcgcacaagcaatatttattcgccgtttccagaagagggcaacagaaagatgatagacgcgataagttcgtttctgtttgcgccaacaaagcgcaacgaggaaactctgctgtcggagaatataaaccaatcgaaaatttttgttaccggaaatacggttatagacgcgctgtttgaaatgcgcaagcgaatagacgccgacgaaaatctgcgtaaaaatatcgcagataatttaagcaaatcagggtattttattgcgcaaaacagaaagatagttcttattacgacccaccgcagagaaaatataggcgaaaatcttgccgaaatatacgccgcgataaaaattcttgcagaaaataacgcggactgcgactttttggtggttttgcatccaaatcccgtgctggcgcagattatcgaaccgatagtttcgcagacgaacaatataaaaatcctgcgcaacgtcgattattattcatttatgtttttgatgagcaaggcgtatatagttatgaccgattcgggcggcatacaggaagaagcgccgagtttcggcgtacccgtgtttatcctgcgaaacgagaccgaacgtcccgaaggcgtggagtgcggcgtagcaaaacttttgggcgccgataaggattttatcgtatcgcaggtgtcgcaggttttgagcgacgcgcaatttcacgattctatgcgctgtaaacaaagtccttacggcgacgganaagcgtcgcaacgaatcgcggatgttttagaanagcaataa

SEQ ID NO: 77190 - protein, 264 aa, Unknown
  Obtained from environmental sample
  DOMAIN (1)...(262): UDP-N-acetylglucosamine 2-epimerase
  misc_feature (1)..(264): Xaa is any amino acid
MAHVEAGLRTSNIYSPFPEEGNRKMIDAISSFLFAPTKRNEETLLSENINQSKIFVTGNTVIDALFEMRKRIDADENLRKNIADNLSKSGYFIAQNRKIVLITTHRRENIGENLAEIYAAIKILAENNADCDFLVVLHPNPVLAQIIEPIVSQTNNIKILRNVDYYSFMFLMSKAYIVMTDSGGIQEEAPSFGVPVFILRNETERPEGVECGVAKLLGADKDFIVSQVSQVLSDAQFHDSMRCKQSPYGDGXASQRIADVLEXQ

SEQ ID NO: 77191 - DNA, 600 bp, Unknown
  Obtained from environmental sample
  misc_feature (1)..(600): n is a, c, g, or t
ttgagcggcttgctggccgaagcgctaacgcatctaggttatcaggtgcatatcaaatggcccaacgacataatccaaagtcaaaataacgactattcctgccgcagggcggactggcgcaaagtctccggaattcttctggaagaatgtgccggaattttgattgccggaataggcgttaatcttgtaagcgcgccaccagatgcggccttgcgcgaaggcgccgccctgtcggccggagtgttgcaggcgcggaacaggcaagctccaggcaaagataccaaggacgcggcggtaaaagaaagcgcgagtgccggcacgcctgcgcctctattcaattggtggtctcagcttgcgaatgaaacattttcctgctacgaacagaaagtcgccggaaaaaaatcctggtggcctgagcttgccgaaaagcatcttgccttccaaggctgtctggttcgagtggatgaaacgcctcccggggccaacggtcaaggcgtcattgatggtctttgcgtatccggcgcgttacgtctgcgcaccccatccgggctcatgacttttttgaacggttcacttatgccatgcggcgtctgtgcttga

SEQ ID NO: 77192 - protein, 199 aa, Unknown
  Obtained from environmental sample
  misc_feature (1)..(199): Xaa is any amino acid
MSGLLAEALTHLGYQVHIKWPNDIIQSQNNDYSCRRADWRKVSGILLEECAGILIAGIGVNLVSAPPDAALREGAALSAGVLQARNRQAPGKDTKDAAVKESASAGTPAPLFNWWSQLANETFSCYEQKVAGKKSWWPELAEKHLAFQGCLVRVDETPPGANGQGVIDGLCVSGALRLRTPSGLMTFLNGSLMPCGVCA

SEQ ID NO: 77193 - DNA, 855 bp, Unknown
  Obtained from environmental sample
  misc_feature (1)..(855): n is a, c, g, or t
atgagcgaatcaaaaaataagataaagctgttcgggcaaaaacaggttcgcgccgaatgggatgaagaaaaggagaaattgtggtttcccattgttgacgtggtcggtgtcttgaccgatcagccaacgccgcgcggggcaagtttgtattggggcaaactgaaacagaggctgcaagatgaaggttctgaactgttgacaaaatgtcaacagttgaaaatgacggcttccgacggcaaaaaacggttgaccgatgtggccgatactgaacaggttttgcgtttagtccagtctattccgagcaaaaaagccgaaccattcaaactgtggcttgccaaggtaggcaatgaaaggattgacgaaacgcttgatccagaactgtctatcaaccgcgcaattcagaattatcggcgtcttggatacagcgaaagctggatcaatcagcgcgtcaagtccatagaagtccgcaaggccctgacggacgaatgggacaagagcggagtccggcagggggaggaatatgccgtgctgaccgacctgatgagcaaaacctggagcggcatgaccacgcgggaatataagcgattcaaaggacttaagaaggaaagcctgcgcgacaacatgaccaacaccgagctggtgctgaacatgttggcggaagtcgctgcgacagatatttctgtggaacggcagccggtgggcttcgaggaaagcgcagctgtcgccgaagagggcgcaaaagctgcgcaagtcgcccgcaaacagcttgaaaaaagcactggaaaatccgctgtcagcccgctgaacgcacagcaccgggaacaggatgtgctggaaggggaaacaggctcatga

SEQ ID NO: 77194 - protein, 284 aa, Unknown
  Obtained from environmental sample
  misc_feature (1)..(284): Xaa is any amino acid
MSESKNKIKLFGQKQVRAEWDEEKEKLWFPIVDVVGVLTDQPTPRGASLYWGKLKQRLQDEGSELLTKCQQLKMTASDGKKRLTDVADTEQVLRLVQSIPSKKAEPFKLWLAKVGNERIDETLDPELSINRAIQNYRRLGYSESWINQRVKSIEVRKALTDEWDKSGVRQGEEYAVLTDLMSKTWSGMTTREYKRFKGLKKESLRDNMTNTELVLNMLAEVAATDISVERQPVGFEESAAVAEEGAKAAQVARKQLEKSTGKSAVSPLNAQHREQDVLEGETGS

SEQ ID NO: 77195 - DNA, 339 bp, Unknown
  Obtained from environmental sample
  misc_feature (1)..(339): n is a, c, g, or t
gtgcttttttcaagctgtttgcgggcgacttgcgcagcttttgcgccctcttcggcgacagctgcgctttcctcgaagcccaccggctgccgttccacagaaatatctgtcgcagcgacttccgccaacatgttcagcaccagctcggtgttggtcatgttgtcgcgcaggctttccttcttaagtcctttgaatcgcttatattcccgcgtggtcatgccgctccaggttttgctcatcaggtcggtcagcacggcatattcctccccctgccggactccgctcttgtcccattcgtccgtcagggccttgcggacttctatggacttgacgcgctga

SEQ ID NO: 77196 - protein, 112 aa, Unknown
  Obtained from environmental sample
  SIGNAL (1)...(21)
  misc_feature (1)..(112): Xaa is any amino acid
MLFSSCLRATCAAFAPSSATAALSSKPTGCRSTEISVAATSANMFSTSSVLVMLSRRLSFLSPLNRLYSRVVMPLQVLLIRSVSTAYSSPCRTPLLSHSSVRALRTSMDLTR

SEQ ID NO: 77197 - DNA, 444 bp, Unknown
  Obtained from environmental sample
  misc_feature (1)..(444): n is a, c, g, or t
gtggaagggctggcggtcggggatatccatcaacgtgctgccctgaccgtgcaggtactgccgttcgtacggcaggaacaatatgaccgcctgctgtggtgctgcgacttcaacgcggtacgcggcgaagattcgttcgtgcgcgcccagtgggccgggaggccactgctgtggcacatctatcgccaggacgaagacatccacctggacaagctcgatgccttcctgacgctctacacgagcgccttatcgccggccgccaaagctgcagtcgtgacgctttggcaagcctggaacgctgatggcgatatgacacaaccttggaaaatgctgttggagcactggcccgaggtgtgtcagaacgccgagacgtggtgtctggaacaaggcttgcaagctgatcttgcgacggcgctggtacagttttatgaaagttggatatga

SEQ ID NO: 77198 - protein, 147 aa, Unknown
  Obtained from environmental sample
  misc_feature (1)..(147): Xaa is any amino acid
MEGLAVGDIHQRAALTVQVLPFVRQEQYDRLLWCCDFNAVRGEDSFVRAQWAGRPLLWHIYRQDEDIHLDKLDAFLTLYTSALSPAAKAAVVTLWQAWNADGDMTQPWKMLLEHWPEVCQNAETWCLEQGLQADLATALVQFYESWI

SEQ ID NO: 77199 - DNA, 660 bp, Unknown
  Obtained from environmental sample
  misc_feature (1)..(660): n is a, c, g, or t
atgctacgcagtcggctctggcgcgcaaaggcacagcaacgcacaatggctgtgccaatctcgcataagcgcttgcccatgaacccgaatgccctgaccgatcaactcggcctgtttctcgatgtactggagaccggcagtttttccgccgccgcccgccggcatccgctgaccccttcggcagtggcccgacgcatcgacagcctggaaaattcggtgggcagccgcttgtttcagcgcagcacccacgccgtggtgccgaccccggcgggcctggccttcgcggagcgagcgcggcgaatcgtcagcgagttgcagttggcgcgtgccgaggcggtgtcattgagccatgcgccagaaggcttgattcgtgtggacgccccggccgcgttcggacgacggcacttggcgccggtgattgccgactttttgaaggtgtacccggggctcgacgtgcacctgcatttgatcgacagcttcgtcgatatgcagggcgtccatctgggcaaggtcgacctggtgctgcgcgccgggcatatcgtcaacacccgcctgatcgccacccccttggccagcatcgtgcgtattgcctggcccagcccggggtacttaaaaagtcgtggcacccccacccatcccaaggaggttaagggaacataa

SEQ ID NO: 77200 - protein, 219 aa, Unknown
  Obtained from environmental sample
  DOMAIN (33)...(92): Bacterial regulatory helix-turn-helix protein, lysR family
  misc_feature (1)..(219): Xaa is any amino acid
MLRSRLWRAKAQQRTMAVPISHKRLPMNPNALTDQLGLFLDVLETGSFSAAARRHPLTPSAVARRIDSLENSVGSRLFQRSTHAVVPTPAGLAFAERARRIVSELQLARAEAVSLSHAPEGLIRVDAPAAFGRRHLAPVIADFLKVYPGLDVHLHLIDSFVDMQGVHLGKVDLVLRAGHIVNTRLIATPLASIVRIAWPSPGYLKSRGTPTHPKEVKGT

SEQ ID NO: 77201 - DNA, 477 bp, Unknown
  Obtained from environmental sample
  misc_feature (1)..(477): n is a, c, g, or t
ttgccgaaggatcacaagacgttcgacaatttagtcgccgacgtgcgtcatgagtatcaggagttgcggaacgtgccgatgatatcgctgtcggcgcttacggggcagcgggtgtcgtcgctcatggatgtcgtcttcggggtcaaggagcgtatgagcaagagcgtgggcggggcggacttcgagaacaaaattttcgattgggtgagggcgcatccccacccggtcacgccgggcaaggaggtgcgctttttgggggcgaggcagataggcgcggcttttccgctgtttcgattctttgtgacgcaccacgacttggtatccgtttcttacgagcgctttttggcgaacaagatttatgatacctatgacttcgcggggtgtccggtggtattggagttcaggccgatagcgagggggggcgggggtcagaagggcgaggggcagggggacgggggcggtgaaaaggatgtctga

SEQ ID NO: 77202 - protein, 158 aa, Unknown
  Obtained from environmental sample
  misc_feature (1)..(158): Xaa is any amino acid
MPKDHKTFDNLVADVRHEYQELRNVPMISLSALTGQRVSSLMDVVFGVKERMSKSVGGADFENKIFDWVRAHPHPVTPGKEVRFLGARQIGAAFPLFRFFVTHHDLVSVSYERFLANKIYDTYDFAGCPVVLEFRPIARGGGGQKGEGQGDGGGEKDV

SEQ ID NO: 77203 - DNA, 756 bp, Unknown
  Obtained from environmental sample
  misc_feature (1)..(756): n is a, c, g, or t
atgtcagatgcctaccagcagaccggcaaccccgattaccgggttgcggcggaccgggccaaggaattcctgcatcgggctttcctagatcccggatacggtggcttgtattgggctgtcgattatctcggcaagaatcccaataccaggaaacagatatataatctagcgttcggcatctatgcgctaagtgagcattacctggccacccgcgacgattcatccctcgcattagccctagagttgtttgacgccatcgaaacccacgccttcgacccaatctacggcggctatctggaagcgttcgagcgagattggagcccgatcgccgactatcggctaagcgagaaagacttgaacagtccaaagtcaatgaacacctgccttcatgtgatggaggcatacaccactcttgttcgagcaagcgccgatgagcgagtgcgcgccgcgctggagaaacttatccgcgtggtcttagcgcagattattgacgaaaaccggttccggttattctttgacgaatcgtggcgctcgctgactgaggaactttcttgggggcacgatatcgagggcagttggctgttgtgtgccgccgccgaggcggtgggcgatctggaactaattgctgaaaccgaggccgtcgccttgacaatcgccgatcgggtgctggcagttgcgatcgacgcggagaacggtggcttgcgcagcggcacaaatcatgcgggcgaatgctcaccaaaaaagantcggcgataa

SEQ ID NO: 77204 - protein, 251 aa, Unknown
  Obtained from environmental sample
  DOMAIN (1)...(245): N-acylglucosamine 2-epimerase (GlcNAc 2-epimerase)
  misc_feature (1)..(251): Xaa is any amino acid
MSDAYQQTGNPDYRVAADRAKEFLHRAFLDPGYGGLYWAVDYLGKNPNTRKQIYNLAFGIYALSEHYLATRDDSSLALALELFDAIETHAFDPIYGGYLEAFERDWSPIADYRLSEKDLNSPKSMNTCLHVMEAYTTLVRASADERVRAALEKLIRVVLAQIIDENRFRLFFDESWRSLTEELSWGHDIEGSWLLCAAAEAVGDLELIAETEAVALTIADRVLAVAIDAENGGLRSGTNHAGECSPKKXRR

SEQ ID NO: 77205 - DNA, 771 bp, Unknown
  Obtained from environmental sample
  misc_feature (1)..(771): n is a, c, g, or t
atggcggactaccgcctgaacgacgcggcgaataccctcgcgcattttttccgcgacgacttttgcgatnggtacatcgaatttaccaaacagcgtttatacggcgaagacgaacagcaaaaagcggacgcgcgctccgtgctcctgtacgtgctggaggcgtcattgcgcttattacatcccgccatgccctttatcacggaagagatctttcagcgtctgcataccgacgggcgcagcatcatggacgcgccctatcccgaattcgcgcccgatctggttgacgaaaacgccgagagccggatgcgcgtcgcgcaggagatagtctcgggcacacggaatgtgcgcgcggagatgcgcatcccgcccgagagggcgctctcggttcaggtggcgaccgataacgccggggtgatcgatcttgtgcgcgccatggagaagaacatcagcacgcaggccaggttaagcgagctgattctgctgcccgccggttcgccgcgcccgaagtttgcggcgagcatcgtgggcgagtcctgggaggtgtgggtgccgcttgaagggctcattgatattgaggcggagcgcgcgcggctttccaaagaaaagctgcggctcgaggcggaacgcgcgcgggtgcaggccaagctcgcgaacgcgggctttaccgcgaacgcgcccgacgaggtcatcgcgctggaacgcgagaaactcgcctcctgggaatcgcgccttgtccggctggaggcggggctgcgcgatctcgcggggtaa

SEQ ID NO: 77206 - protein, 256 aa, Unknown
  Obtained from environmental sample
  DOMAIN (1)...(132): Anticodon-binding domain
  misc_feature (1)..(256): Xaa is any amino acid
MADYRLNDAANTLAHFFRDDFCDXYIEFTKQRLYGEDEQQKADARSVLLYVLEASLRLLHPAMPFITEEIFQRLHTDGRSIMDAPYPEFAPDLVDENAESRMRVAQEIVSGTRNVRAEMRIPPERALSVQVATDNAGVIDLVRAMEKNISTQARLSELILLPAGSPRPKFAASIVGESWEVWVPLEGLIDIEAERARLSKEKLRLEAERARVQAKLANAGFTANAPDEVIALEREKLASWESRLVRLEAGLRDLAG

SEQ ID NO: 77207 - DNA, 627 bp, Unknown
  Obtained from environmental sample
  misc_feature (1)..(627): n is a, c, g, or t
atgggttacggcggcgttttcaggatcatagttaagtccaggggaacaatcttcgccctgataatcaccgcccttgtagggatcgtggggatgatcaataccacgttctggcaggttatcgtaagcaggaagctccttgtcccggattaccttctgccttttttcccgatactgaaatcaataatcaccattattttccttttcgccgtagccccgcgcttttccgtatattccctgaaacgcccccttctcgcgtgctttgcctgctatatcgccgggcaaaccctcctcgtcatcgccccgtccgaaggcgccgtaaagtatgcggcgctttgcgtgtcactcgtctttgacagtttcagccagggttccctgttcatgctcgccaaatcgctggtggcgcttaacgtgaatcccgcggaacgggccagggtacaggctatcctgtacatggcggtcatggcggttaccgttccctttggctttataggcggcctgctctctgaaatctcccggaactttcccttcgtcatgaacctctgccttttgtcgctggggattggtattacgttgctttattacaagggggcttctgttcccgaaaaaccggcggagcggggagtataa

SEQ ID NO: 77208 - protein, 208 aa, Unknown
  Obtained from environmental sample
  misc_feature (1)..(208): Xaa is any amino acid
MGYGGVFRIIVKSRGTIFALIITALVGIVGMINTTFWQVIVSRKLLVPDYLLPFFPILKSIITIIFLFAVAPRFSVYSLKRPLLACFACYIAGQTLLVIAPSEGAVKYAALCVSLVFDSFSQGSLFMLAKSLVALNVNPAERARVQAILYMAVMAVTVPFGFIGGLLSEISRNFPFVMNLCLLSLGIGITLLYYKGASVPEKPAERGV

SEQ ID NO: 77209 - DNA, 486 bp, Unknown
  Obtained from environmental sample
  misc_feature (1)..(486): n is a, c, g, or t
gtgtatcgcaattcaagcgctactggtacttatacccgtgtagggactccttcatccacgtcatttacagataccgacatatctaaaaatacaatttattattacaaagtttcggcatacaacagccatggagaaggacctcagtctgaatatgttcaaggaatgacaaaaccaaacccgccaacaaatgtgtccgcggttggaatatcagccggggtaaatagcggagtcagagtaacttgggattctgtttccggatcaaaaaaatatgttgtgtatggcggcgtattaggtaaagacgtgacttacaatagtgtaaccgattcttatgatggcatgtataggtacggaggtgaatcaacttctactacccttattgcagaatttgccccggaaaaacaatgggtcatttatgtaatagccataaatagtctgggaggagagagttatgagagtgctaaagttgtttcaacagcaatatattaa

SEQ ID NO: 77210 - protein, 161 aa, Unknown
  Obtained from environmental sample
  misc_feature (1)..(161): Xaa is any amino acid
MYRNSSATGTYTRVGTPSSTSFTDTDISKNTIYYYKVSAYNSHGEGPQSEYVQGMTKPNPPTNVSAVGISAGVNSGVRVTWDSVSGSKKYVVYGGVLGKDVTYNSVTDSYDGMYRYGGESTSTTLIAEFAPEKQWVIYVIAINSLGGESYESAKVVSTAIY

SEQ ID NO: 77211 - DNA, 387 bp, Unknown
  Obtained from environmental sample
  misc_feature (1)..(387): n is a, c, g, or t
ttgggatatacgaggctgttaacttgctccaatgatcccgagaattattattcccgaggacttacttatgaagaaaaagagcaatatgaattagcaattgaaaattatactgaactaataaagtataataaagatgaattttctttcgcatatccttacacgcttcgggcctatgcgtactataaaattaaaaaatatgaattggctattaatgattataatgaagctattaaattagaacctgataatgctgatacttatgcttggcgtggaatcgtttttattaaattaggcaataaagagtcggcaaaaaaggattttgataaagctttaagtttggatccggaaaatgaatctgcgaaagactttgtaaaagaattaaattga

SEQ ID NO: 77212 - protein, 128 aa, Unknown
  Obtained from environmental sample
  DOMAIN (13)...(46): Tetratricopeptide repeat
  misc_feature (1)..(128): Xaa is any amino acid
MGYTRLLTCSNDPENYYSRGLTYEEKEQYELAIENYTELIKYNKDEFSFAYPYTLRAYAYYKIKKYELAINDYNEAIKLEPDNADTYAWRGIVFIKLGNKESAKKDFDKALSLDPENESAKDFVKELN

SEQ ID NO: 77213 - DNA, 735 bp, Unknown
  Obtained from environmental sample
  misc_feature (1)..(735): n is a, c, g, or t
atgaaaataacagtagaagatttgcagaaagaagaagagttaattactgaagatatcgatgagtattgtaaagacatgacctcagatgaagcagaaccaatatatgatggtattgtcaatgtagaaaaatatttgaacggtgaaaaatatagaatttgttgggttttaaaagaggcttatgatgaaggagatgaaaaaggtggtggttggagtttaagtaaaaattttctaggtatcgaagagcggtggcaggatgtttctaaacatcctacttggaaaaaagtaatatatgctacttatggaataattaatgattttattgagtattctgaaatggactatatttccgacgatcctgaaatggtcaaatgcttaaatcacattgcggtaataaatgtaaataaaatgccgggaaacaatacttccgatgatttagttattgctcaaaaatatgagcattttaaaccaatattacttagtcaattaaaaagatatgacccgcaaataataatattcggaagtacttttcagcattttcaaaatgatataggaatcaaaaatgaagaattagcgaattattataatgataagacaaagccaagatatattgtaaagaacggtaaattatatattgatgcatatcatccggctgtaagggtagctactatgaaagaacatgattatatacaaagtattattaatattgtgaaaatgaataaggaaaatattgaatga

SEQ ID NO: 77214 - protein, 244 aa, Unknown
  Obtained from environmental sample
  misc_feature (1)..(244): Xaa is any amino acid
MKITVEDLQKEEELITEDIDEYCKDMTSDEAEPIYDGIVNVEKYLNGEKYRICWVLKEAYDEGDEKGGGWSLSKNFLGIEERWQDVSKHPTWKKVIYATYGIINDFIEYSEMDYISDDPEMVKCLNHIAVINVNKMPGNNTSDDLVIAQKYEHFKPILLSQLKRYDPQIIIFGSTFQHFQNDIGIKNEELANYYNDKTKPRYIVKNGKLYIDAYHPAVRVATMKEHDYIQSIINIVKMNKENIE

SEQ ID NO: 77215 - DNA, 624 bp, Unknown
  Obtained from environmental sample
  misc_feature (1)..(624): n is a, c, g, or t
atggccaagctgaatatcaatcccaaccggatggagcttttgaagctcaaggcccgcctgcaatttgcccggcgcgggcataagctcctcaaagacaaacaggaaagtttgatgcaggaatttatgcgcatcctcaaagccctgcgggaactgtacgcgcgcatcagcgcggagctggacggcatatacgccaaattttatcaggcacaggccggtagcgcgccttatgcgctggaggagtctctgctgggcgccgccgccaagaccacgatgaccgttgatttgcaaaataagttcggcgtgaaatttccggtgtttagcattgcggagactaagcccgggctgggcggctcgccggccacggctccgctggcggcgagggatttaatcaaaacagcgggcggggttttcccggcgcttttggaattggcccaggtggagaaaaaaatcgaactgctggcagaggaaattgaaaaaacccgccgccgggtaaatgcgctggaatacaatctcatcccggcgctccaggaaacaatcaaagatattgtgcttaagctcgaggagcgtgaccgctcggagcggacaacgctgatgaaagttaaggacttaattcaggtcaggtga

SEQ ID NO: 77216 - protein, 207 aa, Unknown
  Obtained from environmental sample
  DOMAIN (11)...(205): ATP synthase subunit D
  misc_feature (1)..(207): Xaa is any amino acid
MAKLNINPNRMELLKLKARLQFARRGHKLLKDKQESLMQEFMRILKALRELYARISAELDGIYAKFYQAQAGSAPYALEESLLGAAAKTTMTVDLQNKFGVKFPVFSIAETKPGLGGSPATAPLAARDLIKTAGGVFPALLELAQVEKKIELLAEEIEKTRRRVNALEYNLIPALQETIKDIVLKLEERDRSERTTLMKVKDLIQVR

SEQ ID NO: 77217 - DNA, 801 bp, Unknown
  Obtained from environmental sample
  misc_feature (1)..(801): n is a, c, g, or t
atgtacctgcttgtcacatttttatttgccattttgtatataacccaagaccgctctcttgacccactgcttgtcccatttggtgtattgcccgcctttattatgtattctaaccgtttcttgtccaacgccgttgtcgtcactaccgcaaccaatttgttccaaggtatcgctgccaaatccccaaaaatttttgagattttagactacgcagaacttacgcaaaaagaacacatcgatattgaacagattgaaaagggtatcgaattcaaaaacatctcttacaaagtccacgacgtaaccctgcttgacaatatctcgtttaatatcccacaaggctctgctgtcgctttcgtcggccccgcgggaagcggcaaatcgtacatagtcgacattcttgcaaaacttggaagcccaacaaaaggcgagatacttgtcgacggaataaatttggaagaaattacaagcaaaagttattataaatgcgtaggaatctctttcgagcaaccttttatcctgcgcgacacaatcgcgggcaatttgctttatggcgtaaagcgtgaactccctgaaaacgtaatggcagtaaccgaaagactcggtagccacgaattcatagacagccttgaaaacggctacgaaactttcttaacagacaacacagaagtattgggtcttgggcaaaagcaagcaatttgcgtggctcgcgtggtcttacaaaagcccgagcgtgcttatgctgcaccaagccctctccgcgaccgacaccgtcaccgaaaaagccgttctcggccgatctga

SEQ ID NO: 77218 - protein, 266 aa, Unknown
  Obtained from environmental sample
  DOMAIN (113)...(260): ABC transporter
  misc_feature (1)..(266): Xaa is any amino acid
MYLLVTFLFAILYITQDRSLDPLLVPFGVLPAFIMYSNRFLSNAVVVTTATNLFQGIAAKSPKIFEILDYAELTQKEHIDIEQIEKGIEFKNISYKVHDVTLLDNISFNIPQGSAVAFVGPAGSGKSYIVDILAKLGSPTKGEILVDGINLEEITSKSYYKCVGISFEQPFILRDTIAGNLLYGVKRELPENVMAVTERLGSHEFIDSLENGYETFLTDNTEVLGLGQKQAICVARVVLQKPERAYAAPSPLRDRHRHRKSRSRPI

SEQ ID NO: 77219 - DNA, 831 bp, Unknown
  Obtained from environmental sample
  misc_feature (1)..(831): n is a, c, g, or t
ttgagccgggtattgcaaggctttttgaaagaggcctcctgtcatctccaaagctgggcgggggagccgccgcattatggcattgttataaggcgcggtcaggaggcgattacgcttgatctccggcttgcgcgaccatcgaaccgcgagaccgccgctccggcgaatcaacaggaaccattgcaggcaagcgggatccggcccgggcgtcaggatacacagtctccgcccgcgaagatcgcgctgatcctcgacgatgccggaaacggcgcgaaatcccaatgggcatttctggatcttcccgtcaaactcagtttcgcggtattgcccggatattcggactcgcggcgttttgcggagatggcgcgcgcgcgcgggcacgagattcttgtacacctgccgatgcagcccatgcgcggcgaatcacaagcccttgaaaaggaaatgctcatacccgggatgggcgaacgcgaggttgggcgtattctggacgcggcgctcctttcggtgccgggagcgcgcgggatcaacaaccaccagggttcgctggccacgcaggatcgcgatctgatgcgcagcctgatgcgatgtctcgcgctgcgcggactcttttttgtggacagctttacccatgcttcgtccgtcgcgctggatgaagccacccgtgccgggatgccggcgcgcaagagggacctttttctcgacgaccgggctgaacctgcctatattgaggaagccctgcatacgcttaccctgaaggcggcccgcgacggcaaggccatcggcatcgggcatgtcaccagcccgagaccctgcgggttttgcagataa

SEQ ID NO: 77220 - protein, 276 aa, Unknown
  Obtained from environmental sample
  DOMAIN (82)...(276): Divergent polysaccharide deacetylase
  misc_feature (1)..(276): Xaa is any amino acid
MSRVLQGFLKEASCHLQSWAGEPPHYGIVIRRGQEAITLDLRLARPSNRETAAPANQQEPLQASGIRPGRQDTQSPPAKIALILDDAGNGAKSQWAFLDLPVKLSFAVLPGYSDSRRFAEMARARGHEILVHLPMQPMRGESQALEKEMLIPGMGEREVGRILDAALLSVPGARGINNHQGSLATQDRDLMRSLMRCLALRGLFFVDSFTHASSVALDEATRAGMPARKRDLFLDDRAEPAYIEEALHTLTLKAARDGKAIGIGHVTSPRPCGFCR

SEQ ID NO: 77221 - DNA, 546 bp, Unknown
  Obtained from environmental sample
  misc_feature (1)..(546): n is a, c, g, or t
atgctgatggtctggttccacaccggcgagatcggtgccatcgacgcagacggattcctaaagatcactggctgtaagaaggaaatcatcgtcacggccggcggtaagaacgttgctcggcctgtgctcgaagactgcgttcgcgcccacgcgctggtgtcgcagtgcgcggtggtcggcgacaacaagccgttcatcggtgcgctgatcaccctcgatgaggaaggtctgccgggctggttgaagatgaacgccaagtcccgaatgacggttgcgcaggccaagaacgatcccgatgtcctagcgtcgcttgatgccgccattttgcgggccaacgaggccgtttccaaggccgagtcgattcgcaaatacaccatcctggatggggacttcaccatcgacaatggttacctcacgccgtcgatgaaggtgaagcgctcggaggtgctgcgcgacttcgccaccgtcgttgagcaggtgtactccagcgagagccgggacgttttggcggcccccgttcgcgaactggcttccgcgagcaagtaa

SEQ ID NO: 77222 - protein, 181 aa, Unknown
  Obtained from environmental sample
  misc_feature (1)..(181): Xaa is any amino acid
MLMVWFHTGEIGAIDADGFLKITGCKKEIIVTAGGKNVARPVLEDCVRAHALVSQCAVVGDNKPFIGALITLDEEGLPGWLKMNAKSRMTVAQAKNDPDVLASLDAAILRANEAVSKAESIRKYTILDGDFTIDNGYLTPSMKVKRSEVLRDFATVVEQVYSSESRDVLAAPVRELASASK

SEQ ID NO: 77223 - DNA, 408 bp, Unknown
  Obtained from environmental sample
  misc_feature (1)..(408): n is a, c, g, or t
atgctagcggacgctctgttcttctgcaaggtccgcgacaagctggtcggcaagattgagtacacgtcgtgcggtggtgggccgctggacgagtgcttaggccacttctacagcggtctgggcatcaagatcctggaaggctacggcttgaccgagaccactgcgcntacgtcggtaatccgccccgatgcgaccgtgatcggttcagtcggtcagcagttgcccgtctgcgcggtaaaaatcgccgagtccgacggtgagatcatgttgaagggtccgcacgtattccgcggctacctcaagaatcccgaggccaccgccgaggcgttcgatgctgatggtctggttccacaccggcgagatcggtgccatcgacgcagacggattcctaaagatcactggctgtaa

SEQ ID NO: 77224 - protein, 135 aa, Unknown
  Obtained from environmental sample
  misc_feature (1)..(135): Xaa is any amino acid
MLADALFFCKVRDKLVGKIEYTSCGGGPLDECLGHFYSGLGIKILEGYGLTETTAXTSVIRPDATVIGSVGQQLPVCAVKIAESDGEIMLKGPHVFRGYLKNPEATAEAFDADGLVPHRRDRCHRRRRIPKDHWL

SEQ ID NO: 77225 - DNA, 540 bp, Unknown
  Obtained from environmental sample
  misc_feature (1)..(540): n is a, c, g, or t
atgtataagaatgtcttggtaacaggcggaagcggaaggttgggaaactttgtttgtgcccggttaagaaaacaggggtacaatgttacaagtttcgacacagtcgcgtcccctccggaaagtcagaatgcccaggaaaagatcccctttgtacaaggggatctcttgaatttaggcgactgcctccgggctattgcctttgcccagcctgattatattgtccatcttgcggcaattaccgggccaacggaaatttttcttccctatgataaggaaaaaggtgtgttgcccatgaatccaatgcggacaatgcagagaatgcccgaagatgcctgctttaagatcaacaccatggggactttctttatcatggatgcagcccgcaggatgaatgtcaaagatatgatcatctcttccagttattatgccaccggtattggcggacgctggagcgggacttcctatacgccgaaatatctgcccgtagacgaagagcatccctgcgatcccgagggaaagtacgcgctttccaatacttga

SEQ ID NO: 77226 - protein, 179 aa, Unknown
  Obtained from environmental sample
  misc_feature (1)..(179): Xaa is any amino acid
MYKNVLVTGGSGRLGNFVCARLRKQGYNVTSFDTVASPPESQNAQEKIPFVQGDLLNLGDCLRAIAFAQPDYIVHLAAITGPTEIFLPYDKEKGVLPMNPMRTMQRMPEDACFKINTMGTFFIMDAARRMNVKDMIISSSYYATGIGGRWSGTSYTPKYLPVDEEHPCDPEGKYALSNT

SEQ ID NO: 77227 - DNA, 909 bp, Unknown
  Obtained from environmental sample
  misc_feature (1)..(909): n is a, c, g, or t
atgaacgcaaaaactgtatattttaaaatcgcctccgatgattccgccgatagttttgaggcggaatttgaaattgtaccggactccgttacggaggaaattaatcaaattgacgcgaaaatgcgaaaaaattgggaggagattgaagaattaaataaacaggaagcccctttgattaatcatgccgataaactggattatatagccgcggttgggagcggaattattgcggggctggttgattcgttttgggtcggtaaattcgattttaagcgcggaaaagcgtggagtaataaaaccgctaatgaatttgtaatgaaaatcgcgaaaaaacagggttataacggtaaaagactggacggcgccatcagccatcttgagaacatatataaaattcccagtgataatatatggaaaggcgcggatgaagggattagcgccagaagccaccatctggatgatttggcgcatcatccctctccaatcggtcttcttttttcaataataatacaatttaccaaaaaagggtattttcaaaacagcggcggttcatttatctctatttcttttgatgaagatggattaatagggcatgatgtaaaaaataaaatattcgcgggaaccattaattggtttttccatcttgtcagtgatatgtccggcagtaaaaagaccgcgggcgtcggaatgggcatacccggccccatagtttcccttctcagggaattatcactgataccgggattgaataaatcaggtttagcaaaggaaacgcataacgcttttgtcaaaaataaatttgatttacgctccgagatggctgttatccatgaattgggccggcaggcagtgcctgtaatattaaatgaagtcatagtccgggctttctattttatacgccgtctgtaa

SEQ ID NO: 77228 - protein, 302 aa, Unknown
  Obtained from environmental sample
  misc_feature (1)..(302): Xaa is any amino acid
MNAKTVYFKIASDDSADSFEAEFEIVPDSVTEEINQIDAKMRKNWEEIEELNKQEAPLINHADKLDYIAAVGSGIIAGLVDSFWVGKFDFKRGKAWSNKTANEFVMKIAKKQGYNGKRLDGAISHLENIYKIPSDNIWKGADEGISARSHHLDDLAHHPSPIGLLFSIIIQFTKKGYFQNSGGSFISISFDEDGLIGHDVKNKIFAGTINWFFHLVSDMSGSKKTAGVGMGIPGPIVSLLRELSLIPGLNKSGLAKETHNAFVKNKFDLRSEMAVIHELGRQAVPVILNEVIVRAFYFIRRL

SEQ ID NO: 77229 - DNA, 327 bp, Unknown
  Obtained from environmental sample
  misc_feature (1)..(327): n is a, c, g, or t
atggcagcgaagaaaaaatcccgacaggcaaaaccggcagccggaaatacagcgaacaaaagcatggcacatgtgtttccgccggaaatacaagccaagttgcaggatgcctttaaacgccatcagcaagaacaactggcggaagccaaaacactgtatcaggaaattttgcaggcgtatcccaaacatccggatggactttacttactggggcaactggaacacaaggaaaaaaattattcgctggcagttgatttgctgacaaaagcgattgaagttataccgaacaacccgcatcgttatcatatacttgggcaaggttattga

SEQ ID NO: 77230 - protein, 108 aa, Unknown
  Obtained from environmental sample
  DOMAIN (64)...(97): Tetratricopeptide repeat
  misc_feature (1)..(108): Xaa is any amino acid
MAAKKKSRQAKPAAGNTANKSMAHVFPPEIQAKLQDAFKRHQQEQLAEAKTLYQEILQAYPKHPDGLYLLGQLEHKEKNYSLAVDLLTKAIEVIPNNPHRYHILGQGY

SEQ ID NO: 77231 - DNA, 531 bp, Unknown
  Obtained from environmental sample
  misc_feature (1)..(531): n is a, c, g, or t
atgccgaccctaaaaagattgcactctgggaacaaaggctggggaaaaaaaccaagcccgcgtgtcggtttggtgtggagtggtaatgctgtgttccgaaacgaccataaccgcagtatcatgctctcgcagttattaccgtatttgcccgataactgtgaatacgtcagcctgcaaaaagaagtgagagaatgtgacaaacccacattggctgccctgcttaaatggcggcattacggagaagaactcattgatttttcagataccgccgcgttgtgttccctgatggatgtggttgtcagtacgtgtacgagtgttgtgcatttatcaggcgcattgggaaaaccaacctgggtcatgctttctttttctcccgccccgcgctggctgctcgaaaggagagacagcccgtggtacccggatgtacggctttatcgccagagcgaaccggggaactggaaccctgtgtttgaagaaatccgcggtgatttattaaaactttccattgaagaagaaacggcaatccaataa

SEQ ID NO: 77232 - protein, 176 aa, Unknown
  Obtained from environmental sample
  misc_feature (1)..(176): Xaa is any amino acid
MPTLKRLHSGNKGWGKKPSPRVGLVWSGNAVFRNDHNRSIMLSQLLPYLPDNCEYVSLQKEVRECDKPTLAALLKWRHYGEELIDFSDTAALCSLMDVVVSTCTSVVHLSGALGKPTWVMLSFSPAPRWLLERRDSPWYPDVRLYRQSEPGNWNPVFEEIRGDLLKLSIEEETAIQ

SEQ ID NO: 77233 - DNA, 303 bp, Unknown
  Obtained from environmental sample
  misc_feature (1)..(303): n is a, c, g, or t
atgcgcgaatatataacgactaaattcggtcgccgtattttgctaaacacgccggaagaagacgcacgcattcaggctgcggctattgctgaccctgatgcacagccggttactgatgcacaatggaaggctgcgaagcgatttactcgcggcgggcgtccgccgcacatgcagcccaaaaaagcacccgtcacgttacgccttgacgtggatgttctagctgctcttcgggcaacaggcaagggttggcaaacacgtgttaatgacatcatgcgcgaatggctgaaacaaaattcagcatga

SEQ ID NO: 77234 - protein, 100 aa, Unknown
  Obtained from environmental sample
  misc_feature (1)..(100): Xaa is any amino acid
MREYITTKFGRRILLNTPEEDARIQAAAIADPDAQPVTDAQWKAAKRFTRGGRPPHMQPKKAPVTLRLDVDVLAALRATGKGWQTRVNDIMREWLKQNSA

SEQ ID NO: 77235 - DNA, 882 bp, Unknown
  Obtained from environmental sample
  misc_feature (1)..(882): n is a, c, g, or t
atgaaattcgccatcatcggctntgcggtgttcatgatcgtggcctccntgctcatcggctggtatgcgcagcgcaaagcccacggcgtgcaggcctttttcggcggcacggccctgttcgggccgatggtcatcggcctgtccaccatggcggctgtcgccagcgcttttgccgtggtcggggtgccggggttgatctatgccgccggcaacgccatggggctgtggatgatgggcgccggcgccttcttcatgtgctacatcattctgggcaagaagatgcgggcgatggccgaggtcgggccggtggcgacgcttggcgacgttattgacctgcgctacggcaaaagcaaaagcctcaagctcgtcacgtccctgaccttgttcatcggctgcatcgcctacctggcctcgcaggtcaagggcgtgtcggaaatgttcgcgcatttgatgggctggagcaccatgaccatcggcgtgatcatcttcggctcgctcatcctgtacatggtggtcagcggcgaggtcggcggactgttgacccaggcctttcagggcatgatcatggtcatcgcggccgtgatcatgatgtgctccctgttctgggccagcggcggcatgtccgagataaccgccgccgtggccaacgccggcacggtgaccggcaacgggtacaccaaggtcatgtcgcccaacctgctcaacgcctggggaaccatgcccggcgccgtggcgctgaccttcatgttcattccctttctgggcgtgctcggccagccctcggtactgacccgcatgtactcgctcaaagatccgtggacatacccagaatggccctgtggggcgcgggatcgcatttctgcgtggcctcggccgatctga

SEQ ID NO: 77236 - protein, 293 aa, Unknown
  Obtained from environmental sample
  SIGNAL (1)...(17)
  misc_feature (1)..(293): Xaa is any amino acid
MKFAIIGXAVFMIVASXLIGWYAQRKAHGVQAFFGGTALFGPMVIGLSTMAAVASAFAVVGVPGLIYAAGNAMGLWMMGAGAFFMCYIILGKKMRAMAEVGPVATLGDVIDLRYGKSKSLKLVTSLTLFIGCIAYLASQVKGVSEMFAHLMGWSTMTIGVIIFGSLILYMVVSGEVGGLLTQAFQGMIMVIAAVIMMCSLFWASGGMSEITAAVANAGTVTGNGYTKVMSPNLLNAWGTMPGAVALTFMFIPFLGVLGQPSVLTRMYSLKDPWTYPEWPCGARDRISAWPRPI

SEQ ID NO: 77237 - DNA, 312 bp, Unknown
  Obtained from environmental sample
  misc_feature (1)..(312): n is a, c, g, or t
atgaaactgcttgatatagcacgggctgtatcagaagatgttaaattaaatgttatcggcataagacccggtgaaaaattgcatgagcagatgataggaaccgaagatgctccttatacttttgagtacgatgggtactataaaattttacctcaaattatggattggtacaaagatactaaacgaataaaaaaaggtaagcctgttcctgaggattttgtatatacatctgataacaataataaatggatggcagttgaggaattgaggaaatggatagaggagaatagagataaggtaggggtgatttaa

SEQ ID NO: 77238 - protein, 103 aa, Unknown
  Obtained from environmental sample
  misc_feature (1)..(103): Xaa is any amino acid
MKLLDIARAVSEDVKLNVIGIRPGEKLHEQMIGTEDAPYTFEYDGYYKILPQIMDWYKDTKRIKKGKPVPEDFVYTSDNNNKWMAVEELRKWIEENRDKVGVI

SEQ ID NO: 77239 - DNA, 360 bp, Unknown
  Obtained from environmental sample
  misc_feature (1)..(360): n is a, c, g, or t
gtgctttttgaccgggagcagatgagaagggcgatagtcaatatccttcagaacgcgataaacgccattgcgaaaaccgcgcggcggggagagatacgggttgtggcggaaaaaattgacggcgaagttttgtgtataatacgcgataatggatgcggcattccgcccggaacgggggacgcgatttttacgccctatttttcgcggcaggaaggcggcaccgggcttggtctctccattgtcgaaaagatcgtgtatgaccatggcgggcgcgtctggtatgagagcagccccgggggaacgagtttttatttcaccattggccggaacgccgccgctcagaaaacggagaacgaatag

SEQ ID NO: 77240 - protein, 119 aa, Unknown
  Obtained from environmental sample
  DOMAIN (3)...(110): Histidine kinase-, DNA gyrase B-, and HSP90-like ATPase
  misc_feature (1)..(119): Xaa is any amino acid
MLFDREQMRRAIVNILQNAINAIAKTARRGEIRVVAEKIDGEVLCIIRDNGCGIPPGTGDAIFTPYFSRQEGGTGLGLSIVEKIVYDHGGRVWYESSPGGTSFYFTIGRNAAAQKTENE

SEQ ID NO: 77241 - DNA, 399 bp, Unknown
  Obtained from environmental sample
  misc_feature (1)..(399): n is a, c, g, or t
ttgatcatgttccgccatgttcacctgctcagcggcgtcatcgccttcgcggcggcggctttcgcctgcaacctcatgttcggaaaggtcaatgcgggattcgccgggcaacccgtggcccattccgcccatctctggaactttctgggcatgatggttgccggatgggcgtccgcgctggccggaggttgcccaggacggcaaattttcatgaccggcgaaggcgacacggatgccggcctctttatgatcggcatgatggcggccgccgccttcgcccacaacttcggcctggcaagttccgcgacaggcatcgggccttatggcgatgtggccgtgtatgtctgtctggcggttctgctggggctgtcgttgatccatatccgcaaagcgccataa

SEQ ID NO: 77242 - protein, 132 aa, Unknown
  Obtained from environmental sample
  SIGNAL (1)...(22)
  misc_feature (1)..(132): Xaa is any amino acid
MIMFRHVHLLSGVIAFAAAAFACNLMFGKVNAGFAGQPVAHSAHLWNFLGMMVAGWASALAGGCPGRQIFMTGEGDTDAGLFMIGMMAAAAFAHNFGLASSATGIGPYGDVAVYVCLAVLLGLSLIHIRKAP

SEQ ID NO: 77243 - DNA, 759 bp, Unknown
  Obtained from environmental sample
  misc_feature (1)..(759): n is a, c, g, or t
atgcgctggcagccggggataccggcaacggtcagggttcccnggcatgtgtaccggaaattggttgaaattctgccttcactgcgtccttcaggcatcaccttccattatcttcttcctgacgttgattggcacaaccggatactcatagcgcttgaggaactgccggaaaggccgacgctgatagcggacgcgggctatatgtacgcggcaaaaatgagcggttatgcggatcattatgatcttttcaccccggatatcggcgaactggcattcctggcggacgagtcggccccgcacccgttctatacccggaattttctgcttgcggatgaagaacaggcggaagagcttatcttcagatcatacgcgggcaataacgccgcccggcatctgctggtcaagggccgtgccgaccgatacgcgcacaacggcgctatcctggaaaaagtggactctccggatgtgcctatgctggaacccatcggcggcacaggagacacgctgaccgggatcgtcagcgctttagcggcttgcggagtcgagatgcctgtcgcctgtgcggcggcgttcaaaataaaccggcatatgggcttgttggcccagccgactccggcatcgtccgttgcggaattattggcttttttgccgcatgcatgccgctccgtgccgactccgcttatattggcgctgaggtccgtgactgcgcgcagcgcatcccggccagcacataaaaatcatggggccgcaaaatcgtga

SEQ ID NO: 77244 - protein, 252 aa, Unknown
  Obtained from environmental sample
  misc_feature (1)..(252): Xaa is any amino acid
MRWQPGIPATVRVPXHVYRKLVEILPSLRPSGITFHYLLPDVDWHNRILIALEELPERPTLIADAGYMYAAKMSGYADHYDLFTPDIGELAFLADESAPHPFYTRNFLLADEEQAEELIFRSYAGNNAARHLLVKGRADRYAHNGAILEKVDSPDVPMLEPIGGTGDTLTGIVSALAACGVEMPVACAAAFKINRHMGLLAQPTPASSVAELLAFLPHACRSVPTPLILALRSVTARSASRPAHKNHGAAKS

SEQ ID NO: 77245 - DNA, 549 bp, Unknown
  Obtained from environmental sample
  misc_feature (1)..(549): n is a, c, g, or t
atgcgggcggcgaaagagcggagggtatgcgaggtgagctacagggcctccgtattcaaggagccgcgcagcttcaatttcgcgccgcaacggctcatggcgggccgcgattccatgtacgtcatcggccgggaggtcacggataaggggcaggtcgcgcccctgtatgccaacccgctgtgcctgctcgcgcaccgtatccggaaagcgtccgtcacgcgcagaacctggaaggatttgcctgatgcgccttccgcttccggcgctttcggcatcatggccggggagccgttccgcgccgtcatccgcatcacgacgccggaggcagtcacctatgtggcggaacggatctggagcgaggatcaaaagctggaatttctggaggacgagagcctgatcctgaccatgaccgcgcaaagccctcttgaggtcgtctcctgggtactcagcctcgggtccgccgctgaactgatcgaaccggactggctgtgcaaggacattcaagccgagatcgcggtaatggcgggcaaggtttttccttccgcatga

SEQ ID NO: 77246 - protein, 182 aa, Unknown
  Obtained from environmental sample
  misc_feature (1)..(182): Xaa is any amino acid
MRAAKERRVCEVSYRASVFKEPRSFNFAPQRLMAGRDSMYVIGREVTDKGQVAPLYANPLCLLAHRIRKASVTRRTWKDLPDAPSASGAFGIMAGEPFRAVIRITTPEAVTYVAERIWSEDQKLEFLEDESLILTMTAQSPLEVVSWVLSLGSAAELIEPDWLCKDIQAEIAVMAGKVFPSA

SEQ ID NO: 77247 - DNA, 903 bp, Unknown
  Obtained from environmental sample
  misc_feature (1)..(903): n is a, c, g, or t
gtgagcacctctatgtggaatgccacattattcgactccaatgtgaatatgctccgcgcaacaaccgaagccatgagtgctgccatagcaggcgcagactctatcaccgttatcccttacgatgcgatattcaaaaaacctgatgaattcagcaaccgcatagctcgcaatattcagttgctcctcaaaaacgaatgtaagttcaacaaaatagttgacccttccgcaggttcttattatatagaaaccctcacggagcagatagcatccaggtctcttgatgccgtcaaaaaactggaaggcgaaggcggcttgctcgctgctctccaaagcggctcggttcaaaaagccatagacgagagccgtaagcaaaaggaaaaattaattgcgcaacgtcgtgaagtgttcataggcacaaaccagtacccaaatttgcaagaaaagatgagcgacaaaatccaatataaattggatatccatcgtggtgcggaaatatttgaaacgctccgcttgcaaacggaggaatacgcaaaaaagaccggaagtgcaccaaaggtgttcttgtggactgctggagacttggctatgaggcttgcacgagcgacattcataaaaaatttctttggttgcgctggctacacggttatagataccaacggaattccaaatgttgcagaaggcattgagcttgtgaaaaagaacgctccgcagatagttgttctctgctccaaagacgatgaatatttgggacttgcaaaggaaattttcccagcccttgaaaaggaattcccaaaaatcattcgcatagttgcaggtaatccaaaagaagctgaggatttaaaagcatctggtgcacaagatttattcagttctacaaatgctaagaatctaagctcgcgataa

SEQ ID NO: 77248 - protein, 300 aa, Unknown
  Obtained from environmental sample
  DOMAIN (1)...(216): Methylmalonyl-CoA mutase
  misc_feature (1)..(300): Xaa is any amino acid
MSTSMWNATLFDSNVNMLRATTEAMSAAIAGADSITVIPYDAIFKKPDEFSNRIARNIQLLLKNECKFNKIVDPSAGSYYIETLTEQIASRSLDAVKKLEGEGGLLAALQSGSVQKAIDESRKQKEKLIAQRREVFIGTNQYPNLQEKMSDKIQYKLDIHRGAEIFETLRLQTEEYAKKTGSAPKVFLWTAGDLAMRLARATFIKNFFGCAGYTVIDTNGIPNVAEGIELVKKNAPQIVVLCSKDDEYLGLAKEIFPALEKEFPKIIRIVAGNPKEAEDLKASGAQDLFSSTNAKNLSSR

SEQ ID NO: 77249 - DNA, 858 bp, Unknown
  Obtained from environmental sample
  misc_feature (1)..(858): n is a, c, g, or t
gtgttccttgccgtccctgatgaagagaacttctccgtcggcatgagggctgccgtgcatctgcttaaaaatctgaaagacatgcatggatttgactacgaactttgcatagattcggaaccggcaatgagagcggggagaaagcatataatatccctcggtacagtcggcaagtgcatgccggtagtaatggctcaaggcgaaaaggcgcatatttccatgtgtttcgacgggcttaacccgctgggaattctttcggatatttttcgcgcgacggagcttaacctggacttttccgacgcgtacggcggcgaaaggactgtgccgccaagctggaattatttcagggacatgaagtatgagtacgatgtatctttgcccatacgcgccagcggatattttagtgtgttaagctattattcgacgcctgacgaaacattagcgaagctcagaaaaataagcgaagactgctttgagggctatgtgacccatatgcgggaagtttacgaaaaattctggcatggccaaaagtttaacacagccaagggcatcagctatgaaacaaccgttataaccgtcgccgaacttactgaatattgccggaaaatagatggatttgacgctttctaccctagtttgtacaaagaaataaaggaaaaactggatgccagcgaacttaactgtcctcaggcgacacttctaatgatggcgcgcttgcttgatttttctggcataacaaagccgttggtgctgctgggctttgctccgccgtattattcacctctatgtagcaataacgtaaagagcaaggaaaacaaagcccgccgaatatatgtcctatatatgccgggaatctga

SEQ ID NO: 77250 - protein, 285 aa, Unknown
  Obtained from environmental sample
  misc_feature (1)..(285): Xaa is any amino acid
MFLAVPDEENFSVGMRAAVHLLKNLKDMHGFDYELCIDSEPAMRAGRKHIISLGTVGKCMPVVMAQGEKAHISMCFDGLNPLGILSDIFRATELNLDFSDAYGGERTVPPSWNYFRDMKYEYDVSLPIRASGYFSVLSYYSTPDETLAKLRKISEDCFEGYVTHMREVYEKFWHGQKFNTAKGISYETTVITVAELTEYCRKIDGFDAFYPSLYKEIKEKLDASELNCPQATLLMMARLLDFSGITKPLVLLGFAPPYYSPLCSNNVKSKENKARRIYVLYMPGI

SEQ ID NO: 77251 - DNA, 714 bp, Unknown
  Obtained from environmental sample
  misc_feature (1)..(714): n is a, c, g, or t
ttggaaaaggccatgctttaccgccctgacgtgcgcgcggcgcgcttggcgctggagcggaacaagatattgaagcaactaaggtcaaaaggcatgtctcctacgctgaccggctctgccaggtggaccgcgtggtcggatccatggaattcctcgtccccacaaaaaggtgaactgacggcttcgttgacgttgaattttccacttaccgacggcaacgagaccaaatacaacattttgaacgcagataaattgacggaggcggcggaagcgaccctctcgtcccttgagaacaccacaaacacagaactttctgtggcgctgaacaactgggaattggccgccgcgctggagaaggataaggcgcgtcaggtcgagcgctccggcgaggagctgcgcattacggaactcatgtacaacgaggggatgggcgcgcagattgacctgatcaacgctcagacggaaaaccagcgtgtgcgcactgaatatctgaacgctgtcaaggggatgtacgtcgcgctcgtggaccttcgcagggccgttggagactacgccccgaacgagaacggaagctggaaagaagcggttgtcaggtatggccgtgggacggaagtatcgggtagaacgcggacgccgcagaaacagcaggcacacccctcacaaactcccccaaaaacgaatccaccaaaaaacaaaagcaaaaaaatcccgtga

SEQ ID NO: 77252 - protein, 237 aa, Unknown
  Obtained from environmental sample
  DOMAIN (1)...(182): Outer membrane efflux protein
  misc_feature (1)..(237): Xaa is any amino acid
MEKAMLYRPDVRAARLALERNKILKQLRSKGMSPTLTGSARWTAWSDPWNSSSPQKGELTASLTLNFPLTDGNETKYNILNADKLTEAAEATLSSLENTTNTELSVALNNWELAAALEKDKARQVERSGEELRITELMYNEGMGAQIDLINAQTENQRVRTEYLNAVKGMYVALVDLRRAVGDYAPNENGSWKEAVVRYGRGTEVSGRTRTPQKQQAHPSQTPPKTNPPKNKSKKIP

SEQ ID NO: 77253 - DNA, 906 bp, Unknown
  Obtained from environmental sample
  misc_feature (1)..(906): n is a, c, g, or t
atgaaattgcgtaggttatgtcgcgacgcccgcgccgtccgcgccgcaaaacgcacctcggcctctggccgaaatgcggcaatacgcgccgttcacgggaatgaaatattacccgtcattggcaagctgcgtcggctttttgcccaaatcagcatcaagcggcttcagcctgactttgtaatcatggatgagttccagggtttccgtgagctcatcagcgcggagccgggtaccgagacgaggcttttgacagacacctttcttagaaataaaaaatcttcggtcaacacgctccttatgtccgcgacgccatataagatatatcaaacgcgcgaagaagccgcgcttgaagaagccgcgaagagcggagttgacaactatcatgaatttttagaagttatggactttttgattgaggatccggagaaaataaaactctttaagcagaaatggcgcgatttttccgattctctccccgaggcaagctctgactttgactcctgcctccaaaaaaagcggatagccgaaaaggaaatgtccaaatacgtttgccgcaccgaacggttgcttgtggggccggatagcgggcttattgacgaccgccaatgcgaaccagttgacatctatgacaaatttgacgaaaatattctctctttccttgaagccgaaaaactcgccaacgaactcagagaactcggtgaaaccgcgcatcttcccgttgaatacgtcaagtcgtgcccgtatccgctgtctttcatggaaatggaagtctatgacttcaagaaaaaattagacgagaataggccaaggcttgatttttcacgccccgagacagagaaaatgctgtttgtggataaagaaaaggtgctgaaattcgattcgctgccgccaaataacgcgaggtga

SEQ ID NO: 77254 - protein, 301 aa, Unknown
  Obtained from environmental sample
  misc_feature (1)..(301): Xaa is any amino acid
MKLRRLCRDARAVRAAKRTSASGRNAAIRAVHGNEILPVIGKLRRLFAQISIKRLQPDFVIMDEFQGFRELISAEPGTETRLLTDTFLRNKKSSVNTLLMSATPYKIYQTREEAALEEAAKSGVDNYHEFLEVMDFLIEDPEKIKLFKQKWRDFSDSLPEASSDFDSCLQKKRIAEKEMSKYVCRTERLLVGPDSGLIDDRQCEPVDIYDKFDENILSFLEAEKLANELRELGETAHLPVEYVKSCPYPLSFMEMEVYDFKKKLDENRPRLDFSRPETEKMLFVDKEKVLKFDSLPPNNAR

SEQ ID NO: 77255 - DNA, 444 bp, Unknown
  Obtained from environmental sample
  misc_feature (1)..(444): n is a, c, g, or t
atgaagagcatatatctgtcggctccgggacttgtctgttgcgccggacctaacagggagagaatgtataattcctgcctaaagggagacaggagcggatttgttgtccgggaattgcccggcggcagcgctgatgagagcagggtgaaatatcctgtggggcagattcaatgggaagaccatgcgaccattcccgggtcaggctttttcgccaatgagacggacagcagaattatccgcatcattgatgaggcgctccggcagattcagaatgaaatcgaaaatgccattgccggctatggcccggaaagaatcggggtctgtttcggcacttgcgataacggctccgaaagctctctctttgcacacagggaatttgccgcaaggggagtttttcccggaaactacaatcttgcctttcaaagcccttcattttccggttga

SEQ ID NO: 77256 - protein, 147 aa, Unknown
  Obtained from environmental sample
  misc_feature (1)..(147): Xaa is any amino acid
MKSIYLSAPGLVCCAGPNRERMYNSCLKGDRSGFVVRELPGGSADESRVKYPVGQIQWEDHATIPGSGFFANETDSRIIRIIDEALRQIQNEIENAIAGYGPERIGVCFGTCDNGSESSLFAHREFAARGVFPGNYNLAFQSPSFSG

SEQ ID NO: 77257 - DNA, 477 bp, Unknown
  Obtained from environmental sample
  misc_feature (1)..(477): n is a, c, g, or t
atggcgggaaaagaacctcacaattacccagagcggcgattttttaaagatgaacgcgctattttcgatattcagggtgaaggcaaaattgaattgcgtttaaggcttccagcatggcttcgcgagaaagccagcataagccttaacgggaaggaaattgatttccgcacgcttgacggttacgccgtaatccaaaggcgctttattgatggcgacaaacttgaaataagtcttcccttcgctctgcggcttgagagaaccaaagataaccctttgatcgcctgcctttactacgggcctctggtcatggtaattgacgacgcaagcaatgaatttattgaattagagctggatgaaagagcagcagggtttgaaagaaccggagacttagagttgtcttttggaatatacaggttcattccaatactgcttgccaatacaaagccgtatcacgcttacttcaaactaaaatcatga

SEQ ID NO: 77258 - protein, 158 aa, Unknown
  Obtained from environmental sample
  misc_feature (1)..(158): Xaa is any amino acid
MAGKEPHNYPERRFFKDERAIFDIQGEGKIELRLRLPAWLREKASISLNGKEIDFRTLDGYAVIQRRFIDGDKLEISLPFALRLERTKDNPLIACLYYGPLVMVIDDASNEFIELELDERAAGFERTGDLELSFGIYRFIPILLANTKPYHAYFKLKS

SEQ ID NO: 77259 - DNA, 894 bp, Unknown
  Obtained from environmental sample
  misc_feature (1)..(894): n is a, c, g, or t
gtgcagccgcaccgagaacaggagggagcattaaaaaaacaaggggaatgcgaaaaaacgattcaagatttgaacgggtctattgaacaacaggagcgttttatcgctgcatcacaaaatgagtataacgatatgagcgcccaatattttgaagaagctaaagcggcagaggaaaaattggctatccatctgaggacaaaaaggtatgaggaggtaagcaataatttcgggccgcggctgcaagctttaaaaaatcaaaagggtgaattagacttgaaattgaaagacttgcaacagggttttaattccaaatacggcaacgattttccgcgcggttatgaacacatgaagaactattcagaggaaaagtttaaattagagaactcgaaaataacggaatacaaagaggaattagacaaggctaaagaacggtgtgaaaaagaatttaaagaatcgtttctttcggaaatgagagaaaatatcgagaaagccaagagtgaatttaaaggactaaacaacgtgttgaaggatgtttgttacggcggtgagtattataaatttgaaataacgcctaataaacagaaagagcagctttaccgcatgataacggacgaatccaattacggttcaaatacgcttttcgggactgagtttgaaaggaaatacaaagatgaaattgacgatttgttttcaaagttgaccgtttcggatgattcgggtgaaaaaacacttagagaatattcggattacaggaattaccttgattatgatattgaggtaaccaaaaacaacgagcggcataaattttctaaaatttatgcggaaaaaagcggaaggagaaacccaaacgccgtattatgtcgcgatagccgcctcttttcatncagtttataa

SEQ ID NO: 77260 - protein, 297 aa, Unknown
  Obtained from environmental sample
  misc_feature (1)..(297): Xaa is any amino acid
MQPHREQEGALKKQGECEKTIQDLNGSIEQQERFIAASQNEYNDMSAQYFEEAKAAEEKLAIHLRTKRYEEVSNNFGPRLQALKNQKGELDLKLKDLQQGFNSKYGNDFPRGYEHMKNYSEEKFKLENSKITEYKEELDKAKERCEKEFKESFLSEMRENIEKAKSEFKGLNNVLKDVCYGGEYYKFEITPNKQKEQLYRMITDESNYGSNTLFGTEFERKYKDEIDDLFSKLTVSDDSGEKTLREYSDYRNYLDYDIEVTKNNERHKFSKIYAEKSGRRNPNAVLCRDSRLFSXSL

SEQ ID NO: 77261 - DNA, 540 bp, Unknown
  Obtained from environmental sample
  misc_feature (1)..(540): n is a, c, g, or t
atggtcaaaagaatccggccgaaagtcactgtcccgctgctgtttatgacctatataaaccccgtatttacatacggcaaggaccgctttgcggcaaagtgcaagcaagtggggattgacggcgtcattatccccgacctgccatttgaggaaaagggcgaattgcaaggcgaatgcgacaagcacggcgtttgcctgatttccatgattgcgccgacctccggcaaacgggcggaggaaatagcccgcggcgcgcaaggcttcctctattgcgtatcctcgctgggcgttacgggcgagcgaagcaagctaagcaccgaaatcgcggaaaccatccgatacgtaagggccgcctcccccatcccctgcgccgtcggcttcggcatatccacgcccccgcaagcggcggaaatggccaaattctccgacggcgtcatcatcggcagcgccatagtaaaaatcgtaggcaaatacggcaaaaacagcccggaccccgtaagcagcttcgtaaagggcataaaggaagccataagccgctga

SEQ ID NO: 77262 - protein, 179 aa, Unknown
  Obtained from environmental sample
  SIGNAL (1)...(24)
  DOMAIN (1)...(178): Tryptophan synthase alpha chain
  misc_feature (1)..(179): Xaa is any amino acid
MVKRIRPKVTVPLLFMTYINPVFTYGKDRFAAKCKQVGIDGVIIPDLPFEEKGELQGECDKHGVCLISMIAPTSGKRAEEIARGAQGFLYCVSSLGVTGERSKLSTEIAETIRYVRAASPIPCAVGFGISTPPQAAEMAKFSDGVIIGSAIVKIVGKYGKNSPDPVSSFVKGIKEAISR

SEQ ID NO: 77263 - DNA, 417 bp, Unknown
  Obtained from environmental sample
  misc_feature (1)..(417): n is a, c, g, or t
ttgggaagaggcgcgtatcttgacgacctgctgtactgcccgcaccaccccgacaagggctatcccgaagagattccagagtacaaaattgtttgccaatgccgcaagcccaagccaggcatgttacttgaagcggcggagagatacaacattgacctttcacggtcttacatgataggcgacagcacggctgacattctcgcagggctttcggctggttgtaccgcaattggcatcagaacgggcgaagcattgaaagatggcaaatatgcaggtcccattcaaagcagctatcgaacatacaactcgctgcgcgatgctataatggctatcacgaagggaaaaacgagtgctgatggcgcaacggaaaaaacagacgagggcaaaaatggaaacgataggctgcgacatttctga

SEQ ID NO: 77264 - protein, 138 aa, Unknown
  Obtained from environmental sample
  misc_feature (1)..(138): Xaa is any amino acid
MGRGAYLDDLLYCPHHPDKGYPEEIPEYKIVCQCRKPKPGMLLEAAERYNIDLSRSYMIGDSTADILAGLSAGCTAIGIRTGEALKDGKYAGPIQSSYRTYNSLRDAIMAITKGKTSADGATEKTDEGKNGNDRLRHF

SEQ ID NO: 77265 - DNA, 480 bp, Unknown
  Obtained from environmental sample
  misc_feature (1)..(480): n is a, c, g, or t
atgaacatcataagacggcctttccgctacaaaaacgacaatgttgtgttcatactcatcgggataaacatactggtttacattgccgagctttttttcagaaactcacagattattacccgcctttccatgatcccgctggcggtggtgcaaagacactggatttggcagtttgtcacctacatgtttgtccatgacccgaattccattgcccatattctgttcaatatgtttgccctttttatgttcgggcgtcaggtggaatggaaaatgggaagcagcgaattcctgctttattatctgcttacaggaaccctggcaggggttttttcattctttgtttacatctatactggtactctgggtgttcacctgatgggcgcttcgggggcgatatttgcggttcaactggcattcgccgcctttttccccgattcaatcatgtacctatggggcatactaccccctcggccgatctga

SEQ ID NO: 77266 - protein, 159 aa, Unknown
  Obtained from environmental sample
  DOMAIN (49)...(159): Rhomboid family
  misc_feature (1)..(159): Xaa is any amino acid
MNIIRRPFRYKNDNVVFILIGINILVYIAELFFRNSQIITRLSMIPLAVVQRHWIWQFVTYMFVHDPNSIAHILFNMFALFMFGRQVEWKMGSSEFLLYYLLTGTLAGVFSFFVYIYTGTLGVHLMGASGAIFAVQLAFAAFFPDSIMYLWGILPPRPI

SEQ ID NO: 77267 - DNA, 306 bp, Unknown
  Obtained from environmental sample
  misc_feature (1)..(306): n is a, c, g, or t
atggttgacaccagctgttttacgctgattataaccgaagcagtcaggcaggaattgggccttgatgtgattgaagaatatgatgttattctggcaaacgagacgacagagacgtgcaaaaaaacagagcctgtggaagttcattggaaaaaccgtcaagacgttgtccgagccatggtcctgccaagcgctaaagaagtcctcctgggagccatccctcttgaaggtatggatttgatagtagaccccgcacgacagacagtgatgggcgctcacggcgaaaaagcggtctatccagtcaaatga

SEQ ID NO: 77268 - protein, 101 aa, Unknown
  Obtained from environmental sample
  misc_feature (1)..(101): Xaa is any amino acid
MVDTSCFTLIITEAVRQELGLDVIEEYDVILANETTETCKKTEPVEVHWKNRQDVVRAMVLPSAKEVLLGAIPLEGMDLIVDPARQTVMGAHGEKAVYPVK

SEQ ID NO: 77269 - DNA, 780 bp, Unknown
  Obtained from environmental sample
  misc_feature (1)..(780): n is a, c, g, or t
ttggtgtcgataacctcgggtgcggcggcggccctgccggctttgatctcggctattatctcatcgtccatgtcgacgacgtcgccggtgccgagcatgtcggcggcgctatcgattttattatcctcatcaaccgctgtttcaataatatcaattgtatcaatagtatcgacagtatcaacagcggtatcacccgcatcaacaatagtttcagtaccaatgacatcactagtatcaacaacactatctgtactaactacggtatctgtaccaataatattatcagtatcaattatatcaccggtgtcgacaattgtatctgtaccaatgacatcatcggtatcaacaatcgtatctgtactaacgacatcacctatatcgacaatcgtatctgtaccaatgacatcaccggtatcaacaatcgtatctgtaccaatgacatcatcggtatcgacaattgtatctgtaccaatgacatcaccggtatcaacaacactttcttctgtactaacgacatcacaggtatcaacaacactttcttccgtactaacgacattacctacatcaacaacactttcttccgtactaacgacatcacctatatcaacaacactctcttccgtaccaatgacatcacctacatcaacaacactttcttccataccaacgacatctccggtatcaacaacactctcttccgtactaacgacatcaccggtatcaacaacactctcttccataccaacgacatctccggtatcacaacactctcttccgtag

SEQ ID NO: 77270 - protein, 259 aa, Unknown
  Obtained from environmental sample
  SIGNAL (1)...(25)
  misc_feature (1)..(259): Xaa is any amino acid
MVSITSGAAAALPALISAIISSSMSTTSPVPSMSAALSILLSSSTAVSIISIVSIVSTVSTAVSPASTIVSVPMTSLVSTTLSVLTTVSVPIILSVSIISPVSTIVSVPMTSSVSTIVSVLTTSPISTIVSVPMTSPVSTIVSVPMTSSVSTIVSVPMTSPVSTTLSSVLTTSQVSTTLSSVLTTLPTSTTLSSVLTTSPISTTLSSVPMTSPTSTTLSSIPTTSPVSTTLSSVLTTSPVSTTLSSIPTTSPVSQHSLP

SEQ ID NO: 77271 - DNA, 714 bp, Unknown
  Obtained from environmental sample
  misc_feature (1)..(714): n is a, c, g, or t
atggctattgatgatttctgtaatgctatcattcttaatctggaaagttatgatgtctacaaaggccgcggattagcttatttaaaatctggtcaatatagtttagctattaatgactttaataaagcaattgccttaaatttggattttgattcttatattttccgtggaattgcctacctgaaagaaagtcaatatgacaaagctattgaaaattataccgaagctattaaagaatatcgggaatttaactatgaaaaagaatattttaaagcctttataggtcgtggacaaacctatatgtatattggtcaatttgccaaagctattgatgatttggatagagctattttaattactgaacaagccatgttatcttacactaaaagaatatatattaccggaataagtagtcaatatgacaaggctattaatgacctggataaagctgtcaaaattgctcataactactcgtttgctcttgctatccgtggagatttttacagaatgaaaggtcaatatgacgaagctattaatgacttaaacgaagctatccaaaattatccggaatactcatttgctctagctgtccgtggagatgtttatagaaggaaaggttgttattataaggccattacagatttaaataaagctatcaaaattgatccaaatttttcattcgcttgcaccgtacgcacagaggttacagattaa

SEQ ID NO: 77272 - protein, 237 aa, Unknown
  Obtained from environmental sample
  DOMAIN (90)...(123): Tetratricopeptide repeat
  misc_feature (1)..(237): Xaa is any amino acid
MAIDDFCNAIILNLESYDVYKGRGLAYLKSGQYSLAINDFNKAIALNLDFDSYIFRGIAYLKESQYDKAIENYTEAIKEYREFNYEKEYFKAFIGRGQTYMYIGQFAKAIDDLDRAILITEQAMLSYTKRIYITGISSQYDKAINDLDKAVKIAHNYSFALAIRGDFYRMKGQYDEAINDLNEAIQNYPEYSFALAVRGDVYRRKGCYYKAITDLNKAIKIDPNFSFACTVRTEVTD

SEQ ID NO: 77273 - DNA, 531 bp, Unknown
  Obtained from environmental sample
  misc_feature (1)..(531): n is a, c, g, or t
ttgccgccgggttttctgcaccttgacggatttatggatacaagcgacgccgttctgtcacgccgcccgcttgaagaaaaacgacggattcttaaagacccgcacacaggctcattcgccgtcataatgctggcgatcttgtttattctgcaatttggtgctgtatttcccattgtcgaaaaggggcaataccttgttttgttgatcacaattcctgttatttcaaggtgttgcgcggctttgtctatactctgtctgaatacaatgcctcaaagcagttatgcgaatatgttccgtcaaaatgccggaatacaacataaaatcgcggtactcattacgggaattacggtaatagcgctctccggttattttgctcaagccctcggtctgataacggcagcggcggcggtcgtggggtttatcgcggctcttgtctgggcatacaaaaacctgcgcggcgtttcgggcgatgtagcggggtttgcccttgttatcggcgaattatgcggcttaatcgcgatgactgtttga

SEQ ID NO: 77274 - protein, 176 aa, Unknown
  Obtained from environmental sample
  DOMAIN (1)...(174): Cobalamin-5-phosphate synthase
  misc_feature (1)..(176): Xaa is any amino acid
MPPGFLHLDGFMDTSDAVLSRRPLEEKRRILKDPHTGSFAVIMLAILFILQFGAVFPIVEKGQYLVLLITIPVISRCCAALSILCLNTMPQSSYANMFRQNAGIQHKIAVLITGITVIALSGYFAQALGLITAAAAVVGFIAALVWAYKNLRGVSGDVAGFALVIGELCGLIAMTV

SEQ ID NO: 77275 - DNA, 729 bp, Unknown
  Obtained from environmental sample
  misc_feature (1)..(729): n is a, c, g, or t
atgaagcgcgaacacatcatcggcgccagcgtcagcgacaccaccgccgagactgcgatcgaggcggtgacggtgagggcgaattcgcggaacagccgcccgatgataccgcccatcaacagcagtgggatgaacaccgcgatcagcgacaggctgatcgacagcaccgtgaagccgatctcgcgcgaccccttcagcgccgccgcgaacggtgtttcgccgtgctcgatgtggcggtggatgttctccaccaccacgatggcgtcgtcgacgacgaagccgaccgcgatcgtcagcgccatcagcgacagattgtcgaggctgaaccccatcaggtacatcgccgccgccgagccgagcagcgccagcggcacggtaaccccggggatgatggtcgcccagaagttgcgcaggaacagaaggatcaccagcaccaccagcatgacggtgaggccgagggtgaactcgacgtccttcaccgaggcgcggatggtgccggtgcggtcctgcaggatggcgacgttcatcgccggcggaatgttgcggatcagccgcggcagcagcgcccggatctcgtcgacggtgtcgatgacgttggcgccgggctgcttgaacaccacgagcaggacgccgcgcttgccgttctggaacgcgccgacgggtgtgtcggtcggaccgttgacgggctggccgatgtcgcggatccggatcggaccgccggcgtggtag

SEQ ID NO: 77276 - protein, 242 aa, Unknown
  Obtained from environmental sample
  misc_feature (1)..(242): Xaa is any amino acid
MKREHIIGASVSDTTAETAIEAVTVRANSRNSRPMIPPINSSGMNTAISDRLIDSTVKPISRDPFSAAANGVSPCSMWRWMFSTTTMASSTTKPTAIVSAISDRLSRLNPIRYIAAAEPSSASGTVTPGMMVAQKLRRNRRITSTTSMTVRPRVNSTSFTEARMVPVRSCRMATFIAGGMLRISRGSSARISSTVSMTLAPGCLNTTSRTPRLPFWNAPTGVSVGPLTGWPMSRIRIGPPAW

SEQ ID NO: 77277 - DNA, 477 bp, Unknown
  Obtained from environmental sample
  misc_feature (1)..(477): n is a, c, g, or t
gtgatgcgggggatctggccgaactggcgctcgagcggcgaggcgaccgacgccgccatggtctcggcgctcgcgcctngcaaggtcacgctcacctggatggtgggaaaatcgacctgcgggagcgcggcgaccggcaggaacgggatcgcgacgaggccgacgaacccgatcgccgccatcagaagcgccgtcgcgatcgggcggcggatgaacggctcggatatgttcatggggcgcggtcccgcgtggcagcacagccggcgtccccgcacacacgccgacgccggccgtcaccggcaatgggctggaaggggtcccccgctccgtgctggggcgtctcggcgccggtctggccggacatgccagggaaccggggtggcgtgtcaccggcggcgcggcgactgcaggcgcgatgagaagggcaccgggcagccgcgagcggtcctcgtgccccggcatcgcgcacgtgggtga

SEQ ID NO: 77278 - protein, 158 aa, Unknown
  Obtained from environmental sample
  misc_feature (1)..(158): Xaa is any amino acid
MMRGIWPNWRSSGEATDAAMVSALAPXKVTLTWMVGKSTCGSAATGRNGIATRPTNPIAAIRSAVAIGRRMNGSDMFMGRGPAWQHSRRPRTHADAGRHRQWAGRGPPLRAGASRRRSGRTCQGTGVACHRRRGDCRRDEKGTGQPRAVLVPRHRARG

SEQ ID NO: 77279 - DNA, 762 bp, Unknown
  Obtained from environmental sample
  misc_feature (1)..(762): n is a, c, g, or t
atgcacgaggaatttgatctgacggggaaaaaggccgtcgtcaccggcgccggcaggggactgggcaggaacatcgccgtgggactcgcgcggtacggggcggatgtcgcgctctggagccgcaccatgtcggaactggaagaaacggcggccatgatccgggccgaagggcgccagacatggatcgagtgcgttgacgtggcggatatcggcgccctggagggcgcggcgcaaaaggcggcggcgtccatggggcgtgtggacatcctggtgaacaacgccggcaccaacaagccgcagcccgctgaaagcgtggacgcggccacttgggacgcgatcatgaacatcaacacaaagggcgcttttttttgcgcccaggcattcggcaagatcatgatcgggcagcagggcggcaagatcatcaacatttcctcgcagtccggcaagctcgcgctgctcaaccgtgccgtatactgcgcgagcaagggcgcgctcgatcagcttacccgggtcatggcctatgaatgggccaagcacaacattacggtcaatgccgtggcgcccacgttcgtggagacgagcctgaccgcgagcatgctcaaggacaaggctttcagcgactacgtgttcggcaagctgcggatgagccgcatggccaaggcggaagaagtgacggccgccgtgctctatctggctggccccggcgcgaacatcgtgacggggcatatcctgtatgtggacgggggctggnacattcactga

SEQ ID NO: 77280 - protein, 253 aa, Unknown
  Obtained from environmental sample
  DOMAIN (10)...(177): short chain dehydrogenase
  misc_feature (1)..(253): Xaa is any amino acid
MHEEFDLTGKKAVVTGAGRGLGRNIAVGLARYGADVALWSRTMSELEETAAMIRAEGRQTWIECVDVADIGALEGAAQKAAASMGRVDILVNNAGTNKPQPAESVDAATWDAIMNINTKGAFFCAQAFGKIMIGQQGGKIINISSQSGKLALLNRAVYCASKGALDQLTRVMAYEWAKHNITVNAVAPTFVETSLTASMLKDKAFSDYVFGKLRMSRMAKAEEVTAAVLYLAGPGANIVTGHILYVDGGWXIH

SEQ ID NO: 77281 - DNA, 864 bp, Unknown
  Obtained from environmental sample
  misc_feature (1)..(864): n is a, c, g, or t
atgggacagactgcgggcgtggctgatccgtcacagtggatgaaagttttcggcgtcgatatagacagccgtgatactactgcgctgatcgaacgcgccaagtcgattactactcaagagatcgcttcgatggagaatgtttttaagaagtacttngaaaagctcccccaggccggtgatgtaactgaacgctcaattcgcatgtacctggccatcaagaagatcgtcgcggaagaggggtttgatttttacacaatccagtcgtttcccggtctcgcggatgattataccgctacatgtttcgcccagagcatgatgctcaacgaccgtgttcctacatctactcttagcgatttcaacactgccatgacggtttacctgcttgacaatttgagcgacagcccggtttattacggagatttgcagcactttgacaaaaaaacaaaagagatgaagatcattggcgatggagcggtcccgccggatctggcggcaaaaggcacaaaagcggctttcgcggaacatggtataccgactgagggcagcgcgggaggcctttccatcagtctggtgtgcaaggaaggcaagggtgttcttgcgagactgggacgggtaaacggcgaatttgtgatggtaatcgcgcgatgcagcgtgtttgtccccgatccttccgaactggaaaaacgacgtcttgaatgcggtatacccttttggccccacgcattcgcaaaaatggactgcgatatggattccttgcttgaacactggaacaacgagtacggctgtttggggtatggtgaacacctgtacgatagccttgtagaattctgtgctataatcggcataaaggtaattttaccttga

SEQ ID NO: 77282 - protein, 287 aa, Unknown
  Obtained from environmental sample
  DOMAIN (135)...(287): L-fucose isomerase, C-terminal domain
  misc_feature (1)..(287): Xaa is any amino acid
MGQTAGVADPSQWMKVFGVDIDSRDTTALIERAKSITTQEIASMENVFKKYXEKLPQAGDVTERSIRMYLAIKKIVAEEGFDFYTIQSFPGLADDYTATCFAQSMMLNDRVPTSTLSDFNTAMTVYLLDNLSDSPVYYGDLQHFDKKTKEMKIIGDGAVPPDLAAKGTKAAFAEHGIPTEGSAGGLSISLVCKEGKGVLARLGRVNGEFVMVIARCSVFVPDPSELEKRRLECGIPFWPHAFAKMDCDMDSLLEHWNNEYGCLGYGEHLYDSLVEFCAIIGIKVILP

SEQ ID NO: 77283 - DNA, 849 bp, Unknown
  Obtained from environmental sample
  misc_feature (1)..(849): n is a, c, g, or t
gtgtttgtgcttactcctaattattcccattacaccatcaccatggacgccttgagagcgggaaaacacgtattctgcgaaaagcccataaccaacaactttgccctttcaaaggaaatggccgaggaagcgaaaaaacagaaccgggttcttaatattggcgtgtgcaacagataccataaatccgtagagttaataaaggaatatgttgaacaaggcaaactgggagacctttaccatatctactgttctttccgcagttttaggagcatcccggggctgggcggcgcttttacctcaaaaaaggaatccggcggcggcgtgctgattgattggggcattcactttcttgatcttattctctacattaccggcgccaggctccgcactgtttccgccaatacgtacaacaaactgggccgggacattcccgcttatgtgtacaaggatatgtgggccggccctccggtactaaacggagtctgcgacgtggacgatatggtaacgggctttatcagaaccaacggggcaagcatcagctttaacggagcctgggcccagaatattgatcaacgcgaaatgttcattgactttatgggagacaaaggcggtatcaggcttgactatggaaaacagttcagcttgtatactactgaaaacggcgtgctccagtctgtaaagccggactacaaaattcctgatatgtacgaaagggaagactcccgctttattgaggccgtaagaaaagggttaaaaacccgaagccacatagacgaagtgctcgaaagcgcgcgccttttggatgccatttacgaatccgcgggacaacaggcggagatttcaatatag

SEQ ID NO: 77284 - protein, 282 aa, Unknown
  Obtained from environmental sample
  DOMAIN (67)...(174): Oxidoreductase family, C-terminal alpha/beta domain
  misc_feature (1)..(282): Xaa is any amino acid
MFVLTPNYSHYTITMDALRAGKHVFCEKPITNNFALSKEMAEEAKKQNRVLNIGVCNRYHKSVELIKEYVEQGKLGDLYHIYCSFRSFRSIPGLGGAFTSKKESGGGVLIDWGIHFLDLILYITGARLRTVSANTYNKLGRDIPAYVYKDMWAGPPVLNGVCDVDDMVTGFIRTNGASISFNGAWAQNIDQREMFIDFMGDKGGIRLDYGKQFSLYTTENGVLQSVKPDYKIPDMYEREDSRFIEAVRKGLKTRSHIDEVLESARLLDAIYESAGQQAEISI

SEQ ID NO: 77285 - DNA, 690 bp, Unknown
  Obtained from environmental sample
  misc_feature (1)..(690): n is a, c, g, or t
ttgtccancgggtggaatatttcaacgccccggatcctggattacgacgcgccccgggctgaagccctgacngtggacaaaaaagccattgttctcagcaactacgcgcgctggtccattgaggatccgttgcagttctatcgcaccatgcggacgatccccggcgctcaggcgcgcctgaaagacgtggtgtattcgcagttgcgcattctggtgggcagctatacgctggcggaggttgtctccagccagcgggccgccatcatggagacggtcacccacagagtctccgaactcatgagaggttttggggtcaaagtggtggatgtgcggatcaagcgcaccgacctgccgcctgaaaacgcccgcgccatttttgaacgcatgcgcgcggaacgtgagcggcaggcgaaacaataccgttccgaaggaggagaagaatctacccgcatccgttcggatgccgatcgtcagcgcgccgtggaattggcggaagcgggacgcaaggcggaactgatccggggggaaggagacgcggaagcagcacgtatttatgcggaaacatttggaaaggctccggatttttttgaatttcagcgtggtttggaagctttgcgcaaggcattgaagcagaacacccgcgtggtgatgactcaggatgatccgtttttcagatccctacgggagtaa

SEQ ID NO: 77286 - protein, 229 aa, Unknown
  Obtained from environmental sample
  DOMAIN (1)...(146): SPFH domain / Band 7 family
  misc_feature (1)..(229): Xaa is any amino acid
MSXGWNISTPRILDYDAPRAEALTVDKKAIVLSNYARWSIEDPLQFYRTMRTIPGAQARLKDVVYSQLRILVGSYTLAEVVSSQRAAIMETVTHRVSELMRGFGVKVVDVRIKRTDLPPENARAIFERMRAERERQAKQYRSEGGEESTRIRSDADRQRAVELAEAGRKAELIRGEGDAEAARIYAETFGKAPDFFEFQRGLEALRKALKQNTRVVMTQDDPFFRSLRE

SEQ ID NO: 77287 - DNA, 630 bp, Unknown
  Obtained from environmental sample
  misc_feature (1)..(630): n is a, c, g, or t
gtggataatatttattcgattgtgatttggataatcaacaatgcgaatatcggcatacttgaccagatcggcgaagtgtttgacaagttgagtactgttgaatatatagaggcttataaatcgaataagcattgggtaaaaggcgactggcgacacaccgacagcagttggaaataccagaaactgccgccgcgctggaagctgggacttgattaccgtatcgttgccgaagcgcataaccaatacacatacacctcacagggtaggcgcacagttgttgacgattttatcattgtctgccggaacctaggcttcccaatatctgactgcgacattcccaactacacattgcatcaagcagagcagaagtttcataccgagaacggagaactcgcgtttaccatgcgctactataccggcaaccggaacgcgcacttaaaaatcaataaaaagcttctgatgaaattcaatatcgaggttgcgaaaatacgccgctggatgtctgagcctgacgatgtggttgaggaatatggcgtaccgcaggacgaagccacgaggctttggaatagcgggttggggttattaggtacttatgatgtaaagatgcttgagtttaaggcggcggtgtga

SEQ ID NO: 77288 - protein, 209 aa, Unknown
  Obtained from environmental sample
  misc_feature (1)..(209): Xaa is any amino acid
MDNIYSIVIWIINNANIGILDQIGEVFDKLSTVEYIEAYKSNKHWVKGDWRHTDSSWKYQKLPPRWKLGLDYRIVAEAHNQYTYTSQGRRTVVDDFIIVCRNLGFPISDCDIPNYTLHQAEQKFHTENGELAFTMRYYTGNRNAHLKINKKLLMKFNIEVAKIRRWMSEPDDVVEEYGVPQDEATRLWNSGLGLLGTYDVKMLEFKAAV

SEQ ID NO: 77289 - DNA, 594 bp, Unknown
  Obtained from environmental sample
  misc_feature (1)..(594): n is a, c, g, or t
atgattatcccgagcatttttgaagacaccggcagaggcgagcgagcttttgatatatattcccgtttgctcaaagaacgcataatttttttaggtgcaccaataaacgatgaagttgccaacgtgataatggctcagctcatctacttggaatatgaaaatccgcaaaaagacgtgaccatttatataaacagcccaggcggctacatttccagcggccttgccatttacgataccattcagcatattcgctccgaggtggttaccatttgcatcggcgaggcttcttcaatggctgcgattatacttgctgccggaacaaagggaaaaagatatgcccttccacattcacgcataatgctgcaccagccacaaggttatgcaaaaggccaaagctccgatattcaaattcacgcaagggaagtgataaacactcgcgataaattgaacgatattgtggcaaaacacaccgggaaaaattccgaagagataaaaaagaaaaccgaccgcgacttttaccttaccccgcaagaagccttggaatttggaattatagacgaagtttttaaaccaaaagagaaaacaaagaagtga

SEQ ID NO: 77290 - protein, 197 aa, Unknown
  Obtained from environmental sample
  DOMAIN (11)...(192): Clp protease
  misc_feature (1)..(197): Xaa is any amino acid
MIIPSIFEDTGRGERAFDIYSRLLKERIIFLGAPINDEVANVIMAQLIYLEYENPQKDVTIYINSPGGYISSGLAIYDTIQHIRSEVVTICIGEASSMAAIILAAGTKGKRYALPHSRIMLHQPQGYAKGQSSDIQIHAREVINTRDKLNDIVAKHTGKNSEEIKKKTDRDFYLTPQEALEFGIIDEVFKPKEKTKK

SEQ ID NO: 77291 - DNA, 903 bp, Unknown
  Obtained from environmental sample
  misc_feature (1)..(903): n is a, c, g, or t
atgcccgccggaactatggacatcggtacagggtcattttcgctgcgttccgaaggcgagttttcaaacagcgacatgataaaaaaccttgtcgtaagccggctcggaggaaaaacagtactcatgtcagacgttgcaaccgtcattgacaccacgcgaaaagttacacaggaacttcgcatcaacggcaaaccgggcgcacaaatcgttatccagaaacagtcaggcgcaaattccgtagccatatcaaaagccgtagtaaaggaactgccaaaactgctcaaaacactgccacccgacgtacatatagacgtgatgaacaacacatccgacttcatagaaaaaagcataaacagtttgaccgaaacagtattacttgcattcatattcgtaatgttagtcgtactcttctttctcggacggtggagagcaacgttcatcatcgtaatcaccatacccgtatcgctgctcacaagtttcatctatctttatgcaaccggcggttcgctgaacatcatatcgctcagttcgctgtcaatcgcaatcggcatggttgtggacgacgccatagtagtccttgaaaacatcaccaaacacatcgaacgcggcagttccccacgcgaagcctcgatatacggaacaaacgaagtatggcttgccgtaatcgcaaccaccctgaccgtcatagccgtatttttcccgcttacgctgataggaggaatggcaggcataatgttcaagcaactcggctggatagtatgtatcgtgatagccatttccaccattgcagccataacgcttaccccgatgcttaccgcaaaaatgctccgcttcaggtcagcagggcatacatacacgggactggacgacttttataccaatagacaacctcggccgatctga

SEQ ID NO: 77292 - protein, 300 aa, Unknown
  Obtained from environmental sample
  misc_feature (1)..(300): Xaa is any amino acid
MPAGTMDIGTGSFSLRSEGEFSNSDMIKNLVVSRLGGKTVLMSDVATVIDTTRKVTQELRINGKPGAQIVIQKQSGANSVAISKAVVKELPKLLKTLPPDVHIDVMNNTSDFIEKSINSLTETVLLAFIFVMLVVLFFLGRWRATFIIVITIPVSLLTSFIYLYATGGSLNIISLSSLSIAIGMVVDDAIVVLENITKHIERGSSPREASIYGTNEVWLAVIATTLTVIAVFFPLTLIGGMAGIMFKQLGWIVCIVIAISTIAAITLTPMLTAKMLRFRSAGHTYTGLDDFYTNRQPRPI

SEQ ID NO: 77293 - DNA, 369 bp, Unknown
  Obtained from environmental sample
  misc_feature (1)..(369): n is a, c, g, or t
gtgtatgtatgccctgctgacctgaagcggagcatttttgcggtaagcatcggggtaagcgttatggctgcaatggtggaaatggctatcacgatacatactatccagccgagttgcttgaacattatgcctgccattcctcctatcagcgtaagcgggaaaaatacggctatgacggtcagggtggttgcgattacggcaagccatacttcgtttgttccgtatatcgaggcttcgcgtggggaactgccgcgttcgatgtgtttggtgatgttttcaaggactactatggcgtcgtccacaaccatgccgattgcgattgacagcgaactgagcgatatgatgttcagcgaaccgccggttgcataa

SEQ ID NO: 77294 - protein, 122 aa, Unknown
  Obtained from environmental sample
  misc_feature (1)..(122): Xaa is any amino acid
MYVCPADLKRSIFAVSIGVSVMAAMVEMAITIHTIQPSCLNIMPAIPPISVSGKNTAMTVRVVAITASHTSFVPYIEASRGELPRSMCLVMFSRTTMASSTTMPIAIDSELSDMMFSEPPVA

SEQ ID NO: 77295 - DNA, 537 bp, Unknown
  Obtained from environmental sample
  misc_feature (1)..(537): n is a, c, g, or t
gtgccgcagcgcatagatgcagcaaaaagtgagaaaaagtcgttgaagccagacatgggtcagaagtccgccatgacagggcaaaaatcgcttgaaatgcacttgagcaagattgatttgacaagcctccagcgagcgcgagaactattggattcggactccattgacgcattggaagtaggcacagtccatggtctcaagcaaatccacatctacctatttgaaggtctgtatgaatttgcggggcaggtgagggaactcaatatctccaagaacaattttagttttgccaacttccgctttttgtcaaaagtcctgcctgacatagaaaaaatgcatgaatcttcattcgatgaaatcatcgagaagtacgtagagatgaacgtcgcgcacccattcttggtcggcaatggcaggagcggcaggatatggctggacatgatgctgaaaaaaaatctgggccagtgcatagactggcaaaaaatcaccaagcgcgactatatgagcgcgatggagcgcagcccaataaacgactag

SEQ ID NO: 77296 - protein, 178 aa, Unknown
  Obtained from environmental sample
  DOMAIN (66)...(177): Fic protein family
  misc_feature (1)..(178): Xaa is any amino acid
MPQRIDAAKSEKKSLKPDMGQKSAMTGQKSLEMHLSKIDLTSLQRARELLDSDSIDALEVGTVHGLKQIHIYLFEGLYEFAGQVRELNISKNNFSFANFRFLSKVLPDIEKMHESSFDEIIEKYVEMNVAHPFLVGNGRSGRIWLDMMLKKNLGQCIDWQKITKRDYMSAMERSPIND

SEQ ID NO: 77297 - DNA, 591 bp, Unknown
  Obtained from environmental sample
  misc_feature (1)..(591): n is a, c, g, or t
atgcttaggaaacgcggcgtcaagattgtggacgccacatgcccgaacgtcaaaaaagtccatgaaatcgtggaacgcttggccgccgagggccggcgagtgttcattttgggcggccgcgcgcaccccgaaacgattgggacaaaggacagggccggccccgacgccacggtattcgagaacgcggaggaaataaggggcacggaccccggaccgaacgcggcactcgtttccaaaaccacccaaacgcgggccgaatacgacagggccttggcggcattggaagggacgggacgccgggtcgaagcgttctgcacggtgtgcccgaatacagagttgaatcagcgggcggcggcggaactggccaaaacggcggacgtaatgattgtggttggcgggacgaagtcgacgaatacgcgggccctggtgaccattgcgatggaattttgcccggacacatatgcggtcgaatccgcggcggatttaagacccgaatggttttttgggaagaaaaagtgcggaatagcggcgggcctttcgacccctatgtccgcaatcctggaagtggaaaagaaaattaaaagttattaa

SEQ ID NO: 77298 - protein, 196 aa, Unknown
  Obtained from environmental sample
  DOMAIN (2)...(196): LytB protein
  misc_feature (1)..(196): Xaa is any amino acid
MLRKRGVKIVDATCPNVKKVHEIVERLAAEGRRVFILGGRAHPETIGTKDRAGPDATVFENAEEIRGTDPGPNAALVSKTTQTRAEYDRALAALEGTGRRVEAFCTVCPNTELNQRAAAELAKTADVMIVVGGTKSTNTRALVTIAMEFCPDTYAVESAADLRPEWFFGKKKCGIAAGLSTPMSAILEVEKKIKSY

SEQ ID NO: 77299 - DNA, 375 bp, Unknown
  Obtained from environmental sample
  misc_feature (1)..(375): n is a, c, g, or t
gtgggcatcctcaatcagcttcatgaaaaactcaagcggttacttaaaaacggggtacaggaatctatttctcatatctcaaaacttgcagtgcatttcaggcaaaatttatcaacccaaaaacattttagtattcctgacagttatcccctatcaaattctttgaccccggtttactgtcagcggcaaaatgccaaaaaggcatttgaatttctgaaagataattacggaatttacgttactccctgcgcgggagatattgcgatgtttcttttccgtgtcgcccacatgagccagatactcaatatcgcagatatagatgagcttatcaggcttttaaaagtatttgaggaggaagaacatgattgccggtaa

SEQ ID NO: 77300 - protein, 124 aa, Unknown
  Obtained from environmental sample
  misc_feature (1)..(124): Xaa is any amino acid
MGILNQLHEKLKRLLKNGVQESISHISKLAVHFRQNLSTQKHFSIPDSYPLSNSLTPVYCQRQNAKKAFEFLKDNYGIYVTPCAGDIAMFLFRVAHMSQILNIADIDELIRLLKVFEEEEHDCR

SEQ ID NO: 77301 - DNA, 483 bp, Unknown
  Obtained from environmental sample
  misc_feature (1)..(483): n is a, c, g, or t
ttgaggaggaagaacatgattgccggtaaaacggttgtttacacttccggtactttcgatatgcttcattacaatcatcttaagatgattgaatatgccagggcattgggcgacatattaatcataggagtgaataccgatgaactggttatgtcctataaatcggaacccattattccttttgaggaacgcatttctctgataaaggcgcttaaataccctgacattgtcattcctcaacattccctggatcaccgggacaaggtaaaaaatttaaactttgacgtgttcgtggttggagatgattgggcaggaaaatttgattacctcaaagaacagggtgtaacggttgtttacttcccctacggcaagggcgtcacatccacaaatttgaaagaacagatctacacaagatacgcagaaatgaaagccaaagcggattcacattttcccgtagatatcaatatcgtcaaagaccagtaa

SEQ ID NO: 77302 - protein, 160 aa, Unknown
  Obtained from environmental sample
  DOMAIN (14)...(134): Cytidylyltransferase
  misc_feature (1)..(160): Xaa is any amino acid
MRRKNMIAGKTVVYTSGTFDMLHYNHLKMIEYARALGDILIIGVNTDELVMSYKSEPIIPFEERISLIKALKYPDIVIPQHSLDHRDKVKNLNFDVFVVGDDWAGKFDYLKEQGVTVVYFPYGKGVTSTNLKEQIYTRYAEMKAKADSHFPVDINIVKDQ

SEQ ID NO: 77303 - DNA, 459 bp, Unknown
  Obtained from environmental sample
  misc_feature (1)..(459): n is a, c, g, or t
gtgggctatctcatttcctttctcttcacgatctacatttccggctgggagtctcacgccggcgggttcattccgcccttgcacagcaccatcgcctactgcgtcattcttggggcgatcatgatcattgccacgcacaagtccttcagcctgatcacgcatctgcccgactacgcgctgcgctggataggcggcggtcacgaatccctgggcgaagggcatgatcaggagcggaccaatacgatggtgggcggcgcgtttgggcgcgttgaacgggccgggatggccggcgcgggcttgaacgcggacggcaaggcagtccgcgctcccggcgaacggatgcagcaggcgggggatacaggagaaaatagggccacaggaggcgaaacctcacacactaccgaacatctctcgccgggggataagggggatggtcgtctgggaaacaaggaagtataa

SEQ ID NO: 77304 - protein, 152 aa, Unknown
  Obtained from environmental sample
  misc_feature (1)..(152): Xaa is any amino acid
MGYLISFLFTIYISGWESHAGGFIPPLHSTIAYCVILGAIMIIATHKSFSLITHLPDYALRWIGGGHESLGEGHDQERTNTMVGGAFGRVERAGMAGAGLNADGKAVRAPGERMQQAGDTGENRATGGETSHTTEHLSPGDKGDGRLGNKEV

SEQ ID NO: 77305 - DNA, 684 bp, Unknown
  Obtained from environmental sample
  misc_feature (1)..(684): n is a, c, g, or t
ttgaaaaggtatgcaataaatcctgaaaagaaagccggtagttatccccattccatgactttgcaatcgggggacgtgaggtgtgatacctcgccgttgcaagtctcccagtttgaggcagacgataggatgattcagcaactggaaaaaatctacatcgaaaaaggcggcgggggtaacgattccgaaagttatgatttcgcctggtactttgccggaacccacacgtccatcgactgttgggaaaaacggaaaagaaaaggataccttttcaccatcggcgatgaatcaacaccccacggccttgaaaggatacacatcaaaacggttctcggagaagatgtcgaatccgatttaaccgccaagcagtgcctcgcgctggctgagaaaatgtatcatgtgtaccacatcattattgctgaaggcgattacccccggcatagaggtgtggacaaggtaaaagcggcatggacaaaccttatgggccaacgggccgtagtcctgaccgaccataccaaactggcagaattggttatttcccttattcagatgaacgaaggaactgacaaagacagcgttatcggttcatgggatggttcgacttctctggtcatcagggatgccgtcaaggacgtagctttggaagcgggtaaagtttccgaaaacggtgttgtcactgtttaa

SEQ ID NO: 77306 - protein, 227 aa, Unknown
  Obtained from environmental sample
  misc_feature (1)..(227): Xaa is any amino acid
MKRYAINPEKKAGSYPHSMTLQSGDVRCDTSPLQVSQFEADDRMIQQLEKIYIEKGGGGNDSESYDFAWYFAGTHTSIDCWEKRKRKGYLFTIGDESTPHGLERIHIKTVLGEDVESDLTAKQCLALAEKMYHVYHIIIAEGDYPRHRGVDKVKAAWTNLMGQRAVVLTDHTKLAELVISLIQMNEGTDKDSVIGSWDGSTSLVIRDAVKDVALEAGKVSENGVVTV

SEQ ID NO: 77307 - DNA, 579 bp, Unknown
  Obtained from environmental sample
  misc_feature (1)..(579): n is a, c, g, or t
atgcgcgtcgcggccccctcggccatccgcgccacctcttcacggccgctttcctcttccggctcgacgggcaacaatatatgccgcaaggcctcgtccaccacgcttctgcgttcttcaacgcggctttccacgcggctgtgcgcggcttccagcaccagatcgccgggggcgagatccggatcgccctgcacacgccaggcatcaaggccgggggtgtgttccctggcagcggcaagcatctccgccaccatggcttcatcatcggatcgcacccgcatcagcacggcgctgcgggcctcaaacagcttcacggcgtccgaaaacaagcgttccagcaaggatttgcgatccgcgtcaagcacgaagcccgtgcctttttccacgcaagccgtcagcagggcgcacaaatcttctttccataccgcaaaaatacggtcacactgggcatggacggctgaaatcaccgtgcccgtcgcttcgcccatcacggcgcgaaagtgttccaagtccccctgcacttgcgcgacgcccgccgcatacccgtccgcataccccgttcctcgcctctcgcgataa

SEQ ID NO: 77308 - protein, 192 aa, Unknown
  Obtained from environmental sample
  misc_feature (1)..(192): Xaa is any amino acid
MRVAAPSAIRATSSRPLSSSGSTGNNICRKASSTTLLRSSTRLSTRLCAASSTRSPGARSGSPCTRQASRPGVCSLAAASISATMASSSDRTRISTALRASNSFTASENKRSSKDLRSASSTKPVPFSTQAVSRAHKSSFHTAKIRSHWAWTAEITVPVASPITARKCSKSPCTCATPAAYPSAYPVPRLSR

SEQ ID NO: 77309 - DNA, 765 bp, Unknown
  Obtained from environmental sample
  misc_feature (1)..(765): n is a, c, g, or t
gtgcagggggacttggaacactttcgcgccgtgatgggcgaagcgacgggcacggtgatttcagccgtccatgcccagtgtgaccgtatttttgcggtatggaaagaagatttgtgcgccctgctgacggcttgcgtggaaaaaggcacgggcttcgtgcttgacgcggatcgcaaatccttgctggaacgcttgttttcggacgccgtgaagctgtttgaggcccgcagcgccgtgctgatgcgggtgcgatccgatgatgaagccatggtggcggagatgcttgccgctgccagggaacacacccccggccttgatgcctggcgtgtgcagggcgatccggatctcgcccccggcgatctggtgctggaagccgcgcacagccgcgtggaaagccgcgttgaagaacgcagaagcgtggtggacgaggccttgcggcatatattgttgcccgtcgagccggaagaggaaagcggccgtgaagaggtggcgcggatggccgagggggccgcgacgcgcatgttcgatctggttccgaaaccgccgcgcgctcccgctgtgccgtatgaggccgggacggagggcgatgccgctgcggcatgcgcggaaccgcccgctgaagttcccgcgctttccgcgccggaagcaacgggttccgccgtgccggaagcggcggatgccgccgtgccggctgccggggacgcgccggaagatctggatgccgtactggccggcggcggttttcttcccgcggaggagcgctag

SEQ ID NO: 77310 - protein, 254 aa, Unknown
  Obtained from environmental sample
  misc_feature (1)..(254): Xaa is any amino acid
MQGDLEHFRAVMGEATGTVISAVHAQCDRIFAVWKEDLCALLTACVEKGTGFVLDADRKSLLERLFSDAVKLFEARSAVLMRVRSDDEAMVAEMLAAAREHTPGLDAWRVQGDPDLAPGDLVLEAAHSRVESRVEERRSVVDEALRHILLPVEPEEESGREEVARMAEGAATRMFDLVPKPPRAPAVPYEAGTEGDAAAACAEPPAEVPALSAPEATGSAVPEAADAAVPAAGDAPEDLDAVLAGGGFLPAEER

SEQ ID NO: 77311 - DNA, 801 bp, Unknown
  Obtained from environmental sample
  misc_feature (1)..(801): n is a, c, g, or t
gtgactacgacggggagtagccctttttcgttgacagttggtgactcggccaatgtggtcattgtcgtggtaccttctgccaattacgaggttaacgcgtggacattaactcgcggatcggccggtacggaaaacgttttagccaaatcggaggtttccaacgagaataaaacgcttacaattccggactctcttttgaccgacgagttggcggtgggtgtgactttcaaagcagcgactcccgccggtttgaccgctaagcaggtggcgatctccctcggatcgggaaacactacaacttccgggttctccgtgccgctcatgattaaggtcggcgggtcacccaccacggatgaccttcccagcgggtggacgctcactacctctaacgctcagttcactatcactgggacgggatccgcgattacggcggggggggctagtgctgttgcgtccgggttcacgctcgtcaaaggaacaaatctcacggtgggggagaaaacggttgctttgacctttacgcaaacgaatttttcgagtaccacgcccactttgaccgtaaatgtaacggacgtcgcccccggtaccatctccatcacccgccaaccgaccgacggcggcagtgacgggactccggcgatttccggaagcccgaagtctttcgatcagtaccgtacagccgtcaccgcacgtctgaacgttgcggcgactgttgccggcgggcctgccggtttcgatcaagctaccgggtttgcagtacacgtggtattatactacggctgcaaacgacgctactactaa

SEQ ID NO: 77312 - protein, 266 aa, Unknown
  Obtained from environmental sample
  misc_feature (1)..(266): Xaa is any amino acid
MTTTGSSPFSLTVGDSANVVIVVVPSANYEVNAWTLTRGSAGTENVLAKSEVSNENKTLTIPDSLLTDELAVGVTFKAATPAGLTAKQVAISLGSGNTTTSGFSVPLMIKVGGSPTTDDLPSGWTLTTSNAQFTITGTGSAITAGGASAVASGFTLVKGTNLTVGEKTVALTFTQTNFSSTTPTLTVNVTDVAPGTISITRQPTDGGSDGTPAISGSPKSFDQYRTAVTARLNVAATVAGGPAGFDQATGFAVHVVLYYGCKRRYY

SEQ ID NO: 77313 - DNA, 858 bp, Unknown
  Obtained from environmental sample
  misc_feature (1)..(858): n is a, c, g, or t
gtgtttttggctgtcgcgctttattatgtattaaaaaacgatctgctgaatgtttcggatattccctatataaacaaactcaaactgaacgacaaggtgacagtttattttgttgttttactgggcgtatctttcgcagtttttgtaagccttattaccgtttgccgatacctttctttttacacgccaaattttgatttagggcttttcgtaaacatgttttacaacatgagaacgcggttcctcccgtatgtaacaagcgaacggaatttgcttttgagtcacttcgctgtgcatatctcgccgatttactatctgatgcttcctttctacctgcttttcccgtatccagtcacgctgcaaattttgcaggccgtgatactcgcaagcgggattgtaccgctttatctgctcgcgaagcataaaggattaccaaacaaaacgatagtcttcctttctttcctttacgcactgtatccggcgttatccagcgggtgcttttacgatttgcacgaaaattgctttttaaccgccttgcttttttggactttttatttttatgaaaagaaaaaatacatctccctttacatcttcgcttttctggtgttgcttgtaaaagaagatgctgcgatttacattgctttttttgctctatacgttattttatcgaatctttcggagaggaacaaaaaaacatttctacatgggtgcgcgctttttctgttagcaatggcgtatttcgggtttgcctggtttatgctgtcgaaatacggtcagggtattatggacgtacgaacctttggtaactatattccggatggtggcaatattttaagcagtaaagctcggccaatctga

SEQ ID NO: 77314 - protein, 285 aa, Unknown
  Obtained from environmental sample
  misc_feature (1)..(285): Xaa is any amino acid
MFLAVALYYVLKNDLLNVSDIPYINKLKLNDKVTVYFVVLLGVSFAVFVSLITVCRYLSFYTPNFDLGLFVNMFYNMRTRFLPYVTSERNLLLSHFAVHISPIYYLMLPFYLLFPYPVTLQILQAVILASGIVPLYLLAKHKGLPNKTIVFLSFLYALYPALSSGCFYDLHENCFLTALLFWTFYFYEKKKYISLYIFAFLVLLVKEDAAIYIAFFALYVILSNLSERNKKTFLHGCALFLLAMAYFGFAWFMLSKYGQGIMDVRTFGNYIPDGGNILSSKARPI

SEQ ID NO: 77315 - DNA, 597 bp, Unknown
  Obtained from environmental sample
  misc_feature (1)..(597): n is a, c, g, or t
ttgaaatatttaaaccccatattacaaggtttttatccagatcccagtatttgtcgagtagggcaggattattatttggtaacaagttcttttgaatactttccaggtgtgccgatttttcacagcaaggatttgattcattgggagcagataggccactgtcttacaagagaatctcaactacccctaaagggtgtcaatccttcgggaggaatttgggcaccgacaattcgatatcataaagggctcttttatatgacaactactaacattaacggtcacggaaatttttatgttacagcagaagacccatcaggagaatggtcagagccgatatggttgtcgattggtggtattgacccctcgtttacttttgatgaaaataaagtttattatactgtgagtcatcctgacgctaatggttcatggggaatcgcacaagcggaaattgatgtttcaacaggaaaatttacaagcgaattaaaacaaatttgggaaggatcgggagggaaaagtcccgaagctccgcatttatataaaataggtgattggtattaccttatgatagctcgtgccgaatctgatccgtgccnttga

SEQ ID NO: 77316 - protein, 198 aa, Unknown
  Obtained from environmental sample
  misc_feature (1)..(198): Xaa is any amino acid
MKYLNPILQGFYPDPSICRVGQDYYLVTSSFEYFPGVPIFHSKDLIHWEQIGHCLTRESQLPLKGVNPSGGIWAPTIRYHKGLFYMTTTNINGHGNFYVTAEDPSGEWSEPIWLSIGGIDPSFTFDENKVYYTVSHPDANGSWGIAQAEIDVSTGKFTSELKQIWEGSGGKSPEAPHLYKIGDWYYLMIARAESDPCX

SEQ ID NO: 77317 - DNA, 675 bp, Unknown
  Obtained from environmental sample
  misc_feature (1)..(675): n is a, c, g, or t
ttgttgtcgccggcttttccgccgcaacggttgcggacactctttgcgacctgcggcgacggagcngattccggcgctgcccatcgacccgcngacattgaccatgacgttttccgtgaacacgtcgcccttggccgggaaatcaggcggaaaaaagctgaccggacggatgattggcgaccgcctgttcaaagaggccgagaccaacatcgcgctcaaagtaacgcggtcgaacgcgaacgattcgttcgaagtgtccgggcgcggcgaactgcaattgggcattctaatcgaaaccatgcggcgcgaagggttcgagttgtcggtcgcgcggccccacgtcgtcatggtcgacggaaaagagcccatcgaggacgtcgtcatcgacgtcgacgacgaatacagcggccgcgtggtcgaaaaaatgaccaaacgcaaaggaatcatcgtcgaaatgaagccgtccggcgtcggcaagacgcgcatcgtgttctcggcgccgtcgcgcggccttatcgggtatctttcggaattcataaccgacacgcgcggcacgggcgtaatgaaccgcgtgttcgcgtcctatggcgactggcggggcgaaatcgacgcgtaccggccgggcgttcttatcagtatggaaaacggcctcgccgcaagttatgcgctgaataa

SEQ ID NO: 77318 - protein, 224 aa, Unknown
  Obtained from environmental sample
  misc_feature (1)..(224): Xaa is any amino acid
MLSPAFPPQRLRTLFATCGDGADSGAAHRPADIDHDVFREHVALGREIRRKKADRTDDWRPPVQRGRDQHRAQSNAVERERFVRSVRARRTAIGHSNRNHAARRVRVVGRAAPRRHGRRKRAHRGRRHRRRRRIQRPRGRKNDQTQRNHRRNEAVRRRQDAHRVLGAVARPYRVSFGIHNRHARHGRNEPRVRVLWRLAGRNRRVPAGRSYQYGKRPRRKLCAE

SEQ ID NO: 77319 - DNA, 591 bp, Unknown
  Obtained from environmental sample
  misc_feature (1)..(591): n is a, c, g, or t
atggcgaagtatgcctacgtcagagtatcttcacttgaccagaatgaggacagacagcttgacgcaatgaccgcgcttaaaatacctcaggagaacatattcaccgaaaaactgtcaggcaaaaacacgcagcgaccacaacttcaagccctgctcgccgccgtcaaacatggcgacagcgtaaccgttgagagtataagccgtttcgcccgcaatacaagggatttgctcgaactcgtggagcaacttacatcaaggggtgcggagttcataagccttaaagaagcacttgataccaccacacctacgggaaagttcatgctgaccatatttggggcagtcgcagagttggaacgcgggtacttgctccaacgccaagcagagggcattgccgccgcgagagcaagaagaaagcatcttggcagacccccaaaaaaaccgccagccggcttctcaaaactcgtcaagcgttgggaatacaaggaaatcgcacttccaaaaagtcctcgacgagtgcgatggcatatgtcccgctacattttaaaaatggcttggccgaataccgctctgcccagcggtctaagcttataa

SEQ ID NO: 77320 - protein, 196 aa, Unknown
  Obtained from environmental sample
  DOMAIN (3)...(139): Resolvase, N terminal domain
  misc_feature (1)..(196): Xaa is any amino acid
MAKYAYVRVSSLDQNEDRQLDAMTALKIPQENIFTEKLSGKNTQRPQLQALLAAVKHGDSVTVESISRFARNTRDLLELVEQLTSRGAEFISLKEALDTTTPTGKFMLTIFGAVAELERGYLLQRQAEGIAAARARRKHLGRPPKKPPAGFSKLVKRWEYKEIALPKSPRRVRWHMSRYILKMAWPNTALPSGLSL

SEQ ID NO: 77321 - DNA, 339 bp, Unknown
  Obtained from environmental sample
  misc_feature (1)..(339): n is a, c, g, or t
atgcgcccccttttggttttgcagatcatgctggtcatcttttccctggccggggccctgatcaaggtggccgccgaggcctggtcccgggcgggtttctggtcgcccggggtgctgggagccctggccggctcggtggcccttctggccctctacgccgtgggctggcaaaagattctccagcgtctgcccctgaccgtggcctatttcaaccggggcctggccgtcttctggggccttctctggtcggccctgctcttcggtgaaaccctgacctttttcaacatcctgggcacggcggtcatcttcgccggcctggccctggtgaaccggccatga

SEQ ID NO: 77322 - protein, 112 aa, Unknown
  Obtained from environmental sample
  SIGNAL (1)...(24)
  misc_feature (1)..(112): Xaa is any amino acid
MRPLLVLQIMLVIFSLAGALIKVAAEAWSRAGFWSPGVLGALAGSVALLALYAVGWQKILQRLPLTVAYFNRGLAVFWGLLWSALLFGETLTFFNILGTAVIFAGLALVNRP

SEQ ID NO: 77323 - DNA, 873 bp, Unknown
  Obtained from environmental sample
  misc_feature (1)..(873): n is a, c, g, or t
gtgctcagaaaatatccataccttaccacaccagattttgtcgttaaaaactcacagtattattttcggcaatgccttacatggtctgcgttaagtggtatgttttctgttaggtggtctgacattggttcgatatgtgcagataagggacaaggtctgtttgcaaatgaaaatgaattgtattttcattgtggattgctaaacagcaaggtggcatccctgtatttagatatgatttcaccgacgttagattataattgcgggtatgtgaggagaataccctatatttcaaataaccaagagcgaatcccatttctggtttcacaatgcgttgatatatctcgcgccgactgggattcatttgaaacctcatgggacttcaagtgccatccgctaattaacggcgaaatgtccattgaagcggcgttcgccgcgtgggaacgcgagtgcgaagaacgcttccaaaccctcaaagccaacgaggaggagctaaaccgcattttcataaacatctacggcttacaagacgaacttacgccggaggttgaggacaaggatgtgaccgtgcgccgcgccgacttgggacgcgagattcgttcgctgattagctacgctgtgggctgtatgtttgggcggtatacattgtacacggacggtttgttttacgcaggtgggcattgggacacagactcgaagattgaccttataagcgacatggcgcggaagaacggctttgaaccgtggcatccgtccgcgctgtttctgccggaggacgaaaatgttctgcccctcaccgacgcggattacttccataatgatattgtggcgcggttcacccggtttgtacgggctgtttacggggatagcggctga

SEQ ID NO: 77324 - protein, 290 aa, Unknown
  Obtained from environmental sample
  misc_feature (1)..(290): Xaa is any amino acid
MLRKYPYLTTPDFVVKNSQYYFRQCLTWSALSGMFSVRWSDIGSICADKGQGLFANENELYFHCGLLNSKVASLYLDMISPTLDYNCGYVRRIPYISNNQERIPFLVSQCVDISRADWDSFETSWDFKCHPLINGEMSIEAAFAAWERECEERFQTLKANEEELNRIFINIYGLQDELTPEVEDKDVTVRRADLGREIRSLISYAVGCMFGRYTLYTDGLFYAGGHWDTDSKIDLISDMARKNGFEPWHPSALFLPEDENVLPLTDADYFHNDIVARFTRFVRAVYGDSG

SEQ ID NO: 77325 - DNA, 879 bp, Unknown
  Obtained from environmental sample
  misc_feature (1)..(879): n is a, c, g, or t
gtgggagactatgtaaaagtaggacagcttattggcgaagcagttggctttgtttcatcacccgttcatgccagcgtctcagggacagtaaaaagcatagatcccctgacccccataacgggagagaaagccgtatcaattacaatcacttcggacgggaagcaggaactctgggaaggcatcgcgccgcctaaggttactaatcttaccgagtttctggaagccgtaagaaacagcggcgtagtcggtcttgggggcgcaggctatcctaccgccccaaagtttacgttaaaagagaccgttaagcttgattatatactggttaacggcgcggagtgcgaaccctatatcacttccgatacaagaacgatggtagacgataccgatttgctctgggaaggcgttctgttaatgaaagaataccttaaacctaagaatatcattgtttgtatcgaaaacaacaaacctcaaccaattaaaaaaattaaagccctatgcgaaggcaaggagggaatatcagttcaagtactgccctctttataccctcaaggtgaaagaaaagtactggtttacaatgtaacgggacggattgtcccggaaggcggacggcttcccgacgtaggatgcatcgtcgtaaattgcacgacggtcgccgtatttacaaagtacataaaaacgggaatcccccttgtttcaagatgcgtaaccgttgacggaccggcgataaaaaaaccctgtaatattatcgcccccatcggctcttacgtccgtgatttacttgatttttgcgataaacaaaataccgacgaaaaacataaactgctcataaacggacagctaaatgacaatgtaaaaaaaataacctgggcggcccgatga

SEQ ID NO: 77326 - protein, 292 aa, Unknown
  Obtained from environmental sample
  DOMAIN (57)...(280): Respiratory-chain NADH dehydrogenase 51 Kd subunit
  misc_feature (1)..(292): Xaa is any amino acid
MGDYVKVGQLIGEAVGFVSSPVHASVSGTVKSIDPLTPITGEKAVSITITSDGKQELWEGIAPPKVTNLTEFLEAVRNSGVVGLGGAGYPTAPKFTLKETVKLDYILVNGAECEPYITSDTRTMVDDTDLLWEGVLLMKEYLKPKNIIVCIENNKPQPIKKIKALCEGKEGISVQVLPSLYPQGERKVLVYNVTGRIVPEGGRLPDVGCIVVNCTTVAVFTKYIKTGIPLVSRCVTVDGPAIKKPCNIIAPIGSYVRDLLDFCDKQNTDEKHKLLINGQLNDNVKKITWAAR

SEQ ID NO: 77327 - DNA, 669 bp, Unknown
  Obtained from environmental sample
  misc_feature (1)..(669): n is a, c, g, or t
gtgctaaaactgtggcaggaggactgccatgcagagacggcacgcgctgagggacgaccagtgggggaaggtcaggggcgccctgcccgggaagcccgagggccccggcaggacgtgcggcgacaaccgcctcttcgtggaggccgtcatgtggatagggaagacgggggccccgtggcgcgacctcccgcccgagtacggcaagtgggcgaccgtccacaagcggttcgtccgctgggcgaagaacggggtctggcagatggtgttcaacgcactggcggccgatgccgacaacgagcggctgatgatcgacggcaccatagtccgcgcccaccggcacgccgcgggggcgaaaaagggggcgaagaaggccgggccctcggccgctccgggggcgggctcggcacgaaggtccacaccctctgcgacgccctcggcctgcccctccgcttcctcctgaccggcggggagcggcacgacagcacacaggccctgccactgctggagggcatggagggcggcgcggtcctggcggacaaggggcacgacagcgacgcgacagcggcggccgtgtcggggatgggcgccgaggtggtcatcccgccgaggtcgaaccgcaggggtcccgcccgtgcgacagcgacccctgcagggagaggaacgcgatag

SEQ ID NO: 77328 - protein, 222 aa, Unknown
  Obtained from environmental sample
  misc_feature (1)..(222): Xaa is any amino acid
MLKLWQEDCHAETARAEGRPVGEGQGRPAREARGPRQDVRRQPPLRGGRHVDREDGGPVARPPARVRQVGDRPQAVRPLGEERGLADGVQRTGGRCRQRAADDRRHHSPRPPARRGGEKGGEEGRALGRSGGGLGTKVHTLCDALGLPLRFLLTGGERHDSTQALPLLEGMEGGAVLADKGHDSDATAAAVSGMGAEVVIPPRSNRRGPARATATPAGRGTR

SEQ ID NO: 77329 - DNA, 543 bp, Unknown
  Obtained from environmental sample
  misc_feature (1)..(543): n is a, c, g, or t
gtgccccttgtccgccaggaccgcgccgccctccatgccctccagcagtggcagggcctgtgtgctgtcgtgccgctccccgccggtcaggaggaagcggaggggcaggccgagggcgtcgcagagggtgtggaccttcgtgccgagcccgcccccggagcggccgagggcccggccttcttcgccccctttttcgcccccgcggcgtgccggtgggcgcggactatggtgccgtcgatcatcagccgctcgttgtcggcatcggccgccagtgcgttgaacaccatctgccagaccccgttcttcgcccagcggacgaaccgcttgtggacggtcgcccacttgccgtactcgggcgggaggtcgcgccacggggcccccgtcttccctatccacatgacggcctccacgaagaggcggttgtcgccgcacgtcctgccggggccctcgggcttcccgggcagggcgcccctgaccttcccccactggtcgtccctcagcgcgtgccgtctctgcatggcagtcctcctgccacagttttag

SEQ ID NO: 77330 - protein, 180 aa, Unknown
  Obtained from environmental sample
  misc_feature (1)..(180): Xaa is any amino acid
MPLVRQDRAALHALQQWQGLCAVVPLPAGQEEAEGQAEGVAEGVDLRAEPAPGAAEGPAFFAPFFAPAACRWARTMVPSIISRSLSASAASALNTICQTPFFAQRTNRLWTVAHLPYSGGRSRHGAPVFPIHMTASTKRRLSPHVLPGPSGFPGRAPLTFPHWSSLSACRLCMAVLLPQF

SEQ ID NO: 77331 - DNA, 432 bp, Unknown
  Obtained from environmental sample
  misc_feature (1)..(432): n is a, c, g, or t
atgcagagacggcacgcgctgagggacgaccagtgggggaaggtcaggggcgccctgcccgggaagcccgagggccccggcaggacgtgcggcgacaaccgcctcttcgtggaggccgtcatgtggatagggaagacgggggccccgtggcgcgacctcccgcccgagtacggcaagtgggcgaccgtccacaagcggttcgtccgctgggcgaagaacggggtctggcagatggtgttcaacgcactggcggccgatgccgacaacgagcggctgatgatcgacggcaccatagtccgcgcccaccggcacgccgcgggggcgaaaaagggggcgaagaaggccgggccctcggccgctccgggggcgggctcggcacgaaggtccacaccctctgcgacgccctcggcctgcccctccgcttcctcctga

SEQ ID NO: 77332 - protein, 143 aa, Unknown
  Obtained from environmental sample
  misc_feature (1)..(143): Xaa is any amino acid
MQRRHALRDDQWGKVRGALPGKPEGPGRTCGDNRLFVEAVMWIGKTGAPWRDLPPEYGKWATVHKRFVRWAKNGVWQMVFNALAADADNERLMIDGTIVRAHRHAAGAKKGAKKAGPSAAPGAGSARRSTPSATPSACPSASS

SEQ ID NO: 77333 - DNA, 378 bp, Unknown
  Obtained from environmental sample
  misc_feature (1)..(378): n is a, c, g, or t
atgaatattgtaaccgtaaccaaagaaaacttggaacgcgaacacatctgctgcgcgatttcaaataacaatgattgtcaggtcgccgcgaaaaaatcatggctttcggagcgttttgcggacgggcttgttttcaagaaaagcgatgtgcgcgggaaatgctttattgaatacatacccgctgaaaaggcgtggtgtcctattgaagctgctggatatgtgttcattgactgtttttgggtatcagggcagttcaaaggacagggcaattccaatctgctgcttgacgagtgtatcaaagatagcaaagaaaagggcaaaacagggctttgcgtcctatcttcaacgaagaaaatgccgattgtcgactcgccataa

SEQ ID NO: 77334 - protein, 125 aa, Unknown
  Obtained from environmental sample
  misc_feature (1)..(125): Xaa is any amino acid
MNIVTVTKENLEREHICCAISNNNDCQVAAKKSWLSERFADGLVFKKSDVRGKCFIEYIPAEKAWCPIEAAGYVFIDCFWVSGQFKGQGNSNLLLDECIKDSKEKGKTGLCVLSSTKKMPIVDSP

SEQ ID NO: 77335 - DNA, 423 bp, Unknown
  Obtained from environmental sample
  misc_feature (1)..(423): n is a, c, g, or t
gtggagttcattatgaatggtacaaatcacaaaatgaacgccgcaagcacgttcccgttttatatctttgaatgttggaatcaggaaactccgctactatctgaatttccatgcaaaggcgatacagtcatcggtaacgacgtttggattgggcagaacgctactattcttcccggcgttcaagtcggcaacggcgctataatcggattgaacagcgtgataggaagcaatgtcgagccgtacacgattgttgcgggcaatcccgcaaaactgattaggaaacgctttgacgacgagcttatctcaatgctcgaacagttcaagtggtgggataagtccgtagaggaaatacaaacgctgatacctttgctgtccaacagagatttggaacaggtaaaaagtgaattgaggcgtctgatatga

SEQ ID NO: 77336 - protein, 140 aa, Unknown
  Obtained from environmental sample
  misc_feature (1)..(140): Xaa is any amino acid
MEFIMNGTNHKMNAASTFPFYIFECWNQETPLLSEFPCKGDTVIGNDVWIGQNATILPGVQVGNGAIIGLNSVIGSNVEPYTIVAGNPAKLIRKRFDDELISMLEQFKWWDKSVEEIQTLIPLLSNRDLEQVKSELRRLI

SEQ ID NO: 77337 - DNA, 522 bp, Unknown
  Obtained from environmental sample
  misc_feature (1)..(522): n is a, c, g, or t
ttgtccttgcggatcatgttccaggacgaggccagattcggaagaattcaagaccccaaagcctgttgggcgctgcggcccatgcgcccctatgtggtaaggcagatagtacgcgagtatgtatatgtttttggtgctgtaagcccttgcgacgggcggcatgacagcttggtgttaccttgggcgaacgccgaaaccatgtccttgttcttggaagagataagccaacgctatcctgatgaacacatcttgatgtttatggatcaggccggttggcacaaagcaaagcagttgcgaattccggcgaacatagaattagcgtttttgccgccatattcacccgaattgaatccgcaagagcagatttgggatgaattgcgagaaaaatactgcgggaacaaggtgtttaaaaacctccaaagtgtcgttgatgccgtagtccaaggcttacaacacttggagacctcgccttgtaccctcgctcgcctcactcaaaggagttggctgttaaatcccacttga

SEQ ID NO: 77338 - protein, 173 aa, Unknown
  Obtained from environmental sample
  misc_feature (1)..(173): Xaa is any amino acid
MSLRIMFQDEARFGRIQDPKACWALRPMRPYVVRQIVREYVYVFGAVSPCDGRHDSLVLPWANAETMSLFLEEISQRYPDEHILMFMDQAGWHKAKQLRIPANIELAFLPPYSPELNPQEQIWDELREKYCGNKVFKNLQSVVDAVVQGLQHLETSPCTLARLTQRSWLLNPT

SEQ ID NO: 77339 - DNA, 600 bp, Unknown
  Obtained from environmental sample
  misc_feature (1)..(600): n is a, c, g, or t
gtggctgaccattacagccgccaagcccgcgaggccggctatccggcccgttcggtctataagctggaggaaatggaccggaagcaccgcttgttccggccgggccagcgagtgctggatttaggctgcgcccccggtagctggagcctctacgttgcccaaaaagtcggcggggaaggcttggttctcggcttggatttaaagcccttgccgcttgaaaatggccaaccgcgccccccgctttttttcctgaccgccgatatcttgacggcttccccggaattagccgaaccccaaggcccttttgacctggttctgtcggacctggctccggcgacctgtggccgcaaggaggtggaccaagcccgcagtctggccctggtccaggtggcctggacttgggccgaggctttgttgaaaccgggcggacattttttatataaaattttccagagtcccgaaggtgaggatttcggccggaacctcaaaggaaaattcaataaagttgaattattgaaaccaaaggccacccggagccggagccgggagattttcgggctggggcttggcttcaaatcgggtcccggtcatggcgactaa

SEQ ID NO: 77340 - protein, 199 aa, Unknown
  Obtained from environmental sample
  DOMAIN (14)...(193): FtsJ-like methyltransferase
  misc_feature (1)..(199): Xaa is any amino acid
MADHYSRQAREAGYPARSVYKLEEMDRKHRLFRPGQRVLDLGCAPGSWSLYVAQKVGGEGLVLGLDLKPLPLENGQPRPPLFFLTADILTASPELAEPQGPFDLVLSDLAPATCGRKEVDQARSLALVQVAWTWAEALLKPGGHFLYKIFQSPEGEDFGRNLKGKFNKVELLKPKATRSRSREIFGLGLGFKSGPGHGD

SEQ ID NO: 77341 - DNA, 579 bp, Unknown
  Obtained from environmental sample
  misc_feature (1)..(579): n is a, c, g, or t
atgatgatggcgaaaatggaaaattgttttacaaaaatatataaagcaacagaaataaacattgacgatatgacttgtatatttaatgattcaattaaaatatttccttcaaatataagaagagattctggcaggaaccaactttctgatgtttttaattcaaataatgtttttattgttgaaagaacggacatttcaaaaaaaattggatggatagcttataaaacaaatgaagatcacgtatttatttccggattatatattctaacagatgaacagcataaaggtattggaacaaaaataatgaattattgtattaatgaaatatggaaaaataattttaaaataataacattgcatgcgttaaaatgcgcgccttggtcaatagagttttataaaagaaacggttttttaatttatgatgaaacaattgaatataaaaaagatttaatgttcctaaagacaaaagaaataaaggattgggaaattattatgtataaatatttaaacaaaaaaaacgtcagttaccgcangaacagtagatgcaatgggtctaaaaagattttgatgcatctttga

SEQ ID NO: 77342 - protein, 192 aa, Unknown
  Obtained from environmental sample
  DOMAIN (60)...(138): Acetyltransferase (GNAT) family
  misc_feature (1)..(192): Xaa is any amino acid
MMMAKMENCFTKIYKATEINIDDMTCIFNDSIKIFPSNIRRDSGRNQLSDVFNSNNVFIVERTDISKKIGWIAYKTNEDHVFISGLYILTDEQHKGIGTKIMNYCINEIWKNNFKIITLHALKCAPWSIEFYKRNGFLIYDETIEYKKDLMFLKTKEIKDWEIIMYKYLNKKNVSYRXNSRCNGSKKILMHL

SEQ ID NO: 77343 - DNA, 306 bp, Unknown
  Obtained from environmental sample
  misc_feature (1)..(306): n is a, c, g, or t
atgagccaaagaattagaattaaactcaagtcttacgatttcaacttggttgacaagtcggccgaaaaaatcgtaaaaaccgtgaaatcaacgggcgccgtaatcagtggacctattccattgcctaccgacaagaaaatcttcaccgtaaaccgctcgacgttcgtcaacaaaaaagcgcgcgaacagttcgaaatgtcggcttacaaacgtttgatcgatatttacagcagcagttcaaaaacaatcgatgccttgatgaagcttgaattgccgagcggggtggaagtggaaattaaggtttaa

SEQ ID NO: 77344 - protein, 101 aa, Unknown
  Obtained from environmental sample
  DOMAIN (4)...(99): Ribosomal protein S10p/S20e
  misc_feature (1)..(101): Xaa is any amino acid
MSQRIRIKLKSYDFNLVDKSAEKIVKTVKSTGAVISGPIPLPTDKKIFTVNRSTFVNKKAREQFEMSAYKRLIDIYSSSSKTIDALMKLELPSGVEVEIKV

SEQ ID NO: 77345 - DNA, 852 bp, Unknown
  Obtained from environmental sample
  misc_feature (1)..(852): n is a, c, g, or t
ttgattaaacttctattgactgaaaacactcaacttttctgtgttggtgatgattggcagagcatttatggatttagaggctcaaatgtgagctacattattgaatttgaaaaacattttgtcaatgccaagataataaaactcaatttgaactatcgaagtacacaaaacatagtaggggcaagcaatgaagtaataaaaaataataaatttaaagtagataaagatattcaagcgtctaaaaaatcggaacataaaatagttgtttattcaggtaacaatgaagaagaaaatactcaattttgtttagataaagtaaaagagttattgaatgatggttttagtaatgatgaaatcttatttttatatagaagaagtaaaatgtctaagccatatttttctagattaaataaggaaggcatacgtgttcaattcaagacaattcatggatctaaagggttagaggcaaaaattgtttttattattggattgaccgaggggtatggtggttttcctgacatttggcttgaagacagaatatttcaaactattaaaaaaacagattatgatttgttaatggaagaggaaagaagattattttatgttgctattacaagagctaaagataagttatttttgattactgaaaaaggaaatgaatctagcttcttaaaggaaataccagaaatatttactgttcgtaccacaaatctaagtaaatcagtagttgataaggtcattacatgtgataattgttatagtcaattagaaaaactttgggtagtttgtccctactgtgggcataaaataaataactgctcgcaaaatgattgtaatattttacggtattag

SEQ ID NO: 77346 - protein, 283 aa, Unknown
  Obtained from environmental sample
  misc_feature (1)..(283): Xaa is any amino acid
MIKLLLTENTQLFCVGDDWQSIYGFRGSNVSYIIEFEKHFVNAKIIKLNLNYRSTQNIVGASNEVIKNNKFKVDKDIQASKKSEHKIVVYSGNNEEENTQFCLDKVKELLNDGFSNDEILFLYRRSKMSKPYFSRLNKEGIRVQFKTIHGSKGLEAKIVFIIGLTEGYGGFPDIWLEDRIFQTIKKTDYDLLMEEERRLFYVAITRAKDKLFLITEKGNESSFLKEIPEIFTVRTTNLSKSVVDKVITCDNCYSQLEKLWVVCPYCGHKINNCSQNDCNILRY

SEQ ID NO: 77347 - DNA, 465 bp, Unknown
  Obtained from environmental sample
  misc_feature (1)..(465): n is a, c, g, or t
atgcagtatgtaataggcgttgatggcggatctaccaaatgccttcttaaagcaaaggattttgagggcaatatcattggagaattccggggaagcacaacgaatcatcttaccattggagagtaccaggcggggaaacgcatctccaggcatgtagacaatcttcttgccacgtttaacggaaaaaaagaagactgtaaatgtattgttgtgggggccgccgggatcgactcgcctaacgagaagatcatcgttgaggggctttacgaggcgctgctcattccctgtccggtattctgtatgaacgatgctgcaatagcgctctacacggtctccaaggatgagggtgtccttgccatttcggggacaggttcaattgccataggacgtaaccgtgatggcagggtaacacgatccgggggctatccaacgacaatcttcggtgacgagggtaccagccgctga

SEQ ID NO: 77348 - protein, 154 aa, Unknown
  Obtained from environmental sample
  misc_feature (1)..(154): Xaa is any amino acid
MQYVIGVDGGSTKCLLKAKDFEGNIIGEFRGSTTNHLTIGEYQAGKRISRHVDNLLATFNGKKEDCKCIVVGAAGIDSPNEKIIVEGLYEALLIPCPVFCMNDAAIALYTVSKDEGVLAISGTGSIAIGRNRDGRVTRSGGYPTTIFGDEGTSR

SEQ ID NO: 77349 - DNA, 534 bp, Unknown
  Obtained from environmental sample
  misc_feature (1)..(534): n is a, c, g, or t
gtgaagtttctggttgcccatccgtttaatcccccccatcttgtcccgcttgtagaactggtgggcagcaatgaaacaagtgaacagacagtactgcttttaaaggattttcttgaaggctgtggacggaaggtctgtgtcatgaaaaaaagcgttcccggctttatcgcgaaccgtttgcagcacgcaatggtgcgcgaggcgtttcatcttgtcgaggaaggagttgcctcgcccgctgatattgacatggtgttaaactggagctttataccccgttatacaaaagtgggcctttttcagcatcatgacgggtatggtatggatatgcttgttaatttgcagaattatttatatccacacctttgtgacgatnaggaagcgaatcccattgttatcgaagctgtaaagcagggaaagcttgggcaaaagaccggcaaaggtatttatgattgggatgaaaaatcaatcgcggagtttaaacgcaacgcagctgagccgtactggcattttttcaactgggatctgccctaa

SEQ ID NO: 77350 - protein, 177 aa, Unknown
  Obtained from environmental sample
  DOMAIN (54)...(152): 3-hydroxyacyl-CoA dehydrogenase, C-terminal domain
  misc_feature (1)..(177): Xaa is any amino acid
MKFLVAHPFNPPHLVPLVELVGSNETSEQTVLLLKDFLEGCGRKVCVMKKSVPGFIANRLQHAMVREAFHLVEEGVASPADIDMVLNWSFIPRYTKVGLFQHHDGYGMDMLVNLQNYLYPHLCDDXEANPIVIEAVKQGKLGQKTGKGIYDWDEKSIAEFKRNAAEPYWHFFNWDLP

SEQ ID NO: 77351 - DNA, 840 bp, Unknown
  Obtained from environmental sample
  misc_feature (1)..(840): n is a, c, g, or t
atgggaaatataataaagaaacaacattatgtatggagaaagtatttagaaccttgggcacaaaacgataaaatatggtgccaaaggggcaataaagtattttcatcttctcttatggggattgctaatgagtcttatttctatgaagttactgaattaaatgcaaccgaacaagaaatattacttttgcttattaatcaatatccaaaggaaaacagagcgcttataacagatattcttatgagatataatattattagtaagatatcagataaaacacgaaagaatggtttagaaaattattacagtaaaatggaagataatgctgttgttttatatgaaaaattatataaaaaagatttgtcatttataaataatgattttgtgagatcaaacttttatggatttttaggtttgcagtatacaagaacaaaaaaaatgctcgtgaattctaaaaatatttttgattttatcccaacacctgaaaagttcaaagggaaatttaatccagataatatcaatagaattattggacttatatcagcagaaactataggaaattggatttatgtaatggggaatatctattttttcgatagtgattatgaactaataacatgtgatcaaccaataataaatgttcacgcaagctactataaaaacatggagcctccaaaaagattagaattatattatcccataacacccaatctggcgctttttattactgatagaaaaatcagtaatagaatactaaaaaaggaagatacaatattatataacaatctaatgaagcaaaaatcacactcggccgatctgatacatgggnnnnncnaatga

SEQ ID NO: 77352 - protein, 279 aa, Unknown
  Obtained from environmental sample
  misc_feature (1)..(279): Xaa is any amino acid
MGNIIKKQHYVWRKYLEPWAQNDKIWCQRGNKVFSSSLMGIANESYFYEVTELNATEQEILLLLINQYPKENRALITDILMRYNIISKISDKTRKNGLENYYSKMEDNAVVLYEKLYKKDLSFINNDFVRSNFYGFLGLQYTRTKKMLVNSKNIFDFIPTPEKFKGKFNPDNINRIIGLISAETIGNWIYVMGNIYFFDSDYELITCDQPIINVHASYYKNMEPPKRLELYYPITPNLALFITDRKISNRILKKEDTILYNNLMKQKSHSADLIHGXXX

SEQ ID NO: 77353 - DNA, 387 bp, Unknown
  Obtained from environmental sample
  misc_feature (1)..(387): n is a, c, g, or t
ttgagtcttatggagatagttcactacaccgcagagagcggttccgacccgtatcaagaatggatggacgctttgcgtgataaccgcgcccgaattgccgtcttgcggcggcttgatcgggcggcccaaggcaatttcggcgatcataagcattgccgggacggtgtttgggaaatgcgcgttgatgtcgggccaggtttccgcgccgtcaaaaagtgtttccaaagctggctggctgctcgcggcggcgcaggcgctatggaagcgacaaaaattatcaacaaggtgaaattgttcatcgaacgccacggcgacagccgcttccatgacttggacagcaaatcagaataccctccgatgattcgtgaccgtgtgggcttcaagtga

SEQ ID NO: 77354 - protein, 128 aa, Unknown
  Obtained from environmental sample
  misc_feature (1)..(128): Xaa is any amino acid
MSLMEIVHYTAESGSDPYQEWMDALRDNRARIAVLRRLDRAAQGNFGDHKHCRDGVWEMRVDVGPGFRAVKKCFQSWLAARGGAGAMEATKIINKVKLFIERHGDSRFHDLDSKSEYPPMIRDRVGFK

SEQ ID NO: 77355 - DNA, 411 bp, Unknown
  Obtained from environmental sample
  misc_feature (1)..(411): n is a, c, g, or t
ttgcccaaggcgcgtgaagccgatgggacgccgcttggcaactggctgcgctttttccgcgcaaagacagaggaggactttatgaccgtcgcgcaaacaagtcctgctatcaatgaagcatggggaagaatcaaagtgttaagcggcgacgaacgcgccagagccttggccgaagccagagaaaaggcccgcatggatttggattcgtggcttggcgatgctaggtacgaagggcggcaggaaggtcgccaagaaggattgcaggaaggattgcaggaagggcggcaggaagggattcttgaagtcgcccggaaccttctgcaagaaaaaatgcctgcggacatggtggttagggcaaccggcctgtccgttgaagaagtaaaccggatagccgctgacctgaaagcctga

SEQ ID NO: 77356 - protein, 136 aa, Unknown
  Obtained from environmental sample
  misc_feature (1)..(136): Xaa is any amino acid
MPKAREADGTPLGNWLRFFRAKTEEDFMTVAQTSPAINEAWGRIKVLSGDERARALAEAREKARMDLDSWLGDARYEGRQEGRQEGLQEGLQEGRQEGILEVARNLLQEKMPADMVVRATGLSVEEVNRIAADLKA

SEQ ID NO: 77357 - DNA, 840 bp, Unknown
  Obtained from environmental sample
  misc_feature (1)..(840): n is a, c, g, or t
atggcgagatggcacggcaacccctgctgcccccactgcaaatgcacgagcgtaagcgactggaacaacgccagccgaaaggacaagagcgcgggctggctccgctgcaacgaccgcaagtgccgcagagaattcaacgccaagacgagaaccatttttgagcatacccagctaccgctgcgggtttggttccaggcttgctggcatatgatgcaaccagatgggataagctccgtcaggttggctagctacataggcgtttcgcagaaaacggcgtggcacatggctcaccgcatacgcagggcgatggcgagccacaaggaaggcatggtgctcaagggcatcgtggagattgacgaggcgggtctcggcggcaaagaaggcaacaagcaccaaaaaaagaggctgcgcccaggcggaggcataggtggcaagaaaggcttgttcggaatggtggaacgtggcgaccggggcagggcgatatcgttggcaatgccggacaagctgacggtgaacaaaaatggaaagataatacccacccccgacattggcaagaaagccgcagaggaaataatacagcggcacgtggagccaggctcgataataaacacggacggcagcacgctatatgaagatttgaagaaactaagatacacccatcatgaggtgaaccactccaaaggcatatacgtgatagacttgaacctgcccacaatcaggcaggcgcacacgaacacgattgagagcagatggaaagccgtgaaaacaacgtaccgcctcctgaacggataccgcaagaggcacgcgcagagataccttgacgaggcggattaccgctga

SEQ ID NO: 77358 - protein, 279 aa, Unknown
  Obtained from environmental sample
  misc_feature (1)..(279): Xaa is any amino acid
MARWHGNPCCPHCKCTSVSDWNNASRKDKSAGWLRCNDRKCRREFNAKTRTIFEHTQLPLRVWFQACWHMMQPDGISSVRLASYIGVSQKTAWHMAHRIRRAMASHKEGMVLKGIVEIDEAGLGGKEGNKHQKKRLRPGGGIGGKKGLFGMVERGDRGRAISLAMPDKLTVNKNGKIIPTPDIGKKAAEEIIQRHVEPGSIINTDGSTLYEDLKKLRYTHHEVNHSKGIYVIDLNLPTIRQAHTNTIESRWKAVKTTYRLLNGYRKRHAQRYLDEADYR

SEQ ID NO: 77359 - DNA, 465 bp, Unknown
  Obtained from environmental sample
  misc_feature (1)..(465): n is a, c, g, or t
gtgacggcgtatatccccgccgtatgcggctatctgatccaaaaagaaatcgaatttatgggcggcgcgctggcgaatcccaagcgtccgctgtgcgcgattttgggcggcgcaaaagtttcggacaaaatcggcgtgatcaacaatctcttggacctggtggatacgttaattatcggcggcggaatggcatatactttttttgccgcgaacggttggagcgtgggtacgagcttgtgtgaaacggacaaaatcagccttgcccgccagatgatcgacaaggctgccgaaaagggcgtcaagttcctcttgccggttgacacgaaagtcggcaaagcatacgcgccggacaccgaggcaaaaatcgtggactcgaatgcccatcgagacgattggatggggctcgacatcggacccgaaacgcaggcgctgtttgccgatgcgatcaaagcagtggcacggtga

SEQ ID NO: 77360 - protein, 154 aa, Unknown
  Obtained from environmental sample
  DOMAIN (3)...(154): Phosphoglycerate kinase
  misc_feature (1)..(154): Xaa is any amino acid
MTAYIPAVCGYLIQKEIEFMGGALANPKRPLCAILGGAKVSDKIGVINNLLDLVDTLIIGGGMAYTFFAANGWSVGTSLCETDKISLARQMIDKAAEKGVKFLLPVDTKVGKAYAPDTEAKIVDSNAHRDDWMGLDIGPETQALFADAIKAVAR

SEQ ID NO: 77361 - DNA, 657 bp, Unknown
  Obtained from environmental sample
  misc_feature (1)..(657): n is a, c, g, or t
gtggccggcggcgccgacgcgctgctggtcttcccgccgcgggcatacgccgaccggcccgaccgggaccaggcgctgctccgcctgcacgagcggctggccgcgcgcaccggcctgccgctgatcctgttcatcctgcacgccgcggccggcggctacgcctacccgccagcgctgctgcgcgacctgctggcccttcccgaggtggccggggtgaagatcgcgaccctcgactccgcgatgacctgccaggatgtcaccacgctggtgcgagaggagttccccggccggctggccatcaccggggaggaccggatgttcggtccgtccctcatgtggggcgcgcaggcggccctggtgggcatcgccgccgcctgcggtcacctgacgaccgacctgctcgcccgctggttcggcggcaccgggcacgacggcttcctcgccgcctccgcccggatggaccagttcgccgaggtcacgttcgtccagccgatcgagggctacgtgcagcggatgctctgggccgccgaggcggagggcgtcatctccgccgaggcggcgcatgacccgttcggcccggcgatcccggccggggaccgcgaacgcgtgcgccggctggtgcggtcgttcacgcggacgcccgccgcggagggataa

SEQ ID NO: 77362 - protein, 218 aa, Unknown
  Obtained from environmental sample
  misc_feature (1)..(218): Xaa is any amino acid
MAGGADALLVFPPRAYADRPDRDQALLRLHERLAARTGLPLILFILHAAAGGYAYPPALLRDLLALPEVAGVKIATLDSAMTCQDVTTLVREEFPGRLAITGEDRMFGPSLMWGAQAALVGIAAACGHLTTDLLARWFGGTGHDGFLAASARMDQFAEVTFVQPIEGYVQRMLWAAEAEGVISAEAAHDPFGPAIPAGDRERVRRLVRSFTRTPAAEG

SEQ ID NO: 77363 - DNA, 726 bp, Unknown
  Obtained from environmental sample
  misc_feature (1)..(726): n is a, c, g, or t
atggggnnnnggcaagtaaagatcggccgtaggtatttccttttttcggcggccgccattgcgctggctgccctgcagccccaatgcttggccgcccaagagcttggcgtagcacaaacagaaatggcttctacccaagaggccaacgatgcagcaaaaagcgacacccatgccacagacagcgccgagggccacgaggctggcggccaccaccaagaacccgtttttctttttggaaagcaattagacccgaccgcccaatttctgttaaagctgcttaacgtcttgattttctgcgggctgctcttttggctgctcaagggcgtccttggtgccgcattcaaggccagggccaatgagatagaaacaaaattggcccaaagcgagaaagacagggccgagggcgaggcgcaggtgcgcgagctcgaagccaagatggccgggctccaagccgagcttggcggcatcatggccaaggccgaagccgacgccgaggctgaaaagcaacgcatcctagaggcggccaagctggaggcggaacagatcctcgccactgcccgctcggaaatcgaataccaaaggcggcttgcagaaacagagctgcgcgggcttatcgccaacctagctgttgagggggccgaaaagcgcatacagcaacagatgcagggcgaaaatgtggcgcgggtgatggatctggccattgagcaaattggaggtgccgattga

SEQ ID NO: 77364 - protein, 241 aa, Unknown
  Obtained from environmental sample
  SIGNAL (1)...(23)
  DOMAIN (87)...(218): ATP synthase B/B' CF(0)
  misc_feature (1)..(241): Xaa is any amino acid
MGXXQVKIGRRYFLFSAAAIALAALQPQCLAAQELGVAQTEMASTQEANDAAKSDTHATDSAEGHEAGGHHQEPVFLFGKQLDPTAQFLLKLLNVLIFCGLLFWLLKGVLGAAFKARANEIETKLAQSEKDRAEGEAQVRELEAKMAGLQAELGGIMAKAEADAEAEKQRILEAAKLEAEQILATARSEIEYQRRLAETELRGLIANLAVEGAEKRIQQQMQGENVARVMDLAIEQIGGAD

SEQ ID NO: 77365 - DNA, 606 bp, Unknown
  Obtained from environmental sample
  misc_feature (1)..(606): n is a, c, g, or t
atgaccctgcgtacgctgtgtctgctggattaccgcaactttgcccaagagacctttgccttcgggccgggagtgaacgtgatttcggggccgaacggcgcgggcaaaaccaatctgctcgagtctgtcttttacctctcgtgttgccggggcctacggggcgcgaaagaatccgacctgatccgcttcggggccaaacaggccgaaatccaggcattcttcgatgccggggaccgggcgcaggaattgcaggccgtcctgcggcgcgggacgcgccgctccctgcggcacaacggcgtactgttgccctctccccgccaattgatgggggttctgcccgccgtcctgttccgcccggaggatttggagctgttgcgcggcggcgcggcggtgcggcggggatacatggacttggccttgtgccagctgaagcccaagtatatggaagccctgtcccattatcggagactgcacgagggcaagcgcaagattctgcgcctggccccgcgcacgccgtcctacctagagcttttgcccgactacgaccgcaagctgtgcgacaccggggccgtgctggccgcctaccgcgccccgttcgtggaataa

SEQ ID NO: 77366 - protein, 201 aa, Unknown
  Obtained from environmental sample
  DOMAIN (2)...(176): RecF/RecN/SMC N terminal domain
  misc_feature (1)..(201): Xaa is any amino acid
MTLRTLCLLDYRNFAQETFAFGPGVNVISGPNGAGKTNLLESVFYLSCCRGLRGAKESDLIRFGAKQAEIQAFFDAGDRAQELQAVLRRGTRRSLRHNGVLLPSPRQLMGVLPAVLFRPEDLELLRGGAAVRRGYMDLALCQLKPKYMEALSHYRRLHEGKRKILRLAPRTPSYLELLPDYDRKLCDTGAVLAAYRAPFVE

SEQ ID NO: 77367 - DNA, 687 bp, Unknown
  Obtained from environmental sample
  misc_feature (1)..(687): n is a, c, g, or t
gtgctgctggcactttcggggggcaaggacagttgggcgctgctggacatactgctcggcatggcccgccacgctccaatccgtttcaccatacgcgccgccacgatagacggcggctttccgctcttcaatccagcgcccatcagggaaaagtgtctcgaactgggtgtccagcacacaattgtgccggcccccatccggccgctgattgaaaacgaacccaagtacagcccctgcgctatatgctccaggctgcggcgcggtgtcctgtattcatacatgaaggaaaacggactaaagaaactggctctgggccacaacctagacgacctcatggagacgctgctgatgaatctgttctacggggggcgcctcagcaccatgccgctgaagttcctcaacaacgaggggacagttaccgtgattagacccctgggaacctgcgacgacgcggaactgcgcgagtacgccatgctgcgcggctacccgattgtcaccagcggatgcccgctgaacttgtgttcctcgccggactccaagagggtgcagacaaaaagcctcatagccgaactccacgcgaaggcccccgacctccgcaggtgcatgctgcgcgcaatgtccaatgtcaaaaccacgcacctgctggacaggaacctgctcgccctgccaaaggagtgggcaaggtga

SEQ ID NO: 77368 - protein, 228 aa, Unknown
  Obtained from environmental sample
  DOMAIN (2)...(208): PP-loop family
  misc_feature (1)..(228): Xaa is any amino acid
MLLALSGGKDSWALLDILLGMARHAPIRFTIRAATIDGGFPLFNPAPIREKCLELGVQHTIVPAPIRPLIENEPKYSPCAICSRLRRGVLYSYMKENGLKKLALGHNLDDLMETLLMNLFYGGRLSTMPLKFLNNEGTVTVIRPLGTCDDAELREYAMLRGYPIVTSGCPLNLCSSPDSKRVQTKSLIAELHAKAPDLRRCMLRAMSNVKTTHLLDRNLLALPKEWAR

SEQ ID NO: 77369 - DNA, 312 bp, Unknown
  Obtained from environmental sample
  misc_feature (1)..(312): n is a, c, g, or t
ttgnnnnnggcatgtatcagatcggcacgagccgccggccagcgccttcaccccnggggttggctaccgccatatcctgatctggccggaccctgccccgaaccaagctccctcgcgccccccccacgactaccgcgaccaggacctgaccccgcttttgaacgacccggccgcccgggagacggccgccctggtccgggcttcgcggcccatcctggaaaaacacccggtcaacgccaagcgcagggcggccggccggctcccggccaactgcctgtggctgtggagccacggccgccggccggccattaa

SEQ ID NO: 77370 - protein, 103 aa, Unknown
  Obtained from environmental sample
  misc_feature (1)..(103): Xaa is any amino acid
MXXACIRSARAAGQRLHPXGWLPPYPDLAGPCPEPSSLAPPPRLPRPGPDPAFERPGRPGDGRPGPGFAAHPGKTPGQRQAQGGRPAPGQLPVAVEPRPPAGH

SEQ ID NO: 77371 - DNA, 675 bp, Unknown
  Obtained from environmental sample
  misc_feature (1)..(675): n is a, c, g, or t
ttgaacgacccggccgcccgggagacggccgccctggtccgggcttcgcggcccatcctggaaaaacacccggtcaacgccaagcgcagggcggccggccggctcccggccaactgcctgtggctgtggagccacggccgccggccggccattaaaactttccaggaacgctggggcctcaccggcgccgccatttcggccgtggatttggtcaagggcctgggggtcctgaccggcctggagaccccggaaatccccggagccaccggctgggtggacaccaattataaaggcaaagtcgaagccgccctggcggccctgacccggctggacctggccgtcatccacctggaagccccggacgaaacctcccaccgcggggatctggatttgaaaatgagagccctgaccgacttggacgcccaagtggccgggcccctcttaaaagccctgccggatttcggcgatttcaggctcctggccgccagcgaccatccgacccccctggaactcaaaacccatacggccgaccccgtgcctttcctgatctatagccagccgccgacccctgaacccagcggccggcctttcagcgaagccgaggcggccgccaccgggcttatggtctcgcccggagcagacctcggccatctcctattcggaccgggaaaatga

SEQ ID NO: 77372 - protein, 224 aa, Unknown
  Obtained from environmental sample
  DOMAIN (91)...(200): Metalloenzyme superfamily
  misc_feature (1)..(224): Xaa is any amino acid
MNDPAARETAALVRASRPILEKHPVNAKRRAAGRLPANCLWLWSHGRRPAIKTFQERWGLTGAAISAVDLVKGLGVLTGLETPEIPGATGWVDTNYKGKVEAALAALTRLDLAVIHLEAPDETSHRGDLDLKMRALTDLDAQVAGPLLKALPDFGDFRLLAASDHPTPLELKTHTADPVPFLIYSQPPTPEPSGRPFSEAEAAATGLMVSPGADLGHLLFGPGK

SEQ ID NO: 77373 - DNA, 777 bp, Unknown
  Obtained from environmental sample
  misc_feature (1)..(777): n is a, c, g, or t
gtggcaagaaaccatatcagaaatatgacttgggaacctcacaaggtttctccaaacgacataagacactttgttgaaggtcaatgctgcacgttcagagaaaacaaacttcctgtcaactacgcttactcgcacgatggcgatgcgatgttcgacttatgctcaagagccaatatgtggaaccctgccaaagtagagcctgatatgaaaaaacaaatcgctcttcctttgattgcgcgtggcattgcgatgttccagattggcgacctgttctcgcactctaaaaaaggcaacgacaacagctataatcaagacaatgaagtaaactggattaactattcggaagttcttgacgcaagaggcgaaccgaaagacaatatgaaaggtcgcgtttatcaatttgcaaaagatatgattgaattccgaaaaatgcaccctgtgttgtccgaaagaaaagccggcgaacatattaaataccacacggcgcacggaacggaagttcctaacgactgcacgggcgactggaacaataccaacgcgcacttctttgcgttcagcgtatccgataaaaaagacaatatttatatagcgcattcaaaatgccacaacagcatccctaccgaactgcctaaaaacgctccaggcaaaaaatggtatcaggtatgcgatacaaccgaaacaaacggcaaagtgtatgtggatggcaaaaacacagcagtacacagcaacagatttgaccttgcaccgggcgcagtagctatattcatcgaaaaatag

SEQ ID NO: 77374 - protein, 258 aa, Unknown
  Obtained from environmental sample
  misc_feature (1)..(258): Xaa is any amino acid
MARNHIRNMTWEPHKVSPNDIRHFVEGQCCTFRENKLPVNYAYSHDGDAMFDLCSRANMWNPAKVEPDMKKQIALPLIARGIAMFQIGDLFSHSKKGNDNSYNQDNEVNWINYSEVLDARGEPKDNMKGRVYQFAKDMIEFRKMHPVLSERKAGEHIKYHTAHGTEVPNDCTGDWNNTNAHFFAFSVSDKKDNIYIAHSKCHNSIPTELPKNAPGKKWYQVCDTTETNGKVYVDGKNTAVHSNRFDLAPGAVAIFIEK

SEQ ID NO: 77375 - DNA, 768 bp, Unknown
  Obtained from environmental sample
  misc_feature (1)..(768): n is a, c, g, or t
ttggctttcctgatggggtcaggagtttcgccaaatgcggcaggcctaatagtgcctggcgcggcggcttccacaactactgaataccttgatgaaggaatttgcaatgttgcactgggcgacggtccggcaggagtacgtcttcagcgtacgtcggttatcacgaaaaaaggtgcggtaaaagctgtagaaccaatgatggaaatgctgcgctatgccggtacacttgtgaaaatgatgttgttcgcaaagcccaatcatgggaaacaggtgtatcaatatgccaccgcatttcctgtaggcactgctatggctcaaacgtggaatgtgcctttagtggaaaaattcggggacgccatcggcgcggagatggaagaattcggcgtaacattctggcttgcacccggaatgaatattcagcgtaatcccttgtgtggacgtaattacgaatattacagcgaagacccggttttgacagggaaaatggcagccgctgcaatcatgggcgtgcagagtcatgatggctgttatgccgcaattaagcattttgccgctaacaatcaggaacaactgcgtaatcattctgatagcatcctctccgaacgcaccttgcgtgaaatttatctgaaaggttttaaaatcgccgtaagagaaggcggcgcaaaaagtgtgatgaccagttataacctgctaaacggtgtatataccgcaaacagttacgatctttgcacgaaattgctcagacaggaatgggctcggccgatctga

SEQ ID NO: 77376 - protein, 255 aa, Unknown
  Obtained from environmental sample
  SIGNAL (1)...(23)
  DOMAIN (26)...(254): Glycosyl hydrolase family 3 N terminal domain
  misc_feature (1)..(255): Xaa is any amino acid
MAFLMGSGVSPNAAGLIVPGAAASTTTEYLDEGICNVALGDGPAGVRLQRTSVITKKGAVKAVEPMMEMLRYAGTLVKMMLFAKPNHGKQVYQYATAFPVGTAMAQTWNVPLVEKFGDAIGAEMEEFGVTFWLAPGMNIQRNPLCGRNYEYYSEDPVLTGKMAAAAIMGVQSHDGCYAAIKHFAANNQEQLRNHSDSILSERTLREIYLKGFKIAVREGGAKSVMTSYNLLNGVYTANSYDLCTKLLRQEWARPI

SEQ ID NO: 77377 - DNA, 642 bp, Unknown
  Obtained from environmental sample
  misc_feature (1)..(642): n is a, c, g, or t
atgacagatcggccgagtcacgtagtgcccggcggcagccccatgttggagcggatggaaaaactcgccgcccagttgaaagatcaaggccgcacaccctacagcatccccggcggcgcttccaacgccctgggcgctctcggctatgtggcatgcgcgcaggaaaccatggagcagttgttccatgacggactgaatatccatacgctgatcgtgcccagcggcagcgccggcacccacgcgggcattgtgaccggcatgtgcggcgccaacacgaacattcccgtgctgggcatcaacgtgagccgcccgaaggccgtccaggaagaactggtttataagctggtacgcgccaccgccgaactcgcgggcgtgaagcaggaaattcccgcttccgccgtgacctgtttcggcgactatgtaggcgccgggtattccctgcccacggacggcatggtggaagccgtcaagctgctggcccgcaccgaaggcattttgcttgacccggtgtattccggcaaggccatggccgggcttatcgatctggtgcgcaaggacaccttccccaagggcagcaacatcctcttcctgcacaccggcggggcgccagcgctatacgcctatatggacagcttcaggtag

SEQ ID NO: 77378 - protein, 213 aa, Unknown
  Obtained from environmental sample
  misc_feature (1)..(213): Xaa is any amino acid
MTDRPSHVVPGGSPMLERMEKLAAQLKDQGRTPYSIPGGASNALGALGYVACAQETMEQLFHDGLNIHTLIVPSGSAGTHAGIVTGMCGANTNIPVLGINVSRPKAVQEELVYKLVRATAELAGVKQEIPASAVTCFGDYVGAGYSLPTDGMVEAVKLLARTEGILLDPVYSGKAMAGLIDLVRKDTFPKGSNILFLHTGGAPALYAYMDSFR

SEQ ID NO: 77379 - DNA, 495 bp, Unknown
  Obtained from environmental sample
  misc_feature (1)..(495): n is a, c, g, or t
atgaacccatgcccgtgcggttattacgggtcaagaacgaccaaatgcacctgtaccgaaagtgcgcgcgaaaaatacttgcgcaaattatccggaccattgatggacaggattgatttgcacatcgaggcggacggggtgacatataacgacctgacatcgaacgcgaacgcagaacccagttcggcggtgcaaaaacgcgtaaatgcggcacgcggtataagtcgcaatcggttcgccgcagacggggcaaacacaacctgcaacgcgaaaatgacacaaagtgaggtcaaagcgtattgcgaactggacgcggatggcgaaaaaatattgcgcgacgcgttcgagaaacttaaattatccgcgcgtgcatattcccgtatcttaaaggtcgcccgcacaatcgcagatttggataattcgccaaatatcaccgccgaacacgtgaccgaggcggtagggtatcgcagtttagaccgcaaatataacctttaa

SEQ ID NO: 77380 - protein, 164 aa, Unknown
  Obtained from environmental sample
  DOMAIN (1)...(52): Magnesium chelatase, subunit ChlI
  misc_feature (1)..(164): Xaa is any amino acid
MNPCPCGYYGSRTTKCTCTESAREKYLRKLSGPLMDRIDLHIEADGVTYNDLTSNANAEPSSAVQKRVNAARGISRNRFAADGANTTCNAKMTQSEVKAYCELDADGEKILRDAFEKLKLSARAYSRILKVARTIADLDNSPNITAEHVTEAVGYRSLDRKYNL

SEQ ID NO: 77381 - DNA, 657 bp, Unknown
  Obtained from environmental sample
  misc_feature (1)..(657): n is a, c, g, or t
gtgaattttgaaaggcttattatgaaatcgttgattgagcctcttattctttactggattctcttttttcgcatccccgccgggagcgcgcctggggaaggggctgccgccttggaattttcctggactgccgaaacatggcgaatcctgatgtatacgctcccttcgctgacccttgtgtggtatcttctgctcagggtaaaaagcctgaaagagatgggaataacgctcccgcgaaaaagagattttgttgtcgcttccgcgacctttgccgccctgactctgatcggcgtgaccatttcgctggtttccgcccaattcggcgaagcggccctgcgccagtccctcagccctcaaaccgtggcgggatgggcggtactggtcatttcctgcgtcagcagcgcctacctggaggagagttatttccggttttatctgctctcaaagagggaggaaatgggacttggcccgctgggcgccgcgctgggttccgccatgttgttttcgacatgccatatctatgaaggcccttggggcttcttgaattcggcgctttccgggcttgtgcttgcctttgctttcctgcgtttccgttccctgcacggcgtagctgtcggtcatgccttatataatattctggcgtttgtattagggtaa

SEQ ID NO: 77382 - protein, 218 aa, Unknown
  Obtained from environmental sample
  DOMAIN (125)...(218): CAAX amino terminal protease family
  misc_feature (1)..(218): Xaa is any amino acid
MNFERLIMKSLIEPLILYWILFFRIPAGSAPGEGAAALEFSWTAETWRILMYTLPSLTLVWYLLLRVKSLKEMGITLPRKRDFVVASATFAALTLIGVTISLVSAQFGEAALRQSLSPQTVAGWAVLVISCVSSAYLEESYFRFYLLSKREEMGLGPLGAALGSAMLFSTCHIYEGPWGFLNSALSGLVLAFAFLRFRSLHGVAVGHALYNILAFVLG

SEQ ID NO: 77383 - DNA, 834 bp, Unknown
  Obtained from environmental sample
  misc_feature (1)..(834): n is a, c, g, or t
ttgggcttggccgcgtctgcctgcggcttcccaccctcgtccgcatcggaggcgaccgcccccaggagcgctgctgccaacagtgcaatgctgatggtgcgcatcatcgtgtggatacctcacggtttccttgtggatgagcttacgctattcgctatttccccgctacataggtgcgatcaggatggtggatttccgcaccggacgcgcttgcggtatcttggcgcgccccataattttggtgtccgggggaaaccagacggttctgcccttggacagtgctgcccgtggggggaggaaatcttgagcgccagaatcatcgacggcaaagccatcgccaggaaactgcgcgaggagatcagggcgcagatcgagacgatggccgcccagcatggcgtgcggccggggctcgccgtgatcctggtgggcagcgatccggcctcccaggtgtatgtgcgcaacaaggtcgcggactgccgcgaggtgggcatccagtcggagctgatcgccctgccccccgccaccacggagctggagctgctcaagcgcatcgatgccttgaatgccgaccccgccatccacggcatcctggtccagctgccgctgccgagccacatcggtgtgcatgcggtgctcgagcgcatctccatcagcaaagatgtggacggcttccacctctacaacgtcggcgggctggtcacggggaacaccatctttccgccgtgcacgccctttggggtgcagaagctcctggagcacgagaagatcgacgtcgagggccgcaacgtggtcgtggtgggcacagcaacatcgtcggcaagcccatggcgctga

SEQ ID NO: 77384 - protein, 277 aa, Unknown
  Obtained from environmental sample
  SIGNAL (1)...(17)
  DOMAIN (225)...(277): Tetrahydrofolate dehydrogenase/cyclohydrolase, NAD(P)-binding domain
  misc_feature (1)..(277): Xaa is any amino acid
MGLAASACGFPPSSASEATAPRSAAANSAMLMVRIIVWIPHGFLVDELTLFAISPLHRCDQDGGFPHRTRLRYLGAPHNFGVRGKPDGSALGQCCPWGEEILSARIIDGKAIARKLREEIRAQIETMAAQHGVRPGLAVILVGSDPASQVYVRNKVADCREVGIQSELIALPPATTELELLKRIDALNADPAIHGILVQLPLPSHIGVHAVLERISISKDVDGFHLYNVGGLVTGNTIFPPCTPFGVQKLLEHEKIDVEGRNVVVVGTATSSASPWR

SEQ ID NO: 77385 - DNA, 378 bp, Unknown
  Obtained from environmental sample
  misc_feature (1)..(378): n is a, c, g, or t
atgggatatgagcggaatctgctggacaggaccaggcacacaggcccccaggaagtcatgcacattctcaatgatatgatggcggaagaattcaccaccgagagcattcttcttgcccaaagtatcctccgtcatttcgatgattatctgggtgattccatgccttcccggggacttaaggaagaagcgtggtttgtagttcggaatgcccatatgccttcggtactggtggagctgggctttgtaactaacgaaagggatgcggttcttatgaatgacgaggcattcataaaaaaaatcaccgaagccctatacaaaggaatcgctgattttgtgactctttttgagcgttccgggggctttaccgccctgtattga

SEQ ID NO: 77386 - protein, 125 aa, Unknown
  Obtained from environmental sample
  DOMAIN (1)...(110): N-acetylmuramoyl-L-alanine amidase
  misc_feature (1)..(125): Xaa is any amino acid
MGYERNLLDRTRHTGPQEVMHILNDMMAEEFTTESILLAQSILRHFDDYLGDSMPSRGLKEEAWFVVRNAHMPSVLVELGFVTNERDAVLMNDEAFIKKITEALYKGIADFVTLFERSGGFTALY

SEQ ID NO: 77387 - DNA, 837 bp, Unknown
  Obtained from environmental sample
  misc_feature (1)..(837): n is a, c, g, or t
ttgaagcgggccgcgcgcaaaaccgccggacggctgatggaggacgccaacatcctcaacatgttgcaagagcgttcacttacttaccgcgacggacgtttcctctttctggtgcgtcaggagtacgtcaaccgcttccccggcttgctggtcgaccggtcggcgtcgggaaactccgtttacatggaaccaaggatgctctcctccgtcaacaacggcattatgttgaaagcgcgggacgaacaggacgaggagacacgtatcttaatggagataacggggaagatcctggcgcgggagcgtgctgttgcggaagcgcaggaggtattgggcgagatagacctgctttccgccgcgagggacgtcatgcgaaagcggcgctggaccctgccagagctggcgcgtcaggcaaagttcaacctgtttggattaagccacccgcttttgaaggaagcggctgtgcctgtggacattcactgcggcggggctttcacatcgctcgtcgtgaccgggcccaacactggtggcaagacggtcgcgctcaaagcggccgggctctgcgtggcgatagggtggaccggcttgcctataccggcgcgcgatgggtcatccattggcaatatcgacgcgatatacgcggatatcggggacgagcaaagcatcgagcaaaatttgtccacctttagcgcacacttgaagaatattgtcgaaatgctgagggccgcgacctccaggtcactggttttgctggatgagctaggagctggcacggaccctcacgagggagccgccctaggcatagcgattctggagaggctcangagcaacagatcctga

SEQ ID NO: 77388 - protein, 278 aa, Unknown
  Obtained from environmental sample
  DOMAIN (128)...(276): MutS domain V
  misc_feature (1)..(278): Xaa is any amino acid
MKRAARKTAGRLMEDANILNMLQERSLTYRDGRFLFLVRQEYVNRFPGLLVDRSASGNSVYMEPRMLSSVNNGIMLKARDEQDEETRILMEITGKILARERAVAEAQEVLGEIDLLSAARDVMRKRRWTLPELARQAKFNLFGLSHPLLKEAAVPVDIHCGGAFTSLVVTGPNTGGKTVALKAAGLCVAIGWTGLPIPARDGSSIGNIDAIYADIGDEQSIEQNLSTFSAHLKNIVEMLRAATSRSLVLLDELGAGTDPHEGAALGIAILERLXSNRS

SEQ ID NO: 77389 - DNA, 561 bp, Unknown
  Obtained from environmental sample
  misc_feature (1)..(561): n is a, c, g, or t
ttggctgtacaaaagaaattcaacgagaagcggcaggatattcaaaggatacgcaaggggctggaggnccgccgcgccaggcgtgtcgagcgcgagctcgccgccgcgtccttcgtgccaagggagggcgtgacggcgcagatcgctggcagcggaatcgtcggggtagtcgagtccgttagaaacggcaaagccaggctggcagccggcccaatgtacgtggaggttccgcttggccagcttacggagaccaataaaacagccaagcttgcggccccgccggtggacactacctcgttgatgaaaagggagactgtgccaagttctcttatgctgcggggtatgaacgtagacgaggctcttccgctgatgagcacatacctggacaaggcctaccgcgcggggcactcgagcgtcgtgatcatccacgggcgcggggaagggatattgcgccgcgaggttcacgcgctctgcggcaggcttaaatacgtgtccaactaccgtcttggcgacatcggcgagggaggttatggggtcacggtcgtgaccttcggaaaataa

SEQ ID NO: 77390 - protein, 186 aa, Unknown
  Obtained from environmental sample
  DOMAIN (110)...(185): Smr domain
  misc_feature (1)..(186): Xaa is any amino acid
MAVQKKFNEKRQDIQRIRKGLEXRRARRVERELAAASFVPREGVTAQIAGSGIVGVVESVRNGKARLAAGPMYVEVPLGQLTETNKTAKLAAPPVDTTSLMKRETVPSSLMLRGMNVDEALPLMSTYLDKAYRAGHSSVVIIHGRGEGILRREVHALCGRLKYVSNYRLGDIGEGGYGVTVVTFGK

SEQ ID NO: 77391 - DNA, 399 bp, Unknown
  Obtained from environmental sample
  misc_feature (1)..(399): n is a, c, g, or t
ttgtttcacaaaatgcgcccagagatcatttccgccgccgcaaaagggacgccaaatggcagcggcgcgtccatgaggaacgcgcttatcgccatagccgcgctgaccatcctggtgggcgggcttatatcccattntgcgtcctccaagccggatgggctggagtggtccatagagaaggcagcaggagaggcaaaaccagaggcccaacagtcgattcaaccaaaaagagcgtcaatccaagaaaagacggccatgatgccaggctacgacttcaagaaagcaggcgaggaggcgcacgaactgggcaccagcgtcgctggcgttgttggtgccgcactgacttttctgctggccatagcatctgcgtttgccataacgagggcgatgaaaaaatga

SEQ ID NO: 77392 - protein, 132 aa, Unknown
  Obtained from environmental sample
  misc_feature (1)..(132): Xaa is any amino acid
MFHKMRPEIISAAAKGTPNGSGASMRNALIAIAALTILVGGLISHXASSKPDGLEWSIEKAAGEAKPEAQQSIQPKRASIQEKTAMMPGYDFKKAGEEAHELGTSVAGVVGAALTFLLAIASAFAITRAMKK

SEQ ID NO: 77393 - DNA, 573 bp, Unknown
  Obtained from environmental sample
  misc_feature (1)..(573): n is a, c, g, or t
atgctgttccaggtgctgctgcccatcggcctgtgggcgcaatttgcgctaaatatccccgtttggcttttccctgtggctctagcggctctgctgctggtcaacgcgggcgggattttttcaagggcccccctctacaattcagggccagcagcttggaaggcccttgccggctttgtgccagagcgcggggcgttcaagttcgttgacctggggtcgggcctgggtggcgcactggcgtacattgccgacaataagccagacgctgtactgctgggcgcagaggcttcgcccttctcttggctcgttgggcggctgaggacgcgaaggcacgcctctcgctgcaagatacgctttagaagcatctggaaaattgacataggcgacgccgacttggtgtacgccttcctctccccggcccccatggccgaactatggacaaaggtcaggcgcgagatgcgccatggaacgctcttcatcagccacagctttgaggtacctggcataagcccggtacaacgcatccccctgccaggcaggaagggcgctgcgctgctggtgtatagggtgtaa

SEQ ID NO: 77394 - protein, 190 aa, Unknown
  Obtained from environmental sample
  SIGNAL (1)...(29)
  misc_feature (1)..(190): Xaa is any amino acid
MLFQVLLPIGLWAQFALNIPVWLFPVALAALLLVNAGGIFSRAPLYNSGPAAWKALAGFVPERGAFKFVDLGSGLGGALAYIADNKPDAVLLGAEASPFSWLVGRLRTRRHASRCKIRFRSIWKIDIGDADLVYAFLSPAPMAELWTKVRREMRHGTLFISHSFEVPGISPVQRIPLPGRKGAALLVYRV

SEQ ID NO: 77395 - DNA, 303 bp, Unknown
  Obtained from environmental sample
  misc_feature (1)..(303): n is a, c, g, or t
gtgaccgagggctggaaaaaagagctagacatcaagggcgtcggctacaaagccgcgatggagggccaggccctgcgcttggatctggggtacagccacccaatcttcttcgacgctccaaatggcatccagctcgccgttgacaaaaacacccacatcacagtggcgggtatagacaggcagcttgtcggccaagtggccgccaacatccgccagttccgcaagcccgagccctacaaaggcaaaggcgtccagtacacaggcgaggtcattcgccgcaaagccggcaagaccggtaaataa

SEQ ID NO: 77396 - protein, 100 aa, Unknown
  Obtained from environmental sample
  DOMAIN (12)...(87): Ribosomal protein L6
  misc_feature (1)..(100): Xaa is any amino acid
MTEGWKKELDIKGVGYKAAMEGQALRLDLGYSHPIFFDAPNGIQLAVDKNTHITVAGIDRQLVGQVAANIRQFRKPEPYKGKGVQYTGEVIRRKAGKTGK

SEQ ID NO: 77397 - DNA, 363 bp, Unknown
  Obtained from environmental sample
  misc_feature (1)..(363): n is a, c, g, or t
atgccaagagacatcaagcttcgccgccaaaaaatcaaggccaggatccgcggccgcatctcgggtacgccagagaggccgcgcctcaccgtctataaaagcctcaagcgcatctacgcccaggcagttgacgacactcgcggcgtgacgcttgcagccgcgtccagcctagagaaagacctccgcgaaaagctgaagagcgggtccaacatcgaggccgccaaagctgtgggcgcttccatagccagcaagctaaaagaaaaagggataaccaaagtggtttttgaccgcaacggcaacctttaccatggccgcgtaaaagcgttggccgacagcgcccgcgagtccgggcttcagttctga

SEQ ID NO: 77398 - protein, 120 aa, Unknown
  Obtained from environmental sample
  DOMAIN (4)...(120): Ribosomal L18p/L5e family
  misc_feature (1)..(120): Xaa is any amino acid
MPRDIKLRRQKIKARIRGRISGTPERPRLTVYKSLKRIYAQAVDDTRGVTLAAASSLEKDLREKLKSGSNIEAAKAVGASIASKLKEKGITKVVFDRNGNLYHGRVKALADSARESGLQF

SEQ ID NO: 77399 - DNA, 867 bp, Unknown
  Obtained from environmental sample
  misc_feature (1)..(867): n is a, c, g, or t
atggcccaaatgcaggcgttacccgcactgcttgcaaacgaaggttaccaaacctcgttnttttgcggtgctgaaagcaattcgatgggatttgaagccattgccaaactcgccggcgttcagcaggtgtttacacgcgaggactacaaagctgccggtttaccaatcaaccgaaatacggatgaattatggggcatttacgatcaaccgttttttgaatacatgaaccacacactcaatcaaatgtcacagccgttcttcgcttcgatatttacattgagttcgcatcatccttatacattgccggaaaatgttaaagctcaaatgccgaaaggaaaaacgccggtgcaacctacagtggcctacacggacttttccctgcggcaattttttgaaaatgccaaacatgaaccctggtttaaaaatacaatttttgtgtttgtagccgaccatgcttcggcagaaatatattcggatgaatatcgcaatccgcgtggaaattcagcaatttttcagttcatatacacacccaacaaggccttgaaaggcgaaaccaatcatgtggctcagcaattggatttaatgccaactttgttggggttgattggttatgaaaaaccttattttgcctttggccgcgatgtgttcaacgaaccggaacggctgccgatagctgctaattataccggacaaacctatcagtgcatcaccgactcgatcaccatctattttgacggccaaacaatcgtttcaacacatgaaaatcaacgaaatccgaaacaagaagccgtcgcagaaacttatcttaaagcaattcttcaaacgtactatcgccgattatcggaaaaaaactacttgtatcggtga

SEQ ID NO: 77400 - protein, 288 aa, Unknown
  Obtained from environmental sample
  DOMAIN (3)...(288): Sulfatase
  misc_feature (1)..(288): Xaa is any amino acid
MAQMQALPALLANEGYQTSXFCGAESNSMGFEAIAKLAGVQQVFTREDYKAAGLPINRNTDELWGIYDQPFFEYMNHTLNQMSQPFFASIFTLSSHHPYTLPENVKAQMPKGKTPVQPTVAYTDFSLRQFFENAKHEPWFKNTIFVFVADHASAEIYSDEYRNPRGNSAIFQFIYTPNKALKGETNHVAQQLDLMPTLLGLIGYEKPYFAFGRDVFNEPERLPIAANYTGQTYQCITDSITIYFDGQTIVSTHENQRNPKQEAVAETYLKAILQTYYRRLSEKNYLYR

SEQ ID NO: 77401 - DNA, 462 bp, Unknown
  Obtained from environmental sample
  misc_feature (1)..(462): n is a, c, g, or t
atgcgccccctgatgctggcgatgatgatcgggatgctgctgtttacgctgctgaaaccccagcttggtgcagcccacgcgcctaagcacagcattgggcaccagacgttgctggcgacttttctgtcattgggcatcggtttttacgatggcttttttgggccgggaacaggcacgctgttgatatttgcattcgtggcgttgttgggctttgattttcttagggcgtcggccatgtccaaggcggtcaattgggcttccaacatagccagtctgacgcttttcatttttaatggcagttggctgccgctcctagcgatcagcatggctgccgccaatggcgtaggtggcttccttggcgcaaagactgccttggcgaagggcagcaggtgggtccgcgccctatttgccctagtcgtctctggcctcatactgaggctggcttggcagcagttcttatga

SEQ ID NO: 77402 - protein, 153 aa, Unknown
  Obtained from environmental sample
  SIGNAL (1)...(25)
  misc_feature (1)..(153): Xaa is any amino acid
MRPLMLAMMIGMLLFTLLKPQLGAAHAPKHSIGHQTLLATFLSLGIGFYDGFFGPGTGTLLIFAFVALLGFDFLRASAMSKAVNWASNIASLTLFIFNGSWLPLLAISMAAANGVGGFLGAKTALAKGSRWVRALFALVVSGLILRLAWQQFL

SEQ ID NO: 77403 - DNA, 780 bp, Unknown
  Obtained from environmental sample
  misc_feature (1)..(780): n is a, c, g, or t
atgaaaggaaaatttaaagttttattattagtatcagttacaattttgatgctaattgattatactgaagtatttactcaggaagctgaagaagatattttttcgggttctccaaaatatgtaaaatatgtaggcgatttgaacagaaggggcaatgttaagaatgcgactgaggcatttgatttattattaatctcgcggcgtggcaatgttaaatactcagctgtttcaacatcgtttctgaaagagaagggcaagcctgatgattattatgcgccgtggagagcaaatgacaaagacaaaaatactgtatgggcagagggcgttaaaggtgatggtataggcgagaaaatttatataatgcaggagtgggagttaaactataaaccatttaaacctgtaacaattaattttaatataatcaatggctgcgcggcaagtgaaggattatttaattcaaataacagggttaaaaaggcaaagttaacaatttatcaggcagagttagattgtattggtggaagtactggacgtatgtcagaacgtataactgatttagtaagtaattataaaataataaatttaccggacacaagcgctgtccaaaatatccaaataaaaataccgccatatgaagagattgatacgactaatgattgttgttgtacgaatggttgctttatggcagaattagagatattagaggtatataagggtacgaaatatagtgatacatgtataagtgaatttaactttaaggagatcattcaggatatataa

SEQ ID NO: 77404 - protein, 259 aa, Unknown
  Obtained from environmental sample
  SIGNAL (1)...(26)
  misc_feature (1)..(259): Xaa is any amino acid
MKGKFKVLLLVSVTILMLIDYTEVFTQEAEEDIFSGSPKYVKYVGDLNRRGNVKNATEAFDLLLISRRGNVKYSAVSTSFLKEKGKPDDYYAPWRANDKDKNTVWAEGVKGDGIGEKIYIMQEWELNYKPFKPVTINFNIINGCAASEGLFNSNNRVKKAKLTIYQAELDCIGGSTGRMSERITDLVSNYKIINLPDTSAVQNIQIKIPPYEEIDTTNDCCCTNGCFMAELEILEVYKGTKYSDTCISEFNFKEIIQDI

SEQ ID NO: 77405 - DNA, 417 bp, Unknown
  Obtained from environmental sample
  misc_feature (1)..(417): n is a, c, g, or t
gtgaccaatgcatcgttgctgacatgtgatacattgttacacatgtcgtcaacttgtaacaactcggttctcttggacgctgccaagcagtgcgtcctcgataccggctggcgacgcaccaccctgtcggacatcgcccgcagggcaggcgtctcccgcatgactctctaccgcaccttcccggacatggaagccctgctccgggaactcatggtgcgcgaatggtccgacgttggcctgcccgacgacgccgccgcgctcaccccttccgggttggccgccgcaatgatggacgccgtcgaaggtctgcgcaccgacccgctgttccgcaagatggttgacgtcgaccccgaaatgctcctcccctacctgctgcgcgccggccgcacccaccaggtgtggttcaacccggcttga

SEQ ID NO: 77406 - protein, 138 aa, Unknown
  Obtained from environmental sample
  DOMAIN (24)...(70): Bacterial regulatory proteins, tetR family
  misc_feature (1)..(138): Xaa is any amino acid
MTNASLLTCDTLLHMSSTCNNSVLLDAAKQCVLDTGWRRTTLSDIARRAGVSRMTLYRTFPDMEALLRELMVREWSDVGLPDDAAALTPSGLAAAMMDAVEGLRTDPLFRKMVDVDPEMLLPYLLRAGRTHQVWFNPA

SEQ ID NO: 77407 - DNA, 849 bp, Unknown
  Obtained from environmental sample
  misc_feature (1)..(849): n is a, c, g, or t
ttgaatggcctcgatctcgaaatggtcaagggcgaaacagtggcaatccttggccctaacggatcgggaaagacaaccttttttaggctctgccttgggcttctgaggcagtgcaagggacatatagaaatcatgggaggcccgccaggaaaccttgcaagcctctcaaagattggagccaccatcgaaacgccctcgctgtacggccacctgagcgcacttgaaaacatgttcgtcacatctcatttgaaagcggtacaccctgatgccaaagaacttaacaggcttatcagcgaagttggcctctcaggcgcaggaaaaatgcctacatccaaatattctatgggcatgaggcagcgccttgctttggccctggccctcattggcgggccagaattgttgatattggacgaaccagcaaacggcctagaccccgtgggcatacgctggttcaggggatgggcgctggaaaccaatgcgaacagaaaaattagcatccttttctccagtcacatactcaacgaagtagccaagataactcaaaaagtggtattgctcaaggaaggaaaaattaaatttgtcggcccgctcgaggaattaatgagcgaaactaaacacaaaatatgcataaggacacatgacctttctcgtacccaagaattattgcaatccagaggctacagtctaagcatcgaanaagacttgctattagttgatgctcctccagagaataggcgtgaaatatttcgttttcttgttcaagaagatattgatttaccggaatgtatcaacatgggaccctctcttgaagaccattacatngaatttatgggagaaagatatgcctga

SEQ ID NO: 77408 - protein, 282 aa, Unknown
  Obtained from environmental sample
  DOMAIN (11)...(189): ABC transporter
  misc_feature (1)..(282): Xaa is any amino acid
MNGLDLEMVKGETVAILGPNGSGKTTFFRLCLGLLRQCKGHIEIMGGPPGNLASLSKIGATIETPSLYGHLSALENMFVTSHLKAVHPDAKELNRLISEVGLSGAGKMPTSKYSMGMRQRLALALALIGGPELLILDEPANGLDPVGIRWFRGWALETNANRKISILFSSHILNEVAKITQKVVLLKEGKIKFVGPLEELMSETKHKICIRTHDLSRTQELLQSRGYSLSIEXDLLLVDAPPENRREIFRFLVQEDIDLPECINMGPSLEDHYXEFMGERYA

SEQ ID NO: 77409 - DNA, 330 bp, Unknown
  Obtained from environmental sample
  misc_feature (1)..(330): n is a, c, g, or t
atgaaggagctttccatgaaagaactggggcgcgaccgtntgattcacgaggcataccgtcttctgggcctgatttcattttttacgagcggcaaagacgaagtgcgcgcctggacgttgcatcagggcgacaacgctgtcgacgcggcgggtgccatacactccgacctcgcgcgaggatttatccgggcccaagtcgtcgcttacgacgattttattgcagccggggcggccttgcctgcctgccgtgacaaaggcgtgctgcgcctggagggtaaagagtatctcgtcagggacggcgacatgattgagatacgctttaacgtatag

SEQ ID NO: 77410 - protein, 109 aa, Unknown
  Obtained from environmental sample
  DOMAIN (24)...(108): Protein of unknown function (DUF933)
  misc_feature (1)..(109): Xaa is any amino acid
MKELSMKELGRDRXIHEAYRLLGLISFFTSGKDEVRAWTLHQGDNAVDAAGAIHSDLARGFIRAQVVAYDDFIAAGAALPACRDKGVLRLEGKEYLVRDGDMIEIRFNV

SEQ ID NO: 77411 - DNA, 609 bp, Unknown
  Obtained from environmental sample
  misc_feature (1)..(609): n is a, c, g, or t
atggcgatgctgctggcaagcggcgaggtgaacccccggtttgtggtaaccccgacctcggaacaaaacatgcataaacagcaggctatcattaccgcctccgaaggcagcgtgatcaaagaaatcaacggcatgagcgcacaggactacttatcttccatcgggtttctgcggggtgaaggcgtggaagccctgacctccgtgccttttgtagtcaattacaacgacggcagtcagcctgtggccagggccatatattctctgaacagcgatggatcggcctcatgcggcggcctcatgcccaaaggcggaacgctttccatcggccgcatggatgtggacgatattctgctgacggcggagaggtctgtggagaagctgttgaaagccgggggcgtcaacggcatcatcgtgttcaccggtctggggcgaaatctggtgcttggcgtgacgcccctgaacgagatcgaaaaggtccgggaagtggtggaagacgccattccctggcatctggcgtacgccggcggtgagctgtgcccggtatacggccgtgacgacggcacggtgaaccgttttcacaacttcgccttcataggctgcgccctataa

SEQ ID NO: 77412 - protein, 202 aa, Unknown
  Obtained from environmental sample
  misc_feature (1)..(202): Xaa is any amino acid
MAMLLASGEVNPRFVVTPTSEQNMHKQQAIITASEGSVIKEINGMSAQDYLSSIGFLRGEGVEALTSVPFVVNYNDGSQPVARAIYSLNSDGSASCGGLMPKGGTLSIGRMDVDDILLTAERSVEKLLKAGGVNGIIVFTGLGRNLVLGVTPLNEIEKVREVVEDAIPWHLAYAGGELCPVYGRDDGTVNRFHNFAFIGCAL

SEQ ID NO: 77413 - DNA, 864 bp, Unknown
  Obtained from environmental sample
  misc_feature (1)..(864): n is a, c, g, or t
ttgtcggaatgtttttcggatggtttgcgcaaggcatgggatcggcgtgggcgttttcgtgagttgcgcagccgtgatcaagatggccccattgttatcgagcttcaatatcgcgaaagacccaattccccgctgattacctatcatcttgaaattgaggaacaaacaagaggacctgtcataaagcaggagtttttgcgttggaaacgcggccacccggcagatcccttttattttctccgctatcaatacgggcaaggcgaggtgattaccggggacgccccggaagcccgcgataagcgtatcaaaaaacccctctccggcccggacgtgctggccgtcaacaccttgggcactttggcggaaaacccgcgtgtcattgccctgcgcagtttcatcaccggctggcatctgtcctatttatcggctgacgctccccgcggcaattccgaggcgggagctgaagaacatttgtcgcctaccggaagcaatttgtccaacgttattcagtatctgcgcgaacagcagcccgcacgcctggaaaagattttcgcagccttgcgccggcgcatccctcgcatcgaaaaagtggaggcagagcttttgcaggatagccgcctgttgctgctgatcaaggatgcgcctttttctgctcctgtgcttgcgcgttttgcctcagacggcacattgaagatgctggcctatctgactgtactctacgatccgaaccctccacccttgatcggcatcgaagagccggaaaattatctccatccgcggctcctgccggagcttgccgaagaatgccacnagccgccgagcacgcgcagctcatcgtcaccacgcactcgccgttcttattaa

SEQ ID NO: 77414 - protein, 287 aa, Unknown
  Obtained from environmental sample
  misc_feature (1)..(287): Xaa is any amino acid
MSECFSDGLRKAWDRRGRFRELRSRDQDGPIVIELQYRERPNSPLITYHLEIEEQTRGPVIKQEFLRWKRGHPADPFYFLRYQYGQGEVITGDAPEARDKRIKKPLSGPDVLAVNTLGTLAENPRVIALRSFITGWHLSYLSADAPRGNSEAGAEEHLSPTGSNLSNVIQYLREQQPARLEKIFAALRRRIPRIEKVEAELLQDSRLLLLIKDAPFSAPVLARFASDGTLKMLAYLTVLYDPNPPPLIGIEEPENYLHPRLLPELAEECHXPPSTRSSSSPRTRRSY

SEQ ID NO: 77415 - DNA, 933 bp, Unknown
  Obtained from environmental sample
  misc_feature (1)..(933): n is a, c, g, or t
ttgggnnnnnnccatggacagtattcggcacgagccagaacggctttcgtaatagatgggcacggtggccccgtcttccacagcttgggcgatatcgtaaatgtcaatgtattcgccgaagaccgccggggtgttcacatccgttttttcaacgggcgtgccggtaaagccaagatagaccgcattgggcaaggcgtcccgcaggtacttggcaaggccgtacacggttcttttgccgatgaccttgccggaaacattcttcacatccacgttacgggccttgaagccgtattgagtgcggtgcgcctcgtccgtgatgacaacgatgttgcgccgtttggagagttcttcgtagacgttgccctcctcgggctgaaatttctgcatggtggagaagacgatgccgccggaggccaccttgagcaactctttgagttcctttctgtccccggcctgcttcggctcctgccgcaaaagctgggtggacgcggcgaaagtgtcgaaaagctgatcgtccagatcgtttctgtccgtgagtacgaccacagtggggttgtcgagactgaccacaattttgcccgtgtaaaacaccatggacagggatttgccgctgccctgggtatgccagacgaccccgcccttgccttttttctcgtcgtcgcgggcggcggccttcagcgtggaagcgatggccttgttgaccgcgtagtactgatgataggcggcaatctttttgactgtgctgacagtgacctggccgctcgtgtcttcctttttcattttttcaaacacggtgaaaaagcgcactacgtccaaaagcgtggccttattcagcagtccgttgatcagcacttccatctggctttgcaggcgcgaggcctcctgtgtgccgtcctcgctcttccagacatgaaacggaaaaaaccggcgtga

SEQ ID NO: 77416 - protein, 310 aa, Unknown
  Obtained from environmental sample
  misc_feature (1)..(310): Xaa is any amino acid
MGXXHGQYSARARTAFVIDGHGGPVFHSLGDIVNVNVFAEDRRGVHIRFFNGRAGKAKIDRIGQGVPQVLGKAVHGSFADDLAGNILHIHVTGLEAVLSAVRLVRDDNDVAPFGEFFVDVALLGLKFLHGGEDDAAGGHLEQLFEFLSVPGLLRLLPQKLGGRGESVEKLIVQIVSVREYDHSGVVETDHNFARVKHHGQGFAAALGMPDDPALAFFLVVAGGGLQRGSDGLVDRVVLMIGGNLFDCADSDLAARVFLFHFFKHGEKAHYVQKRGLIQQSVDQHFHLALQARGLLCAVLALPDMKRKKPA

SEQ ID NO: 77417 - DNA, 855 bp, Unknown
  Obtained from environmental sample
  misc_feature (1)..(855): n is a, c, g, or t
gtgtgtatgtttatgagggactttttcccatggaaggcggcgagatatcaggcgccaatacagcgaatagcaccaacggcggcnggtggtgtgtttgtaaacactagtggaacttttaacatgagtggcggtgaaatatcaaacaataatgcgccaaacggcagtggcggcggtgtatatataaatggcggaacctttaacatgagtaatgggtctataaaaggcaatactgtcttaaataacggcggcggtgtgcatgtaccaagcggaaattttactatgtcaggcggttatatttacggtgaggatggaggtacatattcaccggcagggaatccaaacacagctacgagcggcaagtctatctatgtaggcggaacagcaaattacggcggaagctacggtacgggcagtattattactgccaatagtactctgccgtattttacggttacttttgataaaaatcatgacgatttgacaggctttacagaagcaaacccgataaccaaaacagcaaactataacggaaatgttggtacgttgccaactgccccaactaggacaaactatttatttaatggctggaatacggcggcaaacggaacaggtgttgcatttactgcagctacaactgttaccgccaacaaaaccgtatacgctcaatggatgcaggctgctgccatgattggcacagatacctataagacaacccttaaagaagccataaatgatgtccaaactaatggtacaataacaattttgaaaaatattagcactggtgatactggagaatcggtaacaggttacacgatcagtaagaacataacgattactgttgcaagcggtaggtag

SEQ ID NO: 77418 - protein, 284 aa, Unknown
  Obtained from environmental sample
  misc_feature (1)..(284): Xaa is any amino acid
MCMFMRDFFPWKAARYQAPIQRIAPTAAGGVFVNTSGTFNMSGGEISNNNAPNGSGGGVYINGGTFNMSNGSIKGNTVLNNGGGVHVPSGNFTMSGGYIYGEDGGTYSPAGNPNTATSGKSIYVGGTANYGGSYGTGSIITANSTLPYFTVTFDKNHDDLTGFTEANPITKTANYNGNVGTLPTAPTRTNYLFNGWNTAANGTGVAFTAATTVTANKTVYAQWMQAAAMIGTDTYKTTLKEAINDVQTNGTITILKNISTGDTGESVTGYTISKNITITVASGR

SEQ ID NO: 77419 - DNA, 396 bp, Unknown
  Obtained from environmental sample
  misc_feature (1)..(396): n is a, c, g, or t
gtgaaagccaaaaccctgnccttatgggactgncctttcaaggccaacacggacgacatgcgcgaggccgcctcgctgcggtncattgaagacctgacctcgcacggcatgcgcatccgcgcctttgatccggttgccggccccaacgcggcaaaaattctgggcggcaaccccctcgtggaaatactggactcccagtacgaagcctgtcgcggcgcccaagcccttctggtaggaacggaatggaaccagttccgcaacccggactttgaccgcatacgcagtctgctcaccgcgccactgctctttgacggacgcaacctgtattccccggaactcatgggcgaacgcggcttcgcgtatttttgcgtaggcttgggcgaagcaaaagcttga

SEQ ID NO: 77420 - protein, 131 aa, Unknown
  Obtained from environmental sample
  DOMAIN (13)...(111): UDP-glucose/GDP-mannose dehydrogenase family, UDP binding domain
  misc_feature (1)..(131): Xaa is any amino acid
MKAKTLXLWDXPFKANTDDMREAASLRXIEDLTSHGMRIRAFDPVAGPNAAKILGGNPLVEILDSQYEACRGAQALLVGTEWNQFRNPDFDRIRSLLTAPLLFDGRNLYSPELMGERGFAYFCVGLGEAKA

SEQ ID NO: 77421 - DNA, 507 bp, Unknown
  Obtained from environmental sample
  misc_feature (1)..(507): n is a, c, g, or t
ttgcatatcgctaaacgcccccgaccgcacagggcaggtcatggctttcggattcactatggctatcgctttgtatatgctgatacacgcctcggtagttaccggtttgcttccgccgaccggcgttccgatgccctttttaagctacggcgggatgagcctgatattcaccatgtcgagcgtgggaatattgctgaacatatcgagccatataaaaacggatactgtcccgatggcggcgccgatggggcaaaagcgaaaggcgctgcggacatgagaccgttcacaaagaaaatacacatggtcggaatcggcggggcgggaatgaacccgttggccgaggtgttgctgtcgcgcggacatactgtgactgggagcgaccgcgcggtctccgacgcgtcgcgccgcttggaaacgctggggatacaggtgcagtacggccacgagccgaatttggtcaaaaagngcggaactgctggtatactccagcgcggtcaaggaggataa

SEQ ID NO: 77422 - protein, 168 aa, Unknown
  Obtained from environmental sample
  DOMAIN (98)...(166): Mur ligase family, catalytic domain
  misc_feature (1)..(168): Xaa is any amino acid
MHIAKRPRPHRAGHGFRIHYGYRFVYADTRLGSYRFASADRRSDALFKLRRDEPDIHHVERGNIAEHIEPYKNGYCPDGGADGAKAKGAADMRPFTKKIHMVGIGGAGMNPLAEVLLSRGHTVTGSDRAVSDASRRLETLGIQVQYGHEPNLVKKXGTAGILQRGQGG

SEQ ID NO: 77423 - DNA, 558 bp, Unknown
  Obtained from environmental sample
  misc_feature (1)..(558): n is a, c, g, or t
gtgatcctcataaagagcgcgccgtataggatgaaacgtttggctggtttcctaaatatgcaggagcaagggcaaggcgccggctaccaggtcgcccaatctctcgtaggcttgggacgcggcgggttcttgggcgccgggctcggcaagggagagcagaaatacttctatctgcctgaaccgcacacagacttcatactctccgttctcggagaggagttcgggtttataggcgtgatgctggtgcttctgaccttcgcctttatagtctataggggattttgcatatcgctaaacgcccccgaccgcacagggcaggtcatggctttcggattcactatggctatcgctttgtatatgctgatacacgcctcggtagttaccggtttgcttccgccgaccggcgttccgatgccctttttaagctacggcgggatgagcctgatattcaccatgtcgagcgtgggaatattgctgaacatatcgagccatataaaaacggatactgtcccgatggcggcgccgatggggcaaaagcgaaaggcgctgcggacatga

SEQ ID NO: 77424 - protein, 185 aa, Unknown
  Obtained from environmental sample
  DOMAIN (1)...(167): Cell cycle protein
  misc_feature (1)..(185): Xaa is any amino acid
MILIKSAPYRMKRLAGFLNMQEQGQGAGYQVAQSLVGLGRGGFLGAGLGKGEQKYFYLPEPHTDFILSVLGEEFGFIGVMLVLLTFAFIVYRGFCISLNAPDRTGQVMAFGFTMAIALYMLIHASVVTGLLPPTGVPMPFLSYGGMSLIFTMSSVGILLNISSHIKTDTVPMAAPMGQKRKALRT

SEQ ID NO: 77425 - DNA, 795 bp, Unknown
  Obtained from environmental sample
  misc_feature (1)..(795): n is a, c, g, or t
gtggaattccgggtcaagccaggtcttggcggttacataagctgcgcggagatggaattttaccgtaaaccggcagacaatttcaactatcttacagtatttgccgactcctcctgttcaagccttaaagagggcttaacacgggaggcaatcgacgccataccggacttattcttcaaggatatggcgctgaaaatctttttagacatttacgataaaaacggattccgcgtgcaggaataccgcgcctgggttcatcccgactcccatgccgccaacgacatcaacaaaatatggccgtacagcctgcgcgataacccgaccggcatttatgttaagaaggacgaaaatttgttggtttttgccggtaatatgcaggggcagagcgtgtctctgcttactcaggacctttctaccgggggatggggcgcgcagtacacctatccgctgaccacgggtatgaacaaaatcaaggccaaagcgaagggcttgatctatctgcaatactattccgcgcagggcgaaaacgcgcctaaaataaagatcaattttgctaccggcgcggtcaacggctacttcgacagcaagaagcacagcgcgggcgactggagaagactcttgaacgccgcaacagccccggatttcgaccttgtgggggaattcgcccaccttacctttccggttgacaagttcaaagcctatactccggacggcaaagcgctggttgacgcatgggacgacatgntacggctggaacacgagtttatgggcttgtacaagtacaacgggacataa

SEQ ID NO: 77426 - protein, 264 aa, Unknown
  Obtained from environmental sample
  misc_feature (1)..(264): Xaa is any amino acid
MEFRVKPGLGGYISCAEMEFYRKPADNFNYLTVFADSSCSSLKEGLTREAIDAIPDLFFKDMALKIFLDIYDKNGFRVQEYRAWVHPDSHAANDINKIWPYSLRDNPTGIYVKKDENLLVFAGNMQGQSVSLLTQDLSTGGWGAQYTYPLTTGMNKIKAKAKGLIYLQYYSAQGENAPKIKINFATGAVNGYFDSKKHSAGDWRRLLNAATAPDFDLVGEFAHLTFPVDKFKAYTPDGKALVDAWDDMXRLEHEFMGLYKYNGT

SEQ ID NO: 77427 - DNA, 708 bp, Unknown
  Obtained from environmental sample
  misc_feature (1)..(708): n is a, c, g, or t
gtggaaacggtacgcaacatattccgccgccccttcccaaaaagaaatttctttgaacagattgtcaagatcggctggagctcgcttcccgttacctttttcaccgccgtatccaccggcgcgatcctcgccctgcagaccggctacgccatgatgagtatggtcaagggtacggagcattacgtcggcggtattgtcgcgctgtcggtggtgcgcgaactcggcccgatactctgcgccatcatgatagctggtcgcgccggaagcggaatcaccgccgagataggcaccatgaaggttaccgagcagatcgacgctctcattacgctctccagcaaccccgtgcattatctgatcgtgccgcgcgtactcgcgggaatagtcgttttgccgatactcacgctctttacggatattgtggccatcatgggcgggatggcggttgccttctttgagctgggaatgaatgaaaagcagtatatcgataccaccattgatatgctcgccatggaagatataaacgtcggtatcgtaaagtcggtcgtgtttggcgtattgattacgctcatcgcgagtttccagggctttcgcacccgtggcggcgccgagggtgtcggcaaatccacgacgcgctcagtcgttttgatatgtatgtccatactccttttcgattatatcctttcgtcgatcatgacgaccggtttctga

SEQ ID NO: 77428 - protein, 235 aa, Unknown
  Obtained from environmental sample
  DOMAIN (1)...(232): Domain of unknown function DUF140
  misc_feature (1)..(235): Xaa is any amino acid
METVRNIFRRPFPKRNFFEQIVKIGWSSLPVTFFTAVSTGAILALQTGYAMMSMVKGTEHYVGGIVALSVVRELGPILCAIMIAGRAGSGITAEIGTMKVTEQIDALITLSSNPVHYLIVPRVLAGIVVLPILTLFTDIVAIMGGMAVAFFELGMNEKQYIDTTIDMLAMEDINVGIVKSVVFGVLITLIASFQGFRTRGGAEGVGKSTTRSVVLICMSILLFDYILSSIMTTGF

SEQ ID NO: 77429 - DNA, 750 bp, Unknown
  Obtained from environmental sample
  misc_feature (1)..(750): n is a, c, g, or t
gtgctggatgcggtatgcaactatttgccttccccgctggatcggcccccggccttgggatacgatgaagacggcgccgccgcgcccatagcgcccgatcccgccgcgccgctcagcgccctggtgttcaaggtgctgatggaaaacggacgcaagctggcgctcttgcgtttgtatgcgggttccctgcgcgagggcgatgtgtgccgcaaccttgccggcaagacggatgaccgcgcgcaccgcatttatcgtttgcacgccgacaggcgtgaacaactcgccgaagcgcgggtcggggacattgtggccgtggtcggactgcgttcggcccggacgggcgagacctacgcaagcagagaacgccccctgtcgctcgagcccatcgccggataccagcccgtgatcaccctggccttggaaccgcgcaacgccgacgagggcaagacgcttgacgaggccctggaacgcttcaccatcgaggatcccaccttgaccgtgcaggtggacgaggcgtccgggcatcgctatgtatccggcatgggcgaattgcatctggatgtcttgcaggaacgcattcgccgtgagtacggcatcgcgccccgcgcgggcaatccgcaggtggtgttgcgcgaaaccatacgcaaaagcgcaagcgcccgggcggaattcgaccgcgaactcggcaaggaacggcattacggcaatgtgagcgatggtccgcccgcggaacgcggcgcgtgtcgataa

SEQ ID NO: 77430 - protein, 249 aa, Unknown
  Obtained from environmental sample
  DOMAIN (51)...(118): Elongation factor Tu domain 2
  misc_feature (1)..(249): Xaa is any amino acid
MLDAVCNYLPSPLDRPPALGYDEDGAAAPIAPDPAAPLSALVFKVLMENGRKLALLRLYAGSLREGDVCRNLAGKTDDRAHRIYRLHADRREQLAEARVGDIVAVVGLRSARTGETYASRERPLSLEPIAGYQPVITLALEPRNADEGKTLDEALERFTIEDPTLTVQVDEASGHRYVSGMGELHLDVLQERIRREYGIAPRAGNPQVVLRETIRKSASARAEFDRELGKERHYGNVSDGPPAERGACR

SEQ ID NO: 77431 - DNA, 747 bp, Unknown
  Obtained from environmental sample
  misc_feature (1)..(747): n is a, c, g, or t
atgccgttccttgccgagttcgcggtcgaattccgcccgggcgcttgcgcttttgcgtatggtttcgcgcaacaccacctgcggattgcccgcgcggggcgcgatgccgtactcacggcgaatgcgttcctgcaagacatccagatgcaattcgcccatgccggatacatagcgatgcccggacgcctcgtccacctgcacggtcaaggtgggatcctcgatggtgaagcgttccagggcctcgtcaagcgtcttgccctcgtcggcgttgcgcggttccaaggccagggtgatcacgggctggtatccggcgatgggctcgagcgacagggggcgttctctgcttgcgtaggtctcgcccgtccgggccgaacgcagtccgaccacggccacaatgtccccgacccgcgcttcggcgagttgttcacgcctgtcggcgtgcaaacgataaatgcggtgcgcgcggtcatccgtcttgccggcaaggttgcggcacacatcgccctcgcgcagggaacccgcatacaaacgcaagagcgccagcttgcgtccgttttccatcagcaccttgaacaccagggcgctgagcggcgcggcgggatcgggcgctatgggcgcggcggcgccgtcttcatcgtatcccaaggccgggggccgatccagcggggaaggcaaatagttgcataccgcatccagcacgggctgtacgccgctgttacgcaggccgaatcgcagacacgggagtga

SEQ ID NO: 77432 - protein, 248 aa, Unknown
  Obtained from environmental sample
  misc_feature (1)..(248): Xaa is any amino acid
MPFLAEFAVEFRPGACAFAYGFAQHHLRIARAGRDAVLTANAFLQDIQMQFAHAGYIAMPGRLVHLHGQGGILDGEAFQGLVKRLALVGVARFQGQGDHGLVSGDGLERQGAFSACVGLARPGRTQSDHGHNVPDPRFGELFTPVGVQTINAVRAVIRLAGKVAAHIALAQGTRIQTQERQLASVFHQHLEHQGAERRGGIGRYGRGGAVFIVSQGRGPIQRGRQIVAYRIQHGLYAAVTQAESQTRE

SEQ ID NO: 77433 - DNA, 342 bp, Unknown
  Obtained from environmental sample
  misc_feature (1)..(342): n is a, c, g, or t
ttggccgagcggcatatccgctccggcggcgagcgttttctgctcggtatgcgccaggtgctggacgcgcccgggctgccggaacccgaggcgatatatgcgcgccatacggagttgaaagccatggatgatgtcgccttgcgcgcggctttcgaacctcatgccgacgctttggtggccggcgcccgcaacgccggtctgctctccggggcggactttcaggttatgttgccaagcggcgcttacgtccggcagctcggacgcgaggatatcatcagcgagctgatgaagctgtttatgaaagaacgcttgggcatgcgcaatccggccccgaacccgtga

SEQ ID NO: 77434 - protein, 113 aa, Unknown
  Obtained from environmental sample
  misc_feature (1)..(113): Xaa is any amino acid
MAERHIRSGGERFLLGMRQVLDAPGLPEPEAIYARHTELKAMDDVALRAAFEPHADALVAGARNAGLLSGADFQVMLPSGAYVRQLGREDIISELMKLFMKERLGMRNPAPNP

SEQ ID NO: 77435 - DNA, 663 bp, Unknown
  Obtained from environmental sample
  misc_feature (1)..(663): n is a, c, g, or t
gtgattttgtgggacggtggcaacaacgacctgccgttctatgcctgcgacctgcacatcatcgtcgccgacccgcaccgccccggccacgagctgatgtactaccccggcgagaccaacttccgcatggccgacgtgataatcatcaacaagtgcgacagcgtgaagaacgaggtcgacatcaaggccgtggaggccaacgccgccaaggtcaaccccaaggccgtggtgattcgcgcgaacagccccgtcaccatcgaaaagcccgacatggtgaagggcaagaaggtcttagtgatagaggacggcccaacgctcacccacggctccatgtcatacggcgccggcgtggtggcagccaaaaacggtggtgtggcagaaattgttgaccccacgccctacgcagtggcctctatagccgccacctacaagaaataccccaacgccaagggcatactgccagcgatgggctacggcgacaagcagatcaaagacctggaggccaccatagacgccaccccctgcgacgtggtgctgtccgccacccccattgacatcacccgcgtcctgaaagtgaacaagcccatggttcgcgcttcctacgaactggtcgaagtcaagcctggtcaactgggcgacgctgttaagaaagtcgtcaagtag

SEQ ID NO: 77436 - protein, 220 aa, Unknown
  Obtained from environmental sample
  misc_feature (1)..(220): Xaa is any amino acid
MILWDGGNNDLPFYACDLHIIVADPHRPGHELMYYPGETNFRMADVIIINKCDSVKNEVDIKAVEANAAKVNPKAVVIRANSPVTIEKPDMVKGKKVLVIEDGPTLTHGSMSYGAGVVAAKNGGVAEIVDPTPYAVASIAATYKKYPNAKGILPAMGYGDKQIKDLEATIDATPCDVVLSATPIDITRVLKVNKPMVRASYELVEVKPGQLGDAVKKVVK

SEQ ID NO: 77437 - DNA, 789 bp, Unknown
  Obtained from environmental sample
  misc_feature (1)..(789): n is a, c, g, or t
gtgctggctgaacagaaaaaagttcttgaagagcagcaaagacagcttgcagaacaacaaagggaacagcagagactgcttgaagagcagcaaaaacagcttgcagaacagcaaaggcagcgtgaagaacaggaaaggctggctaaagcgcaggcggaaagggaacgcgccgaacagacgcgccaggtggttcaaagagcagatgctctgcttattggaggaaagtatgccgatgcaatagccagatacgaagaggcgattgctatggaaggcttaaacagagctgaaacaactgaaaccaaccgccttattgctgaagcgaaagctttacaggcggaaatggataaatataacagacctttacaagacagcgattttgaagtcgcgcagagcggcaacattattacaattaccaaatataaagcgtctacaagtaaaacaataactgtcaacggaaacaaccacacggtatattttggcattgttaatgtaaatatcccgcaaagagtcttcggtcaaaatttatcaattatcggtcctgaagcgtttaaaaattgcggaatacaatcactggttatccccgatactgtcaccgagattggctatggagcgtttgccaacaataatcttgaaaaaagtacattgngaaaaggcttaaaaattatcaaaggcggagtctctcaggtaactgtagaagtaagcgaacttggcgcgtttgaaggcaacaaaaaccttacagaaattgtaaatcccgatgctngtactgaaatangcgcaagggctttttag

SEQ ID NO: 77438 - protein, 262 aa, Unknown
  Obtained from environmental sample
  misc_feature (1)..(262): Xaa is any amino acid
MLAEQKKVLEEQQRQLAEQQREQQRLLEEQQKQLAEQQRQREEQERLAKAQAERERAEQTRQVVQRADALLIGGKYADAIARYEEAIAMEGLNRAETTETNRLIAEAKALQAEMDKYNRPLQDSDFEVAQSGNIITITKYKASTSKTITVNGNNHTVYFGIVNVNIPQRVFGQNLSIIGPEAFKNCGIQSLVIPDTVTEIGYGAFANNNLEKSTLXKGLKIIKGGVSQVTVEVSELGAFEGNKNLTEIVNPDAXTEIXARAF

SEQ ID NO: 77439 - DNA, 543 bp, Unknown
  Obtained from environmental sample
  misc_feature (1)..(543): n is a, c, g, or t
atgagcgaacaagtcaaaaaatggtatgtagtccgtgcgataagcggaaaggaaaaaaaagcgaaagaatatcttgaaaaagaaattcaacgcttgaagttacaagattacatcagccaagtcttgattcccacggaaaaagtattcactatcaaaaacggtaaaaaagtgagcgccgaacgctcctatttgccgggatacattttgatagaggcttacttgaccggagaattcattcatatcattcgcaacgttccgaacatcatcggctttttgggctcgcagggcgaacccatcccgatgcggctttccgaagtgaaccgcattttgggcaaagtggatgagttgaccgatgccggtgaagaaatgctcgaaccgtttatcgttggcgaacctgtgaaggtaaccgatggaccgttcaacaacttctcgggcatcattgaggaagtgaacgaagaaaagaaaaaattgaaagttatggtgaaaattttcggtcggaaaactccgctcgaattaagtttcacccaagtggaaaaagaatag

SEQ ID NO: 77440 - protein, 180 aa, Unknown
  Obtained from environmental sample
  DOMAIN (127)...(164): KOW motif
  misc_feature (1)..(180): Xaa is any amino acid
MSEQVKKWYVVRAISGKEKKAKEYLEKEIQRLKLQDYISQVLIPTEKVFTIKNGKKVSAERSYLPGYILIEAYLTGEFIHIIRNVPNIIGFLGSQGEPIPMRLSEVNRILGKVDELTDAGEEMLEPFIVGEPVKVTDGPFNNFSGIIEEVNEEKKKLKVMVKIFGRKTPLELSFTQVEKE

SEQ ID NO: 77441 - DNA, 648 bp, Unknown
  Obtained from environmental sample
  misc_feature (1)..(648): n is a, c, g, or t
ttggcaaaagggatgcctctaatcaacggagtgcgctatctgggaggaacgttggaaagttatggaaacaccaataccgccgacagcctgacggcgatacgggaaaccatatatgaaaaggaactcttttccctggcgcgattgaaagagatgcttgaacggaattttgccggttatgaagaggaacggaaaattcttctttcctgccccaaatacggcaacgatgacgaaatcgccgacaatatggctatacgtattcatgaacatttatgccattgcgcccggtctcaggcggagaaagttggcctgcacagctacctcattgtgattatcaacaactccgcgaataccttgatggggagatataccaaagcgtcagccgatggcagaaaggcatatacgcccatggccaacgccaataacccatccagcggtgcggataaggaaggcgcgacggcgtttttaaattctttggtaaagcttgatacctctatccacgcgggagccgtgcagaacatgaagttcagcaggacacttttgactaagcacagatcccagttcgaagcgctcatgaaggtgtattttgaaaaaggcggggctcangccatgctcaatgtgctatcaaaaacgatttggaaaacgccgtga

SEQ ID NO: 77442 - protein, 215 aa, Unknown
  Obtained from environmental sample
  misc_feature (1)..(215): Xaa is any amino acid
MAKGMPLINGVRYLGGTLESYGNTNTADSLTAIRETIYEKELFSLARLKEMLERNFAGYEEERKILLSCPKYGNDDEIADNMAIRIHEHLCHCARSQAEKVGLHSYLIVIINNSANTLMGRYTKASADGRKAYTPMANANNPSSGADKEGATAFLNSLVKLDTSIHAGAVQNMKFSRTLLTKHRSQFEALMKVYFEKGGAXAMLNVLSKTIWKTP

SEQ ID NO: 77443 - DNA, 300 bp, Unknown
  Obtained from environmental sample
  misc_feature (1)..(300): n is a, c, g, or t
gtgcttgccgggacaggcccgcttgtcgcccgccaggctctcggcattattgaaaccttttccgcggcctcaattattgtggcggcggatgcggcagtcaaggcggcaacggtgcggatcatggacgtgcgtatcgcgctgggaatcggcggcaaaggctatgcgcttttctgcggcgatgtggccgccgtgcgggccgctgtggacgccggcgggcaacgcgcttcggaatccggccttttggtgggcaaagtggtcattcctaggccggcggaaagtttttttgagcgcttgttgtag

SEQ ID NO: 77444 - protein, 99 aa, Unknown
  Obtained from environmental sample
  DOMAIN (12)...(90): BMC domain
  misc_feature (1)..(99): Xaa is any amino acid
MLAGTGPLVARQALGIIETFSAASIIVAADAAVKAATVRIMDVRIALGIGGKGYALFCGDVAAVRAAVDAGGQRASESGLLVGKVVIPRPAESFFERLL

SEQ ID NO: 77445 - DNA, 441 bp, Unknown
  Obtained from environmental sample
  misc_feature (1)..(441): n is a, c, g, or t
ttgccaggagtgttttttatggaacagcacgcgcagggttttgtggaaaccgccggtctggtgatagccatcctggtggctgatgccatggccaaggcggcgaatgtgcgggtattcatggcgcataaggtggatggtctgcgcgtgtgcgtcatttgtgaaggcgatgtggctgcctgtcaggcctcggtgcatgccggcgcggggcttgccaggngactggacggtcttttgggcagcaatgttattccccgtccggtggacgaagcggagaggctgcaacagcatatggccgagatgaaacagcgcaaggcggctcgcaagggtgtgaaagaagcgcggaaacccggagcggctcctgttccggcggctcctgcttcggcggttccttctccctgcgcgggcgagcctgtacgtaagagcggtaaaaaacgcgggtga

SEQ ID NO: 77446 - protein, 146 aa, Unknown
  Obtained from environmental sample
  DOMAIN (10)...(86): BMC domain
  misc_feature (1)..(146): Xaa is any amino acid
MPGVFFMEQHAQGFVETAGLVIAILVADAMAKAANVRVFMAHKVDGLRVCVICEGDVAACQASVHAGAGLARXLDGLLGSNVIPRPVDEAERLQQHMAEMKQRKAARKGVKEARKPGAAPVPAAPASAVPSPCAGEPVRKSGKKRG

SEQ ID NO: 77447 - DNA, 732 bp, Unknown
  Obtained from environmental sample
  misc_feature (1)..(732): n is a, c, g, or t
atgcccgagcttgtggtagggcgtgccgccgagcattccctttacgccgtaaacgaccagattaagcgcgggtttataagcgtggcgggcgggataaggataggtattgcgggcgaggcggtgtttgaggctgacggagaaataaggacgcttaaaaactttacggggcttaatataaggctgccgcacgaggttaaaaactgtgcgcttaacgcttttccctttatttacgacggctttgcgcttaacgcgcttattatttcgccgcccggggcgggcaaaacgacctacctacgcgaccttgcgcggcttatttcggataccgagcattactgcaacgtattggtcgcggacgagcgctgcgagcttgcggcggcggttaacggtataccgcagcttaacgtcgggcgcaacaccgacgttttaagcaactgctctaaggcttacgcgtttaattgcggaatacgcgccatgcgccccgacgtgataatcaccgacgaattgtacggcgcggaggatttggacgcggtttcgtacgcggcggcaagcggcgtgcgggtgatagcctcggttcatgcgtttgataggcacgaccttttaataaaaccgtttttcggcgcggcgataaaaaaccgcttatttaaaaggtttatagagttatccaaccgcaaaggcccggggacgttagagggggtgtacgaccaaaattttgagtgtctgtattttgtgtag

SEQ ID NO: 77448 - protein, 243 aa, Unknown
  Obtained from environmental sample
  misc_feature (1)..(243): Xaa is any amino acid
MPELVVGRAAEHSLYAVNDQIKRGFISVAGGIRIGIAGEAVFEADGEIRTLKNFTGLNIRLPHEVKNCALNAFPFIYDGFALNALIISPPGAGKTTYLRDLARLISDTEHYCNVLVADERCELAAAVNGIPQLNVGRNTDVLSNCSKAYAFNCGIRAMRPDVIITDELYGAEDLDAVSYAAASGVRVIASVHAFDRHDLLIKPFFGAAIKNRLFKRFIELSNRKGPGTLEGVYDQNFECLYFV

SEQ ID NO: 77449 - DNA, 351 bp, Unknown
  Obtained from environmental sample
  misc_feature (1)..(351): n is a, c, g, or t
atgaaatccgacttcacaaccggagcgaaggataggcaagttattgtgttatttactgatgctgacgctcttaaactcggcgagcgaaaaagtgaaaagtattacccctctgacatggtagatatgaaaggacttggcgatatatgggcgtgcgtaggacaggattccagtttgaaactaagagaaaagaataagcgccttgtcttgtttgctcccagtgggacgatatatgaagagctaaagaaatcgctcaaccgtagtgtatttgaaccagtaaatatggaatcaggtttgggtgatattaatttcaaagaaatcatcgatataattgcggcatctgcatcaaactaa

SEQ ID NO: 77450 - protein, 116 aa, Unknown
  Obtained from environmental sample
  misc_feature (1)..(116): Xaa is any amino acid
MKSDFTTGAKDRQVIVLFTDADALKLGERKSEKYYPSDMVDMKGLGDIWACVGQDSSLKLREKNKRLVLFAPSGTIYEELKKSLNRSVFEPVNMESGLGDINFKEIIDIIAASASN

SEQ ID NO: 77451 - DNA, 561 bp, Unknown
  Obtained from environmental sample
  misc_feature (1)..(561): n is a, c, g, or t
gtgccttccagggcctggaaaaaacgccgtttcaaccagggctgggcgcgcggggaaaccctgaacatctccatcggccagggcgcgaccctggttaccccggtgcaactggcctccttcgtctcctcgctcatgaacggcggcaagctgctcaagcccttgctgctggcggatgaacccgtgcaggtgcgccagcaggtgccgggcagccccgacgcgcgaaaattcatcgtggagagcatgcgccgcaccgtggaaggcggcacggccagagtgctctatcgccaggatgccgtcatgggcggcaaaaccggcacggcccaggtggtgaaactgaagttcgccgccggcgaccggcgtctgaaaacccatgaaatggcttatgaacagcgcgaccacgcctggatcgccagctacggcgaaaaggcgggcagacgctacgttgtggtgaccatggtggaacacggcggcggcggctcctccgtggccggccctgtcgccaaaaaagtctatgaccacctgttcagcacgctgtccacggcagccgcgggtcaacgatga

SEQ ID NO: 77452 - protein, 186 aa, Unknown
  Obtained from environmental sample
  misc_feature (1)..(186): Xaa is any amino acid
MPSRAWKKRRFNQGWARGETLNISIGQGATLVTPVQLASFVSSLMNGGKLLKPLLLADEPVQVRQQVPGSPDARKFIVESMRRTVEGGTARVLYRQDAVMGGKTGTAQVVKLKFAAGDRRLKTHEMAYEQRDHAWIASYGEKAGRRYVVVTMVEHGGGGSSVAGPVAKKVYDHLFSTLSTAAAGQR

SEQ ID NO: 77453 - DNA, 852 bp, Unknown
  Obtained from environmental sample
  misc_feature (1)..(852): n is a, c, g, or t
ttgtttgagtccgccaacttcaacggaaccaacgtgcgcctcacatcaaagaagctgggccttcgcacggacgcctccgcccggtatgaaaagggcttggatccaaatctggcggaagcggcgctgttacgcgcgatggaattggtggagctgctgaactgcggcgatgtggttcccggcgcggcggacgcatatccgtcgccgcgtctgcccggccatgtgacgtttgacccggggcgtatcaacgcgctgctcggcatggacatccccgctggcgacatggccgaatggctggcgcgggtcgggatcgcggcccgtgaacgggccggcggggccggatatgaagccgatatccccaccttccgcgcggacatcacacaggaggcggacatcgcggaagaaatcgcccgcttctatggttacggcaacatcccatcccggcatacccaaacggtgcccgcgcccggagagcgcggtgcggcgcggcttcttgcggataagatcatgaacctgatgctctcgcttggatattctcaggccgtaacgttcccatttgaaagccctaaggtgtttgacaaactgatgataccgcccggccatgcgctgcgggaggctatccgtatccagaatccgctgggcatggattacagcctgatgcgcacgactacaatcggcgctttgctggaaagcctttccgtcaactacagccgccgcgccgagtccgctgcgctgtttgaggccgcctgcgcgtaccgtgccaaatcgctgccacttaccgaaatgccaactgagatatacacgctgaccgctgcggcatacggcacagacttcttcgcctccaaggggacataa

SEQ ID NO: 77454 - protein, 283 aa, Unknown
  Obtained from environmental sample
  DOMAIN (71)...(141): tRNA synthetase B5 domain
  misc_feature (1)..(283): Xaa is any amino acid
MFESANFNGTNVRLTSKKLGLRTDASARYEKGLDPNLAEAALLRAMELVELLNCGDVVPGAADAYPSPRLPGHVTFDPGRINALLGMDIPAGDMAEWLARVGIAARERAGGAGYEADIPTFRADITQEADIAEEIARFYGYGNIPSRHTQTVPAPGERGAARLLADKIMNLMLSLGYSQAVTFPFESPKVFDKLMIPPGHALREAIRIQNPLGMDYSLMRTTTIGALLESLSVNYSRRAESAALFEAACAYRAKSLPLTEMPTEIYTLTAAAYGTDFFASKGT

SEQ ID NO: 77455 - DNA, 864 bp, Unknown
  Obtained from environmental sample
  misc_feature (1)..(864): n is a, c, g, or t
ttgggntnaccaagacagattggcacgagtatccctgcaggcgctggatcactgatggcgctgccgaccgaaaaccaggaagaaaacacgctggttgacttcggcacgctggagccctcgttcagcttggaagatgtctcgttcacctaccccggagcggagcggacagcgctcagcaatctttccctgcgcatcatgccgggtgaaaaagtgggggttatcggccgcatgggatcgggcaaatccacgcttggcaagttgctcatcggcctgtaccaacccaaggaaggcgctgtaaaattcggaaatgtggacattcgccagcttcccggcgcggatctgcgcggccgggtcggttttctgccccaggatatcgtcctgttctacggcaccattcgcgacaacatcgccctcggcgatccgtccatcaacgatcaccttatcatgcgggccgcctcgctggccggagtgacagattttgtccgcaacaatcccgcaggcttcggcgcccaggtaggcgaacagggcaaatccctgtccggcgggcaacgtcaagctctggctctggcccgggctctcgtgcgcgatccggacgtgctcattctggacgaacccaccagcaacatggataccggcacggagcagacagttcaacgtcacctgcacagcatcattgcgaataagacattgattcttatcacgcatcgcctgagcatgctcagcatggtggatcgcctgatcgtcatggattccggccgggtcatgctggacgggccaaaagacgctgttttacggcgtttgcgcggacnagccgggcagacgccggttcaagcaaaggatgcggctcatgtcgcaacgccctga

SEQ ID NO: 77456 - protein, 287 aa, Unknown
  Obtained from environmental sample
  SIGNAL (1)...(20)
  DOMAIN (68)...(252): ABC transporter
  misc_feature (1)..(287): Xaa is any amino acid
MGXPRQIGTSIPAGAGSLMALPTENQEENTLVDFGTLEPSFSLEDVSFTYPGAERTALSNLSLRIMPGEKVGVIGRMGSGKSTLGKLLIGLYQPKEGAVKFGNVDIRQLPGADLRGRVGFLPQDIVLFYGTIRDNIALGDPSINDHLIMRAASLAGVTDFVRNNPAGFGAQVGEQGKSLSGGQRQALALARALVRDPDVLILDEPTSNMDTGTEQTVQRHLHSIIANKTLILITHRLSMLSMVDRLIVMDSGRVMLDGPKDAVLRRLRGXAGQTPVQAKDAAHVATP

SEQ ID NO: 77457 - DNA, 657 bp, Unknown
  Obtained from environmental sample
  misc_feature (1)..(657): n is a, c, g, or t
atgcgtgataagaatcaatgtcttattcgcaatgatgctgtgcaggtgacgttgaactgtctgctccgtgccggtatccatgttgctggtgggttcgtccagaatgagcacgtccggatcgcgcacgagagcccgggccagagccagagcttgacgttgcccgccggacagggatttgccctgttcgcctacctgggcgccgaagcctgcgggattgttgcggacaaaatctgtcactccggccagcgaggcggcccgcatgataaggtgatcgttgatggacggatcgccgagggcgatgttgtcgcgaatggtgccgtagaacaggacgatatcctggggcagaaaaccgacccggccgcgcagatccgcgccgggaagctggcgaatgtccacatttccgaattttacagcgccttccttgggttggtacaggccgatgagcaacttgccaagcgtggatttgcccgatcccatgcggccgataacccccactttttcacccggcatgatgcgcagggaaagattgctgagcgctgtccgctccgctccggggtaggtgaacgagacatcttccaagctgaacgagggctccagcgtgccgaagtcaaccagcgtgttttcttcctggttttcggtcggcagcgccatcagtga

SEQ ID NO: 77458 - protein, 218 aa, Unknown
  Obtained from environmental sample
  misc_feature (1)..(218): Xaa is any amino acid
MRDKNQCLIRNDAVQVTLNCLLRAGIHVAGGFVQNEHVRIAHESPGQSQSLTLPAGQGFALFAYLGAEACGIVADKICHSGQRGGPHDKVIVDGRIAEGDVVANGAVEQDDILGQKTDPAAQIRAGKLANVHISEFYSAFLGLVQADEQLAKRGFARSHAADNPHFFTRHDAQGKIAERCPLRSGVGERDIFQAERGLQRAEVNQRVFFLVFGRQRHQ

SEQ ID NO: 77459 - DNA, 696 bp, Unknown
  Obtained from environmental sample
  misc_feature (1)..(696): n is a, c, g, or t
atgataaacgcaacgcaaggaaaaatacaaagatgtcttattgaaaaaggctttttacctgtgaatgcgaaaagttatccaataataaaaaactttgacactgataataagttgtatgaaatgacagcgtgtttaatcatagtctggtcggatgaatatcattctctttatagaattattgacgaaagtttgtgcatcgccaatttttaccctaatggagatttttcatttttaatttatcgtccgacaaccaggaataatttgcaacgccttatcgatattttgtatgatttatcgatcgagtccgggcttaacgctttatatgtaagagaaatcgaagaacgctttgtagaagattaccggcggttaacgggttatcgcatggaagccgaatacgatagcgacatgagtgaatatgtatacagtgcggacagtatacttaatttatgcggacgagagaatgaagaaaagcgccgtcagcttaaaaaatttattgataacccgaatatttccctgaaaataataacaaaagaaaattttaacctgtgtcttgatatagaaaaaaaatggtgcagccagcaaaattgtaatctgtgcagttcttatgtaggttgttcaaaaacaacttcgaaaattatggctaaaatatttgatggttctgtatatcagggtattttagcatatatagancggtaa

SEQ ID NO: 77460 - protein, 231 aa, Unknown
  Obtained from environmental sample
  misc_feature (1)..(231): Xaa is any amino acid
MINATQGKIQRCLIEKGFLPVNAKSYPIIKNFDTDNKLYEMTACLIIVWSDEYHSLYRIIDESLCIANFYPNGDFSFLIYRPTTRNNLQRLIDILYDLSIESGLNALYVREIEERFVEDYRRLTGYRMEAEYDSDMSEYVYSADSILNLCGRENEEKRRQLKKFIDNPNISLKIITKENFNLCLDIEKKWCSQQNCNLCSSYVGCSKTTSKIMAKIFDGSVYQGILAYIXR

SEQ ID NO: 77461 - DNA, 405 bp, Unknown
  Obtained from environmental sample
  misc_feature (1)..(405): n is a, c, g, or t
gtgaccaccagcgtctgtaccgcctgccccaaccgcgccagccgctcgccgaccgcgcttgcggtggcaccgcttatgcccgaatccacctcgtcgaatatcatggtgccgatttcgttgccgccggaaatgaccgcctttatggcgagcgtgaagcgtgcgagctcgccgccgctggcgattttatgcagcaatccagacttcgcgccgacattggtggcgcctacgaactgcgccttgtccgcgccgttcggtccttcttccgcaggttccacctgcacctcgaaggtcgccttcgcaagcttcagcggtggcagttccgccagcaccgcctgcgacaatttcttcgccgcggcttggcgtttcttcgaaagcgcggcggcaagcgcgaggaatttctcgtga

SEQ ID NO: 77462 - protein, 134 aa, Unknown
  Obtained from environmental sample
  SIGNAL (1)...(21)
  misc_feature (1)..(134): Xaa is any amino acid
MTTSVCTACPNRASRSPTALAVAPLMPESTSSNIMVPISLPPEMTAFMASVKRASSPPLAILCSNPDFAPTLVAPTNCALSAPFGPSSAGSTCTSKVAFASFSGGSSASTACDNFFAAAWRFFESAAASARNFS

SEQ ID NO: 77463 - DNA, 390 bp, Unknown
  Obtained from environmental sample
  misc_feature (1)..(390): n is a, c, g, or t
ttgtacatgatcatgccgaaagaggcaattccctggtaccgggagcttttctcccttcttgccgaaccagccaacacgccgctcctcttccattgctccgccgggaaggatcgcaccggtctggctgcggcccttatcctccacgcgttgggcgcggacagggaaacgataatggcggactatcttgtgtcaaccgaatacctgcgaccgtacagggaaatgtgcgcgacgaccatgccccggatggtgccttacgccacggtgaaagaatcgtatctggaagcggcgtttgcggcaatcgaaaagtacggcggcattgaccgctacatcacaaaggagcttggggccgatccccggcggctccgcgaactgtacacggaaaccgcgtaa

SEQ ID NO: 77464 - protein, 129 aa, Unknown
  Obtained from environmental sample
  misc_feature (1)..(129): Xaa is any amino acid
MYMIMPKEAIPWYRELFSLLAEPANTPLLFHCSAGKDRTGLAAALILHALGADRETIMADYLVSTEYLRPYREMCATTMPRMVPYATVKESYLEAAFAAIEKYGGIDRYITKELGADPRRLRELYTETA

SEQ ID NO: 77465 - DNA, 696 bp, Unknown
  Obtained from environmental sample
  misc_feature (1)..(696): n is a, c, g, or t
atggcggcatatgtgctattgtataaacactntgcggaatggagtaacggcggcatgaagttcgcaatgtcatacagtttcggaaaagattcggcccttgcgctgcacaaaatggcgcgggcgggaaacgagcccctgtgccttatcacaaccatcaatgccgggaacgacaaatcgtggtcgcacggaatcaatccagcagtgattgagcgcgcggcccgctctttgaatctccccgttattacggcgcgctgtgattccagcgattacggcacagcctttgagaaagccctggaaaccgccgtggaaatgggggccgaatgttgcgccttcggcgacatggacatagacgagcatctacactggaacgaggagcgctgcaaggccgcgcatattgagtgccgcgtgccgctttggggaatcgacagggagaaagcggttgccgaaatcatcgaattgggatacacggcgctcatcaaggttgttcacaaaagatttctgggcgaagactttttgggcaaggcgctggacgcggcaacagtggacaaaatcagaagggccggggcggatgtgtgcggcgaaaacggggaataccatacctttgttaccggcggcccgctgtaccgggagcccgtcgcggtaacgctgggaaacatcgttgatctgggcgagtatgccgcgatagatatgacgtag

SEQ ID NO: 77466 - protein, 231 aa, Unknown
  Obtained from environmental sample
  DOMAIN (19)...(228): ATP-binding region
  misc_feature (1)..(231): Xaa is any amino acid
MAAYVLLYKHXAEWSNGGMKFAMSYSFGKDSALALHKMARAGNEPLCLITTINAGNDKSWSHGINPAVIERAARSLNLPVITARCDSSDYGTAFEKALETAVEMGAECCAFGDMDIDEHLHWNEERCKAAHIECRVPLWGIDREKAVAEIIELGYTALIKVVHKRFLGEDFLGKALDAATVDKIRRAGADVCGENGEYHTFVTGGPLYREPVAVTLGNIVDLGEYAAIDMT

SEQ ID NO: 77467 - DNA, 495 bp, Unknown
  Obtained from environmental sample
  misc_feature (1)..(495): n is a, c, g, or t
atgaagacgggaaaactggaaaaaatgctggcgcttggacaagaatggttacctgacgcccgctttctcgagtccgtgcggccgacgttttcccagacgggtgaagacggcattgtggcttttatcttgacggtgttaaagatagagacgccgacatatattgatgtcggagcgttcgatccatttcggttcaacaataccgcaagaatgtactgggaaggatgcagaggcatcaatattgagccgaacccggaaatgcatgcgcgtcttcaaaaattcagagagcacgatataaacctgaatatcggcatagccggtaaaaaagggatacttaaatactatgttatggactcgccgacgctcaatactttttcagaaaaagaggccgtttgtatatctgaaaaaatggggaaaaaaatagtaaaagttcttgatattcctgtagacactatagacaatgtaataatgacatatgcaaaacaacaaatggcctga

SEQ ID NO: 77468 - protein, 164 aa, Unknown
  Obtained from environmental sample
  misc_feature (1)..(164): Xaa is any amino acid
MKTGKLEKMLALGQEWLPDARFLESVRPTFSQTGEDGIVAFILTVLKIETPTYIDVGAFDPFRFNNTARMYWEGCRGINIEPNPEMHARLQKFREHDINLNIGIAGKKGILKYYVMDSPTLNTFSEKEAVCISEKMGKKIVKVLDIPVDTIDNVIMTYAKQQMA

SEQ ID NO: 77469 - DNA, 333 bp, Unknown
  Obtained from environmental sample
  misc_feature (1)..(333): n is a, c, g, or t
ttgggtcaatgctttcctctctattactacgaccaggccccagcccataaaaagaccctatttgacaccgatcaggacaatcttgcacaccggtccgggctgaccgacttcattctggaacaaagccgcgccctctacggccccaagacgaccaaagaagatgttttctattacgtctatggcctcttgcacagcccggattatcgccagactttcgcggctgatttaaagaaaatgctgccccgcctgcccctggtggaaaagccggccgatttctgggctttcagccaggccggtcgcgctttagccgatctgcacctcaattatgagtaa

SEQ ID NO: 77470 - protein, 110 aa, Unknown
  Obtained from environmental sample
  misc_feature (1)..(110): Xaa is any amino acid
MGQCFPLYYYDQAPAHKKTLFDTDQDNLAHRSGLTDFILEQSRALYGPKTTKEDVFYYVYGLLHSPDYRQTFAADLKKMLPRLPLVEKPADFWAFSQAGRALADLHLNYE

SEQ ID NO: 77471 - DNA, 792 bp, Unknown
  Obtained from environmental sample
  misc_feature (1)..(792): n is a, c, g, or t
gtggtctggaccgtcctgaacgccctccgcgctcatgatgaccgctttgaagccaaaatagaaaaattggctctgaataaacatcccttcttggacggcggttcggtcttagttggtggtgtgcccaccggtgacgccggcgaacataccggcgcaggcggtggaatccagctacccctgccttttgcggaattcaaggaactccagaacgtcatctatgcccggatggtccagaaggtcggcaataaacgctattgggaacagtgggccgaggatgtggcccatatcgcccaaggctacattgaacgcatcaatcgtttgatcgcccaacccggttcccatcggcgggcttttgaggaatttctggaaggcttgcggaaaaacatcaatccctccgtggaacccggcgaagttgtggaaatgctggcccaacatcttgtcaccaagccggttttcgaagccctgttcgagaatttttcctttgtccggcacaaccccgtctcccaggccctccagaagatggtggaccaattggaagcccaggccctggaaaaggacacgcaggttttgaccaggttttatgaatcggtcaaaatgcgggtgtcgggcataaaaagcgccgaggacaggcaaaaaatcatcgttgagctttacgagaaatttttcaagacggccttccccaagaccgttgaaaaactgggcatagtctatacccccggtggaggtggtggattacatcattcactccgcggccgcagtgctgaaaaaagaaatcggcgaatccctctctag

SEQ ID NO: 77472 - protein, 263 aa, Unknown
  Obtained from environmental sample
  misc_feature (1)..(263): Xaa is any amino acid
MVWTVLNALRAHDDRFEAKIEKLALNKHPFLDGGSVLVGGVPTGDAGEHTGAGGGIQLPLPFAEFKELQNVIYARMVQKVGNKRYWEQWAEDVAHIAQGYIERINRLIAQPGSHRRAFEEFLEGLRKNINPSVEPGEVVEMLAQHLVTKPVFEALFENFSFVRHNPVSQALQKMVDQLEAQALEKDTQVLTRFYESVKMRVSGIKSAEDRQKIIVELYEKFFKTAFPKTVEKLGIVYTPGGGGGLHHSLRGRSAEKRNRRIPL

SEQ ID NO: 77473 - DNA, 582 bp, Unknown
  Obtained from environmental sample
  misc_feature (1)..(582): n is a, c, g, or t
ttgtttctggaactgcacccggccggccccaagcgcgacttccgttttcgcctggacagccagcaccgggccgctctggccggcatgcgcgccgtcagcgtcggcgctttgatcggactggacgactggcggcgggacgccttgtgcacgggcctgcacgccgactggctgcaacagcgtcatcccggcgtggaagtcggcgtttccgtgccgcgcatgcggccgcacgagggcagtccgatcgcggcgcatcccggcacggagcgggatttggcgcagtacatcctggccctgcgcctgtttctgccccgcgcgggcattacggtgtccacgcgggaacgggcctctctgcgcgatcgcctgttgtctctgggcgtgacccgcgtatcggcgggagtgtccacggctgtgggaggccacgccgtgcgccatgacgagaacgccggccagttccacatagcggacgaacgggatgtggacagcatggctgccgccatccgggcacagggctatcagccggtgttcaagaactgggagcctccggacggggtctacgactgcggcggcgccgccgggatgtga

SEQ ID NO: 77474 - protein, 193 aa, Unknown
  Obtained from environmental sample
  DOMAIN (67)...(173): Biotin and Thiamin Synthesis associated domain
  misc_feature (1)..(193): Xaa is any amino acid
MFLELHPAGPKRDFRFRLDSQHRAALAGMRAVSVGALIGLDDWRRDALCTGLHADWLQQRHPGVEVGVSVPRMRPHEGSPIAAHPGTERDLAQYILALRLFLPRAGITVSTRERASLRDRLLSLGVTRVSAGVSTAVGGHAVRHDENAGQFHIADERDVDSMAAAIRAQGYQPVFKNWEPPDGVYDCGGAAGM

SEQ ID NO: 77475 - DNA, 702 bp, Unknown
  Obtained from environmental sample
  misc_feature (1)..(702): n is a, c, g, or t
atgaaagatatggatattataaaagaaatcgaatcattgttacaacttcaattgaagtccgttcaaaaagattcgtatggtacagattcctatactttgcgaaacgataaaattattgcattaagaatttttggaaatcaaatgattaaagaaaatttagaacaattagttatgttcttaaaacaattaagaaatcttgaaattttatatattatccgatgcaatattgatataatcacattacaagaattaaaacaattaacagaacttgatttaactggtaataaaataatagatattgctccattgcaagacctaaagcaattaacaacgcttaacttaactgataataaaaaaatcatagattttaccccattgcaagacttaaaacaattaacaaaactcggtttaagtggtacccaaatcagcaacattacttcattacaaggattaaaacaattaacaacgcttgatttaagtggtaatcaaatcagcgacattaccccattgcaaggattaaaaaaattaacatcacttaatttaatggataatcaaatcagcgacattacctcattgcaaagactaaaacaattaacaacgcttgatttatatcgtaatcaaattattgatattacctcattacaagaattgaagcaattaacagagcttaatttaagtgcactcaagtctcggccgatctga

SEQ ID NO: 77476 - protein, 233 aa, Unknown
  Obtained from environmental sample
  misc_feature (1)..(233): Xaa is any amino acid
MKDMDIIKEIESLLQLQLKSVQKDSYGTDSYTLRNDKIIALRIFGNQMIKENLEQLVMFLKQLRNLEILYIIRCNIDIITLQELKQLTELDLTGNKIIDIAPLQDLKQLTTLNLTDNKKIIDFTPLQDLKQLTKLGLSGTQISNITSLQGLKQLTTLDLSGNQISDITPLQGLKKLTSLNLMDNQISDITSLQRLKQLTTLDLYRNQIIDITSLQELKQLTELNLSALKSRPI

SEQ ID NO: 77477 - DNA, 909 bp, Unknown
  Obtained from environmental sample
  misc_feature (1)..(909): n is a, c, g, or t
ttgagcacttcatgttggcggctcggtcaacgcacccaagtacgatatgcacgtgcaaatggcagccggcgaatgcaacgcttttacccccgccgattcaccaactactacatcacgctgcntgcgcaaaacattgagacggcgctgtggctcgaaagcgaccgcttgctcaccccgctgctcaacgaggaaacgctgcaaacccagcagcaggtagtggtagaggagttctgccagcgctacctcaatcagccttacggcgacgctcaactgctacagcgtccgctggcgtacaaagtacatccctaccaatggagtaccattggtaaaacgcccgaacacattaccactgctacgctgagcgagataaaagattttttcggaaagttctatacgccaaacaacgccattttggtcataggtggtaacatcgcgccacagcaggctttcacgcttgcgcaaaagtggtttagcgacattccgcagggcgaagttttacacaacaacattccacaagaacctgcacaaaccgaggctcgttcgctcagcgttgagcggcacgttcctgctgcggctatctacaaggcgtaccacatgcccgacaggctccatcccgattaccacacctgcgatctgctcagtgaaattctatcgggcggaaaatcgtcgcggctgtaccgccgtttggtgcaggagcagcagctgttcagcaacgtgagcgcctacattggcggcgacattgatgcggggctgattaccgttacggcacatttacttccgcaaaccaccatgccgcaagccgaggctgccattggagcagaattgcagcaactctgttccgaaaacatttcggactacgagctggaaaaggtgaaaaacaggatgaaagcatgcatggtctctcgataa

SEQ ID NO: 77478 - protein, 302 aa, Unknown
  Obtained from environmental sample
  DOMAIN (117)...(295): Peptidase M16 inactive domain
  misc_feature (1)..(302): Xaa is any amino acid
MSTSCWRLGQRTQVRYARANGSRRMQRFYPRRFTNYYITLXAQNIETALWLESDRLLTPLLNEETLQTQQQVVVEEFCQRYLNQPYGDAQLLQRPLAYKVHPYQWSTIGKTPEHITTATLSEIKDFFGKFYTPNNAILVIGGNIAPQQAFTLAQKWFSDIPQGEVLHNNIPQEPAQTEARSLSVERHVPAAAIYKAYHMPDRLHPDYHTCDLLSEILSGGKSSRLYRRLVQEQQLFSNVSAYIGGDIDAGLITVTAHLLPQTTMPQAEAAIGAELQQLCSENISDYELEKVKNRMKACMVSR

SEQ ID NO: 77479 - DNA, 507 bp, Unknown
  Obtained from environmental sample
  misc_feature (1)..(507): n is a, c, g, or t
ttgggctacgaactctacctgtcttgggacaagacccccgcgctctgggaagcgttgatcgccaatgcgcgcgtcaaagcgccgggactcggcgcacgcgacaccttgcgcctcgaagccggtctgcccctgtacggtcatgagctggacacggaacacacgcccgccgaggcgggtatggacaggatgctcaccaatcccgcgcagtacgtgggcaaggaaggtgccctgcgcgtcaggcagcgccttgttccgctcggcatcgccggacgccgcagcgcccgcgccggagatgccgtggttctgcccgatggtacgcatgccggcatcgtcaccagcggttcctttgcgcccagtctcggccatgccatcgccctggcgtggattgacaaggcttacgccgatgcggaggatttcatcgtccgtgccgccaaaacggaacttcccgcgcaaaaaaccgttctgcctttctacaaggacggcacggcgcgcaaaaaacacctataa

SEQ ID NO: 77480 - protein, 168 aa, Unknown
  Obtained from environmental sample
  DOMAIN (2)...(160): Glycine cleavage T-protein (aminomethyl transferase)
  misc_feature (1)..(168): Xaa is any amino acid
MGYELYLSWDKTPALWEALIANARVKAPGLGARDTLRLEAGLPLYGHELDTEHTPAEAGMDRMLTNPAQYVGKEGALRVRQRLVPLGIAGRRSARAGDAVVLPDGTHAGIVTSGSFAPSLGHAIALAWIDKAYADAEDFIVRAAKTELPAQKTVLPFYKDGTARKKHL

SEQ ID NO: 77481 - DNA, 495 bp, Unknown
  Obtained from environmental sample
  misc_feature (1)..(495): n is a, c, g, or t
atgaacgggaaaacatggatcgccctgctgttgacgctttcttttaccttgttcggcgttgcggcagccatagctgccggctccaaacccgcccccgccgcatcggcgacgcaaccaatggccccgcaccccggaaccgttgcccctgccgcgccggcagcgcagccgatggccctgcgtcccgaaacgcccaaggcgtcgcccaggccgtccacgcgcaccgctccttcctttaactgcgcgaaggcgtccaacgccgtggagcgcgccgtatgctccgatgccaccttggccgaacttgatgtgcgtgtggcagccgaatataagaaagcgctcggcctgcatttcgacaaggcggcgctcagggagaaccaaaggcagtggctgcgggagatgcacagccagtgcgcgaacgcgcctgttccctgcgcgcagaaatactacagggtgcgcttgtcgcagcttatgcaacacaacgatcaggcgcaacactga

SEQ ID NO: 77482 - protein, 164 aa, Unknown
  Obtained from environmental sample
  SIGNAL (1)...(25)
  misc_feature (1)..(164): Xaa is any amino acid
MNGKTWIALLLTLSFTLFGVAAAIAAGSKPAPAASATQPMAPHPGTVAPAAPAAQPMALRPETPKASPRPSTRTAPSFNCAKASNAVERAVCSDATLAELDVRVAAEYKKALGLHFDKAALRENQRQWLREMHSQCANAPVPCAQKYYRVRLSQLMQHNDQAQH

SEQ ID NO: 77483 - DNA, 408 bp, Unknown
  Obtained from environmental sample
  misc_feature (1)..(408): n is a, c, g, or t
atggaaaataatctgtcttgcgcgatatgtgactctgtccattggttagctagaggtgttttaataatgaaaaaacaacatatactcaactacctcaaaatcgctcggtttgaccattgggtcaaacagctttttgtattaccaggcgcttggctcgcttttgtgatggttagtcccatactatcaagggatctggctgttcgattagtttttggtatgattgctaccagcgcggcagcttcggccaactactgcatcaatgagtggttggacatggagtttgataaattccatcctataaaaaaacaccgcccttttgtcaccagcagattgagtgttccaatcgtattggttgagtatgttttttttgcgacaatttcactcgctatagctaatttatttcgataa

SEQ ID NO: 77484 - protein, 135 aa, Unknown
  Obtained from environmental sample
  misc_feature (1)..(135): Xaa is any amino acid
MENNLSCAICDSVHWLARGVLIMKKQHILNYLKIARFDHWVKQLFVLPGAWLAFVMVSPILSRDLAVRLVFGMIATSAAASANYCINEWLDMEFDKFHPIKKHRPFVTSRLSVPIVLVEYVFFATISLAIANLFR

SEQ ID NO: 77485 - DNA, 303 bp, Unknown
  Obtained from environmental sample
  misc_feature (1)..(303): n is a, c, g, or t
atgttggagtggcttcgcattgtggaagatcccatcacaattggtttttcctttaccctgttcggtgcccaaatcggccccgtcatccctggcattccgggtatgcgtatggtcctcttttccgtgctgctgatcgttgtcatcatcttccggagcaaagggatcatggggacgcgcgagttttcttgggacgggttttttacctttttccctcggcttttccagtctttgcgaaatcgctttttcccaccttctagttcttccagttctcccagttctttcaacggaggacagaagccatga

SEQ ID NO: 77486 - protein, 100 aa, Unknown
  Obtained from environmental sample
  misc_feature (1)..(100): Xaa is any amino acid
MLEWLRIVEDPITIGFSFTLFGAQIGPVIPGIPGMRMVLFSVLLIVVIIFRSKGIMGTREFSWDGFFTFFPRLFQSLRNRFFPPSSSSSSPSSFNGGQKP

SEQ ID NO: 77487 - DNA, 837 bp, Unknown
  Obtained from environmental sample
  misc_feature (1)..(837): n is a, c, g, or t
atgctgacctgttatgtcatgtccaaaaaacgcggctacgttggctctggaaagggcatcagcctaaaagagctgcgtctggccttcaaagccctgcgccaggatgccgcctccaggcctgccctgattgaagcctggaagatggcctggcagcatactcagatgagcaaaaaaattcgtggcctggtcaaatcctttctggatgctttttttgccttgctaatgccgattatcatcttgggcggcatttattccggcgttttcaccccaaccgaatcggcagtggtggcggtggtgtattgcgtgatcatcagcgcgttcgtctaccgtgaaatgaagtttaaggatttttacaaggcgctttatgatactattgttgtcaatggtatcaccacttttttgatagggttttccatggctttcgcgacttacctgaacttgatgcaagtgccggcggcgcttgccagcttctttttcagtctgaccagtaatcgcgtggtgttttttttgctgctcaattttttgctgttggttttaggctgccttatcgataacatcccggccaccatcattctttcgccgatactgttgccggtggtgtcgcgttttggcatgagccccatcactttcggcgtgatgctgaccatgaatttggccatcggtttctgcacaccgccctacggcatcaatcttttcgtggcgcangccattgccgacgtgaagatggggcagatgatgagcagtatggtgtttttcgtgggggcgttgattgcggtgttattgctgaccacctttgtgccggttttgaccatggggctggttgatctgctgagatga

SEQ ID NO: 77488 - protein, 278 aa, Unknown
  Obtained from environmental sample
  DOMAIN (1)...(270): DctM-like transporters
  misc_feature (1)..(278): Xaa is any amino acid
MLTCYVMSKKRGYVGSGKGISLKELRLAFKALRQDAASRPALIEAWKMAWQHTQMSKKIRGLVKSFLDAFFALLMPIIILGGIYSGVFTPTESAVVAVVYCVIISAFVYREMKFKDFYKALYDTIVVNGITTFLIGFSMAFATYLNLMQVPAALASFFFSLTSNRVVFFLLLNFLLLVLGCLIDNIPATIILSPILLPVVSRFGMSPITFGVMLTMNLAIGFCTPPYGINLFVAXAIADVKMGQMMSSMVFFVGALIAVLLLTTFVPVLTMGLVDLLR

SEQ ID NO: 77489 - DNA, 798 bp, Unknown
  Obtained from environmental sample
  misc_feature (1)..(798): n is a, c, g, or t
gtggatcgtttgaacgcaaacagggaatataaggacagttttttcagaatcctcttcaacatgccggagaaagctctaaaattatactgtgacatcaccggcaaagcctatgataaagatatgaccgctgaaataaaatcgctggataatgtccttttgtcaaaactgcgtaacgatttggcgtttgttgtcaacggggctttggtcgtgatcatggagcatcagtcaacgctgaacaaaaatatgccgttgcgttcattgctatatattttgttattctatgaactttattacgggtttggcgacgccctatataaaacaaagccgatcaaactaccaaaaccggagttttatgtgctctacaacgggctggaaccctgtccttctcgcggcgtcatgcagttatcccatgctttcctgggcttggaagcgaatgagcagcctgggctggagttgattgtcaacgtaatcaacatcaattatggtaaaaatatggaaatactggaaagaaacgcggatcttaaaggctactccatgtttgtatcgaaaatccgtgggtggcgaaaggcggggaagagcttacctgaagcgatccagatcgcagtggaggagtgccttgcggaagggatattaacggaatttttgagagaacataagaacgaggtggaaagcatgttttcattaatttatgacgaagaaaaagcatccagtatgctagagaagaaggcagagaagaggggtgggaaaaaggcagggaagaggggtgggaagaagatatttgcatcctgcgcgcattga

SEQ ID NO: 77490 - protein, 265 aa, Unknown
  Obtained from environmental sample
  misc_feature (1)..(265): Xaa is any amino acid
MDRLNANREYKDSFFRILFNMPEKALKLYCDITGKAYDKDMTAEIKSLDNVLLSKLRNDLAFVVNGALVVIMEHQSTLNKNMPLRSLLYILLFYELYYGFGDALYKTKPIKLPKPEFYVLYNGLEPCPSRGVMQLSHAFLGLEANEQPGLELIVNVININYGKNMEILERNADLKGYSMFVSKIRGWRKAGKSLPEAIQIAVEECLAEGILTEFLREHKNEVESMFSLIYDEEKASSMLEKKAEKRGGKKAGKRGGKKIFASCAH

SEQ ID NO: 77491 - DNA, 534 bp, Unknown
  Obtained from environmental sample
  misc_feature (1)..(534): n is a, c, g, or t
atgaaacaaacgcaaacaatgccggcgctgccgatgagagggctcgtgatcttcccgcacatgatactgcatttcgacgtggggcgggataagtcggtggacgcgctgaaagcggcggcgaacggaggaagaaaaatcttcctcgtggcgcaaagcgacgcgaacgcggtcgacccgggagaggacgacatatacaaaatcggcgtgatagcggaagtccggcagatcctgaaaacgccggagaacgcgacgcgcgtgttagtcgaagggttgacgaaagcaaagctgttgaagttcgacgcgtcggggccgtatttcaaatgcacggtaaaaccgataaccgagccggcgtcgcggctcgcggaaagagaagagtcggcgttggcaaggatgcttggcgaggtttttaagaaatactgctcgctcgcgccgcgtatgccgaacgagctgtatcaggcgattttgaccgagaaaaacctcgataaactgttcgacagcatagtttttaacatctactntaagccggaagaatag

SEQ ID NO: 77492 - protein, 177 aa, Unknown
  Obtained from environmental sample
  DOMAIN (6)...(166): ATP-dependent protease La (LON) domain
  misc_feature (1)..(177): Xaa is any amino acid
MKQTQTMPALPMRGLVIFPHMILHFDVGRDKSVDALKAAANGGRKIFLVAQSDANAVDPGEDDIYKIGVIAEVRQILKTPENATRVLVEGLTKAKLLKFDASGPYFKCTVKPITEPASRLAEREESALARMLGEVFKKYCSLAPRMPNELYQAILTEKNLDKLFDSIVFNIYXKPEE

SEQ ID NO: 77493 - DNA, 342 bp, Unknown
  Obtained from environmental sample
  misc_feature (1)..(342): n is a, c, g, or t
atggttcaggcggttcgcggggccgaaaaagcgggttccgaggcaactattgacgcaatgtgccgtgaacacggaaaagagctggtagaaagcgtccttggtgacggaatcaagcgtcttgccccttcggaaaaggcaaactacacgcggacaaaccgctccatacacgcgctccgcgacataaatgagggtgaaatcatcaaaagggaaatgattgcctgtctccgtaccgaaaaaatacttaaaccgggtctgtccccgtcctgggaagagcaaattatcgggctgacagcaaaaagaaccataccggcgggggaaggtatttgcctgggggatatataa

SEQ ID NO: 77494 - protein, 113 aa, Unknown
  Obtained from environmental sample
  DOMAIN (54)...(113): Antifreeze-like domain
  misc_feature (1)..(113): Xaa is any amino acid
MVQAVRGAEKAGSEATIDAMCREHGKELVESVLGDGIKRLAPSEKANYTRTNRSIHALRDINEGEIIKREMIACLRTEKILKPGLSPSWEEQIIGLTAKRTIPAGEGICLGDI

SEQ ID NO: 77495 - DNA, 396 bp, Unknown
  Obtained from environmental sample
  misc_feature (1)..(396): n is a, c, g, or t
atgaaggaagtatcagcggcgataataatagaaaatggtaaaatattattgacaaaaagaaactcagatggagatctaccgggatattgggaatttccgggcggtaaacgagaaaataatgaaacaatctttgaatgtttagaacgtgaaattaaagaagagttagatgtatgttgtaaagctttaaaagtatttgctgaaaatatatacgaatatgaaaatgggaaaataaaactaattgcaattattgccaaattatacagcaaaaatattatattaaatgtacacgatgaatatacctggacagaaataagcaatctgttcaattttaaattagcccccgccgatactcatattgctaaattacttttagaagaatatgataaaggactgtaa

SEQ ID NO: 77496 - protein, 131 aa, Unknown
  Obtained from environmental sample
  DOMAIN (2)...(126): NUDIX domain
  misc_feature (1)..(131): Xaa is any amino acid
MKEVSAAIIIENGKILLTKRNSDGDLPGYWEFPGGKRENNETIFECLEREIKEELDVCCKALKVFAENIYEYENGKIKLIAIIAKLYSKNIILNVHDEYTWTEISNLFNFKLAPADTHIAKLLLEEYDKGL

SEQ ID NO: 77497 - DNA, 333 bp, Unknown
  Obtained from environmental sample
  misc_feature (1)..(333): n is a, c, g, or t
ttggcaggctttacgttgggcgaacaacatgccatagcgatgagccacggcgaaggcaaatttgtggtgagcgacgcattggccaacgaacttttcgccaacggccaagtggcgttccaatacgttgacctcgatggaacgatcaccgcccaatcgccctacaatcctaacggttcatcgtatgccatagagggcatcattagccgagacggccaaattctcggcaaaatggggcactcggaacgctacgaaaacaacctgctaaaaaacattgatggcaacaaggtacaggatatttttgggaatgcggtgcggtatttcaaaaaattatag

SEQ ID NO: 77498 - protein, 110 aa, Unknown
  Obtained from environmental sample
  misc_feature (1)..(110): Xaa is any amino acid
MAGFTLGEQHAIAMSHGEGKFVVSDALANELFANGQVAFQYVDLDGTITAQSPYNPNGSSYAIEGIISRDGQILGKMGHSERYENNLLKNIDGNKVQDIFGNAVRYFKKL

SEQ ID NO: 77499 - DNA, 615 bp, Unknown
  Obtained from environmental sample
  misc_feature (1)..(615): n is a, c, g, or t
ttgaaaatgaagcccgccaaggccgccgatctggaagacctcctgcgcttcgagggcctggctttaaggcccggcccccggcggcaatacgacgaggccgtggccagggttctgcgcgaggccctgatgtccttccgccaggtcaaaatcacctatgccggccgcgaaggcccccccagggatttcaccttgatccccttgggctttttgtatggggagcgccagcactacctggtggcccgctacgccgatgggcagccggccggcaagccctaccatttcatattaagccgcattctggccgtcgaaaagctggaggctgattttgaggaagaccccgccttcgatcttgaggcccacgcggcccgctctttcggggctttccaggaagaaccctttgaggtggagtggctattcagccccgcggtcgcggccgaggcggccgacttcatctttcaccccagccaggaaatgagccgccaggccgacggcagcctgagcgtccgcttcaccgccgggggccgcctggaaatggcctggcatctccaaacttggggccgggaggtccgggtggtcaagcccgccgacttctgggagactttgcccgaattgtga

SEQ ID NO: 77500 - protein, 204 aa, Unknown
  Obtained from environmental sample
  misc_feature (1)..(204): Xaa is any amino acid
MKMKPAKAADLEDLLRFEGLALRPGPRRQYDEAVARVLREALMSFRQVKITYAGREGPPRDFTLIPLGFLYGERQHYLVARYADGQPAGKPYHFILSRILAVEKLEADFEEDPAFDLEAHAARSFGAFQEEPFEVEWLFSPAVAAEAADFIFHPSQEMSRQADGSLSVRFTAGGRLEMAWHLQTWGREVRVVKPADFWETLPEL

SEQ ID NO: 77501 - DNA, 396 bp, Unknown
  Obtained from environmental sample
  misc_feature (1)..(396): n is a, c, g, or t
gtggctattcagccccgcggtcgcggccgaggcggccgacttcatctttcaccccagccaggaaatgagccgccaggccgacggcagcctgagcgtccgcttcaccgccgggggccgcctggaaatggcctggcatctccaaacttggggccgggaggtccgggtggtcaagcccgccgacttctgggagactttgcccgaattgtgatccgcccggccgtcaggccgcttttgtttgatgttcccggttgtagagaacgcatatttcccgggccgcccgggccgcggccgggctcacccggctgttctccgggcctttatgctggtccagggccaggactccgctcaaagacgggccaaggcccagggtggaacgccggccgtccggctcggtga

SEQ ID NO: 77502 - protein, 131 aa, Unknown
  Obtained from environmental sample
  misc_feature (1)..(131): Xaa is any amino acid
MAIQPRGRGRGGRLHLSPQPGNEPPGRRQPERPLHRRGPPGNGLASPNLGPGGPGGQARRLLGDFARIVIRPAVRPLLFDVPGCRERIFPGPPGPRPGSPGCSPGLYAGPGPGLRSKTGQGPGWNAGRPAR

SEQ ID NO: 77503 - DNA, 477 bp, Unknown
  Obtained from environmental sample
  misc_feature (1)..(477): n is a, c, g, or t
gtgctttggtttttgctggcgattgttttttccctcatgctccgctacacggttatcgggaggagcatctatcttatcggctgtaaccgacctgcagcacagagggccggggtcaacctcctgaaaacaaccctgtttatttacggcgttacaggcgcgatttcgggaattgcttcaattgttcatgtctccattgtacagactgtaaccccaagctcaattgtcggccaggaaatgcaggtgattgccgcagttgttctgggcggtgcttcgattactggaggcaggggaacaattgcgggaaccgttcttggagtattgttgttttcaattttaagcaatgcccttaccctgcttaaaatttcctcgtactggtacaatgttttcatcgggataatcattctgggaagcgttatcataaacgccgtacaggaaataaggcagcgcaaatttatcgtgcgtgttaatgtaatataa

SEQ ID NO: 77504 - protein, 158 aa, Unknown
  Obtained from environmental sample
  misc_feature (1)..(158): Xaa is any amino acid
MLWFLLAIVFSLMLRYTVIGRSIYLIGCNRPAAQRAGVNLLKTTLFIYGVTGAISGIASIVHVSIVQTVTPSSIVGQEMQVIAAVVLGGASITGGRGTIAGTVLGVLLFSILSNALTLLKISSYWYNVFIGIIILGSVIINAVQEIRQRKFIVRVNVI

SEQ ID NO: 77505 - DNA, 738 bp, Unknown
  Obtained from environmental sample
  misc_feature (1)..(738): n is a, c, g, or t
ttgaaggcaagtttgcggactggacgcantgcggtttccaaaacccccctgatcaaggtgcaacaccctgaatatgaggcctggagcagcagcgcgcacggcgccgccggcgtgagctgcgccgactgccatatgccctatatccgcgaggacggcaaaaagatctccagccaccaggtgacctcgccgctcaaaactcccgggatgatagacacagcttgccggaagtgccatgccgacaagtcggccgagttcttgcgggcgcgcgtggaatacacccaggagaaagcctttgagaatctcctgaaagcgcaggaaatgtccgtgaaggcgcatgaatccgtgcgccaggcgcttgaatggaccggcgccaggcacgcggagtacgacaagctcatcatcaacgccaaggaaatgatccgcaaggggcagttcttctgggattatgcctcggccgagaacagcgtgggcttccataatccatctttgttgctggatacggtcttcaaatccctgacatacagccaggaggccgtgaattacgcgatgcaggctgtcaattacggcattgcgcccaagctggaaggcgacatccggcagattgtgccgcctcttctggaatggacccgtgcgatgcatatggacccggaaaccaagaaaaagcacgcctggacctcctacctgccggatattcccaaggccgagcgcatgtggctcaagcaggagaaaatccgctaa

SEQ ID NO: 77506 - protein, 245 aa, Unknown
  Obtained from environmental sample
  misc_feature (1)..(245): Xaa is any amino acid
MKASLRTGRXAVSKTPLIKVQHPEYEAWSSSAHGAAGVSCADCHMPYIREDGKKISSHQVTSPLKTPGMIDTACRKCHADKSAEFLRARVEYTQEKAFENLLKAQEMSVKAHESVRQALEWTGARHAEYDKLIINAKEMIRKGQFFWDYASAENSVGFHNPSLLLDTVFKSLTYSQEAVNYAMQAVNYGIAPKLEGDIRQIVPPLLEWTRAMHMDPETKKKHAWTSYLPDIPKAERMWLKQEKIR

SEQ ID NO: 77507 - DNA, 627 bp, Unknown
  Obtained from environmental sample
  misc_feature (1)..(627): n is a, c, g, or t
ttgacgcctgctcaagaaaaagaaatcaaagacttaatagctcaccacgcccctgatgacttgggattaccatattctttatggaacagggagtcagttaaacgtttgatctctgaaaaatgtgctgtagagttagctttacgcacagtttcattgtattttgttcgttggaaatttacataccaaaagccagcgaaaagagcttaccgccagaacccggaagatgtaaaacactggcaggaggtagaatatcctcgaataaagaaagaagcagcagaagaaaaagcggaaatatattggtgcgacgaaacaggaataagcaatgaaacgaatgataaaaggggattttcaccgcgaggccaaactccaatcctgaaggttgaagtaaagaaggaaagagtaaacatgatatcagcgctgacaaatcaagggaaattgcgattcatgctttatttggagacaatgacgacggtactgttgatcatgtttttacagagattaatgagtgaagcagggcgtaaaatctatgtgattatggataacctgcgtgtacatcacagcaagaagtttgttgagtggctgaagaagaatgaggatagaattaaagtatatatctctcggccataa

SEQ ID NO: 77508 - protein, 208 aa, Unknown
  Obtained from environmental sample
  misc_feature (1)..(208): Xaa is any amino acid
MTPAQEKEIKDLIAHHAPDDLGLPYSLWNRESVKRLISEKCAVELALRTVSLYFVRWKFTYQKPAKRAYRQNPEDVKHWQEVEYPRIKKEAAEEKAEIYWCDETGISNETNDKRGFSPRGQTPILKVEVKKERVNMISALTNQGKLRFMLYLETMTTVLLIMFLQRLMSEAGRKIYVIMDNLRVHHSKKFVEWLKKNEDRIKVYISRP

SEQ ID NO: 77509 - DNA, 480 bp, Unknown
  Obtained from environmental sample
  misc_feature (1)..(480): n is a, c, g, or t
atgtgccggcggacggaccacccgtcaacaaacggcacgcggacggttagcggatgcgtgcccgccgctatggcgcaggtgatgattttccacaagtggccgcagggcgcgaacacggtaaacagcaaaccntacgtgaccgaaacgcgcgaacttaaaatggagtccgtgccgctgggcggattcgattggggcaatatgccgattacctcttccggcgctaccgccgaccaaaagaacgccgtggccaagttgatgtaccacgcggggctgagcgtgaggatgaattacgatatagcggacgaaggcggcagcgggacgcataacagttacgtccccgaggcgctgaccgggtatttcgggtacgacaagagcgcgcaatataaacgccgtgattgctatgacgatatatcgtgggaaaatatactgaaatcggagttgaacgccgaaagaccggtcgtattcgggcgcagacgctga

SEQ ID NO: 77510 - protein, 159 aa, Unknown
  Obtained from environmental sample
  misc_feature (1)..(159): Xaa is any amino acid
MCRRTDHPSTNGTRTVSGCVPAAMAQVMIFHKWPQGANTVNSKPYVTETRELKMESVPLGGFDWGNMPITSSGATADQKNAVAKLMYHAGLSVRMNYDIADEGGSGTHNSYVPEALTGYFGYDKSAQYKRRDCYDDISWENILKSELNAERPVVFGRRR

SEQ ID NO: 77511 - DNA, 807 bp, Unknown
  Obtained from environmental sample
  misc_feature (1)..(807): n is a, c, g, or t
atggatgatggctgtacatcaatagatttagctaaggctcttaacggcaatacaaaaattattgtctccacgattcagaagttcagttatgtattagataaggttaaagatttagcgaacaatacatttgctatcatcatagatgaagctcattcttccacttccggtacaagtatgagcgatgtgagtgaggttctaagcagaaatacgggaaaaaacagtgaagaagacgcctcatctgatgatgaaactaccggatttgacaaaatagaagaaaaaataaccaaagaaattgccgcaaacggcaaacaacaaaatgtgtcaatgattgcctttactgccacgccgaaagcgacaacattgcagcttttcggaactcttaatgagaaaggtcaaaaaactgcctttaacaattattcaatgaaacaagccatcgaagaaggctttattcttgatgttctggaaaattatataacttacgaaacatattacaaaatcaataaaataatagaagatgatcccgaactaaaaacaatcacagcaaaacggaagattgcgaattatataacccttcatgatacaaacatagcacaaaaaattgaaataatcgtagaacattttcatgataaaattatgccgcttcttgacggtaaagccaaagcgatggtagtaacgccatcaagagccgccgctgtaaaatacaaacgggcttttgataactatattagtgagcatggttataatgatataaaagctcttatagctntttcaggaaaagtttcggtagaaattgagaagatggagtaa

SEQ ID NO: 77512 - protein, 268 aa, Unknown
  Obtained from environmental sample
  misc_feature (1)..(268): Xaa is any amino acid
MDDGCTSIDLAKALNGNTKIIVSTIQKFSYVLDKVKDLANNTFAIIIDEAHSSTSGTSMSDVSEVLSRNTGKNSEEDASSDDETTGFDKIEEKITKEIAANGKQQNVSMIAFTATPKATTLQLFGTLNEKGQKTAFNNYSMKQAIEEGFILDVLENYITYETYYKINKIIEDDPELKTITAKRKIANYITLHDTNIAQKIEIIVEHFHDKIMPLLDGKAKAMVVTPSRAAAVKYKRAFDNYISEHGYNDIKALIAXSGKVSVEIEKME

SEQ ID NO: 77513 - DNA, 900 bp, Unknown
  Obtained from environmental sample
  misc_feature (1)..(900): n is a, c, g, or t
ttgcttgacgaactgtgttccggattgtctatgtccgaggtgaattccctgctgctggaattgtacagaagaaaaaccctggaaatgaatccggcggaactcctcagacaatacgcgcaaaaccggttcgcaagtcccgctgatcttgatccggtgttgagttaccggttttccgctgacgtacttgaagccgcgaaaaagcacgggtatacggctcttgaactttccccggttgccattcttggttcctgttcggtaattgcggcggtggatcagaataaggtgctgagcgccctcaggggaaccgaggcggtgtccgacgctaccaatgtgctggccctgcacattgcttcgcaaaaaaacagcggaaactttaaaaggacagaacgccttcggtattgcgccgtacaccggcatatcagggcacaaaaattccagggtaagaatcagctgccccatttccttcttttcagcgcggtaatctccggcgcagacgagggaaactttaaatttcagaaggaatccctcagggaaacctttgccttttaccatgaatatatgtcaggccaaagctgcataaaaaacctgaggtttatcatctggcccagagacggggaagcggataattttactgaggagataatcaattatctcatgactcaatgcccggaagaagcaaattcctggaatataagcgaagaaaaacctcccacggaaaacaactattatcgtggcctccagttcaagatcaggagaagttacagggatacggaatttgaagtaggcgacggtggttttgtggactggtccagaanactcctccangaacacaaggaacggatgcttgttagcggaattggccttgagcggcttataagaaatgtcactgaacatttctga

SEQ ID NO: 77514 - protein, 299 aa, Unknown
  Obtained from environmental sample
  misc_feature (1)..(299): Xaa is any amino acid
MLDELCSGLSMSEVNSLLLELYRRKTLEMNPAELLRQYAQNRFASPADLDPVLSYRFSADVLEAAKKHGYTALELSPVAILGSCSVIAAVDQNKVLSALRGTEAVSDATNVLALHIASQKNSGNFKRTERLRYCAVHRHIRAQKFQGKNQLPHFLLFSAVISGADEGNFKFQKESLRETFAFYHEYMSGQSCIKNLRFIIWPRDGEADNFTEEIINYLMTQCPEEANSWNISEEKPPTENNYYRGLQFKIRRSYRDTEFEVGDGGFVDWSRXLLXEHKERMLVSGIGLERLIRNVTEHF

SEQ ID NO: 77515 - DNA, 909 bp, Unknown
  Obtained from environmental sample
  misc_feature (1)..(909): n is a, c, g, or t
ttgaacgcccagatgctggagcttcaggccggccacatagacaccatgaacctgaccccggaccagtatgaggaaaagacccgagaggccgatttcaaggccgcctataacgtcttccgctacccggccttcagctacggctacctgggcttcaacctggaacggccgctgttccaggatcagagggtgcgccaggccttggcctacgccatagacccggaagagatagtcgaaggcgtgctccttggcctcggccaagtggccaacggccccttcaagcccgacatgtgggccaacaaccatggcgtccgcccctatccccacgacccggccaaggcccgggcccttctggccgaggccggctggaccgagcatgacggccgcctggtccgggagggccgccccttgagcttcaccatagccaccaaccagggcaacaagatccgggaacaggtgggggccgtcatacaggcccgccttaaggaaataggcgtggaggtcaaaatccaggtcattgaatgggccgccttcctgaaggaatacctggaccgccacaacttcgacgccgtgatcatgggctggaccatacccacggatccggacctcttcgatatctggcactccagcaaaaaccggcccggcgaactcaatttcataagctacaagaacgaggaggtggaccggctggtggacgaggcccggttcattctggaccaggccgaacgcaaaaagatctatgaccgggtccaggaaatcctccacgacgaagtcccctatgtttttctctacgtccccgacgccctgccggccgtggcccggcgcttcgtcgggccggaagtcggccccggggggctcggccacaatttcaaccagtggttcgtgccgccggacgagcggaaatatgactga

SEQ ID NO: 77516 - protein, 302 aa, Unknown
  Obtained from environmental sample
  DOMAIN (1)...(214): Bacterial extracellular solute-binding proteins, family 5 Middle
  misc_feature (1)..(302): Xaa is any amino acid
MNAQMLELQAGHIDTMNLTPDQYEEKTREADFKAAYNVFRYPAFSYGYLGFNLERPLFQDQRVRQALAYAIDPEEIVEGVLLGLGQVANGPFKPDMWANNHGVRPYPHDPAKARALLAEAGWTEHDGRLVREGRPLSFTIATNQGNKIREQVGAVIQARLKEIGVEVKIQVIEWAAFLKEYLDRHNFDAVIMGWTIPTDPDLFDIWHSSKNRPGELNFISYKNEEVDRLVDEARFILDQAERKKIYDRVQEILHDEVPYVFLYVPDALPAVARRFVGPEVGPGGLGHNFNQWFVPPDERKYD

SEQ ID NO: 77517 - DNA, 795 bp, Unknown
  Obtained from environmental sample
  misc_feature (1)..(795): n is a, c, g, or t
ttgttatctgatattaatccacatttaataaatttttacaatgcaataaaatataataaaataacttctttgaaagtaaaaagttatctagaaattgagggattaaatttaaaacaagccggaaataatggatatgatcactatagatttatcagggacagatttaatacaacatttaatccattggattttcttttcttatcaagagctggatttaatggtatgatacgatttagtagtaagggaaaatggaatattcctttttgtaaaaaacaagaaagatttagtcaagcatatattacaaagattgtaaatcaagtatcaagagtttcacaaataataaatgataattggatatttgttaataaagattttagagaaataatatcgcttgcaacggaaaatgattttatctactgtgatcctccgtatcatggacgttatgttgattattataatggatggacagataaagatgaaaacgaactttacgaattattatcaaatacgaaagctaaatttattttatcaacatggcatcataatgattatagacaaaatgaaatgataaatcaatattggaacaattttaatattataacaaaagatcatttttatcattctggaggtaaaatagagaatagaaatagcattgttgaggctttggtattcaattttgagtcaaacatttctgcacataattacgaacctatagaaaaagaaatacaatttgctttgttaagtaagaccccaaaatataatacaaaacaattaattgatgttgtaaaaaaatag

SEQ ID NO: 77518 - protein, 264 aa, Unknown
  Obtained from environmental sample
  DOMAIN (1)...(208): D12 class N6 adenine-specific DNA methyltransferase
  misc_feature (1)..(264): Xaa is any amino acid
MLSDINPHLINFYNAIKYNKITSLKVKSYLEIEGLNLKQAGNNGYDHYRFIRDRFNTTFNPLDFLFLSRAGFNGMIRFSSKGKWNIPFCKKQERFSQAYITKIVNQVSRVSQIINDNWIFVNKDFREIISLATENDFIYCDPPYHGRYVDYYNGWTDKDENELYELLSNTKAKFILSTWHHNDYRQNEMINQYWNNFNIITKDHFYHSGGKIENRNSIVEALVFNFESNISAHNYEPIEKEIQFALLSKTPKYNTKQLIDVVKK

SEQ ID NO: 77519 - DNA, 633 bp, Unknown
  Obtained from environmental sample
  misc_feature (1)..(633): n is a, c, g, or t
gtggatgacaagctagtgactgaactgggcacgcgcgtcgatccagcatctgcacagatcacggttgatggcatgcgagttgatttggacgattctcggatcgttgtcgctctgaacaagcctctgggtgtggtatcggcgatgtctgatccgcaagggcgccctacgctcaccgaatttattgcagaccgtccagagcggctgtttcatgtgggacggctcgattacgattcccaaggtctaatattcctgaccaatgacggcgaattagcaaatcggctgagccatcccaaatacggcatccctaaaacgtatattgttgaagtcgaaggcgaattgtatcctcgacggcaaaaagccttgcttgaaggcgtggaactagaagacggtattgcgaaagctgatcggctaaaacttatcgaaacaaatggggaatattcgatcgctgaaatccaaatccacgatggccgaaaccgaatcgtgcgccgcatgttcgatgcgattgattgtccagttaccaaattagttcggacaaaatacggcccaataaagttaggcgaattgaaacttggccgcactcgcgtcctaaataataccgaagttgggtcgttattgaaagctgtcaaattatga

SEQ ID NO: 77520 - protein, 210 aa, Unknown
  Obtained from environmental sample
  DOMAIN (34)...(167): RNA pseudouridylate synthase
  misc_feature (1)..(210): Xaa is any amino acid
MDDKLVTELGTRVDPASAQITVDGMRVDLDDSRIVVALNKPLGVVSAMSDPQGRPTLTEFIADRPERLFHVGRLDYDSQGLIFLTNDGELANRLSHPKYGIPKTYIVEVEGELYPRRQKALLEGVELEDGIAKADRLKLIETNGEYSIAEIQIHDGRNRIVRRMFDAIDCPVTKLVRTKYGPIKLGELKLGRTRVLNNTEVGSLLKAVKL

SEQ ID NO: 77521 - DNA, 441 bp, Unknown
  Obtained from environmental sample
  misc_feature (1)..(441): n is a, c, g, or t
atgctttcatccgagaaaagacctaatgcgggaaagaaggtaaaacctgataaaaatacatgggaagcggtgttgcaaagggctaattatgcttgtgaatggacggaaggaaatgaaatatgcgccttagaacaaggggcagttgatcctattggcggtggaaaagtaaaattaacccccgatcataaaaatccacattctttaaatcccgatacagatacaaaagatataaatcaatggcaggcactctgtggaagacatcaagtaatgaagaaaaattattgggatactaataccggcaaaatgaatgtttatgctattatacaatcctcgactacaactgaaaaagaaatagtatttaaattcttattggattattttgggtatgtacaggatgaacaaggaaatatacataaaattaaaaggataaacaaaaagtga

SEQ ID NO: 77522 - protein, 146 aa, Unknown
  Obtained from environmental sample
  misc_feature (1)..(146): Xaa is any amino acid
MLSSEKRPNAGKKVKPDKNTWEAVLQRANYACEWTEGNEICALEQGAVDPIGGGKVKLTPDHKNPHSLNPDTDTKDINQWQALCGRHQVMKKNYWDTNTGKMNVYAIIQSSTTTEKEIVFKFLLDYFGYVQDEQGNIHKIKRINKK

SEQ ID NO: 77523 - DNA, 852 bp, Unknown
  Obtained from environmental sample
  misc_feature (1)..(852): n is a, c, g, or t
ttgcgacaccttattagcgaaatcgtggagcgctccggttcccgactcgttattgacgacaaacgaactgcgggggacgagataggtgtggcgcttcgcggcgatttgcgcgatgaccaagcgtccgctgttgatgcgatgctcggccacgacgacggcgtccttgtcgccccacccgctgccggaaaaacggtaatagcctgtgcggtgattgccgaacgagcagtctcaaccgtggtattagtgaaccgcaaagcattagccgaacaatggcgagaacgcataacccagtttctcggaataaagccaggtcaaaaaggtggcgggcgaaacaagctgacgggcattgtagatatcgctatgctaccagcgctggcgcgcagcgatgacgttacccaactacttagtggatacggccaagtgatcgtcgatgaatgccataacgtggcggcccccgcgtatgactacgcgatgaaacgcgtaactgcgcaatactggctcggcttgaccgccaccccaaataggcgcgacaaactcgaccagcttattacctggcaactcggcccgattcgccatacgatgggcgtagataaacccggaacgctagccgcaacgacggaatccgcaggtgtcgccgaacgaatcctaacaattcacgagacctcattttccggaggcgatgttgatccgcttgatccagtcgcagtatcggaattggtgcanagggcgatcaacgacgaggccccgaattcacaaatactncatgatgtagaaggactgctgaataacgggcgcaactgcttaatcgccacaccagaaaggaacacgtcgaactgctcgacgcggcgctaa

SEQ ID NO: 77524 - protein, 283 aa, Unknown
  Obtained from environmental sample
  DOMAIN (37)...(181): DEAD/DEAH box helicase
  misc_feature (1)..(283): Xaa is any amino acid
MRHLISEIVERSGSRLVIDDKRTAGDEIGVALRGDLRDDQASAVDAMLGHDDGVLVAPPAAGKTVIACAVIAERAVSTVVLVNRKALAEQWRERITQFLGIKPGQKGGGRNKLTGIVDIAMLPALARSDDVTQLLSGYGQVIVDECHNVAAPAYDYAMKRVTAQYWLGLTATPNRRDKLDQLITWQLGPIRHTMGVDKPGTLAATTESAGVAERILTIHETSFSGGDVDPLDPVAVSELVXRAINDEAPNSQILHDVEGLLNNGRNCLIATPERNTSNCSTRR

SEQ ID NO: 77525 - DNA, 648 bp, Unknown
  Obtained from environmental sample
  misc_feature (1)..(648): n is a, c, g, or t
atggaaaataagggttttgacaaaataacatccctttataacagtatatttaaaaaatatattcagaattatttattaacaataaatgatttatttaaattaaatctttttttgaacactacaaaaccatgttctactattattgaacaatttaataatctttcacaagaatttaatacttccattaaaaagaaattggatattgaaaagcagataataatggaagaaaaaaagaatttcttttcttccattatgagttataaattagaacgttttcatagtgaattattacgcatgattattgaccccaaaacagaatatataggaaataatgactttataaaaatatttcttgatacaattaaagtggaaaatttatttcaaaaagaaatatttgtaaaaacagaagaaggtaataatgattatggctttattgatataattatatacgataatgattatgcgataattattgaaaataaaataaatggcgctattgatcaaccaaatcaattagcaagatattataattatgtagaaaatataatgaaaaaagaagtaattgccattgtttatataccttattttggagaattttatgaaccagatttttactatttatctgatgagaatttaaatgtattataa

SEQ ID NO: 77526 - protein, 215 aa, Unknown
  Obtained from environmental sample
  misc_feature (1)..(215): Xaa is any amino acid
MENKGFDKITSLYNSIFKKYIQNYLLTINDLFKLNLFLNTTKPCSTIIEQFNNLSQEFNTSIKKKLDIEKQIIMEEKKNFFSSIMSYKLERFHSELLRMIIDPKTEYIGNNDFIKIFLDTIKVENLFQKEIFVKTEEGNNDYGFIDIIIYDNDYAIIIENKINGAIDQPNQLARYYNYVENIMKKEVIAIVYIPYFGEFYEPDFYYLSDENLNVL

SEQ ID NO: 77527 - DNA, 576 bp, Unknown
  Obtained from environmental sample
  misc_feature (1)..(576): n is a, c, g, or t
atgtgcagccgctcgcccgganccgtcgcgccgtttggaagcatagacccgctgttcggaacgaacccgctcggctttgcgtccccgacggacgacgcgccgatcgtgttcgacgcggcgaccagcgcgataacgttctatgggctggtaatcgcgaaatccaagggcgaaaaactgccgaagggaatcgcgacggacaaaaacggcgcgcccaccatcgatcccggcgacgtcatcgacggcggcgcggtatccgcgttcggaaattcatacaaggcggcgggcttcggcatgctggtcgaactgttgtccgggccattggtcggcggcgcgttcttggactataaaacgtatgacaaggaatggggcgctttgacaatcgcaatcgacccggccatattgaccgacgcgggcgagttcaagaaaaattgttcgtcgttcgtcgacataattcggaaatcaagaacgcttggcgaaataagattgccgcatgacgaatcgcgcaaaaattacaacgagtgcgccgcgtccggcatggtcgaaatcgacgacgccttgtttaatgagatattttag

SEQ ID NO: 77528 - protein, 191 aa, Unknown
  Obtained from environmental sample
  DOMAIN (1)...(190): Malate/L-lactate dehydrogenase
  misc_feature (1)..(191): Xaa is any amino acid
MCSRSPGXVAPFGSIDPLFGTNPLGFASPTDDAPIVFDAATSAITFYGLVIAKSKGEKLPKGIATDKNGAPTIDPGDVIDGGAVSAFGNSYKAAGFGMLVELLSGPLVGGAFLDYKTYDKEWGALTIAIDPAILTDAGEFKKNCSSFVDIIRKSRTLGEIRLPHDESRKNYNECAASGMVEIDDALFNEIF

SEQ ID NO: 77529 - DNA, 306 bp, Unknown
  Obtained from environmental sample
  misc_feature (1)..(306): n is a, c, g, or t
atgataaatgtgaacacgctttcgggaactgaattccaaaaatcggtctggcgggaattgcagaaaatcccaaagggcaaaaccataacatatgcggaattggcgcggcggattgggcggccacacgcgacccgcgcggtcggaaatgcggttgggaaaaatccatgcgcgccggaaatcccatgccacagagtcgtcggcggcggcggcagacttggcggctattccggcaagggcggcatccgcacgaaaataaaactccttcgcgccgaaggcatcaatttacaaacaaaggaagaaagatga

SEQ ID NO: 77530 - protein, 101 aa, Unknown
  Obtained from environmental sample
  DOMAIN (9)...(96): 6-O-methylguanine DNA methyltransferase, DNA binding domain
  misc_feature (1)..(101): Xaa is any amino acid
MINVNTLSGTEFQKSVWRELQKIPKGKTITYAELARRIGRPHATRAVGNAVGKNPCAPEIPCHRVVGGGGRLGGYSGKGGIRTKIKLLRAEGINLQTKEER

SEQ ID NO: 77531 - DNA, 831 bp, Unknown
  Obtained from environmental sample
  misc_feature (1)..(831): n is a, c, g, or t
ttgggacgccccagaggctttgaagtaaataatatgggagatgctgttgagatagttaagtttattccaactgatttcacccaagtggttatacctaaaacattttttaatccgccgttgccggtaacgagtattggcgcaaacgctttccgggattgtgaatccttaacaagcgttgtaattccggatggtgttacaatcattaagggcgatttaacaagcggcgctttctctgattgtaaatcattaaagcgaattgtacttcccaaaagtcttgaaaaaattggtcagaatgcatttatttcctgcgactcattggctgctataaccatcccggacagtgtaactgacattggtgataacgtttttttaggctgtgaatcattaacaaatatagttatatcccaaaatttaaaaacaattgctaatatggcttttttcaattgcgcggcattaagacaccttatcatccctgatagtgttacgcatataggggataatgcattttcttataacaaatctttggaaaatattgtaatacctgaaagtgtgataagtatcggtgagggcgctttttcactttgtgaatcacttcttgaagttactattccaggcaatgttaaaagtataggccatggcgctttttctttttgcgattcattgacaaatgtaaacattattagtgcggacacgagttttgggccaaaaagaattattgaaaaaaatatgcctgtactaattaaagtatttctaaaatttatttcaactttgagaaagaagtcttttaaaaaaatagtaacaatcaggagcttttataggtgcagaaattaa

SEQ ID NO: 77532 - protein, 276 aa, Unknown
  Obtained from environmental sample
  misc_feature (1)..(276): Xaa is any amino acid
MGRPRGFEVNNMGDAVEIVKFIPTDFTQVVIPKTFFNPPLPVTSIGANAFRDCESLTSVVIPDGVTIIKGDLTSGAFSDCKSLKRIVLPKSLEKIGQNAFISCDSLAAITIPDSVTDIGDNVFLGCESLTNIVISQNLKTIANMAFFNCAALRHLIIPDSVTHIGDNAFSYNKSLENIVIPESVISIGEGAFSLCESLLEVTIPGNVKSIGHGAFSFCDSLTNVNIISADTSFGPKRIIEKNMPVLIKVFLKFISTLRKKSFKKIVTIRSFYRCRN

SEQ ID NO: 77533 - DNA, 699 bp, Unknown
  Obtained from environmental sample
  misc_feature (1)..(699): n is a, c, g, or t
gtgaccaccacggccggcgacgtcttgaaggccgtcatagactacaacaccgaccatccggaccaggccctgctctggccccaattcgagcgctaccccgatggctgggattccacggccaaggtggggcccacgaacggcaccatctggctcagcggcggcgaaaaccccgactccgcgggccagcacggggtcaacctgaaattcattcccgacggcacggccctcaaggcgggcgacgtttttgaagttcccgtgggctggtaccgcggcgacgaaaagaacatggacgtcaacctggattcccaaacccgcggcaccctgaacaccaccggcaacactcttttgggcggcaacggggccggggacaacatcctcgataccattcagcgcctcatgttcggcctgcaagcgaacgacaccgaggccataggccgggaactgcccaacatcaaggcggccattgaaaaagtcaccaccctggagagcaagatcggcaccaagcagatccgcaaccagttcgtggccacgaccctggacctgaagcagttcggcgccgaaagcctcttaagctccattgaggacgtggatttcagcaagctgatcaccgacctcaaaaattcccagaccgtctatgaggcccttttaggcatcaccggcatgaccaccaagctgagcctcttaagcttcatacgctaa

SEQ ID NO: 77534 - protein, 232 aa, Unknown
  Obtained from environmental sample
  misc_feature (1)..(232): Xaa is any amino acid
MTTTAGDVLKAVIDYNTDHPDQALLWPQFERYPDGWDSTAKVGPTNGTIWLSGGENPDSAGQHGVNLKFIPDGTALKAGDVFEVPVGWYRGDEKNMDVNLDSQTRGTLNTTGNTLLGGNGAGDNILDTIQRLMFGLQANDTEAIGRELPNIKAAIEKVTTLESKIGTKQIRNQFVATTLDLKQFGAESLLSSIEDVDFSKLITDLKNSQTVYEALLGITGMTTKLSLLSFIR

SEQ ID NO: 77535 - DNA, 690 bp, Unknown
  Obtained from environmental sample
  misc_feature (1)..(690): n is a, c, g, or t
atgcaagaattgtctctgaatgccaaaaagggcgtaaatgtctttttgcctcttactttctttagtgaggatgaagaaaaaaaatcatttaaagatgataaattatcacttaatataacttataataaagaacatatatttattggtgaagggaaaattgacagaactagcgatattctctcatgggatgaaaataatggtaaaattaatatagtttttaaggatgaacctgataagccatatacttataaaacgaatgtaaaaattgaatatcctttttttaataagaatattaaacaatctcatctctatataggtgtaaaagcaggtgaaaaggtatcagaaagaataaacagtgcaaaaaagtcaattaaaatattatctccattttttggtaaaaaacaaattgaacaattaattaagaaaaaagagcaaaaaattgatattcatgttatttctactgacagtaacagtgattttcacaatcctaaaaaatcatctattttaaagaatataatagaacaggaaaaacatgaatcagaaaagaataaaattaaatttaatcgtttaaaaatatttattaatatttataccgtattatatattttatcattaatttcttttatatatttacagttaaaaggaatcagttttattttgtttcaatataaatatttaattggattataa

SEQ ID NO: 77536 - protein, 229 aa, Unknown
  Obtained from environmental sample
  misc_feature (1)..(229): Xaa is any amino acid
MQELSLNAKKGVNVFLPLTFFSEDEEKKSFKDDKLSLNITYNKEHIFIGEGKIDRTSDILSWDENNGKINIVFKDEPDKPYTYKTNVKIEYPFFNKNIKQSHLYIGVKAGEKVSERINSAKKSIKILSPFFGKKQIEQLIKKKEQKIDIHVISTDSNSDFHNPKKSSILKNIIEQEKHESEKNKIKFNRLKIFINIYTVLYILSLISFIYLQLKGISFILFQYKYLIGL

SEQ ID NO: 77537 - DNA, 753 bp, Unknown
  Obtained from environmental sample
  misc_feature (1)..(753): n is a, c, g, or t
ttgaccggagacttcacagttacagacgcagtagtaacaaaagaagtttctgcggacggaataacctgcaaagttacggcaactttcccggcaacagacgcgcccacaaaaatagcaggcggtaataatattaccattgtaagaccggtactttttgctactgctcctacaaccggcggcgctactgtcagcggaaccgatcttactaccacgaccgcgaatatcacatggacaccggctcctgttaacggcgtgtttgtaggcggagttgcttacacagcgtcgcttacagtaagcgcaaaagcaattagtcatactcttaccggagctgtagcaggagacttcactgccgctaatggtggtacaatagcttctgtcacacccggcggaaccttagggcaaagcacagctgttgtaacggtatctttcccggcaacagccgcaactgtggagttaggcgctgctacaatagcgataactgcaccggtagcaggcgcaggtccgcaacagatagcaatatccggaacaactaacgttaatgccggcggacccatcacatggaaagattcaaccggcgcagctattacaggaaacttcccgactctaacaacaggtattactgcggaattcaccgtaacgacagctcagtattatacctttaaggatgcgacaatcactgtcgccggcggaacggtaacacccgcagccggatcagtgaatggaccaactgttaatgttaaggttacttactag

SEQ ID NO: 77538 - protein, 250 aa, Unknown
  Obtained from environmental sample
  misc_feature (1)..(250): Xaa is any amino acid
MTGDFTVTDAVVTKEVSADGITCKVTATFPATDAPTKIAGGNNITIVRPVLFATAPTTGGATVSGTDLTTTTANITWTPAPVNGVFVGGVAYTASLTVSAKAISHTLTGAVAGDFTAANGGTIASVTPGGTLGQSTAVVTVSFPATAATVELGAATIAITAPVAGAGPQQIAISGTTNVNAGGPITWKDSTGAAITGNFPTLTTGITAEFTVTTAQYYTFKDATITVAGGTVTPAAGSVNGPTVNVKVTY

SEQ ID NO: 77539 - DNA, 303 bp, Unknown
  Obtained from environmental sample
  misc_feature (1)..(303): n is a, c, g, or t
atgataaataattcaattgtttacgatgatatacaaacgattttatcggaagacatagggtgggattgtttgagcggaaaaacaattctcttaaccggagcgaatggttttatcccaagttatgttgtgtatacgctcttggagttgaaccgttcgagatttaaaagcaatccggcggcaatactagctcttgtcagaaacaaagagaaagcggcgaanaaatttgcggcagttatgtncaacangaatttttcatctgatcgtatccgatgttttcgcacccgtacattacatgaaaagtag

SEQ ID NO: 77540 - protein, 100 aa, Unknown
  Obtained from environmental sample
  misc_feature (1)..(100): Xaa is any amino acid
MINNSIVYDDIQTILSEDIGWDCLSGKTILLTGANGFIPSYVVYTLLELNRSRFKSNPAAILALVRNKEKAAXKFAAVMXNXNFSSDRIRCFRTRTLHEK

SEQ ID NO: 77541 - DNA, 840 bp, Unknown
  Obtained from environmental sample
  misc_feature (1)..(840): n is a, c, g, or t
atggtttacacgctggtcagtatgttccttatcgtctatctaaccaacgtgctgcaattaccgagtcgcgacctcggcttaattaccggcatcctcgttggatttagaatattgnacgcaataaacgatccgttaatcggcatggttgttgataatacccgaacccgttggggtaaacataaaccgtggattgcgattggggcgttactgagcgggttaatgacgatcctgttattccgggctccgcaagcgagcgggaacgtcctcgtgctgtacttcgccgtcgttttcttcttttgggcaatcacctattctttcaacgacattgctttctggtcctacgtccccgcacttagtcaggaccaaaaggaacgcgaaaacatcggtggcaaggccaggatcttcgcgctgatcggcgtgttctttgtcgtcgccggaaatgtgccgatcatcaacgctctgcgcggggcctgcaacgatgcggtgccaccggtctgtgcgcgcactgaagcgcaggcttattttcgatttgccgtgatcgtcgcgatcattctttggctcggccagttagttacgctgctgggtgtacgtgaaccgcccggcctttcggaagagcaatcgcatacgtcgttccgcgactttgttcgggcaatattccacaacgatcaactgttgtatattgcaattgcaatggcattgttcatgatcggctacaccacgacgacttcgtttgggctcttttacttccagtatgtatttggaaagcgagggccatgttccgcgatctttgctgccgtgcttggggtttcccagatcgcgtctctactgctgttccgctag

SEQ ID NO: 77542 - protein, 279 aa, Unknown
  Obtained from environmental sample
  misc_feature (1)..(279): Xaa is any amino acid
MVYTLVSMFLIVYLTNVLQLPSRDLGLITGILVGFRILXAINDPLIGMVVDNTRTRWGKHKPWIAIGALLSGLMTILLFRAPQASGNVLVLYFAVVFFFWAITYSFNDIAFWSYVPALSQDQKERENIGGKARIFALIGVFFVVAGNVPIINALRGACNDAVPPVCARTEAQAYFRFAVIVAIILWLGQLVTLLGVREPPGLSEEQSHTSFRDFVRAIFHNDQLLYIAIAMALFMIGYTTTTSFGLFYFQYVFGKRGPCSAIFAAVLGVSQIASLLLFR

SEQ ID NO: 77543 - DNA, 516 bp, Unknown
  Obtained from environmental sample
  misc_feature (1)..(516): n is a, c, g, or t
atggactggcttgtcaatacggctcttgtgtatagggttgatcgcaccacaaacccgaaacttcctctttcaagttatggtgagcgcgaacactttaagctttatttccttgatgtcggcctgttaggcgcaaaggccctgctcgatatatctacccttatgctccccaacagcgccgtattcacggagttcaagggtgcgttgacggaacaatacgccttacaggaattaaaggccaacaccgccttgcccgtgttctattggggcaatgattccggaaaggccgaggtcgatttcattatgcaatacaaaagtgagattatccccatcgaggcgaagtcagcaataagcacgaagtcgcaaagcctttccgtatatttggaaaaatacaagagtgcccgcgcgatccgagcttccttgaagccttttagcaaggatagtcgaacctacgctgtgccgctttatatgataggggaaatagagcgcatactcgccgacgaaggcagttggttgtaa

SEQ ID NO: 77544 - protein, 171 aa, Unknown
  Obtained from environmental sample
  misc_feature (1)..(171): Xaa is any amino acid
MDWLVNTALVYRVDRTTNPKLPLSSYGEREHFKLYFLDVGLLGAKALLDISTLMLPNSAVFTEFKGALTEQYALQELKANTALPVFYWGNDSGKAEVDFIMQYKSEIIPIEAKSAISTKSQSLSVYLEKYKSARAIRASLKPFSKDSRTYAVPLYMIGEIERILADEGSWL

SEQ ID NO: 77545 - DNA, 594 bp, Unknown
  Obtained from environmental sample
  misc_feature (1)..(594): n is a, c, g, or t
gtggacgaggccgatttggagttgcgggagaggctggaggcggaggcgggcgagcgcggcgctgcgtggatgcacgatcggctcgcggaggttgaccctgaggcggccgcaaaaattcatccgaacaatttacggcgggtattgcgcgcgcttgatatattttataggaagggactgccgctttcggcgttgcaaaaagagggccgccaacctgaggatgtcgatttccgggcagtcgtgataagccgccccagagacgtactgtacgacaggatcaacaggcgtgtggacgcgatgattgaggcggggttgttggaggagttccgacgcctccgcgccatgggctacggcgagcgcagtccgggcatggtgtgcgtgggttaccgggagcttttcggggtcgaaaggggagaggtcggcttggatagggcggtcgagcttataaaacagaatacgcggcgctacgccaagcgccaaacgacgtggtttcggaacaagacgaagtgtgagagcattgacgttaccgatgaagacggggattttttgatggattggttcgcgcgggggattaacaccaaaacacataacaaataa

SEQ ID NO: 77546 - protein, 197 aa, Unknown
  Obtained from environmental sample
  DOMAIN (1)...(175): IPP transferase
  misc_feature (1)..(197): Xaa is any amino acid
MDEADLELRERLEAEAGERGAAWMHDRLAEVDPEAAAKIHPNNLRRVLRALDIFYRKGLPLSALQKEGRQPEDVDFRAVVISRPRDVLYDRINRRVDAMIEAGLLEEFRRLRAMGYGERSPGMVCVGYRELFGVERGEVGLDRAVELIKQNTRRYAKRQTTWFRNKTKCESIDVTDEDGDFLMDWFARGINTKTHNK

SEQ ID NO: 77547 - DNA, 486 bp, Unknown
  Obtained from environmental sample
  misc_feature (1)..(486): n is a, c, g, or t
gtgatatatttcttggacacatccacccttattgatgccaagaaactgcacttcccgttcggcgagcaaacaggcttctgggactggctgcttgtgctagggaaaaaaggcagcgtgaaaatacccgagtacgttctcaaagaggtgtacagccaaaaagacgacctatcggcttgggcgaacgaccacaagggcattttccattgtggggttgaagagtgtattcgcttcgtgcccgaagtgctcgcggcctatggcgaaccgctgctgaacgaagccgatctcgaaacgctctgggcagatccctacttgatcgctcatgccatagccgttggcgggactgtcgtcaccaatgaaatcccaagcaatgccacagccccgaagaacaaaaagataccagtggtctgcaaaaccctgaatgttccctgcctgacgcttcccgcgttcatgtgggaattgcggcagaccttcccgcagcacagctga

SEQ ID NO: 77548 - protein, 161 aa, Unknown
  Obtained from environmental sample
  misc_feature (1)..(161): Xaa is any amino acid
MIYFLDTSTLIDAKKLHFPFGEQTGFWDWLLVLGKKGSVKIPEYVLKEVYSQKDDLSAWANDHKGIFHCGVEECIRFVPEVLAAYGEPLLNEADLETLWADPYLIAHAIAVGGTVVTNEIPSNATAPKNKKIPVVCKTLNVPCLTLPAFMWELRQTFPQHS

SEQ ID NO: 77549 - DNA, 489 bp, Unknown
  Obtained from environmental sample
  misc_feature (1)..(489): n is a, c, g, or t
gtgggcgcggcggacgagacggacgcggagatcgttaggtacacgtcggggctgtaccggaggctgaatttggatagggtctacttttcgtcctatcagcgcgggttggggagcgaggctataccgggggagcggcgcgcgggcgttggggcggaggatgggtttgtgagggagcataggctgtaccaggtggactttttgttccgtcagtacggttttacggaggaggatattcagtacgatgaaaatggtcggctgttcatagataaggatcccaagttaatgtgggcggagcggcatcctgagcgttttccggtggatgtgaacagggcggagctgccgcagttgctgcgtgttcccggcatagggccgcagacggcgcggcggatcgtgaagatgcggtcgggcggggcgcgcataccgtcgctttctgggttgccgcttaaggggaagaggcgggcgttggcggaaaagtatctgacttgttga

SEQ ID NO: 77550 - protein, 162 aa, Unknown
  Obtained from environmental sample
  DOMAIN (104)...(133): Helix-hairpin-helix motif
  misc_feature (1)..(162): Xaa is any amino acid
MGAADETDAEIVRYTSGLYRRLNLDRVYFSSYQRGLGSEAIPGERRAGVGAEDGFVREHRLYQVDFLFRQYGFTEEDIQYDENGRLFIDKDPKLMWAERHPERFPVDVNRAELPQLLRVPGIGPQTARRIVKMRSGGARIPSLSGLPLKGKRRALAEKYLTC

SEQ ID NO: 77551 - DNA, 444 bp, Unknown
  Obtained from environmental sample
  misc_feature (1)..(444): n is a, c, g, or t
atggttgaagaccactgcaacgacgacacgttcaggatgataggcgaccgcgtctacgcccgcatcgccgacccccgcagctacgagatagaggccgaggtcacggtctaccaggggcaggacgtggacacggtcatggacagggtcaccgccctggcccacgactacgcgctgacgcacagcgcgaagctgggcgcggacgtgacgcccacgcaggtgctcctctccctggcgccggcngccgaggggctttacagcgtcaacctggtgcagcccgacaggatagtcagtgtggacgccaacgagtgggcgaaggccctcgtcatcacgctcaggttcgcgggcttgccgatgactaggaacgncgaacctgctgccccccgtctggnggaagcgagggggctggccttcccgccgccgggggaccgtccttccgcctgctga

SEQ ID NO: 77552 - protein, 147 aa, Unknown
  Obtained from environmental sample
  misc_feature (1)..(147): Xaa is any amino acid
MVEDHCNDDTFRMIGDRVYARIADPRSYEIEAEVTVYQGQDVDTVMDRVTALAHDYALTHSAKLGADVTPTQVLLSLAPAAEGLYSVNLVQPDRIVSVDANEWAKALVITLRFAGLPMTRNXEPAAPRLXEARGLAFPPPGDRPSAC

SEQ ID NO: 77553 - DNA, 804 bp, Unknown
  Obtained from environmental sample
  misc_feature (1)..(804): n is a, c, g, or t
ttgcccgcagcgaccgcgccaatatccccgtcgccaaccgggatttccccggttacggtgccccaggatcctttccgcgtgcttattaacagtatctcgggcggacgctggcgtacccaggacagcgccgtttactgggattttacccccgatacaagcggtttatacggtatcttattacgcggacgtcagacgacgtatcacgggatgttcagcacgcgggccctgaccataaacggcgaagtccccttccgggaagcggaaaatatccagttcctcttctccacggagtggcaggtattcgccctgggcgacaaggaacacgggccttaccaattccccttcgaagccgggcggacataccgcataggcctcaaggtagaactcggcgaaatgggtgaagtattacgccgggtagaggaaagtatttttgttttaaatgagatgttccgaaccattctgatgataacgggaccaagcccggatcgaaaccgcgattatgactttaagcggcttattcccggggtacttgcctctatggaagtacaggccggggtactgcgcggcatttcagaaaatattacctccttgtcaggttctaaaacggaccgtaccgtccagatagaccggctggtttatttactggagcgaatgtatacccgtccctcggatattgcaaatgtttttaacaattttcggagcagtatttccgccgcgggggcctggctgctggaatccgcctatcagccttttgaccttgattggattgctttttccgcggaaaacgctcgtgccgaattctga

SEQ ID NO: 77554 - protein, 267 aa, Unknown
  Obtained from environmental sample
  misc_feature (1)..(267): Xaa is any amino acid
MPAATAPISPSPTGISPVTVPQDPFRVLINSISGGRWRTQDSAVYWDFTPDTSGLYGILLRGRQTTYHGMFSTRALTINGEVPFREAENIQFLFSTEWQVFALGDKEHGPYQFPFEAGRTYRIGLKVELGEMGEVLRRVEESIFVLNEMFRTILMITGPSPDRNRDYDFKRLIPGVLASMEVQAGVLRGISENITSLSGSKTDRTVQIDRLVYLLERMYTRPSDIANVFNNFRSSISAAGAWLLESAYQPFDLDWIAFSAENARAEF

SEQ ID NO: 77555 - DNA, 501 bp, Unknown
  Obtained from environmental sample
  misc_feature (1)..(501): n is a, c, g, or t
ttggggccgtggccgcccccccccncnnnnnangnggggggggggggggggggtggttgtttttttcctttcccccccgcgggggggggggttgttttttttttttttttttttctcccccccccccagcgaggggggggggggggagagggnannnaccccccccccccccccccggggggggggggcccccccccccccccggggggggtttgggtgagaaaannccccggggggcccctttttttttttaaaaaagggccccgagtttccctggtccnaaggccagccgcggccggctccggccgcctgttccggccgctcgctgaaaaaacggcggcggctttccggccgggccaagaagaattcgtaaagatcggagggtatatagatggtttcatcctgataggcgccgatggaggccggaccgccgccttcttctttgggccaaagaaaccggagagggtcgggctggatatattcattggtttccgcggttga

SEQ ID NO: 77556 - protein, 166 aa, Unknown
  Obtained from environmental sample
  misc_feature (1)..(166): Xaa is any amino acid
MGPWPPPPXXXXGGGGGGGCFFPFPPAGGGVVFFFFFFLPPPQRGGGGGEGXXPPPPPPGGGGPPPPPGGVWVRKXPGGPLFFFKKGPRVSLVXRPAAAGSGRLFRPLAEKTAAAFRPGQEEFVKIGGYIDGFILIGADGGRTAAFFFGPKKPERVGLDIFIGFRG

SEQ ID NO: 77557 - DNA, 846 bp, Unknown
  Obtained from environmental sample
  misc_feature (1)..(846): n is a, c, g, or t
ttgatggcccagagagacgtgctgaaagctaaagaatttccagaattttcatcggtcgcagatatgctggaatccttgcgtatgggcaaagttgatgcggtgttactcagcagcagttatatgaatcagcttaaaggaagcggcgcttaccctgatgttgactatctgatggtgccggaggatgtttatgtcaataaagctgccccgatttttcatacggagaaacttcgagatcaatacaacgaatggttcaaaggcattgctgcagacggaacatggcaggaaatcgttgaccgctggttaagcggttcgttgccctctcatgaggatatcccacaatttgagctgacgggagaaaacggtacgctgagaatgtgcgacaccggcaactatccgccgttgatttattttgatgccaacggcaagcccgccggttttgatgtggatatgatgagccgttttgccttgcacatgggaatgaagctagaaattgaaatgatgaattatgatgcgattataccttatgtgctttctggcaaagccgatatgagtgcctgtacggtgacggttacagacgaaaggggagagggtgtaattttcggcgagccgagcgtaattacaccagcggtgcttattgtgcctaaaactggaagcgtagaagggaaaaaagcggatggcggttttttcaaatggctccaaacaggaatagaacgcaacatgattgccgacaatcgctggagaatggtcacaagcggtctggaaataaccatgataatcgcaatcttttcacaattatttggcacagtgttaggctgtttcgcttgctggctgcttatgagtagataa

SEQ ID NO: 77558 - protein, 281 aa, Unknown
  Obtained from environmental sample
  DOMAIN (123)...(279): Bacterial extracellular solute-binding proteins, family 3
  misc_feature (1)..(281): Xaa is any amino acid
MMAQRDVLKAKEFPEFSSVADMLESLRMGKVDAVLLSSSYMNQLKGSGAYPDVDYLMVPEDVYVNKAAPIFHTEKLRDQYNEWFKGIAADGTWQEIVDRWLSGSLPSHEDIPQFELTGENGTLRMCDTGNYPPLIYFDANGKPAGFDVDMMSRFALHMGMKLEIEMMNYDAIIPYVLSGKADMSACTVTVTDERGEGVIFGEPSVITPAVLIVPKTGSVEGKKADGGFFKWLQTGIERNMIADNRWRMVTSGLEITMIIAIFSQLFGTVLGCFACWLLMSR

SEQ ID NO: 77559 - DNA, 396 bp, Unknown
  Obtained from environmental sample
  misc_feature (1)..(396): n is a, c, g, or t
ttggctctgcccagcatcctccgggaagaactggggcgctcggaaaggccggatcaggtcatggccctggcctatgatgtcttcctgaccctctacccttatgagcattggcgaaagctcatggctgaaataaaagaatccatacccgagaccgcccgccgcaatgacgccctgcgcgccttttcgacccaggtccggcccttgaacctggacaaggcggggcgggttctgatagctcccgagcagagggccgcggccggcctgggccgggaggtccgggttatcggcgtgggctcgaagattgaaatctgggatgcggccgtctatgaacggcgggaagcctcggataaggctgtgctggacgaggtcataaagacccgggggctggaattctga

SEQ ID NO: 77560 - protein, 131 aa, Unknown
  Obtained from environmental sample
  DOMAIN (61)...(131): MraZ protein
  misc_feature (1)..(131): Xaa is any amino acid
MALPSILREELGRSERPDQVMALAYDVFLTLYPYEHWRKLMAEIKESIPETARRNDALRAFSTQVRPLNLDKAGRVLIAPEQRAAAGLGREVRVIGVGSKIEIWDAAVYERREASDKAVLDEVIKTRGLEF

SEQ ID NO: 77561 - DNA, 519 bp, Unknown
  Obtained from environmental sample
  misc_feature (1)..(519): n is a, c, g, or t
ttgatttatggccgagcaccgctggcgtttgcgttcgactttttggcgattgctctggcgcaattgggcaacatgtcggaacgccgcacggcgcaactgatattgggcgcacgcgaattgcccgaatacctgattgcctcgtcgggactgaactccggttttatgattccacaatatgctgccgctgcactggtcaaccagaacaaaacttactgccatccgtcgtcgtgcgattcgattgtgtcgagcaacggacaggaagacttggtgagcatgggcggcaacgcagccaccaagttattaaaagtggtggacaacgtggaacgcattttggccattgagttgatgtgcgccgcgcaagctattgaatttcgccgtccgaccaagtcgtcgcccgcgctcgaaaagctggtggccgatttccgcaaggctgtaccgtttttgcaggaagaccgcgtgatgtatcaggatatgcagaaagcattggattttgttagggctacggactgtacgaattaa

SEQ ID NO: 77562 - protein, 172 aa, Unknown
  Obtained from environmental sample
  SIGNAL (1)...(20)
  misc_feature (1)..(172): Xaa is any amino acid
MIYGRAPLAFAFDFLAIALAQLGNMSERRTAQLILGARELPEYLIASSGLNSGFMIPQYAAAALVNQNKTYCHPSSCDSIVSSNGQEDLVSMGGNAATKLLKVVDNVERILAIELMCAAQAIEFRRPTKSSPALEKLVADFRKAVPFLQEDRVMYQDMQKALDFVRATDCTN

SEQ ID NO: 77563 - DNA, 327 bp, Unknown
  Obtained from environmental sample
  misc_feature (1)..(327): n is a, c, g, or t
atgataagcatccaaaataccgtattacaaaagagatctcaattataccagaaaaaaagacttctggtgaacaaaaaaaaggagattaatatggaactggtacatgtgttagctgaaattattggcgtttttatagctaagggtggaaatgggaagagcacgatccttttggagctagcatactgcttaagtattatttttaagttgaaagtcttgataatagatcttgatccgcaggtaacaacaacaaattttttaacaattaatgaaaatgaaaactatggaacaatatttgatgtattaataggagtgaaagatataacctga

SEQ ID NO: 77564 - protein, 108 aa, Unknown
  Obtained from environmental sample
  misc_feature (1)..(108): Xaa is any amino acid
MISIQNTVLQKRSQLYQKKRLLVNKKKEINMELVHVLAEIIGVFIAKGGNGKSTILLELAYCLSIIFKLKVLIIDLDPQVTTTNFLTINENENYGTIFDVLIGVKDIT

SEQ ID NO: 77565 - DNA, 732 bp, Unknown
  Obtained from environmental sample
  misc_feature (1)..(732): n is a, c, g, or t
atggcgctcgcgatgcgaacggtgtcgatggggcgcgcgctgcatagccagcacaagatcaaggtgcgccagccgctcgcggcgattcatctggtaacgagcgacgcgaatgagcgcgccattctcgcgcgccttgaggatatactgtgcgaagaattgaatgtgaaacgggtgctctttggcgagcgcgaagaagaactcgttacgctctcggcgaaggcgaatttcaagacgctcggcgcgcgcctgggcaaggatatgaaacgcgcggcgggtttgatcgaaaagatggacagcgcggcgcttgccggtttgcgcgtgaaagggagctaccgccttaccgacggagatttcagcgccgagatcagcgccgaggacgtcctgattcaccgcagcgaaagggaggggcttgttgtgatgaacgacggcactctgactattgccttggataacacactcagcgaggaactggagctggaggggctcgcgcgcgatctggtgcatcagatacagattatgcgcaaggagagcggcttcgcgatcaccgaccggatccgcgtgtactacgccggggacgaacggctctccgccgcctttgaacgctttggtgcgtatatttccagcgaagttttggctgcggagatgcgatccgccgaaggcgccgggcaggctttgaagatatattcctttgacgggacagacgcgggcttggctgtggagcggataatttaa

SEQ ID NO: 77566 - protein, 243 aa, Unknown
  Obtained from environmental sample
  misc_feature (1)..(243): Xaa is any amino acid
MALAMRTVSMGRALHSQHKIKVRQPLAAIHLVTSDANERAILARLEDILCEELNVKRVLFGEREEELVTLSAKANFKTLGARLGKDMKRAAGLIEKMDSAALAGLRVKGSYRLTDGDFSAEISAEDVLIHRSEREGLVVMNDGTLTIALDNTLSEELELEGLARDLVHQIQIMRKESGFAITDRIRVYYAGDERLSAAFERFGAYISSEVLAAEMRSAEGAGQALKIYSFDGTDAGLAVERII

SEQ ID NO: 77567 - DNA, 888 bp, Unknown
  Obtained from environmental sample
  misc_feature (1)..(888): n is a, c, g, or t
gtgtcgataggcggtcatcatgcggaaaccgataatttaacggtcaacaaagcgaagccggttattatcttcccgacagcggagccaatcacctacggtatgaagctgtcgcaatcggaattgaaaggcggcagcggtacgccgcccggcgctttcgagtgggctgacggagcgacaactcccaacgccggtgaagatgaatatgaagttatctttaccccgaccgacacggataattatgattttacaaacgtagaaggttggatcgaggatagaagtaaagtgatacggcttgtttctatcacaattaacaaagccgaaggcgggaaggttggcaaaccttccggtacatttagcggcagtacaaaaacgattaccgttaccgccgtaaccgcgcccgaaggacagactgttgaatataacatcagcgcggcaaataacggttccggtcttggaacatggcaagacgacctcacctttgatatttcatccgccgcgacttactatgtctacgcgcgttccaaagaaaacgcgaactataacgccggcgagccaaacgttagcgaggggattaaagtggctagccagaatattggttttgaaattataccaaacgaatcaccgccgacggtaacaaccaacaccggagtcgtcatatcccgctcaggcgccgacggactgcctaaaacagtatccctaacggtaagttccggttacacggatattaaatggtactacaacgacactctgctggaagaaacggcaaccatagtactggattcgtcaaatcccatttataacatgctcggtttgaaaattgtcaggntggaagcctggaaagacngcgtttcatatatcacgaataatgaatttgaggtaaagccatga

SEQ ID NO: 77568 - protein, 295 aa, Unknown
  Obtained from environmental sample
  misc_feature (1)..(295): Xaa is any amino acid
MSIGGHHAETDNLTVNKAKPVIIFPTAEPITYGMKLSQSELKGGSGTPPGAFEWADGATTPNAGEDEYEVIFTPTDTDNYDFTNVEGWIEDRSKVIRLVSITINKAEGGKVGKPSGTFSGSTKTITVTAVTAPEGQTVEYNISAANNGSGLGTWQDDLTFDISSAATYYVYARSKENANYNAGEPNVSEGIKVASQNIGFEIIPNESPPTVTTNTGVVISRSGADGLPKTVSLTVSSGYTDIKWYYNDTLLEETATIVLDSSNPIYNMLGLKIVRXEAWKDXVSYITNNEFEVKP

SEQ ID NO: 77569 - DNA, 366 bp, Unknown
  Obtained from environmental sample
  misc_feature (1)..(366): n is a, c, g, or t
ttgcccatgtggacggcacggacattatcattgccgccaatcacaccaaaaacgaagcggccgtttatattgtcaaggattaaaaaaatgaattttaagggaaatcctgtatcaccaggcgttgcgcttggtcctgtttatgtttaccagcctttttctgttgaagtgtccgaaagccttatcggcaaagacgctgtcaaaaacgaaggggaacgttatgccgaagtcaggaaaaaggcggctgcggaaattaatgctatctacgcctctcttgaaaccaaagatcccgaaaaggcgaagattttccgggcccacctggatatcctcaacgatccggcaatacaggaagaaataatgaaggcatga

SEQ ID NO: 77570 - protein, 121 aa, Unknown
  Obtained from environmental sample
  DOMAIN (32)...(121): PEP-utilising enzyme, N-terminal
  misc_feature (1)..(121): Xaa is any amino acid
MPMWTARTLSLPPITPKTKRPFILSRIKKMNFKGNPVSPGVALGPVYVYQPFSVEVSESLIGKDAVKNEGERYAEVRKKAAAEINAIYASLETKDPEKAKIFRAHLDILNDPAIQEEIMKA

SEQ ID NO: 77571 - DNA, 444 bp, Unknown
  Obtained from environmental sample
  misc_feature (1)..(444): n is a, c, g, or t
gtgccgcaaaaaaaaggcggcgaatggcgtataacaaagctcattgaccgaccggtaagcgatgtagccctgtgcgatcttgacggctgcggcgaggatgaactcgtaactatcgaacccttccacggcaatcaatttgtggtaaacaaaaagaccgcaaacagctacgaaattgtctggcaataccccaatgaaattgattttgcccatacagtggttggatgcagtcttttgggaaaacccgccgtcgttggcggaatacgccggaagaactgcgaactctttgtattgctttacgaacagggaaagggttttttcaccgaactgatagaggaaggcgtgggaaccagcaacgccgcggttgcccatgtggacggcacggacattatcattgccgccaatcacaccaaaaacgaagcggccgtttatattgtcaaggattaa

SEQ ID NO: 77572 - protein, 147 aa, Unknown
  Obtained from environmental sample
  misc_feature (1)..(147): Xaa is any amino acid
MPQKKGGEWRITKLIDRPVSDVALCDLDGCGEDELVTIEPFHGNQFVVNKKTANSYEIVWQYPNEIDFAHTVVGCSLLGKPAVVGGIRRKNCELFVLLYEQGKGFFTELIEEGVGTSNAAVAHVDGTDIIIAANHTKNEAAVYIVKD

SEQ ID NO: 77573 - DNA, 570 bp, Unknown
  Obtained from environmental sample
  misc_feature (1)..(570): n is a, c, g, or t
gtgcgcactttcgtaaccgagcttacccagtctttccggggcatttcagatcgctggctgcccggatccgttcccggcgttgattgcgcggttacctacggctttggcgcgcccaatgcggttaccattggcttcctctttggcgcattggggcaattcctctccatcggcattctgctgctgctgcgcagcccacttgtaatcatttccggctttgtacccatgttctttgacaatgccacaatcggcgtgtttgcgaataacaagggcggccttaaagccactatgtttttcccattcctctgcggtgtttgtcaggtctttggatccgcgttcattgccggctttatcggccttgcggcatacggcggatacctgggtatgtgggattgggcgattctgtggccggtatttaccgtagcaatgaagtatttcagctatatcggtgtcgcgctggtggtaatcttcctggtagcgataccccagattcaataccggaaaaacaaggatacttacttccttgtagttgacgattacgaagcctttaagaaaaagagggaggcggcataa

SEQ ID NO: 77574 - protein, 189 aa, Unknown
  Obtained from environmental sample
  misc_feature (1)..(189): Xaa is any amino acid
MRTFVTELTQSFRGISDRWLPGSVPGVDCAVTYGFGAPNAVTIGFLFGALGQFLSIGILLLLRSPLVIISGFVPMFFDNATIGVFANNKGGLKATMFFPFLCGVCQVFGSAFIAGFIGLAAYGGYLGMWDWAILWPVFTVAMKYFSYIGVALVVIFLVAIPQIQYRKNKDTYFLVVDDYEAFKKKREAA

SEQ ID NO: 77575 - DNA, 708 bp, Unknown
  Obtained from environmental sample
  misc_feature (1)..(708): n is a, c, g, or t
atgctcaccaagtggaagaattgcgcttatcgcgtcttcagaggcttggatgctgtgacatttgccgattccggatgccgaatagggaaaaagcggcttgatctgcgcgactatgtgagagtggctgaagaaattgatgacgccatagccgatttgggcgacatttcgagcatcggcgcggcgttttgcggcggaatgttgggggagtcgggcggcatttttacttcctccccgggttcttgggcggaaacgtatgcttgcaatgttctgggcaatttggcggtcgtaaaaggctgtgaaaaggcgataagaagaggaatcgtcttcaggggggtctttttcgccggggggggggcggcgtatgggtatcctgaattttccggctacgccttgtcaaaagtctccgtggtgagggcggtggaaaatctggggatggaatttgccgtcatgaatctgcccgcccaggtgattgctcttgcccctggcgctgtagacacggacatgctgaagctggttatggcgaacggcggaaaagtaaaaacgaagacggatatctccgagccgacacggtttgtcgcacagtttgtgtgcggagcttttgattcctcctctatgaacggacgatattttcatgtgcgcgacaaggttgatggcgtcgatttttcaaaattgccagaggatatgttcaagctgaggcggaaagaatga

SEQ ID NO: 77576 - protein, 235 aa, Unknown
  Obtained from environmental sample
  misc_feature (1)..(235): Xaa is any amino acid
MLTKWKNCAYRVFRGLDAVTFADSGCRIGKKRLDLRDYVRVAEEIDDAIADLGDISSIGAAFCGGMLGESGGIFTSSPGSWAETYACNVLGNLAVVKGCEKAIRRGIVFRGVFFAGGGAAYGYPEFSGYALSKVSVVRAVENLGMEFAVMNLPAQVIALAPGAVDTDMLKLVMANGGKVKTKTDISEPTRFVAQFVCGAFDSSSMNGRYFHVRDKVDGVDFSKLPEDMFKLRRKE

SEQ ID NO: 77577 - DNA, 555 bp, Unknown
  Obtained from environmental sample
  misc_feature (1)..(555): n is a, c, g, or t
atgagaatagcctattttacagatacatactcgccggagataaatggcgtgaccaatacattgtcaaaacttggaacatggcttgatgaaatgcgtatacgccaactggttatcgctccggattatgacggtaaaaattccggagttgattctgcgtaccgcaaagttcagcgttttaaggggattgccgtttctctttctccaaagagccgcatcgcttttcccgcgttttgggaaatagaccagatatgcgatagttttaaaccggatattattcatgtaactacggaactgggtataggtttcaggggaatgcgttatgcgttaaccagaaatataccgctggttatgagtttccatacggattattgcaggtatttaaagtaccataacctggaatttacgcggccgttactcgaaaattatcttgcgtggttttacagtttttccaatcgcacgcttgccccttcacggaatacccttaacgagctttttcgtagaggttatcaaaacctgggagctttggtcgcggggaatagatactgtcagttttaa

SEQ ID NO: 77578 - protein, 184 aa, Unknown
  Obtained from environmental sample
  misc_feature (1)..(184): Xaa is any amino acid
MRIAYFTDTYSPEINGVTNTLSKLGTWLDEMRIRQLVIAPDYDGKNSGVDSAYRKVQRFKGIAVSLSPKSRIAFPAFWEIDQICDSFKPDIIHVTTELGIGFRGMRYALTRNIPLVMSFHTDYCRYLKYHNLEFTRPLLENYLAWFYSFSNRTLAPSRNTLNELFRRGYQNLGALVAGNRYCQF

SEQ ID NO: 77579 - DNA, 723 bp, Unknown
  Obtained from environmental sample
  misc_feature (1)..(723): n is a, c, g, or t
atggcatctatattatctaatgcatcagtcgtgttaataatatctacggcattgtcgtctttactgaagcctgaaagggtgtccatgtcgataacttcaacgacatcgttcgtgccaagctcgttgctggcgttaactacgtcgtctatgttcacaagatcatctggattaacaatgctgtcggggtcaacaatactatctgtatcaacaacaccgtcagcattatcaacaatgccatccgtactaacaatgctgtcaggatcaataacgctatcgggatcgacaacgccttcggtaacagtatccgtactaatcataccatctgtatcaacaatattatctgtatcaataacgccgtcagtaaccgtatctgtaccgataacgtcttctgtatcaacgatgttatccggatcaacaacttcttccgtaacaatatccgtaccaacaacagtagtatcaatggtatcaacagtagtatcaacggtatcaacggtatcaacactatcaacagcttcgacagtatcaaccgtatcaacgacatcagtagtatcgactgtatcaaccgtatcaactgtatcaaccgtatcaaccgtatcaaccgtatcaactgcatcgactgcttcagtagctccaaccgcgtcatcaatatcaaccgtcataacatcctcaacggccatagcggtagtagtatctgacgccgacaccccaaacatcttcgtctag

SEQ ID NO: 77580 - protein, 240 aa, Unknown
  Obtained from environmental sample
  SIGNAL (1)...(19)
  misc_feature (1)..(240): Xaa is any amino acid
MASILSNASVVLIISTALSSLLKPERVSMSITSTTSFVPSSLLALTTSSMFTRSSGLTMLSGSTILSVSTTPSALSTMPSVLTMLSGSITLSGSTTPSVTVSVLIIPSVSTILSVSITPSVTVSVPITSSVSTMLSGSTTSSVTISVPTTVVSMVSTVVSTVSTVSTLSTASTVSTVSTTSVVSTVSTVSTVSTVSTVSTVSTASTASVAPTASSISTVITSSTAIAVVVSDADTPNIFV

SEQ ID NO: 77581 - DNA, 339 bp, Unknown
  Obtained from environmental sample
  misc_feature (1)..(339): n is a, c, g, or t
ttgatattgatgacgcggttggagctactgaagcagtcgatgcagttgatacggttgatacggttgatacggttgatacagttgatacggttgatacagtcgatactactgatgtcgttgatacggttgatactgtcgaagctgttgatagtgttgataccgttgataccgttgatactactgttgataccattgatactactgttgttggtacggatattgttacggaagaagttgttgatccggataacatcgttgatacagaagacgttatcggtacagatacggttactgacggcgttattgatacagataatattgttgatacagatggtatga

SEQ ID NO: 77582 - protein, 112 aa, Unknown
  Obtained from environmental sample
  misc_feature (1)..(112): Xaa is any amino acid
MILMTRLELLKQSMQLIRLIRLIRLIQLIRLIQSILLMSLIRLILSKLLIVLIPLIPLILLLIPLILLLLVRILLRKKLLIRITSLIQKTLSVQIRLLTALLIQIILLIQMV

SEQ ID NO: 77583 - DNA, 582 bp, Unknown
  Obtained from environmental sample
  misc_feature (1)..(582): n is a, c, g, or t
ttgcgccctggccgagatgcaggaaattctggctccagccgaagatgccgcgcctccctactgtccgcaccagggcgcatgcggcggctgcgcctggccgggcctcggctatgcggaagaattgcgctggaaggaacgccatgtgcgggaaagcctccggcgtctcggaggcctgggagaggcagccgacagcctcgtcgcgcccattgtcccctcccccaggcagctcggctaccgcaacaagctggaattcgccttcgcccccgatgcgggcggcggcgtcgccctgggcctgaaatgccggggaacgcaccggatcattcccgtcagcgactgcgccctggccccttcctccgtggcggaactgctcgccttcactcgccgctgggcggaggaaaaggccctgagcgcctggaacggcaagacgggctttctgcgccatctggtcgtgcgccggccggactacgccccgcagggcattccccagtgccaagtggagctgatcgtcaacagcgcggcgcatgccggggccagggacgcagcctgcgccttcggcccctccctgcggcaggccgtgcctga

SEQ ID NO: 77584 - protein, 193 aa, Unknown
  Obtained from environmental sample
  misc_feature (1)..(193): Xaa is any amino acid
MRPGRDAGNSGSSRRCRASLLSAPGRMRRLRLAGPRLCGRIALEGTPCAGKPPASRRPGRGSRQPRRAHCPLPQAARLPQQAGIRLRPRCGRRRRPGPEMPGNAPDHSRQRLRPGPFLRGGTARLHSPLGGGKGPERLERQDGLSAPSGRAPAGLRPAGHSPVPSGADRQQRGACRGQGRSLRLRPLPAAGRA

SEQ ID NO: 77585 - DNA, 381 bp, Unknown
  Obtained from environmental sample
  misc_feature (1)..(381): n is a, c, g, or t
gtggaaagtgaagaggcgcttgccgcgtttctggacgatctgtccgtactggcgcatgccaacgatacgggggagagtttcggccttgtgattgccgaggccatggccgtcgggctgccggtggtcacgcatccctgcgcggggttgaaggacaatgcgcaactggagcttgtcgaacacggggtgacgggcttggtggcggacaatgcggaagactacgcctgcgccgtggcgtggcttttcgcccatccggacgcggcgcgccgcatgggccgcgcggggcgggacaaggccgcgcgtctgtatgccgaggacgtggtggcgggcgcattggaggccgtatatgccgcgttgctttccggggaggggcgggatgagtga

SEQ ID NO: 77586 - protein, 126 aa, Unknown
  Obtained from environmental sample
  misc_feature (1)..(126): Xaa is any amino acid
MESEEALAAFLDDLSVLAHANDTGESFGLVIAEAMAVGLPVVTHPCAGLKDNAQLELVEHGVTGLVADNAEDYACAVAWLFAHPDAARRMGRAGRDKAARLYAEDVVAGALEAVYAALLSGEGRDE

SEQ ID NO: 77587 - DNA, 768 bp, Unknown
  Obtained from environmental sample
  misc_feature (1)..(768): n is a, c, g, or t
gtggagcatacagcccacgaaaagcggcagcttcgccggcgccggcgccaaacactccatgcaactctccacgaaaagccgttgccatgtgtgcagttccgccgaagcggatgccgagttgcggcacagggtgcagttctccgcctccatgcccgccgcgcgggcaagaaaaaacagcgcccagggagaactgtccgcaagcagcacgggcggctgcgcgccgcacgcttcctcaaggcccggccagacccggcggacaagctccacatccgtttccaggatcacgagtccctccggaacccgcccgcacagcaagcgagcaagcgtcccatcccccagaccgagaagcagcagccaagatcgcttgccggcgacatgcacgcgcacggccctgtccgccgcgcggcgcgcctgctccgcatcctccggcggcacggagaaattctccgtccggcccaaacgccaagccagcacttcccgcgtgtagcggccgaaattttcccgcacggcgtcactcatcccgcccctccccggaaagcaacgcggcatatacggcctccaatgcgcccgccaccacgtcctcggcatacagacgcgcggccttgtcccgccccgcgcggcccatgcggcgcgccgcgtccggatgggcgaaaagccacgccacggcgcaggcgtagtcttccgcattgtccgccaccaagcccgtcaccccgtgttcgacaagctccagttgcgcattgtccttcaaccccgcgcagggatgcgtga

SEQ ID NO: 77588 - protein, 255 aa, Unknown
  Obtained from environmental sample
  misc_feature (1)..(255): Xaa is any amino acid
MEHTAHEKRQLRRRRRQTLHATLHEKPLPCVQFRRSGCRVAAQGAVLRLHARRAGKKKQRPGRTVRKQHGRLRAARFLKARPDPADKLHIRFQDHESLRNPPAQQASKRPIPQTEKQQPRSLAGDMHAHGPVRRAARLLRILRRHGEILRPAQTPSQHFPRVAAEIFPHGVTHPAPPRKATRHIRPPMRPPPRPRHTDARPCPAPRGPCGAPRPDGRKATPRRRRSLPHCPPPSPSPRVRQAPVAHCPSTPRRDA

SEQ ID NO: 77589 - DNA, 591 bp, Unknown
  Obtained from environmental sample
  misc_feature (1)..(591): n is a, c, g, or t
atgtgtgcagttccgccgaagcggatgccgagttgcggcacagggtgcagttctccgcctccatgcccgccgcgcgggcaagaaaaaacagcgcccagggagaactgtccgcaagcagcacgggcggctgcgcgccgcacgcttcctcaaggcccggccagacccggcggacaagctccacatccgtttccaggatcacgagtccctccggaacccgcccgcacagcaagcgagcaagcgtcccatcccccagaccgagaagcagcagccaagatcgcttgccggcgacatgcacgcgcacggccctgtccgccgcgcggcgcgcctgctccgcatcctccggcggcacggagaaattctccgtccggcccaaacgccaagccagcacttcccgcgtgtagcggccgaaattttcccgcacggcgtcactcatcccgcccctccccggaaagcaacgcggcatatacggcctccaatgcgcccgccaccacgtcctcggcatacagacgcgcggccttgtcccgccccgcgcggcccatgcggcgcgccgcgtccggatgggcgaaaagccacgccacggcgcaggcgtag

SEQ ID NO: 77590 - protein, 196 aa, Unknown
  Obtained from environmental sample
  misc_feature (1)..(196): Xaa is any amino acid
MCAVPPKRMPSCGTGCSSPPPCPPRGQEKTAPRENCPQAARAAARRTLPQGPARPGGQAPHPFPGSRVPPEPARTASEQASHPPDREAAAKIACRRHARARPCPPRGAPAPHPPAARRNSPSGPNAKPALPACSGRNFPARRHSSRPSPESNAAYTASNAPATTSSAYRRAALSRPARPMRRAASGWAKSHATAQA

SEQ ID NO: 77591 - DNA, 786 bp, Unknown
  Obtained from environmental sample
  misc_feature (1)..(786): n is a, c, g, or t
ttgggagtgccgattagtgtttgtatcggtgcgagtgcaattatagcgtgtatttcccttggatacccgttgatggttattgggcaaaaaatggtatccgggcttgattcgtttcttcttgtggcggttcctctcttcattcttgccggtaatttgatgagttccggtaagattaccgagaaaatttttagttttgtaaaagaactggttgggtggatacccggcggcctgggtcacgctaatgtggtagccagcgttatcttcgccggtatgtcaggcaacgcaccggctgacgcggggggactggggaccatcgaaatggaggccatgacatcaaacggttatgacaaggaattttccggaggaattaccgccgcatcatcggtaatcggacctatcttcccgccgacaataccgcttatcatttacggttccgtcgccagcgtaagcgtagcaaaactcttcatgggaggcgttattccagggctattaatgggtatcgctttaatggtgctggtatatatcatggcaattaaaagaaaatatctccgggataagttctcttttatttccatgattaagcaattcttttcatcgatactttcccttattacgccggtaattattttaagcggctttgtttttggctggtttacccccacagaggcggcaagcatctcggaaggctatgcccttctcatttccataggagtgtatccttcagtggattgggcatccttcaaaaaatgtctatttgaaagcgcgctgggcttcgcaaattcctga

SEQ ID NO: 77592 - protein, 261 aa, Unknown
  Obtained from environmental sample
  DOMAIN (1)...(261): DctM-like transporters
  misc_feature (1)..(261): Xaa is any amino acid
MGVPISVCIGASAIIACISLGYPLMVIGQKMVSGLDSFLLVAVPLFILAGNLMSSGKITEKIFSFVKELVGWIPGGLGHANVVASVIFAGMSGNAPADAGGLGTIEMEAMTSNGYDKEFSGGITAASSVIGPIFPPTIPLIIYGSVASVSVAKLFMGGVIPGLLMGIALMVLVYIMAIKRKYLRDKFSFISMIKQFFSSILSLITPVIILSGFVFGWFTPTEAASISEGYALLISIGVYPSVDWASFKKCLFESALGFANS

SEQ ID NO: 77593 - DNA, 402 bp, Unknown
  Obtained from environmental sample
  misc_feature (1)..(402): n is a, c, g, or t
atggacagcatggtagcgcttaataaaaatggaatttacgcagcgctcttttcgcccgtcaatagccaaggggatttagacaaagaaaaacttaaagctcttattcgttttgagatggatcatggtgttgaaggtttttattgctgtggttcttcgggagagggactcctttcggaaaccgaagaacgaaaagccgtaacagaaattgtagccgcagaagtccggaacaaggttccttttataattcacacaggtactttgaatactcgttcgtctatagatctttcttcacatgcaaaggcatctggagctgcggcggtttcccttatccctcctatttattatcattattccctgaatgagattgagcaatactacagagacgtagttaatgcaggttga

SEQ ID NO: 77594 - protein, 133 aa, Unknown
  Obtained from environmental sample
  DOMAIN (8)...(133): Dihydrodipicolinate synthetase family
  misc_feature (1)..(133): Xaa is any amino acid
MDSMVALNKNGIYAALFSPVNSQGDLDKEKLKALIRFEMDHGVEGFYCCGSSGEGLLSETEERKAVTEIVAAEVRNKVPFIIHTGTLNTRSSIDLSSHAKASGAAAVSLIPPIYYHYSLNEIEQYYRDVVNAG

SEQ ID NO: 77595 - DNA, 903 bp, Unknown
  Obtained from environmental sample
  misc_feature (1)..(903): n is a, c, g, or t
ttgggatgtaggatacgccagcgccataaccgtagtgctggtcgttatgttattgagtttgacctgcgcgcatttctttacccgggacaagcgcgcgttctacagttaggcgaaaaaatgaaaaaagtgaatccgggactgattctggcatttctgattttcggctttcttacgctgctttttctgatccccctcctgtggatgctgcgaaccgccttcgccgagcacggcaaggccctggacctgtccgcctttttcgcgcctaccctttcaaatttttcccgcgtttggtccgccgcgcctttcagggtatattacagtaacaccctgataatggtaacgggcattttggcggtgcaattcgtgtttattaccctggcgggttacgcttttgcccggcttgacttttacggcagcaagctgttgtttgtgctgctgcttacccagctcatgattacccccgacgtgctgattatgccggtgtacagtctgatgggccgtttctcgctgatcaatacgcgcataggggttatgctgcctttctttgcttccgcgatgggaaccttttttatccggcagacgataaaaaccattccctatgaactggaagaggcggcggttatagacggctgctccctcccccgtatgctgctgcggatctatgtccccctgctcaagccggcctaccttgccttcggttttatttcatcctcctaccagtggaacaacttcctctggcctctcgtgatgatcaattctgtggaaaagcggcccctgactcttggactcgcgattttcgccatgtcctacgaaacaggcgcccagtggagcgacgtctgtgccgctactcttcttgttgtcgcgccgcttctcacggccttcctgtcttctcggccaatctga

SEQ ID NO: 77596 - protein, 300 aa, Unknown
  Obtained from environmental sample
  DOMAIN (102)...(299): Binding-protein-dependent transport system inner membrane component
  misc_feature (1)..(300): Xaa is any amino acid
MGCRIRQRHNRSAGRYVIEFDLRAFLYPGQARVLQLGEKMKKVNPGLILAFLIFGFLTLLFLIPLLWMLRTAFAEHGKALDLSAFFAPTLSNFSRVWSAAPFRVYYSNTLIMVTGILAVQFVFITLAGYAFARLDFYGSKLLFVLLLTQLMITPDVLIMPVYSLMGRFSLINTRIGVMLPFFASAMGTFFIRQTIKTIPYELEEAAVIDGCSLPRMLLRIYVPLLKPAYLAFGFISSSYQWNNFLWPLVMINSVEKRPLTLGLAIFAMSYETGAQWSDVCAATLLVVAPLLTAFLSSRPI

SEQ ID NO: 77597 - DNA, 357 bp, Unknown
  Obtained from environmental sample
  misc_feature (1)..(357): n is a, c, g, or t
atgcgtggaagtatgggcggcgggttcggagccccccgcggtggtatgggcggtgcccgtggtggtatgggtggcagcttcggcgggcgccccatgggcggcatgggtaggccgatgggccgcccgatgggtccaccaatgggtaggccgatggggccgccaatgggcatgcgtccgatgccgccgatgggataccggccaatgtatcgcccgatgggcggcttctaccgcccgcgtcccgtttactacggcagcccgtggggcatgggtgggggctgttgcctcacctcaatgctcacgatgacgtcaaccgtagctttaggtgctgcggcgatcgccaaagccctcaagaaataa

SEQ ID NO: 77598 - protein, 118 aa, Unknown
  Obtained from environmental sample
  misc_feature (1)..(118): Xaa is any amino acid
MRGSMGGGFGAPRGGMGGARGGMGGSFGGRPMGGMGRPMGRPMGPPMGRPMGPPMGMRPMPPMGYRPMYRPMGGFYRPRPVYYGSPWGMGGGCCLTSMLTMTSTVALGAAAIAKALKK

SEQ ID NO: 77599 - DNA, 990 bp, Unknown
  Obtained from environmental sample
  misc_feature (1)..(990): n is a, c, g, or t
atgcagccgccagccgctccctatggtgcgcttgaccgaccgctacgcggtaacatccacagtgatagcctccgctatgccggggtttgcctggtggaacgcgcatcgcttgggtttgcccacccggcagtaaggtttgccgaggttttggtagttgccaccccctgtcccttgctgattgccgcaccggtggcattcatggcggggatgagccgagccacccgccgcggcatcgtcatcagatcaagtgccacgttagaaaagctcagcaaagccaagagttttgcctttgacaaaaccggcactctgactaaaggacaccctgaatttgtggcggtcaaagcagaaccaggtttcagcgaaaatgaattgctggcatatgccgcctccgccgaaactggttcggcacacattttggctgacgccatcgtggctggggctagcgcactcaacctgcctgtcccggcagcggctaatgtggtagaaaacaccggcggcggcgtgcgcgcgagtgtttcaggccatgtggttgccgtgggcaaacacgcctacattgaatcccaagttggctatgcgccgcccgaggtgcggttagccccaggtgaactggccgtgctggtggccgtggatgggaaatacgccggcgcaattatcatgcgcgaccaactccggccagagtccgtaaataccatccgcaccttggaagccaatggcgtgcagcgcgtagccatgtttactggcgatggcgcagccacagctaactttattgctggcaagttgggaatccgcgacgtgcatgccaattgcttgcccgccgataaactcaacggcgtgcgctccatgcagccgcacccggtagttatggtgggcgatggcgttaatgacgcccccgttctcgctgctgccgatgtgggcgtagccatggccgcccgcggctccactgccgcatctgaatcagccgaatgtgggattctgcctgatattagctga

SEQ ID NO: 77600 - protein, 329 aa, Unknown
  Obtained from environmental sample
  DOMAIN (92)...(312): haloacid dehalogenase-like hydrolase
  misc_feature (1)..(329): Xaa is any amino acid
MQPPAAPYGALDRPLRGNIHSDSLRYAGVCLVERASLGFAHPAVRFAEVLVVATPCPLLIAAPVAFMAGMSRATRRGIVIRSSATLEKLSKAKSFAFDKTGTLTKGHPEFVAVKAEPGFSENELLAYAASAETGSAHILADAIVAGASALNLPVPAAANVVENTGGGVRASVSGHVVAVGKHAYIESQVGYAPPEVRLAPGELAVLVAVDGKYAGAIIMRDQLRPESVNTIRTLEANGVQRVAMFTGDGAATANFIAGKLGIRDVHANCLPADKLNGVRSMQPHPVVMVGDGVNDAPVLAAADVGVAMAARGSTAASESAECGILPDIS

SEQ ID NO: 77601 - DNA, 414 bp, Unknown
  Obtained from environmental sample
  misc_feature (1)..(414): n is a, c, g, or t
ttgaatagccaagaacttttatttccagaaaatgttgaaattccatcttatctgcagcctctactggaggctcaaaaaaacgaattaaaaaaacttggctttaacatagaaccctttggttcaagtacttggcgtttgcgaagtattcctgctcatttgaaaataagtgcggcagctccagcagtaattgtttttctgcaaaatgcctacgatagcaaagaaagtgatatgttcaaaaaaaatgctctctcttatgcaaatagttctgcaattccaagtggagcagagctttcggtgcaagagatgaaagctattgtttctgatttgctgtttttgcaaaatccttatgaaacacctaggggtgaggctgtttttatgaaaatgccattagatgatataaggaaaaagttttag

SEQ ID NO: 77602 - protein, 137 aa, Unknown
  Obtained from environmental sample
  misc_feature (1)..(137): Xaa is any amino acid
MNSQELLFPENVEIPSYLQPLLEAQKNELKKLGFNIEPFGSSTWRLRSIPAHLKISAAAPAVIVFLQNAYDSKESDMFKKNALSYANSSAIPSGAELSVQEMKAIVSDLLFLQNPYETPRGEAVFMKMPLDDIRKKF

SEQ ID NO: 77603 - DNA, 780 bp, Unknown
  Obtained from environmental sample
  misc_feature (1)..(780): n is a, c, g, or t
gtggaccgcgagcagctacatgtgcaagccagcgtgctaggcgagtctgactctgcaccgacggtagagatcaacaagactgtaggcggcgcggaagtcgttgtcaaagatctttcaaggcgccgttttttggggttgctgccgcccaaaattgttgggtgcgacctagtaatatccctgccaaagaaggcactggtggacgtaaaaacaataaatggggctatagcggcttatgccattgacgggtttttgaaatgcgaaacggtcaatggccggattcagatagagcgcgttttgggcagagtagaagcaaaaacattgtcgggggcgattacaattacaaggctggccctaagtcctttggccatgacccctagccaaaatttgcaaagcaggccgccaagcgcagcttttgagggcttggtagcgaaatccgtcaatggtagcatcgttttggaagatgtaatgggcagcgccgaagtgtccaccatccacggcaaaatcgaggcaaggcgcgtccatgtcatgggtggcgagaccagctttgaaaccatcagcggagacttggagatcgaaatgctgaggggagtgtctgagattgccgtcaaatccatggccggccaaatagacgcccaagtgccaaattcaaagataatagaagaaagcaaaattcaaacgataatccagctgccgattcgcccaaatcggcagtccactgatcatggccaaatgcagacggtcacggtaaaaacagtcaacggtaaaatcaccctgcgctga

SEQ ID NO: 77604 - protein, 259 aa, Unknown
  Obtained from environmental sample
  misc_feature (1)..(259): Xaa is any amino acid
MDREQLHVQASVLGESDSAPTVEINKTVGGAEVVVKDLSRRRFLGLLPPKIVGCDLVISLPKKALVDVKTINGAIAAYAIDGFLKCETVNGRIQIERVLGRVEAKTLSGAITITRLALSPLAMTPSQNLQSRPPSAAFEGLVAKSVNGSIVLEDVMGSAEVSTIHGKIEARRVHVMGGETSFETISGDLEIEMLRGVSEIAVKSMAGQIDAQVPNSKIIEESKIQTIIQLPIRPNRQSTDHGQMQTVTVKTVNGKITLR

SEQ ID NO: 77605 - DNA, 714 bp, Unknown
  Obtained from environmental sample
  misc_feature (1)..(714): n is a, c, g, or t
ttgatgagcttcgacgaaatggagcttgataccatcggcgaccgcaaaaccgcgctgttcatcattataagcgatacggacacgacgttcaatttcgtggccgcgctgatgtacagccagttgttcaaccttttatgcgacaaagcggacagtcaaaagggtggcaggctcaaaacgcacgtcaggtttttgctggatgaatttgccaatatcggcaccatcccacactttgataagctgattgcgaccatcagaagccgggaaatatcggcttgcgtgatattgcaaacgcagtcgcagcttaaaaacatgtacaaagataacgccgaaacgataatcggcaacatggactcgcgggtgtttctcggcggctctgaaaaaactacactcaaagatttgtcagaatcgcttgggaaagaaacaatcgaccttttgaaccattccgtcagcaaaggaaactccccgtcattcagcagcaattaccaaaaattaggcaaagagcttatgtccattgacgaaatttctgttatggacggctcaaagtgcatacttcaactgcgcggcgtccgcccgttcctgtctgataaattcgacatcaccaaacacaaaaactacaaacatctatcggatttttcggacgacaacatctttgatattgaggcgttcgtcaacacaacgctcaacgtcaaggacaccgacgaatacgcgggttaa

SEQ ID NO: 77606 - protein, 237 aa, Unknown
  Obtained from environmental sample
  misc_feature (1)..(237): Xaa is any amino acid
MMSFDEMELDTIGDRKTALFIIISDTDTTFNFVAALMYSQLFNLLCDKADSQKGGRLKTHVRFLLDEFANIGTIPHFDKLIATIRSREISACVILQTQSQLKNMYKDNAETIIGNMDSRVFLGGSEKTTLKDLSESLGKETIDLLNHSVSKGNSPSFSSNYQKLGKELMSIDEISVMDGSKCILQLRGVRPFLSDKFDITKHKNYKHLSDFSDDNIFDIEAFVNTTLNVKDTDEYAG

SEQ ID NO: 77607 - DNA, 582 bp, Unknown
  Obtained from environmental sample
  misc_feature (1)..(582): n is a, c, g, or t
gtgagccgcccgaagtcaaagagccggagcggacagtcccggaacggacagcgccggagcggaagcgcagtcgcggcgcggaactgtgaaagggggattacgatgattgacgaaaaaaccgttgaacaggcaagaaacgccgatattatcgcctttctggaacagcgttacggcttcacgttcgcccatcggtgcggcgcgtaccgctgtcaacagcacacgagccttgccgtcaagggcgaccgccgttcttggtactggcacagcaaggggataggcggctgcggcgcgttggatttcctgattatcgctgaatgtatgcctttccgcgaagcggtggaagtcttgacgggctttgctccggcaatgccacggcgggaaacggaacagcctcaaactctgatttcctctgataaagacttaaaaactctgattctccctgataaagccgcctttcctctgcgcttgtttgattacctctgcaataagcgcggcattgacaccgacatcgttaatgcgcttattcaaagaaaaatgctgtatgaggacaggcgcgggcaacgtggtatttgtcggctatga

SEQ ID NO: 77608 - protein, 193 aa, Unknown
  Obtained from environmental sample
  misc_feature (1)..(193): Xaa is any amino acid
MSRPKSKSRSGQSRNGQRRSGSAVAARNCERGITMIDEKTVEQARNADIIAFLEQRYGFTFAHRCGAYRCQQHTSLAVKGDRRSWYWHSKGIGGCGALDFLIIAECMPFREAVEVLTGFAPAMPRRETEQPQTLISSDKDLKTLILPDKAAFPLRLFDYLCNKRGIDTDIVNALIQRKMLYEDRRGQRGICRL

SEQ ID NO: 77609 - DNA, 468 bp, Unknown
  Obtained from environmental sample
  misc_feature (1)..(468): n is a, c, g, or t
gtgatgttttcaagctggcgacgtgaagtggcgcgacatgctcgcaagtggggcaaagaagaggtgtcntgcgattttcgccattatttgccgttattggaaagcaagcccggcgcattggattacgccgcgccttttgttggtctaacgctgcctggctgttttgatgatntgcgccgtcggctggaaagcggttatggccattgcgggacgaaggattatatcgaagtgttgcggttgttggaggagcggcaatcagttcccaaagtggcgcaggcaattgagaagggattgtctgtctgccagcgcccgaccgtggaggttatccgtttatatctttacagcgatgagcgtcctgaggcgcggactttctgtttagatggctggccgcatttggcgggtgtgcgggtagatcttccggatttgtcgcggtatggccagttgttgcaaggggagggccaggcatga

SEQ ID NO: 77610 - protein, 155 aa, Unknown
  Obtained from environmental sample
  misc_feature (1)..(155): Xaa is any amino acid
MMFSSWRREVARHARKWGKEEVSCDFRHYLPLLESKPGALDYAAPFVGLTLPGCFDDXRRRLESGYGHCGTKDYIEVLRLLEERQSVPKVAQAIEKGLSVCQRPTVEVIRLYLYSDERPEARTFCLDGWPHLAGVRVDLPDLSRYGQLLQGEGQA

SEQ ID NO: 77611 - DNA, 915 bp, Unknown
  Obtained from environmental sample
  misc_feature (1)..(915): n is a, c, g, or t
atgataaataattacggctttgcggtgcttaccgaggacagcgtcagccacatcgacaaggttccgcgcccgctgcgcgtcgtcgaccaatggacgtatcactcgcgcctgtactcggcggcaaacctcgcgcgcaaaaaaccgtatttagaaattgtccaattaaattccttcggttgcgggcttgacgcggtgacgaccgaccaagtccaagaattaatgaccgaggcgaaacgcctttacaccacgctgaaaatcgacgaggtcaacaacctcggcgccgcgcgtatccgtatgcgctcgctgatagccgtggtaaacgagcgcgacgcgaaaaactcctgcggttgcggcgaaatcgcaccgcctaaagacagaatagtctttaccgaagaaatgaagcggacttataaaattatcgcgcccgaaatctcgcctattcatttacggatactgcgcgaggctatggtgtccgagggctacgacctcgacgttttgcccgaaagccgcggcgcggtggaagccgggctaaagtacgtcaacaacgacgcgtgctacccgtccattctcaccgtcgggcaaatcatcgacgcgttgcaaagcggcaagtacgacgtaaacaaaacggcggtaatgattacccaaaccggcggcggctgccgcgccacaaattatatcgccatgctacgcanagccctcgtagaagccaacctttcccaagtccccgtaatctcgctgaacgtcgcgggcatggaaaagaacccgggctttaagctgaagctgaaattagtcaatcaaatgattcagtccatagtctacggcgacacgctaatgagagtgttattccgtcacagaccgtacgaaatcgaaaaagcttcgccnacgccctatacgaaaagtggaatcgaaagctaa

SEQ ID NO: 77612 - protein, 304 aa, Unknown
  Obtained from environmental sample
  misc_feature (1)..(304): Xaa is any amino acid
MINNYGFAVLTEDSVSHIDKVPRPLRVVDQWTYHSRLYSAANLARKKPYLEIVQLNSFGCGLDAVTTDQVQELMTEAKRLYTTLKIDEVNNLGAARIRMRSLIAVVNERDAKNSCGCGEIAPPKDRIVFTEEMKRTYKIIAPEISPIHLRILREAMVSEGYDLDVLPESRGAVEAGLKYVNNDACYPSILTVGQIIDALQSGKYDVNKTAVMITQTGGGCRATNYIAMLRXALVEANLSQVPVISLNVAGMEKNPGFKLKLKLVNQMIQSIVYGDTLMRVLFRHRPYEIEKASPTPYTKSGIES

SEQ ID NO: 77613 - DNA, 948 bp, Unknown
  Obtained from environmental sample
  misc_feature (1)..(948): n is a, c, g, or t
gtgaccatccgccttgcgggcggcggggaacggacaataatgcccacggaagaagccgttgccgactcatactcgctttcgtttacccccggctcaggccagaatccgatagaggcgataacggacatagacccgtccgtcatggaagcgggcgtggaggttcagcttgccgcaggcacatggacggtaaccgtcaccgcttttgtagatattgaggtggaagggctggacaaaggcttgtacccggtggcagaaggcagtaagacgtttacggtagttgaggacgcagcctatacagacgtggagatcaccgtagactatattaccggcagcggggagggggttttgaattatgacattaccctgccttcgtatgccgtgacggctaccttaaccgtgctggacataaacggcgccgcgcttgacccggccgtgagtatcaacctgaaaacggccaacacaggcttcaagaccctgcctgccgactactatatactccagatacgggttgtcggcactaccagcgacgacgttaccgtaaagagcgacgtgctccacatttactccggcatggttacctatgcggtaatgaacagcgattttaccatcattaagaatacggtcattagcgctccggcggcttttgtgctggacggccttcttaccgctccggtggcatttgccgacccggtaacaacacaagtaaacaccacatggtacacgggcgccgtaacatggaaggaaaccgacaacggggacacgcccgagttttataaaccgggtaaagagtacaaggcgacactgaacctttcgccgaaagaaggtttcacctttggcaatctggcgcaagacgcctttacctacaccggagcgactgtttccaacgacgcgggcagtgcggtggtaatcgttatccttccccgcaccggcgtcggtgagttcccctga

SEQ ID NO: 77614 - protein, 315 aa, Unknown
  Obtained from environmental sample
  misc_feature (1)..(315): Xaa is any amino acid
MTIRLAGGGERTIMPTEEAVADSYSLSFTPGSGQNPIEAITDIDPSVMEAGVEVQLAAGTWTVTVTAFVDIEVEGLDKGLYPVAEGSKTFTVVEDAAYTDVEITVDYITGSGEGVLNYDITLPSYAVTATLTVLDINGAALDPAVSINLKTANTGFKTLPADYYILQIRVVGTTSDDVTVKSDVLHIYSGMVTYAVMNSDFTIIKNTVISAPAAFVLDGLLTAPVAFADPVTTQVNTTWYTGAVTWKETDNGDTPEFYKPGKEYKATLNLSPKEGFTFGNLAQDAFTYTGATVSNDAGSAVVIVILPRTGVGEFP

SEQ ID NO: 77615 - DNA, 912 bp, Unknown
  Obtained from environmental sample
  misc_feature (1)..(912): n is a, c, g, or t
gtgctgggggccgactttttgaattcgccactgtctgacaggcgcaccctgatgggtgtgctggagtcaatcgcagaatggtacagcaaaggcacccctaatggcatccgaatggatcaagattccggtctgatatggagccccccgcatttcacttggatggacacgaactatcccgccggctccccgcgcgagggctatcccgtggagatacaggctctgtggatatgcctgttgcgcttgctgggcaacaccctgccagagaaggctagaaagtggcgagacttggccaagctggccgaatcgtccattgataaattttggcttgcctcagaggggtattttgcagacgtgctgatagcccctgcgggccgtccagctagggatgcatgccccgccgaccacctgcgcccaaaccagctattcttaatatcattgggcctagtcaaaggcgagagggcgcaactggcagtttccgccgccatgaggcatttgctcgttcctggcgcaatcaggagcttggctccgctccccgtcaaaagggccccgcttccagtccacgcgccttggggcctcctgaacgaccccaaccgcccatattggggacactacgagggcgacgaggacactaggcgcaagccggcctatcacaatgggacagcttgggtgtggcccttgggtactttttgcgaggccttggcgatggcctggccagacgaccaagcggcaaaagattctgctttggcaatattgggcagcgtggacttcatgctctccgaaggatgcataggccacctgccagaaataatagacggagacgcgccgcacgcccaaaggggctgcgatgcccaagcttggagcctcagcgaagtttcagggcgaaagggcgataacaagcagcctcggccataa

SEQ ID NO: 77616 - protein, 303 aa, Unknown
  Obtained from environmental sample
  DOMAIN (1)...(293): Amylo-alpha-1,6-glucosidase
  misc_feature (1)..(303): Xaa is any amino acid
MLGADFLNSPLSDRRTLMGVLESIAEWYSKGTPNGIRMDQDSGLIWSPPHFTWMDTNYPAGSPREGYPVEIQALWICLLRLLGNTLPEKARKWRDLAKLAESSIDKFWLASEGYFADVLIAPAGRPARDACPADHLRPNQLFLISLGLVKGERAQLAVSAAMRHLLVPGAIRSLAPLPVKRAPLPVHAPWGLLNDPNRPYWGHYEGDEDTRRKPAYHNGTAWVWPLGTFCEALAMAWPDDQAAKDSALAILGSVDFMLSEGCIGHLPEIIDGDAPHAQRGCDAQAWSLSEVSGRKGDNKQPRP

SEQ ID NO: 77617 - DNA, 702 bp, Unknown
  Obtained from environmental sample
  misc_feature (1)..(702): n is a, c, g, or t
ttggcacactttgctacaaccgattttgagcgtttgattttgtggaaagatacaaaaccgtggattaatcatgatgggcaactcgaatttacagtgctcaaaatcacagatggagcctattcagaagaaaatagtatactcataaaaaaatatctatcatgtatgcagaatgaaaatgataatgttcgggcggtattgttgttggcactattctgtattttagaaggtattagttttacacgcaaagacggtcaatacctaagatgggatcaacgttccggtcgttgttggggggcgatacctttcaataaaggagaagtactacaatttaataaagctattaccgaaaaattaatagaaattctatcagatgttaagagtggtagcccaatatcgttatttgatttttcatacccaacaataaagaaagggtctgtaacgattataggcggttcgtgtttgagtgaattaccgaatatttgtgcagatagtgttgatcttgttataacatctccgccatattgtaatcgttatgactatactagaacatacgcacttgagttagcaatgttgggaattgatgagaagaaactcttgacattacgacaagagatgcttagttgtaccgtcgaaaatagagaaaaaaaattactggctattaatcctgcgtgggacagcgtattgacaattgtaaaagcatga

SEQ ID NO: 77618 - protein, 233 aa, Unknown
  Obtained from environmental sample
  misc_feature (1)..(233): Xaa is any amino acid
MAHFATTDFERLILWKDTKPWINHDGQLEFTVLKITDGAYSEENSILIKKYLSCMQNENDNVRAVLLLALFCILEGISFTRKDGQYLRWDQRSGRCWGAIPFNKGEVLQFNKAITEKLIEILSDVKSGSPISLFDFSYPTIKKGSVTIIGGSCLSELPNICADSVDLVITSPPYCNRYDYTRTYALELAMLGIDEKKLLTLRQEMLSCTVENREKKLLAINPAWDSVLTIVKA

SEQ ID NO: 77619 - DNA, 684 bp, Unknown
  Obtained from environmental sample
  misc_feature (1)..(684): n is a, c, g, or t
ttgttcagcttactggtttttgacgttattgttcgtattattctaaatctgtgtcacaataacgtcagaggaactgagtttatggaggccaacacaacagtcctgtcgctcatgaaagaacgcggcggctaccttagtgccaaggaagcgcgggagggcggcgtggacaacaacgccctgcggcgcatggcgaagtgcggcctgatagaccgcgtggcgcacggcctgtacgtgggcaccgatgtcatcccagaccctttcttcgtggcgcagcgccgctgcccaaggggagtcttttcccacgagacggcgctgttcttccacgacctctccgacagggccccgctccagattatgatgaccataccttccggctggaatacgaggcttctgtccgagagtaagaatggcgaaataatgtttttctatacaaagccgcaacacgcatctctgggggcagtcagggccatgacgccattcggcaactccgtcacagtctatgacacgccaaggacgatctgcgactgcctgagaagcatagagcggctggacaaagacttggtgctgaccgctctgaagcggcacatcaaagacagatcaacagacaaggccaagctgctggaatacgctgccacattcaaaatccaaagcaaagttatgatgtatctggaggtgctgtcttga

SEQ ID NO: 77620 - protein, 227 aa, Unknown
  Obtained from environmental sample
  misc_feature (1)..(227): Xaa is any amino acid
MFSLLVFDVIVRIILNLCHNNVRGTEFMEANTTVLSLMKERGGYLSAKEAREGGVDNNALRRMAKCGLIDRVAHGLYVGTDVIPDPFFVAQRRCPRGVFSHETALFFHDLSDRAPLQIMMTIPSGWNTRLLSESKNGEIMFFYTKPQHASLGAVRAMTPFGNSVTVYDTPRTICDCLRSIERLDKDLVLTALKRHIKDRSTDKAKLLEYAATFKIQSKVMMYLEVLS

SEQ ID NO: 77621 - DNA, 540 bp, Unknown
  Obtained from environmental sample
  misc_feature (1)..(540): n is a, c, g, or t
atgccgcctgtgtccgcttccgattgcagcccggccctggcctgcctggacgaggccggccgggcggaatattgggccagcctggccctgcgccatgccaaaaacttgggcgcgcgctccatccaacgcctggccgcgcacttcggctcggctctcgccgcgatcacccatcctgaagattggcccgaagccacggtcaaccggaaccggagcgcgtccatccgggacggttcctggcgcgtcggcgccaagccggaatgggaagcggccaagaccctccgcggccgcatcatcctgtggaccgatcctctctacccgccgttgttgcgcgaactgccggacgctccgctctttctgtacgctcttggggatctctccctgttgcgcggcccgtgcctggccgttgtcggcaagcggcagtgttcgtccgaaggcatccgcgcctcggcctattttgccggcgtcctggcggaagccggcgtgaccatcgtctccggccttgcgcgcggcgggatcaaacggcccaccgcgaatccgtga

SEQ ID NO: 77622 - protein, 179 aa, Unknown
  Obtained from environmental sample
  DOMAIN (89)...(176): SMF family
  misc_feature (1)..(179): Xaa is any amino acid
MPPVSASDCSPALACLDEAGRAEYWASLALRHAKNLGARSIQRLAAHFGSALAAITHPEDWPEATVNRNRSASIRDGSWRVGAKPEWEAAKTLRGRIILWTDPLYPPLLRELPDAPLFLYALGDLSLLRGPCLAVVGKRQCSSEGIRASAYFAGVLAEAGVTIVSGLARGGIKRPTANP

SEQ ID NO: 77623 - DNA, 378 bp, Unknown
  Obtained from environmental sample
  misc_feature (1)..(378): n is a, c, g, or t
ttgcgggcgccggggaaacaggccgcctatcaggccgcgctgaacgcgtatgaagccaagcgctacaaggaggcatggaatgcctttgaccgttacctggccgactatcccaacggacttttcgtgcccaatgccctgtattggaaagccgaagtgcgctatgcgctgggtgattacgcaagcgccatcccccagttcaaagaagtgatccagcgctttcccaagcaccagaaagcgccggacgctctgctcaagatcgtcttgatctacgagaagttacaggacaaagacaacgccgccctgcacctgcgcatcctcaacgaggactatccccgttccgatgcggcccagcgcgcaaaaaaactgaacctgtcatga

SEQ ID NO: 77624 - protein, 125 aa, Unknown
  Obtained from environmental sample
  DOMAIN (43)...(76): Tetratricopeptide repeat
  misc_feature (1)..(125): Xaa is any amino acid
MRAPGKQAAYQAALNAYEAKRYKEAWNAFDRYLADYPNGLFVPNALYWKAEVRYALGDYASAIPQFKEVIQRFPKHQKAPDALLKIVLIYEKLQDKDNAALHLRILNEDYPRSDAAQRAKKLNLS

SEQ ID NO: 77625 - DNA, 366 bp, Unknown
  Obtained from environmental sample
  misc_feature (1)..(366): n is a, c, g, or t
gtgaggctgacgccggcgacttcgctacggaggaggaaatggcggacatggacgccaaatggggccaccgtgcgcgttaggtggctcaaggcggcgagacgcaaccttgatgccgcgcttgagtatattgcccgggaagacccggaggcggcgatacgaatctatgcctgtatccgggagcgcgttgccgccttggcgcttcagcccaatatgggaaggcccggcagggtgtttggcacacgggaactcgtgatagaaagatacccctaccttgtcccgtatcgcatccatgaaaacgaggtacagatacttcgtgttttgcatacaagccgaaaaccgccgcaatcctggcagtctccggaatga

SEQ ID NO: 77626 - protein, 121 aa, Unknown
  Obtained from environmental sample
  DOMAIN (26)...(113): Plasmid stabilisation system protein
  misc_feature (1)..(121): Xaa is any amino acid
MRLTPATSLRRRKWRTWTPNGATVRVRWLKAARRNLDAALEYIAREDPEAAIRIYACIRERVAALALQPNMGRPGRVFGTRELVIERYPYLVPYRIHENEVQILRVLHTSRKPPQSWQSPE

SEQ ID NO: 77627 - DNA, 333 bp, Unknown
  Obtained from environmental sample
  misc_feature (1)..(333): n is a, c, g, or t
atgggccttttagccggtctcatgaaaagcgtggatttttcccaaggccggcccgaagcgagcctcatccagaataatggggaggggaataagagggtttcggttttcaggggggatgattttatcattatttatacctactctggggagacattcactctggaatctgttaatctaagcggctggaaagaagccgcgctttggtggtttgaccccgcctccggagtttacagttactgcggtctgatgccctggggcatgacaaggattttcacgcccccgcggaaacccttgggtcagaatgactgggttctgctgctcaaaaggagataa

SEQ ID NO: 77628 - protein, 110 aa, Unknown
  Obtained from environmental sample
  misc_feature (1)..(110): Xaa is any amino acid
MGLLAGLMKSVDFSQGRPEASLIQNNGEGNKRVSVFRGDDFIIIYTYSGETFTLESVNLSGWKEAALWWFDPASGVYSYCGLMPWGMTRIFTPPRKPLGQNDWVLLLKRR

SEQ ID NO: 77629 - DNA, 564 bp, Unknown
  Obtained from environmental sample
  misc_feature (1)..(564): n is a, c, g, or t
atggattatccattgccccacgctactatggatgggcggtgcgaagacaaagaggcgggtatgtattttttcatagcagccatggagctataccgccgtacagggaaaacgtgttttcttgaatgggccggaatcgcggcggattggataatgacgttcctctacttctgggaaccgccgttaaggccgggaagcccttgtggcaaagggaaattccgagtttcaggctggcccggcgtaagcgttcaaaatcaccacctggatgttttctttgccccggtggaactttacgaatacggacgggctgtcaaagacccaatgtacgaagactgcgcaaacctggttatagacgcttggacccacggcgtctgtgaatatcccggcaattggggttttacgatacccggggaacaaggcgaacagtactatcaaaccaactacagccaggcaaaggattcccttaaccgcctggaagactggcggggcggtatgtccaactggaatccctcgtggattatcgccgaagtcctgtcggcgtgcctgcatttcgagcttaaggggtag

SEQ ID NO: 77630 - protein, 187 aa, Unknown
  Obtained from environmental sample
  misc_feature (1)..(187): Xaa is any amino acid
MDYPLPHATMDGRCEDKEAGMYFFIAAMELYRRTGKTCFLEWAGIAADWIMTFLYFWEPPLRPGSPCGKGKFRVSGWPGVSVQNHHLDVFFAPVELYEYGRAVKDPMYEDCANLVIDAWTHGVCEYPGNWGFTIPGEQGEQYYQTNYSQAKDSLNRLEDWRGGMSNWNPSWIIAEVLSACLHFELKG

SEQ ID NO: 77631 - DNA, 915 bp, Unknown
  Obtained from environmental sample
  misc_feature (1)..(915): n is a, c, g, or t
atgacgatactgaaaaatcaagcggcggcacacccaggggctcacggctgcccggaagctcctggttcagttcgggataggcctggtggccggatttttcctgtatgcttcgccggccttcgatacggttttgtacatgccggtcttcaagggcctgaacctggacctggggattctctacatccccttcgccgccctggtcatctgcggcgcctcaaacgcggtcaacctgaccgacggcctggacgggctggccgccggccccatgatcatcgccaccctgacctatatggtcttcgtctattgcgcggggaacgcccgtttcgcccattacctgcaaatcagtttcgtccccgaggcggccgaagtcacggtgctcctggcggccgtggccggctcggtcctgggttttctctggttcaacacctacccggcccaaatcttcatgggcgatgtgggttccctgtccctgggcggcatcctgggatgcgcggctttgatcgccaagcaggaactgattctcataatcgtcggcggccttttcgtcatggaggccatgagcgtcatcattcaggtcggctatttcaagctgaccggaggccggagggtttttcgcatggctccgctccaccatcatttcgagttgaaaggctgggcggagccgaaagttatcgtcagattctggattatcgccatcatcctggccatgatcgggctttcgaccttgaaggtgagatgaatttcaaagtggctttctcgccggcaggtttcgttcctggccaaaatcagcggtttgcaaggagggcaatcagtggcaataagaagatatggaaaatgcctggtagtgggcgcgggtctgtcgggccaatgggccgcggaacttctgctcgaagcgggcgccctcggccgatctga

SEQ ID NO: 77632 - protein, 304 aa, Unknown
  Obtained from environmental sample
  misc_feature (1)..(304): Xaa is any amino acid
MTILKNQAAAHPGAHGCPEAPGSVRDRPGGRIFPVCFAGLRYGFVHAGLQGPEPGPGDSLHPLRRPGHLRRLKRGQPDRRPGRAGRRPHDHRHPDLYGLRLLRGERPFRPLPANQFRPRGGRSHGAPGGRGRLGPGFSLVQHLPGPNLHGRCGFPVPGRHPGMRGFDRQAGTDSHNRRRPFRHGGHERHHSGRLFQADRRPEGFSHGSAPPSFRVERLGGAESYRQILDYRHHPGHDRAFDLEGEMNFKVAFSPAGFVPGQNQRFARRAISGNKKIWKMPGSGRGSVGPMGRGTSARSGRPRPI

SEQ ID NO: 77633 - DNA, 654 bp, Unknown
  Obtained from environmental sample
  misc_feature (1)..(654): n is a, c, g, or t
gtggccggatttttcctgtatgcttcgccggccttcgatacggttttgtacatgccggtcttcaagggcctgaacctggacctggggattctctacatccccttcgccgccctggtcatctgcggcgcctcaaacgcggtcaacctgaccgacggcctggacgggctggccgccggccccatgatcatcgccaccctgacctatatggtcttcgtctattgcgcggggaacgcccgtttcgcccattacctgcaaatcagtttcgtccccgaggcggccgaagtcacggtgctcctggcggccgtggccggctcggtcctgggttttctctggttcaacacctacccggcccaaatcttcatgggcgatgtgggttccctgtccctgggcggcatcctgggatgcgcggctttgatcgccaagcaggaactgattctcataatcgtcggcggccttttcgtcatggaggccatgagcgtcatcattcaggtcggctatttcaagctgaccggaggccggagggtttttcgcatggctccgctccaccatcatttcgagttgaaaggctgggcggagccgaaagttatcgtcagattctggattatcgccatcatcctggccatgatcgggctttcgaccttgaaggtgagatga

SEQ ID NO: 77634 - protein, 217 aa, Unknown
  Obtained from environmental sample
  DOMAIN (1)...(146): Glycosyl transferase family 4
  misc_feature (1)..(217): Xaa is any amino acid
MAGFFLYASPAFDTVLYMPVFKGLNLDLGILYIPFAALVICGASNAVNLTDGLDGLAAGPMIIATLTYMVFVYCAGNARFAHYLQISFVPEAAEVTVLLAAVAGSVLGFLWFNTYPAQIFMGDVGSLSLGGILGCAALIAKQELILIIVGGLFVMEAMSVIIQVGYFKLTGGRRVFRMAPLHHHFELKGWAEPKVIVRFWIIAIILAMIGLSTLKVR

SEQ ID NO: 77635 - DNA, 897 bp, Unknown
  Obtained from environmental sample
  misc_feature (1)..(897): n is a, c, g, or t
ttggagaaagggaatctgtctgattctaagtttaccggagacatcgacgtagactacatcttgttaggcgcaagttatattggcggagcggttggaaaaataggggcagggacaggaaacacgccggtaagtggggcggtaaaattagaaaatataaacgtcagcggaaagatctcttttaaaaacggcggtttgggtgctctccaattagggggaatatgcggatattccaacggtgtaaacaacatcaatgttatttttaaagactgcgaatacagcggtactataagtattcctgcggggacgaacggcacccccgaatacaaaataggcggatttatcggagaaatcgccaggtttacaacattgaataactgcggaagcagtgcctctggaatagaagtttttcaaggcggtacactttatgttggaggatttttaggatatacaagtagcgaaggcaaggtgaacaattgtttttccacctctccgattacgataaaagtaacaaccaataatgaggttaaaattggcggatttatcggaaaagttgatggatcgagcaacgatcatacaaatgtaacgaattgtctcgcctcaagagaaattgatgcggaaatatatgacaacaacacagataccggtgttggaggttttatcggcggggcgaatgcggggaatggcggctttaaagtgaatttcttaaattgttatgccttgngcgatgtatcggttaagagttcaggttcaggcagcgtgagtgtcggggggttcgcaggtaattttgaaagcccaactgtaagtatagagaaatgttttgccacaggttcagtttgggctcagtctttatccaaagcgagaataaacgcggggaggcttgtgcgggtataccaataa

SEQ ID NO: 77636 - protein, 298 aa, Unknown
  Obtained from environmental sample
  misc_feature (1)..(298): Xaa is any amino acid
MEKGNLSDSKFTGDIDVDYILLGASYIGGAVGKIGAGTGNTPVSGAVKLENINVSGKISFKNGGLGALQLGGICGYSNGVNNINVIFKDCEYSGTISIPAGTNGTPEYKIGGFIGEIARFTTLNNCGSSASGIEVFQGGTLYVGGFLGYTSSEGKVNNCFSTSPITIKVTTNNEVKIGGFIGKVDGSSNDHTNVTNCLASREIDAEIYDNNTDTGVGGFIGGANAGNGGFKVNFLNCYALXDVSVKSSGSGSVSVGGFAGNFESPTVSIEKCFATGSVWAQSLSKARINAGRLVRVYQ

SEQ ID NO: 77637 - DNA, 561 bp, Unknown
  Obtained from environmental sample
  misc_feature (1)..(561): n is a, c, g, or t
gtggcggatatgtacaatggtttccgcagtttttataccgttactccggtaaagactgtagcagatcttaaaggcctaaggatccgaggtttcggcaacaatatcggaaatgcgctggccaagtatttcggttttgcaaacatcggcattacctggggcgaagtagtccccggactccagcagaaaacccttgacggctgtgaagttcaggtagctacagcgtacggatctgcggtttacgacgtagtaaagaatttggctttgaccaagcattatatgcttcaatcatcctttgtatgttccaacgctatgctcagcagaatgtccgccacagacagggatttctttctgaaaacggttcgtgatactgcccaaaaatattccggcattatcgcaaatgaggaagctccctactatcagcagatgagggataaaggcgttgtcattacggaagtcaacatgaaggaattccaggatgccatcgcgccgctttataccaacaatgatctcggattttctgccggtctgaaagatagattgttcagggaacttggcctgtaa

SEQ ID NO: 77638 - protein, 186 aa, Unknown
  Obtained from environmental sample
  DOMAIN (2)...(172): Bacterial extracellular solute-binding protein, family 7
  misc_feature (1)..(186): Xaa is any amino acid
MADMYNGFRSFYTVTPVKTVADLKGLRIRGFGNNIGNALAKYFGFANIGITWGEVVPGLQQKTLDGCEVQVATAYGSAVYDVVKNLALTKHYMLQSSFVCSNAMLSRMSATDRDFFLKTVRDTAQKYSGIIANEEAPYYQQMRDKGVVITEVNMKEFQDAIAPLYTNNDLGFSAGLKDRLFRELGL

SEQ ID NO: 77639 - DNA, 678 bp, Unknown
  Obtained from environmental sample
  misc_feature (1)..(678): n is a, c, g, or t
gtggcagtggggcagggcgagtccttttccgttgtgcggggggaatcgcttggaccaaggggaaatcgcttttcgcttggctccccgatgggcgccctcgacatcgaaataaagctcacgggcggccaccaagtccaaaacgccgcgctggccgcgtcaattgcgttaatcgccgggttcgacggctctggcgttgtgcgcgggcttgccgccgtagagcctgaggaagggcgcggccgcctcagcccccttgcgggcggagggtggctcctggacgaatcctacaacgcaagccccgattccgtcatatcgtgcgcgaaggcgctcttgagcctggacggcggcgagcccgtctgcgtcctgggctgcatacgcgaactgggccccgattccgcctccatacacgacgccaccggaagggcgcttcgtgcagccggcgtcagccgcgtatgggtcttcggcgactatgcggcggatctgtgcggagggttcgggaagggcgcgtatggctaccccgattttgagacaatggagccgagccttgccgaactgccgcagggtgcgcgcatactggtgaagggcagccgctactggaaatccgaaagggcggtcgcttctttgcttatgctatttggaatgcgtacgggcgggcccggggcaaaagggggatgcgagtga

SEQ ID NO: 77640 - protein, 225 aa, Unknown
  Obtained from environmental sample
  misc_feature (1)..(225): Xaa is any amino acid
MAVGQGESFSVVRGESLGPRGNRFSLGSPMGALDIEIKLTGGHQVQNAALAASIALIAGFDGSGVVRGLAAVEPEEGRGRLSPLAGGGWLLDESYNASPDSVISCAKALLSLDGGEPVCVLGCIRELGPDSASIHDATGRALRAAGVSRVWVFGDYAADLCGGFGKGAYGYPDFETMEPSLAELPQGARILVKGSRYWKSERAVASLLMLFGMRTGGPGAKGGCE

SEQ ID NO: 77641 - DNA, 720 bp, Unknown
  Obtained from environmental sample
  misc_feature (1)..(720): n is a, c, g, or t
atgacagatcggccgagctccggcgtggtccccgacatagtcagggccggcaaccccacggttgccgtcagaagcccaaggcatccagtggcagtggaactgctgcggacattcggcgggccgctcgccgcgccctccgccaacagaagcacggagaccagccccaccaagccagagcatgtcctgaatggcatgggcgacagcattgacctgattctggacggcggcaggactaccgccggcatagagagcacgatcataaccttggcggaaaagcccccccgcctgctgcggcccggaccgatcagcgttgaggaactggaggccatcgtgggcactctggcacgctttgaaggctctgccccggacaacgcggcacaggcggctccgggcatgtcccgccgccactacgcgccaaaggcgcgtctgacgctgtgcgaggcgagcgaactgccggcggccacaagcagggcgggccggtcagaaaaggcggtggccgtcgtcatcggggacgggccgacccccccgtgcgaccaccgccggctgccatccgacccaaagggcgtttcgtcaaggctttacgcgctattgcacgatctggactccgaaaactacactagggtttttttccaggcgccgcccaaaacggacgagtggctggccgtgtgggacaggctcaccagggccgcttcgccggactcgatggattcaacggactga

SEQ ID NO: 77642 - protein, 239 aa, Unknown
  Obtained from environmental sample
  DOMAIN (1)...(100): yrdC domain
  misc_feature (1)..(239): Xaa is any amino acid
MTDRPSSGVVPDIVRAGNPTVAVRSPRHPVAVELLRTFGGPLAAPSANRSTETSPTKPEHVLNGMGDSIDLILDGGRTTAGIESTIITLAEKPPRLLRPGPISVEELEAIVGTLARFEGSAPDNAAQAAPGMSRRHYAPKARLTLCEASELPAATSRAGRSEKAVAVVIGDGPTPPCDHRRLPSDPKGVSSRLYALLHDLDSENYTRVFFQAPPKTDEWLAVWDRLTRAASPDSMDSTD

SEQ ID NO: 77643 - DNA, 855 bp, Unknown
  Obtained from environmental sample
  misc_feature (1)..(855): n is a, c, g, or t
gtggtcgccagtgccattcccaccatcgaggaaatcctgcctggcgaagcaggggtcgacgagccgctcggcgcggcgtaccaggaaacagaggacgagaagagtctccgccttcacactgtggaccaactcatcgccgaaaagttcgcgaggaacgagaaggtcatcggggaaaggctggccgaagtcgagcacaccatccaggcgaagatagccgcagcagagcaaacggccacgcagaatgcggccgaagccgaggcaaaggcaacccaggccgaggaaagagcagcacaggccgaggccagggtcacccaagcggagcagcagattgccgaaatacacagaaaggcctacgaggaaggcttcgcgcagggcgaaaacgaaggcagggagaccggggagacccatttcaacacgcacatcgcccgccttgaggaaaaccttgcggccctctcggacgcagttagcctgcaccgaagtgcatcggaacaagaggtgcttgcgctgataaccgccatggcggattacttggctggccagcacatcgggatgacggcggacgccgcagggccgctgctgcgctccattttgaatgcccacccattccccctgcccgactcggcgtcccccggcgaacctgccgtggtggtgttcatgcacccaaaggatctggaccaagcaaaggtcagcatcacaaaggatttccctggagtccgccttttggccgacgctggactgagcaggggaagcctgaggttggaaaccgccgacaccgtcatcgactccacattcgaaaggcgcagggagcgcctgttgcagctcatcaggaggctcaaagaagaggggcggatttga

SEQ ID NO: 77644 - protein, 284 aa, Unknown
  Obtained from environmental sample
  misc_feature (1)..(284): Xaa is any amino acid
MVASAIPTIEEILPGEAGVDEPLGAAYQETEDEKSLRLHTVDQLIAEKFARNEKVIGERLAEVEHTIQAKIAAAEQTATQNAAEAEAKATQAEERAAQAEARVTQAEQQIAEIHRKAYEEGFAQGENEGRETGETHFNTHIARLEENLAALSDAVSLHRSASEQEVLALITAMADYLAGQHIGMTADAAGPLLRSILNAHPFPLPDSASPGEPAVVVFMHPKDLDQAKVSITKDFPGVRLLADAGLSRGSLRLETADTVIDSTFERRRERLLQLIRRLKEEGRI

SEQ ID NO: 77645 - DNA, 459 bp, Unknown
  Obtained from environmental sample
  misc_feature (1)..(459): n is a, c, g, or t
atggccaagcgcttctatttcagactggctccggtcctaaagattcgggaagccaagaaaaaagacgcccagaggcttctgggcaaacgcatgggcgagctcaggctcttgcaggatcatctgcaatcgcttaagcaggcccagagcgacgcattcggtcagcgccgcgtgcaacagggccagccggttaacttggacatgtggcgctccatagagaggttcctagcctcggtggaacgaaaaatagaagagaccaacgtggagatagccaaagcagaggcactcgtggacgaagcaaggaaagcgctcaccaaggcgcaccgcgaccacctgacgcttgagcgcctgagggagcggcgcaaagagcagtacgacctggaagtcgccagagaagagcagcggcaggctgacgaactcgccatgcttcgctaccaattcaaggcattagaggtatcttga

SEQ ID NO: 77646 - protein, 152 aa, Unknown
  Obtained from environmental sample
  misc_feature (1)..(152): Xaa is any amino acid
MAKRFYFRLAPVLKIREAKKKDAQRLLGKRMGELRLLQDHLQSLKQAQSDAFGQRRVQQGQPVNLDMWRSIERFLASVERKIEETNVEIAKAEALVDEARKALTKAHRDHLTLERLRERRKEQYDLEVAREEQRQADELAMLRYQFKALEVS

SEQ ID NO: 77647 - DNA, 729 bp, Unknown
  Obtained from environmental sample
  misc_feature (1)..(729): n is a, c, g, or t
atggaccaacttttttcgtctcttttcgacgacagcatcgctcacactgtttgcgtctatgcgcttgtcattgcactgggcgtacgtttgggaaaaataaaaatttgcggggtttcgtttaatgtaagctttgtgctgtttacgggcattgtttgcgggcatttcggcctgtccgtcaatgaacaccttctgcatttcatcaaggcattcggcttggtactatttgtttttgccgtgggtctgcaagtcggcccgtcatttttttcttcttttaaaaaagacggcatacacatgaacatgacggctgttgccgttgtgcttctggacgtcataaccgttatagtcctctattggattttttccgataaaatttctatgaccatgatggtcggcattttaacaggagcgaccacaaacactccctcgctcggcgtcgcgcaagaggctctgcggcaaatgtccgtacaggaacctatcgctctgggctatgccgtggcctatccccttggagttgttggggctatcatggctttgattttcctgagaattgttttgaagatacacttggaaaacgaagcaagagatttagaaaatatgaagaatgcggaggaacagccggcgctttattcgattttactcacaaacaccgtcccttgtaaacaggactttggaaaatgtaaaaccctggtttggacgcaactttataatatcccgcctaaaacgaggtga

SEQ ID NO: 77648 - protein, 242 aa, Unknown
  Obtained from environmental sample
  DOMAIN (19)...(183): Predicted Permease Membrane Region
  misc_feature (1)..(242): Xaa is any amino acid
MDQLFSSLFDDSIAHTVCVYALVIALGVRLGKIKICGVSFNVSFVLFTGIVCGHFGLSVNEHLLHFIKAFGLVLFVFAVGLQVGPSFFSSFKKDGIHMNMTAVAVVLLDVITVIVLYWIFSDKISMTMMVGILTGATTNTPSLGVAQEALRQMSVQEPIALGYAVAYPLGVVGAIMALIFLRIVLKIHLENEARDLENMKNAEEQPALYSILLTNTVPCKQDFGKCKTLVWTQLYNIPPKTR

SEQ ID NO: 77649 - DNA, 390 bp, Unknown
  Obtained from environmental sample
  misc_feature (1)..(390): n is a, c, g, or t
ttgcgactcataacatccaccacgcaaagcgcgaatttcatgttgcgggagataggcatttgcttgtttctggcaagcgtcggcctgggctccgcgccccgtttcgttgaaacggtattttctgaaaatggattgctgtggctcttgtgcggcttcctgatcacagtgctccccctgcttgtggtaggattttttgccggaaaatttgccaaatacaattacctgacgttgatgggcgtcctgtccggcagccggaccaatccgcccctgcttgcctatgccgactccctcgcggcaggcggcggccctgcggtaagctatgccaccgtgtatccgctgacgatgtttttgcggatacttgcggcgcaggtgttgatattcgcgttttaa

SEQ ID NO: 77650 - protein, 129 aa, Unknown
  Obtained from environmental sample
  DOMAIN (4)...(127): Predicted Permease Membrane Region
  misc_feature (1)..(129): Xaa is any amino acid
MRLITSTTQSANFMLREIGICLFLASVGLGSAPRFVETVFSENGLLWLLCGFLITVLPLLVVGFFAGKFAKYNYLTLMGVLSGSRTNPPLLAYADSLAAGGGPAVSYATVYPLTMFLRILAAQVLIFAF

SEQ ID NO: 77651 - DNA, 387 bp, Unknown
  Obtained from environmental sample
  misc_feature (1)..(387): n is a, c, g, or t
atgcaattaaagaacaactacaaccgggaagtctttaatggcgatggcgggttggtggagagaatcgacctggaggcccaggaactgaccgtcaactttgaaggccggccggtggtctatgatttttctgaattggacgagttgaccttggcctacgccattactattcacaagtctcaaggctcggagttcccggccgtgattatgcccttgaccaacagccaccacatcatgctcaggcgaaatctcctatacacaggcctgaccagaggacgacgcctggttattcttataggctcagcccgggccctggaggctgccgtggccaataaccgggaacacattcgccgctccaacctggcccgcaaattgacagctgccagatag

SEQ ID NO: 77652 - protein, 128 aa, Unknown
  Obtained from environmental sample
  misc_feature (1)..(128): Xaa is any amino acid
MQLKNNYNREVFNGDGGLVERIDLEAQELTVNFEGRPVVYDFSELDELTLAYAITIHKSQGSEFPAVIMPLTNSHHIMLRRNLLYTGLTRGRRLVILIGSARALEAAVANNREHIRRSNLARKLTAAR

SEQ ID NO: 77653 - DNA, 900 bp, Unknown
  Obtained from environmental sample
  misc_feature (1)..(900): n is a, c, g, or t
ttgcccagaaacaacactgttcaaccgcttaccgtgtccgtagatggctccggccccttttactatcagtggtatgtaaccaccgacagtaacaatcctctcggttcgcttattgccggggctaccgattcggtttatatcccgactcatattggtggcaccttctattattattgtgcggtttccaatgattgcggccaagtctcatccaattccagcggctcacacaagcttttggccttctccaaatgtagcccggcaatagccggttttaatggtggtaagcttggaaaaatcacgtatggtaatacttcgaacaccgacatcaataataataccacgaccatttccggtaatagcatcacccagacctggtctgctcacgtctttgctgttggttgcgataaaaccggttattccggcttgtcagttaccgccggagattcaatttttaaaacggattgtcgccggagccatgaaaccagccgtaattataccggttatggcgacttgttctcctggtgtgccgttatgaaattcaaagattcactttgccctgctccttggcgtgttccctccaaattggattttattaatttggataaagctcttggcggcaccggtgagaatcgcgcggataatagcgctcttactaccggtattaaagctaaatatgttgctgcctctggtgctcaaggctgggccggcgcttggggcggctcctgcgatgcttccggaacgcttttctatcaggggacgaatttgtactactggtcggcttccgagaatagcgcaatgggcgcatcaaccttgagcatctacacgacgagcctctacccacaggtttccgatttcaagttatacgggttcgcgctccggtgcgtcaagtatgacgcctga

SEQ ID NO: 77654 - protein, 299 aa, Unknown
  Obtained from environmental sample
  misc_feature (1)..(299): Xaa is any amino acid
MPRNNTVQPLTVSVDGSGPFYYQWYVTTDSNNPLGSLIAGATDSVYIPTHIGGTFYYYCAVSNDCGQVSSNSSGSHKLLAFSKCSPAIAGFNGGKLGKITYGNTSNTDINNNTTTISGNSITQTWSAHVFAVGCDKTGYSGLSVTAGDSIFKTDCRRSHETSRNYTGYGDLFSWCAVMKFKDSLCPAPWRVPSKLDFINLDKALGGTGENRADNSALTTGIKAKYVAASGAQGWAGAWGGSCDASGTLFYQGTNLYYWSASENSAMGASTLSIYTTSLYPQVSDFKLYGFALRCVKYDA

SEQ ID NO: 77655 - DNA, 384 bp, Unknown
  Obtained from environmental sample
  misc_feature (1)..(384): n is a, c, g, or t
ttgtttctggatggcaaaattggggggaagcggggcgcttatcctttcccggcggaaaaagggcaccggcttggggattggcccgagcctttttacggaaattccgagtattatgatttttggatgacgcaacttctgccgttgatccaaaaaattgagggggaaattttttttggtctaatgccccgtgatattactgtggttattgtggcatatcggatgagttcaattacggctgccgattcagttatatatctggaaaatggacgactaattgcccgtggtgctccggaagaattgctcgaaaatgatccaggattccgtgccatcgctacggcgtacgataccgaagctaaacgcagacaattagcggcggtttcctaa

SEQ ID NO: 77656 - protein, 127 aa, Unknown
  Obtained from environmental sample
  misc_feature (1)..(127): Xaa is any amino acid
MFLDGKIGGKRGAYPFPAEKGHRLGDWPEPFYGNSEYYDFWMTQLLPLIQKIEGEIFFGLMPRDITVVIVAYRMSSITAADSVIYLENGRLIARGAPEELLENDPGFRAIATAYDTEAKRRQLAAVS

SEQ ID NO: 77657 - DNA, 783 bp, Unknown
  Obtained from environmental sample
  misc_feature (1)..(783): n is a, c, g, or t
gtggtaatagtgcttttgagcttaccagattgccatatgcgcctcacgaagaagcggagcgtcaaaaccaagaagcgacgcgccagcaccgtgattgggatagaggaatggaggcgtaaaatgaatatgccagtttatgtttctcccgaacaattaatgaaggatcgggcggatttcgctcgcaaaggtgtggcgcgggggcgtccggttatcgtaatgcaatatgataacggcattttgttcgcatcagaaaacgtgtcaagatcgttgcataaaattgcagaaatatatgacagaattggattcgcagcagttggcaaatataacgaatttgaaaaacttagagtagctggcgtacgttatgctgatatgcgcggctatgcttatgatcgtgctgatgtggctgccagaggcctcgccaattcttatgcgcaaatactaggttccagttttacctctgatccgaaaccgatggaagttgaaatagtcgttgccgaagtcggcgatactcaagatgatgaccaaatttatcggctctcttacgatgggtcagtggctgatgagccaggatttgtagtgatgggggctggtgcggaaacgctgcgcgcgcaactcanagaatctttcaatccgaacgccacgcttgacgaagccctggtaacagcgatcaaaactctgcaactaactgcctcggatggctcggaagtcagtaaagacgatgagaacgccacccccgtaacccacgaaattaaanccgagccatttggaactggccgtgtttag

SEQ ID NO: 77658 - protein, 260 aa, Unknown
  Obtained from environmental sample
  DOMAIN (64)...(239): Proteasome A-type and B-type
  misc_feature (1)..(260): Xaa is any amino acid
MVIVLLSLPDCHMRLTKKRSVKTKKRRASTVIGIEEWRRKMNMPVYVSPEQLMKDRADFARKGVARGRPVIVMQYDNGILFASENVSRSLHKIAEIYDRIGFAAVGKYNEFEKLRVAGVRYADMRGYAYDRADVAARGLANSYAQILGSSFTSDPKPMEVEIVVAEVGDTQDDDQIYRLSYDGSVADEPGFVVMGAGAETLRAQLXESFNPNATLDEALVTAIKTLQLTASDGSEVSKDDENATPVTHEIKXEPFGTGRV

SEQ ID NO: 77659 - DNA, 375 bp, Unknown
  Obtained from environmental sample
  misc_feature (1)..(375): n is a, c, g, or t
atgaaaatgaatgtttttgtggccgtattgtttgttggttttgttttttctgtttttagtcaaaatgcaagcgatttttattttactgtaaatgacaagaaaataattataacaggatataatcatgaagccactaaaaatgtcacaatacccgcaagcatatacgggtggcctgttgttgctattggagaagcggcatttgcaattccactatatgggggaagttatagaaagggcgacataaccaatataattattcctaattccgttacctctatcggaaaatatgctttcgcttacaaccagtntaccagtgtaactatccctaattccgttacctctatcggaaacatgcattttctgtcaaccaattaa

SEQ ID NO: 77660 - protein, 124 aa, Unknown
  Obtained from environmental sample
  SIGNAL (1)...(20)
  misc_feature (1)..(124): Xaa is any amino acid
MKMNVFVAVLFVGFVFSVFSQNASDFYFTVNDKKIIITGYNHEATKNVTIPASIYGWPVVAIGEAAFAIPLYGGSYRKGDITNIIIPNSVTSIGKYAFAYNQXTSVTIPNSVTSIGNMHFLSTN

SEQ ID NO: 77661 - DNA, 903 bp, Unknown
  Obtained from environmental sample
  misc_feature (1)..(903): n is a, c, g, or t
gtgctggcaaccaacttgttctttgccaggaggccaactaaagacatccaatatataccaactggcacaagcgggctgaacacatcaaacataaaactccacttaactttgcctcctacaagcaaaggaaatggacctttcccagttgttgtattcctccatggtggcgcattngctggcggaagcagggacgattctcccggtgcctctggtaaggctccagacaatggatatgccttagtaagcataggttaccgcttgtctggcgatgctggcggaacattccccggaagtttcaacgatattttaacagctatccgtttcttaaaaaccaatgccgcaacatactgccttgaccctgacaatttcgcagtgaccggtttctccgctggtgcttaccatgcaggaatggtttgtgtcctttctggatatgagggtcacggtttagacggatggacatctttgtatcaaggggtgaatagtaaagtaaaagcgtgtgcaacttatgccgcacttagcgatatggcaaaattggacgaacatgaggcacaggcaggtggtagattttcgtttcctcacgacgcaagttcccccgaatcaaaatttttgggtataaatacggcactcaaggatgctccaaacaccgcacctccaaatgcctctgttcgctggaaagcaaacccgattaattacataaccacgaatactccacctatattgatgatacatggctcaggtgacaatgtagttccgtgggtacaatctgactatatggtaaatgagattaacaaggtagcttcgggcagggcggagtttctgaaggtacaaggagccggacacagcggtttcgatgacaaggcaacccaagttttcacgcttttcgataagtatcttaaaaagtaa

SEQ ID NO: 77662 - protein, 300 aa, Unknown
  Obtained from environmental sample
  DOMAIN (29)...(282): X-Pro dipeptidyl-peptidase (S15 family)
  misc_feature (1)..(300): Xaa is any amino acid
MLATNLFFARRPTKDIQYIPTGTSGLNTSNIKLHLTLPPTSKGNGPFPVVVFLHGGAXAGGSRDDSPGASGKAPDNGYALVSIGYRLSGDAGGTFPGSFNDILTAIRFLKTNAATYCLDPDNFAVTGFSAGAYHAGMVCVLSGYEGHGLDGWTSLYQGVNSKVKACATYAALSDMAKLDEHEAQAGGRFSFPHDASSPESKFLGINTALKDAPNTAPPNASVRWKANPINYITTNTPPILMIHGSGDNVVPWVQSDYMVNEINKVASGRAEFLKVQGAGHSGFDDKATQVFTLFDKYLKK

SEQ ID NO: 77663 - DNA, 696 bp, Unknown
  Obtained from environmental sample
  misc_feature (1)..(696): n is a, c, g, or t
atggcgttggaagcgacagaaggcgtggggttgcgttatgtaagcaatgcccgtgcgcttggtcagccggatatgattatccttccgggcacgaaaaatacaatcgcggatatgaaatggctgcgggaaagcggcttggaggcagctatcctgcgatgtgccggacggggtacgatggtattcggggtttgcggcgggtatcaaatgctggggctaaccatccgcgacgcggcaaatacagagggcggcggcgaaatcgccgggttggggctgcttccggttcacacggaatttatgcccgaaaagcaacgcttacgcagccgtggaacgattaccggggcttcaaacgcgctggcgtcgttcaatggcgtaacagcggaagggtatgaaatccatatgggcatatcaagtctggaatacggagccgtgccgcttatgcgtttggacagcggcgtggcggacggatgcgtcagcgggaatgtcgccggtacctacctgcacggcttcttcgattccgattcgtgcagggaagcgctgaccgtcttgctgtgcgaacagaaagggattcccgcgcttggcacacgcgcttttgactttaagcaatataaacaggagcagtttgacaagctggcggtcgctgtacgcgagcatttggatatgccgttcatttacggcgtgttggagggcaaggtatga

SEQ ID NO: 77664 - protein, 231 aa, Unknown
  Obtained from environmental sample
  DOMAIN (16)...(175): CobB/CobQ-like glutamine amidotransferase domain
  misc_feature (1)..(231): Xaa is any amino acid
MALEATEGVGLRYVSNARALGQPDMIILPGTKNTIADMKWLRESGLEAAILRCAGRGTMVFGVCGGYQMLGLTIRDAANTEGGGEIAGLGLLPVHTEFMPEKQRLRSRGTITGASNALASFNGVTAEGYEIHMGISSLEYGAVPLMRLDSGVADGCVSGNVAGTYLHGFFDSDSCREALTVLLCEQKGIPALGTRAFDFKQYKQEQFDKLAVAVREHLDMPFIYGVLEGKV

SEQ ID NO: 77665 - DNA, 390 bp, Unknown
  Obtained from environmental sample
  misc_feature (1)..(390): n is a, c, g, or t
gtgcgttcaacgtgcgtgggttatgagaaaatgcttgtgtcttccggcaagtttgatttagaagattctttcgattacgaaggcatggccgtgggcatgaaaaatttcaaaaaaatcgcaaagcggcttagtgcggcagcgagcgatagattagacgactatcgtntgctgtccaacgagggttgcggcaactgcgagggctgcacatacccggataaaccctgccgtttcccggaacaggtacatggctccattgagagttatggtgtttttgtgaataaattaactgaacaagctggaatctgttatataaacggtcaaaataccgtgacctatttcggtgcgcttttatacaacgaaaacgaatgggacgggaatagaaatggctaa

SEQ ID NO: 77666 - protein, 129 aa, Unknown
  Obtained from environmental sample
  misc_feature (1)..(129): Xaa is any amino acid
MRSTCVGYEKMLVSSGKFDLEDSFDYEGMAVGMKNFKKIAKRLSAAASDRLDDYRXLSNEGCGNCEGCTYPDKPCRFPEQVHGSIESYGVFVNKLTEQAGICYINGQNTVTYFGALLYNENEWDGNRNG

SEQ ID NO: 77667 - DNA, 330 bp, Unknown
  Obtained from environmental sample
  misc_feature (1)..(330): n is a, c, g, or t
atgaatcactatgaaaccgttttcattatgactcccgttttatctgatgaacagatgaaggaagcggtaaaaaagtaccaggatttgctgaaaagccatggtgcagagatcattcatgaagaaaattggggtttgaaaaagttggcctaccccattcagaaaaaagccagcggattttattatctcatggaattcaaagccgaaggcgatgtggtggacaccctggaaaccgcttaccgtcgcgatgaacgcatgctccgctttttgaccgttaaattggacaaattcgccgtggcatacagtgaaaaacgtagaaacaaaaacaagtaa

SEQ ID NO: 77668 - protein, 109 aa, Unknown
  Obtained from environmental sample
  DOMAIN (2)...(93): Ribosomal protein S6
  misc_feature (1)..(109): Xaa is any amino acid
MNHYETVFIMTPVLSDEQMKEAVKKYQDLLKSHGAEIIHEENWGLKKLAYPIQKKASGFYYLMEFKAEGDVVDTLETAYRRDERMLRFLTVKLDKFAVAYSEKRRNKNK

SEQ ID NO: 77669 - DNA, 519 bp, Unknown
  Obtained from environmental sample
  misc_feature (1)..(519): n is a, c, g, or t
ttggttaaccacccatctcgcgaacatgtgatgcgcaaagccgttaataaaattcaggacgactacgattttgtcatcattgattgtgcgccttcgcttggtttggttacgctgaacgccatgacagcctccgattcggttatcatcaccgttcaatgcgaatactttgctttggaaggacttggtaagttgctgcaaaccatcaaaatcgtccaatcccgtttcaacgaaaatttggcgatagaaggtattttgctcaccatgtacgatgcccgtctgcgcttagccaaacaagtggttgaggaagttcaagaacatttcgactatttggtgttcgacaccttggtttatcgaaataccaaattggccgaatcaccaagccatcgcaaaaccatcttggaatacgatgcacagtcggcaggtgcgctgaactatcttaacttagcccgagaaatcctgcaaaagaacgatatgacaaacataaaaaacgcggataaaacactttcagaacatgagtaa

SEQ ID NO: 77670 - protein, 172 aa, Unknown
  Obtained from environmental sample
  DOMAIN (1)...(124): CobQ/CobB/MinD/ParA nucleotide binding domain
  misc_feature (1)..(172): Xaa is any amino acid
MVNHPSREHVMRKAVNKIQDDYDFVIIDCAPSLGLVTLNAMTASDSVIITVQCEYFALEGLGKLLQTIKIVQSRFNENLAIEGILLTMYDARLRLAKQVVEEVQEHFDYLVFDTLVYRNTKLAESPSHRKTILEYDAQSAGALNYLNLAREILQKNDMTNIKNADKTLSEHE

SEQ ID NO: 77671 - DNA, 414 bp, Unknown
  Obtained from environmental sample
  misc_feature (1)..(414): n is a, c, g, or t
atgagtaaaacaccggccatgggcagaggtctcgctgccttaataggagatatcgaggcttcaactcccaaaaaacaacattcggacaacactctcgaaacggacattgtagggagttttggggaaatttccatcaaagatattgaccctaaccccgaaaatccgagaaagaatttttcggaggaaggtcttcaagaattagcggattctattcgagcaacgggcattattcaagccatcaccgttcgcaaaaaacaaggccgataccaaattatttcgggtgaacgtcgttttcgtgctgctcaaatggcaggattgaaaaccgttccggcctatatcctcatcgctaccgatacggaaacgctgaaaatggcgcctactgaaaacattcaacgctcgaacttaaatcgatag

SEQ ID NO: 77672 - protein, 137 aa, Unknown
  Obtained from environmental sample
  DOMAIN (41)...(130): ParB-like nuclease domain
  misc_feature (1)..(137): Xaa is any amino acid
MSKTPAMGRGLAALIGDIEASTPKKQHSDNTLETDIVGSFGEISIKDIDPNPENPRKNFSEEGLQELADSIRATGIIQAITVRKKQGRYQIISGERRFRAAQMAGLKTVPAYILIATDTETLKMAPTENIQRSNLNR

SEQ ID NO: 77673 - DNA, 579 bp, Unknown
  Obtained from environmental sample
  misc_feature (1)..(579): n is a, c, g, or t
ttgcgggcaaaagcggcggtggaacgtgccgacgtgtgcttgattatgattgacgctaacgaaggtccgacgtttcatgatgaacgtatcgccggaattgttcacgaggcgggtaaggcgtcaattatcgctgtgaataaatgggatagcatagaaaaagataattcgactatgaaaaaattcacggggattttgaaaaatgcatttgcttttatgagttatgcccctgagatattcatctcagcgaagactggacagcgggtaaataagctgtttgatattataaacgcagtttacgaacagtcgagtagacgagtgacgactggcgcattaaacgacgttttaagcgatgcgattgcacgttctcaaccgccgagtgataaaggacggcggctgaaaatatattatatgacgcagaccggaataaagccgcctgtttttgttatgtttgtcaataatgcggaactttttcatttctcatatcaacgatatatagaaaatcgtatccgtgagacgtttggctttttaggaactcctatgcgctttattataaaaaatcgcagccgaggcgatatttaa

SEQ ID NO: 77674 - protein, 192 aa, Unknown
  Obtained from environmental sample
  misc_feature (1)..(192): Xaa is any amino acid
MRAKAAVERADVCLIMIDANEGPTFHDERIAGIVHEAGKASIIAVNKWDSIEKDNSTMKKFTGILKNAFAFMSYAPEIFISAKTGQRVNKLFDIINAVYEQSSRRVTTGALNDVLSDAIARSQPPSDKGRRLKIYYMTQTGIKPPVFVMFVNNAELFHFSYQRYIENRIRETFGFLGTPMRFIIKNRSRGDI

SEQ ID NO: 77675 - DNA, 756 bp, Unknown
  Obtained from environmental sample
  misc_feature (1)..(756): n is a, c, g, or t
ttggcccaaacctcggccggcaaccagatggtgcggctgagccaggcnccggacgccaaggcccagaacagcctgccccggccagcctggaactggcgttcggtccgcctgtattacaatgaaaccgtcagcgccgaccaggaggtccgcctccatctctacggcccggccctctggcggcttctgggcgggttgcgccttgtcctcatggccatcttcgccttaagccttctggaagtgaagatccgcggcctctggcggccggccccggccgcggccgccctgctcctggccgccctttgggcctctccggccctggccaccggggacgcctggcccgacccggatatcctgaacgactaccaggcccgccttctggaacaaagcccccggcccccggcgggcctgcccttcctgcgccttaacctggccgccgaaagcctggaactggacttgaccgtggaagccggccaggaggaaatcatccccctgccggccctggaccggaacgtcttccggccccagagcctgaccctggacaacggccgggacctgcccctcctcgaaatagaggaccgctggctgaccctggtcccgccgggccgccaccgcctgaaactggcgggccggcttaaaaaaaccgccccgggcttccaagccttcgacctgaactttccgccggaaggcctacctcagcgggtggaggccgcgggcgaaaactggcgggtgaagggcggagccgctctgccaatctga

SEQ ID NO: 77676 - protein, 251 aa, Unknown
  Obtained from environmental sample
  misc_feature (1)..(251): Xaa is any amino acid
MAQTSAGNQMVRLSQAPDAKAQNSLPRPAWNWRSVRLYYNETVSADQEVRLHLYGPALWRLLGGLRLVLMAIFALSLLEVKIRGLWRPAPAAAALLLAALWASPALATGDAWPDPDILNDYQARLLEQSPRPPAGLPFLRLNLAAESLELDLTVEAGQEEIIPLPALDRNVFRPQSLTLDNGRDLPLLEIEDRWLTLVPPGRHRLKLAGRLKKTAPGFQAFDLNFPPEGLPQRVEAAGENWRVKGGAALPI

SEQ ID NO: 77677 - DNA, 792 bp, Unknown
  Obtained from environmental sample
  misc_feature (1)..(792): n is a, c, g, or t
atgttgcgggaaaataatgtaccgggaaacaggctggttgtaatcaaaggacattttaatagtcttttatataacgatgaagccagaaaggttcagacctatttcataactggaggtatgctcttgcaagatagagatggaaacttgactaagaaagaacagaaaagcaatgaactaacatatcagggagtgactgattctttggaacaatatcgaagaagattcaatttagcatatgagttatcaggtagtgctagtggagatgtaatagctttaagcataccgctggaacagcaatatttagatttgtttacatttacatctgaaacagactattttactaagaaaacaacttatactccggttatattcccaagagtaaaattagaaaaaaatgaaacttttcttattattggttggggtactgtccgcaaagttgatagtttttatgaacttggaagcataaattatcctcatgactattaccaacagtattttattcggataaacactatgcctaaaggaagtaaatatttcgtagatggggaaaaggctttatggaaaaaaaataaagacagtaacaataaggcaattattgcatttactaaggcaattaaggctaatccagaatttgtttccgcatatatccgtcgaggagatgtctatacaatgaaggatgattataataatgcactgtcagattttaacaaagcccttgaaattgccccaaataacccaaacatatatgaatctcgtggaaaaatgtttctcaaaaaaaggaatataatgtag

SEQ ID NO: 77678 - protein, 263 aa, Unknown
  Obtained from environmental sample
  DOMAIN (212)...(245): Tetratricopeptide repeat
  misc_feature (1)..(263): Xaa is any amino acid
MLRENNVPGNRLVVIKGHFNSLLYNDEARKVQTYFITGGMLLQDRDGNLTKKEQKSNELTYQGVTDSLEQYRRRFNLAYELSGSASGDVIALSIPLEQQYLDLFTFTSETDYFTKKTTYTPVIFPRVKLEKNETFLIIGWGTVRKVDSFYELGSINYPHDYYQQYFIRINTMPKGSKYFVDGEKALWKKNKDSNNKAIIAFTKAIKANPEFVSAYIRRGDVYTMKDDYNNALSDFNKALEIAPNNPNIYESRGKMFLKKRNIM

SEQ ID NO: 77679 - DNA, 867 bp, Unknown
  Obtained from environmental sample
  misc_feature (1)..(867): n is a, c, g, or t
ttggaagaacccaaaaagtccaagctttggctgtggattctgctgcccttgttaatcatcggcgctgggctgttggcgttcttcttgttccgggacaccgggcctggcgaacctgaagccccgcccaccgcattggttcccagtttttccgagggaatcacggaacagttggcatgcagtcaagtagaaactgccggctttgtttgcgaacctttaattgacggaaactccaatgctcctgaaggcacttggctgcgccaagaaccggccggcggcacctaccttgagttaggtgaaactgtaacgttgtggttctcaggtggaccagccaccttgggcgtacctgacttaacgggcatgtcaattgatcaagccacggctatcctggaagaagctggcctggttcgcgggcaaatcaccgaagaacccagcccagagcaaccagcgggcaatgtgactcgcacccaacctgccgctatggtggccgtgcagcgtggatctactgtggctttgtatgtttccaatggcaatgtggtgctgccaaatgtggttggccaaccgtttgaaactgcgcaatccatgttaagcccattgcggttaggggctcggcgcattgacgaacccactacctcagcaccccctggcacagtgattcgccaatcgccagatcctggccaagttgaccagggtactcaggtagagttaattgtggcggttgcccccgaaattcaaaacgcggcggttcccgatgtcactgggcaatcctgcgtggccgcccgcactaacctagaaggcagtgggttcgtggtaacccagtaccccggagcccaaccgtcagtggatgagggtacccatggctcgcgataa

SEQ ID NO: 77680 - protein, 288 aa, Unknown
  Obtained from environmental sample
  DOMAIN (112)...(175): PASTA domain
  misc_feature (1)..(288): Xaa is any amino acid
MEEPKKSKLWLWILLPLLIIGAGLLAFFLFRDTGPGEPEAPPTALVPSFSEGITEQLACSQVETAGFVCEPLIDGNSNAPEGTWLRQEPAGGTYLELGETVTLWFSGGPATLGVPDLTGMSIDQATAILEEAGLVRGQITEEPSPEQPAGNVTRTQPAAMVAVQRGSTVALYVSNGNVVLPNVVGQPFETAQSMLSPLRLGARRIDEPTTSAPPGTVIRQSPDPGQVDQGTQVELIVAVAPEIQNAAVPDVTGQSCVAARTNLEGSGFVVTQYPGAQPSVDEGTHGSR

SEQ ID NO: 77681 - DNA, 393 bp, Unknown
  Obtained from environmental sample
  misc_feature (1)..(393): n is a, c, g, or t
ttgccggacgatatcgaacttatctgccatcttgtgcgttaccacatgcgctatcatttcatgctcaccgaccggggcatacgccgcttccacgccctggacgaatacccgcgcctgatgcagatgaccctggccgacatcaaggccagaaactccagcaccacgaattacaatcacaaccaaaaatacctcaaccgcgcggaaacggacgccctcttcctggaacctctgctcaacggcaagcagatcatggaatacgcgggtctgcctcccggtcccctgatcggcgtcctgcgcgatgcgctgctcaaggcgcaggtggcgggagaagtgacggacgaagacggcgcgattgcctttgtcatcgccaaggcccagaagaccaccgcttga

SEQ ID NO: 77682 - protein, 130 aa, Unknown
  Obtained from environmental sample
  misc_feature (1)..(130): Xaa is any amino acid
MPDDIELICHLVRYHMRYHFMLTDRGIRRFHALDEYPRLMQMTLADIKARNSSTTNYNHNQKYLNRAETDALFLEPLLNGKQIMEYAGLPPGPLIGVLRDALLKAQVAGEVTDEDGAIAFVIAKAQKTTA

SEQ ID NO: 77683 - DNA, 963 bp, Unknown
  Obtained from environmental sample
  misc_feature (1)..(963): n is a, c, g, or t
ttggacgaaaccgtaagaaaaatagaaagcataatacgtaaagaagtccccgaagcgacgtttaccctgtccaacatagccgccggtttcggaggtcaggcggtcggcagcaatatagcgcaaatccgcatagcgttagttccaaaaaataagcgttcccgttcgtccgcccaagtagccgaacagcttcgcccgaaacttatggggcttcccggaacgaccgttcgagttcgtgaaggacaaggtttatttttgcttaggatgggaacaaataccgatcaggcgatcggtatagaaattcgcgggtacgatttggaaacggggcaaactcttgccagacaaataaacgacgcggtatcgcaggtcgcgggtattacggaaacgcaaataagccgtgaagcaggaatgccggaatatcgagtaaaaatcgacaggggcaaagccgcggaattgggattatccgcgactcaaatcggttcgacggtacagacggctatgggcggaacgtccgctacaaaagtacgcgtcgatggtaaagaatacgcggttgtcgtacggcttgcgcaagacgaccgaaagagcatcgacaacgtaagcaatctttccgtaatgaacagcggcaaccgtccgataatgctgcaaagcgcggcgcaagtcgaggcgggcgtgggacccgttaaagtggaacgccgcgatagagagcgtatagtaacggtaagcgtaaattatgcgggtcgggacatgagaagcgtggtagaagatattcgttcggcgataaaagatatttcggtgccgcangagtttgtggtgcttattcgcggcgactgggaagacagcagaaagcgcanaaagaaatgtttttcggtatcgctatgggcgatacctttattttctaggtatggcgggacattcgagtcgttaaaagacccttttatcgttatattttcattcctatggcattga

SEQ ID NO: 77684 - protein, 320 aa, Unknown
  Obtained from environmental sample
  misc_feature (1)..(320): Xaa is any amino acid
MDETVRKIESIIRKEVPEATFTLSNIAAGFGGQAVGSNIAQIRIALVPKNKRSRSSAQVAEQLRPKLMGLPGTTVRVREGQGLFLLRMGTNTDQAIGIEIRGYDLETGQTLARQINDAVSQVAGITETQISREAGMPEYRVKIDRGKAAELGLSATQIGSTVQTAMGGTSATKVRVDGKEYAVVVRLAQDDRKSIDNVSNLSVMNSGNRPIMLQSAAQVEAGVGPVKVERRDRERIVTVSVNYAGRDMRSVVEDIRSAIKDISVPXEFVVLIRGDWEDSRKRXKKCFSVSLWAIPLFSRYGGTFESLKDPFIVIFSFLWH

SEQ ID NO: 77685 - DNA, 696 bp, Unknown
  Obtained from environmental sample
  misc_feature (1)..(696): n is a, c, g, or t
atgaacgctccggaatacttaaacttagacgcggtcgttaccgatacggttatgccgtttgacaacgttgacgacattcaagagcatttggaagcggcgcgaaaattcagaccggattttcgtcaggcgtcgctgcaagcgaaaaaaggcgaattggatttatcctatacaaaaaacggacttctgccaaaacttgatttctttatttctctgcgcgaaacgtcttatgccgaatcttttgcgcaagcgatgacgcctaaagagccgacggaaaccgtatctacgggatttacgcttcaatttccgcttacaagcggctcttcaagagaaaagtttcgcagagccaactactccttgcagcagcaaaaattgtccgtcgagaatttttcgcacctgcttgaatacgaggtgcgctccgcacacatggaagtatcgagagcgtcgatacaaattgaaactgcaaagaccgttcgtgatcttcaacagcaaaagttagacgccgagcaggagaagttgaaagtaggaaaatctaccggatatgcggtgttgcaagtacagcgggatttagtatcggcaaaccttgacgaagcaagggcgcgcatggcttatacttatgctcttctatctctttattttcgcgacggaacgcttttgatgaggcgcggaattaagccgatggagacgatttcgcaataa

SEQ ID NO: 77686 - protein, 231 aa, Unknown
  Obtained from environmental sample
  DOMAIN (26)...(215): Outer membrane efflux protein
  misc_feature (1)..(231): Xaa is any amino acid
MNAPEYLNLDAVVTDTVMPFDNVDDIQEHLEAARKFRPDFRQASLQAKKGELDLSYTKNGLLPKLDFFISLRETSYAESFAQAMTPKEPTETVSTGFTLQFPLTSGSSREKFRRANYSLQQQKLSVENFSHLLEYEVRSAHMEVSRASIQIETAKTVRDLQQQKLDAEQEKLKVGKSTGYAVLQVQRDLVSANLDEARARMAYTYALLSLYFRDGTLLMRRGIKPMETISQ

SEQ ID NO: 77687 - DNA, 303 bp, Unknown
  Obtained from environmental sample
  misc_feature (1)..(303): n is a, c, g, or t
atgcaaagaaaagtaaatcgcagtgatagcgattatcattacggcaaagaaaaacacaagcggaatgtttataaaatgatgttggaatgtaaacaaagagaggtaatgccaagggatataaacgattattccagggtagaaagatgggattgtttgcaaagaaccatgtgttcttgccggatgccgcgtaaacgccgtatccagccgacaaaactgtccagactcaatgcatcagagcttccatgtaaaactgataagcgggtgtatcaagcaatttcgtccatccgcgattatcaaatctaa

SEQ ID NO: 77688 - protein, 100 aa, Unknown
  Obtained from environmental sample
  misc_feature (1)..(100): Xaa is any amino acid
MQRKVNRSDSDYHYGKEKHKRNVYKMMLECKQREVMPRDINDYSRVERWDCLQRTMCSCRMPRKRRIQPTKLSRLNASELPCKTDKRVYQAISSIRDYQI

SEQ ID NO: 77689 - DNA, 507 bp, Unknown
  Obtained from environmental sample
  misc_feature (1)..(507): n is a, c, g, or t
ttggatatcaanngtattaccttggggttgaaaaaaagtcttgacgagctttccggcgaagacagagcgcttgcgaatcatattcttagcgaagaaatttctcttcgtaattgtatctgggcgttaaggcttcgaacttattacaataaaaaagcgcctgaaataaccgaatatttaacgcatgcggaggaagcgaaacagtcgctggaactgccgctggacacaagaacggattggaacggatggaaatgggaaagatttcttaaccccgaacaatcaggcgatcattggcaattgaatccgcgttattttcaaaatgccgcgttccattacctgaatcggcttgcccttctcgggtttcacagaataccaatgtcgataagctcgatattttgctttattaagattaaacaatacgaagaagattttcttacaagcattgcagaagggctgtcaatgggtatagaaagccccgatttattcaagcttctggaggttcctgtatga

SEQ ID NO: 77690 - protein, 168 aa, Unknown
  Obtained from environmental sample
  misc_feature (1)..(168): Xaa is any amino acid
MDIXXITLGLKKSLDELSGEDRALANHILSEEISLRNCIWALRLRTYYNKKAPEITEYLTHAEEAKQSLELPLDTRTDWNGWKWERFLNPEQSGDHWQLNPRYFQNAAFHYLNRLALLGFHRIPMSISSIFCFIKIKQYEEDFLTSIAEGLSMGIESPDLFKLLEVPV

SEQ ID NO: 77691 - DNA, 639 bp, Unknown
  Obtained from environmental sample
  misc_feature (1)..(639): n is a, c, g, or t
atgcttacccccgattggtacgttgtgcgcgagcttcgcgcccctgacggctatctgcttgacgaaacgccgaaaattattgaagtaaagacgagcgcccccaccgttatcacttttactaacaaaccgctgacaagtctgcaaatcaagaaggaggacgcggccacgggagcgccgctcggcggcgcaaggttcgttatcgagaagataaacggcgggcgcgtcggcgaatggactaccgacaacacgggatttatcaatatcacatcgttattgcccgattggtacgtgatacgcgaaacgcaggccccgccggggtacttgctggacgaaaccccgaaaacggttgaggttaagacaaacgcgccgacggtagttacattcgttaataaaaagctgacggcgttgcagattatcaaaattgatgaaactacccgcgagccgctgcccggagcgaaattcacggtggaaaagcaaaacggggagcgcgttggcgagtttaccacagacgccgccgggactatcaatatccctactctttcgccggattggtacgttgcgcgcgagattatggcgccgcaagggtacttgctggacgaaacgccaaaaaccgtggaagtcaaaacaacgcgcctatag

SEQ ID NO: 77692 - protein, 212 aa, Unknown
  Obtained from environmental sample
  DOMAIN (149)...(210): Cna protein B-type domain
  misc_feature (1)..(212): Xaa is any amino acid
MLTPDWYVVRELRAPDGYLLDETPKIIEVKTSAPTVITFTNKPLTSLQIKKEDAATGAPLGGARFVIEKINGGRVGEWTTDNTGFINITSLLPDWYVIRETQAPPGYLLDETPKTVEVKTNAPTVVTFVNKKLTALQIIKIDETTREPLPGAKFTVEKQNGERVGEFTTDAAGTINIPTLSPDWYVAREIMAPQGYLLDETPKTVEVKTTRL

SEQ ID NO: 77693 - DNA, 963 bp, Unknown
  Obtained from environmental sample
  misc_feature (1)..(963): n is a, c, g, or t
gtggatggactagttgccgtgaactttccgctggaggggcagaaacgggcccagttgatgtctgccgccataggcccttgggactattgggtgattgaatatggctacaaacagtttgacccatcaaaagaggccgacgagctggcaaagatagcaggccgcagcgatgaccctctgctgatctatggcaccgatgaagacagctcattcggcatagaccctgacgtcaacacgtacgaccttggccccgacaccttggcatttgccgcaaagcggattcagctatctgccgagctgataaagcggctgcaaaaccgcacattcaagccgggcgagccgtaccacatattgaggcgccaaaccaatcgagcgctcagccaagtcgccaattctgtctcattcgcgtccaagtacatcggcggcgtttcatacaaccgagatcacgctggcaccagccgcaccaacatgatccccgtccctgccgaccgacagagggaggccctgaagttgcttgaaaagcaaatattcagcatggactcattcaagttcacgcccgaattcctgtctcgcctgaccagcgaccgcgtggactacaacgacctctcgtcacccacctacagcccaagccggctcatgctgaccatacaaaaatatgccctctctaggatgatggccacaggcgttgcgcaaaacatcttagatgcaagcgaaaagcagacaaacgcaaagcaagtctttaggctctccgagctatatgacacgctgcaattggcgatctgggcagagctaaggggaggcaaggagccaactatggccaggcgcagcctacagcgcgaacacctccgcagcatgatcaacgtgctgctgagggccaccacgagcatgccagacgacgccagaaacctgatccgcgaaaacatgcgacagttgaaaacccaactgcaggcggactccctgcgataa

SEQ ID NO: 77694 - protein, 320 aa, Unknown
  Obtained from environmental sample
  misc_feature (1)..(320): Xaa is any amino acid
MDGLVAVNFPLEGQKRAQLMSAAIGPWDYWVIEYGYKQFDPSKEADELAKIAGRSDDPLLIYGTDEDSSFGIDPDVNTYDLGPDTLAFAAKRIQLSAELIKRLQNRTFKPGEPYHILRRQTNRALSQVANSVSFASKYIGGVSYNRDHAGTSRTNMIPVPADRQREALKLLEKQIFSMDSFKFTPEFLSRLTSDRVDYNDLSSPTYSPSRLMLTIQKYALSRMMATGVAQNILDASEKQTNAKQVFRLSELYDTLQLAIWAELRGGKEPTMARRSLQREHLRSMINVLLRATTSMPDDARNLIRENMRQLKTQLQADSLR

SEQ ID NO: 77695 - DNA, 591 bp, Unknown
  Obtained from environmental sample
  misc_feature (1)..(591): n is a, c, g, or t
ttggtgggcacccagatggcggccaagggccacgatttccccaacctgaccttggtgggcgtggtggacgccgacctgggcctcaatctcccggatttccgggccgcggaacgcacttttcaactcctgtcccaggtggccggccgggccggccggggccaccttccggggacggtgctaatccagaccttaaacccgcgccacccggtgctgcgggccgcggcggcccacgactaccgggctttctttcaggccgaaatagaagtgcggcgcgagttgggctacccccccttcagccgcctggccttgatccgcttcagcggcccggaagccccggcaacggaggccgccgccgcggccgccgccgaagccggccgccgcctggccgctgaaacaaacgtggaaatcctgggcccggccccggcccccctggcccgccttaaggaacaataccgcttccaactgctcatccggggggccacggccgaagcccgccgtcgcttcctggccgcctggctgcccctggcggaaaaagccaccccggccggcctgaaactgacggccgacatcgacccctatcattttttataa

SEQ ID NO: 77696 - protein, 196 aa, Unknown
  Obtained from environmental sample
  misc_feature (1)..(196): Xaa is any amino acid
MVGTQMAAKGHDFPNLTLVGVVDADLGLNLPDFRAAERTFQLLSQVAGRAGRGHLPGTVLIQTLNPRHPVLRAAAAHDYRAFFQAEIEVRRELGYPPFSRLALIRFSGPEAPATEAAAAAAAEAGRRLAAETNVEILGPAPAPLARLKEQYRFQLLIRGATAEARRRFLAAWLPLAEKATPAGLKLTADIDPYHFL

SEQ ID NO: 77697 - DNA, 438 bp, Unknown
  Obtained from environmental sample
  misc_feature (1)..(438): n is a, c, g, or t
ttgaaaaacattctggatagtttcgcccaaggcgaaattcattctcttggtgggcacccagatggcggccaagggccacgatttccccaacctgaccttggtgggcgtggtggacgccgacctgggcctcaatctcccggatttccgggccgcggaacgcacttttcaactcctgtcccaggtggccggccgggccggccggggccaccttccggggacggtgctaatccagaccttaaacccgcgccacccggtgctgcgggccgcggcggcccacgactaccgggctttctttcaggccgaaatagaagtgcggcgcgagttgggctacccccccttcagccgcctggccttgatccgcttcagcggcccggaagccccggcaacggaggccgccgccgcggccgccgccgaagccggccgccgcctggccgctga

SEQ ID NO: 77698 - protein, 145 aa, Unknown
  Obtained from environmental sample
  misc_feature (1)..(145): Xaa is any amino acid
MKNILDSFAQGEIHSLGGHPDGGQGPRFPQPDLGGRGGRRPGPQSPGFPGRGTHFSTPVPGGRPGRPGPPSGDGANPDLKPAPPGAAGRGGPRLPGFLSGRNRSAARVGLPPLQPPGLDPLQRPGSPGNGGRRRGRRRSRPPPGR

SEQ ID NO: 77699 - DNA, 684 bp, Unknown
  Obtained from environmental sample
  misc_feature (1)..(684): n is a, c, g, or t
atgccgagaatggatctgcaccgcgaagaactcgactttgccctggagatcatgtgtcagcaggtcatggtgctcggcaaggtcacgctctacgacgtggtggaaggggccggcgctgtcgccaagttcacggtggattacaaacgcccgcttgagcacaacgtcatcctcagcggctccgccctgtggtctgatccggactccgatctgctgggtcaggtagacgcctgggcgctcatgatccaggaggagaccggcggccttgtgcccggcgatctgctgctcggcaagaacgcgtggaaggttttccgcaagcacaacgacgtcaaggaatacatggacgtcaaggatattcatgtcggctccctggccccgcatgtggccaaaaagatcaaggggacatggaacggcctgaccgtctgggtcatcgccggcgcctacacggatctcgacggcagcacgaagcagtatcttgatccggactgcgccctgctcgttgcgtccgacgccgagtccgtcattgagttcggcctgccggtggacaacgactgcgcggcgcctgtggagattttctccaagggcttcaaacaggaggatccgtccggctatttcaccatcgcggaatcccggcccttgccctggtcgaagcagcctggatggaccgtgttggccaaggttgtctag

SEQ ID NO: 77700 - protein, 227 aa, Unknown
  Obtained from environmental sample
  misc_feature (1)..(227): Xaa is any amino acid
MPRMDLHREELDFALEIMCQQVMVLGKVTLYDVVEGAGAVAKFTVDYKRPLEHNVILSGSALWSDPDSDLLGQVDAWALMIQEETGGLVPGDLLLGKNAWKVFRKHNDVKEYMDVKDIHVGSLAPHVAKKIKGTWNGLTVWVIAGAYTDLDGSTKQYLDPDCALLVASDAESVIEFGLPVDNDCAAPVEIFSKGFKQEDPSGYFTIAESRPLPWSKQPGWTVLAKVV

SEQ ID NO: 77701 - DNA, 417 bp, Unknown
  Obtained from environmental sample
  misc_feature (1)..(417): n is a, c, g, or t
ttgcgtgatgcttcgcttcttccttgctggttcggcgctgttcccaggctcattgacgccgttgtcggactgttccccgacagcaagggcaaggcggagatcgaagcaaagatcgcgatgacgctcatgcagtacggcgcggaacaggacgcgcgccagaccgaagtgaataaagcggaagcgcagcacgccagcctcttcgtcgccgggtggaggccgttcatcggctgggtgtgcggcgcggcgctcgcctttcagtttgtcgtccgtccgttctgggtgtggttctccgccgtgtggtggccgggcgcgcctgtgccgcccacgcttgacggcatgatgtgggagctggtgttcggcatgctcggcatcggcggtctgcggacgtttgaaaaaatcaagaaagtaagccggtga

SEQ ID NO: 77702 - protein, 138 aa, Unknown
  Obtained from environmental sample
  misc_feature (1)..(138): Xaa is any amino acid
MRDASLLPCWFGAVPRLIDAVVGLFPDSKGKAEIEAKIAMTLMQYGAEQDARQTEVNKAEAQHASLFVAGWRPFIGWVCGAALAFQFVVRPFWVWFSAVWWPGAPVPPTLDGMMWELVFGMLGIGGLRTFEKIKKVSR

SEQ ID NO: 77703 - DNA, 489 bp, Unknown
  Obtained from environmental sample
  misc_feature (1)..(489): n is a, c, g, or t
atgcctccgttcatcatcatcgcgaaggacatatacagtttaatcttcttggcgccggtgccgttcacgttcagcgacgcgtccgccgcgttgccgccagacctgaatttcacaccaacgatagcccctggtttcaagacaaagcctggaagagcgacttgcacctcgccgccgacagagccgccgccaggtcccatatattctccgatgctgacgccgccttccgtagccgagatagtcttcccgtcgttggctatctgtatattagcccctgctattaagatgtcctgcttgccgtctattcgtgcgcctagagcgttatcagcattgccccttgccgtagcctcagcggttatcagaccccttacagcggtgtcgtcgtaccctgcgccgcctcctgtcgccgaaattgtccttacatcagaggctatctgtatattaccccctgctattaaagcgtcttgcttgccgtctaatcctggaacctaa

SEQ ID NO: 77704 - protein, 162 aa, Unknown
  Obtained from environmental sample
  SIGNAL (1)...(29)
  misc_feature (1)..(162): Xaa is any amino acid
MPPFIIIAKDIYSLIFLAPVPFTFSDASAALPPDLNFTPTIAPGFKTKPGRATCTSPPTEPPPGPIYSPMLTPPSVAEIVFPSLAICILAPAIKMSCLPSIRAPRALSALPLAVASAVIRPLTAVSSYPAPPPVAEIVLTSEAICILPPAIKASCLPSNPGT

SEQ ID NO: 77705 - DNA, 603 bp, Unknown
  Obtained from environmental sample
  misc_feature (1)..(603): n is a, c, g, or t
gtgtgtgctgatatcgaaacccaagggatttctaagctcacagaagctgattttttatgcgccaaatccttggggtacaacataaaacttatcgctggcgcacggctttcagggttattcgccgaggcctctgtcgcgccgcgccttgttccgcactggcatccgctgtataatgtgaatggcgtttacaacggagtcttgcttggtgcaaaatctgtgggagatgtcatgttttacggacgtggcgcgggcaaatatccaactgcatcggccgtcgtcagcgacctcgttgaggttatccgaaagataaacaaaaatactaacctctactggtcgcacgaaacactggacatcgttcccactacccacgccgaaagaagaatgatacgcgctgaacgcggagaaacatttgaaacgaccgtcgctcggctgtggccagaagcaccaaacgtttcgcccaagcaactcccgcgagaaaacgcatggcttaccgaaacggaagacataacggacgacctcataaaaagctggcccgccttcaaggaaacgtcaccggtaacaaatattttatggtgtgattggcgcattccgcaaaatgaatga

SEQ ID NO: 77706 - protein, 200 aa, Unknown
  Obtained from environmental sample
  DOMAIN (1)...(97): Homoserine dehydrogenase
  misc_feature (1)..(200): Xaa is any amino acid
MCADIETQGISKLTEADFLCAKSLGYNIKLIAGARLSGLFAEASVAPRLVPHWHPLYNVNGVYNGVLLGAKSVGDVMFYGRGAGKYPTASAVVSDLVEVIRKINKNTNLYWSHETLDIVPTTHAERRMIRAERGETFETTVARLWPEAPNVSPKQLPRENAWLTETEDITDDLIKSWPAFKETSPVTNILWCDWRIPQNE

SEQ ID NO: 77707 - DNA, 867 bp, Unknown
  Obtained from environmental sample
  misc_feature (1)..(867): n is a, c, g, or t
ttgccggaagccaggaccggcgtatacagcatagacagcccaggcggatggcagttgataggccgcactccgctcaggctgttcgaccccgacaacagcgataatccgactctcatagacgcgggagaatggataaggttctgcgccataccaaaagatgaattcgaggacattaagcgcggcgcgagcgacggtaagtacaccactgctgttgtgccccctgtacccccattgggggtcaaggggactcagtccccttgcaggggttcgggggcggcgcccccgaggtcttttagcgtcgaaaggccgggaatgctgactttagtgcaggacctcgggcggtgggggcaccagtcgagggggctcacggtatcaggtccgatggatcagttctcgctgcgaatgggcaacgtgatgctgggcaacgacgagaacgacgcggcgctggagatcacgcttttcggcctggaaattatttttcacgacgatagatgcgtcgtgctcgccggagccgatctcgtcatgaatatcgacggaatcccggcagcttcatggacagtccaccgcgccgctcccggcagccgcctcgccataaccggactgccgcgccgctccggcgggggatgccgcgcgtatctctgcgtaagcggcggcatagacgtgcctatcgtcatgggaagccgctcgacatacgcgaggggcaagatcggcggatacaagggacgcttgctcgccgccggagacatcgtcgacatgctcgaccccaaaccactttggcggcgttcggagggattcgtctgccctcgggagctgaggccgtccgggatctggagcgagccgctccacacaatgaagtcctgtccataa

SEQ ID NO: 77708 - protein, 288 aa, Unknown
  Obtained from environmental sample
  DOMAIN (119)...(288): Allophanate hydrolase subunit 2
  misc_feature (1)..(288): Xaa is any amino acid
MPEARTGVYSIDSPGGWQLIGRTPLRLFDPDNSDNPTLIDAGEWIRFCAIPKDEFEDIKRGASDGKYTTAVVPPVPPLGVKGTQSPCRGSGAAPPRSFSVERPGMLTLVQDLGRWGHQSRGLTVSGPMDQFSLRMGNVMLGNDENDAALEITLFGLEIIFHDDRCVVLAGADLVMNIDGIPAASWTVHRAAPGSRLAITGLPRRSGGGCRAYLCVSGGIDVPIVMGSRSTYARGKIGGYKGRLLAAGDIVDMLDPKPLWRRSEGFVCPRELRPSGIWSEPLHTMKSCP

SEQ ID NO: 77709 - DNA, 939 bp, Unknown
  Obtained from environmental sample
  misc_feature (1)..(939): n is a, c, g, or t
ttgagcgtatacctcggggaggcactctcaaatatgttcaaggaattggagagcggacgggccgagttcaagcgaggcgcgacgcttgaccttgggatggcgaagttggcaaaaatcaatgcctacgatagtgatcgcaataggaccagccctgtcgcctttacgggggacaagttcgagtttcgcgttcccggcgcgtcacaagctctggcgttgcctgtgacagcgctcgccacgatatggagctggggcatcaagcacgtctcggcgttggtggagagcaagatagagggcggagccgatccactggatgcggccatcgaagtgatagttgacgttatgaacgactcgaagaatataatattcgaaggtgacgcctacacgaccgaatggagggccgaggccgaacgccgtgggcttataaggtcgaataccattccccaggccatagacctgatgctcgaacccagtaccgtggagatgctggaggaactgggtgtttacaagaagaacgagatcgagagcatccacgaaatacgaatggaatccttctgcacggccattgaagtggagttcgtcatgatgttcgacatgctgtacgaaggagtgttgcccgcgatttcacggcagatggtgctggagaaagagtctatggcagccataagcggccttgacctgccggaggaagccgatctgaaagcgttcatcggcaagctagccaaaattaaggcggcactcttaaaggattcggaacaactcgtagcgctcaagtcccgcataactgaccttcagccgcgcgagcgcgccgaagtgatagttaacgaagtagtgcctctgatgaaaagcgtccgtgaaaagtgcgacgctgtggagctaatgatctccctcgacatctggccgtacccgatttacagaaacctgccttcgctgtcggcgtaa

SEQ ID NO: 77710 - protein, 312 aa, Unknown
  Obtained from environmental sample
  misc_feature (1)..(312): Xaa is any amino acid
MSVYLGEALSNMFKELESGRAEFKRGATLDLGMAKLAKINAYDSDRNRTSPVAFTGDKFEFRVPGASQALALPVTALATIWSWGIKHVSALVESKIEGGADPLDAAIEVIVDVMNDSKNIIFEGDAYTTEWRAEAERRGLIRSNTIPQAIDLMLEPSTVEMLEELGVYKKNEIESIHEIRMESFCTAIEVEFVMMFDMLYEGVLPAISRQMVLEKESMAAISGLDLPEEADLKAFIGKLAKIKAALLKDSEQLVALKSRITDLQPRERAEVIVNEVVPLMKSVREKCDAVELMISLDIWPYPIYRNLPSLSA

SEQ ID NO: 77711 - DNA, 774 bp, Unknown
  Obtained from environmental sample
  misc_feature (1)..(774): n is a, c, g, or t
ttgaaaggcgcggaaattatccgcgcctccagaacttccgtcccgccgccgcgatgcgtatcaggccgctcggcggcctgtttttgcagcaacacgaaagagagatgcaagtccttcttggccagtcccgcctcccgcgtgagttgcgccaaccagacgggcgctccctcggcgctcaggctgaaatggcaccagcgccgcgtgccccgcaagggacagggccgggcatgcgggcaaggccgcgcgggcgcaagacccgaggcaagcgacacatcccgcatgctttgcacaagcttggcccccagacgcgtgccgggttccacacccagaaacgcgccctgcggatgcagcagcttcgccgcctgtcccgcaaacacggccagacgatcctccaacggaacacgtcccgccttcaattcattcagcacattgacggcgctgatcagccagggccgcccgcgcaccgctcgcgccaactcatggacgcccgcgcgcaaggggatgatccgccacgggcttttttcaccggccagacgcgcaaacagcgcgcgcccccattccagcgccccggacgaagcgtccaggcacgccacatccagcggcaactcccgccatcccggcttcgccagccacaaagccagcggcagggtcagcgggccggaaccgatatccagcagcatcgcccgctgtgccgcacttgcaggaggaacaggcagatccaacgcgcccaggagacgaaccagacgcaacagattccaggctcggccgatctga

SEQ ID NO: 77712 - protein, 257 aa, Unknown
  Obtained from environmental sample
  misc_feature (1)..(257): Xaa is any amino acid
MKGAEIIRASRTSVPPPRCVSGRSAACFCSNTKERCKSFLASPASRVSCANQTGAPSALRLKWHQRRVPRKGQGRACGQGRAGARPEASDTSRMLCTSLAPRRVPGSTPRNAPCGCSSFAACPANTARRSSNGTRPAFNSFSTLTALISQGRPRTARANSWTPARKGMIRHGLFSPARRANSARPHSSAPDEASRHATSSGNSRHPGFASHKASGRVSGPEPISSSIARCAALAGGTGRSNAPRRRTRRNRFQARPI

SEQ ID NO: 77713 - DNA, 657 bp, Unknown
  Obtained from environmental sample
  misc_feature (1)..(657): n is a, c, g, or t
gtgcgaggcacgctcccattgcgaccgcctggtggtcggcctcaacagcgacgcctcggtcaagcggctcaaggggccggcgcggccggtgcagggcgaggacgcgcgctcgatcgtgctcgccgggctggcgttcgtggacgccgtcgtgctgtttgccgaggacactccgatcgaactcatccgccgcatccgccccgacatcctcgtcaagggcgccgactaccggctcgagcaggtggtcgggcacgaggtggtcgcggccgcgggcggccgggtcgtgctcgtcaacctggtcccggattcctcgacgacgcgcatcatcgaccgcctcaaggccgatgcactgagagtggcgtgagcggtcgcgatggcgcctgttgccgtgcacataggcggcggcgacgtcgatgcgatgacgaggcaagggcacgagcgccgggcaatcgacggctgtgccacccgtgtccacggcgtgaaccgggtactctcagcccttacacgcggacctctccatccgcggttgcacggaaattttcatccgaaggaaggccatcttcatgcacggcaaaatcgaacggccgcacgccgctgcgggggttggcgcggacaataggatcgttcctctggaagccctgcgcggacttgcggcgctga

SEQ ID NO: 77714 - protein, 218 aa, Unknown
  Obtained from environmental sample
  misc_feature (1)..(218): Xaa is any amino acid
MRGTLPLRPPGGRPQQRRLGQAAQGAGAAGAGRGRALDRARRAGVRGRRRAVCRGHSDRTHPPHPPRHPRQGRRLPARAGGRARGGRGRGRPGRARQPGPGFLDDAHHRPPQGRCTESGVSGRDGACCRAHRRRRRRCDDEARARAPGNRRLCHPCPRREPGTLSPYTRTSPSAVARKFSSEGRPSSCTAKSNGRTPLRGLARTIGSFLWKPCADLRR

SEQ ID NO: 77715 - DNA, 588 bp, Unknown
  Obtained from environmental sample
  misc_feature (1)..(588): n is a, c, g, or t
gtggacacgggtggcacagccgtcgattgcccggcgctcgtgcccttgcctcgtcatcgcatcgacgtcgccgccgcctatgtgcacggcaacaggcgccatcgcgaccgctcacgccactctcagtgcatcggccttgaggcggtcgatgatgcgcgtcgtcgaggaatccgggaccaggttgacgagcacgacccggccgcccgcggccgcgaccacctcgtgcccgaccacctgctcgagccggtagtcggcgcccttgacgaggatgtcggggcggatgcggcggatgagttcgatcggagtgtcctcggcaaacagcacgacggcgtccacgaacgccagcccggcgagcacgatcgagcgcgcgtcctcgccctgcaccggccgcgccggccccttgagccgcttgaccgaggcgtcgctgttgaggccgaccaccaggcggtcgcaatgggagcgtgcctcgcacaggagctggacatggccgggatggaggaggtcgaagcagccgttggtgaagccgaccgagaggccctcgctgcgccagggcgcggacggcgtcggcgatcgcggcgaggtccctga

SEQ ID NO: 77716 - protein, 195 aa, Unknown
  Obtained from environmental sample
  misc_feature (1)..(195): Xaa is any amino acid
MDTGGTAVDCPALVPLPRHRIDVAAAYVHGNRRHRDRSRHSQCIGLEAVDDARRRGIRDQVDEHDPAARGRDHLVPDHLLEPVVGALDEDVGADAADEFDRSVLGKQHDGVHERQPGEHDRARVLALHRPRRPLEPLDRGVAVEADHQAVAMGACLAQELDMAGMEEVEAAVGEADREALAAPGRGRRRRSRRGP

SEQ ID NO: 77717 - DNA, 330 bp, Unknown
  Obtained from environmental sample
  misc_feature (1)..(330): n is a, c, g, or t
gtggtcggcctcaacagcgacgcctcggtcaagcggctcaaggggccggcgcggccggtgcagggcgaggacgcgcgctcgatcgtgctcgccgggctggcgttcgtggacgccgtcgtgctgtttgccgaggacactccgatcgaactcatccgccgcatccgccccgacatcctcgtcaagggcgccgactaccggctcgagcaggtggtcgggcacgaggtggtcgcggccgcgggcggccgggtcgtgctcgtcaacctggtcccggattcctcgacgacgcgcatcatcgaccgcctcaaggccgatgcactgagagtggcgtga

SEQ ID NO: 77718 - protein, 109 aa, Unknown
  Obtained from environmental sample
  misc_feature (1)..(109): Xaa is any amino acid
MVGLNSDASVKRLKGPARPVQGEDARSIVLAGLAFVDAVVLFAEDTPIELIRRIRPDILVKGADYRLEQVVGHEVVAAAGGRVVLVNLVPDSSTTRIIDRLKADALRVA

SEQ ID NO: 77719 - DNA, 504 bp, Unknown
  Obtained from environmental sample
  misc_feature (1)..(504): n is a, c, g, or t
gtgctggtcgcggccccatttcgggctcagggagaaggtcagggacctcgccgcgatcgccgacgccgtccgcgccctggcgcagcgagggcctctcggtcggcttcaccaacggctgcttcgacctcctccatcccggccatgtccagctcctgtgcgaggcacgctcccattgcgaccgcctggtggtcggcctcaacagcgacgcctcggtcaagcggctcaaggggccggcgcggccggtgcagggcgaggacgcgcgctcgatcgtgctcgccgggctggcgttcgtggacgccgtcgtgctgtttgccgaggacactccgatcgaactcatccgccgcatccgccccgacatcctcgtcaagggcgccgactaccggctcgagcaggtggtcgggcacgaggtggtcgcggccgcgggcggccgggtcgtgctcgtcaacctggtcccggattcctcgacgacgcgcatcatcgaccgcctcaaggccgatgcactga

SEQ ID NO: 77720 - protein, 167 aa, Unknown
  Obtained from environmental sample
  misc_feature (1)..(167): Xaa is any amino acid
MLVAAPFRAQGEGQGPRRDRRRRPRPGAARASRSASPTAASTSSIPAMSSSCARHAPIATAWWSASTATPRSSGSRGRRGRCRARTRARSCSPGWRSWTPSCCLPRTLRSNSSAASAPTSSSRAPTTGSSRWSGTRWSRPRAAGSCSSTWSRIPRRRASSTASRPMH

SEQ ID NO: 77721 - DNA, 504 bp, Unknown
  Obtained from environmental sample
  misc_feature (1)..(504): n is a, c, g, or t
gtgtcgcggcgcgcctgcgcggctggtcggacgccgttgcggcggacgcggactgtgcggttccgaaactctaccaacacgttcatttccagctcatcgaagccaggcaacggatcaaatacctggagcagcaactcgagtcccagggatgagcgccgatgcgtgatgtcgggcactccatgtcttcacctgagatgtcttcacctgagatgtcttcacctgagatgtcttcacctgagatgtcttcacctgagatgtcttcacctgagatgtcttcacgtgagatgtcttcacctgagatgtcttcacctgagatgtcttcacctgagatgtcttcacctgagatgtcttcacctgagatgtcttcacccgagatgtcttcattcgagacggttctcgaccagttcgggggcaagcgcgtgctcgtggtcggcgacgtcatgctcgaccggttcgtctacgggcaggtgtcgcggatctcgcccgaggcgccggcgccggtga

SEQ ID NO: 77722 - protein, 167 aa, Unknown
  Obtained from environmental sample
  misc_feature (1)..(167): Xaa is any amino acid
MSRRACAAGRTPLRRTRTVRFRNSTNTFISSSSKPGNGSNTWSSNSSPRDERRCVMSGTPCLHLRCLHLRCLHLRCLHLRCLHLRCLHLRCLHVRCLHLRCLHLRCLHLRCLHLRCLHLRCLHPRCLHSRRFSTSSGASACSWSATSCSTGSSTGRCRGSRPRRRRR

SEQ ID NO: 77723 - DNA, 360 bp, Unknown
  Obtained from environmental sample
  misc_feature (1)..(360): n is a, c, g, or t
atgacgtcgccgaccacgagcacgcgcttgcccccgaactggtcgagaaccgtctcgaatgaagacatctcgggtgaagacatctcaggtgaagacatctcaggtgaagacatctcaggtgaagacatctcaggtgaagacatctcaggtgaagacatctcacgtgaagacatctcaggtgaagacatctcaggtgaagacatctcaggtgaagacatctcaggtgaagacatctcaggtgaagacatctcaggtgaagacatggagtgcccgacatcacgcatcggcgctcatccctgggactcgagttgctgctccaggtatttgatccgttgcctggcttcgatgagctggaaatga

SEQ ID NO: 77724 - protein, 119 aa, Unknown
  Obtained from environmental sample
  misc_feature (1)..(119): Xaa is any amino acid
MTSPTTSTRLPPNWSRTVSNEDISGEDISGEDISGEDISGEDISGEDISGEDISREDISGEDISGEDISGEDISGEDISGEDISGEDMECPTSRIGAHPWDSSCCSRYLIRCLASMSWK

SEQ ID NO: 77725 - DNA, 516 bp, Unknown
  Obtained from environmental sample
  misc_feature (1)..(516): n is a, c, g, or t
atgcgtgatgtcgggcactccatgtcttcacctgagatgtcttcacctgagatgtcttcacctgagatgtcttcacctgagatgtcttcacctgagatgtcttcacctgagatgtcttcacgtgagatgtcttcacctgagatgtcttcacctgagatgtcttcacctgagatgtcttcacctgagatgtcttcacctgagatgtcttcacccgagatgtcttcattcgagacggttctcgaccagttcgggggcaagcgcgtgctcgtggtcggcgacgtcatgctcgaccggttcgtctacgggcaggtgtcgcggatctcgcccgaggcgccggcgccggtgatccgcaccgccggcgccgccgacgccgtcgtcggcggctccggcaacgtggtgcgcaacatcctcagcctgggcgccgcctgccacctcttcgccgtggccgggcgcgacaacccggcgcgggtggtccgcaagcaccttcagagatggaagtccccccccacggggtga

SEQ ID NO: 77726 - protein, 171 aa, Unknown
  Obtained from environmental sample
  misc_feature (1)..(171): Xaa is any amino acid
MRDVGHSMSSPEMSSPEMSSPEMSSPEMSSPEMSSPEMSSREMSSPEMSSPEMSSPEMSSPEMSSPEMSSPEMSSFETVLDQFGGKRVLVVGDVMLDRFVYGQVSRISPEAPAPVIRTAGAADAVVGGSGNVVRNILSLGAACHLFAVAGRDNPARVVRKHLQRWKSPPTG

SEQ ID NO: 77727 - DNA, 525 bp, Unknown
  Obtained from environmental sample
  misc_feature (1)..(525): n is a, c, g, or t
gtgcttgatattatgtgcgctgaaaatggctgtaccgctaaaaaacggtacgactatacggaacttgataaagcgataggtgaatacggcggggtcgagggcagcctcattaccatccttcagaaagggcaggagatttacggctacctgccgcgtgaggtcgttgagtatattgcgcgcgcgctgaggctgaaaaccgcgaaggtatacggcgtcgccacattttacacgcaattccggtttgaaccgatcggcaaatacctgataatgctctgcatggggaccgcttgccatgtcaacggagcgaagatgataggggaagctgtcagcgagcaactcggtatatcggacggtgaaacgacacaggacgggctgttcacactaagtaatgtcgcttgcctcggctgttgcagcctttctccggtcatgatgataaacggggagacatacggctcgctgacaaaggacaaagttaaggacgtgcttgacggcctgaaagccaaagcgcaggaggtaactcagtga

SEQ ID NO: 77728 - protein, 174 aa, Unknown
  Obtained from environmental sample
  DOMAIN (10)...(166): Respiratory-chain NADH dehydrogenase 24 Kd subunit
  misc_feature (1)..(174): Xaa is any amino acid
MLDIMCAENGCTAKKRYDYTELDKAIGEYGGVEGSLITILQKGQEIYGYLPREVVEYIARALRLKTAKVYGVATFYTQFRFEPIGKYLIMLCMGTACHVNGAKMIGEAVSEQLGISDGETTQDGLFTLSNVACLGCCSLSPVMMINGETYGSLTKDKVKDVLDGLKAKAQEVTQ

SEQ ID NO: 77729 - DNA, 381 bp, Unknown
  Obtained from environmental sample
  misc_feature (1)..(381): n is a, c, g, or t
gtgaggatacttgtaggacaaggaagctgcggcaacgcggcgggggcaaacaaagtttacgacgcgctggaagcggccctgcgtgaaaacggcatcgacgccaaattgttaagcacaggctgtatcggcgcgtgctatcttgagccgatcgtcgaggtgattggcgatggcggcgagagacatacgtatgtgaaagtgaacgccgatgccgtgngcgagattgttaaaaaacacctggtgggcggatcgccggtcgaatatctgctcatgccgcccgaggacatcaagtcgattgagcggccaacgaagatcgcgctgcgaaattgcggtgtcatcaatcccgaggatatctccgaatacatcgccggcggcggggtatga

SEQ ID NO: 77730 - protein, 126 aa, Unknown
  Obtained from environmental sample
  misc_feature (1)..(126): Xaa is any amino acid
MRILVGQGSCGNAAGANKVYDALEAALRENGIDAKLLSTGCIGACYLEPIVEVIGDGGERHTYVKVNADAVXEIVKKHLVGGSPVEYLLMPPEDIKSIERPTKIALRNCGVINPEDISEYIAGGGV

SEQ ID NO: 77731 - DNA, 375 bp, Unknown
  Obtained from environmental sample
  misc_feature (1)..(375): n is a, c, g, or t
atgaaaattattacgagtttgctggatactgactggtacaaaataaccatgaaccgcgtattcttttacaggttcagcgacgtaatcggggaatacgcttttatatgccgtactcccggcgtanaatttacccgcgaaatggtaagcagcgtcagggaacaaatcgaccaattatgcgatctccgcttcaccgaagacgagatagattttattaaatccgtcccttacatgaaaaacgccgtaggctatttggagtttctcaagctgttcaggctttaccgtgattttattcaaataagcgaattagaccttgacaattcttgcgggctttctatacgcgcaaaaagaccgctgtgggcggtttccccgttttga

SEQ ID NO: 77732 - protein, 124 aa, Unknown
  Obtained from environmental sample
  misc_feature (1)..(124): Xaa is any amino acid
MKIITSLLDTDWYKITMNRVFFYRFSDVIGEYAFICRTPGVXFTREMVSSVREQIDQLCDLRFTEDEIDFIKSVPYMKNAVGYLEFLKLFRLYRDFIQISELDLDNSCGLSIRAKRPLWAVSPF

SEQ ID NO: 77733 - DNA, 768 bp, Unknown
  Obtained from environmental sample
  misc_feature (1)..(768): n is a, c, g, or t
ttgcgctggtcggccgtggctggagtggtgggccgggcccctcagcccgcctcgccctggaccacggctccggcccgtccggcgccgatccccccgccccgaccctcctggctggacgaagcgccgccctccccgcccgccggggaaatcccggccgcgccacccagcccgccggccgaacaggcgaggtctgaacaggcgagccccgaacccgcccccgccgccgggccgaatttcgagcccctccggcccctggcccaactctaccacagctatatcctggccgaaggcgcccggggcctctacctggtggaccagcacgccgcccacgagcgcctgttgttcaacaagctcaagcgggacttggcccggaccggcctgcccagccaggccctcctcttgcccgaacccctggaactcccgccccgggaggcccgcgccgcggaaaaactgcgcccccacctggcccgcctgggatttgaactggaacccttcggcgaaggcggtgattttctcttgcgtggcgtgccggccatattgggccgcgaagacccgcggccacccctcatggaaatcctgggggccggccagagccaactggccgccctggacggcgcggggctacgggaagccctggcggccctggccgacagctggctctacagcctggcctgccgggccgccctcaaagccggggaaaaaatgagccctggaagccatggtcaggctgcgggacgacatggcccaagaaccccacggggcttatga

SEQ ID NO: 77734 - protein, 255 aa, Unknown
  Obtained from environmental sample
  misc_feature (1)..(255): Xaa is any amino acid
MRWSAVAGVVGRAPQPASPWTTAPARPAPIPPPRPSWLDEAPPSPPAGEIPAAPPSPPAEQARSEQASPEPAPAAGPNFEPLRPLAQLYHSYILAEGARGLYLVDQHAAHERLLFNKLKRDLARTGLPSQALLLPEPLELPPREARAAEKLRPHLARLGFELEPFGEGGDFLLRGVPAILGREDPRPPLMEILGAGQSQLAALDGAGLREALAALADSWLYSLACRAALKAGEKMSPGSHGQAAGRHGPRTPRGL

SEQ ID NO: 77735 - DNA, 660 bp, Unknown
  Obtained from environmental sample
  misc_feature (1)..(660): n is a, c, g, or t
gtgcccgtcgccgctgaccgtcgcgactccggagttgctggtggcccagacgacgtccttgatggtggcgtcggcgggggagacggtggcgtacagctcgccggtggcgcccccggcctccagggacatctcggatctgttcagcgcgacgcccgtgacgtggatggtctccagcgcgacggcgacggcgcatgtggccttcttgctgccgtccagcgcggcggccgttatggtggcgctccccaggtcaagcgccgtgacgcggccgtcctgggatacggacgcgacttcgggggcgctgctggaccattcgatgcccttgttggacgcgttggccggccagacagtagccaccagggtctcgctgtagcccctcaccaacgacaggacccgcctgttcagcgtcacgtccgtgacgcccgcggtgaccgtcgcggtgcagctggccgccctgccgccgtcgagcgtcctggcggttatcactgctgtcccggccgccacggccgtgacctggccgctggcggagacggtggcgacgccgggggcgctgctgcgccattcgacgtccttgttggtggcgttgccgggctcgacggtgggctggagcgtctcggagcccgccgtctggacccggcaccaggcgacgagtcttctccataa

SEQ ID NO: 77736 - protein, 219 aa, Unknown
  Obtained from environmental sample
  misc_feature (1)..(219): Xaa is any amino acid
MPVAADRRDSGVAGGPDDVLDGGVGGGDGGVQLAGGAPGLQGHLGSVQRDARDVDGLQRDGDGACGLLAAVQRGGRYGGAPQVKRRDAAVLGYGRDFGGAAGPFDALVGRVGRPDSSHQGLAVAPHQRQDPPVQRHVRDARGDRRGAAGRPAAVERPGGYHCCPGRHGRDLAAGGDGGDAGGAAAPFDVLVGGVAGLDGGLERLGARRLDPAPGDESSP

SEQ ID NO: 77737 - DNA, 804 bp, Unknown
  Obtained from environmental sample
  misc_feature (1)..(804): n is a, c, g, or t
gtggcggccgggacagcagtgataaccgccaggacgctcgacggcggcagggcggccagctgcaccgcgacggtcaccgcgggcgtcacggacgtgacgctgaacaggcgggtcctgtcgttggtgaggggctacagcgagaccctggtggctactgtctggccggccaacgcgtccaacaagggcatcgaatggtccagcagcgcccccgaagtcgcgtccgtatcccaggacggccgcgtcacggcgcttgacctggggagcgccaccataacggccgccgcgctggacggcagcaagaaggccacatgcgccgtcgccgtcgcgctggagaccatccacgtcacgggcgtcgcgctgaacagatccgagatgtccctggaggccgggggcgccaccggcgagctgtacgccaccgtctcccccgccgacgccaccatcaaggacgtcgtctgggccaccagcaactccggagtcgcgacggtcagcggcgacgggcacggggcggttgtgacgcccctgagcaacggggtggccctaatatccgtcaccaccgtgagcaacggcaggtctgccgtatgcacggtcagggtcaccggcccggtggcggtgacgggcgtggcgctcaacaagacgaccaacaccctcgggataggcgtcggcgagacgctggtggccaccgtcaggccatcgacggccaccaaccagaacgtaacatgggcaagcagcgcgcccacgatcgcgtccgtcacccanganggccgcgtcacgggcctggcggccggcagcgccacatcacggtga

SEQ ID NO: 77738 - protein, 267 aa, Unknown
  Obtained from environmental sample
  DOMAIN (203)...(267): Bacterial Ig-like domain (group 2)
  misc_feature (1)..(267): Xaa is any amino acid
MAAGTAVITARTLDGGRAASCTATVTAGVTDVTLNRRVLSLVRGYSETLVATVWPANASNKGIEWSSSAPEVASVSQDGRVTALDLGSATITAAALDGSKKATCAVAVALETIHVTGVALNRSEMSLEAGGATGELYATVSPADATIKDVVWATSNSGVATVSGDGHGAVVTPLSNGVALISVTTVSNGRSAVCTVRVTGPVAVTGVALNKTTNTLGIGVGETLVATVRPSTATNQNVTWASSAPTIASVTXXGRVTGLAAGSATSR

SEQ ID NO: 77739 - DNA, 699 bp, Unknown
  Obtained from environmental sample
  misc_feature (1)..(699): n is a, c, g, or t
gtgcccgtgagccgccctgtcccgtgtcaccgtgatgtggcgctgccggccgccaggcccgtgacgcggccntcntgggtgacggacgcgatcgtgggcgcgctgcttgcccatgttacgttctggttggtggccgtcgatggcctgacggtggccaccagcgtctcgccgacgcctatcccgagggtgttggtcgtcttgttgagcgccacgcccgtcaccgccaccgggccggtgaccctgaccgtgcatacggcagacctgccgttgctcacggtggtgacggatattagggccaccccgttgctcaggggcgtcacaaccgccccgtgcccgtcgccgctgaccgtcgcgactccggagttgctggtggcccagacgacgtccttgatggtggcgtcggcgggggagacggtggcgtacagctcgccggtggcgcccccggcctccagggacatctcggatctgttcagcgcgacgcccgtgacgtggatggtctccagcgcgacggcgacggcgcatgtggccttcttgctgccgtccagcgcggcggccgttatggtggcgctccccaggtcaagcgccgtgacgcggccgtcctgggatacggacgcgacttcgggggcgctgctggaccattcgatgcccttgttggacgcgttggccggccagacagtagccaccagggtctcgctgtag

SEQ ID NO: 77740 - protein, 232 aa, Unknown
  Obtained from environmental sample
  misc_feature (1)..(232): Xaa is any amino acid
MPVSRPVPCHRDVALPAARPVTRPSWVTDAIVGALLAHVTFWLVAVDGLTVATSVSPTPIPRVLVVLLSATPVTATGPVTLTVHTADLPLLTVVTDIRATPLLRGVTTAPCPSPLTVATPELLVAQTTSLMVASAGETVAYSSPVAPPASRDISDLFSATPVTWMVSSATATAHVAFLLPSSAAAVMVALPRSSAVTRPSWDTDATSGALLDHSMPLLDALAGQTVATRVSL

SEQ ID NO: 77741 - DNA, 603 bp, Unknown
  Obtained from environmental sample
  misc_feature (1)..(603): n is a, c, g, or t
gtggggcaagtcgtcaatctcacctcactgggcaatgatgtgggggcatccgccacaaccatcagacactggctctccgttctgaaggcgtcctatgtggtgtttgaactgcccccgtttttcgcaaatgtgcagaaacggctgatcagggcgcccaaaatatatttcaccgatgtcggtcttgccgccttcctgctcggtatccatacgcccgagcaggccgcacgcgatcctttgcggggaaatctctacgaaaacatggtcatcatcgatatcctgaaaggcgctctgaaccgcggcatcaggccggatgtctcttttttccgggattcccacggcaatgaagtggatttgctcatccgcgaacaaggtgcgctcatgccggtcgagatcaagtccgccgcgaccttttccgctgatttcatcaaacagcttgagcgctttcacacgctggacctcaaaggagtcccgcccggcgcggtgctttgcaacagcgaacgcccgtttaccgttcggggcatcaaagtgcttaatcccttccatgtggaagatatttggcacatgcttaccaccgccgccgacgcacgggacacgccccggtaa

SEQ ID NO: 77742 - protein, 200 aa, Unknown
  Obtained from environmental sample
  misc_feature (1)..(200): Xaa is any amino acid
MGQVVNLTSLGNDVGASATTIRHWLSVLKASYVVFELPPFFANVQKRLIRAPKIYFTDVGLAAFLLGIHTPEQAARDPLRGNLYENMVIIDILKGALNRGIRPDVSFFRDSHGNEVDLLIREQGALMPVEIKSAATFSADFIKQLERFHTLDLKGVPPGAVLCNSERPFTVRGIKVLNPFHVEDIWHMLTTAADARDTPR

SEQ ID NO: 77743 - DNA, 660 bp, Unknown
  Obtained from environmental sample
  misc_feature (1)..(660): n is a, c, g, or t
gtgggaatggcctttggcatagacggcttcaagggcgaggagatgccctgggacgtgattccagacattctggggctggagaggatgctgatgaccgacctacccgatggagcaacgggcaaactgagcctgccctccgaccgcatctcagccatagcctcccgcagcggcagcaagctcagaatagaagacttggtggcctgccacaaaaaggccaacggtcacaagacagagttccagttgtggcaggagtcggacggcactaggaggctgatagacctgctgcctgcctttctctggaacacagccctaggcaccagaaattcctttgtcatagacgaccttggcaaggacttgaccgcgcaggtggcccgtaagctgctgcaactgttcctttcgcactgctcaaaggaaagcaggtcccagttgctgttcaccacccgcgatgtgctgctgatggaccagtccctgctgggcaccgaggaaatgtgggtcatggaaaaacgcgacaacggcgaatccgagctgcagtccatgctggtttacgatgacattgcgcccagccgtgccaaagaccagttcccgcccagccatctcggtgtgcccgattcactgctggacttagccttcggcaagacggcggacggggtagaccactag

SEQ ID NO: 77744 - protein, 219 aa, Unknown
  Obtained from environmental sample
  misc_feature (1)..(219): Xaa is any amino acid
MGMAFGIDGFKGEEMPWDVIPDILGLERMLMTDLPDGATGKLSLPSDRISAIASRSGSKLRIEDLVACHKKANGHKTEFQLWQESDGTRRLIDLLPAFLWNTALGTRNSFVIDDLGKDLTAQVARKLLQLFLSHCSKESRSQLLFTTRDVLLMDQSLLGTEEMWVMEKRDNGESELQSMLVYDDIAPSRAKDQFPPSHLGVPDSLLDLAFGKTADGVDH

SEQ ID NO: 77745 - DNA, 696 bp, Unknown
  Obtained from environmental sample
  misc_feature (1)..(696): n is a, c, g, or t
ttgcccacacaggcggcaaacaaacatgtgtcttggcgcagcagcgaccncagtgtggcggtggtgtcntgcgatggccctaatgggcaatatggcttggtgaggggcgtcggcgacggcaatgccaagataacggtgcgcagcagcgatggtggattcgaggcgcactgcagcattactgtaatggttttagccactggcgtttctctcaataaatactcaaccacgctaagcgctggaagcagcgaaaccttggtcgcaacagtgctaccaaatagtgccacaaacaaaaatgtgtcttggagcagtggcgacccaaacgtggtaagcgtggacaacgatggccacgtaacagcaaaacgtcctggcagggcgataattgctatcactgcgctggacggcagcaatgcgtctgcgcaagcaacaatcacagtcgagccaggcgcacctagcatgcaggcatcggcagccgaggtagctaggccaaagaaagacggcgaggaagggccaaggaaagaagatgatgcgagaagcctggaggcggccactgccaaagccaccgtcaataggctggagccaaattttaaggttaggcaagacaacatctcatggagcaacaatgtgttggcatcgcatgccgcttctgaagaaagcagcggtttcccgtggcgcaaagcaagaatcaggcttccttga

SEQ ID NO: 77746 - protein, 231 aa, Unknown
  Obtained from environmental sample
  DOMAIN (64)...(143): Bacterial Ig-like domain (group 2)
  misc_feature (1)..(231): Xaa is any amino acid
MPTQAANKHVSWRSSDXSVAVVSCDGPNGQYGLVRGVGDGNAKITVRSSDGGFEAHCSITVMVLATGVSLNKYSTTLSAGSSETLVATVLPNSATNKNVSWSSGDPNVVSVDNDGHVTAKRPGRAIIAITALDGSNASAQATITVEPGAPSMQASAAEVARPKKDGEEGPRKEDDARSLEAATAKATVNRLEPNFKVRQDNISWSNNVLASHAASEESSGFPWRKARIRLP

SEQ ID NO: 77747 - DNA, 756 bp, Unknown
  Obtained from environmental sample
  misc_feature (1)..(756): n is a, c, g, or t
atgaggggagacgcgcaggatgtaaaccttaagaaattctcggtaaaaataggcaacgacaatgaagtggaccgcgcgataccgtatgcgctgactgatggccttacaatcggcgccaccagtgaacttgccaacaacgtcctgaagtctgaatggtcatactcgctcgacgcaacgaagtttaaatcctcgtcgtttgttgagggagaaaacaccataaccattaccggctgggatgccaataagtcaaacccggtatcgtttaagtttatcagggatactcaaccgcccaatataacgctctccaacattgagtcaaacggaaccaccatactgtcagactccgccgcgaagatacagattgtagtgagcgacgtgacttcaaatctgggtcagacgaaatccggagccaattaccaatatagatacgtgattaacaagaaaggcagcagcaccaatacgtattataccgcgaatgtgtcgggagatgagaccaaaaactggactctcagcattccgctgaatcagaccagtcccgccggctggtggactggtgaattagtcgacggcgaatattggatacaagtcgaagtacttgaccgcgtgggcaacaagcgggaaaccgcccaggttccgtttaccgtagaccggaaagacccggtgctgacgatagatccggcggtcgccgacaatatcatccgcggcagcgcattctcgctgacgggaaaaatgttgaaggaaacctcgacagactga

SEQ ID NO: 77748 - protein, 251 aa, Unknown
  Obtained from environmental sample
  misc_feature (1)..(251): Xaa is any amino acid
MRGDAQDVNLKKFSVKIGNDNEVDRAIPYALTDGLTIGATSELANNVLKSEWSYSLDATKFKSSSFVEGENTITITGWDANKSNPVSFKFIRDTQPPNITLSNIESNGTTILSDSAAKIQIVVSDVTSNLGQTKSGANYQYRYVINKKGSSTNTYYTANVSGDETKNWTLSIPLNQTSPAGWWTGELVDGEYWIQVEVLDRVGNKRETAQVPFTVDRKDPVLTIDPAVADNIIRGSAFSLTGKMLKETSTD

SEQ ID NO: 77749 - DNA, 885 bp, Unknown
  Obtained from environmental sample
  misc_feature (1)..(885): n is a, c, g, or t
atgctgatagagcttctgcccgacaacatgagcaaaatcttttttaccatcggcggcgcggacgcaaacgaaaacgcgttgaaaatggcgcgtatgtacacgggacggtacaaagttttttcacgttaccgcagttaccacggctcaacattcggcgcgggcaacctgacgggcgaaccgcgcagatatccgttagagccgggcatacccggttttgtaaaattttttgatccgtacatctaccgcgaacctatacagtttaaatcggagagcgaagcgtcctgctattacttggaaaaactgcgcgaacaaattgtttatgaaaacgcgtcaagcgttgcggcaatcgtacttgaaaccgtcacgggttctaacggtatcatcattccgccggaaggctacctcgaaggcgtgcgtaaaatctgcgacgaatacggcataataatgatttgtgacgaggtcatgacaggattcggcaggacaggtaaaatgttcgggtttgaaaatttcggaatcaagccggacatggtgacattcgcaaagggagttacatgcggctatatacagcttggcggagtggcggtatcaaaaaaaatcgccgcgtattttgacgataatttcctgtcatgcgggcttacgtacagcgggcatccgcttgcgtgcgccgccggggttgtgtgtgtggaatattacactaaacataaaatcctggataatgtaaatcaaggctccgcggttttaaaatccattctggaaaaactgaaagaaaaacacctctgcgtaggcgacgtgcggtgtatcgggctgttcgctggcgtagaattagtcaaggacaaaaaaacaaaggagcccatgttccctacggggcggatccgaaaggagtaa

SEQ ID NO: 77750 - protein, 294 aa, Unknown
  Obtained from environmental sample
  DOMAIN (1)...(277): Aminotransferase class-III
  misc_feature (1)..(294): Xaa is any amino acid
MLIELLPDNMSKIFFTIGGADANENALKMARMYTGRYKVFSRYRSYHGSTFGAGNLTGEPRRYPLEPGIPGFVKFFDPYIYREPIQFKSESEASCYYLEKLREQIVYENASSVAAIVLETVTGSNGIIIPPEGYLEGVRKICDEYGIIMICDEVMTGFGRTGKMFGFENFGIKPDMVTFAKGVTCGYIQLGGVAVSKKIAAYFDDNFLSCGLTYSGHPLACAAGVVCVEYYTKHKILDNVNQGSAVLKSILEKLKEKHLCVGDVRCIGLFAGVELVKDKKTKEPMFPTGRIRKE

SEQ ID NO: 77751 - DNA, 759 bp, Unknown
  Obtained from environmental sample
  misc_feature (1)..(759): n is a, c, g, or t
atgatggccnggnagctgagtttttggaaaagtccacagcatcgcctaccgcgtccgaaggaacaatgtttggatttgccggagacggtaagcgtggttcgcacggtcgatttagagccgaacgccgcgaaactgtaccgcgctctcgccaaagactgcgtcgccgagttgagcggcaaggaggtcagcgttacgaacgtactgaccaagctgctccggctcacgcagttaacgggcggctacatcaccgatgacgacggcaacacgagcaaggtgtcctcggcgaagatggacgcgctgtcggacatcgtggatgaggccgtgaacgacggacgcaaaaccgtaatcatcgcccgcttcacgccggaggtcgatgcgatatgccaaatgctcgaaaagcaaggaatcaaatattcccgtatggacgggagcgtgaaagaccgcgccgagcaagtcgctcgattccaaaacgacgcggatgtgatggcgtttgtcgggcaaatacaggtcgcgggcataggtctcacgctcaccgcaagcagcttaatggtgctgtattccttggatttcagcgtagcgaaccatgaacaggcgcttgccagaattcaccgggcggggcagacgcaaccgtgtacctattactatttgcaggcgcgaaacaccgttgacggcaagattctcgcggctctgcgcgataaagccgacttcgccaagcgaatggtggatgacttccgaaacgggctgaacccgctcggataa

SEQ ID NO: 77752 - protein, 252 aa, Unknown
  Obtained from environmental sample
  DOMAIN (130)...(206): Helicase conserved C-terminal domain
  misc_feature (1)..(252): Xaa is any amino acid
MMAXXLSFWKSPQHRLPRPKEQCLDLPETVSVVRTVDLEPNAAKLYRALAKDCVAELSGKEVSVTNVLTKLLRLTQLTGGYITDDDGNTSKVSSAKMDALSDIVDEAVNDGRKTVIIARFTPEVDAICQMLEKQGIKYSRMDGSVKDRAEQVARFQNDADVMAFVGQIQVAGIGLTLTASSLMVLYSLDFSVANHEQALARIHRAGQTQPCTYYYLQARNTVDGKILAALRDKADFAKRMVDDFRNGLNPLG

SEQ ID NO: 77753 - DNA, 903 bp, Unknown
  Obtained from environmental sample
  misc_feature (1)..(903): n is a, c, g, or t
ttgcttaggtctgaagatccgaacgcttatgtactaaaaatgatagactacgccaattcaatgggcgtagtctataacgatacattaccgttaacgtatgaatatcctttcgaatatacattcgatacaggtctcgaacaaaaaacggcggctcagacgcaaatcgagaagtatttgaagcattttaagcttgatccggatattaccggtttagaattgataacatttttccgcgatcattatgcaatagaaaaagcatataccgacgagcaagttcgggtcgtctccggagtgcgatacgagctagaaacgcgcgttttattttcatattctgtttattattttaccgaagacgtaaaaccagattatttagtgttattacaagaacaacagtttcccggtatttcgcttgttccggtaacgataccggaatactatacaacctacgcggcgcacttactgggacgcgtgggtcctatggacgcctcagaatacgagaaatataaagaattaggttacccgtataacgcgtacgttggtaaggacggattagaagcggcatttgaatatgaattgcatggttcggacggtttacgtacggttactcgtaatataaacggcacaatacttgacgtttattataataatgaaactaaacctggtaataacatacgtttaactatcgatatcgaattacagcanatagccgaacagagcttaaaagacacgataaataatataaacgacgaacgcataaaaaaagcggtcgaaaagggaaaaccgcttgattctatacaattagccgtaggcggttcgacggtagttatccatgtaccaaccggcgaggtattagcagcgcaagtacccgacatacgacattcgcacgatgtcaaggggatatag

SEQ ID NO: 77754 - protein, 300 aa, Unknown
  Obtained from environmental sample
  DOMAIN (13)...(214): Penicillin-binding Protein dimerisation domain
  misc_feature (1)..(300): Xaa is any amino acid
MLRSEDPNAYVLKMIDYANSMGVVYNDTLPLTYEYPFEYTFDTGLEQKTAAQTQIEKYLKHFKLDPDITGLELITFFRDHYAIEKAYTDEQVRVVSGVRYELETRVLFSYSVYYFTEDVKPDYLVLLQEQQFPGISLVPVTIPEYYTTYAAHLLGRVGPMDASEYEKYKELGYPYNAYVGKDGLEAAFEYELHGSDGLRTVTRNINGTILDVYYNNETKPGNNIRLTIDIELQXIAEQSLKDTINNINDERIKKAVEKGKPLDSIQLAVGGSTVVIHVPTGEVLAAQVPDIRHSHDVKGI

SEQ ID NO: 77755 - DNA, 474 bp, Unknown
  Obtained from environmental sample
  misc_feature (1)..(474): n is a, c, g, or t
ttggtacaacgaatcccgattcaggaaagcggcgctgaactggtactggtaaaccttcacctggaggcatatgactctggcggcgcgggccgtattgcccaaacacgcgttttggccgaattcctgaaagcagagtacgcgaaaggcaactattgtgttgccggtggggattttaaccaggtctttcctgcatttaaagacgtgtttcccattcaacaaagtgagttttttactcccggcatagtcgacgattcgctctttggagaaggatggatcctggcagccgatccttcatctccaagctgccgatccctggacagaccctacaccggcaaccgggaaaacttccaattttatatcatcgacggttttattctctcccccaatgtggagctaatttcggttaaaacccaggatttggactttcaaaattccgaccataatccggtaaaattgacgttcagcctgaagtaa

SEQ ID NO: 77756 - protein, 157 aa, Unknown
  Obtained from environmental sample
  misc_feature (1)..(157): Xaa is any amino acid
MVQRIPIQESGAELVLVNLHLEAYDSGGAGRIAQTRVLAEFLKAEYAKGNYCVAGGDFNQVFPAFKDVFPIQQSEFFTPGIVDDSLFGEGWILAADPSSPSCRSLDRPYTGNRENFQFYIIDGFILSPNVELISVKTQDLDFQNSDHNPVKLTFSLK

SEQ ID NO: 77757 - DNA, 864 bp, Unknown
  Obtained from environmental sample
  misc_feature (1)..(864): n is a, c, g, or t
atgtatgaaaaaaccacccgctttttcaagctggtaagggattttttgacggtatatctgcccgatcaaaaggcggcaagcgccaataccgtcaggtcttaccgtgaatcccttaacctgttgttaaactacatttgttacagaaacaagattagccttggaaaactttgctttgaatatttgtctagggaggcggtcgagggtttcctggattatctggaaaaatcacggcaatgcggcgttcccacgcgtaatcatcggcttgcatgtatcagatcgtttgttaagtacgctggcgccagggatgtcggcgttcaagcattcgctaatgatttgtgtggtatccctgcaaaaaaggaaagaaagaatactgttgtttcatatttcagtgaaacagcattgaaaaccattcttgaacagccggataccggaaagaaaaaagaactgagaaacttgttttttatgatcctgttatatgattccggagggcgaaaccaggaattgcttgatctcaggctgagcgatattcattccgaaggaaagtccccctacatttctattaccggaaaaggaagtaaaacccgtttagtgccgctcatgcttaaaactgtcgagcattttaaaaggtacgccgctgtttttcactccgaaccgatttccggcaaccgtcttttttatactgaacggaacggaaaacgatatgctatgtcgccggataacacggaaagatttatcagaaaatacgctgtcgccgctcatagtgttaaccctgaagtgccgaagtcgctgcatccccatatgtttcggcacagccgtagcatgcactgtatgaagcggtatgccctcggccgatctgatacttga

SEQ ID NO: 77758 - protein, 287 aa, Unknown
  Obtained from environmental sample
  DOMAIN (137)...(285): Phage integrase family
  misc_feature (1)..(287): Xaa is any amino acid
MYEKTTRFFKLVRDFLTVYLPDQKAASANTVRSYRESLNLLLNYICYRNKISLGKLCFEYLSREAVEGFLDYLEKSRQCGVPTRNHRLACIRSFVKYAGARDVGVQAFANDLCGIPAKKERKNTVVSYFSETALKTILEQPDTGKKKELRNLFFMILLYDSGGRNQELLDLRLSDIHSEGKSPYISITGKGSKTRLVPLMLKTVEHFKRYAAVFHSEPISGNRLFYTERNGKRYAMSPDNTERFIRKYAVAAHSVNPEVPKSLHPHMFRHSRSMHCMKRYALGRSDT

SEQ ID NO: 77759 - DNA, 930 bp, Unknown
  Obtained from environmental sample
  misc_feature (1)..(930): n is a, c, g, or t
gtgcaaatgagcggatccgcggatccggttccattttccgggctgtccgactgggaatccaaccttggcgcggttacggaacctgctggttccgaccaaatgtatgctgaggaaataacgagtttttatcctcccgaagctataattgcggaaaccccgatccccgaatatttagtccccgaatctacggctcgtgaaaccgtttctacggctgctgaaccggtcatcgaaaggcaaagggtccccagtatcctcggaacttttgagagcccaaaggattcagaatcccagcctacatttatacctgaaattctgccggatcctatcgatccatcggttgcaatggctccgatttattctgaagcgccaaagaaccctgtggaaccggcgggatcatcaatagccgcggttaaaagaaatgaacctgtagctgttgctccttcttatattgaaaatcctgaagcctatgattatgaacttttctctgctgaagaacggccccccgcggcaagcggccctgttatcgatcctgagtatataatagcccaggtaaatccgccggctgctgctcccagaaacgatacggttcgccctgagaatgtaatcgcgccgatagccacaccgccggcccggaacgataccattcgccctcaggatacaatccccccggtgaatcccccggctccttcaaggaatgaaacaattcgccccgaggaaatgatagcctcatacgcgccgccggcccggaatgaaacgattcgtcctcaggatacaattcccccggtgaatcccccggctcctcccaggaacgaaatcatccgccccgaggaaatgatagccccatacgcgccgcccggcccggaacgaaacgattcgtcctcaggatacaaatccccccatatagttccagctctttctctgagccggtaa

SEQ ID NO: 77760 - protein, 309 aa, Unknown
  Obtained from environmental sample
  misc_feature (1)..(309): Xaa is any amino acid
MQMSGSADPVPFSGLSDWESNLGAVTEPAGSDQMYAEEITSFYPPEAIIAETPIPEYLVPESTARETVSTAAEPVIERQRVPSILGTFESPKDSESQPTFIPEILPDPIDPSVAMAPIYSEAPKNPVEPAGSSIAAVKRNEPVAVAPSYIENPEAYDYELFSAEERPPAASGPVIDPEYIIAQVNPPAAAPRNDTVRPENVIAPIATPPARNDTIRPQDTIPPVNPPAPSRNETIRPEEMIASYAPPARNETIRPQDTIPPVNPPAPPRNEIIRPEEMIAPYAPPGPERNDSSSGYKSPHIVPALSLSR

SEQ ID NO: 77761 - DNA, 429 bp, Unknown
  Obtained from environmental sample
  misc_feature (1)..(429): n is a, c, g, or t
gtgcggatcccattccaaagaatctacttttatggctacattggtacacaagctgacaagacaattaaagcggtggaagtatttatggatctgctgcaaaatatgcctgagtattcagaacgtacagaaaacataaaaaactacttgatacaagtcggctatatgtcgcgccccgcattcagagatgcgagcggcacatacgctgcgtggaggctgcgcggctacacgcagtcgcccgctcaggaaaatatgccggcttacgagcagctgacgtttgacaatatcaaaaactactacgagaagtacatcaaaggacgtaaggtagccattggcattgtgggcaatccgcagcaggtaaatttaaagcagctggaaaaatacggacgagttgaacgaatttcacctgcaaaggtgttctctaaaaaataa

SEQ ID NO: 77762 - protein, 142 aa, Unknown
  Obtained from environmental sample
  misc_feature (1)..(142): Xaa is any amino acid
MRIPFQRIYFYGYIGTQADKTIKAVEVFMDLLQNMPEYSERTENIKNYLIQVGYMSRPAFRDASGTYAAWRLRGYTQSPAQENMPAYEQLTFDNIKNYYEKYIKGRKVAIGIVGNPQQVNLKQLEKYGRVERISPAKVFSKK

SEQ ID NO: 77763 - DNA, 624 bp, Unknown
  Obtained from environmental sample
  misc_feature (1)..(624): n is a, c, g, or t
gtgtccttcatctgccgggcctgctcccgcatgacggcgttaagccgcgcggctcccgcctcgttcaggtttttgaacagcgcctccgcctgcgccgcggtaaggttggccttgtgggcggcctccgcgaacaccgcgccgtcgctctccttgtctttggcgaaagagtatccgtccgccgttttgggccgcccggctttttcccagaacgccgcgacctcttcgggcttcgcgtcctttccgggaatacctccggaagccgcctttgtatccagctccaggaacgcctttgccatgtcgcccaccttctggtatttcgcaagcttcgccgcagactcgggattgttcttcatctccggcggcagctggtcgcaccatgcggcaagctcgatcttctcgcttccggcttgttttccccccgcggccgcgtcccctgtagcgggtttggcgtcgggcttctttccttcagcgccggcagcgcctccgaaggcgttcgctagtgattcttcagcgttaacgggcgccggcatcccgccctccgccgaaccgacagcggcgcctgccgccgcttcctgcttaccctcgttctcaaggtttggcataattatttccctcccccggtaa

SEQ ID NO: 77764 - protein, 207 aa, Unknown
  Obtained from environmental sample
  SIGNAL (1)...(30)
  misc_feature (1)..(207): Xaa is any amino acid
MSFICRACSRMTALSRAAPASFRFLNSASACAAVRLALWAASANTAPSLSLSLAKEYPSAVLGRPAFSQNAATSSGFASFPGIPPEAAFVSSSRNAFAMSPTFWYFASFAADSGLFFISGGSWSHHAASSIFSLPACFPPAAASPVAGLASGFFPSAPAAPPKAFASDSSALTGAGIPPSAEPTAAPAAASCLPSFSRFGIIISLPR

SEQ ID NO: 77765 - DNA, 777 bp, Unknown
  Obtained from environmental sample
  misc_feature (1)..(777): n is a, c, g, or t
gtgattatccccatggacaggcagatcctggaggtaattcctctgcattatattgtggatgatcaacggaggattcgggatcctctggatatgataggcgtgcggttggaagcggaagtacatatcatcacctgttcaggtacgggagctcaaaatattggaaaatgcatacagcgcgcgggatttggggtcaataacctgattttccaatccctggctaccgcgcgcgccgtattaacacccgatgagaaggaatccggggtggttcttattgatctgggaggcggcactaccgatatgctggcatactctgagggcactccttactccgccgctaccattgccgcgggaggcgctcaggttaccaatgatatttccattcttaagaatattaattttgaaatggcggaaaaaataaagttagaggcaggctgctgctgggagccctttctggaaggcgacgatgacattatcgtcccgggagtagggggaaggcctcctgtagctattccaaaatctcagattctggagatcatcaagcccagaatggaagaaatttttaagatggtaaaagaaaagctaaataaactcggccataatcggccgttgggaggcgggattgtaattaccggagggggatcccagcttctgggggcggtagaattggcgtcggaaattttcggccttcctgtacggatggggatgccgctgcctgtcggaggcttagtggaagaataccggaaccccgcctatgccacggccctggggctggtatag

SEQ ID NO: 77766 - protein, 258 aa, Unknown
  Obtained from environmental sample
  DOMAIN (88)...(257): Cell division protein FtsA
  misc_feature (1)..(258): Xaa is any amino acid
MIIPMDRQILEVIPLHYIVDDQRRIRDPLDMIGVRLEAEVHIITCSGTGAQNIGKCIQRAGFGVNNLIFQSLATARAVLTPDEKESGVVLIDLGGGTTDMLAYSEGTPYSAATIAAGGAQVTNDISILKNINFEMAEKIKLEAGCCWEPFLEGDDDIIVPGVGGRPPVAIPKSQILEIIKPRMEEIFKMVKEKLNKLGHNRPLGGGIVITGGGSQLLGAVELASEIFGLPVRMGMPLPVGGLVEEYRNPAYATALGLV

SEQ ID NO: 77767 - DNA, 831 bp, Unknown
  Obtained from environmental sample
  misc_feature (1)..(831): n is a, c, g, or t
ttggcgcaagacggaaaaagctgccgcagcgtggtaaacacaacagcggtaaaggcaagctatcctaccaagcccacctccgttaacttcagctgtaccgatgtcaatcggcaaggtgcaacgtttaccgcaagcggcggctcaagcgcggttggttcagcgatatgctccagctgctacctctacaacaccacccaaaccgttaccgcgcccgggtggactccgattagcgtcatcaagccgttggcaagcaccgatgctacccactacattttggcgcaggataacagaacttgccgcagcaaccccaacaccacagggctacgagcgagcattcccaccacgccctcctctgtggactacacctgcagcagcagccaacctcagtcagccacgtttaccgcacccggcagcacaagcccaagcggactatcgacaagcatagtgtggagcagcacgtcaaacacgccgagcgcaggtacatggactgcaaacccaaggtcgcttaccggcgttacctctgcctctaacaccaatgttgcagtgcaggacagcaagggctgccgcagcaatatggtatcaatagatgcatctgttccttccgcacccagctcgatttcccatacctgcggtgagaacgaacgaactgttgccacgtttgccatatccggcagctcgggcggctatacgccgtacaccatcatgtggaacacaaccagcaactcctccgttaccacgagcggttggaatgaaagcaaatctacgctgaccaccaccgcaccaaccgctggtttttggtgcgagacaacaagcaatgccgcagcaacgtga

SEQ ID NO: 77768 - protein, 276 aa, Unknown
  Obtained from environmental sample
  misc_feature (1)..(276): Xaa is any amino acid
MAQDGKSCRSVVNTTAVKASYPTKPTSVNFSCTDVNRQGATFTASGGSSAVGSAICSSCYLYNTTQTVTAPGWTPISVIKPLASTDATHYILAQDNRTCRSNPNTTGLRASIPTTPSSVDYTCSSSQPQSATFTAPGSTSPSGLSTSIVWSSTSNTPSAGTWTANPRSLTGVTSASNTNVAVQDSKGCRSNMVSIDASVPSAPSSISHTCGENERTVATFAISGSSGGYTPYTIMWNTTSNSSVTTSGWNESKSTLTTTAPTAGFWCETTSNAAAT

SEQ ID NO: 77769 - DNA, 612 bp, Unknown
  Obtained from environmental sample
  misc_feature (1)..(612): n is a, c, g, or t
ttgccaacgccactacggtgtacgtttacgttggcggtttcccccggcgtgagcaactcctcaacaggaacgaattcattgaatgcaggaggctttaacggcggcggcaacaggtacgccttccccggcggcggcggcgcatctgacattcgcattggaggaaacgacctaaattcacgcatcattgttgccggcggcggcggctcgtgcggcgctacaggcaaaccgggcggtgatggcggcggtacatcgggtacatctaggagcgaatcttacggcagcggcggcggcggcggtactcagacggcaggaggaacaggaggaaataacaacggcggaacattcggggtaggcggcacaggtctgtactatgccagcggttacggcggcgcaggcggcggcggctggtacggcggcggcggtgtttaccctgacggctcaggcgatgatgatagaggcggcggcggcggctcaggctacgttcttacctcaagctcgcaccgtcccaacggatatattcacgcggtgggcagcccctaccagctgacaaatacaagcatgcaaaacggcgttaatccggggcatggctatgtacgcatagtaaagttttag

SEQ ID NO: 77770 - protein, 203 aa, Unknown
  Obtained from environmental sample
  SIGNAL (1)...(20)
  misc_feature (1)..(203): Xaa is any amino acid
MPTPLRCTFTLAVSPGVSNSSTGTNSLNAGGFNGGGNRYAFPGGGGASDIRIGGNDLNSRIIVAGGGGSCGATGKPGGDGGGTSGTSRSESYGSGGGGGTQTAGGTGGNNNGGTFGVGGTGLYYASGYGGAGGGGWYGGGGVYPDGSGDDDRGGGGGSGYVLTSSSHRPNGYIHAVGSPYQLTNTSMQNGVNPGHGYVRIVKF

SEQ ID NO: 77771 - DNA, 810 bp, Unknown
  Obtained from environmental sample
  misc_feature (1)..(810): n is a, c, g, or t
atgactcataaagcaacggagatcctgacagtaaaagttatgcaaaaatcgttcttattaccggatgttccagtgaattggncctggaaagcgcgctcgaataaacnngccaggggttttcatgtgctgncaggtgccgggaaaccggatgatgttgagcgcatgaacagcatgggattaccgggcgtgttgatcgatctggattcaccagaaagtgttgatcgcgcagccgacgaggtgatcgccctgaccgataattgtctgtatgggatctttaacaatgccggattcggcatgtatggccccctttccaccatcagccgtgcgcagatggaacagcagttttccgccaacttnttcggcgcacaccagctcaccatgcgcctgttacccgcgatgttaccgcacggtgaagggcgtattgtgatgacatcatcggtgatgggattaatctccacgccgggtcgtggcgcttacgcggccagtaaatatgcgctggaggcgtggtcagatgcactgcgcatggagctgcgccacagcggaattaaagtcagcctgatcgaacccggtcccattcgtactcgcttcaccgacaacgtcaaccagacgcaaagtgataaaccagtcgaaaatcccggcatcgccgcccgctttacgttgggaccggaagcggtggtggacaaagtacgccatgcttttattagcgagaagccgaagatgcgctatccggtgacgctggtgacctgggcggtaatggtgcttaagcgcctgctgccggggcgcgtgatggacaaaatattgcaggggtga

SEQ ID NO: 77772 - protein, 269 aa, Unknown
  Obtained from environmental sample
  DOMAIN (37)...(178): short chain dehydrogenase
  misc_feature (1)..(269): Xaa is any amino acid
MTHKATEILTVKVMQKSFLLPDVPVNWXWKARSNKXARGFHVLXGAGKPDDVERMNSMGLPGVLIDLDSPESVDRAADEVIALTDNCLYGIFNNAGFGMYGPLSTISRAQMEQQFSANXFGAHQLTMRLLPAMLPHGEGRIVMTSSVMGLISTPGRGAYAASKYALEAWSDALRMELRHSGIKVSLIEPGPIRTRFTDNVNQTQSDKPVENPGIAARFTLGPEAVVDKVRHAFISEKPKMRYPVTLVTWAVMVLKRLLPGRVMDKILQG

SEQ ID NO: 77773 - DNA, 741 bp, Unknown
  Obtained from environmental sample
  misc_feature (1)..(741): n is a, c, g, or t
atgattgcacgttggttctggcgcgaatggcgttcgccgtcgctattaattgtctggctggcgctaagcctggcggtggcctgcgtgctggcgctgggcaatatcagcgatcgcatggagaagggcttaagccagcaaagccgtgagtttatggcgggcgatcgggcgttgcgcagttcacgcgaagtgccgcaagcgtggctggaggaagcgcaaaagcgcggcctgaaagtcggcaagcagctgactttcgccacaatgacctttgcaggcgacacaccgcagctggcgaacgtcaaagcggtggatgatatctacccgatgtatggcgatctgcaaactaatccccctggcctgaaaccgcaggcgggcagcgtattgctggccccacgcctgatggcactgcttaacctgaaaacgggcgacaccattgacgtgggcgatgccaccttgcggattgccggagaagtgattcaggaaccggattccggttttaaccccttccagatggctccgcgtctgatgatgaatctggcggatgtcgataaaaccggagccgtgcagccggggagtcgggtcacctggcgttataaattcggcggcaacgagaaccagctcgacggctatgagaaatggttgttacctcagcttaaacccgaacaacgctggtacggtctggaacaggacgaaggcgcgctggggcgatcgatgaacgctcgcaacagtctcggccgaatctga

SEQ ID NO: 77774 - protein, 246 aa, Unknown
  Obtained from environmental sample
  SIGNAL (1)...(27)
  misc_feature (1)..(246): Xaa is any amino acid
MIARWFWREWRSPSLLIVWLALSLAVACVLALGNISDRMEKGLSQQSREFMAGDRALRSSREVPQAWLEEAQKRGLKVGKQLTFATMTFAGDTPQLANVKAVDDIYPMYGDLQTNPPGLKPQAGSVLLAPRLMALLNLKTGDTIDVGDATLRIAGEVIQEPDSGFNPFQMAPRLMMNLADVDKTGAVQPGSRVTWRYKFGGNENQLDGYEKWLLPQLKPEQRWYGLEQDEGALGRSMNARNSLGRI

SEQ ID NO: 77775 - DNA, 738 bp, Unknown
  Obtained from environmental sample
  misc_feature (1)..(738): n is a, c, g, or t
atgccccactataaatgcgtagtaagcgatcctaaaggaaaaaaatcaaaaatcgtaaaaagcgccaccaatgaaagggagctagcgctttcctgtaatgaaaataaactctacctaatatcatggaaaaaagtagaagaagcggatttataccgcagtaaaaaacattttcaaaaaaatacgatacttgatttcaccaatataatggccgctctgttaaaggcgggattaacattacaagacgcactccagttatgtcaatcaatttcaggtaacgcaaagacagccgcattaagccgcaccatactggaagggctgaatcgcggtatatcttttcatgaagtgctgaaaatatacgcctcgtcattttcgccgctttatcgttccttaattcgcttgggcgagaaaacaggctctgtagccgaagttttttcccgaatggggtcatacatggaatctgaaaaaaaaatcagggggaaattgggaaacgtcctttggtatcctcttatgattcttttcatagcgattattggatgttttggaattgttttttatgtaatgcccagaatggtcgatattttttcagctttccatgcaggcgaagcaggaaccgccattgatatgaatagtatttatcggtcgctgtggatttctttcagtatttttatttttttcttattatcaatatttttctgcgttatttttcgtaaactgtcaaaatcatttaccatgttatag

SEQ ID NO: 77776 - protein, 245 aa, Unknown
  Obtained from environmental sample
  DOMAIN (65)...(188): Bacterial type II secretion system protein F domain
  misc_feature (1)..(245): Xaa is any amino acid
MPHYKCVVSDPKGKKSKIVKSATNERELALSCNENKLYLISWKKVEEADLYRSKKHFQKNTILDFTNIMAALLKAGLTLQDALQLCQSISGNAKTAALSRTILEGLNRGISFHEVLKIYASSFSPLYRSLIRLGEKTGSVAEVFSRMGSYMESEKKIRGKLGNVLWYPLMILFIAIIGCFGIVFYVMPRMVDIFSAFHAGEAGTAIDMNSIYRSLWISFSIFIFFLLSIFFCVIFRKLSKSFTML

SEQ ID NO: 77777 - DNA, 465 bp, Unknown
  Obtained from environmental sample
  misc_feature (1)..(465): n is a, c, g, or t
ttgatccggaaacaggaaaacctgttttatacaggcgtaacaagggaaataagaagcggtcttgtattaggaattaacggatgggtttcaggcgatggtatggttacaatgaaggtaaacgccgccgtttccaaacaagatgaaagcggttctaatgccagcgctactacaaaccctccgccgacatctgaaagagtggtaaacactcaaataagaaccaaatccggaactcctattgttataggagggcttttacaaatagaaaaaacagaattggtaagtaaaatgccgattctcggcagcataccgctattaggaaaactttttaacgacacaagcatttcagaaataactacggaaatgattatttatattatcccttatgtgcatcatggagacgattcttcaaatgactacataaaacgaagcgaagaatattataagaaatatatactgcatgggtaa

SEQ ID NO: 77778 - protein, 154 aa, Unknown
  Obtained from environmental sample
  misc_feature (1)..(154): Xaa is any amino acid
MIRKQENLFYTGVTREIRSGLVLGINGWVSGDGMVTMKVNAAVSKQDESGSNASATTNPPPTSERVVNTQIRTKSGTPIVIGGLLQIEKTELVSKMPILGSIPLLGKLFNDTSISEITTEMIIYIIPYVHHGDDSSNDYIKRSEEYYKKYILHG

SEQ ID NO: 77779 - DNA, 459 bp, Unknown
  Obtained from environmental sample
  misc_feature (1)..(459): n is a, c, g, or t
atggcagcacgtagcataactattgtaaaaggagatagtaaaacgattccgctccttccgcaagaagctggaagagtcctcctaacaggacaatacgatgatttttttactattggtaaaagcgcatatccacaggcgtttgtttaccgttattataattcaagacctaatgatttaatagcacaggtacgaaacattgatacggttattttttgtctcgcaaaaaatgatgatcttacggtattaaatgtcttgcaaggtttacgaaaaaaagtaattgtgttttcagttttaacacctattcatctcgatagggttccttgggttgatggagctatagcggcgtatagttatgcgacttcgtcttttatagcaggtttttctgtgcttctgggaaggattccaagcgaggggattcttccttttccgctttatgaacctcgttggactgcaccatga

SEQ ID NO: 77780 - protein, 152 aa, Unknown
  Obtained from environmental sample
  misc_feature (1)..(152): Xaa is any amino acid
MAARSITIVKGDSKTIPLLPQEAGRVLLTGQYDDFFTIGKSAYPQAFVYRYYNSRPNDLIAQVRNIDTVIFCLAKNDDLTVLNVLQGLRKKVIVFSVLTPIHLDRVPWVDGAIAAYSYATSSFIAGFSVLLGRIPSEGILPFPLYEPRWTAP

SEQ ID NO: 77781 - DNA, 417 bp, Unknown
  Obtained from environmental sample
  misc_feature (1)..(417): n is a, c, g, or t
ttggtatattctgaacgcatgaaggcacggattattattgcggaacaggacgaggctctcggcgcgaagcttcaggagagccttacgcaaaagggatatgccgtacttgcgtttgcccgcaacggatccatggcgcttgagcttgcgcgaacgcataaaccggatctgatcatcatggatgtggatctcgaagccagctacgacgggctggaggcggccggtattatctattatgaattggcgacgccgataatttttcttaccgaaaaaataaatcccgcgcttgtaaagaaggcggaagatatcaatacgtacgggtttattgtcaaatcatcctcatttgacgatttacatgctatggttgccctcgcggttgcgcaggagcaagcccagagaaatcttcaggagcaaaaataa

SEQ ID NO: 77782 - protein, 138 aa, Unknown
  Obtained from environmental sample
  DOMAIN (9)...(122): Response regulator receiver domain
  misc_feature (1)..(138): Xaa is any amino acid
MVYSERMKARIIIAEQDEALGAKLQESLTQKGYAVLAFARNGSMALELARTHKPDLIIMDVDLEASYDGLEAAGIIYYELATPIIFLTEKINPALVKKAEDINTYGFIVKSSSFDDLHAMVALAVAQEQAQRNLQEQK

SEQ ID NO: 77783 - DNA, 942 bp, Unknown
  Obtained from environmental sample
  misc_feature (1)..(942): n is a, c, g, or t
gtgctgctgtatgtggactgtatattgcaaaaggatggcaggagcgtatttagcctcgcgatgaagatttcnggaattggcatttcgcaggataaattggatgtaatttttgagcgtttctctcaagccgattcttcaacaacgcgtttttatgggggcacaggacttgggctcagtatctcgcgccagcttgcccgcggtatgggcggcgatatagcggtagagagcagcgttgggataggtacgacattctggttttccattccgctcgagcttgattccgccaacgagtccccgctcctgagtctgaaatgctataaccatctcatcgatctttatctcgtttgcacctatgacgccgttggacgtatctatagccggatttgcaaggagagcggcgttaattgtgccgtttgcgatccccatgatatttccggacagcttgagcttagcaataaaaaaccaatgtgtattgtgctcattgaccagcgcattaacgatatggattgttttgcccttgccaaaacgcttaggaaaaattttaaggggaatatgttaaaactcatactccttgccaattccgattccattccggaaaatattcatgcaaaaggcgcactgtttgacagtgtcatgttaaaaccgctttttcatcagacattcgtgaaccggattctttcgctgattttcccggaagatttcaaaaactccagtgattatgaagaaaaacctctgacctaccttgcggaggaacccccatcgcagccgacggacggtgaggagcttgacgagcagattttgacggacgtatccattcttgtggttgaagataattcggtcaatcagatggtggtggtgcgcatactgaagaagtttggcgcgaagattgcggtagcaaatcacgggcaggaagcgctgaacggatgggactcggccatctga

SEQ ID NO: 77784 - protein, 313 aa, Unknown
  Obtained from environmental sample
  DOMAIN (1)...(91): Histidine kinase-, DNA gyrase B-, and HSP90-like ATPase
  misc_feature (1)..(313): Xaa is any amino acid
MLLYVDCILQKDGRSVFSLAMKISGIGISQDKLDVIFERFSQADSSTTRFYGGTGLGLSISRQLARGMGGDIAVESSVGIGTTFWFSIPLELDSANESPLLSLKCYNHLIDLYLVCTYDAVGRIYSRICKESGVNCAVCDPHDISGQLELSNKKPMCIVLIDQRINDMDCFALAKTLRKNFKGNMLKLILLANSDSIPENIHAKGALFDSVMLKPLFHQTFVNRILSLIFPEDFKNSSDYEEKPLTYLAEEPPSQPTDGEELDEQILTDVSILVVEDNSVNQMVVVRILKKFGAKIAVANHGQEALNGWDSAI

SEQ ID NO: 77785 - DNA, 912 bp, Unknown
  Obtained from environmental sample
  misc_feature (1)..(912): n is a, c, g, or t
ttggagtttatagagagaggtaatagaatgccagatcctaaattgcaaattgggcaaattcttctacaaaaaaaacttatagatgaatatcaattagcccatgcaatgagggagcaaaagcgcacgggtttacatataagcaaaattataacgcggcttggctttgttagcgaagagcgaatggctcttgtacttggcgaacaattgcaacataaggaacacaagcgcataggtgaattgctcgtagaaaggaattacataaccgcagagcagcgcgacaaagcacttgaagagcaaaaaaaaacggggcttcggcttggcaaaatgcttatgcagctcggttttatgaccgaagagcgcttgatagaaattctctctgctcagcttgaaattccaacagcgaatttaaacgagctatccatttcaccagaagtcacgcagcttttgccagaggaattttgccgttcttataaagttgtgccgttatcggttattggtaaaactttaacccttgccatgcacgaccccagcaaccaaagaaccattgaccacataagatttaaggttcaaaaagaaataagccctgtgatggcaggcgaaaaagacatactagaaacaataaatagaatttatatgggctctgcaagtggcgaagccatgaaagagctttctaagctcaacgaagccgaagacctgcaaaccgtaaacaaagccgaagaaggcggttcagaggaacaattatcagacgaagaaggtcagcaggttgttaaattggttagctccattattcaagatgccattgcgcgcaaagcctctgatatacatttggaacccgcagaaacttttttaaagctacgcattcgcatagacggcgaatttaagcgttatgccgccaaattccagctcgcttaa

SEQ ID NO: 77786 - protein, 303 aa, Unknown
  Obtained from environmental sample
  DOMAIN (110)...(217): GSPII_E N-terminal domain
  misc_feature (1)..(303): Xaa is any amino acid
MEFIERGNRMPDPKLQIGQILLQKKLIDEYQLAHAMREQKRTGLHISKIITRLGFVSEERMALVLGEQLQHKEHKRIGELLVERNYITAEQRDKALEEQKKTGLRLGKMLMQLGFMTEERLIEILSAQLEIPTANLNELSISPEVTQLLPEEFCRSYKVVPLSVIGKTLTLAMHDPSNQRTIDHIRFKVQKEISPVMAGEKDILETINRIYMGSASGEAMKELSKLNEAEDLQTVNKAEEGGSEEQLSDEEGQQVVKLVSSIIQDAIARKASDIHLEPAETFLKLRIRIDGEFKRYAAKFQLA

SEQ ID NO: 77787 - DNA, 651 bp, Unknown
  Obtained from environmental sample
  misc_feature (1)..(651): n is a, c, g, or t
atgagcaaactgaaaaggccaaatattgagccacaggagatggacttgaaatgtttcatgaacctcatggtcgtgcttatcccgatgcttctcatatcggctgagttcgccaaggtcgcgatcattgacatcaagttaccagaagcgcggggttcgcagacgaacaccgcggtaaccgagcagccgcaggaggataagagcgagaagctcctcctcacggctatcatcactgattctgtcgtgaccctaggggccaaaggcgggtttatgcccagcctattctatagggagtatcaccgttatctgaccaaagatcagtacgatactactatagagtatacgcccggccagactccgatcaatccgagaaccgggaaggagttctccgttcacgagcgctacgagatctacttgtataccgctgacgagaaccgcaacatcctgaggtcgctgtacacgaagtttggagagatggtgacggatgccgagggcattcccgtcaaagaggctaagataggcgacacgctatacgcgctcacgaatcctcggcaccgggtcattgtgacgaacccggccgagcagttcgagacaaatcgttgtcagtctacgacgagcttaaaaacgtcttatgaaggtgaaggagctgtataa

SEQ ID NO: 77788 - protein, 216 aa, Unknown
  Obtained from environmental sample
  misc_feature (1)..(216): Xaa is any amino acid
MSKLKRPNIEPQEMDLKCFMNLMVVLIPMLLISAEFAKVAIIDIKLPEARGSQTNTAVTEQPQEDKSEKLLLTAIITDSVVTLGAKGGFMPSLFYREYHRYLTKDQYDTTIEYTPGQTPINPRTGKEFSVHERYEIYLYTADENRNILRSLYTKFGEMVTDAEGIPVKEAKIGDTLYALTNPRHRVIVTNPAEQFETNRCQSTTSLKTSYEGEGAV

SEQ ID NO: 77789 - DNA, 789 bp, Unknown
  Obtained from environmental sample
  misc_feature (1)..(789): n is a, c, g, or t
atgagggacgattatacatctgaaaaattcataatcggcgaaaacaataattttgccgccaatgccgccatcgccatcagccggaatccgggaaccgcttacaatcctttcctgatctacggcggggtaggtttgggcaagacccacctgatgcaggccatcggcaattatattcacgaaaactccgaccacaaagtaatatatgttacttccgaggattttttaaacgaatatgtgcaggcgattcgggaaaaggaaatgcccaccttcaaaaataaattccgctataccgacgtgctgttaattgacgacattcagttctttcaggaaaaggaacaaatccaggaagaatttttccatacctttaacaccctgcttaacgccaaaaaacaactggtaatgacctgcgaccggccgccctccgagcttaaaaaattctctgaccggcttatctcccgttttgaacaaaatttacgggtagatctacagcctccccgctacgaggttcgctgtgcgatcctcaaatcaaccgccgaaagccgcggcgttgtcattcccgatgaaataattgacctgatcagtaaaaatatctcctccaatatcagagacctgataggcgccttaaaaacgcttatttcctacactgaaattatgggacagccggttaccctggagatagcccaacaaaaactaaaggacatattcgcttcccgcagacaggccaatctatccatagaaataatacaaaaagtagtggccgatttttactctttgagttccaatgattaa

SEQ ID NO: 77790 - protein, 262 aa, Unknown
  Obtained from environmental sample
  DOMAIN (1)...(218): Bacterial  dnaA  protein
  misc_feature (1)..(262): Xaa is any amino acid
MRDDYTSEKFIIGENNNFAANAAIAISRNPGTAYNPFLIYGGVGLGKTHLMQAIGNYIHENSDHKVIYVTSEDFLNEYVQAIREKEMPTFKNKFRYTDVLLIDDIQFFQEKEQIQEEFFHTFNTLLNAKKQLVMTCDRPPSELKKFSDRLISRFEQNLRVDLQPPRYEVRCAILKSTAESRGVVIPDEIIDLISKNISSNIRDLIGALKTLISYTEIMGQPVTLEIAQQKLKDIFASRRQANLSIEIIQKVVADFYSLSSND

SEQ ID NO: 77791 - DNA, 378 bp, Unknown
  Obtained from environmental sample
  misc_feature (1)..(378): n is a, c, g, or t
gtggagattgaagtggcagagccaccacccattgaagcaagggtgaacctgcaaggcgttacatttggtagcggcaacgctacattgacacctaatgccaaaaaagttcttgacggagttgcggaacagcttttggcaaatccaaaagtcaaaattgaaattcaaggccatacggacaatcagggcaaacctgcggcaaaccaagacctatcccagcgcagagcaaaatctgttgtgggttacctggctactaagggtgttagcaccagccgcatgaaagccgttggctacgggcaagatgtacctatagcggacaacaaaactgccgaaggccgtgagttgaaccgccgtatagagatggtaagagtggatgattag

SEQ ID NO: 77792 - protein, 125 aa, Unknown
  Obtained from environmental sample
  DOMAIN (21)...(116): OmpA family
  misc_feature (1)..(125): Xaa is any amino acid
MEIEVAEPPPIEARVNLQGVTFGSGNATLTPNAKKVLDGVAEQLLANPKVKIEIQGHTDNQGKPAANQDLSQRRAKSVVGYLATKGVSTSRMKAVGYGQDVPIADNKTAEGRELNRRIEMVRVDD

SEQ ID NO: 77793 - DNA, 366 bp, Unknown
  Obtained from environmental sample
  misc_feature (1)..(366): n is a, c, g, or t
atggaatacggtcctgtgccgtcttatttgtatgatattttcaagggcgtaaggaataagaatcctgattttgccaaatatgcgcaaattatatccgtgcaaggatatagagttgcaccgctgaaacctgccgatttggataatctatccgaatcagacattgaaaagctgaataaatctattgaagacaacaaggagctgtctatggggcagctaacagacaagtctcatggcattgcttggaaaaaatccgaagacaaccagcagataaacatggatagcatatttgacgaggttggaatgccgagtaatgaacgcaagttgatactggaaagcgaagcgttcacaagggcattcgctagatga

SEQ ID NO: 77794 - protein, 121 aa, Unknown
  Obtained from environmental sample
  misc_feature (1)..(121): Xaa is any amino acid
MEYGPVPSYLYDIFKGVRNKNPDFAKYAQIISVQGYRVAPLKPADLDNLSESDIEKLNKSIEDNKELSMGQLTDKSHGIAWKKSEDNQQINMDSIFDEVGMPSNERKLILESEAFTRAFAR

SEQ ID NO: 77795 - DNA, 669 bp, Unknown
  Obtained from environmental sample
  misc_feature (1)..(669): n is a, c, g, or t
atggataatcccattgaagctgtatatattcctgtaaaagatatgacttcaaatgctccgggttttagatctctttacgatattcgtgaaattcatttcgaagaaatttatgttgatattcttcgcaaggcttttactccatttctgaaaggcccaaccgacaaacaacgtaaaaaacttctggataatcttcaagctgccataagtggaagggtaataataaaaaatgaggagtttttcttgcgtaacgaagaaggtgaactggaatttactcttctggcggaaggatacagaaagctggggcttttatgggtattattgcagaatggaacgctattaaatggctcggtactcttctgggatgaacccgaagctaatctgaatcccaaactaatgcaatcagtggttgggatattgcttgaaatgcagcggtttggcgttcagatattcattgcaactcacgattatgtgctgcttaaagaacttgaccttcaaattcaggaacatgataaaatcaagttttatagtcttttcagaaatgagaaaggtcaagttgaagtatcaactaccggaaattaccgggaaatttatccaaataccataaatgatacctttggcaatattgttacccgtgaaatacaaaggccaattaaaggcagtcaagcatga

SEQ ID NO: 77796 - protein, 222 aa, Unknown
  Obtained from environmental sample
  misc_feature (1)..(222): Xaa is any amino acid
MDNPIEAVYIPVKDMTSNAPGFRSLYDIREIHFEEIYVDILRKAFTPFLKGPTDKQRKKLLDNLQAAISGRVIIKNEEFFLRNEEGELEFTLLAEGYRKLGLLWVLLQNGTLLNGSVLFWDEPEANLNPKLMQSVVGILLEMQRFGVQIFIATHDYVLLKELDLQIQEHDKIKFYSLFRNEKGQVEVSTTGNYREIYPNTINDTFGNIVTREIQRPIKGSQA

SEQ ID NO: 77797 - DNA, 756 bp, Unknown
  Obtained from environmental sample
  misc_feature (1)..(756): n is a, c, g, or t
atggctataataatttcaaaaaataaggaaaatgccgtaaaaattgatcggtcagaaatagaacttgaagagaatatacaggaatatatttataataatcctaatgttattcctttatatgaaattaatgatgatattaaactatttgtagcggcacgcgaatttattccagattatgaaaaaagagaaagaattgatgggttggcttttgatggaactggaaatatatatgttattgaaacaaaattatataaaaatgcggataaaagaaatgttgtggctcaagcacttgattatggcgcacagctttggaggtgtataacaaattttaatgattttttaatgaatctaaatgaccatactcagaaacaatttggaatgagttttgaggaaaaatataaagatttttttaatatagataatgcctctgacaatatggctgcgattgcagataatttaaattctggcaatattaaattcattatccttatggacaaattacacgattcgctgaaagatttaataatttacattaatcaaaattcaaaattcgatatatatgctgttgaattagagtattataaacatcaagaatatgaaattataataccaaaattatttggaaatgaagttaagaaaagcatttcgtctaataagtattcaccaaaatatgaaacaatatcagaacaagaattcgataatatattanaatctgaacaaagcctaagtgctgaaaatataaaactattattttag

SEQ ID NO: 77798 - protein, 251 aa, Unknown
  Obtained from environmental sample
  misc_feature (1)..(251): Xaa is any amino acid
MAIIISKNKENAVKIDRSEIELEENIQEYIYNNPNVIPLYEINDDIKLFVAAREFIPDYEKRERIDGLAFDGTGNIYVIETKLYKNADKRNVVAQALDYGAQLWRCITNFNDFLMNLNDHTQKQFGMSFEEKYKDFFNIDNASDNMAAIADNLNSGNIKFIILMDKLHDSLKDLIIYINQNSKFDIYAVELEYYKHQEYEIIIPKLFGNEVKKSISSNKYSPKYETISEQEFDNILXSEQSLSAENIKLLF

SEQ ID NO: 77799 - DNA, 633 bp, Unknown
  Obtained from environmental sample
  misc_feature (1)..(633): n is a, c, g, or t
gtgcgggctatttcattcagaaaaagaccaacaagattctttcggacaagcaagagatattctgggcagcggcttattacggaaaaaatcggncggtatcttttcaaaatttctctgaatacctttgcgcaggtcaacacaccgcaggccgagaaagcctacgcacaaataaaaaaatggtgcgcggcggacacttcgacccagctcagtaatatactggacgcctactgcggtatcggcactatcgctttgtccgtggcggacagcgcggaatatgtgctgggtattgaagaagtgccgcagtcggtcaaggacgcccggcgcaacgcggaaaataacgggctgaataatgtaaagtttatctgcggccgggcggaagaactcgagataccgggacagccggagatagttattgccgacccgccgcgcaaaggtctggcgccggaaatgattggcaaaattttagcaataaacccccggaaaattatttatctgtcctgcaatccggcctcgctggccagagatttgaaattgcttttgcagggaacagaatataaattacaagaggttatcccctatgacttctttccgcagaccacgcacattgaaacactggttttgctggagagataa

SEQ ID NO: 77800 - protein, 210 aa, Unknown
  Obtained from environmental sample
  misc_feature (1)..(210): Xaa is any amino acid
MRAISFRKRPTRFFRTSKRYSGQRLITEKIGRYLFKISLNTFAQVNTPQAEKAYAQIKKWCAADTSTQLSNILDAYCGIGTIALSVADSAEYVLGIEEVPQSVKDARRNAENNGLNNVKFICGRAEELEIPGQPEIVIADPPRKGLAPEMIGKILAINPRKIIYLSCNPASLARDLKLLLQGTEYKLQEVIPYDFFPQTTHIETLVLLER

SEQ ID NO: 77801 - DNA, 465 bp, Unknown
  Obtained from environmental sample
  misc_feature (1)..(465): n is a, c, g, or t
atgatagatgatttctcaacaataaaaagtcaattaaaggaattagctccaataattaatgagttcaaatctgagcaagtacaactatgtcttattgaaattatttttaataaggagactacagaatacaaaacagaaaaaaaagtagttgataacaacgaggggaaaaagactcaaagaactacaagaaaaaaacaaaaaaaagtatctcagtcttctcctgataaaactgataagaaaagtccatcaaaaaaaggtccaggttattacttatcacaattaatagatgaaggatattttgataaaccacgacaaattaattcaattgttgagcatttgaaaacaaacaatgcaataacttataaaacaagtgatttatctacaccattaagacgattaatacaatcaaaaaaattaaagcgaacaaaaaatgctgataagcaatttgaatatgaaaaaacttaa

SEQ ID NO: 77802 - protein, 154 aa, Unknown
  Obtained from environmental sample
  misc_feature (1)..(154): Xaa is any amino acid
MIDDFSTIKSQLKELAPIINEFKSEQVQLCLIEIIFNKETTEYKTEKKVVDNNEGKKTQRTTRKKQKKVSQSSPDKTDKKSPSKKGPGYYLSQLIDEGYFDKPRQINSIVEHLKTNNAITYKTSDLSTPLRRLIQSKKLKRTKNADKQFEYEKT

SEQ ID NO: 77803 - DNA, 450 bp, Unknown
  Obtained from environmental sample
  misc_feature (1)..(450): n is a, c, g, or t
atgaagacggacgatgaaaacaggcttgctctgttcagtaaaatcggactcaatcctgtcaacgtatacggtttaaaacagattcacagccgtactgttcttgccgttgacagtataaaccctccttcagatcaagcggacggcatggtaacgcaagatcgaaatattaccctttcagttacagtagcggattgtcttcctgtttttttatttgattccaaatcaggcgcattcggtcttgtacactcaggctggaaaggaacgggaattgcggttgactctcttgttttgatgcgggaacgttatgggacagaaccttgcgatgtcgccgcagttcttggcccctgtattgattcctgctgttacaaagtagaccgagaaagagcagaaatatttaaaaaagactttggaaaagaaagcatgncgggagacggcggatattttctttaa

SEQ ID NO: 77804 - protein, 149 aa, Unknown
  Obtained from environmental sample
  DOMAIN (1)...(149): Uncharacterised ACR, YfiH family COG1496
  misc_feature (1)..(149): Xaa is any amino acid
MKTDDENRLALFSKIGLNPVNVYGLKQIHSRTVLAVDSINPPSDQADGMVTQDRNITLSVTVADCLPVFLFDSKSGAFGLVHSGWKGTGIAVDSLVLMRERYGTEPCDVAAVLGPCIDSCCYKVDRERAEIFKKDFGKESMXGDGGYFL

SEQ ID NO: 77805 - DNA, 495 bp, Unknown
  Obtained from environmental sample
  misc_feature (1)..(495): n is a, c, g, or t
gtgtctttctctgctttcgatggggtaccctttatctggatgatttccgcttccatgaaaagggatgttgatgttatgaaactgcccctagaatggatgccgaaatattttttccctgacaactaccttaaggtctggaatattggacggatcgcccaacgggattaccattttgccctggcttatttcaattccttaaagatcccgttaataaatttaacaggatccgaattaaccggcgctgccgcgagtaactcctttgcgaaaattaaattccacggctgtaacgacctttttatgatataccttgccactatgatgatccccaaccaggtgacccttatccccaaattcaccatattagccacccttggattggtaggaacccattggccattgatacagccggggcttgcaaccattaccgcaactttcctgatgcagcctgtatttcatgacagttcccgacgaactgcgcgaatctttcttacatag

SEQ ID NO: 77806 - protein, 164 aa, Unknown
  Obtained from environmental sample
  misc_feature (1)..(164): Xaa is any amino acid
MSFSAFDGVPFIWMISASMKRDVDVMKLPLEWMPKYFFPDNYLKVWNIGRIAQRDYHFALAYFNSLKIPLINLTGSELTGAAASNSFAKIKFHGCNDLFMIYLATMMIPNQVTLIPKFTILATLGLVGTHWPLIQPGLATITATFLMQPVFHDSSRRTARIFLT

SEQ ID NO: 77807 - DNA, 321 bp, Unknown
  Obtained from environmental sample
  misc_feature (1)..(321): n is a, c, g, or t
atgtgggtctggttttgggaaagcggaatggagcacccgccgatcgaaatggcagaatacgcgcgggattcaaacttcagggctatgtacggcgcgtttgcattccttaaaaatactgacggcgattataaaaattattatataaaattcgcggcgtacatcggcgggaaacgtgaatcgcgggggcttttaggggatataattttgagtaaacgcgacatattcaataaatccgcgttcccagacggcatagtgccaaccaacgtggaacctttgaccgttcattatccaagacagggcgttttacgcggcttttcatga

SEQ ID NO: 77808 - protein, 106 aa, Unknown
  Obtained from environmental sample
  misc_feature (1)..(106): Xaa is any amino acid
MWVWFWESGMEHPPIEMAEYARDSNFRAMYGAFAFLKNTDGDYKNYYIKFAAYIGGKRESRGLLGDIILSKRDIFNKSAFPDGIVPTNVEPLTVHYPRQGVLRGFS

SEQ ID NO: 77809 - DNA, 555 bp, Unknown
  Obtained from environmental sample
  misc_feature (1)..(555): n is a, c, g, or t
gtgcgcgattttaaccagaaaatacaaccacatgatggcccggcaaatattgcggagatttatgaggtcgaaagaaaaatggcgattctcaaaaacgaactgaatctgcatatctttacaggatattttctgatcggcaaggaagttttgggttggacaatacactgcgccaaagtttacaatgtaaggacaggccgttactggaaaataaaagccgacgtgttctcggactgtaccggtgacggaacgctggggttttttgaggggggtgattacgagacaaccaccaatgggcacatgggaatgaccaatgtgtggtatgtcgacagagctgccgatgaacggcaatttccccgctgtccatgggcaatagatctgtcaaacgtggattttccgggccggaaaaatgtgaaaagcgtttacgatcaggtcgggcccgaaggcgatgtgggtctggttttgggaaagcggaatggagcacccgccgatcgaaatggcagaatacgcgcgggattcaaacttcagggctatgtacggcgcgtttgcattccttaa

SEQ ID NO: 77810 - protein, 184 aa, Unknown
  Obtained from environmental sample
  misc_feature (1)..(184): Xaa is any amino acid
MRDFNQKIQPHDGPANIAEIYEVERKMAILKNELNLHIFTGYFLIGKEVLGWTIHCAKVYNVRTGRYWKIKADVFSDCTGDGTLGFFEGGDYETTTNGHMGMTNVWYVDRAADERQFPRCPWAIDLSNVDFPGRKNVKSVYDQVGPEGDVGLVLGKRNGAPADRNGRIRAGFKLQGYVRRVCIP

SEQ ID NO: 77811 - DNA, 456 bp, Unknown
  Obtained from environmental sample
  misc_feature (1)..(456): n is a, c, g, or t
gtggcgatgggtatccgcatgatagtggatggcatcgancaaaataggataagaaacttgctaaacgctgaaatcagggcaacccaaagccgccacagcgttggccaagaaacattcaagttcatcgccgttgccgccccgtcgtttggtatggtgggtacattgatcggcatggtccaattgtttgctaccattgacgatcccaaaaaaatggccagcgccatggccctctctctgctgtcaacgctatggggcgcagttgtcgcgtatcttttcgcaatgccgattgcgggcaagcttgaacttaggagcaaggaggaagcgcaaaataaggcactggctctggaggggatcatgggcatcaaatcggagatgcacccaggacacttagaagaacatttaaacgcattcttggcccctggcaaaaaggtgagccgtcaaccggcgggcgcatga

SEQ ID NO: 77812 - protein, 151 aa, Unknown
  Obtained from environmental sample
  misc_feature (1)..(151): Xaa is any amino acid
MAMGIRMIVDGIXQNRIRNLLNAEIRATQSRHSVGQETFKFIAVAAPSFGMVGTLIGMVQLFATIDDPKKMASAMALSLLSTLWGAVVAYLFAMPIAGKLELRSKEEAQNKALALEGIMGIKSEMHPGHLEEHLNAFLAPGKKVSRQPAGA

SEQ ID NO: 77813 - DNA, 744 bp, Unknown
  Obtained from environmental sample
  misc_feature (1)..(744): n is a, c, g, or t
atgcagctcgcccatgcccgagataatggtttgcccggtctccggatcgctgttgaccctgaaggtgggatcctcctcggcgagtttggaaagcgcaagcccgattttatcctgatcggctttggttttcggctcaatggcaatattgatcaccggatcgggaaacgacatggattccagcactatcggcgcgttttcctcgcacatggtgtcgcccgtggtaaaatttttaagcccggcagccgccagaatatcccccgctcttgcctcctcgcgatcctcacggttattcgcgtgcatctgcagcaagcggccgatgcgctccttcgttccctttgccgcgttatagacctggctgccggcggtgatgcgcccggaatagacgcggaaatagcaaagcttcccgacgtgctgatcggtttggatcttgaacgccagagccgcgaaaggctcgtcatcggcggcgcggcgggtcagcggcgtctcatcctttggatttaccccacacgctggcggaatgtccagcggcgatggaagataatcgacaatcgcgtccaaaagctgctgaatgcccttattcttgaaagcgctgccgcagacaacaggaaaaattttcatggcgcacgccgcgcggcggattccatcggcgagttcctctgcggtcggattgagaccttcaagatatttttcgatgagattatcgtccgcctcgcatatcaattctaccatgctcggccgatctga

SEQ ID NO: 77814 - protein, 247 aa, Unknown
  Obtained from environmental sample
  misc_feature (1)..(247): Xaa is any amino acid
MQLAHARDNGLPGLRIAVDPEGGILLGEFGKRKPDFILIGFGFRLNGNIDHRIGKRHGFQHYRRVFLAHGVARGKIFKPGSRQNIPRSCLLAILTVIRVHLQQAADALLRSLCRVIDLAAGGDAPGIDAEIAKLPDVLIGLDLERQSRERLVIGGAAGQRRLILWIYPTRWRNVQRRWKIIDNRVQKLLNALILESAAADNRKNFHGARRAADSIGEFLCGRIETFKIFFDEIIVRLAYQFYHARPI

SEQ ID NO: 77815 - DNA, 891 bp, Unknown
  Obtained from environmental sample
  misc_feature (1)..(891): n is a, c, g, or t
atggtagaattgatatgcgaggcggacgataatctcatcgaaaaatatcttgaaggtctcaatccgaccgcagaggaactcgccgatggaatccgccgcgcggcgtgcgccatgaaaatttttcctgttgtctgcggcagcgctttcaagaataagggcattcagcagcttttggacgcgattgtcgattatcttccatcgccgctggacattccgccagcgtgtggggtaaatccaaaggatgagacgccgctgacccgccgcgccgccgatgacgagcctttcgcggctctggcgttcaagatccaaaccgatcagcacgtcgggaagctttgctatttccgcgtctattccgggcgcatcaccgccggcagccaggtctataacgcggcaaagggaacgaaggagcgcatcggccgcttgctgcagatgcacgcgaataaccgtgaggatcgcgaggaggcaagagcgggggatattctggcggctgccgggcttaaaaattttaccacgggcgacaccatgtgcgaggaaaacgcgccgatagtgctggaatccatgtcgtttcccgatccggtgatcaatattgccattgagccgaaaaccaaagccgatcaggataaaatcgggcttgcgctttccaaactcgccgaggaggatcccaccttcagggtcaacagcgatccggagaccgggcaaaccattatctcgggcatgggcgagctgcatctggagatcatcgttgatcggctcttgcgggagtttaaggttgaggcaaacgtgggcaaaccgctggttgcgtaccgcgaaacggtgcgaaaggcggttgaaatcgaaacaagcatgtgcggcagaccggcggtcacgggcaatacgcgcatgtggttatga

SEQ ID NO: 77816 - protein, 296 aa, Unknown
  Obtained from environmental sample
  DOMAIN (109)...(176): Elongation factor Tu domain 2
  misc_feature (1)..(296): Xaa is any amino acid
MVELICEADDNLIEKYLEGLNPTAEELADGIRRAACAMKIFPVVCGSAFKNKGIQQLLDAIVDYLPSPLDIPPACGVNPKDETPLTRRAADDEPFAALAFKIQTDQHVGKLCYFRVYSGRITAGSQVYNAAKGTKERIGRLLQMHANNREDREEARAGDILAAAGLKNFTTGDTMCEENAPIVLESMSFPDPVINIAIEPKTKADQDKIGLALSKLAEEDPTFRVNSDPETGQTIISGMGELHLEIIVDRLLREFKVEANVGKPLVAYRETVRKAVEIETSMCGRPAVTGNTRMWL

SEQ ID NO: 77817 - DNA, 549 bp, Unknown
  Obtained from environmental sample
  misc_feature (1)..(549): n is a, c, g, or t
gtgtttatagatgagtcatctgtaaaaacaaatatgacacgtttgtttggacgttcgcttcaaggattacgatgcaacgattctgcgccacatggtcactggaatactgtcaccatgttatcgtcaatcagatttgacggctcaacagaagcgctcgttattgatggtccagtgaataatgagatgtttttcgcgtacattgaacaagagcttgcgccgactttgcgccacggtgatattgtcatcatggacaatttatcagctcataagaacgaatctgtgagtaaaagtattgaaagtcgaggagcaacattgaggtatctacctccatacagtccagatttgaaccccatcgaaaaaatgtggagtaaaattaagcaactgttacgcggtgccaaggcaagggattttgaagagttgatacgagctatcggtgctgccctcaacaaaatcacgccaagcgatgcagcaggctggtttcatcttgncgctataaccaaaaanaaatgggagtccccnaagctcgggntgggggaccccaaaatttga

SEQ ID NO: 77818 - protein, 182 aa, Unknown
  Obtained from environmental sample
  misc_feature (1)..(182): Xaa is any amino acid
MFIDESSVKTNMTRLFGRSLQGLRCNDSAPHGHWNTVTMLSSIRFDGSTEALVIDGPVNNEMFFAYIEQELAPTLRHGDIVIMDNLSAHKNESVSKSIESRGATLRYLPPYSPDLNPIEKMWSKIKQLLRGAKARDFEELIRAIGAALNKITPSDAAGWFHLXAITKXKWESPKLGXGDPKI

SEQ ID NO: 77819 - DNA, 609 bp, Unknown
  Obtained from environmental sample
  misc_feature (1)..(609): n is a, c, g, or t
atgagagcggtgaaatctcctgccgacttgggccgcctgcttctggccttggaaagcatttcccatactctggcgggcaaagccctggacctggccgcttatgtgttcctccgggcctcagaattgacaggggccagatggtccgagattgacttggcttctggcttctggcgacttcccccggagcggatgaaagcgaaaggcgaacatctgattcccctgtcccgccaggtgaaggaacgcctggaagccttgaaagagctaaccggtggtggaccttgtgttttcccggcctgggctggtggtcaagccaatatgaatcctgaatcccttcgccgagccttgaatcgtcttggttacgggccgcgagccctgggcgggggccatactccgcacggttttaggagttgcgccagcacgtttttaagggaacggggctttgacccggcttggattgaaattcaactggcccatgcggaaagggataaaatcgtcaaagcatataatcacgccagctacattccccaaagagaagccatgatgcaggcttggagcgattatcttgacgaattgcgggaggcggccagggaagaggccgccgacaattaa

SEQ ID NO: 77820 - protein, 202 aa, Unknown
  Obtained from environmental sample
  DOMAIN (10)...(178): Phage integrase family
  misc_feature (1)..(202): Xaa is any amino acid
MRAVKSPADLGRLLLALESISHTLAGKALDLAAYVFLRASELTGARWSEIDLASGFWRLPPERMKAKGEHLIPLSRQVKERLEALKELTGGGPCVFPAWAGGQANMNPESLRRALNRLGYGPRALGGGHTPHGFRSCASTFLRERGFDPAWIEIQLAHAERDKIVKAYNHASYIPQREAMMQAWSDYLDELREAAREEAADN

SEQ ID NO: 77821 - DNA, 645 bp, Unknown
  Obtained from environmental sample
  misc_feature (1)..(645): n is a, c, g, or t
ttgcaatcaatagctacattccaaaaggcacggcagagctttggccgactcttggccctgcgtcgcgccgggcgcgtttccgctccttggtttttcctcatcgcttcttcattttttttggactcggtcgaaaattggacggccgccctcgacaaggcgctgcccgggttccagcaaacaaaaaatgaaggcaagggaatttttttggccggatcgccaatattcttcccaaacttcaagctgctgcatctattggaagatgtaggtctgttagttgtgggcgacgacctctgctcttctgagagaatattccctctcaatgtggcagttggcgacccatctaaagaggggctgttgagggctttggccgaaagctaccaccagggctgtttgtgtccgacattcggcgacaacgagcgccgcattaacaacatttgggaggcacggcaaggcgcaaatttcaatggcgtggcctttcatgtcctcaagggttgccacccctacgacctagagagcttttcccttgaggagccattaaaaaaagagggactccactttttgagggtggagacggattattcttttgaggattcgcaaagcatgctgacccgactggaagcctttggccggactttgggagattaa

SEQ ID NO: 77822 - protein, 214 aa, Unknown
  Obtained from environmental sample
  misc_feature (1)..(214): Xaa is any amino acid
MQSIATFQKARQSFGRLLALRRAGRVSAPWFFLIASSFFLDSVENWTAALDKALPGFQQTKNEGKGIFLAGSPIFFPNFKLLHLLEDVGLLVVGDDLCSSERIFPLNVAVGDPSKEGLLRALAESYHQGCLCPTFGDNERRINNIWEARQGANFNGVAFHVLKGCHPYDLESFSLEEPLKKEGLHFLRVETDYSFEDSQSMLTRLEAFGRTLGD

SEQ ID NO: 77823 - DNA, 891 bp, Unknown
  Obtained from environmental sample
  misc_feature (1)..(891): n is a, c, g, or t
ttggcgccggtaaggcgcgaggtttttaataaatcaaatgataaagccattgcgccggcctgtgtgttgtttttcaattatacgaaaagtcaaaatacagataataatcttatagagcacattactttaaaaccaagccgttttttctcaatgtttaaaatatttactattaatcgtcatgatataaaaacagtacaacaagacagattgaaaaaatatgattggttatggaaagttctggtttatggttcatatttggattttaattttataaaccgactgaaagaaaattatcccacaatacaaaaatgcattgataataatggcaattttatcgttgggcagggaataacgattggcggtggtgatgaaaatgatgtttctgatttaattggaaaacaatatattgacacaaaaacggatattcgtcaattttggataaatccaaataacagtaataaatgggagcgtggtattgtacatagaccaagaaatcgaaagttgtttgatgcccctgttttacttattaaaaaaggtttccagaataatttttcaatggtatccgcaatttcatatcatgacgctgtttttactgattcattaactgcaataaaaacaacaaaaggaaatatttctttattaagaaatattgcggggttaattggttcgacagtaacagcttacttcaatttaatgacatttagttcatccggcattgaaagagaacagtcttttgacgaagaaaaattagatgtccccttttgtgaagatgatagtatttctgacatagtgaatgacatagaanaattattaattcaaaaacaccannacacattagaggatgataatattncatatttggtagataataagtatattgaaattaaataa

SEQ ID NO: 77824 - protein, 296 aa, Unknown
  Obtained from environmental sample
  misc_feature (1)..(296): Xaa is any amino acid
MAPVRREVFNKSNDKAIAPACVLFFNYTKSQNTDNNLIEHITLKPSRFFSMFKIFTINRHDIKTVQQDRLKKYDWLWKVLVYGSYLDFNFINRLKENYPTIQKCIDNNGNFIVGQGITIGGGDENDVSDLIGKQYIDTKTDIRQFWINPNNSNKWERGIVHRPRNRKLFDAPVLLIKKGFQNNFSMVSAISYHDAVFTDSLTAIKTTKGNISLLRNIAGLIGSTVTAYFNLMTFSSSGIEREQSFDEEKLDVPFCEDDSISDIVNDIEXLLIQKHXXTLEDDNIXYLVDNKYIEIK

SEQ ID NO: 77825 - DNA, 480 bp, Unknown
  Obtained from environmental sample
  misc_feature (1)..(480): n is a, c, g, or t
gtggatccnccttgtggcagggagacttgggactgggaaggttggcggctccaccccttcgcactgccgcacgacgccatagacccagtagcttacagaatagaggtcggcggcacaaacctagcggtgataacggacttgggatacgccacgaccctgaccatcgaatacgcgagcgaccttgatctgttggcactggaatccaaccacgatgtgggaatgttgcgggacggcccctacccatcgcagttaaaggcccgcatactcagccgcgtggggcacctgagcaacgactcgtgcgctgagatgctggacagggtgctttcgcccaagctgaagcacattgtactggcccacctgagcgagcagaacaacgaccccgcgctggctaggctgacctcggcggaggtcatcaaaaagacctgcggcgcgtgcctgcacgtagcaagccaagacgaggcgtttgaagtgccactttga

SEQ ID NO: 77826 - protein, 159 aa, Unknown
  Obtained from environmental sample
  misc_feature (1)..(159): Xaa is any amino acid
MDPPCGRETWDWEGWRLHPFALPHDAIDPVAYRIEVGGTNLAVITDLGYATTLTIEYASDLDLLALESNHDVGMLRDGPYPSQLKARILSRVGHLSNDSCAEMLDRVLSPKLKHIVLAHLSEQNNDPALARLTSAEVIKKTCGACLHVASQDEAFEVPL

SEQ ID NO: 77827 - DNA, 606 bp, Unknown
  Obtained from environmental sample
  misc_feature (1)..(606): n is a, c, g, or t
atggcgggtctaaagtgctacatagccactacagagacggccaaacataggacttttgtatttcaagacgctggcgtggtgctggacaacagtgcgatagcgatggccagtgaagatgcgtaccatttgggcgtactgtcctcaaaaatccatcgcgtctggttcaccgcgtggtgcgccagtttgggcaagaccgaaagatacaccaagtccctctgtttcgacccattcccattcccagacccgccggaggcggcaaaagcagagataagggcgcttggcgaggaactggacaaccacataaagggcgcgcagcagaggggcgcgacaatcacgcagatatacaacgtggtggagctaatcagggcaggtgccgcgctgagcgcgatccacaggccaatccacgaatgggcggcaacggacatactgatagagattcacgacagactggacgccgccgtgtcccgcgcatacggctggcctgccgacctgtccgatgaggagaccctggagcgcctgacggcgctgaacgccgagagggccgcggaagaggccgccggcaacatccgctggctgaggccggagtaccagtgcagacagagctaa

SEQ ID NO: 77828 - protein, 201 aa, Unknown
  Obtained from environmental sample
  misc_feature (1)..(201): Xaa is any amino acid
MAGLKCYIATTETAKHRTFVFQDAGVVLDNSAIAMASEDAYHLGVLSSKIHRVWFTAWCASLGKTERYTKSLCFDPFPFPDPPEAAKAEIRALGEELDNHIKGAQQRGATITQIYNVVELIRAGAALSAIHRPIHEWAATDILIEIHDRLDAAVSRAYGWPADLSDEETLERLTALNAERAAEEAAGNIRWLRPEYQCRQS

SEQ ID NO: 77829 - DNA, 795 bp, Unknown
  Obtained from environmental sample
  misc_feature (1)..(795): n is a, c, g, or t
atgcgctacgccaaagacctcgcactgcacggggagcatgtcccgttcctgattgtctgcgacgtgggcatgggcttttatgtatgggacaggttttcgggcgactacggcaggtacgccagccgcagggtgatacccctggaggacctcgtcaaaagcgacgtgcaggactacctgcgcgcgatctggaccgacccctacagcctggacccaggcgcggtcacggccgccgtcacacgcgaaatagccacagagatgggcgaactgaaaaagcaactcgccgatgtggagccggatcccaagcgcattgccctattcctgatgcgggtggtgttcacgttcttcgccgagagcataggcctcttgcctgagggcctgttttcggctggcctgaaactctgggagcacgagctggagcacttccagcagggcctaaacgacttttgggcgatgatggacaagggcggcaggttcgggcacaacaagctcaaacagttcaacggcgggcttttcaaggatgtcgagtgcctgcccctttcaagggcccaagtcaggtggatgatccagatagccgaaaagtcttggaaggacatagacccagccatattcggtgcccctgctgaaagcgcgctggacacaaagacgcgcaagaagttcggcatacactacacgccaagggcccacatacagcgcctgaaagacgccacgtttggcgaccacctgtgggggggagtgggatggttctgcacaaagagccgcaaaccctgcctggacagcctgaaaagcacgagataa

SEQ ID NO: 77830 - protein, 264 aa, Unknown
  Obtained from environmental sample
  misc_feature (1)..(264): Xaa is any amino acid
MRYAKDLALHGEHVPFLIVCDVGMGFYVWDRFSGDYGRYASRRVIPLEDLVKSDVQDYLRAIWTDPYSLDPGAVTAAVTREIATEMGELKKQLADVEPDPKRIALFLMRVVFTFFAESIGLLPEGLFSAGLKLWEHELEHFQQGLNDFWAMMDKGGRFGHNKLKQFNGGLFKDVECLPLSRAQVRWMIQIAEKSWKDIDPAIFGAPAESALDTKTRKKFGIHYTPRAHIQRLKDATFGDHLWGGVGWFCTKSRKPCLDSLKSTR

SEQ ID NO: 77831 - DNA, 714 bp, Unknown
  Obtained from environmental sample
  misc_feature (1)..(714): n is a, c, g, or t
gtgctcaaacgcgaacatcctgcccgtgcgcccaaggccggactggatttcgtccagaatgagcaggcagtggtttttgtccgcgatttcccgcagtgccttgaggaagccntgcggcggaatgactacgccgccctcgccctggattggctccatgaagatggcggccgtgtttggcgtgatggcggcttccaccgccgatatgtccccgtatgggactatcttgaagcctggcgtgaatggtccgaagttggagaagctgtcggggtccgtgctgaagccgactattgtggtggtgcgcccgtggaagttgccgctggcggtgattatttcggctttggggtactcgacgcccttgacgtcgtaggcccacttgcggactgccttgatggcggtttcgactgcctccgcgccagagttcatcagcagcgctttgtcgaagccggtcatgcggcacagtttttccaacagcggcggaaacatgtcgttgcggaatgcgcggctggtcagtgccagcttgcggatctgctggatcatcgcttcggctatgtaggggtggttgtgcccttggttgacggcgctgtatgcggcaaggaagtccatgtacttgttgccatctacatccgtcagaaacacgccctcgccctttgtgcagaccacgtccaacgggtggtagttgtgcgccccgaattggttttcctgctctatcagtga

SEQ ID NO: 77832 - protein, 237 aa, Unknown
  Obtained from environmental sample
  misc_feature (1)..(237): Xaa is any amino acid
MLKREHPARAPKAGLDFVQNEQAVVFVRDFPQCLEEAXRRNDYAALALDWLHEDGGRVWRDGGFHRRYVPVWDYLEAWREWSEVGEAVGVRAEADYCGGAPVEVAAGGDYFGFGVLDALDVVGPLADCLDGGFDCLRARVHQQRFVEAGHAAQFFQQRRKHVVAECAAGQCQLADLLDHRFGYVGVVVPLVDGAVCGKEVHVLVAIYIRQKHALALCADHVQRVVVVRPELVFLLYQ

SEQ ID NO: 77833 - DNA, 681 bp, Unknown
  Obtained from environmental sample
  misc_feature (1)..(681): n is a, c, g, or t
gtgccaatgtacgcacgtgacggcaagagcctgggctttaccactaacaccgctgcacttgcggcagtcaaagaaatgcttgacatacagcttagattaaaggccgcgggagccctgtacgatcccgaggatgcctttgtttccggccgtggcttcccggaaatgccccttacccagggtaaggcctggaacaactggaactggagcaatcagcatgtcggctatgcagccgccgcaaacaggcccttggattactatatctgcccggccccaaccgccaccggtatgaaaacgccattcggcacctatcttaaaccgtccatgcttatctccatgctcacaacttccaaaaaccaggatctggccgcgaggtttattgacttctttatcaatgatgaggaagcaaaccgcatcctgatggcggaacggggtgtcccaattcccaccaacattcttcaagacctgtctacccgtgtcgatgccaatatgaaatacacctttgattacatcacaaaagccacatccgtaagttcagccattgaccccccggatcccacgagagccggagaagcgcgggacgctatgaggccgattattatccagtgcctgacggggcgaatcacttccgatgccgccattacccagatggttcaggcggccaacgcggtattgagcaggtag

SEQ ID NO: 77834 - protein, 226 aa, Unknown
  Obtained from environmental sample
  misc_feature (1)..(226): Xaa is any amino acid
MPMYARDGKSLGFTTNTAALAAVKEMLDIQLRLKAAGALYDPEDAFVSGRGFPEMPLTQGKAWNNWNWSNQHVGYAAAANRPLDYYICPAPTATGMKTPFGTYLKPSMLISMLTTSKNQDLAARFIDFFINDEEANRILMAERGVPIPTNILQDLSTRVDANMKYTFDYITKATSVSSAIDPPDPTRAGEARDAMRPIIIQCLTGRITSDAAITQMVQAANAVLSR

SEQ ID NO: 77835 - DNA, 504 bp, Unknown
  Obtained from environmental sample
  misc_feature (1)..(504): n is a, c, g, or t
ttgtaccatcacccgctcaactgctactacaaaaccaaatacgcgggcggctctaacccgccggactgcggcagtttcgacggcgtaatcggcgcgggcgacccgggcggcgagtgcaaaaaatgtccgcttaatcagtacggcgcggcagaggaaggaggcggcaaagcctgcaaaaaccgccgcagaatctatgttttgcgcgagggggacgtgttcccgatgttgctgtcgctcccgacaggaagccttaaagagtttacgaaatatctaaaaagactgctttcaaaaggacaaaaatcgggcgcggttgttacgaaattttcgttgcaaaaggcgaccaatcaaggaggcgttatctactcgcaggcgcagttcgcggtcgaccgcgttcttacgccggaagagtacgcgcttgtgggaaaaatgtccgagcagatgagggagcatagccgtaacgtcgggttcgaggtcgaccccgatacgggcgaagtcggcgcgtaa

SEQ ID NO: 77836 - protein, 167 aa, Unknown
  Obtained from environmental sample
  misc_feature (1)..(167): Xaa is any amino acid
MYHHPLNCYYKTKYAGGSNPPDCGSFDGVIGAGDPGGECKKCPLNQYGAAEEGGGKACKNRRRIYVLREGDVFPMLLSLPTGSLKEFTKYLKRLLSKGQKSGAVVTKFSLQKATNQGGVIYSQAQFAVDRVLTPEEYALVGKMSEQMREHSRNVGFEVDPDTGEVGA

SEQ ID NO: 77837 - DNA, 423 bp, Unknown
  Obtained from environmental sample
  misc_feature (1)..(423): n is a, c, g, or t
ttgagcttgagagaagagttgcggtacggttgtccgcaacctgttacctcaaaaaatacaataaatgaggaaacagaaatgagtagaaatcctaaatttaacgcttccggctgtgttgacaaggtcgctttcgaggcaatcggtcgggtaactcacggggagcggaaaaagtcaaaattgcaaaaagtgtatatatgttcgccgtttcgcggagatgttaaaaccaacgccgcgaacgctgttcggtactgccgattcgcgttaaagcgcggcaaattcccaatcgcgacgcatatatggtttccgcgatttttggacgataacgtccccgccgagcgcgtactcgcgctaaaaatcggcgggtggctgttaagtcaatgcggcgaagtctgggttttcccggacgaattagcgatggtatga

SEQ ID NO: 77838 - protein, 140 aa, Unknown
  Obtained from environmental sample
  misc_feature (1)..(140): Xaa is any amino acid
MSLREELRYGCPQPVTSKNTINEETEMSRNPKFNASGCVDKVAFEAIGRVTHGERKKSKLQKVYICSPFRGDVKTNAANAVRYCRFALKRGKFPIATHIWFPRFLDDNVPAERVLALKIGGWLLSQCGEVWVFPDELAMV

SEQ ID NO: 77839 - DNA, 648 bp, Unknown
  Obtained from environmental sample
  misc_feature (1)..(648): n is a, c, g, or t
atgctgcgcgaaaacaatggcagcactacgctcgaaaatcgtaagtatttagcagcacaagcattcaacgtgtcgagccattacgatagcgcaatcttttcgtacttcaaccgcagccaaaatatttcctcgtttaagcaaagcgtacatggcagcatgaacctgcgctacggcgaaaatccccaccaaaaagcagcattttatggtcgtttcaacgatatgtttgagcagctgcacggcaaggaaatttcgtacaacaacctgttagatattgacgctgctgttgcgctcatcaacgaatttagcgagcctacctttgccatactaaagcataacaacgcttgtggtgtagcctcacgccctaccctgccgcaagcatggagcgatgcgctggctagcgaccctgtatcagcatttggcggcgtacttatttgcaatcgcgagctggacaaggctacggcagaagaggtgaataagctattttgcgaggtggtcattgcaccttcatacaacgccgaaggtttggagattttaaagcagaaaaaaaacagaattattttggtgacaaaaaaccttacgctatctgccatgcaaagctcgtacgctactcaatggtgtagtgctgcaggagcgcgacttggctactga

SEQ ID NO: 77840 - protein, 215 aa, Unknown
  Obtained from environmental sample
  DOMAIN (2)...(215): AICARFT/IMPCHase bienzyme
  misc_feature (1)..(215): Xaa is any amino acid
MLRENNGSTTLENRKYLAAQAFNVSSHYDSAIFSYFNRSQNISSFKQSVHGSMNLRYGENPHQKAAFYGRFNDMFEQLHGKEISYNNLLDIDAAVALINEFSEPTFAILKHNNACGVASRPTLPQAWSDALASDPVSAFGGVLICNRELDKATAEEVNKLFCEVVIAPSYNAEGLEILKQKKNRIILVTKNLTLSAMQSSYATQWCSAAGARLGY

SEQ ID NO: 77841 - DNA, 378 bp, Unknown
  Obtained from environmental sample
  misc_feature (1)..(378): n is a, c, g, or t
atgctgattggcaatacaattgccgatctgattggcggctgggggttctggttcgattggtcaatcggcaacggcgttctcggactgttcatcggtgcccttccgctttacggtgccaagatcgatgaaggcatcttcggcgtcaagcacgcgataatctacgctgtgctggtcatcataggaaacgcgctggctttcggtcttgtgacgcctatcctcacatcatggttctattcctccgatttggaaatcaccttcctgcaggcgtttgcttccggaatttccaacaccgccgtgttgataattattggcatccctcttctcttcctgcttgcaaaccgttacaaaaagcgcagcaacctcaaagaagaagattga

SEQ ID NO: 77842 - protein, 125 aa, Unknown
  Obtained from environmental sample
  DOMAIN (1)...(124): Protein of unknown function (DUF1393)
  misc_feature (1)..(125): Xaa is any amino acid
MLIGNTIADLIGGWGFWFDWSIGNGVLGLFIGALPLYGAKIDEGIFGVKHAIIYAVLVIIGNALAFGLVTPILTSWFYSSDLEITFLQAFASGISNTAVLIIIGIPLLFLLANRYKKRSNLKEED

SEQ ID NO: 77843 - DNA, 516 bp, Unknown
  Obtained from environmental sample
  misc_feature (1)..(516): n is a, c, g, or t
atgttgccaataattcttggaataggagccggaatagccggattagtgggtattggtaaaggtataaaagcagtaaaagataacaaagatgccaagcgggtcaatcaaagggcggaggatctgattgcggaagcaaaagaaacaatagagactgccagaaaatacagcagcggctcgctagaaattttgggtaggaaaaagatttttaccctggacaataacatggagcgctttatcaatacatttaaaaagataaaaaatattgatatccaggattcgataggccttgatgaattaaaaaaattcaagattgactcacaatcatttactgaattaagggaaatgagcggttacgcttcttcaattgcaagcgggattctgagcggcgccggcggcggagcgttagcagcttttggagcgtatagcggagtaatggcatttggtgccgcttctaccggaacagctataacagccttaagcggcgcggcggcgaccaatgcaacccttgctttttag

SEQ ID NO: 77844 - protein, 171 aa, Unknown
  Obtained from environmental sample
  misc_feature (1)..(171): Xaa is any amino acid
MLPIILGIGAGIAGLVGIGKGIKAVKDNKDAKRVNQRAEDLIAEAKETIETARKYSSGSLEILGRKKIFTLDNNMERFINTFKKIKNIDIQDSIGLDELKKFKIDSQSFTELREMSGYASSIASGILSGAGGGALAAFGAYSGVMAFGAASTGTAITALSGAAATNATLAF

SEQ ID NO: 77845 - DNA, 354 bp, Unknown
  Obtained from environmental sample
  misc_feature (1)..(354): n is a, c, g, or t
atggggcacgccgaaggctatgcggccatggaggcggttgtgcgcaactaccctttgccgttctccgtttttgcggtcaatgacgaaacagcgcttggggtgctgaagttttgccggcgcaacggcctgtccgttccggcggatgtcgaaattgtcggtttcagcaatatcgccttcctggacatgatcagcgcgcgcctgtccaccgtgaatattccggccgagacgatgggggaggaggcggcgcgcatgttgctgcacaggattgaaggcgggacggaagacggacgggtgaccgtgctggagacgacctttgtgccgggcgagacgaccttgaaaaaatatccggcgtag

SEQ ID NO: 77846 - protein, 117 aa, Unknown
  Obtained from environmental sample
  misc_feature (1)..(117): Xaa is any amino acid
MGHAEGYAAMEAVVRNYPLPFSVFAVNDETALGVLKFCRRNGLSVPADVEIVGFSNIAFLDMISARLSTVNIPAETMGEEAARMLLHRIEGGTEDGRVTVLETTFVPGETTLKKYPA

SEQ ID NO: 77847 - DNA, 402 bp, Unknown
  Obtained from environmental sample
  misc_feature (1)..(402): n is a, c, g, or t
gtggctgccggcctcgccggagaggtcggcccgggcgcgctgatcatggaatccagcttcaccaggctgtatgacgtgggcaaaagcctgtatccttatatgccggtcagtttgtttctgccccaggactatgactccgtcgcctctatgcgcggcaaaaattttcctttgctgatcatccatagtcctgacgacaagctggttccctacgccctgagtgaggccgttttcgccgcatacagcggcccgaagcaattcgtgcgcatcagcggttcccataattcggggtttcagacggacaggggcaggtatcttgaagggctggagacttttttgcggtccctgccgcctcgaaatgcggagcatttcgagaggcaaggcgagacgatgctctcgccgtag

SEQ ID NO: 77848 - protein, 133 aa, Unknown
  Obtained from environmental sample
  misc_feature (1)..(133): Xaa is any amino acid
MAAGLAGEVGPGALIMESSFTRLYDVGKSLYPYMPVSLFLPQDYDSVASMRGKNFPLLIIHSPDDKLVPYALSEAVFAAYSGPKQFVRISGSHNSGFQTDRGRYLEGLETFLRSLPPRNAEHFERQGETMLSP

SEQ ID NO: 77849 - DNA, 423 bp, Unknown
  Obtained from environmental sample
  misc_feature (1)..(423): n is a, c, g, or t
atgctgcacgaacttattatgggcggagacaaaaacatggcgcttgccaaatcgttggacgcgagaatggcgcggcagaaagtcatagccaacaatatcgcgaacgtagaaacgcccggttatcacagaaaagaagtgaaatttgaagaaagtttggcagacgcgcttaacaggtcgcttttacagggtgcaaaaacaaacgccagacattttgaattgggacgacccaaagtcggcgacgtgcagtttgaggtggtagaaccgattgaccacacgatgtcaagcggagtaaacaacgtggacattgattttgaaatggcatcgcttgcggagaatcaaatcgggttcagttatgcgatgaaaatgctaaaaggcagtcacgataaattaaacgcggcgatacaaggacagccgataaaataa

SEQ ID NO: 77850 - protein, 140 aa, Unknown
  Obtained from environmental sample
  DOMAIN (13)...(42): Flagella basal body rod protein
  misc_feature (1)..(140): Xaa is any amino acid
MLHELIMGGDKNMALAKSLDARMARQKVIANNIANVETPGYHRKEVKFEESLADALNRSLLQGAKTNARHFELGRPKVGDVQFEVVEPIDHTMSSGVNNVDIDFEMASLAENQIGFSYAMKMLKGSHDKLNAAIQGQPIK

SEQ ID NO: 77851 - DNA, 822 bp, Unknown
  Obtained from environmental sample
  misc_feature (1)..(822): n is a, c, g, or t
ttgaattcagcggggagatatgggagattttttaagcaacttntgacccaaacttccgacgtttggcgaaagttatccgttcaacagcaaattataattacggttttgaccgtgcttatgtttataggtttgctgtggcttgccatttggaacggagcaggcggcggcgcgagcggcggcggttcaagcggcggttccgcaagcggatacaaaagattgttttcaaatcttccgatagaagaattggcaaacgttaccgacgctttgggacaagcgggtttcaaatataaaatatccaacaacggaacttccgtagacgtagaagaaaagacgtattacgaggcgcgtatggcgcttgcgcgcgaaggacttcccgcaaacagaggcgtgggctgggaattatttgattctaaaaatttcggcgataccgactttgaattaaaattgaaagcccgaagagcgcttgaaggcgaacttactcggacaatcaagtcgattagcgaagtcgaagacgcaagagtccatttaactttaccggaagaatccctttttcttgaagaaaaaaagccggctaaagcggcgattgcggtaaaagttcgcgcaagcagaactttgagccgagaacaaattaacggtatcgcgtatcttgcggcaagcagcgtggacggcttggctattaacaatatatcaatcgtggattttcagggacgtgtgctttcgcgtcccgcagacgaaaacgacgctactttaatcggaagcagaaacatggaaatgcgtcaggatgtcgaaaagaatctgaaaggaaagtcgtttcgcttttga

SEQ ID NO: 77852 - protein, 273 aa, Unknown
  Obtained from environmental sample
  DOMAIN (25)...(250): Secretory protein of YscJ/FliF family
  misc_feature (1)..(273): Xaa is any amino acid
MNSAGRYGRFFKQLXTQTSDVWRKLSVQQQIIITVLTVLMFIGLLWLAIWNGAGGGASGGGSSGGSASGYKRLFSNLPIEELANVTDALGQAGFKYKISNNGTSVDVEEKTYYEARMALAREGLPANRGVGWELFDSKNFGDTDFELKLKARRALEGELTRTIKSISEVEDARVHLTLPEESLFLEEKKPAKAAIAVKVRASRTLSREQINGIAYLAASSVDGLAINNISIVDFQGRVLSRPADENDATLIGSRNMEMRQDVEKNLKGKSFRF

SEQ ID NO: 77853 - DNA, 780 bp, Unknown
  Obtained from environmental sample
  misc_feature (1)..(780): n is a, c, g, or t
atgatggattcagcacaggaacgacaagaacaaagttacaccgctcaacaaaaaacacccaaggcccagttgattgcggcaatcgaaaatgatgaatccctcgaagttatacgtggcattatcgaggcaggcgcggatgtcaacgcgcgagacgacgacggaagtacagccttgataatagcggcagagcgtaacaaaaaccccgaaatcttgcgtctcctcatcgaagctggcgcagatgtccatgtcagaagcaatttgggattgagaactgagcagacagctttgatgagagcggcatcgaaaaacaataatcctgaaattttgcgtgttcttatcgaagccggtgcgaatgtcaacactacaagcatctgggagagaacagccctgacgtgggccgcaacgaaaaacgagaatcctgaaattctgcgtgttcttatcgaagccggcgcggatgtcaacgctaaagacagcagtgggagaatagccctggtgtgggccgcaaagaacaacaataatcccgaagttctgcatgtccttcttgaaaccagcgcgggggtcaatgcacaagacaatgtacaaacagccttgatgtgggccgcaggaaaaaacgaatgggacgcaaggggaaacgaaaatcctgaagttctgcgtgtccttatcaaagcgggagcggatgtcaacgcaaaaaccgactacggatggacagccttaatgtgggccgcacagtacaacaaaaaccctgaagttctgcggtcctatcaagccccggccatctga

SEQ ID NO: 77854 - protein, 259 aa, Unknown
  Obtained from environmental sample
  DOMAIN (159)...(192): Ankyrin repeat
  misc_feature (1)..(259): Xaa is any amino acid
MMDSAQERQEQSYTAQQKTPKAQLIAAIENDESLEVIRGIIEAGADVNARDDDGSTALIIAAERNKNPEILRLLIEAGADVHVRSNLGLRTEQTALMRAASKNNNPEILRVLIEAGANVNTTSIWERTALTWAATKNENPEILRVLIEAGADVNAKDSSGRIALVWAAKNNNNPEVLHVLLETSAGVNAQDNVQTALMWAAGKNEWDARGNENPEVLRVLIKAGADVNAKTDYGWTALMWAAQYNKNPEVLRSYQAPAI

SEQ ID NO: 77855 - DNA, 840 bp, Unknown
  Obtained from environmental sample
  misc_feature (1)..(840): n is a, c, g, or t
gtggtctccatcttttgtcccttcatgtcggatgtctatagtgccgaggccggcaagagactgttcgggctgatagccgtgggtggcacactgggcgccatcgccggcgcgtgggtcaccgcagggctggcgaatctgctggggcagggccggctccactggctattcgtggcctctgcgctgttggttgaactggcggcgctgtgcgtgctcgcgctgttcagaatcaatggcggacgcgacgcagagggcaccttggacgatgggtcgcacgaacctgggccaagcgcggcggcagggttgacgctgttgggcaagtccaggctcctccagtcaatatcgctgtacatgctgctctacgcagtggcgggcacgttcctgtacgtttatcagggaagggtggttgaggcggccttcgcgtccgctgcggcccgcacagccgccttcgccaaaatagacctctgggcaaacgtgctgaccctggcggcgcaggtgtttttcacgcacaagctggtggcaagggcaggggtgcctgtgacgctggcgatactgccgctgaccacgatgatgggcttcggggccctgtggctatgccccggctttgccgtgctggccatattccaggtggccagaaggggcctgcactacgccatagaccgccctgtcagggaaatgctgtacatccccatgtcggccgacgccaagtacaaggccaagagcttcatggacaccttcgtctatagggcaggcgactttataggcatctggatcgcccccgcgctaaaggccgtgtcgctttccctgtgcctgcccgctatcggcgtgtccgcgctgtggtag

SEQ ID NO: 77856 - protein, 279 aa, Unknown
  Obtained from environmental sample
  misc_feature (1)..(279): Xaa is any amino acid
MVSIFCPFMSDVYSAEAGKRLFGLIAVGGTLGAIAGAWVTAGLANLLGQGRLHWLFVASALLVELAALCVLALFRINGGRDAEGTLDDGSHEPGPSAAAGLTLLGKSRLLQSISLYMLLYAVAGTFLYVYQGRVVEAAFASAAARTAAFAKIDLWANVLTLAAQVFFTHKLVARAGVPVTLAILPLTTMMGFGALWLCPGFAVLAIFQVARRGLHYAIDRPVREMLYIPMSADAKYKAKSFMDTFVYRAGDFIGIWIAPALKAVSLSLCLPAIGVSALW

SEQ ID NO: 77857 - DNA, 621 bp, Unknown
  Obtained from environmental sample
  misc_feature (1)..(621): n is a, c, g, or t
ttggaggtatttatgataaggaagacactagctgttatttttacttttgttgttgtgttaacgggatgcagtagagctaattatagttctgcggcattttctcttgaacgttcaccgcgcgaagcagccgacgaggctgatgagttatccgccgaaaacgcttatgatactcaggaaataacggttcgtaaattgataataagttcaaaccttcaaataagaattgaaaatttggacagcggcgttaacaaattgaacgaaataatgaataaatatagtacatacgcctcttcaattaatgtctatgaaaattcaagaagttataccctgaaagtaccggcgttaaattataaaatttttcttgatgaaataatgggaattggaaaaataattagctacagggaaacaacggaagatgtgacgctgaagtattacgatttggaaagcaggttgaatacaaaaaggggattaataaaaacttttcaagattatcttaacagagcanaaaatatagaagaaatcttgtcggtagaatctaanatcgcggaattacaggcggaaattgacgatgtcggaagacaattccggctgctgaataatctgatagattattcaacataa

SEQ ID NO: 77858 - protein, 206 aa, Unknown
  Obtained from environmental sample
  SIGNAL (1)...(26)
  misc_feature (1)..(206): Xaa is any amino acid
MEVFMIRKTLAVIFTFVVVLTGCSRANYSSAAFSLERSPREAADEADELSAENAYDTQEITVRKLIISSNLQIRIENLDSGVNKLNEIMNKYSTYASSINVYENSRSYTLKVPALNYKIFLDEIMGIGKIISYRETTEDVTLKYYDLESRLNTKRGLIKTFQDYLNRAXNIEEILSVESXIAELQAEIDDVGRQFRLLNNLIDYST

SEQ ID NO: 77859 - DNA, 369 bp, Unknown
  Obtained from environmental sample
  misc_feature (1)..(369): n is a, c, g, or t
atgatgacgaccaaaaaacaaaatactgaatttggaattgtcgcttccttagcgattatagttgtatccttatggtgcaaagttgatttatatatttttgcggtaatcacgcttttggtgtgtctgcttttcccgaaactttattctcccttttcccaattatggtttggattggcaaaagtattggaacggatgatgtcaaaatcgctcttgtttctgattttcttttttgtaattacgcctgtcggaatgctacgaaaagcactgggaaaagatagtctgcatacagggttttcaaaaaaacagaaaagcatttttgagtccacaacgcatacttataaatcggaaaatatggaaaaacaattttaa

SEQ ID NO: 77860 - protein, 122 aa, Unknown
  Obtained from environmental sample
  misc_feature (1)..(122): Xaa is any amino acid
MMTTKKQNTEFGIVASLAIIVVSLWCKVDLYIFAVITLLVCLLFPKLYSPFSQLWFGLAKVLERMMSKSLLFLIFFFVITPVGMLRKALGKDSLHTGFSKKQKSIFESTTHTYKSENMEKQF

SEQ ID NO: 77861 - DNA, 741 bp, Unknown
  Obtained from environmental sample
  misc_feature (1)..(741): n is a, c, g, or t
ttgtcatcgtggtatatctatcatcaaatggaaaggcgcccgtcgaaaactgacgccatgtctggcgcatacctcggtcctgcctttacaaacaaagacatcgaaaacatgatcaggagatatggtattcatgcacagtatcatcatgatgaggaactgtttgccatcgtagcgaagttattagatgaaggacgaattgtcggttggtttcagggacgtatggaattcggtccgcgggcattgggtaatcggtcgattattgccgatccccgaaacacagacatgcagaaaaaactcaatatggaaatcaaattcagggaaagtttccgcccgtttgcgccggctgttctggaagaagacgttcacgaatatttcgaattgaatgattcttcgccctacatgcttcttactgctcctgtagccgacaaataccggttatctgtgccgtataattacgatcaacttgattattctgaaaaattatataccaatcgttctcgcctgcaagccatcacacacgtcgatttttctgcgcgagtacaaacggtctcagcaaaaaccaaccctcggttccatgcattgataacagcatttaaggcgcttacaggatgcggtttagttgtaaacaccagctttaatgtccgtagcgaacccattgtttgtactcctgatgacgcataccggtgtttcataaatacaggcatggattatttagtgatggataattacttattcacgtaa

SEQ ID NO: 77862 - protein, 246 aa, Unknown
  Obtained from environmental sample
  DOMAIN (1)...(181): Carbamoyltransferase
  misc_feature (1)..(246): Xaa is any amino acid
MSSWYIYHQMERRPSKTDAMSGAYLGPAFTNKDIENMIRRYGIHAQYHHDEELFAIVAKLLDEGRIVGWFQGRMEFGPRALGNRSIIADPRNTDMQKKLNMEIKFRESFRPFAPAVLEEDVHEYFELNDSSPYMLLTAPVADKYRLSVPYNYDQLDYSEKLYTNRSRLQAITHVDFSARVQTVSAKTNPRFHALITAFKALTGCGLVVNTSFNVRSEPIVCTPDDAYRCFINTGMDYLVMDNYLFT

SEQ ID NO: 77863 - DNA, 471 bp, Unknown
  Obtained from environmental sample
  misc_feature (1)..(471): n is a, c, g, or t
atgaagaagtggcttaaaatatctctcatctcgttagcctcattgattggggtgtttctgcttgctttcggcattgtttgctatatgttgtttacgcccaaacaactgacaccgctggctaacaagtatatcaatcaatatatcaatgccgatgtgaaaattgaaaaaattgatttgtcttatttttcggtttatccgcatgtgcgtttggatattgataacgtacttattacctcaaaaaaccatccgcaagatacgcttacctatatcccaaaggctaaagccaaattgaattttaatcaatttgtgtttaaaaacaatttgattataacccaattggaattgagcggaggtgtaacccacgtgcatttcgaccccaacggcccaatgaattgggatatttttccaaacgacagcacgccgccccgatactacctcgacggctttggattcgctgttcaatgtnattga

SEQ ID NO: 77864 - protein, 156 aa, Unknown
  Obtained from environmental sample
  SIGNAL (1)...(22)
  misc_feature (1)..(156): Xaa is any amino acid
MKKWLKISLISLASLIGVFLLAFGIVCYMLFTPKQLTPLANKYINQYINADVKIEKIDLSYFSVYPHVRLDIDNVLITSKNHPQDTLTYIPKAKAKLNFNQFVFKNNLIITQLELSGGVTHVHFDPNGPMNWDIFPNDSTPPRYYLDGFGFAVQCX

SEQ ID NO: 77865 - DNA, 426 bp, Unknown
  Obtained from environmental sample
  misc_feature (1)..(426): n is a, c, g, or t
ttgcgggatggggggattttcggcgttacttcctgggaactattcttattaattgcgttccaggccaaaccgttcattgattcctttactttggccttgttgtgtttggctttttttaccccgtttggcagggggcttttcttatgggggcaggatggtggaaagggggatatcctttttgccctttgttcagggggaactcttgtttcggcgtttatcttagctgcggaccctgtgacaagcgcaaaatcttactggtgcatcctgggcgccgccatagccggcggctttatgacctggcttttccgttatcctggaaccgaaccttatggagcggttttttcagtattgtgtatcaatgggcttcttcctatagtccgaaatattgaaagccgctggttttatgaaaaacggaggatctcatga

SEQ ID NO: 77866 - protein, 141 aa, Unknown
  Obtained from environmental sample
  misc_feature (1)..(141): Xaa is any amino acid
MRDGGIFGVTSWELFLLIAFQAKPFIDSFTLALLCLAFFTPFGRGLFLWGQDGGKGDILFALCSGGTLVSAFILAADPVTSAKSYWCILGAAIAGGFMTWLFRYPGTEPYGAVFSVLCINGLLPIVRNIESRWFYEKRRIS

SEQ ID NO: 77867 - DNA, 720 bp, Unknown
  Obtained from environmental sample
  misc_feature (1)..(720): n is a, c, g, or t
atggctaaagaagagaaatgccctccttgtaaacaaatagtccccgaatttatggcgacctacggcgatatggtaacgttggttttgtgtttttttgtgcttttattcgccatgatgtcgccggacgcaaaaaaattcgaattagccgcttcgtcttttcaatcggcttttaacggcgttttaacaagtttgccgactgtagccgttaacaaggaagtaatgatgccgcggcttggcggagacgctcaaaacaagcacatggctgcggacgccgcacaaaaaatcagagaagtcgcctcaaaagaaaatatggacgacgcggtaaaagtagacgttaccgatacgggaatcgccataagaatttcggacaaggtaagttttgaccccggaagcgacaagttaaaaccggaatttgtcgcaattttggaaaaaatgatggaaatagtgagagaaaaacccggacgcgaaataagagtcgaaggacataccgacaatactcctataaatacggcaagatttccctccaactgggaattatctgcctcccgtgctttagcggtcgttaaatatttgtatcagcgcggcgaagaccctaaaaagttgtccggcgtcggatatggagagtttcgccctatcgttcctaacgatacagaagcacacaaaagagaaaacagacgaatagaagtttatatagaatatcttgaaaaagttaacaaataa

SEQ ID NO: 77868 - protein, 239 aa, Unknown
  Obtained from environmental sample
  DOMAIN (126)...(225): OmpA family
  misc_feature (1)..(239): Xaa is any amino acid
MAKEEKCPPCKQIVPEFMATYGDMVTLVLCFFVLLFAMMSPDAKKFELAASSFQSAFNGVLTSLPTVAVNKEVMMPRLGGDAQNKHMAADAAQKIREVASKENMDDAVKVDVTDTGIAIRISDKVSFDPGSDKLKPEFVAILEKMMEIVREKPGREIRVEGHTDNTPINTARFPSNWELSASRALAVVKYLYQRGEDPKKLSGVGYGEFRPIVPNDTEAHKRENRRIEVYIEYLEKVNK

SEQ ID NO: 77869 - DNA, 570 bp, Unknown
  Obtained from environmental sample
  misc_feature (1)..(570): n is a, c, g, or t
gtgcgacatcggcgccattttacaccaccgcccgagaactacatcaccattcagcactcgggtggtcagaccggcgaccagaaatatacattcggcaacgtggattcgagcaagacntacggcgcggaactgacattcagctatcttcaccagccgactagccttacgccctacctcaacggtgtgtggatcaaccgcacgttcaatcgcggcgggaaggagacagaccgcacgggcctgcccaagctgaacggcaacgtcggcgtcaggtacgagtgcggttccgcctcaagccttaatttccacgcggacgcttatggtcgctttacggcaggcagcgaagaagaccagattgacgaatccactaggaacaccgtcctgcggtatccaggctgggctacgctcaacttcgccttcggcgtgaaaaagcccttctccgccgacaaaaagcggagcttcttcgcggacgtcaacctgaacaacgtcctgaacaaagcgtatatccctgccatgagcacactggaagaccctggcttccacgttgtcgtccgcgccggcgtgaacttttga

SEQ ID NO: 77870 - protein, 189 aa, Unknown
  Obtained from environmental sample
  misc_feature (1)..(189): Xaa is any amino acid
MRHRRHFTPPPENYITIQHSGGQTGDQKYTFGNVDSSKTYGAELTFSYLHQPTSLTPYLNGVWINRTFNRGGKETDRTGLPKLNGNVGVRYECGSASSLNFHADAYGRFTAGSEEDQIDESTRNTVLRYPGWATLNFAFGVKKPFSADKKRSFFADVNLNNVLNKAYIPAMSTLEDPGFHVVVRAGVNF

SEQ ID NO: 77871 - DNA, 474 bp, Unknown
  Obtained from environmental sample
  misc_feature (1)..(474): n is a, c, g, or t
atgtcaatcgtcgtgcgcatggtgtacggcgaggccgcctttttgtttaccggcgacgccgaggggctttccgagcgcgagatgctcaggggcgagctgccacttcgatcagacgtattgaaggccggccatcacgggagcggttcgtcctcaacgtccgagtttttagacgccgttagcccgtctgtggttgtcatctcctgcggcaaaaaaaatgtctacggattcccggatgaaaaagtgctgaaaaacgtcatgaagccggagcgcaatataaccttgttccgcacggacgaggacggaacggtagtcataagcacagacggtcaaaatataacattgccaagcaaaaaggaggtagcccatgtactgggtaatagaccgtatagaaaacggcatagccgtattgataaatacggacacacaagaaacgttggatcggccccaaaaagatttgcccaacggcgcgaatga

SEQ ID NO: 77872 - protein, 157 aa, Unknown
  Obtained from environmental sample
  misc_feature (1)..(157): Xaa is any amino acid
MSIVVRMVYGEAAFLFTGDAEGLSEREMLRGELPLRSDVLKAGHHGSGSSSTSEFLDAVSPSVVVISCGKKNVYGFPDEKVLKNVMKPERNITLFRTDEDGTVVISTDGQNITLPSKKEVAHVLGNRPYRKRHSRIDKYGHTRNVGSAPKRFAQRRE

SEQ ID NO: 77873 - DNA, 693 bp, Unknown
  Obtained from environmental sample
  misc_feature (1)..(693): n is a, c, g, or t
gtgaacgccgaatggaacgtctccagtgcgacatgcttcaggcatgaaaaaaaggaaaacccgatgaacgcggaagtgcggcgtctcattgccgggtacgcggaagaaggactgcgtctgcgtgagaactttttcgccgcgcaggcggaaaacctggtggattgcgcgcggcgtatcgcttcggcagtggccggaggcaacaaactgctgatctgcggcaacggcggaagcgcggccgatgcccagcatcttgccggggagtttgtcaaccgttttgtggttgatcgccctcccctgccggccctcgccttgaccacggacagttccgtcctcaccgccatcggcaacgatttcggctttgaacaggtttttgtgaaacaaattcacgccctcggcgttccaggagacgtactcctcgctatttccacttccggcaagagtcccaacgtccttgcggccttgcgcgcggcaagggagaaagacatgcataccctcggcctgagcggcgcaggctgcggcatggatgcgttatgcgacaccgtgatacatgtcccgcacacatctaccccgttggttcaggaaatccacatcggagccggacacctcctgtgcgcgcttgtggaccatttcctgttcaaggatatcatgaccatcttgcccggcccgcacggtgatgccgcgcttganaactga

SEQ ID NO: 77874 - protein, 230 aa, Unknown
  Obtained from environmental sample
  misc_feature (1)..(230): Xaa is any amino acid
MNAEWNVSSATCFRHEKKENPMNAEVRRLIAGYAEEGLRLRENFFAAQAENLVDCARRIASAVAGGNKLLICGNGGSAADAQHLAGEFVNRFVVDRPPLPALALTTDSSVLTAIGNDFGFEQVFVKQIHALGVPGDVLLAISTSGKSPNVLAALRAAREKDMHTLGLSGAGCGMDALCDTVIHVPHTSTPLVQEIHIGAGHLLCALVDHFLFKDIMTILPGPHGDAALXN

SEQ ID NO: 77875 - DNA, 918 bp, Unknown
  Obtained from environmental sample
  misc_feature (1)..(918): n is a, c, g, or t
atgaaaaaaattcttccgctcccttcccaggccctgcaagcccgcatgccggaaacgcgcatcccttgggccgacagcgccgaaatcnccgcacgttttcaaaacaacgacatcaagaactgtccncaacccagagccttgcacgctctggaactggcgcttcatataaacgccagggattatcatgtgtatctntccggcgagagcaacctcgggcgcaggcatatgttgcgcgaattcctgcaacncaaggcgcgcaaagaacctacgccgccggatctgctgtatgtacacaatttcgccgtgcccgacaaagcgctgctcatcgctgtgcccgccggatacgggcacaagatcaaaaaagcgctggcggaaacgctcggcaaaatacgcaaggaactccccggccgttttgaagccgacagctatatggaacatcgggtgcggctgatggacaggttccagaagacgcgtgaccgtctcctgcgcaaaatggacgctgttgcgggggccaagggctttcaccttgatttcgaccagcagggcagcctgactttatatcctttggttgaaggtaaacgactcagtgaagaagagtttgaccgtttggacgccccaatgcgccaacggctcaaacatcaaggagattcgctgctgaacgccatggccggtttcatacgccaactcaacagggccgaacaggggttcaaggaagatgaacgcagcctggaacgcgaagtggtgcgccaaacccttaacgcccttctgacgccgcttgaagaaaaaattttacgatcctgcggcggcgaggccctgcaaaaatattttcaagcgttacgtgaagatattctgaacaatccggaccaagttctcccccgggacaatcagccgcagcaaccgggcgnctcggccatctga

SEQ ID NO: 77876 - protein, 305 aa, Unknown
  Obtained from environmental sample
  misc_feature (1)..(305): Xaa is any amino acid
MKKILPLPSQALQARMPETRIPWADSAEIXARFQNNDIKNCPQPRALHALELALHINARDYHVYLSGESNLGRRHMLREFLQXKARKEPTPPDLLYVHNFAVPDKALLIAVPAGYGHKIKKALAETLGKIRKELPGRFEADSYMEHRVRLMDRFQKTRDRLLRKMDAVAGAKGFHLDFDQQGSLTLYPLVEGKRLSEEEFDRLDAPMRQRLKHQGDSLLNAMAGFIRQLNRAEQGFKEDERSLEREVVRQTLNALLTPLEEKILRSCGGEALQKYFQALREDILNNPDQVLPRDNQPQQPGXSAI

SEQ ID NO: 77877 - DNA, 555 bp, Unknown
  Obtained from environmental sample
  misc_feature (1)..(555): n is a, c, g, or t
gtggcggagcttcagtcggcgatacgcgcgtttgacttgtgcccgctctctaaatacgccacacaccccatggtcggcataggcgttgagcgcccgaaactcttgataataaccgagatgcccgaggcggacgaggacgcgagcggcaaggctttatccggcccgcacggagaattgctgatgcgcatcatgccgaacttggagcgctcgttcgagaaggacgcgttcgcgttccccgcgattttctggcggccggcgggaggagtcgcgcccgataaggcggttgtttccatgctccgcccgttcgtgaaaaggttcgtggggctcctggcacccgagatgatcctgctgctcggctccgcggggctcgttatgttgttcggccgggacgaggcgatggcaggcgcgcatggcaaatggttgaagttcgagggaatccccgtcatgccgaccttctcgctcgcgtccatagcaaatagcaaggacacgaaaacggccgcatgggaagacatgaaaaaaatcctcaacccgccagagaagagcaatgtcgcctaa

SEQ ID NO: 77878 - protein, 184 aa, Unknown
  Obtained from environmental sample
  misc_feature (1)..(184): Xaa is any amino acid
MAELQSAIRAFDLCPLSKYATHPMVGIGVERPKLLIITEMPEADEDASGKALSGPHGELLMRIMPNLERSFEKDAFAFPAIFWRPAGGVAPDKAVVSMLRPFVKRFVGLLAPEMILLLGSAGLVMLFGRDEAMAGAHGKWLKFEGIPVMPTFSLASIANSKDTKTAAWEDMKKILNPPEKSNVA

SEQ ID NO: 77879 - DNA, 786 bp, Unknown
  Obtained from environmental sample
  misc_feature (1)..(786): n is a, c, g, or t
ttgggagactttaccgttttaaatggcgacacccagaaaggctgggctacaacattagttgacgacgcagattttgaaccaactcttgattttgatgatcttaaggcagccaaattcctcgttctggaacttgataaaaagcctacaggcggaatgcaaattgtttgttttggcgatggtaatagttggggttggactcaaggacaaacagatgttcttaaaagtgacggtacgcctgatgcaaaatacgcgaaatttagagacaacgatggaaaggtgcttgaaattcaattaagcaaactaaaagactttaataaagtaacctcagccgcaggtacaaaagctaaacttattattggttatttttccagtaacatagccgatcttggattgacaaaggcgtatctggaaatttggaaaggcggcgacacaactccaactgtagaaagcgtaacagtaactcccacgttgcctacaattgaacagggtgcgacaagatcatataaagccgaagttgaaggggaaaacaatcctgcggaaacggtaacatggtcaatttccggtgcaagcgcagggacaacaataactaccgcgggtttacttaccgtagccgctactgaaccggtcgatacgaagataacggtaacagcgacatcgacagtggatactacccagagcggatcggtggtagttaccgttgtagccccagaagttgtctccccggatttcttcaaactgggcgcctttgatgatgatgaaaaaatcttggtatacaaacggcactga

SEQ ID NO: 77880 - protein, 261 aa, Unknown
  Obtained from environmental sample
  DOMAIN (147)...(229): Bacterial Ig-like domain (group 2)
  misc_feature (1)..(261): Xaa is any amino acid
MGDFTVLNGDTQKGWATTLVDDADFEPTLDFDDLKAAKFLVLELDKKPTGGMQIVCFGDGNSWGWTQGQTDVLKSDGTPDAKYAKFRDNDGKVLEIQLSKLKDFNKVTSAAGTKAKLIIGYFSSNIADLGLTKAYLEIWKGGDTTPTVESVTVTPTLPTIEQGATRSYKAEVEGENNPAETVTWSISGASAGTTITTAGLLTVAATEPVDTKITVTATSTVDTTQSGSVVVTVVAPEVVSPDFFKLGAFDDDEKILVYKRH

SEQ ID NO: 77881 - DNA, 927 bp, Unknown
  Obtained from environmental sample
  misc_feature (1)..(927): n is a, c, g, or t
atgggccacgagggcatcgacatgcagcggatcgtgcgcctgttggccgacgatctcaacaagtccggcggcgtcaaggccggccccttcaagaaccgcacggtcgaacttgtggtggaagacgacggaggggatccccgcactgcctcccttgccgcgcagaagctggcgacggccaatgtcctggccgtaatcggcacgtacggctcggccgtgaccgaagcctcccagaacatcattgatgaagccggcattgtccagatcggcaccggctccaccagcgtgcgcctgaccgaaaagggcctgccgctctttttccgcgtttgcccgcgcgacgacgcccagggccgcgtggccgcccttatgctcaagaaactgggcggcaagagcgtggctgtcctgcacgacaattcctcttacgccaaggggctggccgaggaagcgcgcaaaacgctggacgcggaaggcgtcaagatcgtgttttttgacgccatcacccccaaggagcgcgactacaacgccacgctgacgcgcatgaagagcgccgcgcccgacatcatttttttcagcggctactacaacgacgccgccaccctgttgcgccagaaaatggaaatgggctggagcgtgcccatgctgggcggcgacgccaccaacaacacggatctggtcaagatagcgggcaaggaagccgccaggggcttctacttcatcagcccgcccgtgcctcaagactttgacacgccggacacgcgggcttttatggaaaattaccgcaaggcccacggccagatgcccagttccgtctgggccgtgctggccggcgacgccttcaaggtcgtcgttgccgcgctggaagccggcgcggacaagcccgcgccatttgcgccaagctcaggagcgacatcaaggatttccccggtctga

SEQ ID NO: 77882 - protein, 308 aa, Unknown
  Obtained from environmental sample
  DOMAIN (7)...(306): Receptor family ligand binding region
  misc_feature (1)..(308): Xaa is any amino acid
MGHEGIDMQRIVRLLADDLNKSGGVKAGPFKNRTVELVVEDDGGDPRTASLAAQKLATANVLAVIGTYGSAVTEASQNIIDEAGIVQIGTGSTSVRLTEKGLPLFFRVCPRDDAQGRVAALMLKKLGGKSVAVLHDNSSYAKGLAEEARKTLDAEGVKIVFFDAITPKERDYNATLTRMKSAAPDIIFFSGYYNDAATLLRQKMEMGWSVPMLGGDATNNTDLVKIAGKEAARGFYFISPPVPQDFDTPDTRAFMENYRKAHGQMPSSVWAVLAGDAFKVVVAALEAGADKPAPFAPSSGATSRISPV

SEQ ID NO: 77883 - DNA, 933 bp, Unknown
  Obtained from environmental sample
  misc_feature (1)..(933): n is a, c, g, or t
ttgaaggaactccgcgaggacagccaggcccaaactgagcccaaggctatagccgaggggaagggcctgaccatgtcccccaccctggagaccttctggactgaaactgttcttccccaaatccaactgacttacacaaaagtaaacctcagcgcgactgaatcaaaactgcgtatgtggttaggccttttactcgaccgtcccttggattccatcaaaacgaccgacctggaaacgcaggtggtcaagcccatgctggaggccggaaaaaacccggcaacaatcgaactggttttgagaaccttttctctgatttggcatagagccagaagatttgatctggtgaccggcgactgcccggttattcatgtcaaaaggcccaaattcgacaaccggcgcgaccgttttcttagcccgcccgaagccgcccaactccttgcggcccttaaagcccgctcccaggacgcccacgaccttgccctcttatccctgttcaccgggcttcgggccggggaatgttcagccctgacctggacggacattgattttgaaaacgggctcattttcgtcaaagacactaagaatctggaaaaccgccacgctttcatgacggctgaggtccgggccatgttaaagcgccgaagggaaaacaacccgcaggcggttcaggttttttatggccgccggggcgggcgtttaagccgggccatgagtcttcccttccgggaaactgtcaaggccctgggctttaatgaaggaatcaacgaccccaggcagcttgtggtattccacacccttcgccacactttcgcctcttggctggtgatgaaaggcaagcccctttacacagtcggaaaactcatggggcatcgacacccaccgatgacggaaagatacgcgcaccttgccccggaagctaaaaaagcgccgtaa

SEQ ID NO: 77884 - protein, 310 aa, Unknown
  Obtained from environmental sample
  DOMAIN (145)...(309): Phage integrase family
  misc_feature (1)..(310): Xaa is any amino acid
MKELREDSQAQTEPKAIAEGKGLTMSPTLETFWTETVLPQIQLTYTKVNLSATESKLRMWLGLLLDRPLDSIKTTDLETQVVKPMLEAGKNPATIELVLRTFSLIWHRARRFDLVTGDCPVIHVKRPKFDNRRDRFLSPPEAAQLLAALKARSQDAHDLALLSLFTGLRAGECSALTWTDIDFENGLIFVKDTKNLENRHAFMTAEVRAMLKRRRENNPQAVQVFYGRRGGRLSRAMSLPFRETVKALGFNEGINDPRQLVVFHTLRHTFASWLVMKGKPLYTVGKLMGHRHPPMTERYAHLAPEAKKAP

SEQ ID NO: 77885 - DNA, 753 bp, Unknown
  Obtained from environmental sample
  misc_feature (1)..(753): n is a, c, g, or t
ttgaacttgtataatttagatgctgttaaagaagcgctcgttgcagagcttcagaagtcggatacgtggcagtcccgcgcagatactgctgtggggcagatgttcattcatctgatttctttcttgggtgtagagatttctcgtgagattataaagactattggtaattattatccaacgcagtcgatgagcaagtgggcaacgatggattttgcgcgtcttgtggggatgcgtccttctcttgcaatacctgcttgtggtagggttcgtctcacgtttaatcctcgtttgtcagaggcagcgaatttgactcgtgagtttgcggttgaagcggctggtgttgtggtgtcggcttttgcggagataagtattccggtgggaactgagcagatagaggttccagttgttcagggtgagtggaggaataagttttttaactcttcggggaatcctaatcagaagttttttattccttccacgtgcattgctgaaaatagtgcggatcaagactttttgattgtgcgggttaatggtgaggaatgggagaaggttgatgacttctatttctttaaggatacagataaagtgtacgctgtacgtgttttgggtgacggggttcagattctttttggcgatggtaggtgtggggtgattcctacgggggcggtttcggttgattacctggagacgcagggtgcgtctggaaatgtattttccacttccggggggcgctgcagtctgatccttgggtaa

SEQ ID NO: 77886 - protein, 250 aa, Unknown
  Obtained from environmental sample
  misc_feature (1)..(250): Xaa is any amino acid
MNLYNLDAVKEALVAELQKSDTWQSRADTAVGQMFIHLISFLGVEISREIIKTIGNYYPTQSMSKWATMDFARLVGMRPSLAIPACGRVRLTFNPRLSEAANLTREFAVEAAGVVVSAFAEISIPVGTEQIEVPVVQGEWRNKFFNSSGNPNQKFFIPSTCIAENSADQDFLIVRVNGEEWEKVDDFYFFKDTDKVYAVRVLGDGVQILFGDGRCGVIPTGAVSVDYLETQGASGNVFSTSGGRCSLILG

SEQ ID NO: 77887 - DNA, 900 bp, Unknown
  Obtained from environmental sample
  misc_feature (1)..(900): n is a, c, g, or t
gtggcgaatccacagaaaaanccagcacacaacgtgactctcagcagttactacgtaagcaaatacgagattacaaacgcccagtggaaagctgtgatgggcgaagagacctcctctcaaccatcgttcccaggttctaattccgacaataagcctaaaacgagcataacatggtacgatgccattgcgtttacatgtaaattaagagagataactggcaaaaaatatcgtttgcttaccgatgctgaatttgagtacgcagctcgcggaggcaaaaaaacaagggggtatctatattcgggtagcaacaatgccgatgatgtggcttggcatttaaatagcacattccctccaacatgtttcggttcgggtcagtatcagcaatgcatgaccatgagtggtccgcaagatgtgggcagcctagcggcaaatgaacttggcacttatgatatgagcggcaatgtttacgaatggacacatgatagctggggtaattttaattcaagtgcaggcgatttaacgaatccaatagatagacccattgctcatacacaaaaaacgcgccgcggcggtagctacgaccaattgccatcagacagccgtgtttctgcgcgcaaaatacgctcaatagagggcaaagatggttccataggatttcgccttgcgctctccgttaatgactccgaccccgctgcacaaatagacccgtgtagcattcaccagcctcctccaagcggcggcaaaccgggtttccgcgatgaaaggcttattacagcagacgacgaggtgtgggcaccgagcggtggttatggcgcaatcctcaaaataaaagcagatggttctgcggtagctggttctatttattgtagcggcaattactgcatgaccagcgattcgtaa

SEQ ID NO: 77888 - protein, 299 aa, Unknown
  Obtained from environmental sample
  DOMAIN (1)...(223): Domain of unknown function (DUF323)
  misc_feature (1)..(299): Xaa is any amino acid
MANPQKXPAHNVTLSSYYVSKYEITNAQWKAVMGEETSSQPSFPGSNSDNKPKTSITWYDAIAFTCKLREITGKKYRLLTDAEFEYAARGGKKTRGYLYSGSNNADDVAWHLNSTFPPTCFGSGQYQQCMTMSGPQDVGSLAANELGTYDMSGNVYEWTHDSWGNFNSSAGDLTNPIDRPIAHTQKTRRGGSYDQLPSDSRVSARKIRSIEGKDGSIGFRLALSVNDSDPAAQIDPCSIHQPPPSGGKPGFRDERLITADDEVWAPSGGYGAILKIKADGSAVAGSIYCSGNYCMTSDS

SEQ ID NO: 77889 - DNA, 552 bp, Unknown
  Obtained from environmental sample
  misc_feature (1)..(552): n is a, c, g, or t
gtgaatggatcgaggcgagggcaacccgctcgcgttgctgcattgcgtgcttattatcccaccgaggaccgcaacgcgggtctgggcatgattccggcgctccggcgccattttccgcagcactgcatcggctattccgatcataccctgccgggggacatgaaggtgctgganatagccgtcctgctcggcgcgcgcattcttgaaaagcacttcacgcatgataaaagcctgcccggcaacgatcactaccacgccatggacagggaggacttgcggcgtttttgggccaatatggagcgtacgcttgcggttgtcggcccgttacaggtcagcgccttcgcctcggaagaaccggcccgcctcaatgcgcgccgttccttggttgcggcgcggccggtgcgggccggctcgcgcatcacccgcgaggatttgacctggaaacgcccggcgcacggcatcagtccccggcacatcgagagcgttctcggcatggccgcgcgcgcggatctggaagaagacacggtgctgcagtggaaacacctggaatag

SEQ ID NO: 77890 - protein, 183 aa, Unknown
  Obtained from environmental sample
  DOMAIN (1)...(168): NeuB family
  misc_feature (1)..(183): Xaa is any amino acid
MNGSRRGQPARVAALRAYYPTEDRNAGLGMIPALRRHFPQHCIGYSDHTLPGDMKVLXIAVLLGARILEKHFTHDKSLPGNDHYHAMDREDLRRFWANMERTLAVVGPLQVSAFASEEPARLNARRSLVAARPVRAGSRITREDLTWKRPAHGISPRHIESVLGMAARADLEEDTVLQWKHLE

SEQ ID NO: 77891 - DNA, 336 bp, Unknown
  Obtained from environmental sample
  misc_feature (1)..(336): n is a, c, g, or t
atgttcaacctgggcttcctgccgggcggcgcagaagaaatcgtcacccgcccggacaccacccttgcggcactgaacggactgctgcccgccatgttgccgggtgcgctgctcaccatccactgctacagcggccacaaaggagggatggaggaaagccgggcggtgcagcactgggcatcgcgccaacgtgaagacatttggcgtgtttaccgctacgaaacgtggaataaaaaatgctgccccgaaaatcttttcctgatggagcgtcgggcagcatcgtcgcgctgccggaaaaccggaacaggcaaaaaaattaaacccggcccagcgtga

SEQ ID NO: 77892 - protein, 111 aa, Unknown
  Obtained from environmental sample
  DOMAIN (2)...(90): Putative rRNA methylase
  misc_feature (1)..(111): Xaa is any amino acid
MFNLGFLPGGAEEIVTRPDTTLAALNGLLPAMLPGALLTIHCYSGHKGGMEESRAVQHWASRQREDIWRVYRYETWNKKCCPENLFLMERRAASSRCRKTGTGKKIKPGPA

SEQ ID NO: 77893 - DNA, 585 bp, Unknown
  Obtained from environmental sample
  misc_feature (1)..(585): n is a, c, g, or t
atgggcaacaacatttcacaaatggatttggtaaaagagttttttacaaagaatccaaatagagatatcaaacaccccgaagttgttgactgggttactgcggaatggaaaaagcgcacgggcggagtgtttcgtgaccctgaccgtatgattcgttcattatcacagaaaggacttttgataaaaattgccaaaggaatttataagtatgaccctaattttgttgttaatagggaactggaagattttacatccgagcaaaaaactgccattttgaagcgagataactatcgttgcgttatttgtggaagaggcagggaagacggagtggagctgcaagttgatcacataaaaccaaaagatttaggtggaaaagcaacaattaaaaatgggcaaactctttgtgcccaacacaattttaaaaagaaaaactacaagcaaaccgaaacaggcaaaaaaatgtttattcgattgtacgatttagcaaagtctattggcgacgtagaaacacagtctttttgcgctcaaatcttaaatgtttttgagaaaaatggtgtgaatggacacattgaatggaaaaaataa

SEQ ID NO: 77894 - protein, 194 aa, Unknown
  Obtained from environmental sample
  DOMAIN (97)...(146): HNH endonuclease
  misc_feature (1)..(194): Xaa is any amino acid
MGNNISQMDLVKEFFTKNPNRDIKHPEVVDWVTAEWKKRTGGVFRDPDRMIRSLSQKGLLIKIAKGIYKYDPNFVVNRELEDFTSEQKTAILKRDNYRCVICGRGREDGVELQVDHIKPKDLGGKATIKNGQTLCAQHNFKKKNYKQTETGKKMFIRLYDLAKSIGDVETQSFCAQILNVFEKNGVNGHIEWKK

SEQ ID NO: 77895 - DNA, 711 bp, Unknown
  Obtained from environmental sample
  misc_feature (1)..(711): n is a, c, g, or t
gtggaggaggaattacagctcatttttcccaacgccacagtggagcgcatggacttggacaccactcgcacgcgcagcgcatacgagcgcattatttccgactttgaaaaccgcagcattgacatactcgtgggtacgcaaatggtaaccaaagggttagacttcgacaacgtgagcctcgttggtattctcaacgccgacaacctgctttcgttccccgactttagggcaggtgagcgcagctatcagcttatgtcgcaggtggcaggtagggcagggcggcgcggtaagcgtgggcgtgtgctgatacaaaccattcagccccgccacaaaattttgcagtacgtgttgaacggcgactaccaaggtatgtacgcctcgcagcttaacgacaggcgcgaatttttgtacccaccttatgtgcgcctcatcaagcttacgctcaagcaccgagatgaaaaaacgctttttcatgcagcacaagtcgtcaatcaaagcttgaggagcatttttgcgcagcgcgttttaggtcccgaaataccccttatcaaccgagtgcagaatcgctacattatcaacttcttgctaaaaattgagcgcgaaaagtcaacagacaaggcaaaattgttgataaaagatatttttgcgcaattaacccatgttgctgaatttaaacaagttgaagttgttaccgatgttgacccaatgtag

SEQ ID NO: 77896 - protein, 236 aa, Unknown
  Obtained from environmental sample
  DOMAIN (6)...(96): Helicase conserved C-terminal domain
  misc_feature (1)..(236): Xaa is any amino acid
MEEELQLIFPNATVERMDLDTTRTRSAYERIISDFENRSIDILVGTQMVTKGLDFDNVSLVGILNADNLLSFPDFRAGERSYQLMSQVAGRAGRRGKRGRVLIQTIQPRHKILQYVLNGDYQGMYASQLNDRREFLYPPYVRLIKLTLKHRDEKTLFHAAQVVNQSLRSIFAQRVLGPEIPLINRVQNRYIINFLLKIEREKSTDKAKLLIKDIFAQLTHVAEFKQVEVVTDVDPM

SEQ ID NO: 77897 - DNA, 795 bp, Unknown
  Obtained from environmental sample
  misc_feature (1)..(795): n is a, c, g, or t
gtgtacgccgatgcgggtgggtcggtgactttccgtgtttcgactgaaaatattgatgacggtgagtacaccgtgacaattgcgcaagttgccccgttgaccggtctcccggctggggtgactgtgggtaattcgagtaaagttactatttctgatgatggaggattgctcactctggtggttgctgcgtcgggagccaccagtggagactatccgcttcatcttactattaatgaaacgacaaccactgagccgtttgtgttagaaattggggcgaccacgccgaatacacaggacgacaaggacatcgctgcagtaaaaacagcgctagagactgcgctgactggcgtagacgaggtggctcaagcaagtgttaataacgctaatcaggcgaagacttttatcgaagctgcaattgcggatgttagcaaaaatggtgtgacagtggcggtgacaattgaagattttgacggagcgaccgccggaactagctcgaatcatgccggtgaaaacggaagtttcgcctatgtgattgcgcttagcaaaggggttggtgtgccggatgccattggtggaatcgttgaaatcgtcgcgacggcttatgttcctcaaactttcgtccccgtgaccaacatcaacctgacctccgcgcaatcgggaacagtaggtacgccgattactttgactacgacggttacgccttccaccgcgacgaacaaagctattgtttggagtgtgaaatccgggtcagcaggtatttcggatggtaacaaactgactgctacgggttcctga

SEQ ID NO: 77898 - protein, 264 aa, Unknown
  Obtained from environmental sample
  misc_feature (1)..(264): Xaa is any amino acid
MYADAGGSVTFRVSTENIDDGEYTVTIAQVAPLTGLPAGVTVGNSSKVTISDDGGLLTLVVAASGATSGDYPLHLTINETTTTEPFVLEIGATTPNTQDDKDIAAVKTALETALTGVDEVAQASVNNANQAKTFIEAAIADVSKNGVTVAVTIEDFDGATAGTSSNHAGENGSFAYVIALSKGVGVPDAIGGIVEIVATAYVPQTFVPVTNINLTSAQSGTVGTPITLTTTVTPSTATNKAIVWSVKSGSAGISDGNKLTATGS

SEQ ID NO: 77899 - DNA, 927 bp, Unknown
  Obtained from environmental sample
  misc_feature (1)..(927): n is a, c, g, or t
gtgtgnccaagttatggttttttggacaagggagccgcccccgtatcacaatgtacttttggagtcaaagaccttgaccctacgcaaataatataccgtagcggagcgaaagatattgttgaatatttggtagagtatgaagaaaaaatagggaaaatatccgtgcccattggaaagacacctatccacgttcaagacgacgccacgctgtcaaaacaagctcaaaaacgcaagggaacgtctacccctaccaacacgccgcccgaagtctccgacgctaccagcgacgaaaaaaacgcaataggacgcgaagccaccggcgctccctccaaccgtatcaccgagggacgccgaaattcagtattatcggccaccgcttttgacttgctgatccgttacggagacaacgacggcaaagcccgtgccacctatgatgtagaagtcaaacgttgtgacccaccgctcccacaaaaagaagttgatggtacatggcgttccgccgtgaaaaattatcacgaaaaagtattaactaaaggggattacatattgccggaagattttgaacctaacaacaccgcccaagccgaggccgggagcagggaaggagtcgtcggtatggtagaagaaagcattgacggcgttgaggaggttggccttatcttgccaaacaaagaaacctacataatgagggcggactggttagattatattgaacctctttccgccgcacagcagggaagtctattttatacgttacttttacacctaaacggtaaaaattcgcccgacgttgaacccggacttcgaccaattctcaatggtatggaaaaacaaattatcaaagaaaatataaagtgggtaggtgaaaaacnggcgaaaaagcgcnggggggaaaggccacgcaagaaaaaaaccgcaagagactga

SEQ ID NO: 77900 - protein, 308 aa, Unknown
  Obtained from environmental sample
  misc_feature (1)..(308): Xaa is any amino acid
MXPSYGFLDKGAAPVSQCTFGVKDLDPTQIIYRSGAKDIVEYLVEYEEKIGKISVPIGKTPIHVQDDATLSKQAQKRKGTSTPTNTPPEVSDATSDEKNAIGREATGAPSNRITEGRRNSVLSATAFDLLIRYGDNDGKARATYDVEVKRCDPPLPQKEVDGTWRSAVKNYHEKVLTKGDYILPEDFEPNNTAQAEAGSREGVVGMVEESIDGVEEVGLILPNKETYIMRADWLDYIEPLSAAQQGSLFYTLLLHLNGKNSPDVEPGLRPILNGMEKQIIKENIKWVGEKXAKKRXGERPRKKKTARD

SEQ ID NO: 77901 - DNA, 459 bp, Unknown
  Obtained from environmental sample
  misc_feature (1)..(459): n is a, c, g, or t
atgtgcgatgtatttgatgcagcgaattattttctcaagcggcaagaccccgatgcgggcgatcttatgtctaatttaaaattgcaaaaactggtctattacgctcagggctttcatttggctatattggatgcgccactgttcaatgagcgtatagaagcatgggaacacggtcccgtgtgcgttgagctttaccataaatacaaaacttatgcctctggctcgattcccattccctatgaggtggatgcctatgatgttttcagcgataaaagccgcgaagtcctagatatggtacatacatattacgggcagttctcggcatggaagctcagaaacctaacgcatatggataccccttgggtgacagcttacaataacggtagaggggaaatcacgcacgagtctttgaagtcttatttcaagacgcagcttgtggatgatgatgaanagacctaa

SEQ ID NO: 77902 - protein, 152 aa, Unknown
  Obtained from environmental sample
  misc_feature (1)..(152): Xaa is any amino acid
MCDVFDAANYFLKRQDPDAGDLMSNLKLQKLVYYAQGFHLAILDAPLFNERIEAWEHGPVCVELYHKYKTYASGSIPIPYEVDAYDVFSDKSREVLDMVHTYYGQFSAWKLRNLTHMDTPWVTAYNNGRGEITHESLKSYFKTQLVDDDEXT

SEQ ID NO: 77903 - DNA, 723 bp, Unknown
  Obtained from environmental sample
  misc_feature (1)..(723): n is a, c, g, or t
atgcttccggcagggcgggtacgggcggacgacggggtctatcgcttgcgctatgtcgccgcctcatatcaggatactcccgatatgagtattgcccgcgcccgtcaggaagtgcagaagatggcggcgctcattgaaaatatgtttacgaaattcattgttcttttttacgatcgcgatatagatcttgaaaaggatgtcaaggaatttgccaaaaatgaggaattaaccgaccagatgcaatcggaactctcgtgctttctgggggagtgttcgcgctataacctgagtacgagcaatctcacgagcgttgccatattggtgcgcgttattgatgagcttgagagtatcgcggattcctgttatcatttgctattgcttgaacgaaagtgccgcgagaagaaatttgtgtatcatatagaggcgctggaggcgaccaaaccgtataccagtctgatccgtgaatttcttgccctgatcacgagatatttggattccagtatgccaagatatagactggacgaggcgaagaaaatggaggatcagattaacgattaccggaattcgctgaagcgcgccgcgcgcaagcgtattgaagagggcggaagtgtgagcggcgagatattgtttattgatgaactgcagcagatggagcatatcggcgattttgcgtttaacatcgcccgcgcgctttccggggtgggtatatatccgtcgcgctga

SEQ ID NO: 77904 - protein, 240 aa, Unknown
  Obtained from environmental sample
  misc_feature (1)..(240): Xaa is any amino acid
MLPAGRVRADDGVYRLRYVAASYQDTPDMSIARARQEVQKMAALIENMFTKFIVLFYDRDIDLEKDVKEFAKNEELTDQMQSELSCFLGECSRYNLSTSNLTSVAILVRVIDELESIADSCYHLLLLERKCREKKFVYHIEALEATKPYTSLIREFLALITRYLDSSMPRYRLDEAKKMEDQINDYRNSLKRAARKRIEEGGSVSGEILFIDELQQMEHIGDFAFNIARALSGVGIYPSR

SEQ ID NO: 77905 - DNA, 621 bp, Unknown
  Obtained from environmental sample
  misc_feature (1)..(621): n is a, c, g, or t
gtggggcacgagatagacgtgacgctggttgacctcgcatccgatgtccgcgccgccacgccgacccaggcggccgagttcgccaccgccgacagggacgcgcttctggcggagctaaacggcgtggccgacagtcttggggtacagatagaccaaagtctgcgccgcttcgagaccacgcttaacctcttggtggacagggggctggcgcgctttgacccactggttccacacgcgatgcgcctgaccgagctggagacgcgcctgaagctgaccgcaccccagaaccgcatggggagtgctacaacgtgcctagctgtgctgcgccagaggctggctccacttggccgaaaagccatcgaggtcaaagaaatgaaactgcgggaatggcaaagccgcatcaattcgggtgcaagcaaaatattggagaaacaatgccacgcacttgccctactgcgggcacagttggacggtctgaaccccgcagcacccttggacaggggctttgtcctggtgagccatcaagatggccgccacatgaagtcggcccacgatgcgaagcccgacgccaaactgcgcctgcgttggagcgacggcgagaggaccgccgtggtcgagtga

SEQ ID NO: 77906 - protein, 206 aa, Unknown
  Obtained from environmental sample
  DOMAIN (2)...(158): Exonuclease VII, large subunit
  misc_feature (1)..(206): Xaa is any amino acid
MGHEIDVTLVDLASDVRAATPTQAAEFATADRDALLAELNGVADSLGVQIDQSLRRFETTLNLLVDRGLARFDPLVPHAMRLTELETRLKLTAPQNRMGSATTCLAVLRQRLAPLGRKAIEVKEMKLREWQSRINSGASKILEKQCHALALLRAQLDGLNPAAPLDRGFVLVSHQDGRHMKSAHDAKPDAKLRLRWSDGERTAVVE

SEQ ID NO: 77907 - DNA, 978 bp, Unknown
  Obtained from environmental sample
  misc_feature (1)..(978): n is a, c, g, or t
gtgggttttgccgtcggtctggtgcgctgggcgcacgattcatcgctgccagcggacaagcggaaggacatcacggacgaatctctcaaaacgcgcaaagaggcgctcgcccgccagcagatcattgacgacattgggctggacacggtaaggctaagggccagcctacaggaagccctggacgttttggggccgcagcacgatacagtgaagatgctgttgggagccacaatccccatgcaggcactgtatggcgatttggctggcgcgaagcctgggactaagcgcaagatcgagaatacgctactgggagccaaaacccccgagcaggcggcaacagacctgttgtcaggcacaaagctgaatgacgaggctgtccgcagacagttgctcgaaggtggatacagggcggttgaggcgtcaagggacccgcttgtggttcgggcccgcatcatcgaggccaaggcgagacccctccgcaaacagttggatgaacatgtgacagccatcatctccgagcattcgcagcgcatagccgaggctaggttcgccatccagggcaagtcgctctacccggacgccacgaacacgctccgcctcacgtacggtccaatagccacgtaccccgcgaacggtacacttatgcagccattcaccacgttccatggtctcattgaccgctacgaggggtggggcggcaatcaggccgccgcagagggcgagttgtggacgctcccccagcgctggctggacaggcttcccaacgtgaacctaactaccccctacaatttcgtctatgcttgcgacaccgttgggcggcactccggcagccccgtaatcaacgcccagggcgaattggtcggcctcaactttgacagcaacatggagggacaggccggctactacgtctatgacggcggtacgaagaggagcatagccgtggacgcaagggccataaccgaggtcctttcaaggtga

SEQ ID NO: 77908 - protein, 325 aa, Unknown
  Obtained from environmental sample
  misc_feature (1)..(325): Xaa is any amino acid
MGFAVGLVRWAHDSSLPADKRKDITDESLKTRKEALARQQIIDDIGLDTVRLRASLQEALDVLGPQHDTVKMLLGATIPMQALYGDLAGAKPGTKRKIENTLLGAKTPEQAATDLLSGTKLNDEAVRRQLLEGGYRAVEASRDPLVVRARIIEAKARPLRKQLDEHVTAIISEHSQRIAEARFAIQGKSLYPDATNTLRLTYGPIATYPANGTLMQPFTTFHGLIDRYEGWGGNQAAAEGELWTLPQRWLDRLPNVNLTTPYNFVYACDTVGRHSGSPVINAQGELVGLNFDSNMEGQAGYYVYDGGTKRSIAVDARAITEVLSR

SEQ ID NO: 77909 - DNA, 789 bp, Unknown
  Obtained from environmental sample
  misc_feature (1)..(789): n is a, c, g, or t
gtgagtctgggcaatccggaagacatttctccgcgcgtgattaaaaccctgcaaaaagccgacctcatcgccgcggaagatacccgctctgccggtctgcttttaagccaatttaatatccgcaaagaactgatttctttttacgaccacaatgaaacagaacgcgtaccgcagttaattgaactgctgaagtccggcaaaactattgcgctaatctccgaagccggtatgccgctgatttccgaccccggctatcatttggtcggggcggtctatgcgcaaaacatcccgctggatgccgtgcccggcccgacggcgctgattaccgcactggtcgtttcgggactgccgacggacagttttagttttcagggttttttgccggccaaagctggttccagacaaaaaactctgagtgaactgcaaaacaccaaatctaccatgattttttacgaagccccgcaccgtatcggagagactctgcaggatatcgcggaaattttcccggaacggatgtgttttgtaggacgcgagctgaccaaaaaatatcaggaatatttacgcggcacggctaaagaaattttggccaaactaaaaacgcccaaaggagaatttgttattgtgctggaaggcaacaaagcaagctcgccggaattatccgcagaaattatccggctggccggggaattaaaaaaagccggtttagccccggccaagatttcgcanatcttagcggaagttttctcgctatcaaaaaataaactaaaagaactgctctttaaggagtaa

SEQ ID NO: 77910 - protein, 262 aa, Unknown
  Obtained from environmental sample
  DOMAIN (3)...(195): Tetrapyrrole (Corrin/Porphyrin) Methylases
  misc_feature (1)..(262): Xaa is any amino acid
MSLGNPEDISPRVIKTLQKADLIAAEDTRSAGLLLSQFNIRKELISFYDHNETERVPQLIELLKSGKTIALISEAGMPLISDPGYHLVGAVYAQNIPLDAVPGPTALITALVVSGLPTDSFSFQGFLPAKAGSRQKTLSELQNTKSTMIFYEAPHRIGETLQDIAEIFPERMCFVGRELTKKYQEYLRGTAKEILAKLKTPKGEFVIVLEGNKASSPELSAEIIRLAGELKKAGLAPAKISXILAEVFSLSKNKLKELLFKE

SEQ ID NO: 77911 - DNA, 876 bp, Unknown
  Obtained from environmental sample
  misc_feature (1)..(876): n is a, c, g, or t
atgatggatcagcttgggatagacatttacaagaaagtaacggagcagaaaaaagaggataagccaaaagagaaccaaaaggcagagtggaaaaacccgctggaaaagtacacggatatagatccggtcatggtagcaaataccatagcgaacccagaaaatacgaaaaacgccaacgacccggaaacaaggccaaaaatgattgacagccttacaggaaaatatggtgtttcaaaagaggatgctgaaactttcatagattttcttgcaaatgccgatggcgaagatcgccaaagagcgcgggaagcgtttgaaaaacttaataaagaagcctcagaaaaagaagtagccgaaatagaagaaagacagaggattgaagccttaaacaaagaaattgaaaaagccaaggttaaagcaaaaaaacaagtagaaaaagaagatgcgtccaaagacggtaaagaattgcttgaaaaaataaaaagctcgtcattggaatcgcttaaagagaaaagaaataaccttgcggtaaggctggatgaattggaaaatggcgaagtcgatgaggccaatatatatggtcaagaattgcaaatagcgagaatgaacgcgctgattaataaaatcgacaatgaaataaaggatagggaagaatccgaaggaaacaagcggcgattttcccttgatgatttgaatgagggctgggataaaggcgttttcacgctaaaagaggttgccgataatttgcangacggggaagtgttccagggctacccggctgatacatggaaagccgcagccaacaatgaagaggagtaccgagagggaaaaataagcgcaaaagagctgatgacnagcaagaaaaactgttttgcctga

SEQ ID NO: 77912 - protein, 291 aa, Unknown
  Obtained from environmental sample
  misc_feature (1)..(291): Xaa is any amino acid
MMDQLGIDIYKKVTEQKKEDKPKENQKAEWKNPLEKYTDIDPVMVANTIANPENTKNANDPETRPKMIDSLTGKYGVSKEDAETFIDFLANADGEDRQRAREAFEKLNKEASEKEVAEIEERQRIEALNKEIEKAKVKAKKQVEKEDASKDGKELLEKIKSSSLESLKEKRNNLAVRLDELENGEVDEANIYGQELQIARMNALINKIDNEIKDREESEGNKRRFSLDDLNEGWDKGVFTLKEVADNLXDGEVFQGYPADTWKAAANNEEEYREGKISAKELMTSKKNCFA

SEQ ID NO: 77913 - DNA, 822 bp, Unknown
  Obtained from environmental sample
  misc_feature (1)..(822): n is a, c, g, or t
ttggcgggaaggaacgagaaaaggcagtcggaaatccttaataggtgccagcaacagtataataagctcaaggaagaggcttctaaaaaccttggggtatcgttaaaagaactcagcgaacagcaaagccaaatatcccgtgatatggacgaaatagaagacgaagccaataaagcccgcgaatctgcaaataccatgaaagacgcatggggtacgtttggcaaggcttttaggaccgccatagaagtagtcgccgatacaaacagcggcgaagcatggcgcgttacatcggcgggaagggagcggttttcggatcactaccaaaaagcaatcagccttgaatccggcgatttttcatgggcagaaaagaaagctacgggcggcggcaatgtcgggccaaggaaaacgcagtttgagctacaagtcgcagatcggatcgtaaggaagggcggaagggcggtagcagccgattcaaccgaagcccttaaaaatatgttcaatctccgtgatatacaatccggcaactgggtactgaatgacaaaagctctgcgaaattccatgtagacaatatcgccatggggttagctgaccttgccgatgttacagggataccggataaccttgtttccctaaatggccggcttgccattgccataggtgcaaggggcaaaagcaaatttgcggcccattatgagccggtagagcgtgttataaacataaccaaaatgcacggcggcggtagcctggggcatgagtggtttcacgccttcgataacctcatagccgatgcaatgacagggggcaggtataacgtattttga

SEQ ID NO: 77914 - protein, 273 aa, Unknown
  Obtained from environmental sample
  misc_feature (1)..(273): Xaa is any amino acid
MAGRNEKRQSEILNRCQQQYNKLKEEASKNLGVSLKELSEQQSQISRDMDEIEDEANKARESANTMKDAWGTFGKAFRTAIEVVADTNSGEAWRVTSAGRERFSDHYQKAISLESGDFSWAEKKATGGGNVGPRKTQFELQVADRIVRKGGRAVAADSTEALKNMFNLRDIQSGNWVLNDKSSAKFHVDNIAMGLADLADVTGIPDNLVSLNGRLAIAIGARGKSKFAAHYEPVERVINITKMHGGGSLGHEWFHAFDNLIADAMTGGRYNVF

SEQ ID NO: 77915 - DNA, 345 bp, Unknown
  Obtained from environmental sample
  misc_feature (1)..(345): n is a, c, g, or t
ttggacaacgccacaaacttatcgccgccgaatgccgccacgctcacgccggcggagactcccgtggagcgccaacctctggcgtcggaagacgactttatgccctccccgaccaccacaaacttgccggcgccaaaagcggcatgggacaaggaggcgacgtacgcgtcaactccgcccatccacccatcctcttcgttgaataaagccgtaaggccgtccccgtctaccgcgacaaaactacccccgccgacatcaccgaacacaatgtattgccacggagaggagggaatacccgtcgtaccgataccccaatcgacaccgccgcttaaagagtacaggtaa

SEQ ID NO: 77916 - protein, 114 aa, Unknown
  Obtained from environmental sample
  misc_feature (1)..(114): Xaa is any amino acid
MDNATNLSPPNAATLTPAETPVERQPLASEDDFMPSPTTTNLPAPKAAWDKEATYASTPPIHPSSSLNKAVRPSPSTATKLPPPTSPNTMYCHGEEGIPVVPIPQSTPPLKEYR

SEQ ID NO: 77917 - DNA, 825 bp, Unknown
  Obtained from environmental sample
  misc_feature (1)..(825): n is a, c, g, or t
atgaattttgattataaaaagcctttggggaaagttttcatagtttttctctttttttttattcttgctcattcggccctctatgcccaaatgtcttccgctgaaacggatgatataaaccggacatttgccgttgcccggttcggaattgacgttagccatcttatccttgcttccatatctatactttgcggactgggactttttgtcgcttttcggggaatcagagaaaccatagcggagggtgctgccatccggcttgatgcggccgctcttgtcaggggagatcttatgcattcggaaaggggaaaacacatggtccgtataaaaaagcgggggatgggcctgcgcttcaaactcgcttcatataccatggcgctggttcttgtggttgaagcgctggtttccgttcccctcttcttcatgatgacccggacccttagacagactctcgtcaagagcctctgggatcgatccacagtgctgctggaaggattggccgccaatgcccgtacctgcctctcccaggggaacatcagggagctgggtttgcttcctggtcagatgaattccatctccgaagccatgtatgtaaccattaccggctataatcctgaaacctttatttttgaagatcaggtttgggcgtcaaatgatccgaatctttcccggaaaatagacagccaggagtttcaccccggtttttccaggattaccgatgtgcttagtacgcgggtacgcgaccttagcgcggagttgaatgccctggccagggaaagggtaagcggttatcctgaaagaatcgccaactgtacagggaaatag

SEQ ID NO: 77918 - protein, 274 aa, Unknown
  Obtained from environmental sample
  SIGNAL (1)...(29)
  misc_feature (1)..(274): Xaa is any amino acid
MNFDYKKPLGKVFIVFLFFFILAHSALYAQMSSAETDDINRTFAVARFGIDVSHLILASISILCGLGLFVAFRGIRETIAEGAAIRLDAAALVRGDLMHSERGKHMVRIKKRGMGLRFKLASYTMALVLVVEALVSVPLFFMMTRTLRQTLVKSLWDRSTVLLEGLAANARTCLSQGNIRELGLLPGQMNSISEAMYVTITGYNPETFIFEDQVWASNDPNLSRKIDSQEFHPGFSRITDVLSTRVRDLSAELNALARERVSGYPERIANCTGK

SEQ ID NO: 77919 - DNA, 726 bp, Unknown
  Obtained from environmental sample
  misc_feature (1)..(726): n is a, c, g, or t
ttgagcggcgtacctgttgataatggaaaagccggcggttatttcgcggcaatttactcaaatgacgagctttataaattagaaaccaatgctccaggcttaaccggcggcacaacaatgtggtntgcgcatccccagggtgaacctcttccctacgatcaacccattacttttatcagacctctcattgcctggggcaaggatgtgggtaacgtgtaccaggcggatacaatagcagggcttgccgcgcagttgaatgtgaacgctgatacgcttgcgaaaaccattaatgactacaacaagcatgtagctgctgcaaaaggtaatgacgcttatgtagaatctgagtggaataaaccggctcatctcgacgcaggatttgattttacacccgaaggtcttattcctttaccagagcgatggttgcttaacatgccgattaatgaggatgcggcggcagcgggcgggtataccgctattctgggagccgggtactattacggcacttgcggcgggcttgatgttgacaaggatatgcaggttctggataatagctctagccatcaaaagatacccggtctttacgctgccggtcaggatacctcaggcgtactccatcatcctaatagagagtattacactggcggcacggctcagggatgggccatcacttccggccgctgggcgggaaggaaggccgctcaagaagcagttaatatgagataa

SEQ ID NO: 77920 - protein, 241 aa, Unknown
  Obtained from environmental sample
  misc_feature (1)..(241): Xaa is any amino acid
MSGVPVDNGKAGGYFAAIYSNDELYKLETNAPGLTGGTTMWXAHPQGEPLPYDQPITFIRPLIAWGKDVGNVYQADTIAGLAAQLNVNADTLAKTINDYNKHVAAAKGNDAYVESEWNKPAHLDAGFDFTPEGLIPLPERWLLNMPINEDAAAAGGYTAILGAGYYYGTCGGLDVDKDMQVLDNSSSHQKIPGLYAAGQDTSGVLHHPNREYYTGGTAQGWAITSGRWAGRKAAQEAVNMR

SEQ ID NO: 77921 - DNA, 864 bp, Unknown
  Obtained from environmental sample
  misc_feature (1)..(864): n is a, c, g, or t
atgaaccgcttgaccgtctataccgacaaaaaaagctggtacgacgcttgggatatcgacattaattatcctaagaaaataaaaagctattttacgcaggtcaagagccgcacatataccgaaaacgcctgcattgtccgcgaaagcgtctacgagtacggaaagtgtcagcttttccaaaaggtcatattatataaggacgccgattaccttatcttcgatacgcgcgtcgattgggatacgaggcataagatgcttagagcggattttgaacccgccgttttttccgataaggtcgtttgcgacattcaattcggcaatatcgcgcgcggcaccggcactattgataaaatcgacaaggcgcagtttgagatttgcgcgcataagtgggtcgacgtcaccgacgaaagtaaaaattgcggcgtgtccgtcctcaataactgcaagtacggccaccgcgtaaaggacggcttgattagcctcaatctcttgcggtcgccgaagtacccggataagcattgcgacatcggggtgcacgcctttatttacgcgctttatccgcatgacggaaacgtgtttgaggccggtactataccgctcggatacgccttaaataatccccttatactgacggacagaaatatcgctatacaggcgccgtccgtaacggtagataaaaagaacgtggttatagagactataaagccgtcgtataacggtaagggcgtagcattgcgcgtgtacgaatgcgcgggaaaagaaacggcggcggaaattaccgcggatttcgagtataagaccgccgtcgagacggacatgctggaaggggaattctttaaacgacgtgagtctgaaggcgtttga

SEQ ID NO: 77922 - protein, 287 aa, Unknown
  Obtained from environmental sample
  DOMAIN (1)...(280): Glycosyl hydrolases family 38 C-terminal domain
  misc_feature (1)..(287): Xaa is any amino acid
MNRLTVYTDKKSWYDAWDIDINYPKKIKSYFTQVKSRTYTENACIVRESVYEYGKCQLFQKVILYKDADYLIFDTRVDWDTRHKMLRADFEPAVFSDKVVCDIQFGNIARGTGTIDKIDKAQFEICAHKWVDVTDESKNCGVSVLNNCKYGHRVKDGLISLNLLRSPKYPDKHCDIGVHAFIYALYPHDGNVFEAGTIPLGYALNNPLILTDRNIAIQAPSVTVDKKNVVIETIKPSYNGKGVALRVYECAGKETAAEITADFEYKTAVETDMLEGEFFKRRESEGV

SEQ ID NO: 77923 - DNA, 360 bp, Unknown
  Obtained from environmental sample
  misc_feature (1)..(360): n is a, c, g, or t
ttgtggacgcggaaaccctcgcgtcgttctgcgacggcgccggaaagggggacgacgacgatgagtaacagcaaactcgcggttcacaccagacttagccccaattgctcgaaacctcggaacaagcctattgacatgatcacaatccattgcatggcgggcgatctgtccatagaatcctgcggcgcattgttcgcgccgacggaacggcaggccagcagcaattacggtgtcggcagcgacggccgcgtcgggctgtacgtcaacgaaactgatcgctcgtggtgtacgtccagcggcgcgaacgataaccgcgccggacaatcgaggtcgcgagcaacgccgcgccctcggccataa

SEQ ID NO: 77924 - protein, 119 aa, Unknown
  Obtained from environmental sample
  misc_feature (1)..(119): Xaa is any amino acid
MWTRKPSRRSATAPERGTTTMSNSKLAVHTRLSPNCSKPRNKPIDMITIHCMAGDLSIESCGALFAPTERQASSNYGVGSDGRVGLYVNETDRSWCTSSGANDNRAGQSRSRATPRPRP

SEQ ID NO: 77925 - DNA, 330 bp, Unknown
  Obtained from environmental sample
  misc_feature (1)..(330): n is a, c, g, or t
ttggtcagattcggccgagcacttgaacattatccgaagcacgagaagtttacgctacgcgccagaacggaggattgtttgatcggcattatggacagcgtggaacgcgcaaacaaaagccataccaaaaagagccacgcatatgaagcggatatcctgctttccagactgcggaggcttttcaggttagcgaaagacttgcacataatcagcatccatcgctactgcgtcatatccgaaaagctgactgagatcggcaacatcctcggcggctggataaaatggattcaggggcaggagggggcaaaacctaaaaacaacgatatgtaa

SEQ ID NO: 77926 - protein, 109 aa, Unknown
  Obtained from environmental sample
  misc_feature (1)..(109): Xaa is any amino acid
MVRFGRALEHYPKHEKFTLRARTEDCLIGIMDSVERANKSHTKKSHAYEADILLSRLRRLFRLAKDLHIISIHRYCVISEKLTEIGNILGGWIKWIQGQEGAKPKNNDM

SEQ ID NO: 77927 - DNA, 543 bp, Unknown
  Obtained from environmental sample
  misc_feature (1)..(543): n is a, c, g, or t
atgctcaaggacaacgcgcgcatttccctgctcaacacccgcctgaccctgcgggcgctcctgcccgtcccgttccggcaacacgccctggatgtggaaggcaacatttcgctgctgcggcctctggaatccctgcgccgcctgctggcggacgaggcgacgcctttcgaacttgcacgctcggcggcggcggccgtcatggtgtccaccctgccgctgccggggctgcaaagcatcctgctgctcctgtgcatcggttggttgcgcctgaaccggctgtgcgctctggccgtggtgccgctgacatggccgcccgttgtgcccggcatgtgcgtactcatcggctatcgcctgcgcaacggctgttggctgacggatttttccatccgaaccctgggccatgaagcgccccaacgcctgcttgactgggcgctcggcgcggcatgcacggcgccgatcttcggccttgcggcgggctgtgtgacctggggactggtttttcttgccgcacgcggtatactggcgaacagaggacggacatga

SEQ ID NO: 77928 - protein, 180 aa, Unknown
  Obtained from environmental sample
  misc_feature (1)..(180): Xaa is any amino acid
MLKDNARISLLNTRLTLRALLPVPFRQHALDVEGNISLLRPLESLRRLLADEATPFELARSAAAAVMVSTLPLPGLQSILLLLCIGWLRLNRLCALAVVPLTWPPVVPGMCVLIGYRLRNGCWLTDFSIRTLGHEAPQRLLDWALGAACTAPIFGLAAGCVTWGLVFLAARGILANRGRT

SEQ ID NO: 77929 - DNA, 966 bp, Unknown
  Obtained from environmental sample
  misc_feature (1)..(966): n is a, c, g, or t
gtgcgcgagacatccacgctcggattccctcagggcgtgaccgtcaccggcatggcctgcctgtgcgcggcgaggcaaagccccgatgccgtgctggcctgtcttgagcaaggccgcaggcatattgcgccgccggagcttcttgacgcgcgggcactgccctttccctggttcgccgcagatgaagcctgcttccccggcggtcgccggcattccgcgaaagacacgctgacgcttgccgaaatcgtcgtccgcaacgccttggcgcaagcgaagctgccggaagagagtctgatccgggcgggcatcgtgctcggcaccacggcggggtgcgcgctgcactttcttgatgcctacgcggcaagccgtagcggcgtcccctgcacgacaccggatcgcgaagactggttcgccgcgaatccggccctggaacaaaacatccccgcacaggggccgcgcctgacgattaccaacgcctgcacctccggggcggacgccatcggtctggccctggacatgatccagaccgggcagtgcgaatgcgtcgtctgcggcggggcggacgccttgagcctcgtgccgcacaccggctttgcccgcctgatggtctatgacggcgagccgtgccgtcctttcgaccggacgcgcaaaggcctgaacctgggcgagggcgccgccgccctggtgcttgagagcatggaacacgcgcaacgccgcaaggcggccgttctcggccgtatcctcggctacgggagcgcggcggacgcgcaccatttcacggcaccgcacccggaaggacggggcttggccgcttccatccgcatcgctctggaacatgcgggactcggtgccgcagacttggccttcgtcaacgcccacggcaccgcgacaccggaaaacgacaaggtggagggccggctccttgcgcggctcctgcccgcaacgcctcggccgattctgacctag

SEQ ID NO: 77930 - protein, 321 aa, Unknown
  Obtained from environmental sample
  DOMAIN (244)...(321): Beta-ketoacyl synthase, C-terminal domain
  misc_feature (1)..(321): Xaa is any amino acid
MRETSTLGFPQGVTVTGMACLCAARQSPDAVLACLEQGRRHIAPPELLDARALPFPWFAADEACFPGGRRHSAKDTLTLAEIVVRNALAQAKLPEESLIRAGIVLGTTAGCALHFLDAYAASRSGVPCTTPDREDWFAANPALEQNIPAQGPRLTITNACTSGADAIGLALDMIQTGQCECVVCGGADALSLVPHTGFARLMVYDGEPCRPFDRTRKGLNLGEGAAALVLESMEHAQRRKAAVLGRILGYGSAADAHHFTAPHPEGRGLAASIRIALEHAGLGAADLAFVNAHGTATPENDKVEGRLLARLLPATPRPILT

SEQ ID NO: 77931 - DNA, 354 bp, Unknown
  Obtained from environmental sample
  misc_feature (1)..(354): n is a, c, g, or t
ttggccatcattacatttaacatatacgccatagtatttttctctggcatttcgtccgacatcaacgtggtcgccaaccgatacgatggaagaagaaccatgcatttcgctcttctgctttttttggtcggcccaatcacttttggcatcgcgtactttgtttggttccacaaaatctctgtgcgcatagggaatgaactcaggcgccgaagccttgataattcatttggcgcagcagacttttggctatggtgcgttcttggcatttttatcatcgttggcccatttgtctatatctacaaactggcgaaggcgaccaaccaattggccgaacactacaacgctaatggttga

SEQ ID NO: 77932 - protein, 117 aa, Unknown
  Obtained from environmental sample
  misc_feature (1)..(117): Xaa is any amino acid
MAIITFNIYAIVFFSGISSDINVVANRYDGRRTMHFALLLFLVGPITFGIAYFVWFHKISVRIGNELRRRSLDNSFGAADFWLWCVLGIFIIVGPFVYIYKLAKATNQLAEHYNANG

SEQ ID NO: 77933 - DNA, 861 bp, Unknown
  Obtained from environmental sample
  misc_feature (1)..(861): n is a, c, g, or t
atgacagatcggccgaggagtgacactgttcacgccttttatctggcagggacggcggtatatgtacgcgccgcggtggaaaaacgccatgaatgggcccgttctctggtacggctttttgaggaaaccggagcggatgaatttaccctggcggcggacagcatgatttaccagttggaagatccctttgttacattcatcgaaaaagaaattattttaggcggaactcacgttgcttacagccgggggaagataagcacgtattacggatatttttaccgcggcgttgaccttgaagatttgcggtactttaccacggggcctgtctttatgaaagatatccggctggtaaaactgcaaaacgggataggggtattttcccgtccccgaaatgaggaaattgaaaaacagtacggctccgcttcggtcgtcggttttaccgttattcccgatcttgacagtttggacgcggaggcgattgccaacgcgaaggtaattcccggtcttttcggcaaaggtgaatggggcggctgcaatcagtgtcatttactggactccggtttaatcggcgtcattgggcataaaagttaccaatcggaagacggcctctcggtatatgtaaatacttcgtttgtttttgatccggccaggcattgtgttttggatgagaagataatagccgtacgctcctcgtatccttcgtaccccgcgaaaaaacccgatcttgccgactgtacatttaccggcggcattgtcacgcgggaagacggcaaggttgatctatacggcgggcttggagattccgcggaaggccgggtagtgataccttatccttttgaaggctatggaaaaataacatag

SEQ ID NO: 77934 - protein, 286 aa, Unknown
  Obtained from environmental sample
  misc_feature (1)..(286): Xaa is any amino acid
MTDRPRSDTVHAFYLAGTAVYVRAAVEKRHEWARSLVRLFEETGADEFTLAADSMIYQLEDPFVTFIEKEIILGGTHVAYSRGKISTYYGYFYRGVDLEDLRYFTTGPVFMKDIRLVKLQNGIGVFSRPRNEEIEKQYGSASVVGFTVIPDLDSLDAEAIANAKVIPGLFGKGEWGGCNQCHLLDSGLIGVIGHKSYQSEDGLSVYVNTSFVFDPARHCVLDEKIIAVRSSYPSYPAKKPDLADCTFTGGIVTREDGKVDLYGGLGDSAEGRVVIPYPFEGYGKIT

SEQ ID NO: 77935 - DNA, 906 bp, Unknown
  Obtained from environmental sample
  misc_feature (1)..(906): n is a, c, g, or t
ttgtgcgggtatctgtccaagttccatgggcagaaagtcctgctgcttattgacggctgcgacgggcctatgacagacgcctgccggtatcaatacgaggaatggatggcagaatttttagacggtttctattcggctgtgacaaataataacccccatctgtggaaggggtttctgaccggctgtttaagaccgacgagagataggggtgttaaccgctggtatccggaaattatatcctcactggatgaaaagtttagtttgtattacggcttcctgccggtggaaatcggggaaacagcctttcactataatgcggctgatcggattccttccctcagggcctggcacggggggtacagggcaggttcccatgaaatattcaattcccggagggttatgcaatatttcgacagaatggacggggtcgaaaaaaattatattccatcctgggcctgtggttccaacgatctggcgaattttatcctgacgaaagagaacgctgggcttaaaagggaaacagcgatccttttaaacggaaaagcaatagaaaaaccggtatcggaaaatatagcactggcggatatttacagcataaaaaattctgggaacgagaaattgtggagttttttattatacatgggatatctgcgcgtcagcaaaacggaatttgataataagcggaatcatgcgctttcaatcccaaacgaggaaataaagtccgtattcggaagcgtggcggtagaatggactaaacttgcgggcgggccggttctttacgatgatatgatccgggcaatgcttacgggaaacggggattattttaaaatagcccttagagaatatttcgaggaagctttccctgtatttggttctgagaaaggatttattgaggggtttcattaa

SEQ ID NO: 77936 - protein, 301 aa, Unknown
  Obtained from environmental sample
  misc_feature (1)..(301): Xaa is any amino acid
MCGYLSKFHGQKVLLLIDGCDGPMTDACRYQYEEWMAEFLDGFYSAVTNNNPHLWKGFLTGCLRPTRDRGVNRWYPEIISSLDEKFSLYYGFLPVEIGETAFHYNAADRIPSLRAWHGGYRAGSHEIFNSRRVMQYFDRMDGVEKNYIPSWACGSNDLANFILTKENAGLKRETAILLNGKAIEKPVSENIALADIYSIKNSGNEKLWSFLLYMGYLRVSKTEFDNKRNHALSIPNEEIKSVFGSVAVEWTKLAGGPVLYDDMIRAMLTGNGDYFKIALREYFEEAFPVFGSEKGFIEGFH

SEQ ID NO: 77937 - DNA, 345 bp, Unknown
  Obtained from environmental sample
  misc_feature (1)..(345): n is a, c, g, or t
atgtgcagaataatatatatttatggcagaaaggggtgtggccatgaatatcaaattaccctgacatgctgcccatattgccagagcaagtatatcgtcaagaatggcagaaaaacgggcagcacacaaaactatttttataagaactgcaggaaacaattcatcgcgaatagtgaacgtaaatataaaggaagccaaccttcacttatagccataattttaatgatgcccgttcgtgattctggaacccgtgatatttgtgaggttctgcctatcagtatgtgcaaagtattgtctgcactggctatgcatattctcgcaacattcgaacaatggatttcgtaa

SEQ ID NO: 77938 - protein, 114 aa, Unknown
  Obtained from environmental sample
  misc_feature (1)..(114): Xaa is any amino acid
MCRIIYIYGRKGCGHEYQITLTCCPYCQSKYIVKNGRKTGSTQNYFYKNCRKQFIANSERKYKGSQPSLIAIILMMPVRDSGTRDICEVLPISMCKVLSALAMHILATFEQWIS

SEQ ID NO: 77939 - DNA, 414 bp, Unknown
  Obtained from environmental sample
  misc_feature (1)..(414): n is a, c, g, or t
atggacgaaatcgagatcctgggcgtaccaatcagtcaggtgaaacgtaagttccgccgccaggatacgattttgcaggggattttccccaatgtaaacgtggtagtaggttccgcttgtgagcccggctgccgtgtgttggtgcgtatggcactggattcctgtctggaaaacgggactcttaaaaaactaaagcggcccctaaccatatttaccggccttcagtttgaaccttatctggacaaggtagaaggggatgtgatcgtgtatggcgactgtgccaaaaagatgcttgatttctaccctcatgcgaaatattggggcgagaccaaagaattcccgaattgtacgccggtttggtcaaacaaacccggtgtgagtttggtggaacatattgattcattagctaattga

SEQ ID NO: 77940 - protein, 137 aa, Unknown
  Obtained from environmental sample
  misc_feature (1)..(137): Xaa is any amino acid
MDEIEILGVPISQVKRKFRRQDTILQGIFPNVNVVVGSACEPGCRVLVRMALDSCLENGTLKKLKRPLTIFTGLQFEPYLDKVEGDVIVYGDCAKKMLDFYPHAKYWGETKEFPNCTPVWSNKPGVSLVEHIDSLAN

SEQ ID NO: 77941 - DNA, 912 bp, Unknown
  Obtained from environmental sample
  misc_feature (1)..(912): n is a, c, g, or t
atggctttaacatggagtgtagcgcgctgggatggagtacaggaacagcagagcagtcagaacaccagcgatatttttaatctagcttggctggcggatcatctggctattttccaccagctacaagtcagttcggcgaacataagttatcatgtatttgccaatcgcgatggcagtctgcgtctgctacagcgatcagtcagccaaccgtcccaattaacatctcgtgcgccagcgcatgactccttgggactgagtgggcacgaccgccgcaaaaactatcttctgcccccaggccaagcggtaccgtttttagttgagctgggtattatggatactgcgggtagagtgatcaaagagcgctatgctaaattccgccagatcaatcgctttttagagttcgttgccgacatctatattaatcttcctgctacaggtactttgcggatagtagattgtggttgtggccgctcgtacttgacttttgccgttcactggttgttgaccagcctctatcagcgacaggtcgagatggtcggccttgacctcaaagagcaggtcatcgctgagtgtaatgctttaagcatgcgcttgcaacttgcaggtttgcgtttccagcaaggtaatatcactagctggcaagccccggaggcggtcgatctagtcatatcactgcacgcctgcgatacagccaccgacgccgctatcgcccaagccattcactggcaagctgcggtgctgctggccgcgccctgctgtcaacatcaaatagcgccccagttgctagacgaccagcaaagtgctttgctgcgccatggcatcctgcgcgagcgcttgggggccatggttactgatgctttgcgtgcggcagcgctggacgccctaggtggcctgccaagtcctcgagtctga

SEQ ID NO: 77942 - protein, 303 aa, Unknown
  Obtained from environmental sample
  misc_feature (1)..(303): Xaa is any amino acid
MALTWSVARWDGVQEQQSSQNTSDIFNLAWLADHLAIFHQLQVSSANISYHVFANRDGSLRLLQRSVSQPSQLTSRAPAHDSLGLSGHDRRKNYLLPPGQAVPFLVELGIMDTAGRVIKERYAKFRQINRFLEFVADIYINLPATGTLRIVDCGCGRSYLTFAVHWLLTSLYQRQVEMVGLDLKEQVIAECNALSMRLQLAGLRFQQGNITSWQAPEAVDLVISLHACDTATDAAIAQAIHWQAAVLLAAPCCQHQIAPQLLDDQQSALLRHGILRERLGAMVTDALRAAALDALGGLPSPRV

SEQ ID NO: 77943 - DNA, 999 bp, Unknown
  Obtained from environmental sample
  misc_feature (1)..(999): n is a, c, g, or t
atgcttctctcgctaaccaccacccccctgatgggcgcacggttcctgcggcgccggcgggagaaaaaagagagcaggcaaaaaaaggaatccatattccatcacatcttcaggtggtacgaacactcgctggcgtgggtgctggagcaccgccgcctgaccatcacggtcacactattgacgatggtctcaacggtgtggctctacatcattgtccccaagggcttcttcccccagcaggacaccggccgcgtcatggggaacatccgcgcatcgcaggacgtcagcttcgccgccatgacccagatactgcctaagttcgcggagataatcgcggccgaccccgccgttgatcatttttcggccaccgccggcacgggcaactccgccagggtgaccatcgcgctcaagcccaagagccagagaaaggacacggccgaccaagtgatagccaggctgcgcgccaatacagcttccatacccgaggccgcaatgttcctccaaagcgtgcaggacatccgcgtcggcggccgcatgggcggtggcgccctttaccaatacacgctacagggcgacgacgcggacgagctatttgaatgggcgcccaaactgctgcaacagtttaggacactgcccgaaatcacggacctgaacagcgaccagcagaacaggggcctacaggccaacgtagtgatagacagggaaacggcctcgcggctgggcgtgacgccgcaggccatcaactccgcgctctacgacgcattcggccagcgcttcgtatccaccatgtacatgacccttaaccaataccgcgtggtgatggtggtctcgcccgaacactggcagacgcccgacagcctggacaacgtctatgtgcgctccacatcgggaaatctggtgcccatcagcgcgttctctaggtgggagcgcaaaaacacgtcgctttcgataagccaccaaggggtgctgcccgccggacgtctcctcaactcgcgataa

SEQ ID NO: 77944 - protein, 332 aa, Unknown
  Obtained from environmental sample
  misc_feature (1)..(332): Xaa is any amino acid
MLLSLTTTPLMGARFLRRRREKKESRQKKESIFHHIFRWYEHSLAWVLEHRRLTITVTLLTMVSTVWLYIIVPKGFFPQQDTGRVMGNIRASQDVSFAAMTQILPKFAEIIAADPAVDHFSATAGTGNSARVTIALKPKSQRKDTADQVIARLRANTASIPEAAMFLQSVQDIRVGGRMGGGALYQYTLQGDDADELFEWAPKLLQQFRTLPEITDLNSDQQNRGLQANVVIDRETASRLGVTPQAINSALYDAFGQRFVSTMYMTLNQYRVVMVVSPEHWQTPDSLDNVYVRSTSGNLVPISAFSRWERKNTSLSISHQGVLPAGRLLNSR

SEQ ID NO: 77945 - DNA, 948 bp, Unknown
  Obtained from environmental sample
  misc_feature (1)..(948): n is a, c, g, or t
atggccngngagcttttacatctgactatacaacgttctatcataagttacagcaaattaacaaacagatggaatgtcgccgcgccctggaaggccaatgaagtattaacgcaatccacttacggaacaaagcgcatggacgccttccgtatcattgaagaaacgttaaacatgcgggatgtctgcgttaatgacgttattgatattggagatggtaaaactaagacggttattaatcacgatgaaacgcttaacgcccggcagaaacaaagtgaaatcaaagaagcgtttcaggcgtggatatggaaagatataagcaggcgaaatgatctcttgaaagtgtataatgaaaaattcaattcaatccgctcaagagaatttgacggacagcatttgaaatttccaggcttaaatctggaaatcaatttcaggccgcaccagctcagcgccattgcaagaggaatatacggcaaaaacaatactctgctcgcacacgccgtcggagcgggtaaaacttatgaaatggccgctattgctatggaaagtaagaggcttggcctttgtcctacttctcttgttgccgtgaaaaaatccacggtagaacaaatcggcggagatttcttgaaattataccccgccgcaaatattttaattgtcggagaagatgatttcagcagggaaaacagaaagaaattcctcggtaaaatcgtttccggcgattatgacgctattatcatcagccatgaacagttggagaaaatcccaatatcgcctgaacgtcagcgcagattattgaaaaatgaaattgacagcataactgacagtataaaacaattgagaaaagaacgcggagactggttttctattaaacaggcggaaagattaaagaaatcgcttgaatccaanctacaggaaacatttgccgaaaaggcagaaaagacggtgtaa

SEQ ID NO: 77946 - protein, 315 aa, Unknown
  Obtained from environmental sample
  DOMAIN (140)...(283): Type III restriction enzyme, res subunit
  misc_feature (1)..(315): Xaa is any amino acid
MAXELLHLTIQRSIISYSKLTNRWNVAAPWKANEVLTQSTYGTKRMDAFRIIEETLNMRDVCVNDVIDIGDGKTKTVINHDETLNARQKQSEIKEAFQAWIWKDISRRNDLLKVYNEKFNSIRSREFDGQHLKFPGLNLEINFRPHQLSAIARGIYGKNNTLLAHAVGAGKTYEMAAIAMESKRLGLCPTSLVAVKKSTVEQIGGDFLKLYPAANILIVGEDDFSRENRKKFLGKIVSGDYDAIIISHEQLEKIPISPERQRRLLKNEIDSITDSIKQLRKERGDWFSIKQAERLKKSLESXLQETFAEKAEKTV

SEQ ID NO: 77947 - DNA, 687 bp, Unknown
  Obtained from environmental sample
  misc_feature (1)..(687): n is a, c, g, or t
gtgccggcaggcgaggcggacaaaaaagtgacgctcgcggacaagagcggcgttatcgggcacgggagcgtgattctcgcctcgatcacgagctgcacgaatacctccaatccggcggtgctcctggcggccggtctcgtcgccaaaaaggcgcgggcgctggggatgaccgtgcccaaatacgtaaaaacgagtctcgcccccgggtcgcgcgcggtgcaggcgtatctggagcgcgcggggctctacgagccgctcgcggcgctcgggttcaatacggtcggctacggctgcgcgacatgcatcgggaacagcggcccgctctctcccgccgtggttgacgccgtgcgcgagggttcgctcgtcgcggcggctgtcctctccggtaacagaaattttgaagggcggatcagcccgcaggcgcgggcgaactatctcgcctcgccgccgcttgtggttgccttcgcgctcgcgggcagggcggatatcgatttccccgccgagccgatcgccaatgacgcctcgggcaagcccgtatatctcgcgaacatctggccgggccacgcggagatcgccgaggcggaacgcgcggtgacgggcgaaatttttacggagagctaccgccatctctttccgggggatgaaacgtgggccgcgacatccggcgcgggcgggtctccgctttga

SEQ ID NO: 77948 - protein, 228 aa, Unknown
  Obtained from environmental sample
  misc_feature (1)..(228): Xaa is any amino acid
MPAGEADKKVTLADKSGVIGHGSVILASITSCTNTSNPAVLLAAGLVAKKARALGMTVPKYVKTSLAPGSRAVQAYLERAGLYEPLAALGFNTVGYGCATCIGNSGPLSPAVVDAVREGSLVAAAVLSGNRNFEGRISPQARANYLASPPLVVAFALAGRADIDFPAEPIANDASGKPVYLANIWPGHAEIAEAERAVTGEIFTESYRHLFPGDETWAATSGAGGSPL

SEQ ID NO: 77949 - DNA, 726 bp, Unknown
  Obtained from environmental sample
  misc_feature (1)..(726): n is a, c, g, or t
gtgaccgacccgcagcatgagacgacgagccgttcgaggcgatcgtctccaaccccgccgtactcgatcaagtgggatggcgacgcgaatccgctgctcatcaacgacgagcgtttcgccccggcgggtgtgctggcgccgaagtcgaaggccgatctcgccttcacaatgcacatgctcagctggctggcggttaacggtactgcggcgattgtcgagtttcccggcgtgctgtatcggggtggcgctgagcgaaagatccgccagtatctcatcgacaacaactatgtcgatgcggtgatccagttgccgccggatctgtttttcggcacgacgattgcgacgtgcatcatcgtgttgaggaagtcgaagacggacaacgcggtgttgttcatcgacgcttctgccgagtttgcccgcgtgggtaacaagaacaaactgctgccggaaaatcagcagcacatcctggaacgcttcgtcgcacgcaaggacgttgatcatgtggcgaggctcgtgccgagcgaggagattgccgcgaacgactacaacattgccgtgtcgtcctatgtcgagcaggaggacacccgcgaggtcatcgacattgcggaactcaacgccgagatcgcccgcatcgtcgcccgtcaggccgagctgcgcacatccatcgacgctatcgtcgccgagcttgaggccggaaacgtcgaggctgaggggctggcagcatga

SEQ ID NO: 77950 - protein, 241 aa, Unknown
  Obtained from environmental sample
  DOMAIN (1)...(198): N-6 DNA Methylase
  misc_feature (1)..(241): Xaa is any amino acid
MTDPQHETTSRSRRSSPTPPYSIKWDGDANPLLINDERFAPAGVLAPKSKADLAFTMHMLSWLAVNGTAAIVEFPGVLYRGGAERKIRQYLIDNNYVDAVIQLPPDLFFGTTIATCIIVLRKSKTDNAVLFIDASAEFARVGNKNKLLPENQQHILERFVARKDVDHVARLVPSEEIAANDYNIAVSSYVEQEDTREVIDIAELNAEIARIVARQAELRTSIDAIVAELEAGNVEAEGLAA

SEQ ID NO: 77951 - DNA, 633 bp, Unknown
  Obtained from environmental sample
  misc_feature (1)..(633): n is a, c, g, or t
gtgcgtcgcccccggtcccctttaaaatctagtcgcccagcggttttctcagggcttttccttttttgttttcaaggagccagaagaccgcttgaagggaaaccgagcctgggctgcacttattttaacatgctcaggcccggaaacctacattgtggtggggggccttggcaaaaaggacatcggcaagacagacgtgttctctgtgaggccgggcgaaacggcccagaagacgctggagctgaagatagccggcaagccgctcattattcaggtggggcccaaccagaacgccgccgacaccaacggccaggagtggaccgacacggtgatagacttctacgactcgctcgacggcgagccggtgctggccgacctcgactacgacgtgatagaccagttcacgatgctgatgccggacgagcctggcgactactacataagggtgacgaacttccagggcagcgccgcgggcggccccaacacatacctgcccgccaacggcgagtactgtctctacgtcaccaacggcagggttctggcggcccagaacatcaacctaataagggccgacaccggcggcatctacaggtcgcagtacttccctggcggatcgtacaacaaccctggtga

SEQ ID NO: 77952 - protein, 210 aa, Unknown
  Obtained from environmental sample
  SIGNAL (1)...(28)
  misc_feature (1)..(210): Xaa is any amino acid
MRRPRSPLKSSRPAVFSGLFLFCFQGARRPLEGKPSLGCTYFNMLRPGNLHCGGGPWQKGHRQDRRVLCEAGRNGPEDAGAEDSRQAAHYSGGAQPERRRHQRPGVDRHGDRLLRLARRRAGAGRPRLRRDRPVHDADAGRAWRLLHKGDELPGQRRGRPQHIPARQRRVLSLRHQRQGSGGPEHQPNKGRHRRHLQVAVLPWRIVQQPW

SEQ ID NO: 77953 - DNA, 576 bp, Unknown
  Obtained from environmental sample
  misc_feature (1)..(576): n is a, c, g, or t
gtgggttcggcttcggctgcccgcgcggtctatccgggctttgtgatcttgaaggccggcgcgcaggcggcgcggcccctctatgccgcagatttctggccggagctgcgcgtgatcgtcgcgcgcgtcagcgatgaggcaaaaaaaaatccgagccgcagcgcgatggaacatacgcgcgcgacgagcccgtactatccggcctggctgcgcgacagccgcgcgctttttgatcgggcgctggacgcgctgggcaaacgcgatctgaggcttcttggccccctgattcgcgcgagcgcctatcgcatgtttggaagtatgctggccgccgatcccgttataatatattggaagcccttaacccttgcgctgctggagcagcttgaggcgcttcgagcgcaggggcttgcgctttttgagaccatggacgccgggccgcaggtcaagatattctgccttgagcgggacgccgatcaggcggttgcttccatacaaaaggcgattccggagctggcggatcggctctccgtgctgaaacccggcggcggcttgacctggattgatcaggaaaaatga

SEQ ID NO: 77954 - protein, 191 aa, Unknown
  Obtained from environmental sample
  DOMAIN (80)...(170): GHMP kinases C terminal
  misc_feature (1)..(191): Xaa is any amino acid
MGSASAARAVYPGFVILKAGAQAARPLYAADFWPELRVIVARVSDEAKKNPSRSAMEHTRATSPYYPAWLRDSRALFDRALDALGKRDLRLLGPLIRASAYRMFGSMLAADPVIIYWKPLTLALLEQLEALRAQGLALFETMDAGPQVKIFCLERDADQAVASIQKAIPELADRLSVLKPGGGLTWIDQEK

SEQ ID NO: 77955 - DNA, 525 bp, Unknown
  Obtained from environmental sample
  misc_feature (1)..(525): n is a, c, g, or t
atggcttatcgcgtcggccacgcttatgtgttccctgccgcggcgttcgcggaaccgtttcctgtaatcaatgtcggcttcggtgtcaagcgcgatcgtcgccattgtgcggacggcttcgacaggatacttgcccgcggccgtctctccgctgagcataatcgcgctcgttccgtcgtaaatcgcgttcgcgacgtcgctgacctcggctctcgtcgggcgagggttcacaatcatgctttcgagcatctgcgtcgccgtgataacgggcttgcccgcgttataacagcagtggataagcttcttctgtatgctcgggagataacccaagtcgatctcgacgcccatgtcccctctcgcgaccattatgccgtcgcttaccgcgagaatttcgttgatgttgtcgacgccgtgctgattctcgattttcgcgatcacttgaattttgtcgcatttatgctcgtcgagaacgcgcctgatgtcgagaattgtcctgcgcgcggctcacaaaactcgcggcgataa

SEQ ID NO: 77956 - protein, 174 aa, Unknown
  Obtained from environmental sample
  misc_feature (1)..(174): Xaa is any amino acid
MAYRVGHAYVFPAAAFAEPFPVINVGFGVKRDRRHCADGFDRILARGRLSAEHNRARSVVNRVRDVADLGSRRARVHNHAFEHLRRRDNGLARVITAVDKLLLYAREITQVDLDAHVPSRDHYAVAYRENFVDVVDAVLILDFRDHLNFVAFMLVENAPDVENCPARGSQNSRR

SEQ ID NO: 77957 - DNA, 876 bp, Unknown
  Obtained from environmental sample
  misc_feature (1)..(876): n is a, c, g, or t
gtgatcgcgaaaatcgagaatcagcacggcgtcgacaacatcaacgaaattctcgcggtaagcgacggcataatggtcgcgagaggggacatgggcgtcgagatcgacttgggttatctcccgagcatacagaagaagcttatccactgctgttataacgcgggcaagcccgttatcacggcgacgcagatgctcgaaagcatgattgtgaaccctcgcccgacgagagccgaggtcagcgacgtcgcgaacgcgatttacgacggaacgagcgcgattatgctcagcggagagacggccgcgggcaagtatcctgtcgaagccgtccgcacaatggcgacgatcgcgcttgacaccgaagccgacattgattacaggaaacggttccgcgaacgccgcggcagggaacacataagcgtggccgacgcgataagccattcggcttgtctcaccgctatcgacatagaggcgagcgcgattataacggttacgcgttcgggagcgtccgcgaaactgctcagcaaataccgtcccgaaaagcccatactctcatgcgttaccgacgttagggcggcgcggcagctcagcctttcatggggggtatacccgataatcatgccgcttttacattcgacggacgaggtgcttaaagtcagcgaggagctatgcataagcaaaggttacatccaaagcggcgatctcgtcgtaataacggcgggtctgccgataggcgaaagcggaaccactaacatggtgaaagttcagctcgtacgcgaatcgctcgcgaaacggatgggtatcggtcaaggcaaaagcgagcgtattctgtgcgtatgcccaagcgaggacgaggttaagacaagttcgcgaacgtga

SEQ ID NO: 77958 - protein, 291 aa, Unknown
  Obtained from environmental sample
  DOMAIN (1)...(129): Pyruvate kinase, barrel domain
  misc_feature (1)..(291): Xaa is any amino acid
MIAKIENQHGVDNINEILAVSDGIMVARGDMGVEIDLGYLPSIQKKLIHCCYNAGKPVITATQMLESMIVNPRPTRAEVSDVANAIYDGTSAIMLSGETAAGKYPVEAVRTMATIALDTEADIDYRKRFRERRGREHISVADAISHSACLTAIDIEASAIITVTRSGASAKLLSKYRPEKPILSCVTDVRAARQLSLSWGVYPIIMPLLHSTDEVLKVSEELCISKGYIQSGDLVVITAGLPIGESGTTNMVKVQLVRESLAKRMGIGQGKSERILCVCPSEDEVKTSSRT

SEQ ID NO: 77959 - DNA, 546 bp, Unknown
  Obtained from environmental sample
  misc_feature (1)..(546): n is a, c, g, or t
atgacggacattgcaaaaaagcgaacgctctcgctgattttatgcgcggtattcgcggctttaagcgcggttttgtcaaccgtcaaaatttggatcgggccggttccggtcggggttgtacatctgtccgtgtttttggcggcgggtctgctcggttcaaaaaaagcggcgctgagccaagccgtgttcgtatcagtcggattatcgggagttctgccgattttcgcggcgtcggggttggcggggccgacgggcggctttataatagggtatatccccgcggcgttcgtaacgggagcggttatcgaaaagcttaaaagcaagagcccgcctttgcttatgctcgcgatgtacgcggggtggctcgtcgcttacgggataggcgttccgtggttcatgctcgttacgggttcgggcttgcgaacggctttggcgcagtgcgtactgccgtttttgctcggggatttggttaaaacaatcgtttcggccgcgctgattagaagattatcagcaatttttaacaaaaatatatttttcagcgaataa

SEQ ID NO: 77960 - protein, 181 aa, Unknown
  Obtained from environmental sample
  SIGNAL (1)...(22)
  DOMAIN (25)...(173): BioY family
  misc_feature (1)..(181): Xaa is any amino acid
MTDIAKKRTLSLILCAVFAALSAVLSTVKIWIGPVPVGVVHLSVFLAAGLLGSKKAALSQAVFVSVGLSGVLPIFAASGLAGPTGGFIIGYIPAAFVTGAVIEKLKSKSPPLLMLAMYAGWLVAYGIGVPWFMLVTGSGLRTALAQCVLPFLLGDLVKTIVSAALIRRLSAIFNKNIFFSE

SEQ ID NO: 77961 - DNA, 648 bp, Unknown
  Obtained from environmental sample
  misc_feature (1)..(648): n is a, c, g, or t
atgttagatgcaatcaagaaagaattttttgaaggaaaaatcaagacccagaatctggaaacagaagtctttgttcgtgagtataactcggatccggcaaaggtaagggatgcctgccaaacggcggcgcagatacgttgtgagtttcttgaaaacaagactggtaaatccctgtcccggattaagagcgcccatattgatacctgttccctgaaagacggtaatgtgatcctcgcggggatagaatcaaaaatcggcggcgcgattctgccaatggggtttgcgggccctgcgaaaatttgcggtcagtatataaagcccgaagaggaaatttatatccctcttgcgactaatgaggcggcgctggtggcgggaattcagcgcggattaaaagcaatctctatggcggggggccttaagactttggtacactacgacgctatgacgcgggctcccttgattgaagccccggatatctataccgccaggaagttcattgaatctgcatccggaaataaggcgtttgtagaggaactgcaaaaatgcgtgcccgacccctttgtccgtttggacgatattgaattttaccagctgggaaccaaagtcttcctgcggctcatttttaaacaggccatgctatgggaatga

SEQ ID NO: 77962 - protein, 215 aa, Unknown
  Obtained from environmental sample
  DOMAIN (13)...(214): Hydroxymethylglutaryl-coenzyme A reductase
  misc_feature (1)..(215): Xaa is any amino acid
MLDAIKKEFFEGKIKTQNLETEVFVREYNSDPAKVRDACQTAAQIRCEFLENKTGKSLSRIKSAHIDTCSLKDGNVILAGIESKIGGAILPMGFAGPAKICGQYIKPEEEIYIPLATNEAALVAGIQRGLKAISMAGGLKTLVHYDAMTRAPLIEAPDIYTARKFIESASGNKAFVEELQKCVPDPFVRLDDIEFYQLGTKVFLRLIFKQAMLWE

SEQ ID NO: 77963 - DNA, 618 bp, Unknown
  Obtained from environmental sample
  misc_feature (1)..(618): n is a, c, g, or t
atgagggcgacgaagaatttaggtgtttacgtacatgtgccgttttgtgagcgaaaatgttggtattgtgattttttttcgcgggttgggacggctgaagagattgaagagtttgtgcggagtttggaagtgagtgggccggagggttatgttgtgcggacgatttatttcggtggtgggacgccgagtttgttaagcgcagaacaagtggggcgaattttggggaaaattcgggtggcctttgagattgcggaggacgcggaagtgaccattgaatgcaacccgaacagcgtgacgaagaaaaaattgaaaggatatcggcggattggggtgaatcgggtgagtattggggcgcagagttttgatgatggggttttgagggagttggggcggttgcataatgcaaggcaggcggtggcggcggttgaggccgcgcgcggtgcgggttttgagaatataagtattgatttgattcacagcgttcaggcaggagcgaatttgcgcgtgccgcacgaggttttggcggcggtttcgcatgtttcggcgtattgtttaacgccggagcgattgcccgaagacgaaagcgtgcgacagcaaaaaattatggaaaaacagtga

SEQ ID NO: 77964 - protein, 205 aa, Unknown
  Obtained from environmental sample
  DOMAIN (10)...(177): Radical SAM superfamily
  misc_feature (1)..(205): Xaa is any amino acid
MRATKNLGVYVHVPFCERKCWYCDFFSRVGTAEEIEEFVRSLEVSGPEGYVVRTIYFGGGTPSLLSAEQVGRILGKIRVAFEIAEDAEVTIECNPNSVTKKKLKGYRRIGVNRVSIGAQSFDDGVLRELGRLHNARQAVAAVEAARGAGFENISIDLIHSVQAGANLRVPHEVLAAVSHVSAYCLTPERLPEDESVRQQKIMEKQ

SEQ ID NO: 77965 - DNA, 345 bp, Unknown
  Obtained from environmental sample
  misc_feature (1)..(345): n is a, c, g, or t
atgggatttattccccgagatgtaagcgccgaaaaacgcgggtttgatgtagaatcatttataccgttagaaatacgaggcaatgccgccccacttcgctttattgaagtaaaaggccgcattaaaggcgctgacacagttactgtaacaaaaaatgaaatattaagggcttttaacaagccagaagaatatattctggctattgttgaagtagacggtaagcagacaaaaacagtatacttgaaaaagccctttaaaatacaccctgactttgctgctacgagcgtaacgtataatatcggagaactggtaaaaagcgcggaagtaatattggaaagaggataa

SEQ ID NO: 77966 - protein, 114 aa, Unknown
  Obtained from environmental sample
  misc_feature (1)..(114): Xaa is any amino acid
MGFIPRDVSAEKRGFDVESFIPLEIRGNAAPLRFIEVKGRIKGADTVTVTKNEILRAFNKPEEYILAIVEVDGKQTKTVYLKKPFKIHPDFAATSVTYNIGELVKSAEVILERG

SEQ ID NO: 77967 - DNA, 513 bp, Unknown
  Obtained from environmental sample
  misc_feature (1)..(513): n is a, c, g, or t
ttgatgagtgcaacggtcttgtgggttatcggcggagtgctgtgcgcgctggtggaactggccgcgccgctcatggtgctgtttttcttcgcgttcggggcgttggcggcggctgccgtagcgtggttcggacacggtttggactggcagattggaagttttatcgccgtgtccatcttgtcccttgcgctgctgcgcaggcacgccaaggtgtttttcagcggcagggccaaacgcggggaagatgagggcgcgcatcccatggtcggcagaagcggcgttgtcagcaagatcatcacgcctgtcgaaccgcggcgaggtggagatcggcggcagtttctggcgcgctacgtccgtccggtccgtggattgcggggagcaggtgcgcgtgctcggcacattgcccgacgatgccctgacgctgtgtgtggaacctttgcgtcccgatggggacaggtaaaaaggaaaaaatcatggaaggatatgtcattctcgctgttttcgccctgctga

SEQ ID NO: 77968 - protein, 170 aa, Unknown
  Obtained from environmental sample
  SIGNAL (1)...(21)
  misc_feature (1)..(170): Xaa is any amino acid
MMSATVLWVIGGVLCALVELAAPLMVLFFFAFGALAAAAVAWFGHGLDWQIGSFIAVSILSLALLRRHAKVFFSGRAKRGEDEGAHPMVGRSGVVSKIITPVEPRRGGDRRQFLARYVRPVRGLRGAGARARHIARRCPDAVCGTFASRWGQVKRKKSWKDMSFSLFSPC

SEQ ID NO: 77969 - DNA, 714 bp, Unknown
  Obtained from environmental sample
  misc_feature (1)..(714): n is a, c, g, or t
atgcagaaagtaaaattattatgcgtgttcggcactcgcccggaagcgacgaaaatgctgccccttatcctggcgctgcaagacgacgcccgcttccaaaccatgatttgcgtgaccgcgcagcaccgtgagctattggacgcggtgcttgcgccttttaaaataaaacccgactatgacttggatataatgaaacctgggcaaacactgaacgacctgacctcgcgcgtgcttaccggcatgggaggggtaatcaaagacgccaagccggatttgctgttggtgcatggcgacacgaccaccacgttcgcggcgtcgcttgcggcttactacgaaaacgtgaaaatcggccatgtggaagcagggttgcgcacatgggataagatgcggccttacccggaagaaatgaaccgcaggctgacggccagcctcgcggatctgcacttcgcccctacagccgacgcccgcgacaacctgttgaaagaaaacgtccctgcggacagcgtatatgtgacgggcaacacagccgtggacatggtgaagcgcgcggcgggagggaacgaaccgttcatcaacgaaacgttgaacaaactggatttcaccaaacgcgtcatagcgatgacggcccatcgcagggaaagctggggtgcgccgctggaaagcatagacagagcggccgcccgcgggcgcggattctcggccattctgtcatga

SEQ ID NO: 77970 - protein, 237 aa, Unknown
  Obtained from environmental sample
  DOMAIN (24)...(237): UDP-N-acetylglucosamine 2-epimerase
  misc_feature (1)..(237): Xaa is any amino acid
MQKVKLLCVFGTRPEATKMLPLILALQDDARFQTMICVTAQHRELLDAVLAPFKIKPDYDLDIMKPGQTLNDLTSRVLTGMGGVIKDAKPDLLLVHGDTTTTFAASLAAYYENVKIGHVEAGLRTWDKMRPYPEEMNRRLTASLADLHFAPTADARDNLLKENVPADSVYVTGNTAVDMVKRAAGGNEPFINETLNKLDFTKRVIAMTAHRRESWGAPLESIDRAAARGRGFSAILS

SEQ ID NO: 77971 - DNA, 417 bp, Unknown
  Obtained from environmental sample
  misc_feature (1)..(417): n is a, c, g, or t
atgatttgcggtttgatttttggttcaagcaacttatacggaatagaaaaatttcttcttgtagcatggaataaggacagtttatccggtgaggcaaactatgatattgaagacgatgacatacatccaaacgaaacctttctttttgaagatatttttaagcctaagaagctggatcgttttgaaaaaaatttgaaagaatatctgcatacggaaagaacaaataatgaaatctatgagtttacgctttccgaaggatttcttccaaaacatgtaactcaaatattaaaagctctgcaaaaagataataaattgagtgtcaccgctataaacggcgaaacccgaaagggcgcgtattatattaatcataacgaatttgatagagtgaggatattgtatgaataccacaaaaattga

SEQ ID NO: 77972 - protein, 138 aa, Unknown
  Obtained from environmental sample
  misc_feature (1)..(138): Xaa is any amino acid
MICGLIFGSSNLYGIEKFLLVAWNKDSLSGEANYDIEDDDIHPNETFLFEDIFKPKKLDRFEKNLKEYLHTERTNNEIYEFTLSEGFLPKHVTQILKALQKDNKLSVTAINGETRKGAYYINHNEFDRVRILYEYHKN

SEQ ID NO: 77973 - DNA, 924 bp, Unknown
  Obtained from environmental sample
  misc_feature (1)..(924): n is a, c, g, or t
atggcggggggcaggcaggccatggcggctgggcgaggcgaaatactggaccttcttgatgacttttatattgcgaaagcgggaccgggctttagggcggccacgataaacgcgcagattgccctcggcaagaacatcttcttcacccccggcaggtatgagtgcgaagttcccatagttgtaaacaggcccgacgctattgtttacgggcacggtttcccgacactgtatcccgcctcgggcaataaaagcggcgcaatattcgtcggcgacgttagcggcgtaatagttgcaggcataatgtttgacgcgacatccgccaattcagcctatattctcgctgcgggagaaaccggcgcgagcgcagaccatagcgataatccgacggttttttccgacatttgtatccgcgtgggcgggtatcagcagggcaacgttcacgccgatgtcgccgctatcctgaacagcaacgatatcatcggcgaccagttctggatattgcgcgccgaccacagctacactagcggcgccaggacagtctgggacgggaatacttccagaaacggcgtagtggtatacggcgataacgtaacgttctacggcctgtttgtggatcatttccacgaatacaatacgctttggtttggcgacagagggacaacgtatttttacacgagcgaggcgccctatgacccggcttatcagagatattatatgagccgtttcaaatcaagagaagattataaggcccaacatgaggggggcaccagtctggggactgtcagaggatatgcccagtacaaagtggttaatagcgtaaataatcacaaggcctatggtctgggaatgtataacgtgtttcttgctgatcgtataagggaaagaccaatgtatcttgataacgctatgggaagttcccaataa

SEQ ID NO: 77974 - protein, 307 aa, Unknown
  Obtained from environmental sample
  misc_feature (1)..(307): Xaa is any amino acid
MAGGRQAMAAGRGEILDLLDDFYIAKAGPGFRAATINAQIALGKNIFFTPGRYECEVPIVVNRPDAIVYGHGFPTLYPASGNKSGAIFVGDVSGVIVAGIMFDATSANSAYILAAGETGASADHSDNPTVFSDICIRVGGYQQGNVHADVAAILNSNDIIGDQFWILRADHSYTSGARTVWDGNTSRNGVVVYGDNVTFYGLFVDHFHEYNTLWFGDRGTTYFYTSEAPYDPAYQRYYMSRFKSREDYKAQHEGGTSLGTVRGYAQYKVVNSVNNHKAYGLGMYNVFLADRIRERPMYLDNAMGSSQ

SEQ ID NO: 77975 - DNA, 771 bp, Unknown
  Obtained from environmental sample
  misc_feature (1)..(771): n is a, c, g, or t
atgggcatcacccccggcctcgttttggccctcgcgctctgtctttgcgccatgggcatggcccggaagatgggcgtgcccaccaccggcgccttccgcctgaacgagcttgcggcgtcctttctggatgccatcctggccctgtgcatgcctctgatcattctgggcggcatttacggcggcgtgttcacccccaccgaggccggggccgtggcctgtctgtatagcctcctgatcagcatcctcgtgtaccgggaaatgacctgggatacgctgaaaaaagtcatcatcagcgcgggcatcagcacctccacggtctttttcgtcctggcctgttcccagtccttcgcctggctgctcaacgtgggcaaaatctccgaaagcgtcgtcaacgtcatgctttccctcacggacagctatgtgggcatgattctgatcattaacgctattctgctttttctgggcgtatttctggaaacccaggccatcatcctgctggtcacacccattctgctgcccattgccatgaaaatcggcctggatcccctagtgctgggcatcatcatgatcatcaacacctccatcggcatgatcaccccacccatggccgtcaaccttttcgtggcccagggactggtgcgggaacacggcgtgaagctggagcatatcacccgctacatcatcccctatttcctcgtggaactggcggtgctgatgctcatcggctatgtgccgggcatttcgacatggctggtcaccgcggtgaagtag

SEQ ID NO: 77976 - protein, 256 aa, Unknown
  Obtained from environmental sample
  SIGNAL (1)...(23)
  DOMAIN (1)...(248): DctM-like transporters
  misc_feature (1)..(256): Xaa is any amino acid
MGITPGLVLALALCLCAMGMARKMGVPTTGAFRLNELAASFLDAILALCMPLIILGGIYGGVFTPTEAGAVACLYSLLISILVYREMTWDTLKKVIISAGISTSTVFFVLACSQSFAWLLNVGKISESVVNVMLSLTDSYVGMILIINAILLFLGVFLETQAIILLVTPILLPIAMKIGLDPLVLGIIMIINTSIGMITPPMAVNLFVAQGLVREHGVKLEHITRYIIPYFLVELAVLMLIGYVPGISTWLVTAVK

SEQ ID NO: 77977 - DNA, 693 bp, Unknown
  Obtained from environmental sample
  misc_feature (1)..(693): n is a, c, g, or t
ttgcagaatgggataaagaaagaaaaaagtattatttatagcggtatcccagagccagggcaattagttgaagtgcgccgccttcattgggtggtcaccgagatatgtgtaagcgctttttacaaatcatcaggaaaaacacagcatcttgtaagtttatcatctcttgatgaagatttttccggcgaagaaattcaagttatatgggaaatagaacctggcgcacaaattatagaaaaagccggattgccttctataaccggatgggataataaagaaaaattggatgcctttttagacgcagtacgctggggagcaactaccaatgcggatcgtaattttctccaatcgccttttcgtagtggcatagccatagaagactatcaacttgatcctcttgttcgtgcaatagatatgagtcgagtcaatctgcttatcgcagatgatgttgggcttggtaaaacaattgaggcaggattagttattcaagaattaatcttgcgtcaccgggtaagaacggtgttggttgtttgtccttcaagccttcagataaagtggaaaaccgaaatgtgggaaaaattcggcctggaattccgtattgtcgatactgagttcttaaaggacttgagaagaaaacttggcattcatatcaatccctggacatcttttccccggctactcggccgattctga

SEQ ID NO: 77978 - protein, 230 aa, Unknown
  Obtained from environmental sample
  misc_feature (1)..(230): Xaa is any amino acid
MQNGIKKEKSIIYSGIPEPGQLVEVRRLHWVVTEICVSAFYKSSGKTQHLVSLSSLDEDFSGEEIQVIWEIEPGAQIIEKAGLPSITGWDNKEKLDAFLDAVRWGATTNADRNFLQSPFRSGIAIEDYQLDPLVRAIDMSRVNLLIADDVGLGKTIEAGLVIQELILRHRVRTVLVVCPSSLQIKWKTEMWEKFGLEFRIVDTEFLKDLRRKLGIHINPWTSFPRLLGRF

SEQ ID NO: 77979 - DNA, 438 bp, Unknown
  Obtained from environmental sample
  misc_feature (1)..(438): n is a, c, g, or t
atgggacaatacatacagatcttactcattattattatcgccttgatcctgttttggttcggtttttccctgcgttttgagaaaggattcttattgggattcggttcttcccagaaacgacatagccccaggccccgggcaaccgacttttctggggcggcccaaacatgcccgatttgcggcacccgactggctgaaggcgaaacgattaaatccacggcctttccctcactaaatggcggtaaagaccgggtcatgcatattaaaggctgtacctactgcctcagaggagaaggagagcgcctttgtcctgtctgcggcgaaaccctaaaaaatgacgagatccttgtgtgccgtttgtatgaacggctcccccgatccggccgaaaacgttcccacgttcatgttttgggctgtacccattgttggggtacataa

SEQ ID NO: 77980 - protein, 145 aa, Unknown
  Obtained from environmental sample
  misc_feature (1)..(145): Xaa is any amino acid
MGQYIQILLIIIIALILFWFGFSLRFEKGFLLGFGSSQKRHSPRPRATDFSGAAQTCPICGTRLAEGETIKSTAFPSLNGGKDRVMHIKGCTYCLRGEGERLCPVCGETLKNDEILVCRLYERLPRSGRKRSHVHVLGCTHCWGT

SEQ ID NO: 77981 - DNA, 876 bp, Unknown
  Obtained from environmental sample
  misc_feature (1)..(876): n is a, c, g, or t
atgttagaggacattgtggcccagctcggggttacaatgaaagaattggccgaaacccacaaagagacggaacgctctatggccaaaagccgggaggagacggaacgggctatgatcaagatccgggaagaggcggagcgctctatggccaaaagccgggaggagacggaacgggctatggtcaagatccgggaagagacggagcgctctatggccaagagccatgaggaaacggaacgctctatggccaagagccatgaggaaacggagcgctctatggccaagagccggaaggagacggaacgctctatggccaagagccgggaggagacggagcgctctatggccaagagcctagaggagacggagcgctctatggccaagagcctagaggagacggagcgaatacttacggccaaaatcaacgggttgaacgaaacggtagacaagtggatcggctataccggccatagtatcggccacatcgtggaactggtcctcatccccggcatanagaaaaaaatgaacgaactcggacatgatttcgatacgctggcgccgaggaaactatactaccgcaaagacggtaatatttttacagaaatcgaccttattcctcgaaaacgccgaagaaattnatggcccgtgaaggtaaaaacccccattattcggtatcggcgggaaaaaccccacctggagaaggttgcaatttgctccccaaacatggtggcgaaaaaattaaacgggaaaaacgaatcctccgggggggccgccggaataaacaataaaaaaaaaccccccccaaaaagggcccccccgccttggggattttttttaataaaaagggtggagagaaccaaaaaaattaacgggtga

SEQ ID NO: 77982 - protein, 291 aa, Unknown
  Obtained from environmental sample
  misc_feature (1)..(291): Xaa is any amino acid
MLEDIVAQLGVTMKELAETHKETERSMAKSREETERAMIKIREEAERSMAKSREETERAMVKIREETERSMAKSHEETERSMAKSHEETERSMAKSRKETERSMAKSREETERSMAKSLEETERSMAKSLEETERILTAKINGLNETVDKWIGYTGHSIGHIVELVLIPGIXKKMNELGHDFDTLAPRKLYYRKDGNIFTEIDLIPRKRRRNXWPVKVKTPIIRYRREKPHLEKVAICSPNMVAKKLNGKNESSGGAAGINNKKKPPPKRAPPPWGFFLIKRVERTKKING

SEQ ID NO: 77983 - DNA, 390 bp, Unknown
  Obtained from environmental sample
  misc_feature (1)..(390): n is a, c, g, or t
atggccgttgagtatcaggaatatataaacaaggtgaaagaattctggggaaaattcagtttcggccagcgtctccttatcggcggcgtgaccgtggtcgttcttgcggggcttctcgcgctcacgctttgggtcaacaagccggaatacagggtgctgttcacgaacctgaccccggaagacgccaaccgtgtcgtgacgatgctccagagcgagaaagtcccctattcgctggaaaacaacgggacagccattctggtgccggaaaagaaagtctatgaagtgcgcctgaaagtcgccggggaagggagccttaaaagcaacggcatcggctacgaaattttcgatcaggtcaaaggtcgcccagacggattttgtgcaaaaaactaa

SEQ ID NO: 77984 - protein, 129 aa, Unknown
  Obtained from environmental sample
  DOMAIN (23)...(129): Secretory protein of YscJ/FliF family
  misc_feature (1)..(129): Xaa is any amino acid
MAVEYQEYINKVKEFWGKFSFGQRLLIGGVTVVVLAGLLALTLWVNKPEYRVLFTNLTPEDANRVVTMLQSEKVPYSLENNGTAILVPEKKVYEVRLKVAGEGSLKSNGIGYEIFDQVKGRPDGFCAKN

SEQ ID NO: 77985 - DNA, 501 bp, Unknown
  Obtained from environmental sample
  misc_feature (1)..(501): n is a, c, g, or t
ttgcaatccggttcacgcgggacaggaagggggcgcgccgcgccgatatcagacgaacacatcgccggctccgcggcttacggtcaccttgccttcggcttcgagccggcgcacgatgcgcacgatactctgctgggcgccctcgatgtcggaaagctttgtgggacccatgtattcgagttcttcgcggatcatgttggaggcgcgttccgacatattcttgaagaacttttctttcagatcgtctgtggccccacgcatggccatcatcagatcctcgttggaaatttccttgagcagttcgcggatgctgcggtcgtccatgcccttgcagtcttcgaacacgaacatgaggttgcggatgtcttcggccatctgggcggaacttttctcgatttccaaagcacttcctcttcggtggcgcggtccacggagttcaaggattccgcgaccgactgcacgccgccgactttctggcttctttgccgcccatggcgatga

SEQ ID NO: 77986 - protein, 166 aa, Unknown
  Obtained from environmental sample
  misc_feature (1)..(166): Xaa is any amino acid
MQSGSRGTGRGRAAPISDEHIAGSAAYGHLAFGFEPAHDAHDTLLGALDVGKLCGTHVFEFFADHVGGAFRHILEELFFQIVCGPTHGHHQILVGNFLEQFADAAVVHALAVFEHEHEVADVFGHLGGTFLDFQSTSSSVARSTEFKDSATDCTPPTFWLLCRPWR

SEQ ID NO: 77987 - DNA, 354 bp, Unknown
  Obtained from environmental sample
  misc_feature (1)..(354): n is a, c, g, or t
ttggaaatcgagaaaagttccgcccagatggccgaagacatccgcaacctcatgttcgtgttcgaagactgcaagggcatggacgaccgcagcatccgcgaactgctcaaggaaatttccaacgaggatctgatgatggccatgcgtggggccacagacgatctgaaagaaaagttcttcaagaatatgtcggaacgcgcctccaacatgatccgcgaagaactcgaatacatgggtcccacaaagctttccgacatcgagggcgcccagcagagtatcgtgcgcatcgtgcgccggctcgaagccgaaggcaaggtgaccgtaagccgcggagccggcgatgtgttcgtctga

SEQ ID NO: 77988 - protein, 117 aa, Unknown
  Obtained from environmental sample
  DOMAIN (2)...(109): FliG C-terminal domain
  misc_feature (1)..(117): Xaa is any amino acid
MEIEKSSAQMAEDIRNLMFVFEDCKGMDDRSIRELLKEISNEDLMMAMRGATDDLKEKFFKNMSERASNMIREELEYMGPTKLSDIEGAQQSIVRIVRRLEAEGKVTVSRGAGDVFV

SEQ ID NO: 77989 - DNA, 351 bp, Unknown
  Obtained from environmental sample
  misc_feature (1)..(351): n is a, c, g, or t
ttggggccgtttcccttcccgaaattgggcgcccagggggttgatgcccccttggccccctggaaatcgttcccggagaaaatggtgctggaaattgacaaaggtgttgcaaagccagttcatcgccatgggcggcaaagaagccagaaagtcggcggcgtgcagtcggtcgcggaatccttgaactccgtggaccgcgccaccgaagaggaagtgctttggaaatcgagaaaagttccgcccagatggccgaagacatccgcaacctcatgttcgtgttcgaagactgcaagggcatggacgaccgcagcatccgcgaactgctcaaggaaatttccaacgaggatctga

SEQ ID NO: 77990 - protein, 116 aa, Unknown
  Obtained from environmental sample
  misc_feature (1)..(116): Xaa is any amino acid
MGPFPFPKLGAQGVDAPLAPWKSFPEKMVLEIDKGVAKPVHRHGRQRSQKVGGVQSVAESLNSVDRATEEEVLWKSRKVPPRWPKTSATSCSCSKTARAWTTAASANCSRKFPTRI

SEQ ID NO: 77991 - DNA, 891 bp, Unknown
  Obtained from environmental sample
  misc_feature (1)..(891): n is a, c, g, or t
gtggccatagtgggcgcgcccaacgcgggcaaatccaccctcttaaaccgccttttgggcgaaaaggtggccatagtcacccccaagccccagaccacccggcaccgcatcctgggcgtcttgacccggccggaggcccagttgatcttctgggataccccgggctggcacgaaccgggccgcctgcccctgaaccgggagatgatgaaccgggcccaggccgccctgagcgacagcgacctggccctctgggtggtggacgggctccggcgcgggcgggaacaccgcctggccctggaggccttgcggcccctgggcccggggcggatcttggccgcggtcaataaaatagacgccctctctgaaaaggccgcccttctgccggtcctggccgaaatagaggccgaggtccatcccgcggccctggtgcccatttcggccaagaccggcgacggcctggcggccctggaaggggagatcatcaagctactccccgaaaaccggcccttctaccccgaagacaccctgaccgaccagcctgagcgggtcatcgccgcggaaatgatccgcgaggccgtcttccggctcaccagccgcgaagtcccctacgccacggccgtgaccgtggatgaattcaaggccgagggtgatttgaggcgcctgtcagccaccatccatgtggagcgngacagccagaagggcatcgtcatcggcgccggcggggctcggctcaagagcatcggccaggccgcccggcgggagttggagcgtttcctgggggcccgggtttatctccagctctttgtccgggccacccgcgactggagcaagaagccctcggccccttttggaattcggttaccgcgacgggtgaagaaggggaagacatga

SEQ ID NO: 77992 - protein, 296 aa, Unknown
  Obtained from environmental sample
  DOMAIN (1)...(168): Elongation factor Tu GTP binding domain
  misc_feature (1)..(296): Xaa is any amino acid
MAIVGAPNAGKSTLLNRLLGEKVAIVTPKPQTTRHRILGVLTRPEAQLIFWDTPGWHEPGRLPLNREMMNRAQAALSDSDLALWVVDGLRRGREHRLALEALRPLGPGRILAAVNKIDALSEKAALLPVLAEIEAEVHPAALVPISAKTGDGLAALEGEIIKLLPENRPFYPEDTLTDQPERVIAAEMIREAVFRLTSREVPYATAVTVDEFKAEGDLRRLSATIHVERDSQKGIVIGAGGARLKSIGQAARRELERFLGARVYLQLFVRATRDWSKKPSAPFGIRLPRRVKKGKT

SEQ ID NO: 77993 - DNA, 501 bp, Unknown
  Obtained from environmental sample
  misc_feature (1)..(501): n is a, c, g, or t
atgaaggaagtcgcccccgaaaagccgaagccgtggcggcgcgtggtttgctccccgaagccgcaggatatcgtggagatcgattcgatcatgcagctcctcgataatcacatcgtggtcatctcctgcggcggcggcgggataccggtggtgcgctcgggcgacggcgagtgcgaggggatcgacgcggttatcgacaaggactataccgccgcgctgctcgccaaaaaagtggacgccgattttctgatgatcctgaccgatgtcgaaaaggtcgctatcaattacggcaaacccgatcagaaatggctcgattcgctctccagcgatgaggcggagagtatgcacaaaaagggcgagttcccgggcggttccatgggcccaaaggtaacagccgcgatagactttgtgcgctggggcggcgaggcggccattatcacctcgctcgaaaaggcgcgcgaagccctggcaggtaaaaccggtacgatcttcaggaaatga

SEQ ID NO: 77994 - protein, 166 aa, Unknown
  Obtained from environmental sample
  DOMAIN (1)...(148): Amino acid kinase family
  misc_feature (1)..(166): Xaa is any amino acid
MKEVAPEKPKPWRRVVCSPKPQDIVEIDSIMQLLDNHIVVISCGGGGIPVVRSGDGECEGIDAVIDKDYTAALLAKKVDADFLMILTDVEKVAINYGKPDQKWLDSLSSDEAESMHKKGEFPGGSMGPKVTAAIDFVRWGGEAAIITSLEKAREALAGKTGTIFRK

SEQ ID NO: 77995 - DNA, 408 bp, Unknown
  Obtained from environmental sample
  misc_feature (1)..(408): n is a, c, g, or t
ttgtttcacgtctccccgggcaattttcatccggcgccctcggtttactcgtcggttgtgcgcttccgcctgcacccgccgccgcttccgcctgaggcgcggccgtatttctttgccctcgtgcgcgcggtcttcagttcgcggcgcaagaccctgcggaacagcctgcgcgactctccctttacacacatgaatccggcgcttctcgacgcggtattgcaggctgagcatatagacggcgggattcgcggggagacgctctccatggagcggtttgtcgctcttgcgcttgcctggattgaactgggcgtttgcacgacgcaaacgtcccgcgcgcggcaggaggccgcgaccggcgcggggcagagcacgacgcaaacgtcccgcgcgggacgggacatagaatga

SEQ ID NO: 77996 - protein, 135 aa, Unknown
  Obtained from environmental sample
  misc_feature (1)..(135): Xaa is any amino acid
MFHVSPGNFHPAPSVYSSVVRFRLHPPPLPPEARPYFFALVRAVFSSRRKTLRNSLRDSPFTHMNPALLDAVLQAEHIDGGIRGETLSMERFVALALAWIELGVCTTQTSRARQEAATGAGQSTTQTSRAGRDIE

SEQ ID NO: 77997 - DNA, 867 bp, Unknown
  Obtained from environmental sample
  misc_feature (1)..(867): n is a, c, g, or t
gtgctcgagctggccatgtgtaacaacccctcgacccgcggcgcgtggctgttcgcccaagccgccagcgccacgcacgaccgctcgctctccgcctattacccgaggctggacgtgaacgcgggcgttaccagaaacatgatgccgggcggcgaggccaccattacctcggccggcgcgagcctcggctggctgctgtacgatttcggcggccgcgaggccgccatagagcggacgtaccagacgatgatgtcgaccgagttctcgtacaaccagactttgcagaacacggcctatcaggcgctggccgcctattggaacacgctcgcgctgcaagagaatctcgaggcggtcaaggccaacgaggtcgcgacgggcaaggcggtcgagttatcctctaaaaagctcgagcttggcatggtatcccgcgcggacatgctccaggcgcagaccgcgcaccagcaggctcggcttgatattaccgtcgccgaacagaggcttctaaacgcgcaggccggactctcgcgccttttgggcctgcccgcgacgctgcgacttaaccttgaaagcgtgggcggcgaggggcgtgaggtcgcgctggccaaaagcctggaagatctgatggaagtcgcccttgaaaagcgcatggatctgcgggcgcagcttgccgacgtaaaggcttcgcaggccgacatagacaaggccaagagcggctttttcccagcgtttccgccgtcgcctccaacaattggacgctgtccaacagcgcggattcctttaacgattatcccatggagacaggcagaagcgcgggcgtccagctctcttggaacatatttttcggcttcgagnacacttacggcgtga

SEQ ID NO: 77998 - protein, 288 aa, Unknown
  Obtained from environmental sample
  DOMAIN (2)...(179): Outer membrane efflux protein
  misc_feature (1)..(288): Xaa is any amino acid
MLELAMCNNPSTRGAWLFAQAASATHDRSLSAYYPRLDVNAGVTRNMMPGGEATITSAGASLGWLLYDFGGREAAIERTYQTMMSTEFSYNQTLQNTAYQALAAYWNTLALQENLEAVKANEVATGKAVELSSKKLELGMVSRADMLQAQTAHQQARLDITVAEQRLLNAQAGLSRLLGLPATLRLNLESVGGEGREVALAKSLEDLMEVALEKRMDLRAQLADVKASQADIDKAKSGFFPAFPPSPPTIGRCPTARIPLTIIPWRQAEARASSSLGTYFSASXTLTA

SEQ ID NO: 77999 - DNA, 438 bp, Unknown
  Obtained from environmental sample
  misc_feature (1)..(438): n is a, c, g, or t
gtggtctacaacgtgataatcggcatagacaatcccgacggcaagctgcttcccggcatgaccgcgttcgtcgaagtcgagaccaaagaggccaaggacgcgccgtccctgcccatccgtgcctttcagttcaggccggatgaaagcctgcgcgagcaccagacagaaagccccgcccgccccgccgtgggcgaggcgttcgtgtgggtgctcgacggcagcaagcttaagcccataaggatacgccgcggcttgtccgacggctcgttcacggaagtgatcacgaccgagctcgccgtgggcgacaaggtcataacggatcatactccctccagaagaagccgtcccgccggagctgcgtccggctcgaataacagacctcgccaaggcggccccggcggccccggcggccccggtcgcggcggtcccggaatgtaa

SEQ ID NO: 78000 - protein, 145 aa, Unknown
  Obtained from environmental sample
  misc_feature (1)..(145): Xaa is any amino acid
MVYNVIIGIDNPDGKLLPGMTAFVEVETKEAKDAPSLPIRAFQFRPDESLREHQTESPARPAVGEAFVWVLDGSKLKPIRIRRGLSDGSFTEVITTELAVGDKVITDHTPSRRSRPAGAASGSNNRPRQGGPGGPGGPGRGGPGM

SEQ ID NO: 78001 - DNA, 612 bp, Unknown
  Obtained from environmental sample
  misc_feature (1)..(612): n is a, c, g, or t
atgaaacgggaagtgatcgggaactgcgaattatatctcggcgattgcttggaaatactgccggagatcggctgcgttgacactgtggtaaccgatccggtgtggccgaataattccattcccgaattcgcgcatattgatccttacaaactctttgcggatgcgtggaagcatattaaaaccaagagggcggtgattcatcttggttgtaattcagatcccggtattttggcgccaatagatctaccgttttttcgtgttgcatggttggaatatgcccgtccacattatatagggcgattgctttttactggagacacggcatatttatacggtcctccaccgagatcaataccaggaaaaagagttatttcgggaaaatgcgtgttcaacaacgtttcaggaaaggaaagcgatcacccatgcccccggaaattgaaacataccaaatggttagtaaaccaattcaccgaaccggaagacaatgtattagatccctttatgggttccggcacaaccggcgtggcctgtttggatttatgcagaagatttattggtattgaaattaacgaaaagtatttgactctgccctcaaacctcggccgattctga

SEQ ID NO: 78002 - protein, 203 aa, Unknown
  Obtained from environmental sample
  DOMAIN (26)...(199): DNA methylase
  misc_feature (1)..(203): Xaa is any amino acid
MKREVIGNCELYLGDCLEILPEIGCVDTVVTDPVWPNNSIPEFAHIDPYKLFADAWKHIKTKRAVIHLGCNSDPGILAPIDLPFFRVAWLEYARPHYIGRLLFTGDTAYLYGPPPRSIPGKRVISGKCVFNNVSGKESDHPCPRKLKHTKWLVNQFTEPEDNVLDPFMGSGTTGVACLDLCRRFIGIEINEKYLTLPSNLGRF

SEQ ID NO: 78003 - DNA, 339 bp, Unknown
  Obtained from environmental sample
  misc_feature (1)..(339): n is a, c, g, or t
ttggtgggggtggaccccaaacaattgcggcgattgtacaaggaagaaatcaacaaggaactgaagtcgctgctgccgaaaccaaaggcggacgccggcaagcccgcgaagggtaagaaaaccgccgcggttaaaccgttggcgaaaaagaaacccgcggcgaagaagccggccgcggcaaagaagtctcccggcaaagccgcggcagccaaacagacacaggcggcggcaagaaaaaatcttcccggccataatcccggaagcgccaaaggttggaaaaagaagacgagggcgcgggtggcgaaaagcgcggccggcgatcccgtggtggagatgtaa

SEQ ID NO: 78004 - protein, 112 aa, Unknown
  Obtained from environmental sample
  misc_feature (1)..(112): Xaa is any amino acid
MVGVDPKQLRRLYKEEINKELKSLLPKPKADAGKPAKGKKTAAVKPLAKKKPAAKKPAAAKKSPGKAAAAKQTQAAARKNLPGHNPGSAKGWKKKTRARVAKSAAGDPVVEM

SEQ ID NO: 78005 - DNA, 459 bp, Unknown
  Obtained from environmental sample
  misc_feature (1)..(459): n is a, c, g, or t
ttgggtaaggtgtacatgtacatgtcatcctacgataaagagttgcactacggacgcaacgaggtgattcctgccgaacactactgcaatagcaacatgagcgaagcggtcggaacaacaagctgggtagcaggtgtacagctcaaagtatcatcggacagcaccggcatgcttgaggtggcaaactttggtctgcccaagtggttggagtataaagtagaaacggaaaaaagcggcacctacgcgctgactatccgctacgcggcagcctctgattccaagtgcaaaatttttgttgacggaaatgaggtcggtgaagttgatctgcccaaaaccggtgactacgccgcttgggcaaccgttactacagctgctataaccattggcacaggcaagcataccatacgctttacgccaagcaagggtcaggtgagcatgaactggtggaggtttttatag

SEQ ID NO: 78006 - protein, 152 aa, Unknown
  Obtained from environmental sample
  DOMAIN (35)...(151): Carbohydrate binding module (family 6)
  misc_feature (1)..(152): Xaa is any amino acid
MGKVYMYMSSYDKELHYGRNEVIPAEHYCNSNMSEAVGTTSWVAGVQLKVSSDSTGMLEVANFGLPKWLEYKVETEKSGTYALTIRYAAASDSKCKIFVDGNEVGEVDLPKTGDYAAWATVTTAAITIGTGKHTIRFTPSKGQVSMNWWRFL

SEQ ID NO: 78007 - DNA, 462 bp, Unknown
  Obtained from environmental sample
  misc_feature (1)..(462): n is a, c, g, or t
gtgttggagcttgacgaagccaaagcgccggagacggtggctaattttctcgcctatgtccgttccggtttctacaagggaacgatttttcatcgcgtcattcccggcttcatgattcagggcggcggcttcacccccgacatggcgcagaaagcgacgcgtccgcccatcaaaaatgaagcggccaacggccttaaaaaccagcgcggcagcatcgccatggcgcgtaccagcgatccccattcggcctccgcgcaatttttcatcaatgtcgtcgacaatcccaatctcgaccatccttcctatgacggctggggatacgcggtgtttggcagggtcgaaaaaggaatggaagtggtcgacgccattgctgccgttgccacccgcaattacggaggccaccagaatgtcccgaccgagcctatcgttatccaatccgcaaccgttctttctgaaaaatga

SEQ ID NO: 78008 - protein, 153 aa, Unknown
  Obtained from environmental sample
  DOMAIN (1)...(150): Cyclophilin type peptidyl-prolyl cis-trans isomerase/CLD
  misc_feature (1)..(153): Xaa is any amino acid
MLELDEAKAPETVANFLAYVRSGFYKGTIFHRVIPGFMIQGGGFTPDMAQKATRPPIKNEAANGLKNQRGSIAMARTSDPHSASAQFFINVVDNPNLDHPSYDGWGYAVFGRVEKGMEVVDAIAAVATRNYGGHQNVPTEPIVIQSATVLSEK

SEQ ID NO: 78009 - DNA, 357 bp, Unknown
  Obtained from environmental sample
  misc_feature (1)..(357): n is a, c, g, or t
atggggatcgttggtgcgcgccatggcgatactgccgcgcttgttctgaaggccgttgtccgcctcgttctggatggcgtcgcgagtccccttctgctgcatatcaggggtaaaaccgccgccctgaatcatgaagcccggaatgacgcggtgaaaaatcgttccgtcgtaaaacccttcccggacatattgctcgaaatttgcgaccgtcaacggcgctttttcagcgtccagcttcagggtcaggataccgtagttggtggtcagtttaatcatggtggatctcatttttcagaaagaacggttgcggattggataacgataggctcggtcgggacattctggtggcctccgtaa

SEQ ID NO: 78010 - protein, 118 aa, Unknown
  Obtained from environmental sample
  misc_feature (1)..(118): Xaa is any amino acid
MGIVGARHGDTAALVLKAVVRLVLDGVASPLLLHIRGKTAALNHEARNDAVKNRSVVKPFPDILLEICDRQRRFFSVQLQGQDTVVGGQFNHGGSHFSERTVADWITIGSVGTFWWPP

SEQ ID NO: 78011 - DNA, 873 bp, Unknown
  Obtained from environmental sample
  misc_feature (1)..(873): n is a, c, g, or t
atggtggatttgccgatgatgtctaaattgctggatgcaattccagacgcttgcgatttatatttgctcggcgatagacatcagctcgcatctgttgaagctggttcaatctttgcggatatttgcgaaaaattcaaaaatgataaaaatgtttacacggaactttcaataaattacagagcaaaggacgccccaggcattgaaaatttaagcaagcaaattcttgaaagttcaaaggaaaagcccgtagagaattttgacaatgaaaatgtccattattttgaaaacattggattggaaaatgaattgctcgaaaggtacaaaaaattattttctgctgcaaataaggaagacgctttggaatatttaaaaacatttcagattttatgtgcgacaaaaatcggaaaaaatggaacggaatttatcaacagaaaattatgcggcattgcaaaaaaagaaaaggcaaaatggactccgataataatcacagaaaatgattatcagcaaaatcttttcaacggggatgtggggattaaatctcaggaagaggcatatttttatatcagcaaaaacgagataaaaactttttccattttaaccctccctaaatatgagcctgcctttgctataacaattcacaaatcgcagggttcagaatatgaatgcgctgcggttgtttatccagaaaaagaaaggggaaatgaaagcgaaacaattttcaccaaagaattgctatatactggcgtaactcgtgcgaaaaaagaatgccctatattcngaagcaaagaggtgctcataaattcctgcaagaaggaaatttatagggcttccggaattagtgaaatatatagcaaagctaccgattttttctaa

SEQ ID NO: 78012 - protein, 290 aa, Unknown
  Obtained from environmental sample
  misc_feature (1)..(290): Xaa is any amino acid
MVDLPMMSKLLDAIPDACDLYLLGDRHQLASVEAGSIFADICEKFKNDKNVYTELSINYRAKDAPGIENLSKQILESSKEKPVENFDNENVHYFENIGLENELLERYKKLFSAANKEDALEYLKTFQILCATKIGKNGTEFINRKLCGIAKKEKAKWTPIIITENDYQQNLFNGDVGIKSQEEAYFYISKNEIKTFSILTLPKYEPAFAITIHKSQGSEYECAAVVYPEKERGNESETIFTKELLYTGVTRAKKECPIFXSKEVLINSCKKEIYRASGISEIYSKATDFF

SEQ ID NO: 78013 - DNA, 756 bp, Unknown
  Obtained from environmental sample
  misc_feature (1)..(756): n is a, c, g, or t
atgaaaaagcatccgctgcgttggcaaacgaccacactctgggactatccttcgcaaaattatcccgtcggcgaggacgcatcatcccgtcagttcctgaatacacagggcgatacggattacgcgggcgcgacgccatcatatatcatctggaacctgctgcagcgctacacgaagaaaaaagatttggtcgtcgacccgatgtgcgggagcggcacgaccctggatgtcgcgcgcgatcttgcgcggcgcgcgcttggctatgatctcgcgcccacccgaaaggacatctttcgcgccgacgcgcgcaggctgccgctggagaccggcaaagcggatttcgtttttatcgatccgccgtactccgatcacatagagtacgcgggcgggccggattgcatcgggcggctctcggccttgggcgaagcgtattacgaggccatggcggaggtcatcggcgagatcgatcgcgtcctgcgcccgggacgctatatggcgctctatgtcagcgattcatacgaaaaggggaagcccttcatgccgataggttttcggctctatgcccttctggccgcgcgttttgtgcccgtcgatatcgtcgcggtcaagcggcataacgccaaactgttccgcaatcattggcacagcgcggcggtagagcataactattttctgcgcggctttcattaccttttcatcatgtataaaaaggagcgccggggcgcgccgcctcagccaaggtctcggccaatctga

SEQ ID NO: 78014 - protein, 251 aa, Unknown
  Obtained from environmental sample
  DOMAIN (65)...(167): Methyltransferase domain
  misc_feature (1)..(251): Xaa is any amino acid
MKKHPLRWQTTTLWDYPSQNYPVGEDASSRQFLNTQGDTDYAGATPSYIIWNLLQRYTKKKDLVVDPMCGSGTTLDVARDLARRALGYDLAPTRKDIFRADARRLPLETGKADFVFIDPPYSDHIEYAGGPDCIGRLSALGEAYYEAMAEVIGEIDRVLRPGRYMALYVSDSYEKGKPFMPIGFRLYALLAARFVPVDIVAVKRHNAKLFRNHWHSAAVEHNYFLRGFHYLFIMYKKERRGAPPQPRSRPI

SEQ ID NO: 78015 - DNA, 870 bp, Unknown
  Obtained from environmental sample
  misc_feature (1)..(870): n is a, c, g, or t
atggcggactcctgtagtgtccaagcggtattctgcaaccccgacaggcccaaggggagagggcttgcgcttgccatgcccccagttaaaatggcggcgctggatttgggccttgacgtgcgccagcccgaaaattggaaagatggcacggccaaggagatttggggccagctcaaaattgatttggcggtggtggtggcgtacggccacattttgcccacttggatgctggatagctgcccattgggcgcgtggaacctgcatttttccctattgccaaggtggcggggggcctcgcctgtctatcacacgatagcggcaggcgatgaagaaacaggcgtaacattgatgaagatcgcgcctggcctagatgaggggccaattctggcacaaactaggcggcggctgacaggccaagaaacgtccgaccagcttttcagcttgctcgccaaggacgcggcagacattctgacggcaaacatccccgcgcttcttggcggcgctgccgcatctccgcaggatgaaaaaaaggccacatacgcgccaaagctaaaaaaagaaatggcaaagctggacttgacaaaagactcaattactctgcaccgacaaataagggcatcgcagccttggcctggggcggagatacaaattgagggttcagcagtaaaaataatatccgtgggcgaaatcgcgcattccgacagcccacctggcactttgctctggggcaggggaggcgcttggctgaccgttggcgacaatagagcgatagaattgttggtgctgaaaagggaaggcaagcccccgatgccctccaaccaagccctgcagcactttggcaagtgcggcccactggccctgatcccatga

SEQ ID NO: 78016 - protein, 289 aa, Unknown
  Obtained from environmental sample
  DOMAIN (9)...(161): Formyl transferase
  misc_feature (1)..(289): Xaa is any amino acid
MADSCSVQAVFCNPDRPKGRGLALAMPPVKMAALDLGLDVRQPENWKDGTAKEIWGQLKIDLAVVVAYGHILPTWMLDSCPLGAWNLHFSLLPRWRGASPVYHTIAAGDEETGVTLMKIAPGLDEGPILAQTRRRLTGQETSDQLFSLLAKDAADILTANIPALLGGAAASPQDEKKATYAPKLKKEMAKLDLTKDSITLHRQIRASQPWPGAEIQIEGSAVKIISVGEIAHSDSPPGTLLWGRGGAWLTVGDNRAIELLVLKREGKPPMPSNQALQHFGKCGPLALIP

SEQ ID NO: 78017 - DNA, 360 bp, Unknown
  Obtained from environmental sample
  misc_feature (1)..(360): n is a, c, g, or t
ttgggcttcgcgcagtgggaaagcgacggcgcgcgcgttctggatcgtatatccctgcacacggacctggcgcttctcggcctgccgcagccaacggacgttatccccggcatttccctgaccgtcgcgggcgtgagcgcaagcgcgaagcgcgcgcatatgctggcgcagcgttatcaccccctgagcgaaaacatggaaggcttcgccgtggctttggcctgcgcgcgccagggcctcccctgcgcggaactgcgcgttttttccaacaaggtcgggtcccgtgcgccggaggaccgggccttccccttggcgcttgcgaaactcggcgcgttagggcaagaattgtttgatggatag

SEQ ID NO: 78018 - protein, 119 aa, Unknown
  Obtained from environmental sample
  misc_feature (1)..(119): Xaa is any amino acid
MGFAQWESDGARVLDRISLHTDLALLGLPQPTDVIPGISLTVAGVSASAKRAHMLAQRYHPLSENMEGFAVALACARQGLPCAELRVFSNKVGSRAPEDRAFPLALAKLGALGQELFDG

SEQ ID NO: 78019 - DNA, 537 bp, Unknown
  Obtained from environmental sample
  misc_feature (1)..(537): n is a, c, g, or t
ttgatggatagccggaacaacgcatcagcgctccaaacccgtctcgctgcggaactgcccgccatatccggcgcgctcgatcaggctgtcggcgcgttgcccgcaagcgtgcaaccccttgcccggcatattctgcttgcgggcggcaaacggctgcgtccttttctgaccgtgctcttcgcgcggctttgggcgtaccgggaaaacgacatctatcccctggcggccgccatggaaatgctgcacgccgccacgctgctgcacgacgatgtgctggacgaggccgtcacccggcgcggcacgcctgcggcccacaccctgttcggcatcgtgcccgccattctggccggcgatgcgctcctttcccacgccaacaaactcgtggccgagtatggcgattgccgcctgagcgcctgctttgccgaggccaccctgcgcaccgccgccggggaaatccagaaatcgcctgccagcgccgcgtggatcagccgcccgaaatctatcacgaaatcatcaccggcaagaccgcctggctga

SEQ ID NO: 78020 - protein, 178 aa, Unknown
  Obtained from environmental sample
  DOMAIN (36)...(177): Polyprenyl synthetase
  misc_feature (1)..(178): Xaa is any amino acid
MMDSRNNASALQTRLAAELPAISGALDQAVGALPASVQPLARHILLAGGKRLRPFLTVLFARLWAYRENDIYPLAAAMEMLHAATLLHDDVLDEAVTRRGTPAAHTLFGIVPAILAGDALLSHANKLVAEYGDCRLSACFAEATLRTAAGEIQKSPASAAWISRPKSITKSSPARPPG

SEQ ID NO: 78021 - DNA, 642 bp, Unknown
  Obtained from environmental sample
  misc_feature (1)..(642): n is a, c, g, or t
atgaaaaaactttttgtttttagtatggttgccttttcaatgctcttcctcgcttgcgaagaagacgttattcctattcctctgccgcctccagcacaggccgttggcaatgaatccgcaccttcggttgatgaaaaagctgaaccgcaacaggttcttgtggaaaaacctagcgaaccagcaaaaccagcaaaagctacagcaaaagaagctcctgcaaaagttgttaaagaaccgcctcccccaaaagaacccgcaaaagcacctgtcttttatagcggcgatgcagagcaactcagcagaggcagatatgttattcaagtatcaattgttccaactgaggcatctgcaagaagaattattaaaaaactctcagacgatggaattaaggcatataacgcaaaagttgataatccagaccctgaaaaaggcatgattggcacatataatagagttagaattggtttttttgatgcaaaacccgctgcagaagcatttgccaaatcaaggctggaacccctaggctaccgttggtgggtggacagaagcagaaacgacnatataggaaaatattcggaatcagagtcatcggaaccttttgttgttaaaaaaatccagaacaaacatctagacaatgtctga

SEQ ID NO: 78022 - protein, 213 aa, Unknown
  Obtained from environmental sample
  SIGNAL (1)...(18)
  DOMAIN (100)...(182): Sporulation related domain
  misc_feature (1)..(213): Xaa is any amino acid
MKKLFVFSMVAFSMLFLACEEDVIPIPLPPPAQAVGNESAPSVDEKAEPQQVLVEKPSEPAKPAKATAKEAPAKVVKEPPPPKEPAKAPVFYSGDAEQLSRGRYVIQVSIVPTEASARRIIKKLSDDGIKAYNAKVDNPDPEKGMIGTYNRVRIGFFDAKPAAEAFAKSRLEPLGYRWWVDRSRNDXIGKYSESESSEPFVVKKIQNKHLDNV

SEQ ID NO: 78023 - DNA, 384 bp, Unknown
  Obtained from environmental sample
  misc_feature (1)..(384): n is a, c, g, or t
atgaccaagcctttcgccgtcgaagaactcctcgcccgtatccgcgtagtcttaaaaagcaggaaaaaaaccctagacacaaaatccggcgtcctgcgtataggcaacctccgcgtcgactccgacgaacacaccgttttctacggcgaccaacccgtggaacttaccaaacgcgagttcgacctcctaaactacctcctaaccaagcgcggcgtaaccgtaacgcgcgaaaatatcctggacaccgtctggggttacgacttctacggcgacaccaacgtagtagacgtctacgtaaggtatctacgcagtaaaatcgacgaccgcttcggcatcaagctaatccacaccgtccgcggcgccggctaccttattaaatcatga

SEQ ID NO: 78024 - protein, 127 aa, Unknown
  Obtained from environmental sample
  DOMAIN (50)...(125): Transcriptional regulatory protein, C terminal
  misc_feature (1)..(127): Xaa is any amino acid
MTKPFAVEELLARIRVVLKSRKKTLDTKSGVLRIGNLRVDSDEHTVFYGDQPVELTKREFDLLNYLLTKRGVTVTRENILDTVWGYDFYGDTNVVDVYVRYLRSKIDDRFGIKLIHTVRGAGYLIKS

SEQ ID NO: 78025 - DNA, 618 bp, Unknown
  Obtained from environmental sample
  misc_feature (1)..(618): n is a, c, g, or t
gtgatacggcaaatctatcaactggctttgcgcgggttccctgcgacaaagataaaagacgaactgttcatggcgaaaatccccacgccctccgagtatatcaagatgaagcgcgggaacgaggttaagccgacctgcctgtggcatacacagggtataaaccgtattttgcaaaacgagcaatacgcgggaacatatatcgcgggcaagctcaaatctctggacgttggctcaaaggttcgcgcgcctgttgacaggagcgagtggataatcatacctgaacaccacacgccaatcgtcggcaaggaaattttcgatgctgtgcaggcgatacttgaatcgcaccttaaatggaaagtggccgaagcgtcgcctaatacgtcttggcgggataatgtaacgaccaaaagaagaaaggacatgataagcggcgcgttcaaaatccgtaaggtcaaatacggataccgcaagctgtctgacggtacgctcggaattgacgaggttgcggcgaacgtgattcaggaagtgtttgagcttgccagtcaagggttgtcgttcgacactatcaggagcaagctgaccgccagaaaagccaccataccgccacgaaaatcttga

SEQ ID NO: 78026 - protein, 205 aa, Unknown
  Obtained from environmental sample
  DOMAIN (2)...(115): Recombinase
  misc_feature (1)..(205): Xaa is any amino acid
MIRQIYQLALRGFPATKIKDELFMAKIPTPSEYIKMKRGNEVKPTCLWHTQGINRILQNEQYAGTYIAGKLKSLDVGSKVRAPVDRSEWIIIPEHHTPIVGKEIFDAVQAILESHLKWKVAEASPNTSWRDNVTTKRRKDMISGAFKIRKVKYGYRKLSDGTLGIDEVAANVIQEVFELASQGLSFDTIRSKLTARKATIPPRKS

SEQ ID NO: 78027 - DNA, 897 bp, Unknown
  Obtained from environmental sample
  misc_feature (1)..(897): n is a, c, g, or t
gtggagatacccggctattaccttgcaaaaaaaggcgcggggcttcagcagagccatgtgttccccgacccgtacaactggacgagttcaaccgtgtgttccatactcaaaaagaaagagtatctcggccatacggtaaacttcaagtccaagaaaaattcgtacagggataagaagaacacctatgttcccgaagatgaatgggtagttttcgagaacacgcacgacgcgataatagaccaacagactttcgacaatgttcagcgtctgcgcggcggtattaaacgccgcccggacggttggggctacactcacccgcttagcggcttgatgttttgcgcggactgcgggggcaagatgtacgtccaccgggtaaacaacggaaaggatattccgaaatacgtctgcgggaactacgccaaaggttccgcgcaaatccagtcgggtatcgtctgcgaatccggccaccgcatcgacgcttcaacggtcattgagcttatccgcgagacgctgaaaaccatatccgattacgccaaaactgacaaggcggcgttcaccaaatcggtgcaggaaatgctggcggcacagcagaccgacgaggtaaagaaacaaaagaaaaggctggccgcctgcaagaaacgcgccgccgacattgataccctgttcaaaaaaatctatgaggacaacgcacttggcaaactgccggacaagcgttttgaatccctctccgacgactacgggcaagagcaggacgcgctcgaaaaagagatagcggaactggaagcgtcggtggagcggtacgaaaacgggagcggacgcgccaaacaattcatcgagttggtgaaccgctatacggactttacngagctgaccgttcccatgctcaacgacgcataa

SEQ ID NO: 78028 - protein, 298 aa, Unknown
  Obtained from environmental sample
  DOMAIN (2)...(94): Recombinase
  misc_feature (1)..(298): Xaa is any amino acid
MEIPGYYLAKKGAGLQQSHVFPDPYNWTSSTVCSILKKKEYLGHTVNFKSKKNSYRDKKNTYVPEDEWVVFENTHDAIIDQQTFDNVQRLRGGIKRRPDGWGYTHPLSGLMFCADCGGKMYVHRVNNGKDIPKYVCGNYAKGSAQIQSGIVCESGHRIDASTVIELIRETLKTISDYAKTDKAAFTKSVQEMLAAQQTDEVKKQKKRLAACKKRAADIDTLFKKIYEDNALGKLPDKRFESLSDDYGQEQDALEKEIAELEASVERYENGSGRAKQFIELVNRYTDFTELTVPMLNDA

SEQ ID NO: 78029 - DNA, 387 bp, Unknown
  Obtained from environmental sample
  misc_feature (1)..(387): n is a, c, g, or t
atgcaccagacgttctttgacatcttgctcgaagagaacaagaaaggcgctacaattttcttctcttcncacgttctttcggaggtgcagaaaatatgcggcagggtcgccatactaaaagagggcaaggtcatcagtattcaaaaaatcagcgagcttagggataacggttataaacgcatacagattatcgcttcgtctgaaattccaaaaggttactttgagatgtccggcgtcatgaatttacaacaggaaaatacggcagcgtcctttatgtttatgggcagcatcatagaaattctgcggaaaatagcctcgttgcctgtggtcgatatcatcgtagaagagccgtcgcttgaggaaatctttcttcattattacaattag

SEQ ID NO: 78030 - protein, 128 aa, Unknown
  Obtained from environmental sample
  misc_feature (1)..(128): Xaa is any amino acid
MHQTFFDILLEENKKGATIFFSSHVLSEVQKICGRVAILKEGKVISIQKISELRDNGYKRIQIIASSEIPKGYFEMSGVMNLQQENTAASFMFMGSIIEILRKIASLPVVDIIVEEPSLEEIFLHYYN

SEQ ID NO: 78031 - DNA, 333 bp, Unknown
  Obtained from environmental sample
  misc_feature (1)..(333): n is a, c, g, or t
gtgcaaaaggcggtcattcaaaaaatggagctgggcgaaccggacgcttccggacgccgcagtccggtgccggtgcccggaagtgaatatgaattgccggtggatgtggtgatcgtggcggtgggcacacaggccaatccgattatcaaagacacgactccggatttggagacgaccaaaaggggctatatcgtgattgacgaaaacggccggactgccaagcccggcgtctgggcgggcggcgatattgccagcggcgcagcgacggtcattctggcgatgggcgcgggtaaaagagcggcacaggacattaccatcagcctaaaaaaatga

SEQ ID NO: 78032 - protein, 110 aa, Unknown
  Obtained from environmental sample
  misc_feature (1)..(110): Xaa is any amino acid
MQKAVIQKMELGEPDASGRRSPVPVPGSEYELPVDVVIVAVGTQANPIIKDTTPDLETTKRGYIVIDENGRTAKPGVWAGGDIASGAATVILAMGAGKRAAQDITISLKK

SEQ ID NO: 78033 - DNA, 720 bp, Unknown
  Obtained from environmental sample
  misc_feature (1)..(720): n is a, c, g, or t
ttgcgtatcgacgagcggggcgagcggataccgctgactgtcgcggataagaatattacggacggcacgatagacttgatagttcaagcggtcggcaagaccacgcatcagctggtcaggctgaaacccggcgacagcattaaggatttggccgggccgctgggcctgccgacgcatattgaaaatttaggcacggtcgtggttatcggcggaggcgtgggcgccgctccgctgtatccgatagcggacggctttcaccgggccgggaataaagttatttccatactcggcgcgcgcaataaagatttgatcatcctgcaaaaagaatttgcggctatcagcgcggagcttattgttacgaccgatgacggttcggccggggttaaaggtctggtcaccaatgctttgcaggggctgatcgataaaaaaacggacatcaaaaaagttatagctatcgggccgctgattatgatgaagtttgtaaccgcgctgacccgtcagtacaatattccgacagtggtcagcctgaatagcctgatgatcgacggcacgggtatgtgcggaggctgccgggtaactgtcggcggggggacgaaatttacctgcatccacggcccggaatttgacgggcatcaggtggatttcgacaccttgctgcgccgggcgaatacttataagcataccgaacaatgccgtctggatgcttatttgaaagggtag

SEQ ID NO: 78034 - protein, 239 aa, Unknown
  Obtained from environmental sample
  DOMAIN (67)...(163): Oxidoreductase NAD-binding domain
  misc_feature (1)..(239): Xaa is any amino acid
MRIDERGERIPLTVADKNITDGTIDLIVQAVGKTTHQLVRLKPGDSIKDLAGPLGLPTHIENLGTVVVIGGGVGAAPLYPIADGFHRAGNKVISILGARNKDLIILQKEFAAISAELIVTTDDGSAGVKGLVTNALQGLIDKKTDIKKVIAIGPLIMMKFVTALTRQYNIPTVVSLNSLMIDGTGMCGGCRVTVGGGTKFTCIHGPEFDGHQVDFDTLLRRANTYKHTEQCRLDAYLKG

SEQ ID NO: 78035 - DNA, 876 bp, Unknown
  Obtained from environmental sample
  misc_feature (1)..(876): n is a, c, g, or t
atgaccgggtatcagtgcgcacaggccgccgatatactgatgcgggcaaaagcactaaaacccggcatcgttaccgcggtcggcgggcatcatgcgcgccttttaccggatgaagttttggctgaaccgtttgtggacaagatatatgaccagtatgactacggcctggacctctttccccttgacgaacagaccttgccctacttccgcagaggcgaaatgcagtatttgacttcgactggctgcccatatggttgccggttttgtgcgataagtatgccttggcggccccgtccaattacacgtattgaccacgaactgtcacgtctgcacgaggccattgggtttaccgaagtttccttcgccgaccccaacatcgcccacttcgcctataaagctgaaaatggaaaaaaagtgaaattcgattcccttgagaggatgcgcggcttgggtgagatcatgcgccggcttgacgcctcttgggaatgcaatatgcgctgcccggaattgacgccggacatggtggagaccatgagctggggaaaatgcacgcacatggagctaggctgcgagtccggttccgagcgggtgttgcgtaaaattgttcgcaagggacacggggttgaggcgattcgccaagcggtgaaaaacgtgaaaggatcgggtatttcgataatgtacagctttctcgcttttatgccgggcgaaacgatggaagacatatataggaccatggatctgattgactggattgtcgatatggatcctctcgctcgcgtatcgatttacaatttcaccccgtatcccggaacgccgttataccaggatgccgttctaggcaaacaaggatacacgccgtccctcgtgccgatctga

SEQ ID NO: 78036 - protein, 291 aa, Unknown
  Obtained from environmental sample
  DOMAIN (76)...(248): Radical SAM superfamily
  misc_feature (1)..(291): Xaa is any amino acid
MTGYQCAQAADILMRAKALKPGIVTAVGGHHARLLPDEVLAEPFVDKIYDQYDYGLDLFPLDEQTLPYFRRGEMQYLTSTGCPYGCRFCAISMPWRPRPITRIDHELSRLHEAIGFTEVSFADPNIAHFAYKAENGKKVKFDSLERMRGLGEIMRRLDASWECNMRCPELTPDMVETMSWGKCTHMELGCESGSERVLRKIVRKGHGVEAIRQAVKNVKGSGISIMYSFLAFMPGETMEDIYRTMDLIDWIVDMDPLARVSIYNFTPYPGTPLYQDAVLGKQGYTPSLVPI

SEQ ID NO: 78037 - DNA, 834 bp, Unknown
  Obtained from environmental sample
  misc_feature (1)..(834): n is a, c, g, or t
atgaagctgtccaagcggtacacgcgccgcaccgaagttattgctttcaaaaacgcctaccacggcagcacgcaaggtgtcntgagcgtaatgggcagcgaggagtggaagcaaagctttcgccctctcctacccgatgttcgattgctggagttcaacaacgaggcgcagctggagcaaataacccggcgcaccgcctgtgtaatggtagagcctgttcaggctgaggcaggtgttcgtgtcccgcaaaacaactttttgcaaaagctgcgtaagcgctgcacagacatgggtgcaatgctcatattcgacgaggtacaaacaggcatggggcgcacaggcagcctctttgcctttgaaaagtatggcgttgtgcctgacatactcaccattggcaaagcctttggcggcggcatgccgctggcagcgttcatcgcctcgcccgaggtaatgagcgtgctagccaaccccgcgctgggacacattactacctttggcggacaccctgtttcatgtgccgcaggactggccgcccttgaggtaataagcgaagataagctgcttgcacaggtagaggaaaagagtcgcaactttcatgaaaagatgctggcgcaccctctggttaaagaggtacgcggcgagggcttactgctggctgtagagctgggcgacgcccaaaaagtgcagcagctctttcagcgctgcctgcaactcggcgtagccattgactggtttttgttctgcaacaccgcctttcgcatagcaccgccgctcaccattacacacgacgaaattgacgaagtgtgtaaaattttatacctttgcctcgaataa

SEQ ID NO: 78038 - protein, 277 aa, Unknown
  Obtained from environmental sample
  DOMAIN (1)...(224): Aminotransferase class-III
  misc_feature (1)..(277): Xaa is any amino acid
MKLSKRYTRRTEVIAFKNAYHGSTQGVXSVMGSEEWKQSFRPLLPDVRLLEFNNEAQLEQITRRTACVMVEPVQAEAGVRVPQNNFLQKLRKRCTDMGAMLIFDEVQTGMGRTGSLFAFEKYGVVPDILTIGKAFGGGMPLAAFIASPEVMSVLANPALGHITTFGGHPVSCAAGLAALEVISEDKLLAQVEEKSRNFHEKMLAHPLVKEVRGEGLLLAVELGDAQKVQQLFQRCLQLGVAIDWFLFCNTAFRIAPPLTITHDEIDEVCKILYLCLE

SEQ ID NO: 78039 - DNA, 372 bp, Unknown
  Obtained from environmental sample
  misc_feature (1)..(372): n is a, c, g, or t
ttgcgactcttttcctctacctgtgcaagcagcttatcttcgcttattacctcaagggcggccagtcctgcggcacatgaaacagggtgtccgccaaaggtagtaatgtgtcccagcgcggggttggctagcacgctcattacctcgggcgaggcgatgaacgctgccagcggcatgccgccgccaaaggctttgccaatggtgagtatgtcaggcacaacgccatacttttcaaaggcaaagaggctgcctgtgcgccccatgcctgtttgtacctcgtcgaatatgagcattgcacccatgtctgtgcagcgcttacgcagcttttgcaaaaagttgttttgcgggacacgaacacctgcctcagcctga

SEQ ID NO: 78040 - protein, 123 aa, Unknown
  Obtained from environmental sample
  SIGNAL (1)...(21)
  misc_feature (1)..(123): Xaa is any amino acid
MRLFSSTCASSLSSLITSRAASPAAHETGCPPKVVMCPSAGLASTLITSGEAMNAASGMPPPKALPMVSMSGTTPYFSKAKRLPVRPMPVCTSSNMSIAPMSVQRLRSFCKKLFCGTRTPASA

SEQ ID NO: 78041 - DNA, 414 bp, Unknown
  Obtained from environmental sample
  misc_feature (1)..(414): n is a, c, g, or t
gtgcggccccagccggggcgatttgaacggccagatatccttcggggaggatgtcatcagccgcatcgtcttcgccggccggggcgacggcctggcccgcttgaaggaccgggtggtggagaacatcaaccgcctcctggaaaaccttttggccgaccacggggcggaccgcgaacgcctggccctggcggtggtggccggcaataccaccatgagccacctcttcgccggcctggaccccaaaaacgtccgcctggccccctacgtgccggccgcggcctactggcccatactccgggccgccgaggtgggtttgaaggttcccgcctcgacccccttattggtctatccttcagtctccagctatgtgggcggcgatatcgtggccggggtgctggcctcgggcatgtataa

SEQ ID NO: 78042 - protein, 137 aa, Unknown
  Obtained from environmental sample
  misc_feature (1)..(137): Xaa is any amino acid
MRPQPGRFERPDILRGGCHQPHRLRRPGRRPGPLEGPGGGEHQPPPGKPFGRPRGGPRTPGPGGGGRQYHHEPPLRRPGPQKRPPGPLRAGRGLLAHTPGRRGGFEGSRLDPLIGLSFSLQLCGRRYRGRGAGLGHV

SEQ ID NO: 78043 - DNA, 819 bp, Unknown
  Obtained from environmental sample
  misc_feature (1)..(819): n is a, c, g, or t
atggacgatgtgctcttcaacggctcccagaaccgccccgcctcggccttggccgaagtcaccctgaccatgacccgcgaggccgacccggaatccggcctggggccggccgagacctccgtcacccggcgcctctaccgcagcggcgacagcgaatacttaatcaaccgcgcgccctgccgcctcaaggacatcgtccgcttcttcaccgaccagggcgtgggaacccgggcctacggcatcattgagcagggccgcatcggctggctggtggacgcccggccggaagagcgccgcagcctcatcgacgaagccgccggcatcaccggctataaacagcagaagaaagaggccgagcgaaagctcctgtcggcctccgacaaccttgaaaacgtgcgggtcatcaaggccgaaaccaaaaagcagctcgaccagatcacccgggccgcggccaaggcagcccgctaccaggccttgagggaggaactgcgggaactggacctggtgctttcggcccgggccttagccgagacccgggaccggcggcgggaagtcgcggccctccgcgaggaaggccggcgccggctctcggccctcctcaccgacctggaactggcggaagtggagatggaaaacatccgcctgaacctgggccgccaggaaagggaggttgaagacctttccaacacctggcactcccaggtcgccgcccgcgacctggccctgaaagaggcggaatacgccgccgccggcctggaccaggctgaaaaacggcaaatccaggtgcgggaggaaagcgcccggcctctgccgatctga

SEQ ID NO: 78044 - protein, 272 aa, Unknown
  Obtained from environmental sample
  misc_feature (1)..(272): Xaa is any amino acid
MDDVLFNGSQNRPASALAEVTLTMTREADPESGLGPAETSVTRRLYRSGDSEYLINRAPCRLKDIVRFFTDQGVGTRAYGIIEQGRIGWLVDARPEERRSLIDEAAGITGYKQQKKEAERKLLSASDNLENVRVIKAETKKQLDQITRAAAKAARYQALREELRELDLVLSARALAETRDRRREVAALREEGRRRLSALLTDLELAEVEMENIRLNLGRQEREVEDLSNTWHSQVAARDLALKEAEYAAAGLDQAEKRQIQVREESARPLPI

SEQ ID NO: 78045 - DNA, 345 bp, Unknown
  Obtained from environmental sample
  misc_feature (1)..(345): n is a, c, g, or t
gtggtgggccccaacggctgcggcaagagcaacatcatcgacgccatacgctgggtcatgggcgaacagagccccaagaccctccgggggccgcagcatggacgatgtgctcttcaacggctcccagaaccgccccgcctcggccttggccgaagtcaccctgaccatgacccgcgaggccgacccggaatccggcctggggccggccgagacctccgtcacccggcgcctctaccgcagcggcgacagcgaatacttaatcaaccgcgcgccctgccgcctcaaggacatcgtccgcttcttcaccgaccagggcgtgggaacccgggcctacggcatcattga

SEQ ID NO: 78046 - protein, 114 aa, Unknown
  Obtained from environmental sample
  misc_feature (1)..(114): Xaa is any amino acid
MVGPNGCGKSNIIDAIRWVMGEQSPKTLRGPQHGRCALQRLPEPPRLGLGRSHPDHDPRGRPGIRPGAGRDLRHPAPLPQRRQRILNQPRALPPQGHRPLLHRPGRGNPGLRHH

SEQ ID NO: 78047 - DNA, 570 bp, Unknown
  Obtained from environmental sample
  misc_feature (1)..(570): n is a, c, g, or t
gtgataagttcgtctcgccctagccctcaatttgacccattttttttagcntgcatgaaacagataggaatggcgttgtctattccatacgaagttttgataaagcatttcagcagcagttacagtgcaagcagagcggcgcaacttgattttcacaaaacctgtttgcctctgcgggaaaaattcgggaacgcattttgccagcctatttatgaggcgtttttggaagaagcgattttaaaaaaccgcataacggcaccgggatatttgaacgacccctacattcgcttggcgtacagcggggcatactggcgcggcgcggcacaagggcaaatagacgaagtaaaagaggtcaatgcagcaaatcttcgcgttaaatatggattcagcacaaagcaggaagaagcgcagaaattgactgggcaggattacaaggacattatgaagcggcaggcggaagaaaagaaaatagcagaggatttaggattgaaatacgaggcagagatgcccggaatgggaatttcaaaaaacgaacaaagcgaggacagcgatgaaaaaggaagcgagtag

SEQ ID NO: 78048 - protein, 189 aa, Unknown
  Obtained from environmental sample
  misc_feature (1)..(189): Xaa is any amino acid
MISSSRPSPQFDPFFLACMKQIGMALSIPYEVLIKHFSSSYSASRAAQLDFHKTCLPLREKFGNAFCQPIYEAFLEEAILKNRITAPGYLNDPYIRLAYSGAYWRGAAQGQIDEVKEVNAANLRVKYGFSTKQEEAQKLTGQDYKDIMKRQAEEKKIAEDLGLKYEAEMPGMGISKNEQSEDSDEKGSE

SEQ ID NO: 78049 - DNA, 606 bp, Unknown
  Obtained from environmental sample
  misc_feature (1)..(606): n is a, c, g, or t
atggctaaacgttaccatataaaactgatagtacgatcaagcatgtcggacgcggaggggacgcttgtaaacaacgatgggattttaccgggtgcggacaaggagggaaccgctgtggaaaaagcatatgtcagcgggctggcggtggatcgggacgtcgccagcgtntcagtcgtgggggtgatggaccggcccggcgtggcataccagattttttcgttgctggcgaaggaaaaaatcgtggtcgacataatcttgcaatcgatcggcaggaacgcgacgaaggacatcagttttaccgtttgcaaaaacgatttgagccggacgcttgaagttttagaagccagtaaaaatctgatcggattcgatatgttaagccatgacggtactatcgccaaactgtctgtcgtgggagcgggtatggcatccaacccgggcgttgcgtccactatgtttgaggcgttgtatgattgcggcgtcaacatcggaatgatctctacttccgaaataaagatatcggtgttgatcgacgcgcaatcggccgatagagcggctaatgcggtgcatgataaatttatcagcaacaatatggaaatagtaaaataa

SEQ ID NO: 78050 - protein, 201 aa, Unknown
  Obtained from environmental sample
  DOMAIN (55)...(127): ACT domain
  misc_feature (1)..(201): Xaa is any amino acid
MAKRYHIKLIVRSSMSDAEGTLVNNDGILPGADKEGTAVEKAYVSGLAVDRDVASVSVVGVMDRPGVAYQIFSLLAKEKIVVDIILQSIGRNATKDISFTVCKNDLSRTLEVLEASKNLIGFDMLSHDGTIAKLSVVGAGMASNPGVASTMFEALYDCGVNIGMISTSEIKISVLIDAQSADRAANAVHDKFISNNMEIVK

SEQ ID NO: 78051 - DNA, 690 bp, Unknown
  Obtained from environmental sample
  misc_feature (1)..(690): n is a, c, g, or t
atggccgagcggccgagtgtccttgccgctggacagcaacggattacgaaaatattcacaccgaagcattacgggtttaccaacggcgatttttttttcgcgcggcatttcgggtataacatcaaactgctggcggctggtcgcgttttccccgattatgtggaagcgctgaccgcgccgatgctgattgaccggcggcatccgctttctaatgtttcggatgtatacaacggcgtgctggttcaagcaagggtaacagacgatgtcatgttctttgggcgtggagcagggaaacttcctacggcaggcgcggtgataagtgatatcgtggatgtttccaaacacctgcaccggcatatcatacacacatggtcggaggaacgcattgcagtagcgccgttttccagttatgttaatagccggatggttcgcgttaagtgtagcgaaaaaaatagaatggaaactttagaactggctagaaaagtattcggcgtcacagacacgttagagttgcccgaacagccaaatcaaatggcgtggattgcccctcgcgagacagaaaaatcgtttgaagcgaagcttgaaaagttaaatcaatcactgggcatcggcggaatactttccattattcgcgtgtacgaaccagttatacttgggagcgaaaagaaagtcacttttcgctccggttga

SEQ ID NO: 78052 - protein, 229 aa, Unknown
  Obtained from environmental sample
  DOMAIN (8)...(110): Homoserine dehydrogenase
  misc_feature (1)..(229): Xaa is any amino acid
MAERPSVLAAGQQRITKIFTPKHYGFTNGDFFFARHFGYNIKLLAAGRVFPDYVEALTAPMLIDRRHPLSNVSDVYNGVLVQARVTDDVMFFGRGAGKLPTAGAVISDIVDVSKHLHRHIIHTWSEERIAVAPFSSYVNSRMVRVKCSEKNRMETLELARKVFGVTDTLELPEQPNQMAWIAPRETEKSFEAKLEKLNQSLGIGGILSIIRVYEPVILGSEKKVTFRSG

SEQ ID NO: 78053 - DNA, 759 bp, Unknown
  Obtained from environmental sample
  misc_feature (1)..(759): n is a, c, g, or t
atgccggatgcggtatccgctgaggcgcaggggctgatatgccttccgcgcgggaagaaaagcgggattgccgtacatacgctgcttgagaagctggacttcgcgcgcgcccaggatcggctccaggcgcttatcgaaacggtaatatcggattatagcctcgcgccgcgcccggcctggctcaagcgattgggtattgccaaatctcctgcgtccgccggcgggggcgatgaagcggcatctcatatccgcgcctatcttcaaaatctcgttcatggtctgttggcggcgcccatcccgcagatcgatcagtcgtttcagttatccgggctgcactctttcgattgcctgaaagaggtgaaatttgacgagcgaaacccgattgcgaaccatgaaccactggaggatatgatgaccggcgtgatcgatctggtgttttggcataatgaaaaaatgtatatagccgactggaaaacaaattggctgccaaattatggatatgcggccatgaagggcgagatgaaggcaaaaagttaccatctgcaggccgcgatctatgccaatgccgtctcgcggtttatccggcagcgcggtctgccggactcctgtctgggcggggtactctacgtttttgtccgcgcttttacgactggagactatcgcgaatcggacgcgcccgctgagccggggcagggtctgtattttatggatatggacgcgattgccaagtacgtaaagctgctgggggttgacggatga

SEQ ID NO: 78054 - protein, 252 aa, Unknown
  Obtained from environmental sample
  misc_feature (1)..(252): Xaa is any amino acid
MPDAVSAEAQGLICLPRGKKSGIAVHTLLEKLDFARAQDRLQALIETVISDYSLAPRPAWLKRLGIAKSPASAGGGDEAASHIRAYLQNLVHGLLAAPIPQIDQSFQLSGLHSFDCLKEVKFDERNPIANHEPLEDMMTGVIDLVFWHNEKMYIADWKTNWLPNYGYAAMKGEMKAKSYHLQAAIYANAVSRFIRQRGLPDSCLGGVLYVFVRAFTTGDYRESDAPAEPGQGLYFMDMDAIAKYVKLLGVDG

SEQ ID NO: 78055 - DNA, 303 bp, Unknown
  Obtained from environmental sample
  misc_feature (1)..(303): n is a, c, g, or t
ttgaagcaattagttattgcgaaaaaattttctgaagtccatcttactattgccgactgcgcgaaagctgttggaattacagaagcctacttgcgaaggatctttaaaaaggcattttataaatcacctggccaatttcttttacagattagaatggacaacgcgaaaaatttactttctaccgggtattatacggtaaatgaagtagctgtccgttccggcttttgtaatcaatcgcatttctcttctgtcttcaggaaatatacgggattttctcctttggcttatattaaaaacagttaa

SEQ ID NO: 78056 - protein, 100 aa, Unknown
  Obtained from environmental sample
  DOMAIN (6)...(48): Bacterial regulatory helix-turn-helix proteins, AraC family
  misc_feature (1)..(100): Xaa is any amino acid
MKQLVIAKKFSEVHLTIADCAKAVGITEAYLRRIFKKAFYKSPGQFLLQIRMDNAKNLLSTGYYTVNEVAVRSGFCNQSHFSSVFRKYTGFSPLAYIKNS

SEQ ID NO: 78057 - DNA, 537 bp, Unknown
  Obtained from environmental sample
  misc_feature (1)..(537): n is a, c, g, or t
gtgaaaaccctttatcccgattcggacaaatccagcgccgccatttacgcgcgggcgattatgcggcttcgcggcggcaaccttgcggtcgcgcggacgggcgcgaaaacgcttcgcgcgcgcgacgcggccaatccttatttttcggaacttttgggcgacatagaatttaagtccggcgaccttgcggcggcgatttccgcgtatcagtctgcggggccggacgacaaaccgcaaatagggcttgcccaggcgcttgcccgggcggaacggaacgtcggcgacgaccgcgcgatggcggcgggcgcggcaaagcgcgcgatattggcggaacccatgccgcttgcgtggtggatacttgcaaaggcggatcccgaaaaggcggactattatttggcagagtatcattatatgatgaaggatttttcacgcgcaaaaacgcacgcgaaggcggcggtgaaaaaacttccgcccgattcgccggagcatatcaaagcgaacgatatacttgaaagtaaaatggatcgtggttcgtga

SEQ ID NO: 78058 - protein, 178 aa, Unknown
  Obtained from environmental sample
  misc_feature (1)..(178): Xaa is any amino acid
MKTLYPDSDKSSAAIYARAIMRLRGGNLAVARTGAKTLRARDAANPYFSELLGDIEFKSGDLAAAISAYQSAGPDDKPQIGLAQALARAERNVGDDRAMAAGAAKRAILAEPMPLAWWILAKADPEKADYYLAEYHYMMKDFSRAKTHAKAAVKKLPPDSPEHIKANDILESKMDRGS

SEQ ID NO: 78059 - DNA, 453 bp, Unknown
  Obtained from environmental sample
  misc_feature (1)..(453): n is a, c, g, or t
atgatatgctccctacaactgccagtttacttcggctcccgtacgggggctaccgctgacgggcgcggctcacgcgaagttcagtcggagggaatatcccccgcgcacggggcggacaaatacggccctacaggcgtcctgatgtccgcggcaaaaatggaccaccttagacnaggggggactttgcttaaccagaaacttaccccgtcgctgctcgccgacgaagagggaattgaaaagttaatggctatggtcaggacttatttcaggatggacggacaccatattcagtttaacgtatgcactgcggacaccctgcgtgacgcgcaaaaacatccggaaaaatactcaaacctgattgtccgcgtggcaggttattctgattattttaacgatctgggggaagccctgcagaacgagattatctccaggacggaacacaaggggttttaa

SEQ ID NO: 78060 - protein, 150 aa, Unknown
  Obtained from environmental sample
  DOMAIN (28)...(131): Glycine radical
  misc_feature (1)..(150): Xaa is any amino acid
MICSLQLPVYFGSRTGATADGRGSREVQSEGISPAHGADKYGPTGVLMSAAKMDHLRXGGTLLNQKLTPSLLADEEGIEKLMAMVRTYFRMDGHHIQFNVCTADTLRDAQKHPEKYSNLIVRVAGYSDYFNDLGEALQNEIISRTEHKGF

SEQ ID NO: 78061 - DNA, 729 bp, Unknown
  Obtained from environmental sample
  misc_feature (1)..(729): n is a, c, g, or t
gtgatctatgcgcagcgatacaagctgcgcggcattctgaacgctctcgatattgattactggaacccttccacggacccgttgctgccgaggcgctactccgccaaatctttgtccggcaaagaagcgtgtcgcagggaactcctgaaaaacacccattttggttccggctataaggggccaatcgtggtctgtgtttccaggcttgccgaacagaagggcttcgatatcattttgccaatcttgaagcaagttgagaatttaggggcgaaatttatttttctaggcagtggacaggcttggatagaggatgcgctgagagagataagcgtggcgaacaaggactctatctgctttttctcaggctataacgagccgctcgcgcaccttctttacgctggaggcgatatctatctgatgccatcgctctttgaaccatgcggattgtcgcagatgatcgctatgcgctacggcaccgtgcccgttgttcgcgaggtggggggcctgcgcgacaccattgtcgacgccgacgcggagggcggcggcaatggatttacttttttgacctatgacgcccaaggattgctttggtcgctgagccgcgctgtagagcgcttctcggacgctcaagcctgggacagtatacgtcagaggggaatgatggaagatttctcttggaacaggtcggcgttgctttatgaagatctgtacaaagagattcttcagtag

SEQ ID NO: 78062 - protein, 242 aa, Unknown
  Obtained from environmental sample
  DOMAIN (46)...(219): Glycosyl transferases group 1
  misc_feature (1)..(242): Xaa is any amino acid
MIYAQRYKLRGILNALDIDYWNPSTDPLLPRRYSAKSLSGKEACRRELLKNTHFGSGYKGPIVVCVSRLAEQKGFDIILPILKQVENLGAKFIFLGSGQAWIEDALREISVANKDSICFFSGYNEPLAHLLYAGGDIYLMPSLFEPCGLSQMIAMRYGTVPVVREVGGLRDTIVDADAEGGGNGFTFLTYDAQGLLWSLSRAVERFSDAQAWDSIRQRGMMEDFSWNRSALLYEDLYKEILQ

SEQ ID NO: 78063 - DNA, 927 bp, Unknown
  Obtained from environmental sample
  misc_feature (1)..(927): n is a, c, g, or t
atgcaaaaaactatttttacaggaaatttaaaaacaattaaattatcattagatttgttaaaaatattagaaaaattaaataaatcaatgattactcttacaactatagaaaataaaatagattcagcatttatgtttgagttacagaataatagaggtaaagatactactgaaatggaacaagtaaaagcttatttaatatatcaaatatatattaatgacgggaaatataaaataattgaaaatatatcaaaattgtatggagaaatatatctatcttttaatgatattcaatatgaaattaaaaatattaatgaggatgatttattatggtatcattgccatgcgtattatggatattgttttattgatgattacaatacaattattgatttcttaaaagaaaaattaaattatataaaagagaagccaaaaaaacttgaatttatatcaaactttgtagaagaattacaattatcattttccaatattcaaaaaatgggaaaaaccaaatctattgaatatttaaaacgtcttttattattaggtatacccggagaactgtatcccattattataaatggatatcgttacataaatcaaaatgataaaacaagttaccttgaaaaaatgtttcatataatagaattgctagctttcagacttgctataataacaacaaatggtaatgtaaaaattaaaaaaaggcttgataatatattgaaagattttaaatgtgatttaaatattttatataatggaataagatcatactttgcggatgatgaaattgaatggcgttggaccgatgatgcaatgtacgatgtgctaatgtgtccggtttatgaaaaaataacaaataatgttatacattatatatttaaaatatatgagattcaaaattttaaaagtattttccaaaaataa

SEQ ID NO: 78064 - protein, 308 aa, Unknown
  Obtained from environmental sample
  misc_feature (1)..(308): Xaa is any amino acid
MQKTIFTGNLKTIKLSLDLLKILEKLNKSMITLTTIENKIDSAFMFELQNNRGKDTTEMEQVKAYLIYQIYINDGKYKIIENISKLYGEIYLSFNDIQYEIKNINEDDLLWYHCHAYYGYCFIDDYNTIIDFLKEKLNYIKEKPKKLEFISNFVEELQLSFSNIQKMGKTKSIEYLKRLLLLGIPGELYPIIINGYRYINQNDKTSYLEKMFHIIELLAFRLAIITTNGNVKIKKRLDNILKDFKCDLNILYNGIRSYFADDEIEWRWTDDAMYDVLMCPVYEKITNNVIHYIFKIYEIQNFKSIFQK

SEQ ID NO: 78065 - DNA, 831 bp, Unknown
  Obtained from environmental sample
  misc_feature (1)..(831): n is a, c, g, or t
ttgcaggttgttgtgcaggatatggaaggtttccacgccggcggtgacggcctcggacagggaggaaaatccatgggggacgagaagataatcctcgaaatccagagaattgccggcggttttggaaccggagagcatattgggacagaggagcggcacgcgggccgcgtcggggccgccgagataggcgtagggttcgagcttgcgggcggccgcgccggctttggcgacggcaagggacacggcggtgacggcattgccgccgagggcggttttttgtttcgtgccgtcaagttccacgagcagggcatcaagcttcgcctgatccgtaacggtttttcccaaaagggccggacggattttctcattgatgttctgtaccgccgtaagcacgcccttgcccatcaggcgcttgccgccgtccctgagttccacggcttcatgggacgacacggaaactccgctcggcgccgaggcggtatagcgaaaaccgctgctcacgaacagatccgcttccaccgccgggatgccccggccattgatgatttcccgcccgcgcagaccggtaatggtgatggtttcgcccatacgctattcctcaatgaccaggattctgaggttcacgacattggtgcccgtagggccggtaaggaccgcatcgcccagggcttccagaagtgtgccggagtcgtgggctttcagggcggcaaagagggttttgccggcggctctggcccggtctgcggtttctccgtcggcaatgccgcccgcaatatccgtcgggccgtccgtgccttcggaatcatggagagcatggtcaagcccttgtag

SEQ ID NO: 78066 - protein, 276 aa, Unknown
  Obtained from environmental sample
  misc_feature (1)..(276): Xaa is any amino acid
MQVVVQDMEGFHAGGDGLGQGGKSMGDEKIILEIQRIAGGFGTGEHIGTEERHAGRVGAAEIGVGFELAGGRAGFGDGKGHGGDGIAAEGGFLFRAVKFHEQGIKLRLIRNGFSQKGRTDFLIDVLYRRKHALAHQALAAVPEFHGFMGRHGNSARRRGGIAKTAAHEQIRFHRRDAPAIDDFPPAQTGNGDGFAHTLFLNDQDSEVHDIGARRAGKDRIAQGFQKCAGVVGFQGGKEGFAGGSGPVCGFSVGNAARNIRRAVRAFGIMESMVKPL

SEQ ID NO: 78067 - DNA, 453 bp, Unknown
  Obtained from environmental sample
  misc_feature (1)..(453): n is a, c, g, or t
ttggccgaggtattttcgtggaggaaaaacgctcggcttgcggcggagcgcgcgaccgaggaagaaaagcacggcctcaaggctcttcttgatgagatggaaagctgcgtcacccgccctgaccgcttcgcgcctttggacacgcgctttcatcagcagatcgcgatctgcgcccacaacccgatcttgctggaattcatttccatcatcggcgatctcattcgcgcccagcacgttgaaatcgcgcgtatgcccgaggtttcccgcatttcccacgaataccacagcgacatattccggcagatcgagcgcggaaacggcgatgctgccgcctctttcatgcgcgaacatattgaacgggcctatggccgcctgcagcgcgtctcccggcggaaaaacacgcgagagcaagcaatacgagaaacagcatggacgcacgatcccgtttcctga

SEQ ID NO: 78068 - protein, 150 aa, Unknown
  Obtained from environmental sample
  DOMAIN (3)...(120): FCD domain
  misc_feature (1)..(150): Xaa is any amino acid
MAEVFSWRKNARLAAERATEEEKHGLKALLDEMESCVTRPDRFAPLDTRFHQQIAICAHNPILLEFISIIGDLIRAQHVEIARMPEVSRISHEYHSDIFRQIERGNGDAAASFMREHIERAYGRLQRVSRRKNTREQAIRETAWTHDPVS

SEQ ID NO: 78069 - DNA, 624 bp, Unknown
  Obtained from environmental sample
  misc_feature (1)..(624): n is a, c, g, or t
gtgcggcaaatgctgttcccgcagcgccctcatttgaggggtttatttttgggaattaggagaaagggtatgtacaggaaaataaatacacgtatctggtctatattattctctttttatgacttgcaaccgcaagacaagttattatgcctgtattttttattaaacgaccatacaaacatacacggcttatacagggcggatataaacacaatatgcaaagaaaccggaatgaacctttcaataaccgatgaaagcctgaaagtattaaaaggatacgaatttataaatgttttagaaaacggcaattataaaataactaaaaagttaatggaatatattaactggaatcacggtaaaggcggagaattaagcgggaattggaaaggcggcataacgcctataaacgccaaaataagggcttcggacgattataaatattggagatccgctgtttatttaagggataaatttatctgtcaagaatgcggggcaaaaaagaacctaaacgcccatcacataaaaccatttgcaaaatatcctgaattaaggtttgcggtatctaacggaataactttatgtaaagactgtcataaggagttacataaaaaagggaggagataa

SEQ ID NO: 78070 - protein, 207 aa, Unknown
  Obtained from environmental sample
  DOMAIN (158)...(205): HNH endonuclease
  misc_feature (1)..(207): Xaa is any amino acid
MRQMLFPQRPHLRGLFLGIRRKGMYRKINTRIWSILFSFYDLQPQDKLLCLYFLLNDHTNIHGLYRADINTICKETGMNLSITDESLKVLKGYEFINVLENGNYKITKKLMEYINWNHGKGGELSGNWKGGITPINAKIRASDDYKYWRSAVYLRDKFICQECGAKKNLNAHHIKPFAKYPELRFAVSNGITLCKDCHKELHKKGRR

SEQ ID NO: 78071 - DNA, 567 bp, Unknown
  Obtained from environmental sample
  misc_feature (1)..(567): n is a, c, g, or t
gtgtacgaggacgatattgaccatattgtcgggttaatccacgtaaaagatttgtattcattggcggttgaaaacggcgaatattcaacggacaaactgctccgccctgtttttctcgtgcctgaaacgattacgctggacaatttgcttatggaattcaagaaaagacacagtcaaatggcggtcgtggttgacgaattcggcggaacgtcgggtttggtaacgcttgaagatgttttagaagaagttttcggcgacgtgcaggacgagtttgacgaagaagagcttaatataaaagagattgagccgggcgtgtatcttgcaaacgcaatgtggcgtttggatgagatggcggattttttcaagcttgatgaaaccgagtttgatgatgaagaagacattgaaacccttgcggggcttgttttaaagtgtttggggcgaattgccgaaaccggcgacgaggctcaatggaaagagttttccttcactgttcaggaggttgacggggcaaggattacgaaaatcaaaatcgcccaacccgcgccgtcgctgccagaagcggtttag

SEQ ID NO: 78072 - protein, 188 aa, Unknown
  Obtained from environmental sample
  DOMAIN (99)...(181): Transporter associated domain
  misc_feature (1)..(188): Xaa is any amino acid
MYEDDIDHIVGLIHVKDLYSLAVENGEYSTDKLLRPVFLVPETITLDNLLMEFKKRHSQMAVVVDEFGGTSGLVTLEDVLEEVFGDVQDEFDEEELNIKEIEPGVYLANAMWRLDEMADFFKLDETEFDDEEDIETLAGLVLKCLGRIAETGDEAQWKEFSFTVQEVDGARITKIKIAQPAPSLPEAV

SEQ ID NO: 78073 - DNA, 390 bp, Unknown
  Obtained from environmental sample
  misc_feature (1)..(390): n is a, c, g, or t
ttgaaacgcagcgtgacggtccctgtgttggcaacgggcgatattacttcatttgagagcgcccaagagtgtttggagattacaaaggctgacggcgtcgcaatcgggcgcggcatgctcggcgacccgacgctgctcgggcggattgaacagtttttggcggcgggggagcggttgcccgcgccgtctttagaagaaagggttaaatttctgattgaacatctggacggcgaaattgcgctccgcggggaggacgtcgggatgaaattcgtcagaaagttttatccttattacatcagcgggattaagaacgcagcaaaataccgcgtcgagttggttttaaccgaaagttattctcgggtaattgaaattttgaacgaaattgcttga

SEQ ID NO: 78074 - protein, 129 aa, Unknown
  Obtained from environmental sample
  misc_feature (1)..(129): Xaa is any amino acid
MKRSVTVPVLATGDITSFESAQECLEITKADGVAIGRGMLGDPTLLGRIEQFLAAGERLPAPSLEERVKFLIEHLDGEIALRGEDVGMKFVRKFYPYYISGIKNAAKYRVELVLTESYSRVIEILNEIA

SEQ ID NO: 78075 - DNA, 612 bp, Unknown
  Obtained from environmental sample
  misc_feature (1)..(612): n is a, c, g, or t
ttgttacgtacacccgtggatctattcgcccaggataacgattcaagaacacaatacgacacggtactttggtataatatcaactgggatcccccaaaagaagacggggtgttacgtaaatacctggaaaatgagattgggaataccggtcaggggatagtacttattcatcacgcgttgttgaatttccagaactgggatctatacaccgatatatgcgggcttagagaaagaggggcgggagtcggttttaagtactaccaaaatgaaaccgtgaatacccatattttggaccctaatcatcctattaccaagggtgtttccgattttacaataatcgatgaaacatacaatatcggagaacccgaggaaccggggaatcatcttttgatctccacagataacnnaaacagcgtgaaaaatctggcatggactcggcagtacaaaaaaagccgggtgttttcttacgcctccgggcacgancataaggtttatgccgatgaaattttccgtaaaatagtatatcaggctctgcgttggaccgcggccgaatataactacttctattttgggccgttgaatgccgccattaaaattcaacctgaaacatag

SEQ ID NO: 78076 - protein, 203 aa, Unknown
  Obtained from environmental sample
  misc_feature (1)..(203): Xaa is any amino acid
MLRTPVDLFAQDNDSRTQYDTVLWYNINWDPPKEDGVLRKYLENEIGNTGQGIVLIHHALLNFQNWDLYTDICGLRERGAGVGFKYYQNETVNTHILDPNHPITKGVSDFTIIDETYNIGEPEEPGNHLLISTDNXNSVKNLAWTRQYKKSRVFSYASGHXHKVYADEIFRKIVYQALRWTAAEYNYFYFGPLNAAIKIQPET

SEQ ID NO: 78077 - DNA, 651 bp, Unknown
  Obtained from environmental sample
  misc_feature (1)..(651): n is a, c, g, or t
atggcgagagcagatgaggaaaaccgacgtatgccacgcttgaaaaaaggtcaatctctcgaaacgattacgcttgaagaagcgttgaatttgttcaaacttccgagaacggtcggaaaatttgaaggcgaggatttggttgtggcgattggtcgttttgggccttatattcgcatgggacaaacgtttttcccactgccgaagaccgacgacccgttggaagtgtcgttagatcgcgttattgaagtcatcaaagaaaaacgcataaaagatgccaaccgcatcattcgcgaatttaaggaaaatcctgaagttcgcgtgcttaacggacgttttgggccttatattgctgtgggtaaacagaacgtcagaattccaaaagacgttgctccggaaagtttgaccttgcaaaagtgtttggagttggccgatggaacgaaatttgcatccaaaggtggcaaaacgcctataaaaaaagctgcagcgaaaaaaacaacaacaacgaagacaacagcaacgaaaaaaacagcaacagcaaaaacaactgtagccaaaaaagcagcaacaaagaaaacggcaacagcgaaaaaaactacagcgaaaaaaacagcaacgaaaaaaacaacaacgaaaaaggctgtcaagaaataa

SEQ ID NO: 78078 - protein, 216 aa, Unknown
  Obtained from environmental sample
  misc_feature (1)..(216): Xaa is any amino acid
MARADEENRRMPRLKKGQSLETITLEEALNLFKLPRTVGKFEGEDLVVAIGRFGPYIRMGQTFFPLPKTDDPLEVSLDRVIEVIKEKRIKDANRIIREFKENPEVRVLNGRFGPYIAVGKQNVRIPKDVAPESLTLQKCLELADGTKFASKGGKTPIKKAAAKKTTTTKTTATKKTATAKTTVAKKAATKKTATAKKTTAKKTATKKTTTKKAVKK

SEQ ID NO: 78079 - DNA, 531 bp, Unknown
  Obtained from environmental sample
  misc_feature (1)..(531): n is a, c, g, or t
gtgtttggagttggccgatggaacgaaatttgcatccaaaggtggcaaaacgcctataaaaaaagctgcagcgaaaaaaacaacaacaacgaagacaacagcaacgaaaaaaacagcaacagcaaaaacaactgtagccaaaaaagcagcaacaaagaaaacggcaacagcgaaaaaaactacagcgaaaaaaacagcaacgaaaaaaacaacaacgaaaaaggctgtcaagaaataatgcacaccattcccgaaatagaacatcaaattgttcaggagttttccaaattcgatgagtggatggaccgatacaattatttgatagaacttgggagagcgtgtccaactgttagcgaaagtgaaaagaccgaagcgaatttgattaaaggctgccaatcgcgcgtttggcttggaacgnagtttgtcgatggaaaaatcatcttcaaagcggatagcgatgccgtgataactaaaggcattgcgagtttgctcattcgcgtgttgtcgaatcaaacgccggaagatttttga

SEQ ID NO: 78080 - protein, 176 aa, Unknown
  Obtained from environmental sample
  DOMAIN (90)...(175): Fe-S metabolism associated domain
  misc_feature (1)..(176): Xaa is any amino acid
MFGVGRWNEICIQRWQNAYKKSCSEKNNNNEDNSNEKNSNSKNNCSQKSSNKENGNSEKNYSEKNSNEKNNNEKGCQEIMHTIPEIEHQIVQEFSKFDEWMDRYNYLIELGRACPTVSESEKTEANLIKGCQSRVWLGTXFVDGKIIFKADSDAVITKGIASLLIRVLSNQTPEDF

SEQ ID NO: 78081 - DNA, 717 bp, Unknown
  Obtained from environmental sample
  misc_feature (1)..(717): n is a, c, g, or t
atgccgaataccaaacttttggcgttaacaaacatgtcgcaactttcggaaattaccgaacaaacctgttgtgtgattaccgaagtgattcggtcgggtgcaggcatggaacttcccaatcccgcatttttagaggctttgcggaagcgttgcaacgaaaccggtgcgttgttgatnttcgacgaaattcaatccggattcggacgcacaggaaaattatttgcgttcgaacactataatatagttcccgacgttttgtgcatcgccaaaagcatgggcggtggaatgcccattggcgcttttgtgtcctcgatcgaacgtatggataaattgaacaacggacatccgttgctcggtcatgccaccacattcggcggacatcccgtatcgtgtgcagcaggtttggcgtcgctcgaaataatagccaagccggaatttttagaacaagtcggccgcaacgaacaactctttcgacaccattttcaacatcccgaaattaaggaaatacgcggcaaaggacaatttttggcggttgaattgaaccatcccgaacgtatcgaaaaaattgtggaacgttgtgtaaacaatggattactactgctttggctgttgtttaatcatcaatctttggcgcttacgccaccgttgattattacggaagaccaaatcaaagacgccgccgaaattttcaagaatgcgttaaccgaatccatttaa

SEQ ID NO: 78082 - protein, 238 aa, Unknown
  Obtained from environmental sample
  DOMAIN (1)...(182): Aminotransferase class-III
  misc_feature (1)..(238): Xaa is any amino acid
MPNTKLLALTNMSQLSEITEQTCCVITEVIRSGAGMELPNPAFLEALRKRCNETGALLXFDEIQSGFGRTGKLFAFEHYNIVPDVLCIAKSMGGGMPIGAFVSSIERMDKLNNGHPLLGHATTFGGHPVSCAAGLASLEIIAKPEFLEQVGRNEQLFRHHFQHPEIKEIRGKGQFLAVELNHPERIEKIVERCVNNGLLLLWLLFNHQSLALTPPLIITEDQIKDAAEIFKNALTESI

SEQ ID NO: 78083 - DNA, 399 bp, Unknown
  Obtained from environmental sample
  misc_feature (1)..(399): n is a, c, g, or t
atggcgttgcatttttctcccaacatactaaccgtgaatggcgaacaaaagatttttgaccccattcgcaaaaagcgcgtagcctttaccccagaagaacttgtaaggcaaggatttattcattttttaatgcacgaaaagggatttcctgcggggctgctcatggtggagtatgcgctcaaggtgaacggcatgagccgccgctgcgatattgtggcgtgcaaccgcgcaggcgagccgctgctattggtggagtgcaaagctccaagcgtacaaatcggcaacgaaacttttgcacaggcagcgcgttacaaccttgcgctgcgcgtaccctatcttgccatcaccaacggcgatagcacgtactgctgtcgtataaatttgaaaccgaaggagtag

SEQ ID NO: 78084 - protein, 132 aa, Unknown
  Obtained from environmental sample
  DOMAIN (29)...(132): Type I restriction enzyme R protein N terminus (HSDR_N)
  misc_feature (1)..(132): Xaa is any amino acid
MALHFSPNILTVNGEQKIFDPIRKKRVAFTPEELVRQGFIHFLMHEKGFPAGLLMVEYALKVNGMSRRCDIVACNRAGEPLLLVECKAPSVQIGNETFAQAARYNLALRVPYLAITNGDSTYCCRINLKPKE

SEQ ID NO: 78085 - DNA, 837 bp, Unknown
  Obtained from environmental sample
  misc_feature (1)..(837): n is a, c, g, or t
atggccgagaggaacctacagcggttcgtgcgcggcggcgcaaaccttacccctgaggcgaaggcgcagctgcgcatggtgaacgaaaagctgtcatcgcttacgctaaagttcgggcaaaacgttctcgccgaaaccaacgcctacaggctggctatcgagagcagggaggagctggagggcttaccgcagtcggcagtagcagccgccgcaacggacaacggtacgtgggcgtttacgctcaaaaatccgagcgtaatgccgttcttgcagtactcggcaaggcgcgacctgcgtgagcaaatccttacggcgtacgccaaccgcgccaacaacggcaacgagcaggacaacaacgctgtgatagccgacatcgtgagcttgcgcgtgcaaaaggcaacgctgatgggctacgaaacctacgccgactatgtgttagacgactgcatggcaaaaacgccgcgcagcgtgtacggtatgctctcgcgcctgtggacacctgcgctgcgcaaggctcgcagcgaggcgcgcgaccaacagcggcttattgataaggagaaggaaagctttgcgctgcaagcgcacgactggcgtttctacgagcaaaaaattaagcagcaaagctacagcttagatgatgaggagctgcgcccctactttccgctggacaacgtgcgcgagggaatttttacgttggtggaaaagctgtggggcgtgcagtttacgcagataaccgatgtccccatgtaccacaaagacgtggtatgctacagcgcgcgcgataccacggcgattttcttggtcttatctacatggactttttccccgcgcaggtaa

SEQ ID NO: 78086 - protein, 278 aa, Unknown
  Obtained from environmental sample
  misc_feature (1)..(278): Xaa is any amino acid
MAERNLQRFVRGGANLTPEAKAQLRMVNEKLSSLTLKFGQNVLAETNAYRLAIESREELEGLPQSAVAAAATDNGTWAFTLKNPSVMPFLQYSARRDLREQILTAYANRANNGNEQDNNAVIADIVSLRVQKATLMGYETYADYVLDDCMAKTPRSVYGMLSRLWTPALRKARSEARDQQRLIDKEKESFALQAHDWRFYEQKIKQQSYSLDDEELRPYFPLDNVREGIFTLVEKLWGVQFTQITDVPMYHKDVVCYSARDTTAIFLVLSTWTFSPRR

SEQ ID NO: 78087 - DNA, 444 bp, Unknown
  Obtained from environmental sample
  misc_feature (1)..(444): n is a, c, g, or t
atgacagataaggaatcagagataataaaagaatacccggaagctccgcttattgttgctatggcggagagtacatgggccggaagccgcatatcggcaaaggtcgagttttttatatccgacggtttaagagcaaaattgaaggagcttttaggaaaagagatacaaaaaatctttataaccgatagcgatgtacggcatattaagaatcatcatggccagcatgaggaaaggagagggcagattgatataaccccggctgatcttgcgcttattcccgtggttatgaatgagtatgacactattgaggatatgggagaggataaaataggcaataaaaaacttttatttacgaaaaagatagaaggaatggtttatattgcaagtattgaaaggggaaataatcaaataggggtaataactttatggaaaagaaagaaataa

SEQ ID NO: 78088 - protein, 147 aa, Unknown
  Obtained from environmental sample
  misc_feature (1)..(147): Xaa is any amino acid
MTDKESEIIKEYPEAPLIVAMAESTWAGSRISAKVEFFISDGLRAKLKELLGKEIQKIFITDSDVRHIKNHHGQHEERRGQIDITPADLALIPVVMNEYDTIEDMGEDKIGNKKLLFTKKIEGMVYIASIERGNNQIGVITLWKRKK

SEQ ID NO: 78089 - DNA, 492 bp, Unknown
  Obtained from environmental sample
  misc_feature (1)..(492): n is a, c, g, or t
atgcccccaaagaaaaccgtctatatagagtccactatccccagttacgcaaccgcgctgccgtcatccaacatcttaaacgtgatacaaaaagcccaaacccttgatttttggaatatccgcgatacctataaactatggataagccaggacgtactcgacgaaatcagcgatggagacccagaagcagcccggcgccgccttgattttgtcaaagacatcgaacttttaccggaatcagaaggaattgcccccttatccgccctgtatcagaccgtactcggcataccggaacgggcaaaaatagactgttcccatttggcatactgcgtattgtaccagatagactatcttttaacatggaactgtgcccatttaggccctgtggtacaaaaaaagctgctggtatataatgacaggcataatttatggacgccggtgttaattaccccggccgccctatttggaataacagaggagggccgcccatga

SEQ ID NO: 78090 - protein, 163 aa, Unknown
  Obtained from environmental sample
  misc_feature (1)..(163): Xaa is any amino acid
MPPKKTVYIESTIPSYATALPSSNILNVIQKAQTLDFWNIRDTYKLWISQDVLDEISDGDPEAARRRLDFVKDIELLPESEGIAPLSALYQTVLGIPERAKIDCSHLAYCVLYQIDYLLTWNCAHLGPVVQKKLLVYNDRHNLWTPVLITPAALFGITEEGRP

SEQ ID NO: 78091 - DNA, 603 bp, Unknown
  Obtained from environmental sample
  misc_feature (1)..(603): n is a, c, g, or t
atggtagaatcagccaataaagggggaaggattggaatttcatacttttgggcggtgtatttaataggagttcttgattttgagtacgtcgcgggagaagaacgaagaaatctcatgagagacgtaatgctcagggatcaggagggtgatttgtttgacaataaactgagattcaagtttctacagatgccgctgttcaataagacggaaacggagttagaggcgcagcaggacaaatggctgtactttttgaaaaaccttgaggatttcgattctataccggctattttgcatgaaccggtatttgagaaggcatttcaaacggcggagcttgccgcgatgagcaaagaggatagggacaggtatgaggtgaatcttcagatttaccgggacaactatgccgcgatggaaaccgctatatgggaaggggaagaaagaggccggaagataggccgtgaggaaggccgtaaggaaggcgaagtcaaattgaaagaagaactgcttaacatagcccgaaagatgctcaaccgcagcaggccgatagatgagattgcggaagataccggtctcaccatcgacgagatcagaaagctcgcggaatga

SEQ ID NO: 78092 - protein, 200 aa, Unknown
  Obtained from environmental sample
  misc_feature (1)..(200): Xaa is any amino acid
MVESANKGGRIGISYFWAVYLIGVLDFEYVAGEERRNLMRDVMLRDQEGDLFDNKLRFKFLQMPLFNKTETELEAQQDKWLYFLKNLEDFDSIPAILHEPVFEKAFQTAELAAMSKEDRDRYEVNLQIYRDNYAAMETAIWEGEERGRKIGREEGRKEGEVKLKEELLNIARKMLNRSRPIDEIAEDTGLTIDEIRKLAE

SEQ ID NO: 78093 - DNA, 594 bp, Unknown
  Obtained from environmental sample
  misc_feature (1)..(594): n is a, c, g, or t
gtgcttaagcatttcaagggggtctgccatctctatgtggaccggggggccgacctggagatggccgccgaactggcggtcaacggcaagacccagcgcccctccacctgcaacagcctggaagccctcctggtccacgccgacgaggccgaagcttttctgccggccctgggccaacgcctggccgccctgggggtcaccttccgggccgacccggaagcaaaaaaatttctgccccaagccgaggcggccaccgaagaggactggggccgcgaatttctggatctcatcctggccgtgaaggtggtgcccgactacgaggccgccctggcccacatagcccgccacggttccaaccacaccgaggtcatagtcacccgcgacgaggccaggggaaaacatttccaaaggtcggtggaggccggctgcgtcatggtcaacgcctcgccccggctcaacgacggcggctgcctggggctgggagctgaaataggcatcagcaccacccgcctccacgcctacggccccatgggtctccgggaactgaccaccacccgcttcatagtcaccgggcacggccaccggagaacctga

SEQ ID NO: 78094 - protein, 197 aa, Unknown
  Obtained from environmental sample
  misc_feature (1)..(197): Xaa is any amino acid
MLKHFKGVCHLYVDRGADLEMAAELAVNGKTQRPSTCNSLEALLVHADEAEAFLPALGQRLAALGVTFRADPEAKKFLPQAEAATEEDWGREFLDLILAVKVVPDYEAALAHIARHGSNHTEVIVTRDEARGKHFQRSVEAGCVMVNASPRLNDGGCLGLGAEIGISTTRLHAYGPMGLRELTTTRFIVTGHGHRRT

SEQ ID NO: 78095 - DNA, 915 bp, Unknown
  Obtained from environmental sample
  misc_feature (1)..(915): n is a, c, g, or t
gtgtnnnnnnggtttatcgcgaggggattcatctttgaccgaacgggaaaagttatcgatgggtgctccggcgcgctgatctcgaacctcggccacgcggtgccggaggtggctgaagccgtggcggcgcagctcaagaagctggagtttgcgcatccctcgcgctggcagtgcgacatcgtggaggaagcggcgacgctggtggcggacttcgctcccgcagctctggacaaggtttggttcgtcagcggcggcagcgaggccatcgaatcggccgtcaagctggcgaggcagtacttctatgagcgtgacggcggcaagacaagcaaatacctcacgataggccgatggaactcctaccacggaagcacgatcggcaccgtggcgtggggcggatccatggctcggcgcaacgtttacgcgcccatgttcacggaatcgccgaaaatagccgccacgtactgctatcgctgccccttcgggctcgaacacccgtcgtgcggcctcaagtgcgggcatcagctggagtcggaaatacgcaggatcgggccgcaatacgtgacgtccttcatcgcggagccgcttgtgggctcgaccgtgggagcccttcccgcccctgacgagtactggcccctggtccgcgagatatgcagcaagtacgacgtccttcttatagccgacgaggtcatgacgggctgtggccgcaccggcaaaaatttcgcggtcgaccattggaacgtcgtcccggacatcatcgcgacggcgaaggggcttgcggccggttacgtgcccaccggcgccatcatcgcgaaggacgagctgctggaaccctccggaagggaagcggggccttcatgcacggccacacctacaacggcaaccccatcagcgccgcggccgtggttgccgttatga

SEQ ID NO: 78096 - protein, 304 aa, Unknown
  Obtained from environmental sample
  DOMAIN (5)...(296): Aminotransferase class-III
  misc_feature (1)..(304): Xaa is any amino acid
MXXXFIARGFIFDRTGKVIDGCSGALISNLGHAVPEVAEAVAAQLKKLEFAHPSRWQCDIVEEAATLVADFAPAALDKVWFVSGGSEAIESAVKLARQYFYERDGGKTSKYLTIGRWNSYHGSTIGTVAWGGSMARRNVYAPMFTESPKIAATYCYRCPFGLEHPSCGLKCGHQLESEIRRIGPQYVTSFIAEPLVGSTVGALPAPDEYWPLVREICSKYDVLLIADEVMTGCGRTGKNFAVDHWNVVPDIIATAKGLAAGYVPTGAIIAKDELLEPSGREAGPSCTATPTTATPSAPRPWLPL

SEQ ID NO: 78097 - DNA, 789 bp, Unknown
  Obtained from environmental sample
  misc_feature (1)..(789): n is a, c, g, or t
atggccgagnagctggccatggccacgcagacctacgccagggtagtgggcgaagaaaaactggacagggccttccaagcggatgccgtgcagaaggacaactacatagctgacgtggtgttcatgggcgaatacgcggaggagcttggtctggcctttctatattcaacaacggtcgttgatgccaaggccaagtatgtgcaggatggtgccccccagagcgacatcgacgagggcaatttcaagtacccgatggatgactatgatgacgctggccaggcccttttcgatgcatggaacgcatgggcgccccgtgtggacgagtacgcggactccttcggcaacttcaggtcctgctttctgcccctgaccaccaaggccggcaacaaggtgataatcggcgcggacatgcgcattgacgatgtcaagcacaggatcaaggaaatcattgcatcgcaggcgacaatcgctggatccattttcatcgtggggcttgccatcacgttgatatttgcccgtgttgtcaccaagcggatgatcggcataggggcacacgtcaacttcatggcggccatgcgcgatttcacgcggccagtggcagtcacgtccaaggacgaaatcggcaggatggccgatagcatcaactcgttgcaggaagttatgaagggcgccatagggcgggcccacggcgcgtccgtgtccaacgcagtccacgcgcagcagttcggcgcggcggccgcctccatccaggccaagttactttgtccgccccgcaagtggagcaactga

SEQ ID NO: 78098 - protein, 262 aa, Unknown
  Obtained from environmental sample
  DOMAIN (153)...(223): HAMP domain
  misc_feature (1)..(262): Xaa is any amino acid
MAEXLAMATQTYARVVGEEKLDRAFQADAVQKDNYIADVVFMGEYAEELGLAFLYSTTVVDAKAKYVQDGAPQSDIDEGNFKYPMDDYDDAGQALFDAWNAWAPRVDEYADSFGNFRSCFLPLTTKAGNKVIIGADMRIDDVKHRIKEIIASQATIAGSIFIVGLAITLIFARVVTKRMIGIGAHVNFMAAMRDFTRPVAVTSKDEIGRMADSINSLQEVMKGAIGRAHGASVSNAVHAQQFGAAAASIQAKLLCPPRKWSN

SEQ ID NO: 78099 - DNA, 582 bp, Unknown
  Obtained from environmental sample
  misc_feature (1)..(582): n is a, c, g, or t
gtggtgcgcgagaacgagggcaaaatgacctacattgcgggcggcgaggagagctttggctttaacgttggtggcttggtgcgcgacaaggactccgttgtgtgctgcggcttggcggctgaggttgccgcatgggcaaaggagcagggcatgaccatgctcgacctgctgcaccacatttatgtgaagtacggctactacaaggaaaagcagattgccgtaaccaaaaaaggcattgacggacttgccgccattaagcaaatgatggtggacttccgcgccaacccgccaaaatcgttggcaggctcggctattaaggaaatttacgactaccaatcgcttgaggttttagacgtaaagagcggtgcaaagcgcaagattgatttgaagtcaacctccaacgtgctacagtggctcacggaggacggcacgataatttctgtgcgcccatcgggtacagagccaaaaattaagttctactttggcgtgcgcgaaaacctgccctcagcgaacggtgtagaaaccataaccgctgccctcgacaagaaaattgatgccattgctgctgagctgaagctatag

SEQ ID NO: 78100 - protein, 193 aa, Unknown
  Obtained from environmental sample
  misc_feature (1)..(193): Xaa is any amino acid
MVRENEGKMTYIAGGEESFGFNVGGLVRDKDSVVCCGLAAEVAAWAKEQGMTMLDLLHHIYVKYGYYKEKQIAVTKKGIDGLAAIKQMMVDFRANPPKSLAGSAIKEIYDYQSLEVLDVKSGAKRKIDLKSTSNVLQWLTEDGTIISVRPSGTEPKIKFYFGVRENLPSANGVETITAALDKKIDAIAAELKL

SEQ ID NO: 78101 - DNA, 408 bp, Unknown
  Obtained from environmental sample
  misc_feature (1)..(408): n is a, c, g, or t
ttggcgcaactttgtgaaaccatgctgcgtttgggagcagaaaagcctacgctcaacgtggtgtttgaccaagttggaacgcctaccaacgctgccgatttggcggcttgcattgcgagcattgtagcacaggttagcagcggcaagcgttcgtttctaggcggcgtgtaccactatagcaacgagggcgtgtgcagctggtacgactttgcccgcgaggtgatggagcagggcagtcgttcatgtcgggttttgccgatagaaagcaaggactacccaacacccgcaaagcgtccgcactacagcgtgttgaacaaggcaaaaatcaagcagacatacggcgttgaaattccgcattggaaggatagcttgaggaggtgcattgctgcgctaaattgtaattcataa

SEQ ID NO: 78102 - protein, 135 aa, Unknown
  Obtained from environmental sample
  DOMAIN (1)...(133): RmlD substrate binding domain
  misc_feature (1)..(135): Xaa is any amino acid
MAQLCETMLRLGAEKPTLNVVFDQVGTPTNAADLAACIASIVAQVSSGKRSFLGGVYHYSNEGVCSWYDFAREVMEQGSRSCRVLPIESKDYPTPAKRPHYSVLNKAKIKQTYGVEIPHWKDSLRRCIAALNCNS

SEQ ID NO: 78103 - DNA, 894 bp, Unknown
  Obtained from environmental sample
  misc_feature (1)..(894): n is a, c, g, or t
gtgggacgcggtagtgcgcccagccgggttttggatactgacagattgtgcgtagtgtgctgcaataatctgtgcagcccttatggaagctccgctcccaccaatgtcgaacccganacgggctatccttggggaatgcgcttcccggtgctcgatccctgtgatgtggcgttttcgcagaaaaaagcactggaggcgataggcatcgggcgcgtggcgggggtcatcggcggctcacttgggggtatgatagccctcgaatgggccgcccagttcgcggactgcctggacttcgccgtcattctcgccgcgccgctgcgcctttacccgcaagccattgcatttaacggagttcaacgtcacgctattacgtcggacccagactggaaagacggaaactattacccagaccagggcccggtcaaagggttggcaaacgcgcggatgctggcgatgatcacctaccgtagcgaggagtcctttgtcaagaggtacatgagggagtccagcaatatcgacgaatgggacggccgcttcaacgtcgagaactatctgatgcaccacgggaaactgcttacccggcgtttcgacgcgaactgctacctatacctcactaaaatgatggacctgcacgacctgggccggggtcgtgcagacgcggaagccgcattcgagcccatgcgcaaaaaaaattttctggcgatcggtatcaacagcgacattctttttccggtctggcaggtccgagaggtggccgaagcagcttcagacgccggcgtatacgtaaaatacatggaaattcggagcgacgccggacatgacgcgtttttgctggaaacagtgcaggtttcagacatcctgaaagaattttttgattcaataggattcgcttga

SEQ ID NO: 78104 - protein, 297 aa, Unknown
  Obtained from environmental sample
  misc_feature (1)..(297): Xaa is any amino acid
MGRGSAPSRVLDTDRLCVVCCNNLCSPYGSSAPTNVEPXTGYPWGMRFPVLDPCDVAFSQKKALEAIGIGRVAGVIGGSLGGMIALEWAAQFADCLDFAVILAAPLRLYPQAIAFNGVQRHAITSDPDWKDGNYYPDQGPVKGLANARMLAMITYRSEESFVKRYMRESSNIDEWDGRFNVENYLMHHGKLLTRRFDANCYLYLTKMMDLHDLGRGRADAEAAFEPMRKKNFLAIGINSDILFPVWQVREVAEAASDAGVYVKYMEIRSDAGHDAFLLETVQVSDILKEFFDSIGFA

SEQ ID NO: 78105 - DNA, 342 bp, Unknown
  Obtained from environmental sample
  misc_feature (1)..(342): n is a, c, g, or t
atgacagattcggccgagacacacgcccgaatttaccgctgcggcgtaatcaaagccgtgaacgatttgaattacggcgtaacggcggaggttttgttcaacacggacggctacgccattcacgacgacattgaaaaggtgaatttcagcggtcatccgatggtgttcggcagtggctgggaaagattcctcgcggaaaagataaacggacattttttggcaatatcctatccgattgaggataagctgattatgaacaaaacctatgtcggatacgacggcggacttagttttatcggcgatttttacagcgtgggactgtcgcaaagctccatacaatag

SEQ ID NO: 78106 - protein, 113 aa, Unknown
  Obtained from environmental sample
  misc_feature (1)..(113): Xaa is any amino acid
MTDSAETHARIYRCGVIKAVNDLNYGVTAEVLFNTDGYAIHDDIEKVNFSGHPMVFGSGWERFLAEKINGHFLAISYPIEDKLIMNKTYVGYDGGLSFIGDFYSVGLSQSSIQ

SEQ ID NO: 78107 - DNA, 558 bp, Unknown
  Obtained from environmental sample
  misc_feature (1)..(558): n is a, c, g, or t
ttggaggtgaatgaagtggacaaaacactacggcatccgtgctataacggcggatgcaaaaacgccagaatacacctgccggtagctccgtcgtgtaatatttcatgtaattattgtaaccgcaggtatgactgcgttaatgaaagccgtccgggcgtatgcagtgaaatcctgactcctcagacggcggcggaaaggtatttgaaagcaaaagcggttatggggaatttacaggttgtcggaattgccggtcccggggaccctctggctgattttgacaaaacaagggaaacctttcgattgatccgagaacatgacccggatgtgatattctgcctttccaccaacggtttgtatcttgagcgctatgcggagcaactcaaagcgctgggagtaacgcatattaccgttaccataaataccctccgtcccgaaacgggagcggttatttataaggaagttacctatgacggcgttgtatattcaggcgccgccgccgccgcattgcttttggaaaaacagttgttggggctgaaaaaatacaggagctggacataa

SEQ ID NO: 78108 - protein, 185 aa, Unknown
  Obtained from environmental sample
  DOMAIN (26)...(182): Radical SAM superfamily
  misc_feature (1)..(185): Xaa is any amino acid
MEVNEVDKTLRHPCYNGGCKNARIHLPVAPSCNISCNYCNRRYDCVNESRPGVCSEILTPQTAAERYLKAKAVMGNLQVVGIAGPGDPLADFDKTRETFRLIREHDPDVIFCLSTNGLYLERYAEQLKALGVTHITVTINTLRPETGAVIYKEVTYDGVVYSGAAAAALLLEKQLLGLKKYRSWT

SEQ ID NO: 78109 - DNA, 765 bp, Unknown
  Obtained from environmental sample
  misc_feature (1)..(765): n is a, c, g, or t
gtgtcctggcaagccgttatacagcacatacaatccgagctcggcgtcggcgcggtttatatcggtgaggcgtgtgccccctacgccgccgaccgctgggcgcggggcgaggttccgcccgccgtttttttacccgaaaattctgagcagaccgctttgattgcccgcgcgctctatgcggcggatcttccctttgtggcgcgcggactcggcaccggaatgtcgggcggcgcgctcccgctcggcaaggccgccgttatctcgtttgaacgcatgacgcgcgtcctggcgcgtcccgaagccctcacgctggaggcggagccgggcgcgctcttaaaagatgtgcaggccgccgccgccgcgcacgggcttatgtatccgcccgatcccgcgagttttgaggagtgctccatcggcggcaacatcgcggagaatgccggtggcctctcctgcgtaaagtacggcgtcacgggcgattttgtgctggcgctggatctcgtgctgccggacggacggccgctcaggctcggaagccgggcgcgcaaggatgtcgccggtctggatctgaagcgccttatcatcgggagcgaaggcacccttgcgctgatcacgggtgtcgtcttgcggctcgtgccgcagccgcaggcttcggcgagtttcgcggtttggtttcgggacgccgcgctggcggtcgagagcctgcggaaattgatgcacgatggcatcacgccggcgcgcgcggagctgatcgcgagcgcgtgttaa

SEQ ID NO: 78110 - protein, 254 aa, Unknown
  Obtained from environmental sample
  DOMAIN (39)...(177): FAD binding domain
  misc_feature (1)..(254): Xaa is any amino acid
MSWQAVIQHIQSELGVGAVYIGEACAPYAADRWARGEVPPAVFLPENSEQTALIARALYAADLPFVARGLGTGMSGGALPLGKAAVISFERMTRVLARPEALTLEAEPGALLKDVQAAAAAHGLMYPPDPASFEECSIGGNIAENAGGLSCVKYGVTGDFVLALDLVLPDGRPLRLGSRARKDVAGLDLKRLIIGSEGTLALITGVVLRLVPQPQASASFAVWFRDAALAVESLRKLMHDGITPARAELIASAC

SEQ ID NO: 78111 - DNA, 555 bp, Unknown
  Obtained from environmental sample
  misc_feature (1)..(555): n is a, c, g, or t
gtgatgccatcgtgcatcaatttccgcaggctctcgaccgccagcgcggcgtcccgaaaccaaaccgcgaaactcgccgaagcctgcggctgcggcacgagccgcaagacgacacccgtgatcagcgcaagggtgccttcgctcccgatgataaggcgcttcagatccagaccggcgacatccttgcgcgcccggcttccgagcctgagcggccgtccgtccggcagcacgagatccagcgccagcacaaaatcgcccgtgacgccgtactttacgcaggagaggccaccggcattctccgcgatgttgccgccgatggagcactcctcaaaactcgcgggatcgggcggatacataagcccgtgcgcggcggcggcggcctgcacatcttttaagagcgcgcccggctccgcctccagcgtgagggcttcgggacgcgccaggacgcgcgtcatgcgttcaaacgagataacggcggccttgccgagcgggagcgcgccgcccgacattccggtgccgagtccgcgcgccacaaagggaagatccgccgcatag

SEQ ID NO: 78112 - protein, 184 aa, Unknown
  Obtained from environmental sample
  misc_feature (1)..(184): Xaa is any amino acid
MMPSCINFRRLSTASAASRNQTAKLAEACGCGTSRKTTPVISARVPSLPMIRRFRSRPATSLRARLPSLSGRPSGSTRSSASTKSPVTPYFTQERPPAFSAMLPPMEHSSKLAGSGGYISPCAAAAACTSFKSAPGSASSVRASGRARTRVMRSNEITAALPSGSAPPDIPVPSPRATKGRSAA

SEQ ID NO: 78113 - DNA, 759 bp, Unknown
  Obtained from environmental sample
  misc_feature (1)..(759): n is a, c, g, or t
ttgctgccggaacaaatgaaccgcaagggcgcggcgacaaagaacaacgcctcgaaaacgccgcgaaacttgcaaaacccgcaaaacgaaatacagaacagtttgcaaagcaagcaggaaagcaaaccgctttccccgccaaaacgatcgacggtaggctcttactacaaggttctcctcatcgcgctgctcgttatcctatccacggtagccaccgtcgtgctctccgcgatgctctccgtgcatctgcgcgacttgtgggcgtcgcaagatgagcatgacgccctgttgaagctggcggactcccttgacgcggattctgaaaacgaatcatcaaacgttccgtacatcagcgcgttcgacgctgaaatgcgcggcgccaaccctgactatgtctgctggataaaaataggcggcacggcgataaactaccccgtggtgcgcggggaggacaacgagaagtatctgggcgtttccttttcaggcgagcagaatgtgttcggcgctgtattcatggattaccgctgcatgggcgaatatgtgccaaacatcatcgtctacgggcacaacaacaaaaacggcgagatgttcggcggcttgcgcaagctccttgacgaaaaatatctgtccgcgcatcccgtcattgtattgaaagcaaatgaccgcgaggtggaatacgagatattttccgccagaaagacgaatgtaaaagaccccgcgtatttcctcgattcagcgaaccggactgtcctccgataa

SEQ ID NO: 78114 - protein, 252 aa, Unknown
  Obtained from environmental sample
  DOMAIN (118)...(251): Sortase B
  misc_feature (1)..(252): Xaa is any amino acid
MLPEQMNRKGAATKNNASKTPRNLQNPQNEIQNSLQSKQESKPLSPPKRSTVGSYYKVLLIALLVILSTVATVVLSAMLSVHLRDLWASQDEHDALLKLADSLDADSENESSNVPYISAFDAEMRGANPDYVCWIKIGGTAINYPVVRGEDNEKYLGVSFSGEQNVFGAVFMDYRCMGEYVPNIIVYGHNNKNGEMFGGLRKLLDEKYLSAHPVIVLKANDREVEYEIFSARKTNVKDPAYFLDSANRTVLR

SEQ ID NO: 78115 - DNA, 603 bp, Unknown
  Obtained from environmental sample
  misc_feature (1)..(603): n is a, c, g, or t
gtgaggagtatggctgaagctaaggatatatcgggcgacggaaaatttgacgagggcaagctccgctatgacttactcagtccggagtttgaggcggaaatggccaaggtgttgacggacggcgcgaaaacacatggggagcatagctggaaaacactccccaatgcgcgggatcgttattacgccgcattgcgccggcatcttgcggcctggaagcagggggaggagctggataaggaatccggttcgtcgcacatggcgcatgtagcggtaaacgccatgtttttgcggtattttaagcagcaggagggactggaggagcgtgcaatgtccagtatgtcggactgttttacctcaacggaaagcactaagccaaaacgcggtagccttactataaatccgatgccggaaaaaatgcgcaaggctttggaaaaagagcgagtgcgcacaagaaacgtcattaacctgacgcgtgcgcaaactgttttagatgagcttagcgcaaacgattcggccgctgttttgtcaaaggaagaggtggataagctttgtgccgcgctgcgacaggcttgggacgaggcgcttgggcatgacggtatctaa

SEQ ID NO: 78116 - protein, 200 aa, Unknown
  Obtained from environmental sample
  misc_feature (1)..(200): Xaa is any amino acid
MRSMAEAKDISGDGKFDEGKLRYDLLSPEFEAEMAKVLTDGAKTHGEHSWKTLPNARDRYYAALRRHLAAWKQGEELDKESGSSHMAHVAVNAMFLRYFKQQEGLEERAMSSMSDCFTSTESTKPKRGSLTINPMPEKMRKALEKERVRTRNVINLTRAQTVLDELSANDSAAVLSKEEVDKLCAALRQAWDEALGHDGI

SEQ ID NO: 78117 - DNA, 600 bp, Unknown
  Obtained from environmental sample
  misc_feature (1)..(600): n is a, c, g, or t
gtggcgcatatgcagcgcgtaagcgcgcggcccattcagctggttacggaatttctgcgggaggtgcaatcccctgaagcggttntgttgtgtggcctcaacgctacccgcgtggtgcttaatcgcaggnccaggcaaaccttgggctttaacgggcattttttgccccagcncggtgagcgactggtctgccttaagaaccaccgcgacactagtttacggaatggccagttggtgtatgtgtgtcgcgccgaagagctggccaggccgcttgaggtggaagatggggatgagagcctagcggaaacaaaaccttccgccccagaatatcttatttacttacaggagctggatgatggtgtgtacgcgctacgggaagctttgcattcccgtgcttcccaagggcttcgggccaagtccggttcggccctgcttctggattacggctactgcctgaccgtgcacaaagctcaaggttcggaatgggatcgggtggtgctgtttaacgagcaagtggagaagcgctcgcgggacgagcacattcgctggctgtacaccggcataacgcgggccaagaaaaagctgctgcttataagttaa

SEQ ID NO: 78118 - protein, 199 aa, Unknown
  Obtained from environmental sample
  misc_feature (1)..(199): Xaa is any amino acid
MAHMQRVSARPIQLVTEFLREVQSPEAVXLCGLNATRVVLNRRXRQTLGFNGHFLPQXGERLVCLKNHRDTSLRNGQLVYVCRAEELARPLEVEDGDESLAETKPSAPEYLIYLQELDDGVYALREALHSRASQGLRAKSGSALLLDYGYCLTVHKAQGSEWDRVVLFNEQVEKRSRDEHIRWLYTGITRAKKKLLLIS

SEQ ID NO: 78119 - DNA, 885 bp, Unknown
  Obtained from environmental sample
  misc_feature (1)..(885): n is a, c, g, or t
ttgatggcgagcgaatcgcgagcccacccagaaaaggtaggaaaaccctgccctgtcctgggtgggcttttttattttcagtccggcaagaaggcagaaatggcagagacgacaaaaaaagtaaatcgctatgattcgcttgaccctgcgttatggatgaccagcccatttacacgtaacgccgaggggtttttgactggacgcgctattgttaccagcattggggttttcacctataagcgcgaagacggaaaactacagcgtgaactccggctgcccgaggaagtattcgccacagccagccttgagtcaatgaaactcaagccggtaacaaacgaccacccgaaggaaaaagtaacctctcaaaacgtgaaagacctcgcggttggttcgctcggaagcaacccgagcagcacaaatcaagaaaggacatgggacggatacacccctgctgaaaaacttactgacggtctgcacctcgccattgatatgaccataaccaacgaggacgcaatcgaggacgttcttaacggcaagcggtcgctgtctatggggtatgaatgcgacaccgaaatcgctcccgaaggttctgtgtggtgcggacaggcttatgacgtgatccagagaaatatccggtacaaccattgtgccatagtgccgaaggctcgcgccggagataacgcaatgattcgattggatggcggtgacgctatcctcgaaaataaaatttcaacgcctaaggagggcaatgaaatgggaatgaaatccataagaattgatggtgtggaatttcagggagacgaaggtcttgtcgtgaaatacaccgaccagcgcaaacgcgccgatcaagccgaagaaggttggaagcagcccacaaagctgtaa

SEQ ID NO: 78120 - protein, 294 aa, Unknown
  Obtained from environmental sample
  misc_feature (1)..(294): Xaa is any amino acid
MMASESRAHPEKVGKPCPVLGGLFYFQSGKKAEMAETTKKVNRYDSLDPALWMTSPFTRNAEGFLTGRAIVTSIGVFTYKREDGKLQRELRLPEEVFATASLESMKLKPVTNDHPKEKVTSQNVKDLAVGSLGSNPSSTNQERTWDGYTPAEKLTDGLHLAIDMTITNEDAIEDVLNGKRSLSMGYECDTEIAPEGSVWCGQAYDVIQRNIRYNHCAIVPKARAGDNAMIRLDGGDAILENKISTPKEGNEMGMKSIRIDGVEFQGDEGLVVKYTDQRKRADQAEEGWKQPTKL

SEQ ID NO: 78121 - DNA, 531 bp, Unknown
  Obtained from environmental sample
  misc_feature (1)..(531): n is a, c, g, or t
atggctgtgctttcctcttccgaggacggaactcgcggtatgttggactatcccggcatgacagagacatcgctccctgcggacggaaccggaggctcaaagcgttgggcgaccaaatccgtggatcagattctccgcgacatcgacattctgcttgacgcggttgctatcccgacatcagggcgcgaagaagcgaacactctcctgctacctcaagccgagtaccggagattggtacacacccggctcggcgacaacaccatcacccttttgaagtacatcaaggataactacgacaccatcacaaggattgaatggctgaacgagttgagcggaatcggcgttggcggcacagaccgtatcatggtcgcgagcctcgatgaagaacacatcacatgggaaatgccgacaccgttcgagcagttggaagaggaacatgaaggaatggagataaccattccctgccattccgaatgtgcaggatcaatcatgtattacccaatggcgttcgtgtatgcggacggagtttaa

SEQ ID NO: 78122 - protein, 176 aa, Unknown
  Obtained from environmental sample
  misc_feature (1)..(176): Xaa is any amino acid
MAVLSSSEDGTRGMLDYPGMTETSLPADGTGGSKRWATKSVDQILRDIDILLDAVAIPTSGREEANTLLLPQAEYRRLVHTRLGDNTITLLKYIKDNYDTITRIEWLNELSGIGVGGTDRIMVASLDEEHITWEMPTPFEQLEEEHEGMEITIPCHSECAGSIMYYPMAFVYADGV

SEQ ID NO: 78123 - DNA, 348 bp, Unknown
  Obtained from environmental sample
  misc_feature (1)..(348): n is a, c, g, or t
gtggccttactcctcacagaaggtcaagtgagtgactacaaaggagccgcccagttgctccacgccctgccggatgccgaagaactgcttgcggatcgaggctacgacgcggattggtttcgcagcgcactgcttgataaaggcatacgcccgtgcattcctcccaaaagaaatcgcaagcaccccgctgaatacgacaaaaatctctataagcaacggcataaaatagagattatgttcggcaggcttaaagattggcgcagaattgccatgcgctatgaccgatgcgcgcatactttcttttccgctatttgcttggccgctgtttacattttttatctcaattaa

SEQ ID NO: 78124 - protein, 115 aa, Unknown
  Obtained from environmental sample
  misc_feature (1)..(115): Xaa is any amino acid
MALLLTEGQVSDYKGAAQLLHALPDAEELLADRGYDADWFRSALLDKGIRPCIPPKRNRKHPAEYDKNLYKQRHKIEIMFGRLKDWRRIAMRYDRCAHTFFSAICLAAVYIFYLN

SEQ ID NO: 78125 - DNA, 753 bp, Unknown
  Obtained from environmental sample
  misc_feature (1)..(753): n is a, c, g, or t
atgccggggatatcaaatgacatggccttgcttggcgtcgacattttggcttattcccgggcgcgcaagcgtgggcttgggctgcgccggatgttcgcccttgccgccgtattccttttgttctcggcgctggggcttcacactttgcggcttgggttccacggccaggaaagattccgcaagacggcggaaagcggcgcccggaaagaccgcgccgacatagtcgaccggaacggcgaaatcctggcaaaaaacatatacgcattcgacctgttcctggacgcgcgcatgataaaggaccccgaccgcgcggcgaacttcatacactccaagattcccgaggtgtccgccgcggaagtccttgcaaaaatagaaaccggaaaaagaaacatagaacttaaaaaaaacatagggcgcgaggccgcggcgganatcaagaacgaaaggctcgacggaatcgccgcggtgcttaagcaggtgcggaaatatcccaagaacaaccttatgtcgcacgtcgtcgggttcgtgaaccgggacgcggagggggtctatggaatggaaaaatacgcggacgaacggcttagggcggttgcggaaccgcttgtcctttcgatagactcgcggatccaaaacgcgatgcgggcggaactttccgccgccatgaagggaattcgggacgaaggccgcgatggggattctgatgaacgcgcgtacgggagaaatcctccgcatggtgtcgcttccggactatga

SEQ ID NO: 78126 - protein, 250 aa, Unknown
  Obtained from environmental sample
  DOMAIN (70)...(217): Penicillin-binding Protein dimerisation domain
  misc_feature (1)..(250): Xaa is any amino acid
MPGISNDMALLGVDILAYSRARKRGLGLRRMFALAAVFLLFSALGLHTLRLGFHGQERFRKTAESGARKDRADIVDRNGEILAKNIYAFDLFLDARMIKDPDRAANFIHSKIPEVSAAEVLAKIETGKRNIELKKNIGREAAAXIKNERLDGIAAVLKQVRKYPKNNLMSHVVGFVNRDAEGVYGMEKYADERLRAVAEPLVLSIDSRIQNAMRAELSAAMKGIRDEGRDGDSDERAYGRNPPHGVASGL

SEQ ID NO: 78127 - DNA, 579 bp, Unknown
  Obtained from environmental sample
  misc_feature (1)..(579): n is a, c, g, or t
gtgcgcggcgagtatatgtccggcgcgaaaatttaccccgcggcgcgggacattttcgcggcgttcgacctttgcccactggaaaagacgaacgtggtgatattgggtcaggatccgtatcataatccgggtcaggcgcacggcctttgcttttctgtgccggacggggtcgcgaagccgccctcgcttttgaacatatataaagagatagaaagcgacctggggcggccgtcgaagacgaacgggaatttgaccgactggacgaaacagggggtgttgcttttgaacagcaccttgacggtcagggcgtttgcggcggcgtcgcacgcgaacaaggggtgggagaaattcacggacgcggcgataagggcgcttgggacgcggaagaacatagtttatattttatggggaaattacgcaagacagaagggcgcgcttatagacagggaaaataatttggttttggaatctgcgcacccatcgccattgtcggcgtcgaacggctttttcgggaacagacacttttcaaagacgaacgaatacttgtccgcccacggcaaaacgccggttgactggtag

SEQ ID NO: 78128 - protein, 192 aa, Unknown
  Obtained from environmental sample
  DOMAIN (23)...(183): Uracil DNA glycosylase superfamily
  misc_feature (1)..(192): Xaa is any amino acid
MRGEYMSGAKIYPAARDIFAAFDLCPLEKTNVVILGQDPYHNPGQAHGLCFSVPDGVAKPPSLLNIYKEIESDLGRPSKTNGNLTDWTKQGVLLLNSTLTVRAFAAASHANKGWEKFTDAAIRALGTRKNIVYILWGNYARQKGALIDRENNLVLESAHPSPLSASNGFFGNRHFSKTNEYLSAHGKTPVDW

SEQ ID NO: 78129 - DNA, 753 bp, Unknown
  Obtained from environmental sample
  misc_feature (1)..(753): n is a, c, g, or t
ttggaaaaaggcgaacggaatcaggtgcttctcggcgtaacgggaagcggccagacctttacgatggcgaacataatcgcggaatcgaaccgccccgcccttatcatggcgccgaacaaaattctggcggcgcaattatacaccgaaatgaaaagtttctttccgcgcaaccacgtggaatatttcgtgtcctattacgattattatcagcccgaagcgtacgttcccgcgaccgacacgtatatagacaaggacgcgagcgtcaacgaacagcttgaccgcatgcggcacagcgcgacgcgcagcatgcttgaagaaccggatacgattgtggtcgggtccgtgtcggcgatttacgggcttggcagtccggaagagtaccgcgaaatgaaaatcgttttttggcccggacaaaattcgacgcccgacgacgcgataaaaaaactggtcgaacttcaatacagacggaacgacgtcgatttcaaccgcggggatttccgcgcgcgcggcgacaacctggatattttccccagccacgcgacggacacaggatacagaatctcgttcctggacggcgcggtcgagggcatattcgaattcgacgcgctgaccggcgaacagaaacagcggctttcgcgcgccgccgtgtatccgaacacgcactatgcgacgccgatgaanacgctgttgtccgcaatcggcgaaatcgagcgcgacctgaacgaacggctggactttttcgacgacacatga

SEQ ID NO: 78130 - protein, 250 aa, Unknown
  Obtained from environmental sample
  misc_feature (1)..(250): Xaa is any amino acid
MEKGERNQVLLGVTGSGQTFTMANIIAESNRPALIMAPNKILAAQLYTEMKSFFPRNHVEYFVSYYDYYQPEAYVPATDTYIDKDASVNEQLDRMRHSATRSMLEEPDTIVVGSVSAIYGLGSPEEYREMKIVFWPGQNSTPDDAIKKLVELQYRRNDVDFNRGDFRARGDNLDIFPSHATDTGYRISFLDGAVEGIFEFDALTGEQKQRLSRAAVYPNTHYATPMXTLLSAIGEIERDLNERLDFFDDT

SEQ ID NO: 78131 - DNA, 828 bp, Unknown
  Obtained from environmental sample
  misc_feature (1)..(828): n is a, c, g, or t
atggaggcactcatggaatttgtaacccgtcccgaacagaaaatccccgcccggcagtacgatgtggtagtcgcgggtggcggtaccggcggagtatttgccgcggttgctgcggcccgtggaggcgcaagaaccgcgctaatcgaaagcaaaggctatgtcggtggaatcgctaccgaagggggctgcggtctccacagtttttacaatctttggaaggcctttaacgtggaaaaacgcctggtagtccggggtattcccgaggagtttattcagcgtctgtacatggcgggaggctgttcggggcacaacgaaacgattatgcggcctgaatacgataacgataccctctgtgtggatgtggagaagtataaatacgaggccctgtgtatgctcagggacgccggagttcacgtattgctcaatacccacgcggtggatgttatcaggcaaggtcaaaggatccaggggatcattaccgaaagtcatcagggctgcgaagcggttctcggtaagatatttatagacgcaaccggttacggtgacgtttccgcccgcgccggcgccgggtatactgaacccaatgattatccggtggtaaacagtatgggtgtcggcggcgtggacattgataaatacttttcgtttttgaaagaatccggagcgttatttgaatatgccagaggtccaaggagcggcagaacgaatcagattattcgtgttgatggagcgtgggcaaaaattgatcccgccttaggtgaagcgatacgcacccttggcatgagcgcggtgaccaccaccatccacgacaattatttcatgttataa

SEQ ID NO: 78132 - protein, 275 aa, Unknown
  Obtained from environmental sample
  DOMAIN (21)...(259): FAD dependent oxidoreductase
  misc_feature (1)..(275): Xaa is any amino acid
MEALMEFVTRPEQKIPARQYDVVVAGGGTGGVFAAVAAARGGARTALIESKGYVGGIATEGGCGLHSFYNLWKAFNVEKRLVVRGIPEEFIQRLYMAGGCSGHNETIMRPEYDNDTLCVDVEKYKYEALCMLRDAGVHVLLNTHAVDVIRQGQRIQGIITESHQGCEAVLGKIFIDATGYGDVSARAGAGYTEPNDYPVVNSMGVGGVDIDKYFSFLKESGALFEYARGPRSGRTNQIIRVDGAWAKIDPALGEAIRTLGMSAVTTTIHDNYFML

SEQ ID NO: 78133 - DNA, 402 bp, Unknown
  Obtained from environmental sample
  misc_feature (1)..(402): n is a, c, g, or t
gtgaatgaagttctgcttgacagggcgcacaagggtaaaccttattctattgttgtagttgccgaaggtattaagacttctaagaaggatactgtttcatcgggagcatggattgccgaacagattgaaaaaggcaccaaaattgaaacgcgggtaactgttcccggttacactctgcgcggaggaagcccttcgccgctcgaccgtattatcgctacacgaatgggcacttacgccgcttctttaattcataaagcacaattcggtaccatggtggctatgcataacaacgaaatgaaatcagtgccgttaaaggatgttggaggtaaaacacggcttgttcctcaagaccatgtgcttattaaacaggctaaacgagtgggaacattttttggagcatga

SEQ ID NO: 78134 - protein, 133 aa, Unknown
  Obtained from environmental sample
  misc_feature (1)..(133): Xaa is any amino acid
MNEVLLDRAHKGKPYSIVVVAEGIKTSKKDTVSSGAWIAEQIEKGTKIETRVTVPGYTLRGGSPSPLDRIIATRMGTYAASLIHKAQFGTMVAMHNNEMKSVPLKDVGGKTRLVPQDHVLIKQAKRVGTFFGA

SEQ ID NO: 78135 - DNA, 714 bp, Unknown
  Obtained from environmental sample
  misc_feature (1)..(714): n is a, c, g, or t
ttggaaaattccgcatggaaagcgcagattaatttcaatcttgccaagattgacgatgcggacgaagtatatttgaatggggtacttattggaaaaacaggttcgtttcctggttctgccgaaggtttcgtggcgcgatggaatacgccgcgactgtacacagctcccgccgacagcaagtaccttatatggaatgctgaaaatgtgctggcgatacgtgtgtacgacggcgacggcgacggcggcattttcgatggaacgccatttgcatatattcccgatttaattgacaatttgaatattaattttggaaaagacaaccgtactatcgaattggttaatacggcaaatgttgaacaaaacggaaatcttaaaatcgttcagataagtaacaaaacggaaatttccgaagaacttactattttttcggggaaagtcaaagttcaacctcaacaaacatattcttctcatttagattataaacaggaaaacggaacgagaactcaaatcgttgcaacttatacagatgaaacaacgaagaaaataaaacagaaaaagcttgtactgtcgtatattctgacgccgcctgcatccgnaaaaccgcagataaacggagcanaagtattcggtatccgaccggggtcgccgttcctgtttaagatggcggtatcgggagaaacgcccataacttatgccgtaaaaaatttgccctga

SEQ ID NO: 78136 - protein, 237 aa, Unknown
  Obtained from environmental sample
  misc_feature (1)..(237): Xaa is any amino acid
MENSAWKAQINFNLAKIDDADEVYLNGVLIGKTGSFPGSAEGFVARWNTPRLYTAPADSKYLIWNAENVLAIRVYDGDGDGGIFDGTPFAYIPDLIDNLNINFGKDNRTIELVNTANVEQNGNLKIVQISNKTEISEELTIFSGKVKVQPQQTYSSHLDYKQENGTRTQIVATYTDETTKKIKQKKLVLSYILTPPASXKPQINGAXVFGIRPGSPFLFKMAVSGETPITYAVKNLP

SEQ ID NO: 78137 - DNA, 840 bp, Unknown
  Obtained from environmental sample
  misc_feature (1)..(840): n is a, c, g, or t
atggacagattggccgagttgcctattgcacgcaatatagagcgtatcatttgcggaaaacaatatacaattgacgaactgcaactttgcaacgaattatggaacagtttcgaccatcatggcagattttccaataccgaaactgatgtctgtctcgaaaatattaacgccgaattgcaacaggctcacaacaatttagcctgtgccgaatggctttttgttaccttcggaacaatgttgggatactgcttaaaagcaaccggacaaatagtcgctaattgccacaggtttcccgcttccgatttcgaccgcctcccctttgatgtggatgatatatgcgccgtttggaagaaaaccattgctgcgttgcgacagttcaacccaacggtaaagatagttttcactgtaagtccgattcggcatcttcgcgatggcgcacaccaaaaccagttaagcaaatcaacgctactgcttgcaatagacaaattaaaccacgaaattgaaaatacgggctatttccctgcctacgaaattgtattagacgaattgcgcgattaccgcttcttcgacgataacatgacgcatccgaacaacgcggcaataaattatatcatgcaacgtttctgcgaatgttatatggacgataacatgttgcaagatatgaaaacagtagaaaatattgttatagcctcagagcatagaccaattcacaacacctcacaaagcaggaaatttgcttccgactgcatagaaaaaataaacgtattgaagcaacaactgccgatgcttgattttacagaagaactgaataaattaaaaacaagcaatttcgcaatttaa

SEQ ID NO: 78138 - protein, 279 aa, Unknown
  Obtained from environmental sample
  misc_feature (1)..(279): Xaa is any amino acid
MDRLAELPIARNIERIICGKQYTIDELQLCNELWNSFDHHGRFSNTETDVCLENINAELQQAHNNLACAEWLFVTFGTMLGYCLKATGQIVANCHRFPASDFDRLPFDVDDICAVWKKTIAALRQFNPTVKIVFTVSPIRHLRDGAHQNQLSKSTLLLAIDKLNHEIENTGYFPAYEIVLDELRDYRFFDDNMTHPNNAAINYIMQRFCECYMDDNMLQDMKTVENIVIASEHRPIHNTSQSRKFASDCIEKINVLKQQLPMLDFTEELNKLKTSNFAI

SEQ ID NO: 78139 - DNA, 756 bp, Unknown
  Obtained from environmental sample
  misc_feature (1)..(756): n is a, c, g, or t
gtgtgggcggcagtggcatgcaaagcgtgggagccaaaaaagattctgggtgtttcgatgccgacccgattcacaagcgcggaaagcgtggagctggcaagggccatggcgcaaaaccttgggatcaattatttggaactggacgcagacgcgccatattcgagtgctgcggcgctgctgaagcaagcgttccccgcacgggaattttgtctgaccgacgagaacctgcagagccgcgcacgaggggtgctgctgatggccctcaccaccgagccagatgttcgccgccttttgggcgcggatcgctgcgtcgtcatcaatactggcaataaaagcgaagcagccacgggctacttcacgctttacggcgatgggataggggcctttggcccgctgggcgacttgctgaaagccagggtctatttgcttgccgacgagtttcaggggcagattcctgagcaagtggtaaagcgcccgccgtccgccgaactgaggccagggcagacggatgaagcgagcttggtgccttacagccaactggacgcagtgcttggagcgtttctagaggctggtcggccagaggagtgcctgcacgccgatttggcagatgttctgattgggcagaacttaaccggtgccagaagcgcgctgccgaagattctgcaaatgatcaagaacagcgagttcaagcgcaggtatctgccatacgttttgaatgttacgcaaaggaacaactggcctggcaggtcaagctag

SEQ ID NO: 78140 - protein, 251 aa, Unknown
  Obtained from environmental sample
  DOMAIN (3)...(235): NAD synthase
  misc_feature (1)..(251): Xaa is any amino acid
MWAAVACKAWEPKKILGVSMPTRFTSAESVELARAMAQNLGINYLELDADAPYSSAAALLKQAFPAREFCLTDENLQSRARGVLLMALTTEPDVRRLLGADRCVVINTGNKSEAATGYFTLYGDGIGAFGPLGDLLKARVYLLADEFQGQIPEQVVKRPPSAELRPGQTDEASLVPYSQLDAVLGAFLEAGRPEECLHADLADVLIGQNLTGARSALPKILQMIKNSEFKRRYLPYVLNVTQRNNWPGRSS

SEQ ID NO: 78141 - DNA, 927 bp, Unknown
  Obtained from environmental sample
  misc_feature (1)..(927): n is a, c, g, or t
ttgctcaactccctgccattcggccttttgtgggttgacaaaaggggcgttatcggtgggctgaaccaatcgggccagtcgctattggggttgggtggcggtaccgtggggcttttggccgaatcggcacttgggctgcatgcttggctgttggagtcgcttgcgtccgattcgtttgaaccccaaagagcgacggacagccgcggccggaggtgggaagtcagaaagatccccgcccctaaccgggtgggagcgctcatccaatttgaagacatcaccgagcgcgaaaacgaagaaaggcggctggccgtcaaagaccggtttgctgaaatcggcgaaatggccgctggcttggcacaccaactaaaaaacggtttggccgtcctcaaagggcaggggcagctccttggccgtcaagggtacggcgaggccgccgttgaaataatccaagaagtttccatgcttgagaggttgatggccgatttcctgcgctgggcaaggccgctgtctccagaattggcggacacagacttagcggcagtggcagaggaagccattgccgaaatgaggcgaaggccgtgcgcctcgcaattgttggtagaaaaacagggggaagggcgggccctggcggactctgcgctgttgaaagagtcccttttgaacatcatagaaaacgcatgccaagccagccaagccggaggcaaaatattggtgcgcgtttcagacgccatgatagaaatcctagacgaaggcccaggcttgnggccagaagattttggaaaatatcttaggccattcgagagcggccgcccagatgggactggccttggcctgtctttggcattcaaatggctgagcgcccaaggcgcggatttgactgcaaaaagcagaagagcgcgcggaagtatttttgttatcaaatggtga

SEQ ID NO: 78142 - protein, 308 aa, Unknown
  Obtained from environmental sample
  DOMAIN (110)...(171): His Kinase A (phosphoacceptor) domain
  misc_feature (1)..(308): Xaa is any amino acid
MLNSLPFGLLWVDKRGVIGGLNQSGQSLLGLGGGTVGLLAESALGLHAWLLESLASDSFEPQRATDSRGRRWEVRKIPAPNRVGALIQFEDITERENEERRLAVKDRFAEIGEMAAGLAHQLKNGLAVLKGQGQLLGRQGYGEAAVEIIQEVSMLERLMADFLRWARPLSPELADTDLAAVAEEAIAEMRRRPCASQLLVEKQGEGRALADSALLKESLLNIIENACQASQAGGKILVRVSDAMIEILDEGPGLXPEDFGKYLRPFESGRPDGTGLGLSLAFKWLSAQGADLTAKSRRARGSIFVIKW

SEQ ID NO: 78143 - DNA, 882 bp, Unknown
  Obtained from environmental sample
  misc_feature (1)..(882): n is a, c, g, or t
atgagcgacacccaacgacagctaatgtccgatatgggagcgcagtattggcgagcggttgtgccaaatgccgacagcacagcgtttagtacgttggttacacccaagcgtaaatttttgcttactgtcggcggtactttcacccccgattcactgagcaacattgcgcttgacgctgcgctatccaacagcagcgttaaccttttttcgagccacccacaggcgtcaagcacaggcattggcgtgaacgttggcggcgacaaaacgtggcaggcaggcgcaaacagcagcattgtggccggcgcaaaaattttagccttcgataaaaactttagcacgccagaacgctttacctctgccgagtatgagcgcgattggaacattgacggtgggttgcagcagcgcagcttgcggcaatatacaggcatgacgggttatcgctacaggcaaaatttttcgctcaccaccaccgcctcgctcctcaacctcaacgctaccaaccccgagttatcgccgctcgacacctctttttcttccatgcagggaaaaaagctgacggcggatttgatgtttcggcagcgtaattttttaagtacagcatggggcagctttctgcgcacgcagcanagcaaccgcagcacgcagtttgcgcgtggaacggcggagttggcgcaatcgttcggaaaaattacggtcggattttgcgaagaacttgaacataacgaggtgaaaagcacaacacgcttgcgtacagcagccaagcctttcacactgaagagctgtttttgcgcaccgatagcggcgcacacccgcgcagagttgccgccnacatacgcactgatttttttgccgcgagcgatgcgctcgaaaaatcaatcgtaa

SEQ ID NO: 78144 - protein, 293 aa, Unknown
  Obtained from environmental sample
  misc_feature (1)..(293): Xaa is any amino acid
MSDTQRQLMSDMGAQYWRAVVPNADSTAFSTLVTPKRKFLLTVGGTFTPDSLSNIALDAALSNSSVNLFSSHPQASSTGIGVNVGGDKTWQAGANSSIVAGAKILAFDKNFSTPERFTSAEYERDWNIDGGLQQRSLRQYTGMTGYRYRQNFSLTTTASLLNLNATNPELSPLDTSFSSMQGKKLTADLMFRQRNFLSTAWGSFLRTQXSNRSTQFARGTAELAQSFGKITVGFCEELEHNEVKSTTRLRTAAKPFTLKSCFCAPIAAHTRAELPPTYALIFLPRAMRSKNQS

SEQ ID NO: 78145 - DNA, 942 bp, Unknown
  Obtained from environmental sample
  misc_feature (1)..(942): n is a, c, g, or t
gtgtacgcatggcgcgactacaacggcaatggcgtaagggagttgaacgagtttgaggtggccgcctttcgcgacgaggcttcgtatattcgcgttgcgctgctttcgcgcgagtacatacaagcctacaccgggaaatttgcctttcagctaagcctgctgcccgctatgctgtggcagcaaaatcgcggcgtgaagggatttctatcacgctttagcaacacgttttcgtatagcaacgcacataaaaacctacgcaacagctttgcaaaaaacgccaatccatttttcaccgacacaagcgcgctgagccaaacttacgcggcggtgaacacgctcagctacctttcgcgctcggcgcgtaccaaaatggagttgagctggcaacaaaacgcctcgaagcagctgctgataaacggtgttgaaagccgacaaaacaccctgctgaacttcaacgcccgcaggcgattaaccgatccgctgttgctaagcgcaggcgtagagcgcagcacaagaatatgccgctcgcagtacgcgctggctgacaaaaattttgatattttacagcattcacttcttgcgggtggcgagcttacgcctgtttccaacctgcgcctcaacgcaaagtattctttttctaccaaagaaaatactatgggtagcgaaaccgcgcagctgcacgatgtgggtttagaggcaacctgcaactttccgcaaaagggtatggttacaggtagcttcggatttgtgagagcaacctttaacggcgaaatcaacagcactctgggctacgaaatgctgcaaggctatagcgcaggcaacaacctcacgtggggtacaacttttaagcgtgtgctggggcaggggcttgagttgagtttgctgtacgcagggcgaaaactttcggtgggtaaagtgatacatagcggcagcgggagttga

SEQ ID NO: 78146 - protein, 313 aa, Unknown
  Obtained from environmental sample
  misc_feature (1)..(313): Xaa is any amino acid
MYAWRDYNGNGVRELNEFEVAAFRDEASYIRVALLSREYIQAYTGKFAFQLSLLPAMLWQQNRGVKGFLSRFSNTFSYSNAHKNLRNSFAKNANPFFTDTSALSQTYAAVNTLSYLSRSARTKMELSWQQNASKQLLINGVESRQNTLLNFNARRRLTDPLLLSAGVERSTRICRSQYALADKNFDILQHSLLAGGELTPVSNLRLNAKYSFSTKENTMGSETAQLHDVGLEATCNFPQKGMVTGSFGFVRATFNGEINSTLGYEMLQGYSAGNNLTWGTTFKRVLGQGLELSLLYAGRKLSVGKVIHSGSGS

SEQ ID NO: 78147 - DNA, 639 bp, Unknown
  Obtained from environmental sample
  misc_feature (1)..(639): n is a, c, g, or t
gtgtcaatccgcccgtccattgaggatacgggcgtaaagagcggcgttgtgatagatttttcgtcggttaagtcgacgcgcgccaatttgcagacggccgcgcaactgaagctgccgattgtcgtaggcaccaccggtcttgaagataaggatcgcgaactcgcgcaaaatgccgccgaaacgattcccgttctcgtcagctccaacatgagcttgggcgtgaacctgctcttttcgcttaccgagcttgtcgccgagaagttaggcggggcgttcgacatagagataatcgaggcgcaccaccgtttcaagaaggattcgcccagcggtacggcgcggacgcttggggaggtggcggctaaggcgatcgggcggacatacggcgacgcggttgtgaacgggcgcaacgggatggcctccggtacgcgtccgccaacggaaatcggcatgcacgcggttcgcggcggcgacatcgtgggggatcacacggtgctcttcgcgggactcggcgagagagtggagttgcgccatacggcgcataaccgtggaattttcgccagaggcgcggtggcggccgccaagtggatcgcgtctaggccgccggggcattatacgatgaaagatgttttgggactgtaa

SEQ ID NO: 78148 - protein, 212 aa, Unknown
  Obtained from environmental sample
  DOMAIN (1)...(70): Dihydrodipicolinate reductase, N-terminus
  misc_feature (1)..(212): Xaa is any amino acid
MSIRPSIEDTGVKSGVVIDFSSVKSTRANLQTAAQLKLPIVVGTTGLEDKDRELAQNAAETIPVLVSSNMSLGVNLLFSLTELVAEKLGGAFDIEIIEAHHRFKKDSPSGTARTLGEVAAKAIGRTYGDAVVNGRNGMASGTRPPTEIGMHAVRGGDIVGDHTVLFAGLGERVELRHTAHNRGIFARGAVAAAKWIASRPPGHYTMKDVLGL

SEQ ID NO: 78149 - DNA, 717 bp, Unknown
  Obtained from environmental sample
  misc_feature (1)..(717): n is a, c, g, or t
gtggataaattcaaaaaccgtgatattgtgggaactgcaactgcgcttagtgatattatagtcagtttcaagaaagctggtataaatatgaaaccatatacatctgaaatggtggatatatttgcgaataaagaaagtaattgttatcatgaagctattataaatacaaattataagtatattttgacaacaaattatgatgatttattggaaaaagtagcaagggctaaagggtataatgatctattgaatcgagtctattctcattacgatatcaaagaaatttctgaagcaatttacaaaaacgaatcagctataattcatatgcatggtatttataccactgatattgttttagatgaatttatatttaccaaagaagactataaacgtataaaagataaaaaccctggtttcagaacgcttatgaatgctatttttatgaattattctattttgttagttggatatggtagtagtgatcctcatttagaggatattattgatgatttaaatatgattcttaagtggaatggtagtgatgatagtttagaattaccccattattatttattaatcctaaaagataaattatctcctatatttgatcacaataaagacaaaaatcgaacaaaagtaattcctgttgataagtatgacgatatgttagcacttcttgaaagattacaaaaaaagtatcctcgcaaaagaaaatag

SEQ ID NO: 78150 - protein, 238 aa, Unknown
  Obtained from environmental sample
  misc_feature (1)..(238): Xaa is any amino acid
MDKFKNRDIVGTATALSDIIVSFKKAGINMKPYTSEMVDIFANKESNCYHEAIINTNYKYILTTNYDDLLEKVARAKGYNDLLNRVYSHYDIKEISEAIYKNESAIIHMHGIYTTDIVLDEFIFTKEDYKRIKDKNPGFRTLMNAIFMNYSILLVGYGSSDPHLEDIIDDLNMILKWNGSDDSLELPHYYLLILKDKLSPIFDHNKDKNRTKVIPVDKYDDMLALLERLQKKYPRKRK

SEQ ID NO: 78151 - DNA, 921 bp, Unknown
  Obtained from environmental sample
  misc_feature (1)..(921): n is a, c, g, or t
atgaaaaaagtttcaattgtgataccagtttataatgttcagacctacttgacgaaatgtctggacagcgtaattggccaaacttatgagaatattgaaatcatttgcgtaaacgatgccactccagacgattgcgggcaagttttggcggaatactcacaaaaagatgggcgcatcagaaccataacccatgttcataaccagggtctcagcggcgcgcgcaacagcggacttgaaacggccaccggagaatatatctattttcttgacagcgatgattatattgacaacgattatatagaaaaaatggttgaggctattgaaacaagcggcacggaactggttttgaatctgaccataacaagcgagagcgaagataaaagcgccccctatattcacccgacctttccgaaagtcgccccgggcggcgaattcgtaaccaaagaaagagcgattccggatgcgccttttaatgtttgggctcggttgtataaaaagtcttttttagatcagcataatatcagattccctcagggctatgtccatgaagatatctattttcaatatttgacctatgtatttcttgatgaaacatttgtatttcatggcccaggctatcattatgcaagccgcgttggatctatttcaaaaaaggaacccgatgcagatttgttggtcatgaaaatttatgacttgatttttgattattatttgactaataagctgcttgataaatatgaaattaaaatgtttcaagtacatccgtattttatggtcaatacagaagaaaaattcaatttttaccaggcctatttccaaaaagccgcttctcatttgcgaatcaagaaaaatctgtataacgagttggaattattttttgccgataatattcttgattcaaaggatctcggcngaatctga

SEQ ID NO: 78152 - protein, 306 aa, Unknown
  Obtained from environmental sample
  DOMAIN (5)...(173): Glycosyl transferase family 2
  misc_feature (1)..(306): Xaa is any amino acid
MKKVSIVIPVYNVQTYLTKCLDSVIGQTYENIEIICVNDATPDDCGQVLAEYSQKDGRIRTITHVHNQGLSGARNSGLETATGEYIYFLDSDDYIDNDYIEKMVEAIETSGTELVLNLTITSESEDKSAPYIHPTFPKVAPGGEFVTKERAIPDAPFNVWARLYKKSFLDQHNIRFPQGYVHEDIYFQYLTYVFLDETFVFHGPGYHYASRVGSISKKEPDADLLVMKIYDLIFDYYLTNKLLDKYEIKMFQVHPYFMVNTEEKFNFYQAYFQKAASHLRIKKNLYNELELFFADNILDSKDLGXI

SEQ ID NO: 78153 - DNA, 453 bp, Unknown
  Obtained from environmental sample
  misc_feature (1)..(453): n is a, c, g, or t
ttgctcacacccgacatatcctngtcgtttgtaaaagcaatggaactctatcaaattagatggagcattgaggttctgtttaaggaatgcaaacagtatctgcgtcttggaaaatcgcagaataccgatttctgcggacaaattgccgatgccagtttgacaatgataacatacacaatattatctctatacaaacggtttgaatcgtatgaaacattgggtgctcttttcagggacactcaaaaagaaatgcttgaaaaaacgctttgccaaaggatagagattgttattctaaaaatattgtgcgatttattagaaatactatgtatagatgtcgaaaaaacgctctatgatttgatgtcgtccgacaaagcatcgaaagatataattgttttgttaaacgctgtaaatcttataaatgacagctcgggaaaatctattaacacagattga

SEQ ID NO: 78154 - protein, 150 aa, Unknown
  Obtained from environmental sample
  misc_feature (1)..(150): Xaa is any amino acid
MLTPDISXSFVKAMELYQIRWSIEVLFKECKQYLRLGKSQNTDFCGQIADASLTMITYTILSLYKRFESYETLGALFRDTQKEMLEKTLCQRIEIVILKILCDLLEILCIDVEKTLYDLMSSDKASKDIIVLLNAVNLINDSSGKSINTD

SEQ ID NO: 78155 - DNA, 441 bp, Unknown
  Obtained from environmental sample
  misc_feature (1)..(441): n is a, c, g, or t
atgaaggggacgaccttgctgctcaatgcggcggagcagcgccttcagttcgggctggcgcgcgacggcgcgctcgtcttcgggcaggattgggccgcttcctctcaaggcgtggaactcatggcgccggctctggccgccgccatgagccttctggatgcgcctttttccactattgacagaattgcctgcgtgacagggccgggcgggtttaccggcctgcgcctggcattggccacggcttcggctttgcgccatacgctgcatgtgccgctggccggcatcaactacctggaactgctggccgaaggctcgccctgcctgccgggtcagactgtgcgcgtactgacccacgcccggcggggatgcgtctaccgccaggattttcggcgttgcgccgactttcatattgcggctttgggcgaacncgtgcgtttctga

SEQ ID NO: 78156 - protein, 146 aa, Unknown
  Obtained from environmental sample
  DOMAIN (33)...(146): Glycoprotease family
  misc_feature (1)..(146): Xaa is any amino acid
MKGTTLLLNAAEQRLQFGLARDGALVFGQDWAASSQGVELMAPALAAAMSLLDAPFSTIDRIACVTGPGGFTGLRLALATASALRHTLHVPLAGINYLELLAEGSPCLPGQTVRVLTHARRGCVYRQDFRRCADFHIAALGEXVRF

SEQ ID NO: 78157 - DNA, 429 bp, Unknown
  Obtained from environmental sample
  misc_feature (1)..(429): n is a, c, g, or t
gtggccgccgggacaaccggccatgtcgcgctgggtccgggttctgncctgttgcagggtntgcgggacacgtggaatatgatccggctcaccgccgaaggcatcgtcaaactgttccagagagtcgtgccgcttgacgccctgggcggtcccattctgatcgctcaagccgtagggcagcaggcccagagcggcatccttcacgtgttcgccattgcggcgctcatcagcgtcaatctcggcctgctcaatctgttgcccattccggttctggacggggggcacatcgcctttctgacgctggagatgctcttccggcggccgatcagccaggcagtgcaggagttcagcgcgcgcgtgggcatcgtccttttgatcgccctcatgctctttgccacgtggaatgacatcatgcggctgctctcatga

SEQ ID NO: 78158 - protein, 142 aa, Unknown
  Obtained from environmental sample
  DOMAIN (1)...(136): Peptidase family M50
  misc_feature (1)..(142): Xaa is any amino acid
MAAGTTGHVALGPGSXLLQGXRDTWNMIRLTAEGIVKLFQRVVPLDALGGPILIAQAVGQQAQSGILHVFAIAALISVNLGLLNLLPIPVLDGGHIAFLTLEMLFRRPISQAVQEFSARVGIVLLIALMLFATWNDIMRLLS

SEQ ID NO: 78159 - DNA, 822 bp, Unknown
  Obtained from environmental sample
  misc_feature (1)..(822): n is a, c, g, or t
atgaacttcagcacccttttgccccgcatcgccacggcgcttgtcctgctgacagtgctcggcctggccgtctcttttggttttgtctggctgatcgcgctggcttttttctgtgcggcgtgcgccctgtgggaattttacaacctgttctggccgaaagcggcgcatcgcgccgaaaagctgaccggcatgggcatgaccgtcgtgttgtttgcgggcgtctggctgcgctatgaggcagagcgccggggcatcgcgatcgacagcctgggcgttgcggcgtcgctgtgtctcttgatcgccgcaaccgtttttctgatccgttacggcatgggcaaggccgtccggctggacgacgcggcgctgacggcgtttggggtgctgtacgtatccttgtccctgatcctggccctgctcctgacgcgcgaacaactgctgctcttgctggctgtcgtggcaggcacggatacctgcgcctactttgcgggcaatttctggggaaaacacaggatatggcccacgatcagccccaacaaaagcgtggaaggctgtcttggcggcatcgccggcagcgtgatcgtgtgcctgggttttgccctgtaccacggcacagcgctcgtcgccggcgcgtgcctgggaattgtgctggccgtgttcgccatactgggcgatttttttgagtccgcaatcaagcgcgcgcacggcgtcaaggattccggcgtcctgttgccggggcatggcggcatgctggatcgcctggacagcgttctcttcgcggcgccggcctatgcggtgttcaacctgttggcgcgtttgctgtga

SEQ ID NO: 78160 - protein, 273 aa, Unknown
  Obtained from environmental sample
  SIGNAL (1)...(23)
  DOMAIN (7)...(270): Cytidylyltransferase family
  misc_feature (1)..(273): Xaa is any amino acid
MNFSTLLPRIATALVLLTVLGLAVSFGFVWLIALAFFCAACALWEFYNLFWPKAAHRAEKLTGMGMTVVLFAGVWLRYEAERRGIAIDSLGVAASLCLLIAATVFLIRYGMGKAVRLDDAALTAFGVLYVSLSLILALLLTREQLLLLLAVVAGTDTCAYFAGNFWGKHRIWPTISPNKSVEGCLGGIAGSVIVCLGFALYHGTALVAGACLGIVLAVFAILGDFFESAIKRAHGVKDSGVLLPGHGGMLDRLDSVLFAAPAYAVFNLLARLL

SEQ ID NO: 78161 - DNA, 747 bp, Unknown
  Obtained from environmental sample
  misc_feature (1)..(747): n is a, c, g, or t
gtgccacccgaggtcggagccgaatccgtggccgactacgcccaccgttggttacagcggaaaacctcgacgttgaaaccgaaaaccgtcgacaactacgagcggtccctgcggctgtacatttgcgccgacctcgacgggatcaacctcggacgcctccggctgcgcgatctgaccccgacgatcatcgccgactggtttccccgcctccaagccgccacggcccgcgaacccatccgcacatacacgccgcgcaccctgcggcccgagcaggtcgctcgccggtggttggctgcgcagggatacgacatcgacccgcgcggtggacgcctcgccgccgagttgatggacttgtggcgggcggcgggatcaccggcccccagaccgctagatccgttgccagacgacccgacgaaacctcgacgcggtgctgcccaaaccgcgaacacgtacacgtgcctgcggtcgatgttgaacgacgcgttccgcgaggggctgctgccgcaggggcaaccggcgacgttacgtaacgcgggcgcgaaacccgcccccgagcggcccttggcttcgcttgcggacgtgcaagccctcaccgatgcgatgccgccacacttggcgctactagtcaccctcggcgggtgggcgggcctgcgacgcgaagaagccctcgcgttacgtcgcgacgcaatcacattccacgcagcggtggggagatgttggcgcccggatcgcggtcgagcgaactag

SEQ ID NO: 78162 - protein, 248 aa, Unknown
  Obtained from environmental sample
  misc_feature (1)..(248): Xaa is any amino acid
MPPEVGAESVADYAHRWLQRKTSTLKPKTVDNYERSLRLYICADLDGINLGRLRLRDLTPTIIADWFPRLQAATAREPIRTYTPRTLRPEQVARRWLAAQGYDIDPRGGRLAAELMDLWRAAGSPAPRPLDPLPDDPTKPRRGAAQTANTYTCLRSMLNDAFREGLLPQGQPATLRNAGAKPAPERPLASLADVQALTDAMPPHLALLVTLGGWAGLRREEALALRRDAITFHAAVGRCWRPDRGRAN

SEQ ID NO: 78163 - DNA, 891 bp, Unknown
  Obtained from environmental sample
  misc_feature (1)..(891): n is a, c, g, or t
ttgaagaatatcacaaaagagagcatacgccgcaggaattatcctgtattccgggttctcaaaaaaagcgatattccgtctaaaaacgaaatagttcctttacaaatcggtgaaatcggcgattcaaaatggctaaattcgcaaatttttacgggcgacgtcttttatttgaatttggcgtttgatttgtccgtaattcccgacgacctgcttgaatatttaccgctttacacggaatatttgggacgctgcggcgcgggcgggctttcgtcgagccaaatggcgaaattgtggaaacttcattgcggcggattttcatcgttttctttgatttcaagcgattatggtaaacggaattcgtttgtcgcaagcaacgttttcacaataaaaactttgttaaaaaacatcccgcaaacgctggactgcttatcgaaaactttttttgaagcggatttttgcgacgagaatttgataaaaaacgttttgaacgaagaaaagaacgatattttcgaagaaataattcagcacgggcataaccatgcgattatctgttccgcggcgagattttcgcctgcaagcgcgataaaataccgtacggaaggaataggatattacaggtttttgaaaaacttgcatgaagaaaaaagcgaaatacttacaaaaattaaaaaaatccattcaatcattataaattcgcaaaatcttacagtatcgaccgcttgtaccgacgattcgtttttgccgcagacaagggattttatcaaaaaaattccgtcttttgacaaaagaattgaattgacaagcgagaaattgaaatccgcttctcagaaagatatttacggagtggaaatttcgtcgtcggtcaatatgccgccgacgtttttgagttga

SEQ ID NO: 78164 - protein, 296 aa, Unknown
  Obtained from environmental sample
  DOMAIN (2)...(211): Peptidase M16C associated
  misc_feature (1)..(296): Xaa is any amino acid
MKNITKESIRRRNYPVFRVLKKSDIPSKNEIVPLQIGEIGDSKWLNSQIFTGDVFYLNLAFDLSVIPDDLLEYLPLYTEYLGRCGAGGLSSSQMAKLWKLHCGGFSSFSLISSDYGKRNSFVASNVFTIKTLLKNIPQTLDCLSKTFFEADFCDENLIKNVLNEEKNDIFEEIIQHGHNHAIICSAARFSPASAIKYRTEGIGYYRFLKNLHEEKSEILTKIKKIHSIIINSQNLTVSTACTDDSFLPQTRDFIKKIPSFDKRIELTSEKLKSASQKDIYGVEISSSVNMPPTFLS

SEQ ID NO: 78165 - DNA, 777 bp, Unknown
  Obtained from environmental sample
  misc_feature (1)..(777): n is a, c, g, or t
gtgaatcttctctcggtacgggagggaaaagaattatccgggttaaccaagaataccattcttaccattcttgatgatatttttgttttagcaatagaggatggggttgttgattataaccctgtaagatctgtaatgcggttttcaagagagataaccgacattcggggcgcaataccaaaacgcgaaatggagatgctgtttcctatatcccatgacgcgcttgtaaagatttggaggaaacaaatttacgcgacggcataccttgtgttacgtgataccggtttacgccccggagagcttcgggctttgcagtggggagactggtatcccgatctgcggttcttcccggttacaaaagccattgaaagcggaaagcgcgataagataaaagggacaaaaacaggttcggtaaaacccgctgttgtcaccgagcagacggcggcggagatagaaattttacgggctgaggtagaagactattcgcctgataaatttatttttggcgacagtgggggaccgctaacaatagtgcgtctggattacaatttcagaatggggatattgagggcgggactggacaggccgtattccccgtattggctgcggcatacgtttaacacccgtatgctggatgttttgccggatgacacggtgaggcttttaatggggcacgcgaccgaggcaatgacgcggcattacaggcacccggatattgaatcgcttaaaaaggaggcggaaaaaatcaaagatgtgcttaataaagttaattattga

SEQ ID NO: 78166 - protein, 258 aa, Unknown
  Obtained from environmental sample
  DOMAIN (66)...(244): Phage integrase family
  misc_feature (1)..(258): Xaa is any amino acid
MNLLSVREGKELSGLTKNTILTILDDIFVLAIEDGVVDYNPVRSVMRFSREITDIRGAIPKREMEMLFPISHDALVKIWRKQIYATAYLVLRDTGLRPGELRALQWGDWYPDLRFFPVTKAIESGKRDKIKGTKTGSVKPAVVTEQTAAEIEILRAEVEDYSPDKFIFGDSGGPLTIVRLDYNFRMGILRAGLDRPYSPYWLRHTFNTRMLDVLPDDTVRLLMGHATEAMTRHYRHPDIESLKKEAEKIKDVLNKVNY

SEQ ID NO: 78167 - DNA, 441 bp, Unknown
  Obtained from environmental sample
  misc_feature (1)..(441): n is a, c, g, or t
atgataattgaggatcatctttcctttctttgcccttcgcccctgcggggcattaatctggatgattttggggaccggtttgttgatatgagcgccgcttataccccggcgtatatcgaaacagcggaaaaagccgcgaaagaattgaatatcaaaatccaaaagggcgtctatgggtattggcacggcccaacttacgaaaccgccgcggagattcgggcatttatggcattgggtgccgatgtggtcggtatgtctaccgtggcggaagcgattgtcgccaggcattgcggcatgaagatactgggtctgtcctgtataacgaatatgacctgcatttactcaaaaagcggaaccagccacgaagaagttatggagatgggaagattaactgcggatagatttatcgcgttactgacaaaaattattccgcggctgtag

SEQ ID NO: 78168 - protein, 146 aa, Unknown
  Obtained from environmental sample
  DOMAIN (1)...(145): Phosphorylase family 2
  misc_feature (1)..(146): Xaa is any amino acid
MIIEDHLSFLCPSPLRGINLDDFGDRFVDMSAAYTPAYIETAEKAAKELNIKIQKGVYGYWHGPTYETAAEIRAFMALGADVVGMSTVAEAIVARHCGMKILGLSCITNMTCIYSKSGTSHEEVMEMGRLTADRFIALLTKIIPRL

SEQ ID NO: 78169 - DNA, 621 bp, Unknown
  Obtained from environmental sample
  misc_feature (1)..(621): n is a, c, g, or t
gtgtccctggcggactccattgtatcatccttatcgacctttcattacagctatttcgccgacggcaaggttccggaaaagccgggtaattatgaccgcgattcgggctgcgtcggcacctacaagtcaaaggacagctatgtaacaatcgttgccgacaccgacagcgagtgggccgctcttgccgagtttatcggcaaaccggggctttatcccacgaaggccgaaagggcgcagcacgcggacgaaatagccggccttataaacgcgtggctgtccgacaagggcgcgaaagccgcagtcaagcaactgcgcggaaagggcatcgcttgtacaaaggtaatcaatattgaggatatgcagggcgacaggcacctcactgaggcgcggggaatgttcgtggattattttaacatccggacggggaaaatcaagtcaacgtcaaatcccataaaattttccgattcgccgaccgacatccgcaattcggctcctctttacggcgtggataccgtagctatcttaaaagaattttttagtctgaaagatgaaaaaattaacgatttaagagagaggtatgtagtccgtactattgaggatcaacccgattttgccgtctga

SEQ ID NO: 78170 - protein, 206 aa, Unknown
  Obtained from environmental sample
  misc_feature (1)..(206): Xaa is any amino acid
MSLADSIVSSLSTFHYSYFADGKVPEKPGNYDRDSGCVGTYKSKDSYVTIVADTDSEWAALAEFIGKPGLYPTKAERAQHADEIAGLINAWLSDKGAKAAVKQLRGKGIACTKVINIEDMQGDRHLTEARGMFVDYFNIRTGKIKSTSNPIKFSDSPTDIRNSAPLYGVDTVAILKEFFSLKDEKINDLRERYVVRTIEDQPDFAV

SEQ ID NO: 78171 - DNA, 981 bp, Unknown
  Obtained from environmental sample
  misc_feature (1)..(981): n is a, c, g, or t
atggcgtgtaccctcctgaaaacacatttctcgcgtagggagccttctatgacctcgctgcttccccagcccctttccattattaacgtggccctggcgggttttgcggacgcgatccgggctgccggcgcttccgcgctgaccgtggactggacccctcntgcggacagtgacccccggattggccgaatcctggcgcaagtcctgaacgatccgcgtattgaggaagccaacgccaaagcgatgagcgcgtacctggaaacaaatccccgcctcgtcggcgccggccgcgcaagcgaggtgcttacaggctttcacggacggcacattctgcatgcgggtccgccctgccccttcgagcgcatgtgcggccctgtgcagggggccgtcattggggctattttgtttgaaggttgggccgaaacacaggaagaagccgaaaaaatggcccgtagcggcgaaatcagctacagtccctgccaccatttcaacgcctgcggccccatggccgggatagtctgtccctccatgcccatgtggatagtggaagacagcgccaaaaatatccgcaccttttcctctttcaatgaagggcttggaaaagtgctgcgtttcggcgccaataacacggaagttctcaatcgcctcgcctggatgcgcgatgtcatgctccccgctgtggatgccgccgtacgccatgaaggcggcattgatatcaagccgcttatggcgcaggcgctgcatatgggcgacgaggtgcataaccgcaacgcggcggcctcttcgcttttgctgaaacgcctgctgccgggactgttcggctctaccctgcccatggagtccgtgcgcgggactgtggcctttatttccgggaatgaccacagttttctgaatatatccatggcggcctgcaaggccatgctgatggccgcacacaacattccccacagcacgatgggaccgaatggctcggccatctga

SEQ ID NO: 78172 - protein, 326 aa, Unknown
  Obtained from environmental sample
  DOMAIN (74)...(326): Protein of unknown function (DUF1116)
  misc_feature (1)..(326): Xaa is any amino acid
MACTLLKTHFSRREPSMTSLLPQPLSIINVALAGFADAIRAAGASALTVDWTPXADSDPRIGRILAQVLNDPRIEEANAKAMSAYLETNPRLVGAGRASEVLTGFHGRHILHAGPPCPFERMCGPVQGAVIGAILFEGWAETQEEAEKMARSGEISYSPCHHFNACGPMAGIVCPSMPMWIVEDSAKNIRTFSSFNEGLGKVLRFGANNTEVLNRLAWMRDVMLPAVDAAVRHEGGIDIKPLMAQALHMGDEVHNRNAAASSLLLKRLLPGLFGSTLPMESVRGTVAFISGNDHSFLNISMAACKAMLMAAHNIPHSTMGPNGSAI

SEQ ID NO: 78173 - DNA, 723 bp, Unknown
  Obtained from environmental sample
  misc_feature (1)..(723): n is a, c, g, or t
gtgcccgggcagattaaccgcttagttgaccccttggcatacataatatccgtggccaacactcagataaccgccagcggcgcggacgttgaagatgatgaccgtctccgggagcgcatacgcataaaaccggaaagtttcacaacggccgggtccgagttggcttatatctattgggcgctgtccgctcatcaagacatactggacgtgtcggttatcagcgaaccctacttttccccgggcgaagtccatatttttgtcctcttgactgacggccgcttgccagaagctggggggcctgaaatagccctggtcaaagaggcggtgagcgcaaggcgggtgcggccgctgacggaccacgtctttgtctctcccgccacggcggtagaggtggattacgcctttacctggtggattacagaggcccaggcaggctcagtggccgacttgacgggccgaatgaatcaagccgcggcggcttatgaggaatggcagacggagcggctgggccgtgacctgaatcccaatcggctgattcggctggccgtgggcgcgggcgcgaagcggattgaagttgtgcgcatagtgcatggagaagatggggaaggcaacccgaccgagacggaaacgccttttaactttgaagtgctgaacggtatgcaagtggcaaaaatactgccccgggccgaccgcgtccgcttcggggccattgaggacgattga

SEQ ID NO: 78174 - protein, 240 aa, Unknown
  Obtained from environmental sample
  DOMAIN (11)...(181): Baseplate J-like protein
  misc_feature (1)..(240): Xaa is any amino acid
MPGQINRLVDPLAYIISVANTQITASGADVEDDDRLRERIRIKPESFTTAGSELAYIYWALSAHQDILDVSVISEPYFSPGEVHIFVLLTDGRLPEAGGPEIALVKEAVSARRVRPLTDHVFVSPATAVEVDYAFTWWITEAQAGSVADLTGRMNQAAAAYEEWQTERLGRDLNPNRLIRLAVGAGAKRIEVVRIVHGEDGEGNPTETETPFNFEVLNGMQVAKILPRADRVRFGAIEDD

SEQ ID NO: 78175 - DNA, 576 bp, Unknown
  Obtained from environmental sample
  misc_feature (1)..(576): n is a, c, g, or t
gtgnccacgccggaggagttgcagccatccgccaggcccctcttggttctgggcgctggcgtaaaggccaacggcgaccccacgcccgtgctggagggcaggctgctaatggcgctgcgcctcttcgaggaaaagaaggcatcgtggatactggtctccggcgacaaccggacccagtactacaacgagccgcaggccatgcgccgctggctggtcaagcgcggcgtcccccccgaaaggatagtcagcgactacgccggcaggcgcacctacgacagcctgaagcgcgccaagatgattttcggcatcggggacgttgttgtggtcacttccgagttccacatgccccgcacccttttcctcgccgggcacattggcctggaagcgactggcgtttccagcgagaccaaaagcgtgtcggggggcgacctcatccgcctccgctggagggagtacctcgccaggcacaaagcccagatggatgtctggttcccccctggcaccaggctcggcccgacggaggacaccccgccgataatagcggatagtgaccagccaccagccactagccactag

SEQ ID NO: 78176 - protein, 191 aa, Unknown
  Obtained from environmental sample
  DOMAIN (10)...(155): DUF218 domain
  misc_feature (1)..(191): Xaa is any amino acid
MXTPEELQPSARPLLVLGAGVKANGDPTPVLEGRLLMALRLFEEKKASWILVSGDNRTQYYNEPQAMRRWLVKRGVPPERIVSDYAGRRTYDSLKRAKMIFGIGDVVVVTSEFHMPRTLFLAGHIGLEATGVSSETKSVSGGDLIRLRWREYLARHKAQMDVWFPPGTRLGPTEDTPPIIADSDQPPATSH

SEQ ID NO: 78177 - DNA, 663 bp, Unknown
  Obtained from environmental sample
  misc_feature (1)..(663): n is a, c, g, or t
atgacagaatctcgctgcactgtccagcagataggcgtgacgcagaagagcgcctggttcctggagcagcgcatacgcgcagcctgcggcaacatgacggcgaagatcctttctggcataatagaggtggacgagacctacattggcggcatcgagaagaacaagcactcaaagaagcggctgcacccgaagggcggcgcgaaggggaaggccgcggtcatgggcatgagggacaggagcggccaggtcgccgccaaggtcgtcgagcgcgccgacaagcccaccctacagggcgaggtgaggggcgcggcagcccctggctcgaccgtctgcacggacgagcacaccgcctacgcggggctgggggacttctgcgaccacaggacggtgtgccactccgccaagcagtacgtggacggcatggcgagcaccaacggcgtggagagcctctgggccgtcctgaagcgggcgttctacggcacctaccacagcatcagcgagaagcacctgcaattctacgtggacgaggtcgtgttcaggatgaacgagggcaactgcgcgatagacaccgtggacaggctggagtcgctggtaaaggggatgaggggcaggagggtgacatacaggatgctgacggaaggggagtatgggcatgcagcgtag

SEQ ID NO: 78178 - protein, 220 aa, Unknown
  Obtained from environmental sample
  misc_feature (1)..(220): Xaa is any amino acid
MTESRCTVQQIGVTQKSAWFLEQRIRAACGNMTAKILSGIIEVDETYIGGIEKNKHSKKRLHPKGGAKGKAAVMGMRDRSGQVAAKVVERADKPTLQGEVRGAAAPGSTVCTDEHTAYAGLGDFCDHRTVCHSAKQYVDGMASTNGVESLWAVLKRAFYGTYHSISEKHLQFYVDEVVFRMNEGNCAIDTVDRLESLVKGMRGRRVTYRMLTEGEYGHAA

SEQ ID NO: 78179 - DNA, 444 bp, Unknown
  Obtained from environmental sample
  misc_feature (1)..(444): n is a, c, g, or t
atgcctcgttgggcagtacgtttgggcaaattgcaaaaaagacgcgacggcaacagagactactatgaacaaaaacgggttgatgttctgctctctgtcgatatggtgcgccattctgctgcggggcatatacagcatgccattcttgtagccggtgacagcgatttcattcctgctgtcgaagctgccaaagaatccggcgccaccgtttcgttatggtgcagcgaggataatacggttcacaaagatctggtagaacttgccgacattgtaaacaggtttgactggaagttatttcccaggctaaagggtaaaaaactcaaacaggctgaatccattgaagaagaaaaaaatatctcacgacaatcgttctataataaaaaatttcaaaaaaggaacgaaagcgagataaagcaggggcttttttcaagatttttaaaataa

SEQ ID NO: 78180 - protein, 147 aa, Unknown
  Obtained from environmental sample
  misc_feature (1)..(147): Xaa is any amino acid
MPRWAVRLGKLQKRRDGNRDYYEQKRVDVLLSVDMVRHSAAGHIQHAILVAGDSDFIPAVEAAKESGATVSLWCSEDNTVHKDLVELADIVNRFDWKLFPRLKGKKLKQAESIEEEKNISRQSFYNKKFQKRNESEIKQGLFSRFLK

SEQ ID NO: 78181 - DNA, 927 bp, Unknown
  Obtained from environmental sample
  misc_feature (1)..(927): n is a, c, g, or t
atgatagagagcggcgttccgggtgtcaagttcatcgccgcgaatacagaccggcaaagccttgcaaattgcagggctgaggtaaagatacccctcggctcctcgacgacgcgcggcttgggagccggcggcagttcggagcggggccaaaacgcagcagaggagagtcgtgacgaaataaagtcggccattcaggacgccgacatgatctttatcgcagcgggtttggggggcggcaccggcactggggcagcccctgtcgttgccggctgcgcggccgaatttggaatcctgtccgttgcggttgttttgaccccgtgcaattgggaaggctccggcaaggcgaatctagccgccagtgggttaaacgatctccgcaacgtcgctgacacagtgatagttgtttccaacgaaaaaataggaagctattgcgacaaaaatgtgaacacgattgacgcatggaaggctgccgacagcgttttgatccaaggggttcgcgggatcagcgacctcatcttgcgcccaggcatcatcaacgttgattttgcggacgttgaggcagtcctgcgcggcagcagggaagcgctgatcgggactggcgaagggggcggcgacgatgcgatgctggaagcggtcaagaaagccctcgattgcccgctgctcgaaggcaaccacagcggcggcgcaacgaaagtcattatttcggttatggccgattggcaccaagtggcgtattccgccatcgaagtgtcaatgaagtacgtgagggagtatttcaaggggctgccagacatcaagcttgggcaaattgacgcacccgaactgaatggccgagtcgttgtgacaattctggtatccgggtttaacaattccgtttcgcccaaagaatctcccagaatccaaaaaactgagctcgtgccgatctga

SEQ ID NO: 78182 - protein, 308 aa, Unknown
  Obtained from environmental sample
  DOMAIN (178)...(301): Tubulin/FtsZ family, C-terminal domain
  misc_feature (1)..(308): Xaa is any amino acid
MIESGVPGVKFIAANTDRQSLANCRAEVKIPLGSSTTRGLGAGGSSERGQNAAEESRDEIKSAIQDADMIFIAAGLGGGTGTGAAPVVAGCAAEFGILSVAVVLTPCNWEGSGKANLAASGLNDLRNVADTVIVVSNEKIGSYCDKNVNTIDAWKAADSVLIQGVRGISDLILRPGIINVDFADVEAVLRGSREALIGTGEGGGDDAMLEAVKKALDCPLLEGNHSGGATKVIISVMADWHQVAYSAIEVSMKYVREYFKGLPDIKLGQIDAPELNGRVVVTILVSGFNNSVSPKESPRIQKTELVPI

SEQ ID NO: 78183 - DNA, 615 bp, Unknown
  Obtained from environmental sample
  misc_feature (1)..(615): n is a, c, g, or t
gtggcatgcaacgcgatttcggtttcggctttgcaggcattaagggaaggacttcccggcctgtctgttgtcggaacggttcccgcgctaaagccggcgattgagaaaagccggaaacgccgcatcggggtaataggcacgcagcgggcagtggaggacccgtacatagcggaacttgccgcgcagttcgggcctgattgcgccatcgttgggcaggcggcacctgagttaattgactttgtcgaacgccgctggctggaggcggacagggcggaacgcttagaggcggttgagccctggataaaaaaaatcgttgataaaggcgccgataccctggtactggcttgtacccattttcttttgctgaaggaagaattcctccgtgcggcgggcgacagcttaatgatttttgattcgatagaaggtgttataaaacgggtggaaacccttctggacgaagcggccggagagcttagatcgggggcagcaaaagaagccgggcctccagtgcctacagcgcctcaattgatggttgttaccggcaaaaggccccttgaagctcactgggaaaaactctgcctaagttttggctttgttttggaggctggctggtga

SEQ ID NO: 78184 - protein, 204 aa, Unknown
  Obtained from environmental sample
  DOMAIN (1)...(152): Asp/Glu/Hydantoin racemase
  misc_feature (1)..(204): Xaa is any amino acid
MACNAISVSALQALREGLPGLSVVGTVPALKPAIEKSRKRRIGVIGTQRAVEDPYIAELAAQFGPDCAIVGQAAPELIDFVERRWLEADRAERLEAVEPWIKKIVDKGADTLVLACTHFLLLKEEFLRAAGDSLMIFDSIEGVIKRVETLLDEAAGELRSGAAKEAGPPVPTAPQLMVVTGKRPLEAHWEKLCLSFGFVLEAGW

SEQ ID NO: 78185 - DNA, 876 bp, Unknown
  Obtained from environmental sample
  misc_feature (1)..(876): n is a, c, g, or t
atgatggccgagttccttagcggcgcgaccggaatatttctcgcgttttgggggctgatgcttggcgttgtaaggaaacaggctaccaaggcaaaaggaaattttaccggaactgcttatggagacggatcagtaccggcgggaacatgggcggtcgtgccggggacggaactgcgctataaggttctggaaaaagtaaatttcaaggaaggggaaacgttcagctttcctgtcgaagccgaatttcccggcctgtcgcataacatcggttccggcacggcgatccgcctgactcgcgtgattgacggccttgagtcggtttccgtgggcgaggactggatcgtttcctatgggcaggaaacggaagaggatgacaggtatcgcgagcggatagagggccgctggaaaagccaaattctaggcgacatcaaagaggtttacaaatcctatgcggaggcggttgacggagtccgcgccgcacatattgtacgcgcccctcgcggccccgggagtaccgatgtaataatcgcatccgttgtcggattgccgaatgaagacctaataaatgcggtcaaggccgcgctccatgaccatgagcttatggcctttgacgttcaggttttcccgccggaagttcaggaggtaacgcttgacatcgaatacaaaggggatgcatccgaaggcgcggtttctagtatcgctgaacaatatatttatgatcttggcatcggcggaaggtttgtcgtcaaggatttatacgcattattcgatccgctaaagctgaaaacggtcgagatcatctctccgggcagggacgttcagccggatgaacgatccgttattgtcgccgcaataaaagtgacgaaggtggaataa

SEQ ID NO: 78186 - protein, 291 aa, Unknown
  Obtained from environmental sample
  DOMAIN (10)...(255): Baseplate J-like protein
  misc_feature (1)..(291): Xaa is any amino acid
MMAEFLSGATGIFLAFWGLMLGVVRKQATKAKGNFTGTAYGDGSVPAGTWAVVPGTELRYKVLEKVNFKEGETFSFPVEAEFPGLSHNIGSGTAIRLTRVIDGLESVSVGEDWIVSYGQETEEDDRYRERIEGRWKSQILGDIKEVYKSYAEAVDGVRAAHIVRAPRGPGSTDVIIASVVGLPNEDLINAVKAALHDHELMAFDVQVFPPEVQEVTLDIEYKGDASEGAVSSIAEQYIYDLGIGGRFVVKDLYALFDPLKLKTVEIISPGRDVQPDERSVIVAAIKVTKVE

SEQ ID NO: 78187 - DNA, 765 bp, Unknown
  Obtained from environmental sample
  misc_feature (1)..(765): n is a, c, g, or t
gtggttgcttctatcttattttggcccgattccgcgcccaaaagcgccgatgaaaaaatcaggtgggtcacgcttccagctgctgccggcgcgtctggcggctcggctccaacagaggagggaaagacaaaaggcaggcagaggcgggtggaagagactgcgccagaaaaaccggccccggagcctccgaaaaaaaccgcgccccccacgtcggctccaacccctccaaaaccattattggagcctcccaaggtacccccaccagcaaagccgcccgcgccaaaggtcggccccaaccctaacccagatagcaaagggactgccgcagtcgccgcgaaaggggcgaacccatccagcgtcgcagtgccgggcgcggctggcagcgggggcgttggcggcgtggggcagggttcaggcataccagggctaaggccatccaaagcgggggtcatgggcggcacgggcatattgcaggaatttatcggggcaagcgattttccgctatggtacgcccagcagatacaagacggcgtgaccaaaaactggatacaactgcgcggcggtgaaggccgggtcttggtgtattttcggataaacagggatggcaaaatcgaagcggcaagggtggaaatatccagcggcaaagcagagctagacgacatggcgctgcaagcagtgaaaaggactgcactgccaaggctgccagaggagtatgaaggagagacccttggcgtcaggttctggttccactatgggggccagtga

SEQ ID NO: 78188 - protein, 254 aa, Unknown
  Obtained from environmental sample
  misc_feature (1)..(254): Xaa is any amino acid
MVASILFWPDSAPKSADEKIRWVTLPAAAGASGGSAPTEEGKTKGRQRRVEETAPEKPAPEPPKKTAPPTSAPTPPKPLLEPPKVPPPAKPPAPKVGPNPNPDSKGTAAVAAKGANPSSVAVPGAAGSGGVGGVGQGSGIPGLRPSKAGVMGGTGILQEFIGASDFPLWYAQQIQDGVTKNWIQLRGGEGRVLVYFRINRDGKIEAARVEISSGKAELDDMALQAVKRTALPRLPEEYEGETLGVRFWFHYGGQ

SEQ ID NO: 78189 - DNA, 780 bp, Unknown
  Obtained from environmental sample
  misc_feature (1)..(780): n is a, c, g, or t
atgcgatntattccattccttgactacgagcgcatcttggatgaacttgaaacttataaaaatgaaaaactttatcataatatttctctacaaattgacgctttgaaagcaattctaaaccaagcaaaagatgaccaagacaacggcggctggtattcgatcatcattcccgaatctcacatcaaagttgactctatggaaaagctgaccttaaatacagactttgccatcatagtgctgaaatgctacattgacaagttttacaagtatgaaaaacaccgctgggaagcccctagacttgagtaccaattattaaacgaaaatgatgacaattttgtcaaagaatacaaactttcatattacgaaaacaacgacacttcccacggattctccgaagccttggaattgttcgtcaaagaactgggggaactgctcgttcggcatagtggcattcccgcttctctctatcagcgaagtgagttcaggggttcactaatcgctttcgactttcggcagcatctatatgctccgctcatttctttgagggcgaatgtcttacaactgactatatcgcccgttagcctaaacgaagacgaaaaaaaattcgttgatttgctgaaaaaatacgtttgccgcaattccgccactttcgacggcaacagcctctacctgctacggaacaaaagtaaagtggggatgggcttctttgaagcagggaatttttatcctgactttgtactctgggtgacacgccagacgtgcagtacctttcttttgtga

SEQ ID NO: 78190 - protein, 259 aa, Unknown
  Obtained from environmental sample
  misc_feature (1)..(259): Xaa is any amino acid
MRXIPFLDYERILDELETYKNEKLYHNISLQIDALKAILNQAKDDQDNGGWYSIIIPESHIKVDSMEKLTLNTDFAIIVLKCYIDKFYKYEKHRWEAPRLEYQLLNENDDNFVKEYKLSYYENNDTSHGFSEALELFVKELGELLVRHSGIPASLYQRSEFRGSLIAFDFRQHLYAPLISLRANVLQLTISPVSLNEDEKKFVDLLKKYVCRNSATFDGNSLYLLRNKSKVGMGFFEAGNFYPDFVLWVTRQTCSTFLL

SEQ ID NO: 78191 - DNA, 369 bp, Unknown
  Obtained from environmental sample
  misc_feature (1)..(369): n is a, c, g, or t
ttgcgcgaaagacacgaacaagggcttattacaagcatggagtttctgacaatgctacttgatctcgcaaaggaagccgccgaagccgaaaaggtattggtgccgcgcgaggaaatcgacaagggcaaagccgcgctgacggagctattcaacagcgtaaaaaacccgaacaccccgataatcgttgaacgcatcgtagccgatattgacgcgattgtaaagatcgtccgattggacggctggcagaacaccaccgccggaaaacaagaggttaccaaagcattaaggagcgtggtgtggattaagtataaacttaaagacaaggacatattcgataaggcgtacagttatattgaaatgtactattga

SEQ ID NO: 78192 - protein, 122 aa, Unknown
  Obtained from environmental sample
  misc_feature (1)..(122): Xaa is any amino acid
MRERHEQGLITSMEFLTMLLDLAKEAAEAEKVLVPREEIDKGKAALTELFNSVKNPNTPIIVERIVADIDAIVKIVRLDGWQNTTAGKQEVTKALRSVVWIKYKLKDKDIFDKAYSYIEMYY

SEQ ID NO: 78193 - DNA, 501 bp, Unknown
  Obtained from environmental sample
  misc_feature (1)..(501): n is a, c, g, or t
ttggaacacgcccagatgaaggccgccttcactcccccggcggagaatttgactgaaatcaggcctagacgggggctgacggccaccgactcttccgtccgggcctattccggctggcggcatcctcaagccctgctaaccggcttattagcgaacgcacagccttttcggaaagaaacccgaccccaggttgaactttgcctgctaccggacgaggagggggagaattaccacttgatcaagctgtttgaaactgaaagcggccgaacagatgtcccctcagaccatcttctggatgacggactaaaatttgagtgtggactcggcttcagcccctggggggcaaccggctatctgaattgtttgaaagccctggccgcagttcaggaagtggaagaccttcagcgctgcgcccggctctacggcacggtctccctgcccaaatccggcccagaaggttggtatttccacccggttctgggcttcaacgtcaaaaagtga

SEQ ID NO: 78194 - protein, 166 aa, Unknown
  Obtained from environmental sample
  misc_feature (1)..(166): Xaa is any amino acid
MEHAQMKAAFTPPAENLTEIRPRRGLTATDSSVRAYSGWRHPQALLTGLLANAQPFRKETRPQVELCLLPDEEGENYHLIKLFETESGRTDVPSDHLLDDGLKFECGLGFSPWGATGYLNCLKALAAVQEVEDLQRCARLYGTVSLPKSGPEGWYFHPVLGFNVKK

SEQ ID NO: 78195 - DNA, 792 bp, Unknown
  Obtained from environmental sample
  misc_feature (1)..(792): n is a, c, g, or t
gtgtggccnnnntttcactacgccgaattattggccgttgacgcggaaaccggtcaagaattaaccgttcccaatgaattggggacgttgagggttctgcccacgttcgacagcgccgttaatattgaaacatggctgaacgcgcgtcccgccaataacgcctccaattcctctattcccccatatccggtcgtggtaactgcaagcagtttcggcgcccaggctagcaacaacggaagctttggcaaggcgctcaataacaacaacaccaaatgggtcgcccttgagtttgacaatcccgctttaacaagcattccgaattacggttttgaaggttgcggcagtcttaaaagcataaccatgccccacgttaccagcattgggaatagcgcttttgccagtgtcggccttacagagataaactttaaccctagtatcaccagcctaggaggttacacttttcaaaacagcggacttaaaaaggtaaccatacctgacaacgttaccgtcattggaaccagcctttttgacggctgcaccgccctaaccgaaataatcataggcagcggcgttaccataattggggctgccgcttttagcggctgcgccgcccttaccagcgtaacgattaacggcacaatcaccgccgcgaatttttctaccaccttttacggcacaggcaccgcagcctcaggcctattgggcttgcgcaccgcgtatcttaacacggtaacaggaggcgcggggacgtatacgagggaaagcggcggctcaacgtggtcgagacagtaa

SEQ ID NO: 78196 - protein, 263 aa, Unknown
  Obtained from environmental sample
  misc_feature (1)..(263): Xaa is any amino acid
MWPXFHYAELLAVDAETGQELTVPNELGTLRVLPTFDSAVNIETWLNARPANNASNSSIPPYPVVVTASSFGAQASNNGSFGKALNNNNTKWVALEFDNPALTSIPNYGFEGCGSLKSITMPHVTSIGNSAFASVGLTEINFNPSITSLGGYTFQNSGLKKVTIPDNVTVIGTSLFDGCTALTEIIIGSGVTIIGAAAFSGCAALTSVTINGTITAANFSTTFYGTGTAASGLLGLRTAYLNTVTGGAGTYTRESGGSTWSRQ

SEQ ID NO: 78197 - DNA, 417 bp, Unknown
  Obtained from environmental sample
  misc_feature (1)..(417): n is a, c, g, or t
atggcggaaaccatgtatgcggcgcgcggcttggggcttgccgcgccgcaggtggggcaggctatccgtcttgtggtggtggacgccagcgggccggatgaacgtcaggatttgcaggtgtttatcaatccgcgtctgaccgtgctggacccgaccccggtggaggaggaggaaggctgcctgtccgtgccgctcaactaccgcgctccggtaagccgcgcggccagggtggcggtggacgctttggatatggactggcaacccgtgcatgtggaggcggaggggctgatggccgcttgcctgcaacacgagctggatcatcttgacggcaaagtgtttctggatcgcctcagccggctcaagcggatgctgttcgacacgcggatcaagaaatggctgcgccgcaaaaacccttag

SEQ ID NO: 78198 - protein, 138 aa, Unknown
  Obtained from environmental sample
  DOMAIN (1)...(123): Polypeptide deformylase
  misc_feature (1)..(138): Xaa is any amino acid
MAETMYAARGLGLAAPQVGQAIRLVVVDASGPDERQDLQVFINPRLTVLDPTPVEEEEGCLSVPLNYRAPVSRAARVAVDALDMDWQPVHVEAEGLMAACLQHELDHLDGKVFLDRLSRLKRMLFDTRIKKWLRRKNP

SEQ ID NO: 78199 - DNA, 669 bp, Unknown
  Obtained from environmental sample
  misc_feature (1)..(669): n is a, c, g, or t
ttgcccgttatttgcattatggaaaatgggaacaagcgcaaactttccaaacgcaaggacaaagaggcgttggtcgaatactttttggatgcgggctatcccaaggaagcgcttatcgaataccttttaacgatttataatacagattacgaattgtggcggttggcgaatccgcgggcggggtggcgcgattttaatttccgctttgaaaagattggaagcaacagcccgcttttcgattgggataaattgaacgacatttcaaaaaatattttggcgggctattcatgcgaaaagatggacgtcgaagtgcgcaagtttttcggcgggcgattcaccgaacaaaattattgcgacattttgacgcttctatccgttgaccgtggtacggaacggccgcgcaaggacattgcgaaattaagcgacatcgacaccgaatttgactttttgttcaagcctttgcaaatgacgccgcttttggaacgatataatgaacttttaaaaaccacgcccgaccgcgacacgtggttcacgacgtgcaaggcgcgcgcggcggaatttggatttaaaaacgtgcgcgaatttacccaagcggtgcgcgttgcgttgaccggacgcgaacgcacgaccgaccttttcacgatttcaacggttcttttaaaagggtga

SEQ ID NO: 78200 - protein, 222 aa, Unknown
  Obtained from environmental sample
  misc_feature (1)..(222): Xaa is any amino acid
MPVICIMENGNKRKLSKRKDKEALVEYFLDAGYPKEALIEYLLTIYNTDYELWRLANPRAGWRDFNFRFEKIGSNSPLFDWDKLNDISKNILAGYSCEKMDVEVRKFFGGRFTEQNYCDILTLLSVDRGTERPRKDIAKLSDIDTEFDFLFKPLQMTPLLERYNELLKTTPDRDTWFTTCKARAAEFGFKNVREFTQAVRVALTGRERTTDLFTISTVLLKG

SEQ ID NO: 78201 - DNA, 498 bp, Unknown
  Obtained from environmental sample
  misc_feature (1)..(498): n is a, c, g, or t
gtgggttatgccattgccctagcttgccgccctgccctgcttattgcggatgaaccaaccaccgcgttggatgtcactattcaagcgcaggtgcttgagatgatgaacaagcttaaagatgagttgcatacttctatgctccttataacacacgatctcggagtcgtagctgaaacttgcgataatgtggccattatgtacgctggtgagatcgtagaaatggggaccgctgaggacatctttggacacacaagccatccctatacaaagggtctctttggatccattcctgatcttgatgaagacagggagcgcctccagcccattgttggcttgatgcccgatccgagcaatctgcctaatggctgtaattttgctccgcgctgcccctactgtttggacagatgcaaagacgaagcggtagcggaaatacggctgagcgagacccattttgcgcgatgtcgtctactggaaggaacgggggaggtgaaggggtga

SEQ ID NO: 78202 - protein, 165 aa, Unknown
  Obtained from environmental sample
  DOMAIN (72)...(136): Oligopeptide/dipeptide transporter, C-terminal region
  misc_feature (1)..(165): Xaa is any amino acid
MGYAIALACRPALLIADEPTTALDVTIQAQVLEMMNKLKDELHTSMLLITHDLGVVAETCDNVAIMYAGEIVEMGTAEDIFGHTSHPYTKGLFGSIPDLDEDRERLQPIVGLMPDPSNLPNGCNFAPRCPYCLDRCKDEAVAEIRLSETHFARCRLLEGTGEVKG

SEQ ID NO: 78203 - DNA, 432 bp, Unknown
  Obtained from environmental sample
  misc_feature (1)..(432): n is a, c, g, or t
atgggtctcgctcagccgtatttccgctaccgcttcgtctttgcatctgtccaaacagtaggggcagcgcggagcaaaattacagccattaggcagattgctcggatcgggcatcaagccaacaatgggctggaggcgctccctgtcttcatcaagatcaggaatggatccaaagagaccctttgtatagggatggcttgtgtgtccaaagatgtcctcagcggtccccatttctacgatctcaccagcgtacataatggccacattatcgcaagtttcagctacgactccgagatcgtgtgttataaggagcatagaagtatgcaactcatctttaagcttgttcatcatctcaagcacctgcgcttgaatagtgacatccaacgcggtggttggttcatccgcaataagcagggcagggcggcaagctag

SEQ ID NO: 78204 - protein, 143 aa, Unknown
  Obtained from environmental sample
  misc_feature (1)..(143): Xaa is any amino acid
MGLAQPYFRYRFVFASVQTVGAARSKITAIRQIARIGHQANNGLEALPVFIKIRNGSKETLCIGMACVSKDVLSGPHFYDLTSVHNGHIIASFSYDSEIVCYKEHRSMQLIFKLVHHLKHLRLNSDIQRGGWFIRNKQGRAAS

SEQ ID NO: 78205 - DNA, 375 bp, Unknown
  Obtained from environmental sample
  misc_feature (1)..(375): n is a, c, g, or t
atgcagactgaccattccgaatcaacggtgattgacttgatgttgccggccggttcgtgggaaaggttgtctgctgcactgctgaccggctgcgatgctgtttatttcggcgcaggcggtcagagcatccactctcattcgtcggatcatttcgcgcttgacgatctgcctcaaattgttgcgttgtgccgcgcgaaaggcgcattaacgtctctgacacttattactgctatttcctacagcgatatgccggcgctgtgccacgctgccgatgctgccgcgcgctgtggcgttgatgcggatattgcttcagatatggcagctgttctttatgcgcggaattcggtgttgaagttcatgcatccacgcagttga

SEQ ID NO: 78206 - protein, 124 aa, Unknown
  Obtained from environmental sample
  misc_feature (1)..(124): Xaa is any amino acid
MQTDHSESTVIDLMLPAGSWERLSAALLTGCDAVYFGAGGQSIHSHSSDHFALDDLPQIVALCRAKGALTSLTLITAISYSDMPALCHAADAAARCGVDADIASDMAAVLYARNSVLKFMHPRS

SEQ ID NO: 78207 - DNA, 747 bp, Unknown
  Obtained from environmental sample
  misc_feature (1)..(747): n is a, c, g, or t
gtgctgcgcgaactggacattccggctcgcagcacggtcagccccattcccttggaagcgctcggcagggtgaaagagcgttttgccggtgaacaggccgggtcggaacagcgccgggaagtgggcggcggggtcatcgtccgccgccgccgccagagcgatgaagcgccgagcgcaacgcccgctcccctgccggaagcggaagcttccgccgcgccccagactttaacggcagaacctccggcccagggcaagggcagaaagcgcgcccgccccgaagccgcgccggccaagatcatccagcgtcccgcaagcgaaggcggcgaaggcgacaaagcgccgcttgccgcccccttggacgaaattccgccctccccgcgcgaagtttccgcacttgccgacggcgccgggccgaagatcgcggacaggggcgaagctccatccgcagacgctccggcggccgaagccgcgccccagcgtctgcccattgtggacaaagacgcggtgcgcaagcgcgacagccgggccgatcgccgcaaatcccagatcaggcatgagcctgcgcgtgtgatttccacgccgcccgcagcgccggcgcccggcgcggcgcaggaagccgcccaggccgacgaaacggatgccgccaaggcccggcgcgctccggcggcctcggccaggcccgaaggctcctccgctccgagcctcttgccgcctccgggcgaaggccggagttcttacgccgattaa

SEQ ID NO: 78208 - protein, 248 aa, Unknown
  Obtained from environmental sample
  misc_feature (1)..(248): Xaa is any amino acid
MLRELDIPARSTVSPIPLEALGRVKERFAGEQAGSEQRREVGGGVIVRRRRQSDEAPSATPAPLPEAEASAAPQTLTAEPPAQGKGRKRARPEAAPAKIIQRPASEGGEGDKAPLAAPLDEIPPSPREVSALADGAGPKIADRGEAPSADAPAAEAAPQRLPIVDKDAVRKRDSRADRRKSQIRHEPARVISTPPAAPAPGAAQEAAQADETDAAKARRAPAASARPEGSSAPSLLPPPGEGRSSYAD

SEQ ID NO: 78209 - DNA, 777 bp, Unknown
  Obtained from environmental sample
  misc_feature (1)..(777): n is a, c, g, or t
gtgctgctgtttttcctcgccacattctggctttcggcgcactgctacaggcatctgccgctgcttgactttatgccgtaccacgtagggcaaaacattccgcaagctatggcaatacctcaagatgcaccgcatgacgagtatcaaaccattttgatttacgaaaaagacggcgtgaagaaagagttttcggacaccgattttccatggcaggacagcacgtgggtatttgttgacagcaagtcgaagctgctgaagaaaggctacgtgccgcccatatacaacttttccatcacgcaccctgagcagggaaatatcacagagcaggtgctggaaagcgagtacgcatttctgcttgttgcgcccaagctcgaaaaggcaaacgtggagtcaatagagcaaataaaagctctcgccgattttgcaaaaaagcatggttgcacgttccttgggcttacctcgtcaacgcagggctacgtcagcgaatttagccaagcgtacctgctcaactttgacatttgcagcacagacgaaaccacgctcaaatcaatggtacgcgcacaccccgggctgctgctgctgcaccgcggtacgatagtggcgaagtggagctaccgcgacattccatcggtagaaaagttgggaaataatccgctgtcaagcagccttagcgcgctgcgcaagagtaacgagaacaacattatttacgcctacatctttgcgtgctttgcagccatgctactgctggtaatgatgtcaaaaaaatacaagcgttag

SEQ ID NO: 78210 - protein, 258 aa, Unknown
  Obtained from environmental sample
  misc_feature (1)..(258): Xaa is any amino acid
MLLFFLATFWLSAHCYRHLPLLDFMPYHVGQNIPQAMAIPQDAPHDEYQTILIYEKDGVKKEFSDTDFPWQDSTWVFVDSKSKLLKKGYVPPIYNFSITHPEQGNITEQVLESEYAFLLVAPKLEKANVESIEQIKALADFAKKHGCTFLGLTSSTQGYVSEFSQAYLLNFDICSTDETTLKSMVRAHPGLLLLHRGTIVAKWSYRDIPSVEKLGNNPLSSSLSALRKSNENNIIYAYIFACFAAMLLLVMMSKKYKR

SEQ ID NO: 78211 - DNA, 330 bp, Unknown
  Obtained from environmental sample
  misc_feature (1)..(330): n is a, c, g, or t
atggctattatttggtcaaaaaatgcggccgatgaactgttggaaatagtctgttatcaaaaatacaacgtcggtaaagttcccgcccgggatgcttatacgcggatcaggaataaagtcgaacgcatcagccttaatccggatgtcggcgaagcgataccggaactggtggaagtaggcctcaagcatatttatcagctggccgagagtccctggttaatctgctataaagtggacaataaaaatatctgtattctgtctattatggatgttcggaaagatttagaagaaatgctgtacagtaaatttctggaaggaaaaatcatttaa

SEQ ID NO: 78212 - protein, 109 aa, Unknown
  Obtained from environmental sample
  DOMAIN (3)...(95): Plasmid stabilisation system protein
  misc_feature (1)..(109): Xaa is any amino acid
MAIIWSKNAADELLEIVCYQKYNVGKVPARDAYTRIRNKVERISLNPDVGEAIPELVEVGLKHIYQLAESPWLICYKVDNKNICILSIMDVRKDLEEMLYSKFLEGKII

SEQ ID NO: 78213 - DNA, 786 bp, Unknown
  Obtained from environmental sample
  misc_feature (1)..(786): n is a, c, g, or t
atgatgtttgccgattacgattcttttgcccgctacgatcagtatatgtatcccttttatgaaaatgacaaaagcatttccagggaagaggcaaaaaatattttcagggcgctgctatggcgggtaaacgaatgtgggattttgaacatgaccataggcggacttacgccaaaaggggaagatgctgtcaatgatttgacttatctgatcatggaagctgtccgggaattgaaattgaaatgccctaacctgtgcctgcgggtaaaccgttttaccggccccgaattatggaaggaaaccggcgaatgtctggcggtgggtcaggcattaccggctttgtacaatgacgatgtttttatccccatgcttatgtccgccaaaatttccgaatatgacgccaacaattacactttggccgggtgcagccaggcggttattccgggaaaatccaatttcaactgcgacgtgggactgtacacccctgcgaaaatgctggatttggccctgcataacggtttcgatacccacattcagaaacaggttggcccccaaaccggggatgtttctgcctttcaaacttttgaagaagtgtaccgggcataccgggaacaaatggtttactgcgtggaaaaaggcgccgctntgaacaatcaggatatccgggccagaagaaacttattatcctgtgtccgcacaattttaattcctgaatgtattgaaaaagggattggagtattgcagggcggggcgacttataatggcattcaggcgaggtggtgggtctga

SEQ ID NO: 78214 - protein, 261 aa, Unknown
  Obtained from environmental sample
  misc_feature (1)..(261): Xaa is any amino acid
MMFADYDSFARYDQYMYPFYENDKSISREEAKNIFRALLWRVNECGILNMTIGGLTPKGEDAVNDLTYLIMEAVRELKLKCPNLCLRVNRFTGPELWKETGECLAVGQALPALYNDDVFIPMLMSAKISEYDANNYTLAGCSQAVIPGKSNFNCDVGLYTPAKMLDLALHNGFDTHIQKQVGPQTGDVSAFQTFEEVYRAYREQMVYCVEKGAAXNNQDIRARRNLLSCVRTILIPECIEKGIGVLQGGATYNGIQARWWV

SEQ ID NO: 78215 - DNA, 822 bp, Unknown
  Obtained from environmental sample
  misc_feature (1)..(822): n is a, c, g, or t
ttggaattcaccgtttacccctctggtgacaacggcaacgtcattcaggttttcgccgctttcacctccacccccaccagggtgaccctgcggaaaggcctgccctcgctacaaggaatgttgaccaaggacgtcagttaccaggtgagcctgccggacgacctgggccgcaagctgatgttcaccggccggggccgctacctgtccccggaaaagccgcttttggtcaagctggccgggcggaatgtcgatgccgtccgcctccaggcctggcgcattcatgaaaacaacctgccgaccctcatcaatgtccaggattacggcgcttcaacccgagcccggctggccatgcagtttaataaaaacatcttgaaccgtaccacgccggttcaagccgctttcggcgaggttttcgaacggctggtggatttgaaagaggttttggacgaggagcctcacggggcctacctcctgaaaatatcgccggtaaagaaaaacgaaagtcgggaaggcgcggccggggaagccgatgctgaagacgacgagtactacagctattccgactactcttaccgcaccgaacgctatctgccggtgatgatcagcgacctcgggctggcggcccatgtctcgcccggacggatgaccttatgggccaacagcttaagccgagccaaaccggtggagggcggcacggtgaaactctatgatgaagccaaccaagtcgtcgcccaaggccaaaccgaccgggacggccttttcagcgccgaccttgacgtgtcccaggcggttttcgccaccgttgaaaaaaaacgcgactga

SEQ ID NO: 78216 - protein, 273 aa, Unknown
  Obtained from environmental sample
  misc_feature (1)..(273): Xaa is any amino acid
MEFTVYPSGDNGNVIQVFAAFTSTPTRVTLRKGLPSLQGMLTKDVSYQVSLPDDLGRKLMFTGRGRYLSPEKPLLVKLAGRNVDAVRLQAWRIHENNLPTLINVQDYGASTRARLAMQFNKNILNRTTPVQAAFGEVFERLVDLKEVLDEEPHGAYLLKISPVKKNESREGAAGEADAEDDEYYSYSDYSYRTERYLPVMISDLGLAAHVSPGRMTLWANSLSRAKPVEGGTVKLYDEANQVVAQGQTDRDGLFSADLDVSQAVFATVEKKRD

SEQ ID NO: 78217 - DNA, 663 bp, Unknown
  Obtained from environmental sample
  misc_feature (1)..(663): n is a, c, g, or t
gtgcgtttaacaatgcaggttacggatccaaataatagtaataaaccaaacgacggaaactcattagtaggaactgatcctaatcaatattacgcgcgtaccctgcctacaactaccaattctttagacccaaacggcgattatcagtttaccctgacggctgcgaagcacattgtcatagacacgggcgctcctaccataaccggaattacgtctaacactccggcgggtgattatgacgccggcagtgacattacggtaaccgtaaacttcagtaaaccggtaaatttaggcacgccaacgccgtacctgatattgaatatcgccaactctgtaacacaggataacggaagtaacacgaccgtccgtacggttacaacagacggcagtgtaaccgtaaacaataccgccaacacaggttctattacattcaggtacaacataaaacttaatgacactacaagcggatcttctgtcgcgataacaagtttcgggggaattattaacgatcttgcgaacaacgctcttgcgagtaacgctttcaacggcagatcagatacgacgcttacaggaaggtatgttgacgcggttgcgctgacagtcgcacccacggtaaggattcttacagaagcaaatacagctaaagttgtgaaaacaccgtaa

SEQ ID NO: 78218 - protein, 220 aa, Unknown
  Obtained from environmental sample
  misc_feature (1)..(220): Xaa is any amino acid
MRLTMQVTDPNNSNKPNDGNSLVGTDPNQYYARTLPTTTNSLDPNGDYQFTLTAAKHIVIDTGAPTITGITSNTPAGDYDAGSDITVTVNFSKPVNLGTPTPYLILNIANSVTQDNGSNTTVRTVTTDGSVTVNNTANTGSITFRYNIKLNDTTSGSSVAITSFGGIINDLANNALASNAFNGRSDTTLTGRYVDAVALTVAPTVRILTEANTAKVVKTP

SEQ ID NO: 78219 - DNA, 417 bp, Unknown
  Obtained from environmental sample
  misc_feature (1)..(417): n is a, c, g, or t
atgaccctttactttaaaatcaaggccctttccaggcgcaagcccctgattgagcgcacgccttttgtcattgacgagcctctaaccacatcgaatacgctcatcgagtacatagtccggcgtaatgttgacgattacaacaaaaaagccgtagatacgccgcttttcgagtatctcagcgccgatgagcttctgaacggcgcagagacaggcaaaatcggctttaaggacaggaaaaacgagaacccccaggacgcggacaaggcggtggaaaacgcgctgatcagttttaaggacactatattcaagctcttcatcaacgatacggagattggctacgatgagccggttcaccttaaagaaggcgacgaggttacgtttattcgcttgacaatgcttgcgggtcggctttggtag

SEQ ID NO: 78220 - protein, 138 aa, Unknown
  Obtained from environmental sample
  misc_feature (1)..(138): Xaa is any amino acid
MTLYFKIKALSRRKPLIERTPFVIDEPLTTSNTLIEYIVRRNVDDYNKKAVDTPLFEYLSADELLNGAETGKIGFKDRKNENPQDADKAVENALISFKDTIFKLFINDTEIGYDEPVHLKEGDEVTFIRLTMLAGRLW

SEQ ID NO: 78221 - DNA, 369 bp, Unknown
  Obtained from environmental sample
  misc_feature (1)..(369): n is a, c, g, or t
atgcattttgataactggcgcaagctcacctgggtcaacccaaattatattgagttgatacgggatcgcgttatcgagcgcaaccccatgtatcccaaggatatcccgtattatcggtttaattcctttgtggtctatcgtgagatggaacagattggcggcgatttcgtcttctatatcaaaaatctgactatgacccacgatctccacaccgcttcgatggttgataaggatattgacgacgaggcggtatggaagatcattcagcagcgcactcttgaaagcatggatcgcgaacacagggtattaggcgaaaaatcctatgacttcggcatacagcaaaaacttatgaaggatgagcagaattga

SEQ ID NO: 78222 - protein, 122 aa, Unknown
  Obtained from environmental sample
  misc_feature (1)..(122): Xaa is any amino acid
MHFDNWRKLTWVNPNYIELIRDRVIERNPMYPKDIPYYRFNSFVVYREMEQIGGDFVFYIKNLTMTHDLHTASMVDKDIDDEAVWKIIQQRTLESMDREHRVLGEKSYDFGIQQKLMKDEQN

SEQ ID NO: 78223 - DNA, 348 bp, Unknown
  Obtained from environmental sample
  misc_feature (1)..(348): n is a, c, g, or t
atggtcagaatcggccgaggcggttcgctcactatcttggctacagcgcttactgataccggctcgaagatggacgaagtaattttcgaagaatttaaaggtacgggtaacatggagttgcaacttgaccgtaaactgtcgaacaagcgcgtgttcccggctgtagatgttacggctagcggtacgcggcgcgaagatttgttgattgacaaattaaccctgagcaaaatttggatactccgcaaatatctctccgatatgaactcggtagaagccatggaattcctgcgcgaccgcatggaacatacgcaaagcaatgaggagtttttagtttcgatgaacggctga

SEQ ID NO: 78224 - protein, 115 aa, Unknown
  Obtained from environmental sample
  SIGNAL (1)...(18)
  misc_feature (1)..(115): Xaa is any amino acid
MVRIGRGGSLTILATALTDTGSKMDEVIFEEFKGTGNMELQLDRKLSNKRVFPAVDVTASGTRREDLLIDKLTLSKIWILRKYLSDMNSVEAMEFLRDRMEHTQSNEEFLVSMNG

SEQ ID NO: 78225 - DNA, 543 bp, Unknown
  Obtained from environmental sample
  misc_feature (1)..(543): n is a, c, g, or t
gtgaaggcacagaacgggcagttgattatctcgggcaagcgtggacacgccgaagtgctgggccttgtagggcaagtgggtggcgatgcgctggtcattgaacacgaagcgcaattagaggcggttgacttcgcgcaccccgtttggctgtttgcccaaacaaccaagaaccccgacgaatttcgccgtctgtgcgacactatgaaatcccgcatgaaactgggcgtttcgtttgaggcttacaataccatctgcggacaagtatcggggcgacagccgcaccttgagaagtttgctcaccagcacgatacggttattttcgtgagcggccgcaaaagctcgaacggtaaagtattgttcgatgcctgcaaagcggccaatccgcacagctatttggtagaaggccccgaagaattgcaggctgcgtggtttgcaggctgtcgctccgtaggtatctgcggcgccacctccacccccacctggctgatggagcaagtggcggaagctattcgcaaaatagttggtaatagcgcgaaggtgtga

SEQ ID NO: 78226 - protein, 180 aa, Unknown
  Obtained from environmental sample
  DOMAIN (1)...(173): LytB protein
  misc_feature (1)..(180): Xaa is any amino acid
MKAQNGQLIISGKRGHAEVLGLVGQVGGDALVIEHEAQLEAVDFAHPVWLFAQTTKNPDEFRRLCDTMKSRMKLGVSFEAYNTICGQVSGRQPHLEKFAHQHDTVIFVSGRKSSNGKVLFDACKAANPHSYLVEGPEELQAAWFAGCRSVGICGATSTPTWLMEQVAEAIRKIVGNSAKV

SEQ ID NO: 78227 - DNA, 750 bp, Unknown
  Obtained from environmental sample
  misc_feature (1)..(750): n is a, c, g, or t
atgtcgaatattgtaaagcccgctttcatatacgaagccgttactgttacgcacaaaaaaggcgggctcgtttttaccgcttccggaaggaaaattcttcagcaggggtggaaagaacaacggcaggaagatgaggaagaagacaaagaaccggaggaaacccaggatatcccggaacttgccaatggagacgcccttgttttgagcaatccccgcgtcacttcccacgagcgaaagccccccaagtcctttaccgaagcgacgatacttacggcaatgaaaaaacacgggcttggaaccccggcaaccagggattcaataattgaaagcctggtcgccaacgaatactgcttccggaagggaaagaattttctcccggcagaaaaagcgttttttttcattgattccatccccggggaactggaactgtaccgtaatgtcgaaacgacggccgcgtgggaatccatgctggaaaaccagccggagaatttttttaccggcattaaggcgtctacttccgatacgctcaacaatgtcaaatcccgcagtttttccgtttttcaaaacactgtcggcgcgtgcccgttatgcggcggcgccattgttaagggaaagttcaactatttttgttccaaatatcaagagacggcgtgcgcgttctccatcggtaaaaccatctgtgaagcgcagatcttcgaagctgatgttaaatcactgcttgcggggaagaagacgggaatcaaaacatga

SEQ ID NO: 78228 - protein, 249 aa, Unknown
  Obtained from environmental sample
  misc_feature (1)..(249): Xaa is any amino acid
MSNIVKPAFIYEAVTVTHKKGGLVFTASGRKILQQGWKEQRQEDEEEDKEPEETQDIPELANGDALVLSNPRVTSHERKPPKSFTEATILTAMKKHGLGTPATRDSIIESLVANEYCFRKGKNFLPAEKAFFFIDSIPGELELYRNVETTAAWESMLENQPENFFTGIKASTSDTLNNVKSRSFSVFQNTVGACPLCGGAIVKGKFNYFCSKYQETACAFSIGKTICEAQIFEADVKSLLAGKKTGIKT

SEQ ID NO: 78229 - DNA, 942 bp, Unknown
  Obtained from environmental sample
  misc_feature (1)..(942): n is a, c, g, or t
atgggcagggatttcgtcatttttgacccatcagaccaaaaaagcctgatcaaacaggtgctgacagaactgaagctgcccgaaaaacagtttcacccccgcagggtgttggaattcatcagctattacaaaaaccgctgccagcttcctgacgaggcgctggaagatgctgtggacgcttggtcaaaaaaggccatagaggcttacgcgctttaccaaaagggccttgaggcccaccgcgcctgcgactttgacgacctgctgctttacaccgagaggttgctgaggggcgacgagctgcgggaagcatatggaaagaggttcccctttgtaatggtggacgaataccaagacacgaaccgcgcccagtaccttttaatcaagcatcttgcgaagggccaccaaaacatctgcgttgttggcgatgaggaccagtccatctatgggtggcgcggggctgacatcaacaacatcctcgacttcaaaaaagactttccaggggcgcgacagatcaagttggagcaaaactatagatccacgcaaaaaatattggacgcagcgtccaatgtgatagccaacaacacccagcgcatcggcaaaactctgtggacagatttgggcgacggcgaacacatagtgttcaaattgctggacgagggccgtattgaagctgagtgggcggcaagccagataaaaatggacttggccactttcccaaatgctaggatagcggttctgtacagggccaactggcagtcgcgccaaatggaggaagcgctgcgagcgctcaacatcccatacaaattagtgggcggcgtcaagttttacgagcgcgaggaagtaaaggacaccctggcgtacctcaggctgatctcaaacccgtttgacttggtcagctttaggcgggctatcaacaagccaagggcggggcgtgggggatag

SEQ ID NO: 78230 - protein, 313 aa, Unknown
  Obtained from environmental sample
  DOMAIN (1)...(312): UvrD/REP helicase
  misc_feature (1)..(313): Xaa is any amino acid
MGRDFVIFDPSDQKSLIKQVLTELKLPEKQFHPRRVLEFISYYKNRCQLPDEALEDAVDAWSKKAIEAYALYQKGLEAHRACDFDDLLLYTERLLRGDELREAYGKRFPFVMVDEYQDTNRAQYLLIKHLAKGHQNICVVGDEDQSIYGWRGADINNILDFKKDFPGARQIKLEQNYRSTQKILDAASNVIANNTQRIGKTLWTDLGDGEHIVFKLLDEGRIEAEWAASQIKMDLATFPNARIAVLYRANWQSRQMEEALRALNIPYKLVGGVKFYEREEVKDTLAYLRLISNPFDLVSFRRAINKPRAGRGG

SEQ ID NO: 78231 - DNA, 462 bp, Unknown
  Obtained from environmental sample
  misc_feature (1)..(462): n is a, c, g, or t
gtgggaaaatcttcctttttctcacaacagcacagccggaagcgccgtcccgaattccgcccctggagcatgatgaacaaaattgttcttatcctttttgcagcgttgattttttttccggaatcagcgcgcgcgcaaatgagcgaagacgcgaagatcgaacagcttctcgttgcggtcaaacaaacgccggaggacgccaggtttctgcggaacggcaacgagtacggccgtgagcaggccgctgaacatttgcggagaaaatatcagcacgggaaaagatatgccgggacagccagactttttatagaaaatatcgcgtcaaagtcttcagtcacgggtgctgaataccgcatcaggtttgttgacggcacgaccatgacgacgcgcgagtttttcacggaagaactgaagaaaatcgaaaaaagagatgaagcgccggaatcttcccaacttccatag

SEQ ID NO: 78232 - protein, 153 aa, Unknown
  Obtained from environmental sample
  misc_feature (1)..(153): Xaa is any amino acid
MGKSSFFSQQHSRKRRPEFRPWSMMNKIVLILFAALIFFPESARAQMSEDAKIEQLLVAVKQTPEDARFLRNGNEYGREQAAEHLRRKYQHGKRYAGTARLFIENIASKSSVTGAEYRIRFVDGTTMTTREFFTEELKKIEKRDEAPESSQLP

SEQ ID NO: 78233 - DNA, 735 bp, Unknown
  Obtained from environmental sample
  misc_feature (1)..(735): n is a, c, g, or t
gtggggggaggcgttcgcatggaaaagctgcaaacgcggctgcaaaatgcggactgggtatggcttacgcactgtgagacctctaccggagccgtaaatcttgatgaacggcttgtcgcgtattgcaaagcgcgaaatatcaaagtgtgcctggacagcgtgagcgctttcggcaatcaggaagtggatttctccgacatttacctggcaagcgccgcttcgggcaagggactaagctcttttgccgggattgccctggttttttacaaccacgaaccacagcgcgccaaaaatgggcatgattacctcgacctcgcagtgtaccacgaagcggcaagcgtcccgtttaccttttcctcgaacttgctgaacgcgttgtacgcggcgttgcgcgccacagactataaaaagcgctttctgcaaaatgcgcggcatgcgtcacggataacagccttgctcgccgcaaacgcgctgcatactccgttaaatgcgcggcaagctgattatatatggactatcgcgcttccccccaacatatcttccttcgagtttggaacaggactggaaaagaacggcgtggttgttcattacaacagcaggtatttacaggaaaaaaactggatacagcttgccttgatgggcgcatgcggcgcaagaacagtctctgccggtctgaacattttcgagcgcgaactgaaagcggctttatcgggcggcaagcaatcatcggcctga

SEQ ID NO: 78234 - protein, 244 aa, Unknown
  Obtained from environmental sample
  misc_feature (1)..(244): Xaa is any amino acid
MGGGVRMEKLQTRLQNADWVWLTHCETSTGAVNLDERLVAYCKARNIKVCLDSVSAFGNQEVDFSDIYLASAASGKGLSSFAGIALVFYNHEPQRAKNGHDYLDLAVYHEAASVPFTFSSNLLNALYAALRATDYKKRFLQNARHASRITALLAANALHTPLNARQADYIWTIALPPNISSFEFGTGLEKNGVVVHYNSRYLQEKNWIQLALMGACGARTVSAGLNIFERELKAALSGGKQSSA

SEQ ID NO: 78235 - DNA, 585 bp, Unknown
  Obtained from environmental sample
  misc_feature (1)..(585): n is a, c, g, or t
ttgccaagaactgatggtattgtaaaaaaagcaaaattaagatatgacattggaaacccgccaggaaaagataaatcttatggtgatgcgataaattgggagtctttattggaaaatatacctataggggaagatttattttttattagttctgataaagattataaatcagcgttagagtctactcggtttaatcaatatttatttgatgagtggaaagatactaaaaactcaaatctattttactataacagtttaactgaatattttaaatcgcatttgaaacatattgaattagaaacggaagcgcaaaagaatgaactaatagaacaattaagcaagtgtgatgcatttcgtgcaacacacaatattatagcaaaattatcggctttttcaacgtatagtgacgaacagataactcaattattattggccgctgatatgaatgatcaagtatggcaaataataaaggatccagatattgaatcattttatgatactttattaaaagatactattgaccgattttctaagaatgcagaattaaattggattttaaacaggttaggatatagtactgagtga

SEQ ID NO: 78236 - protein, 194 aa, Unknown
  Obtained from environmental sample
  misc_feature (1)..(194): Xaa is any amino acid
MPRTDGIVKKAKLRYDIGNPPGKDKSYGDAINWESLLENIPIGEDLFFISSDKDYKSALESTRFNQYLFDEWKDTKNSNLFYYNSLTEYFKSHLKHIELETEAQKNELIEQLSKCDAFRATHNIIAKLSAFSTYSDEQITQLLLAADMNDQVWQIIKDPDIESFYDTLLKDTIDRFSKNAELNWILNRLGYSTE

SEQ ID NO: 78237 - DNA, 540 bp, Unknown
  Obtained from environmental sample
  misc_feature (1)..(540): n is a, c, g, or t
gtggacgcagcgtcattcgcgctcccggatgcacccgcctttcggaatgattcgttcaggaagcggcgcgtgaaaatctgggtggcgggtttcggcaacgaaaacagggaggacgacgcggcgggtgcgattctcgcgggccgaatccacggttttttgacccgcgtgtccgacgcggaagtcgttttgtgcctggagcaccaattgctccctgagctggcagaagaactggacgtggaccttgcggtcttctgcgatgcggacgccgcgctccacgaaagcggtttttcgatccgcgaggttctgccgaacccaaaactggcgggtttcaatatccactcgatggggccagagtggcttctggccctggcggaacgattgggaacgttcccccaaaaggccctgcttatcacggtatcgggggagcgtttcgatttttcagaggtccctacgcccgtctgcctggagcgcctcgacagggcggaaaaagcgttcgaagagtactggagccgttggctctattcgaacagggcaggataa

SEQ ID NO: 78238 - protein, 179 aa, Unknown
  Obtained from environmental sample
  misc_feature (1)..(179): Xaa is any amino acid
MDAASFALPDAPAFRNDSFRKRRVKIWVAGFGNENREDDAAGAILAGRIHGFLTRVSDAEVVLCLEHQLLPELAEELDVDLAVFCDADAALHESGFSIREVLPNPKLAGFNIHSMGPEWLLALAERLGTFPQKALLITVSGERFDFSEVPTPVCLERLDRAEKAFEEYWSRWLYSNRAG

SEQ ID NO: 78239 - DNA, 471 bp, Unknown
  Obtained from environmental sample
  misc_feature (1)..(471): n is a, c, g, or t
atgcccatatatttctggattatgctggttctggttattctggttacaatcgttataaagaaaacggttttcggccgccgcctccttatgaccggcgacaacagtgaagtggcccagttggccggcattaatgtaaaccacatgcgctttatagcctatataatctgcgccgtatttgccggcatagcgggtatgctggtaacgctgagtttgggcctgggactgccggagaacggggacggctgggaattcagggcgattgccgggacggtggtcgggggaacaagccttatgggaggcaagagttcccctattgggacttttttaggcgtttccctaatgtttatcgcggaaaacgcctttgtctttctcggccttcccggaaccatgcggatcggagtacagggttttttaatggccttggccgtacttgttgatctccgtcgccagcgccgtaaaataccggcataa

SEQ ID NO: 78240 - protein, 156 aa, Unknown
  Obtained from environmental sample
  misc_feature (1)..(156): Xaa is any amino acid
MPIYFWIMLVLVILVTIVIKKTVFGRRLLMTGDNSEVAQLAGINVNHMRFIAYIICAVFAGIAGMLVTLSLGLGLPENGDGWEFRAIAGTVVGGTSLMGGKSSPIGTFLGVSLMFIAENAFVFLGLPGTMRIGVQGFLMALAVLVDLRRQRRKIPA

SEQ ID NO: 78241 - DNA, 741 bp, Unknown
  Obtained from environmental sample
  misc_feature (1)..(741): n is a, c, g, or t
atgaaactatataagttgcagccgttttttttggattatctttggggcggcaccaatctcataaaaaactggggtaaaaaacctccgtccctgaaactggctgaaagctgggagctttgcatacatccaaccggggagagccgggttgcggacggcgcggacgagggtaagctcctttcccaggtactgacaaaagcagagtggggggataactgcgtaaattttcccatcttccctttgatggtaagattaattgacacagaacaaaacgtttccattcatgtgcaccccggcaacacctacgcccaggcaaaaggtgaaccctggggtaaaacggaaatgtggtacattctggaagctaaaccggaggcgggcatttactgcggttttaaggaacctattaccagtgaagaatatgtccggcgaattcatgacggtaccattatcgaagttttacgttttaccgaagtcgaaccggggcaggcaatcaagatcgagccgggtaccgttcacaccgtctgcgcgggattacttctgatggagataaaccagaacagcaatataacctacagggtgtttgatttcggacgtaaagataaggacggcaactcaaggccgcttcaccttgaggatgccgcggcggtatccaacttaacgccatataagggcaaaaacccccggctgtctatggggccgggcaaaactcttttgtgtgcaagcgcgttggttttcggtgtatga

SEQ ID NO: 78242 - protein, 246 aa, Unknown
  Obtained from environmental sample
  DOMAIN (3)...(246): Phosphomannose isomerase type I
  misc_feature (1)..(246): Xaa is any amino acid
MKLYKLQPFFLDYLWGGTNLIKNWGKKPPSLKLAESWELCIHPTGESRVADGADEGKLLSQVLTKAEWGDNCVNFPIFPLMVRLIDTEQNVSIHVHPGNTYAQAKGEPWGKTEMWYILEAKPEAGIYCGFKEPITSEEYVRRIHDGTIIEVLRFTEVEPGQAIKIEPGTVHTVCAGLLLMEINQNSNITYRVFDFGRKDKDGNSRPLHLEDAAAVSNLTPYKGKNPRLSMGPGKTLLCASALVFGV

SEQ ID NO: 78243 - DNA, 633 bp, Unknown
  Obtained from environmental sample
  misc_feature (1)..(633): n is a, c, g, or t
gtgacaaataatgttacaatgaaggctgttgaagcatacactgatagtatacattatcttgataaagcagaacattatctttataatcctatgacaaatgtttattttgacagaggaagatcgtatactgctctgggaaagattcattcaaatagcgattcagaaaaatcaaatgaatattatctaaaagcaataattgatttcaatcattcattatacgaccatccttatcccgagaatgtttattttgcagttgcaaatatacatcgaataatgaaagattatcaaaaggcaatagcatgttatacagatgctttaaaaacagcaaatgatcaatacaagccgacaaaaagagatgttttcattgagcgttcaaatacaaattatgaattcggtttggtcaatttcaatagcaaaaattataaagaagctatacaaaattataaagatgctattgaagataatttcgaaaacggtaacgctcactatgaacttggaaagactctttgctatttgaaaatgtggaaagaagcggtacatcaatttgatttaatattggaacatagtttccgaaatattgatctaaagatagtaaataacagccgtgagtttgctgtcagtatgattgaataa

SEQ ID NO: 78244 - protein, 210 aa, Unknown
  Obtained from environmental sample
  DOMAIN (79)...(112): Tetratricopeptide repeat
  misc_feature (1)..(210): Xaa is any amino acid
MTNNVTMKAVEAYTDSIHYLDKAEHYLYNPMTNVYFDRGRSYTALGKIHSNSDSEKSNEYYLKAIIDFNHSLYDHPYPENVYFAVANIHRIMKDYQKAIACYTDALKTANDQYKPTKRDVFIERSNTNYEFGLVNFNSKNYKEAIQNYKDAIEDNFENGNAHYELGKTLCYLKMWKEAVHQFDLILEHSFRNIDLKIVNNSREFAVSMIE

SEQ ID NO: 78245 - DNA, 789 bp, Unknown
  Obtained from environmental sample
  misc_feature (1)..(789): n is a, c, g, or t
gtgacgcatatcgaccacggcatcggacgtttcggggggcttgaaaaaacagaggttggcgggcatcaacaggaaaccattcggttggtttacaaagataatgatgtgctatttatcagcattcacgcgttgcataaaatttcgcgctacagcggaaaagagggcgcagagccaacgttgacacgcttgggttcaaacacatggaacgctctcaaacataaagccaaacagcgcgtcaaagacattgccaaagatttaatcaaactctatgcacagcgaaaagcctcacagggctttgcattcagtgctgattcgtttttgcaaaatgaattggaagcctcgtttttctatgaagatacgcccgaccaactgaaagccacgcaagacgtgaaaaacgatatggaatccgtatcgccaatggatcggctgatttgtggcgatgtgggtttcggcaaaacggaagtcgccattcgcgctgcattcaaagccgtttcggatggcaaacaagtggcggttctcgtaccaaccacaatcttagcctttcaacatttcaaaacctttaccgaacgcttgaaaaatatgccgtgcaaagtggagtatatttcacggtttcgctcagcaaaagacaaaacgcgcattttaaaagacctgaaaaacggccaagttgatattcttatcggcacacaccgcctcaccggacaagacgttcagttcaaggatttgggcttgttgattatcgacgaagaacaaaaattcggcgtagccatgaaagaaaaattgaaagcgtaa

SEQ ID NO: 78246 - protein, 262 aa, Unknown
  Obtained from environmental sample
  DOMAIN (120)...(262): DEAD/DEAH box helicase
  misc_feature (1)..(262): Xaa is any amino acid
MTHIDHGIGRFGGLEKTEVGGHQQETIRLVYKDNDVLFISIHALHKISRYSGKEGAEPTLTRLGSNTWNALKHKAKQRVKDIAKDLIKLYAQRKASQGFAFSADSFLQNELEASFFYEDTPDQLKATQDVKNDMESVSPMDRLICGDVGFGKTEVAIRAAFKAVSDGKQVAVLVPTTILAFQHFKTFTERLKNMPCKVEYISRFRSAKDKTRILKDLKNGQVDILIGTHRLTGQDVQFKDLGLLIIDEEQKFGVAMKEKLKA

SEQ ID NO: 78247 - DNA, 399 bp, Unknown
  Obtained from environmental sample
  misc_feature (1)..(399): n is a, c, g, or t
atgaaggcccaaacctgggaagcccttctgtttgccgcaaagtataaactcaagggcctcgtgcttatggtggattataacaaagtgcagcttgacggcccttcccaggagatcctccccctggagcctctggcggggaaattcgcgtcctttggctggcatttggcgccaaaagcctttaatggtcatgatccaaaggagattttcgattcttttgaatggcttgacagggacgatcactggcccaaggtaattgtctaccgatccgtgaaaggcaaaggggtctcttttatggaggggaagagcgcctggcacggggctcctattgatgaggaaagctatgccaagggccgtccggaattaatcgcggatcttgaaaaaaaggaggcggtgctatga

SEQ ID NO: 78248 - protein, 132 aa, Unknown
  Obtained from environmental sample
  misc_feature (1)..(132): Xaa is any amino acid
MKAQTWEALLFAAKYKLKGLVLMVDYNKVQLDGPSQEILPLEPLAGKFASFGWHLAPKAFNGHDPKEIFDSFEWLDRDDHWPKVIVYRSVKGKGVSFMEGKSAWHGAPIDEESYAKGRPELIADLEKKEAVL

SEQ ID NO: 78249 - DNA, 498 bp, Unknown
  Obtained from environmental sample
  misc_feature (1)..(498): n is a, c, g, or t
gtgctgccggaggcgcgcatggtgctgccctcggaaggcggacacggagaattccccttccgcaaggaggaggaggactttgcaaaactgctgcgcgacacgttgggcgaagtcgttatggaaacggcggtgagcggcgaggggctgcgccgtctcttcgccttccattgcagcgaagacctgtcgccggcggaggtatgctcccgcctgaatccgccccgcacggccgccgaacaggcaacgctcacctggttcgcgcgtttttacggccgggtatgccgcaatttcgtgctcgacacgctggccttgggcggcctgtatatcaccggcgggatggcaacgcgggtgccggttctggaagaaccggccttcatggaatcgttccgggacagcgcggccatgggcgggctgctgcgggatgtgccggtcttccatatccgcagtccgcaggcgggcctgtggggcgcagccgcctgcggggtgatgcggccggcgtag

SEQ ID NO: 78250 - protein, 165 aa, Unknown
  Obtained from environmental sample
  DOMAIN (1)...(164): Glucokinase
  misc_feature (1)..(165): Xaa is any amino acid
MLPEARMVLPSEGGHGEFPFRKEEEDFAKLLRDTLGEVVMETAVSGEGLRRLFAFHCSEDLSPAEVCSRLNPPRTAAEQATLTWFARFYGRVCRNFVLDTLALGGLYITGGMATRVPVLEEPAFMESFRDSAAMGGLLRDVPVFHIRSPQAGLWGAAACGVMRPA

SEQ ID NO: 78251 - DNA, 447 bp, Unknown
  Obtained from environmental sample
  misc_feature (1)..(447): n is a, c, g, or t
atggcagttggagcactggcggctcatcgacccccacctgggcgatattgtccgcgaggcggcctctttcgagcgacggaacgtcaagacggaccggcccctaatcgtctatcccttaagccccctggtggccgacccctggggcctgtgggcggccgaactggccgacgagtcgagcaaaaaaccgccgaaccccgccatcctgacccgcaccaccaccggccggcctctgccgccgtggtcggaaaaagacgccgaactcatcctgggccgctcggtggccccctttcaccgggaaatcaccgagacggcccaccggctcttggacgagacccccctggtgctggttatcaccctgcgctcttttcggctccatgcccctgccctttgaaaaatgccgcaagtatccccggccccaggccgccatcggctcccggaacggcctga

SEQ ID NO: 78252 - protein, 148 aa, Unknown
  Obtained from environmental sample
  misc_feature (1)..(148): Xaa is any amino acid
MAVGALAAHRPPPGRYCPRGGLFRATERQDGPAPNRLSLKPPGGRPLGPVGGRTGRRVEQKTAEPRHPDPHHHRPASAAVVGKRRRTHPGPLGGPLSPGNHRDGPPALGRDPPGAGYHPALFSAPCPCPLKNAASIPGPRPPSAPGTA

SEQ ID NO: 78253 - DNA, 498 bp, Unknown
  Obtained from environmental sample
  misc_feature (1)..(498): n is a, c, g, or t
atggaagggttatttttaatatttttagtgatagcttgttatgtaagccagatggcgcttcagattaatttcgggataaaagcgggagcaaatttgaaccagtttaaacttaaaactgataatccgaattttaagtcggaggaatacaaacctggatttcatgtgggtccgacgttagagataaaaattcctgtcattggtattggcatacaaggtgacgtgctttacaaattaagtaataatgccagtccaattcctaacgttgaatctgaaacataccataatgttgatgtacatctcaatgctcaatacggattagatcttgttgttgttcgtccttttgtgatggcaggcccatattgggtatatgcccttagtgcaaaagaaaaaagcgccattaaatcgaacatttttggtattggagtcggtcttggtattgatatacttgggaaagcacagctttctgcacggtatcaatttggattgaatgatctttaa

SEQ ID NO: 78254 - protein, 165 aa, Unknown
  Obtained from environmental sample
  misc_feature (1)..(165): Xaa is any amino acid
MEGLFLIFLVIACYVSQMALQINFGIKAGANLNQFKLKTDNPNFKSEEYKPGFHVGPTLEIKIPVIGIGIQGDVLYKLSNNASPIPNVESETYHNVDVHLNAQYGLDLVVVRPFVMAGPYWVYALSAKEKSAIKSNIFGIGVGLGIDILGKAQLSARYQFGLNDL

SEQ ID NO: 78255 - DNA, 453 bp, Unknown
  Obtained from environmental sample
  misc_feature (1)..(453): n is a, c, g, or t
ttgctgttttgcccgttcgctccnntggtttgggtggcgggttgcgggctttgggntttttcccggttcnnnnngcttttttgccttgcncctgttttncgnttcctttctcgcnnnnngggnntgcggggnntttttggnngggcgttttgnttttttcnccctttcnnngntnccnnctcggnnntttngggnntttccgntgngccgcttntttggcgttnttttgtggcncccctgcncnccnnncttgtgggtngccngttngntgnncgcgnntttncccgcntntgcgtntttcgcntnnntncccnnntnnntggtgcctntgtgttttccngcggctnccccccccccgtcttcnnngcggttggctttccngnngntgtgggtcgttttgggggcttgttgtctccccctcaatggtgtttcncggcgcncgggcgtttataa

SEQ ID NO: 78256 - protein, 150 aa, Unknown
  Obtained from environmental sample
  misc_feature (1)..(150): Xaa is any amino acid
MLFCPFAPXVWVAGCGLWXFSRFXXLFCLAPVXRFLSRXXGXRGXFGXAFXFFXPFXXXXSXXXGXSXXPLXWRXFVAPLXXXLVGXXXXXRXFXRXCVFRXXXXXXGAXVFSXGXPPPVFXAVGFPXXVGRFGGLLSPPQWCFXAXGRL

SEQ ID NO: 78257 - DNA, 345 bp, Unknown
  Obtained from environmental sample
  misc_feature (1)..(345): n is a, c, g, or t
atgaactgcagtgcaggtcagttgcttgccagtaccgcctcccggcgtctggtcacgcagaccgcccggacaggctccatcggagtcatgatggctcacagtaattacggtgctgcgctggagaaacagggtgtggaaatcacactgatttacagcggcagccataaggtggatggcaaccccttcagccatcttccggaagaaaaaaaaaaagactctgcagtcccggatggacgcaacccgccagatgtttgcgcagaaggtgtcggcatataccgtccaaaaaaaatgcagagttgtgctggataccgaggctgcagtgtacagcggtcaggaggccattga

SEQ ID NO: 78258 - protein, 114 aa, Unknown
  Obtained from environmental sample
  DOMAIN (1)...(104): Peptidase family S49
  misc_feature (1)..(114): Xaa is any amino acid
MNCSAGQLLASTASRRLVTQTARTGSIGVMMAHSNYGAALEKQGVEITLIYSGSHKVDGNPFSHLPEEKKKDSAVPDGRNPPDVCAEGVGIYRPKKMQSCAGYRGCSVQRSGGH

SEQ ID NO: 78259 - DNA, 672 bp, Unknown
  Obtained from environmental sample
  misc_feature (1)..(672): n is a, c, g, or t
ttgaatataggctataacacgtttactgaagcatactgccgctggattcccgctgaaaacggggatctccagctatcgctaaaagagaaatccaattacgactgtattttctgggcaaaggagccgattgaaggatgcacggtttatgacaagaggcctcttcaatgccgttcttttcccttttggccttcgatagtgaatagcaaaaataactgggaaatggccgcacgagactgtcctggtataggcaagggaaagctccattctcgggattcagttgatnnntggctggctgccngngnnnnngnnccgntnnttttcnggttgtttctctccaagagggtncngggngtncnttgntgcnnntcaagaaaaaagggggtgcgtggttctttgccttcgcctcagttgccttcccaaattagaagcaaaatttcggctattttaaaaaggctcncgcctggngcccttgnnngtccggnnngccgcgngcgttttcttgccgggcttcctccctggctttttggntctgtgggnggcnnttctccctgcgcctcggcgcngctcnntngcnccgncgngnttntcctctttgtcgacggggtcgggnntcngggnncttggatcggccnttgcnnnngnnnnncnnnnnccttcnnagtgcccttctag

SEQ ID NO: 78260 - protein, 223 aa, Unknown
  Obtained from environmental sample
  DOMAIN (9)...(84): Uncharacterised protein family (UPF0153)
  misc_feature (1)..(223): Xaa is any amino acid
MNIGYNTFTEAYCRWIPAENGDLQLSLKEKSNYDCIFWAKEPIEGCTVYDKRPLQCRSFPFWPSIVNSKNNWEMAARDCPGIGKGKLHSRDSVDXWLAAXXXXPXXFXLFLSKRVXGVXXCXSRKKGVRGSLPSPQLPSQIRSKISAILKRLXPGALXXPXXRXRFLAGLPPWLFGSVGGXSPCASAXLXXXXXXXLFVDGVGXXGXWIGXCXXXXXXFXVPF

SEQ ID NO: 78261 - DNA, 615 bp, Unknown
  Obtained from environmental sample
  misc_feature (1)..(615): n is a, c, g, or t
atggcggtttccaactttaagttttatcagacagggcatctgatcattactgatgccgatggacatgtcatttctgacaaaaattcagaattggtgcaaaggcgcttcaattacataaaacaggcaaaaacaaacagtgattatataaaattcagcgagatcgtaaagcgcggaattgacggcgaaaatgggattgactacctagacctagacggcaagcgacaaatatgcgcctacaagtctatattcagccccaatgaggactggtttatcgggataatcgcgccactgtctgaaagcgctttgggcggcgtaccaaaaggcttgctgttgctcgcctttataatgtttgctctgagcataatcgccgccttcttcgccgccgccttcctaaagcgcccattcgagcagtttgacacccagacatcagtattgaaggccgtttttgactgttcgcccaattttattttctgcctcgacatggatctcaagtacatcaggatgaacaaaccgatggccgatgtttttaacatatctgaagaggatgcggtcggcaaaaaggattcggaaattctccctctgccctatgaaacattgaccgaaatgaaagaatag

SEQ ID NO: 78262 - protein, 204 aa, Unknown
  Obtained from environmental sample
  misc_feature (1)..(204): Xaa is any amino acid
MAVSNFKFYQTGHLIITDADGHVISDKNSELVQRRFNYIKQAKTNSDYIKFSEIVKRGIDGENGIDYLDLDGKRQICAYKSIFSPNEDWFIGIIAPLSESALGGVPKGLLLLAFIMFALSIIAAFFAAAFLKRPFEQFDTQTSVLKAVFDCSPNFIFCLDMDLKYIRMNKPMADVFNISEEDAVGKKDSEILPLPYETLTEMKE

SEQ ID NO: 78263 - DNA, 468 bp, Unknown
  Obtained from environmental sample
  misc_feature (1)..(468): n is a, c, g, or t
ttgctcaggttttattttcttacatatcagccaaaaattgtgcaatatcgggtacaaaataatatttctgcaataaaaaaaatatatataaatagtatccttattcttttttgtgtatttattgtcggagggtcggtaatgttgatatttggtaattggggtatgaattttataggtagtaaaacgcctttattaccgaatatgtgtattgtaattactattttatttgcatttttagaagctaatcatggaatcgcaggtaatattctattgacaaaaaatcatgtaccattttttaaggcggcattggtttctggcttaatgacaataatttttctttttttatttttaaaattcttaaatattggagtatggtcgctgatactggcaggcggtatagcccagattatttatcaaaattggaaatggccgttagaagtaataaaagaaatgaaaactgagtcatag

SEQ ID NO: 78264 - protein, 155 aa, Unknown
  Obtained from environmental sample
  misc_feature (1)..(155): Xaa is any amino acid
MLRFYFLTYQPKIVQYRVQNNISAIKKIYINSILILFCVFIVGGSVMLIFGNWGMNFIGSKTPLLPNMCIVITILFAFLEANHGIAGNILLTKNHVPFFKAALVSGLMTIIFLFLFLKFLNIGVWSLILAGGIAQIIYQNWKWPLEVIKEMKTES

SEQ ID NO: 78265 - DNA, 327 bp, Unknown
  Obtained from environmental sample
  misc_feature (1)..(327): n is a, c, g, or t
gtgacatctatcggatggtccgctttttccggctgcagcggattgatttcagtcacaattccaaattcggtaacgtgtattgatgattacgcttttgcgtattgcagcgaattagtcaaaatatttaatcaagcaagcggacctcagacgataactgactgcgtattccataatttaaaccagactaactatatcctatatgtacctgtgagttcggtaatattctaccgcaatgccaatgtgtggaaagagatttataaatattgtgtcaataacgcctgctccggtcatcacaatagatacccctccggcagcaaccgcaaatga

SEQ ID NO: 78266 - protein, 108 aa, Unknown
  Obtained from environmental sample
  misc_feature (1)..(108): Xaa is any amino acid
MTSIGWSAFSGCSGLISVTIPNSVTCIDDYAFAYCSELVKIFNQASGPQTITDCVFHNLNQTNYILYVPVSSVIFYRNANVWKEIYKYCVNNACSGHHNRYPSGSNRK

SEQ ID NO: 78267 - DNA, 888 bp, Unknown
  Obtained from environmental sample
  misc_feature (1)..(888): n is a, c, g, or t
gtgagcaaacgactgaaaattaatttttttttgaattatttgattttcttgaattatctttgccgccaaaaaaataatataaaaatggaaacaacaaaaccaaagaaaataccatgcggacaatgtaattttgagaagatacgcaatcagaattacgcttatgtagataaaacacggtttatagaacaattggaaaatgagcctaacagttatcattttctcatccgcccgcgcaaattcgggaaaacactttttctgtcagtactgcgacattattatgatatttgttatgccgataactttgatgctctgtttggggatttgtacataggagaaaatcctactccaaaccggaactcgttttttgtgatgaaattcagtttttcaggacttaatacaaactctaaggaaaaatttgaaatatcatttacagaagcaataaaaagttctattcaaacttttttaaccgagcacaggtttgtaattaaagattataaaaagtttaaaaaagatgcgtggaatattaatgatgttcgccgttctattgaatttgcctttgacattatttcaggtctcggaaaaaaagccttcatcatcatagacgaatacgaccactttgccaacgaccttattgcacaaggtacaaacctgagcgttaaacagtacagagagttaatctgggcaaacggtgttgtacgcgatttttacgaaacattaaaagataactctgaaaccgttattgaaaaaatctttataacagggataactcctataatgcttgacgatgttacaagcgggtttaatatttcaaacaatatttctcttgacgttcgttataacgaaatttttgggatttaccggaaaaaaaaaatggaattccttgattga

SEQ ID NO: 78268 - protein, 295 aa, Unknown
  Obtained from environmental sample
  DOMAIN (29)...(295): Protein of unknown function (DUF1703)
  misc_feature (1)..(295): Xaa is any amino acid
MSKRLKINFFLNYLIFLNYLCRQKNNIKMETTKPKKIPCGQCNFEKIRNQNYAYVDKTRFIEQLENEPNSYHFLIRPRKFGKTLFLSVLRHYYDICYADNFDALFGDLYIGENPTPNRNSFFVMKFSFSGLNTNSKEKFEISFTEAIKSSIQTFLTEHRFVIKDYKKFKKDAWNINDVRRSIEFAFDIISGLGKKAFIIIDEYDHFANDLIAQGTNLSVKQYRELIWANGVVRDFYETLKDNSETVIEKIFITGITPIMLDDVTSGFNISNNISLDVRYNEIFGIYRKKKMEFLD

SEQ ID NO: 78269 - DNA, 480 bp, Unknown
  Obtained from environmental sample
  misc_feature (1)..(480): n is a, c, g, or t
atggctccgaagatcaccggcgttattcccgcgcgctatgcctcgacgcgctttcccggaaagcctctggcgctgatcaaaggtgttcccatggtggcgcgcgtctatcggcgtgcgctcgattcgggaatatttgatacagtgcttgttgccaccgacgatgagcggatatcgtcgctctaccgtgatcacgcgattcccgtttgtatgacgcgcgcggatcacgtaagcggcagcgaccgtgtctgggaggcggcaggcggcggggactgcgttgacgcggatatcatcgtcaacattcagggcgatgagcctcttttggatcctgcggcgctcaggctgcttgccgagccgctgcgcgatcttgacgccggatccgtcgcggtttcgagcgtctacgcgcccctgactgatcccgccgggtattccgacccaaacgtcgtgaagcttgtgatcgcggctgacggcagggcgctttaa

SEQ ID NO: 78270 - protein, 159 aa, Unknown
  Obtained from environmental sample
  DOMAIN (6)...(159): Cytidylyltransferase
  misc_feature (1)..(159): Xaa is any amino acid
MAPKITGVIPARYASTRFPGKPLALIKGVPMVARVYRRALDSGIFDTVLVATDDERISSLYRDHAIPVCMTRADHVSGSDRVWEAAGGGDCVDADIIVNIQGDEPLLDPAALRLLAEPLRDLDAGSVAVSSVYAPLTDPAGYSDPNVVKLVIAADGRAL

SEQ ID NO: 78271 - DNA, 615 bp, Unknown
  Obtained from environmental sample
  misc_feature (1)..(615): n is a, c, g, or t
gtgacggcagggttttggctgacagaaaaaaataagaacctcttgtttacaattttactgcgttatcattgtattgagaatattcccgcagctattacattgcgtgccggtattgctgtctcctatgctgtcgaaaattacgctgaaaaattaaatagaactgttacggttaaatggccgaatgacattatgattagtaataaaaaagcagcgggaattctttgcgaagcctcaagcgaaggtattgttcatgttggtatcggagtaaatttcttttttaaaaaatttcctccatcaatagaaaaaaaagcgacaacccccgctgttgctgctgggattgatattgtccctcacgaaagatttgtccttctggaaaaaatacttgagtctttttacaatgaacttgttacaacaaaggaaagcctgaaatcaaggctggaacagcgtctttataaaaaaaatgaaaaggttatttttatcgaaggagcagccggttcaggtaaagaagttacaggcatcctttgcggtataacggacaccggagaactgtttatcaaagttgacgaagaacaggaagaacgctcatttattacaggcgaattagtattattttaa

SEQ ID NO: 78272 - protein, 204 aa, Unknown
  Obtained from environmental sample
  misc_feature (1)..(204): Xaa is any amino acid
MTAGFWLTEKNKNLLFTILLRYHCIENIPAAITLRAGIAVSYAVENYAEKLNRTVTVKWPNDIMISNKKAAGILCEASSEGIVHVGIGVNFFFKKFPPSIEKKATTPAVAAGIDIVPHERFVLLEKILESFYNELVTTKESLKSRLEQRLYKKNEKVIFIEGAAGSGKEVTGILCGITDTGELFIKVDEEQEERSFITGELVLF

SEQ ID NO: 78273 - DNA, 963 bp, Unknown
  Obtained from environmental sample
  misc_feature (1)..(963): n is a, c, g, or t
ttgcatnnnnnnnnnnnnnnnnnnnnnnnnnncacactgaagtacaaaggtgagattcgccacgtttatgccaagttggagtattacaactactccggcagcataaaagacaggatggccttttacattctgaaagaagcttacgaaaagggcacaatcaaagagggctacgaaattaccgaagcgacaagcggcaacacgggcattgcccttgctgcgcaagggcgttttttgggacacaaggtcaaaatttttatgcccagctggatgagcattgaaagagtaaatctcattaagagtcttggcgccgaaatagtgcctgtagataaaaatttggaaaaacccgaagaaggcggttttttgggcagcattaaactgtctagggaatacgcaaaaagtggcaatgtattcgaacccctgcagtttgaaaacgatgcaaacaggctagcgcattacacgaccactggccctgagatttgggaacaaatgtccaaattcggtgtcaagcctgatgcgattgtagcgggagtaggcactggcggcacaattatgggagctggcggctatcttaaatccaaagaccataattgtaaagtgtatccaatggagcccgccaattcccccacaatgactacgggcggaaagaaaatcggcaaccaccgcatacaaggcatctcggatgagttcattccagcacttgtaaaactagagcagttggacgaaatagtatcggttgacgatggcgattcaattatcgcggcgcanatgctggccaagacattcggcatgggcgtgggcatttcttctggggccaaccttctttcggcaatcaaagtccaaaatgatttcggacacaaaaacgtggcaacggtattttcggacgacaacaaaaaatacctgttcaaccgactactcccaaaccggaacccagtaaaagctgggctttctatcaaccgatattga

SEQ ID NO: 78274 - protein, 320 aa, Unknown
  Obtained from environmental sample
  DOMAIN (5)...(295): Pyridoxal-phosphate dependent enzyme
  misc_feature (1)..(320): Xaa is any amino acid
MHXXXXXXXXXTLKYKGEIRHVYAKLEYYNYSGSIKDRMAFYILKEAYEKGTIKEGYEITEATSGNTGIALAAQGRFLGHKVKIFMPSWMSIERVNLIKSLGAEIVPVDKNLEKPEEGGFLGSIKLSREYAKSGNVFEPLQFENDANRLAHYTTTGPEIWEQMSKFGVKPDAIVAGVGTGGTIMGAGGYLKSKDHNCKVYPMEPANSPTMTTGGKKIGNHRIQGISDEFIPALVKLEQLDEIVSVDDGDSIIAAXMLAKTFGMGVGISSGANLLSAIKVQNDFGHKNVATVFSDDNKKYLFNRLLPNRNPVKAGLSINRY

SEQ ID NO: 78275 - DNA, 420 bp, Unknown
  Obtained from environmental sample
  misc_feature (1)..(420): n is a, c, g, or t
atgagcggcgaactgacaaggattctaaacttgtacaaaacatccccttgttttgacgggcggcccggcgggtttctttttattaaaaataacgggcaacgcaggaacaagggcgcgtactggcatatctttaacagaatgctctgcgagattggaatcaggaacgcgcaaaacataaaatacgggacgcgcggtccctgcatacacagcctcaggcacacattcgtattacattcattattaaaagcggaatcggaaggccgtgaatttatggacacagttccgtttttatcaacgtatctcggccatgcggggcttatggaaacagacaaatacctgaaggccaggcatgagctgtatgccggagcccatgccgtcattgcggaatacacgcatgacgtgttcccgcaggaggcctga

SEQ ID NO: 78276 - protein, 139 aa, Unknown
  Obtained from environmental sample
  misc_feature (1)..(139): Xaa is any amino acid
MSGELTRILNLYKTSPCFDGRPGGFLFIKNNGQRRNKGAYWHIFNRMLCEIGIRNAQNIKYGTRGPCIHSLRHTFVLHSLLKAESEGREFMDTVPFLSTYLGHAGLMETDKYLKARHELYAGAHAVIAEYTHDVFPQEA

SEQ ID NO: 78277 - DNA, 852 bp, Unknown
  Obtained from environmental sample
  misc_feature (1)..(852): n is a, c, g, or t
ttgcatnnnnnnnnnnnnnnnnnnnnnnnnnncactcaatggaacggaatcggtcccaggatttttgtggggttaggcaactatatcgaattgttcagcgacaaacgcttaatggaccagtttataaacgcgctacttaacagtcttaaactattcgggctcaccgtaataatacaaacgccgcttcagataatcatggcatacatgatctattcgaatatgaaagggcatcgttttacgcatatcgccatctttgcgccgcagatcatttgtaccccaatcattgtctttatttttcggctgcttttggatgttaatgtgggcgttgtcaacaatgtatttgagctaataggtcttgggtcgtgggtacatccctggctgggaatccccaaactgggcatcatattcatgtatatcatgataacatggggaggcatcggcgttggaatgacattcttcctgggtgcgatgaaaatggttggcagtgactgtcttgaagccgcctacatagaaggtgccggattctggacaaggctgacgcgggtgattttaccgcaaatcaagattactgtcgtcaacctgatactcattgcgtacatatactcaatgaccatgttcgatttcagttatgtccttggtggcaacaccggcggagttggcggcagcatagatacaatggcgctttttttctatcgcatagcctttggagattcaaatcctattggcgggaagctttccgagaattcgatcggcatgggtacaacggtcgcctgtgtgctgtttttcatgattttcatcatcgcgttactgcaagtcatctttattaacagcggggaggacagggatgtatag

SEQ ID NO: 78278 - protein, 283 aa, Unknown
  Obtained from environmental sample
  DOMAIN (41)...(280): Binding-protein-dependent transport system inner membrane component
  misc_feature (1)..(283): Xaa is any amino acid
MHXXXXXXXXXTQWNGIGPRIFVGLGNYIELFSDKRLMDQFINALLNSLKLFGLTVIIQTPLQIIMAYMIYSNMKGHRFTHIAIFAPQIICTPIIVFIFRLLLDVNVGVVNNVFELIGLGSWVHPWLGIPKLGIIFMYIMITWGGIGVGMTFFLGAMKMVGSDCLEAAYIEGAGFWTRLTRVILPQIKITVVNLILIAYIYSMTMFDFSYVLGGNTGGVGGSIDTMALFFYRIAFGDSNPIGGKLSENSIGMGTTVACVLFFMIFIIALLQVIFINSGEDRDV

SEQ ID NO: 78279 - DNA, 753 bp, Unknown
  Obtained from environmental sample
  misc_feature (1)..(753): n is a, c, g, or t
gtggtgatcgacgagtttccctacctggcccgggcgaacccggggctgccgtccatcgtgcagaacgcgatcgcgccgcgccgggccgagcgcgaacacagccgcagccgcctgctgctgtgcggatcggccatgaccttcatgggaacgctccttgccgggaacgcgccgctacgcggacgcgccggccttgaactcgtcgtccccacgctcgactaccagctcgccgcgcagttctggaacatcaccgaccccgtgctggccatcaaggtccatgccgtcgtcggcggcacgcccgcctaccggcgcgagttcgcccgcgacgacacgcctgccgatgatagcgacttcgacggctggatccagcgaaccgtcctcaacccggcgagcccgctgttccgcgaggcccgctacctcctggccgccgagtccgaactgcacgacctcggcctctaccactcggtcctcgccgccatcgcggccggcaacacgaccaggggcgccatcggcacctacaccggacggaaatcaggcgacctcgcccacccgctcaacgtcctcatggactgcggtctcgtccgccgccagccggacgcgttccgcgacaaccagtcaacctacgagatcgccgagcccctcatcaccttctatcatgcggtgatgcggccgatctggtccgacctggcacataccagggcacccgcgcgcctgtgggcacggagccggccccggttcaccgccaacgtcctctga

SEQ ID NO: 78280 - protein, 250 aa, Unknown
  Obtained from environmental sample
  misc_feature (1)..(250): Xaa is any amino acid
MVIDEFPYLARANPGLPSIVQNAIAPRRAEREHSRSRLLLCGSAMTFMGTLLAGNAPLRGRAGLELVVPTLDYQLAAQFWNITDPVLAIKVHAVVGGTPAYRREFARDDTPADDSDFDGWIQRTVLNPASPLFREARYLLAAESELHDLGLYHSVLAAIAAGNTTRGAIGTYTGRKSGDLAHPLNVLMDCGLVRRQPDAFRDNQSTYEIAEPLITFYHAVMRPIWSDLAHTRAPARLWARSRPRFTANVL

SEQ ID NO: 78281 - DNA, 507 bp, Unknown
  Obtained from environmental sample
  misc_feature (1)..(507): n is a, c, g, or t
ttgccgggaacgcgccgctacgcggacgcgccggccttgaactcgtcgtccccacgctcgactaccagctcgccgcgcagttctggaacatcaccgaccccgtgctggccatcaaggtccatgccgtcgtcggcggcacgcccgcctaccggcgcgagttcgcccgcgacgacacgcctgccgatgatagcgacttcgacggctggatccagcgaaccgtcctcaacccggcgagcccgctgttccgcgaggcccgctacctcctggccgccgagtccgaactgcacgacctcggcctctaccactcggtcctcgccgccatcgcggccggcaacacgaccaggggcgccatcggcacctacaccggacggaaatcaggcgacctcgcccacccgctcaacgtcctcatggactgcggtctcgtccgccgccagccggacgcgttccgcgacaaccagtcaacctacgagatcgccgagcccctcatcaccttctatcatgcggtga

SEQ ID NO: 78282 - protein, 168 aa, Unknown
  Obtained from environmental sample
  misc_feature (1)..(168): Xaa is any amino acid
MPGTRRYADAPALNSSSPRSTTSSPRSSGTSPTPCWPSRSMPSSAARPPTGASSPATTRLPMIATSTAGSSEPSSTRRARCSARPATSWPPSPNCTTSASTTRSSPPSRPATRPGAPSAPTPDGNQATSPTRSTSSWTAVSSAASRTRSATTSQPTRSPSPSSPSIMR

SEQ ID NO: 78283 - DNA, 534 bp, Unknown
  Obtained from environmental sample
  misc_feature (1)..(534): n is a, c, g, or t
gtgggcccgccggtacaccgagggctggtgcgcacgggcggcagcgaacggaggcatcgtccccgacaacgccggcctggacggcacggtgggacagtacctgggcggccgctggtacggcgggcactacggctggtcatggccgcacggcctgtacagcgtgctgcccgcgctgctgatcgcggcgacgagcacgtccctcgtcgcgggacaggaccaggcgctcgacgcggtgcggcgcgtcatcgacactgttctcgatctcggcaaggacggcactctcgaagagtccggttcgtccctggccgcgcactggacagaccggctgggcccgggctgcgggccggtccgcctgtatccgcaccgttccggcgatccacggttggttcgaccacagtccggtgcaccccggctggctcgtcgccctctggcacccaccggcgacccggactacgccccgcggctggaaacgcttgcgtcaggcttagggtacgaatggcgtggccttccggtcgctccgccgacaagaaataa

SEQ ID NO: 78284 - protein, 177 aa, Unknown
  Obtained from environmental sample
  misc_feature (1)..(177): Xaa is any amino acid
MGPPVHRGLVRTGGSERRHRPRQRRPGRHGGTVPGRPLVRRALRLVMAARPVQRAARAADRGDEHVPRRGTGPGARRGAARHRHCSRSRQGRHSRRVRFVPGRALDRPAGPGLRAGPPVSAPFRRSTVGSTTVRCTPAGSSPSGTHRRPGLRPAAGNACVRLRVRMAWPSGRSADKK

SEQ ID NO: 78285 - DNA, 696 bp, Unknown
  Obtained from environmental sample
  misc_feature (1)..(696): n is a, c, g, or t
gtgcctaggcgcgcccgatacttgcggacgatgctaaatgagttcaaccgcctcaacagccattttttgtggcttggcacacacgcgatggacatcggggccctgaccgtttttctctattgctttagggacagggaaaagatattggatctgttcgaggctttctgcggcgcgaggctgaccaccaccgccatgaggattggcgggctgccggacgacatcccgcagggctttgaaaaaatggccaaggacgcattggccagcatcaaggtgggcataaccgaatatgaaaccctgttaagcgaaaaccgcatctggctaaaacgcaccgtgggcatagccaagctgagcgcggacgactgtttggcctatggcgtaacaggccctatgcttagggccgccggcgttggctatgacattcgcaaggcccatccctatgccgcctacgatgagatgaagtttgaagtgccaaccagaaacgaggccgacacctatgccaggtacttggtgcgaatagaagagatgcgccagagcgtgttgatcattgagcagtgtctagacggcctgccagagggccctgtgatggcaaagctgcccaaggtgctaaagtccgaagtcggcgaggtgtaccacccaacggaggcgccaaagggcgagatcggctactacatagtcagcgaaaagggcggcccttaa

SEQ ID NO: 78286 - protein, 231 aa, Unknown
  Obtained from environmental sample
  DOMAIN (31)...(229): Respiratory-chain NADH dehydrogenase, 49 Kd subunit
  misc_feature (1)..(231): Xaa is any amino acid
MPRRARYLRTMLNEFNRLNSHFLWLGTHAMDIGALTVFLYCFRDREKILDLFEAFCGARLTTTAMRIGGLPDDIPQGFEKMAKDALASIKVGITEYETLLSENRIWLKRTVGIAKLSADDCLAYGVTGPMLRAAGVGYDIRKAHPYAAYDEMKFEVPTRNEADTYARYLVRIEEMRQSVLIIEQCLDGLPEGPVMAKLPKVLKSEVGEVYHPTEAPKGEIGYYIVSEKGGP

SEQ ID NO: 78287 - DNA, 501 bp, Unknown
  Obtained from environmental sample
  misc_feature (1)..(501): n is a, c, g, or t
gtgaggtatgcccgccaagcccgcgaatcgtcaacccgaggcccggatcgtcgtggtggacgacgagacctcgatccgcgaactgcttgccacctcgctgcggtttgcgggcttcgaggtgttcgaggccgagaacggcaacgccgcgctgcggaccgtcgccgaggtgcgtcccgacctcatcgtgctggacatcatgctccccgaccagaacggcttcaccgtgacgcggcgcctgcgcgcgcgcggcgaccacacgccgatcctgtttctcaccgcgaaggacgacgcccgcgacaaggtcgagggcctcaccgtgggcggcgacgactacgtgaccaagccgttctcgttggaggaggtggtcgcgcgaattcgggcggtgttgcgccgcaccggcggtggtggcgcggtgaccgacgacattctgcgggtcggcgatctggaacaggatccggattgtgnnnnnnnnnnnnnnnnnnnnnnnnnnatgcaagctga

SEQ ID NO: 78288 - protein, 166 aa, Unknown
  Obtained from environmental sample
  misc_feature (1)..(166): Xaa is any amino acid
MRYARQARESSTRGPDRRGGRRDLDPRTACHLAAVCGLRGVRGRERQRRAADRRRGASRPHRAGHHAPRPERLHRDAAPARARRPHADPVSHREGRRPRQGRGPHRGRRRLRDQAVLVGGGGRANSGGVAPHRRWWRGDRRHSAGRRSGTGSGLXXXXXXXXXXAS

SEQ ID NO: 78289 - DNA, 597 bp, Unknown
  Obtained from environmental sample
  misc_feature (1)..(597): n is a, c, g, or t
ttgcatnnnnnnnnnnnnnnnnnnnnnnnnnncacaatccggatcctgttccagatcgccgacccgcagaatgtcgtcggtcaccgcgccaccaccgccggtgcggcgcaacaccgcccgaattcgcgcgaccacctcctccaacgagaacggcttggtcacgtagtcgtcgccgcccacggtgaggccctcgaccttgtcgcgggcgtcgtccttcgcggtgagaaacaggatcggcgtgtggtcgccgcgcgcgcgcaggcgccgcgtcacggtgaagccgttctggtcggggagcatgatgtccagcacgatgaggtcgggacgcacctcggcgacggtccgcagcgcggcgttgccgttctcggcctcgaacacctcgaagcccgcaaaccgcagcgaggtggcaagcagttcgcggatcgaggtctcgtcgtccaccacgacgatccgggcctcgggttgacgattcgcgggcttggcgggcatacctcacattctgctaggtgtggcgagccgccaggcgtggttggcggcgccggattagcggcgcgggctgagctgtgccggaatagcagccgagcggtgcgggattag

SEQ ID NO: 78290 - protein, 198 aa, Unknown
  Obtained from environmental sample
  misc_feature (1)..(198): Xaa is any amino acid
MHXXXXXXXXXTIRILFQIADPQNVVGHRATTAGAAQHRPNSRDHLLQRERLGHVVVAAHGEALDLVAGVVLRGEKQDRRVVAARAQAPRHGEAVLVGEHDVQHDEVGTHLGDGPQRGVAVLGLEHLEARKPQRGGKQFADRGLVVHHDDPGLGLTIRGLGGHTSHSARCGEPPGVVGGAGLAARAELCRNSSRAVRD

SEQ ID NO: 78291 - DNA, 552 bp, Unknown
  Obtained from environmental sample
  misc_feature (1)..(552): n is a, c, g, or t
atgcttaaaattctcctatctcgcctcaggcagggccgccgcacgaatgggtaccccaaggaggctcctgccctgcccctcaggttcaggggcacaccaaggctatccagagaacagtgcgtcagcaagtgcaggacatgcgaggccgcctgcccaactggggcaatatcaaaaagccaaaccatcattgacaaaagcggaaaacctcaactgacgctggatttgggcatgtgcctcttttgcccctcctgcatggaaagctgcccagaacaatccatagcctttacgcgggaccaccgcttggcaaccaggaaaagaggacacctgctgttgagccatgaaaattcgcttgtccacgccgcgccgctggttggggacatgcacaaggcattctcaaaaagtttgagcgtctgcgctatttctgctggtggctgcaatggctgtgaggctgaagcaaacatccttcaaaccatcacttgggacatgatgcgcttcgacacgacttcgcggccagtgnnnnnnnnnnnnnnnnnnnnnnnnnnatgcagctga

SEQ ID NO: 78292 - protein, 183 aa, Unknown
  Obtained from environmental sample
  DOMAIN (71)...(94): 4Fe-4S binding domain
  misc_feature (1)..(183): Xaa is any amino acid
MLKILLSRLRQGRRTNGYPKEAPALPLRFRGTPRLSREQCVSKCRTCEAACPTGAISKSQTIIDKSGKPQLTLDLGMCLFCPSCMESCPEQSIAFTRDHRLATRKRGHLLLSHENSLVHAAPLVGDMHKAFSKSLSVCAISAGGCNGCEAEANILQTITWDMMRFDTTSRPVXXXXXXXXXCS

SEQ ID NO: 78293 - DNA, 822 bp, Unknown
  Obtained from environmental sample
  misc_feature (1)..(822): n is a, c, g, or t
ttggcgcacaagttattagagagggcggcacggccactatacgcggcagtggcaacggcccttgcgctggcggtgacgcaccccttggccggaaacataggcggcggcggcttcatgcttgcagtagatgctgacggggcaaaggatttttatgacttccgcgagacggcccccggcaaaacccacccaaagatgtttctagccaagggcaaatataattcttcgctgcaccacagcggacacgggagcatcggcgtgcccggcacggtggccggcctgtatttagcgtggacagatcgcggaaaactgccgtgggcaaggctggttcaaccagcggtcatgctggcgcgcgatggcttccccatcagcaaaaccttggcagacgctctcgaaggcgcattgccctctttcagaaagcaccctgcttcattggcccaattcagcagctctggcaagcccctcaaagagggcgacctgctggtgcaggccgacctagcaaatactttggagcgaatcgcatcggctggccccaaggatttttatagcggcgaaacggcaaagctattgttgaaagagatgaaactaggcaagggcctcataaatgcgcgagacctaaaggcgtacaagccaatgaagcgcacaccagtcgtgggcagctataggggctttgaagtcattggagcttcgccgccaagctctggcggtgtggctatcatagaatccctcaacgggctaaaaagctacgagttgagcaaaatgccttgggactcggctccttttgtccatttggtttcagaagccctgtcccgtgctttcccttaa

SEQ ID NO: 78294 - protein, 273 aa, Unknown
  Obtained from environmental sample
  SIGNAL (1)...(24)
  DOMAIN (15)...(273): Gamma-glutamyltranspeptidase
  misc_feature (1)..(273): Xaa is any amino acid
MAHKLLERAARPLYAAVATALALAVTHPLAGNIGGGGFMLAVDADGAKDFYDFRETAPGKTHPKMFLAKGKYNSSLHHSGHGSIGVPGTVAGLYLAWTDRGKLPWARLVQPAVMLARDGFPISKTLADALEGALPSFRKHPASLAQFSSSGKPLKEGDLLVQADLANTLERIASAGPKDFYSGETAKLLLKEMKLGKGLINARDLKAYKPMKRTPVVGSYRGFEVIGASPPSSGGVAIIESLNGLKSYELSKMPWDSAPFVHLVSEALSRAFP

SEQ ID NO: 78295 - DNA, 378 bp, Unknown
  Obtained from environmental sample
  misc_feature (1)..(378): n is a, c, g, or t
ttgcatnnnnnnnnnnnnnnnnnnnnnnnnnncaccgaccggcccaatcgcatcagcgccctgaactactggatcaacatcggcaaaaaggcgggggtggattttctgatcgtgcccatgatcattgactggcgcgaacgcgaaggcagcgaggccggagtgaccatctcggccgccgtcaccatcgacatctttctgatcgacgcgcgggatcagggcaatctcctgcagcgctctttttaccgggaaaagcaggtgagcctggccagcaacattttgaacatcagcaccttcatcaagcgccgcggcaaatgggtcacggcggaagagctggcgcaggaagccatgcagaaagccattcaagagtttgggctgtga

SEQ ID NO: 78296 - protein, 125 aa, Unknown
  Obtained from environmental sample
  misc_feature (1)..(125): Xaa is any amino acid
MHXXXXXXXXXTDRPNRISALNYWINIGKKAGVDFLIVPMIIDWREREGSEAGVTISAAVTIDIFLIDARDQGNLLQRSFYREKQVSLASNILNISTFIKRRGKWVTAEELAQEAMQKAIQEFGL

SEQ ID NO: 78297 - DNA, 564 bp, Unknown
  Obtained from environmental sample
  misc_feature (1)..(564): n is a, c, g, or t
atgggtcacggcggaagagctggcgcaggaagccatgcagaaagccattcaagagtttgggctgtgatcgtttttccggctgtggacatcaagaacggccaggccgttcgcctgcggcaggggcgcgccgatgacgccaccgtgttttccgatcagccggcggacatggccctgcgctggcagaacgagggggcgcgctttctccatctggtggacttggacggcgcttttgacggccgctcgcccaacacccttcttgtgcagtccatctgttcccggctgtccattccggtgcagctcggcggcggcatccgcaacgcggacagcgcccgccgctggttcgatctcggcgtcgcccggctgatcatcggcaccatggctctcgaagaacccgatcaattcgccgccctgtgccgcgcctttcccggccgcatcggcgtgtccctggatgcggaaaacggccggttcaaaagccggagttgggtggcggacaccgggctgaccctggatcaagccctgccccgtctgctgatcgaacggtcggcttttggtcatctatactga

SEQ ID NO: 78298 - protein, 187 aa, Unknown
  Obtained from environmental sample
  DOMAIN (23)...(187): Histidine biosynthesis protein
  misc_feature (1)..(187): Xaa is any amino acid
MGHGGRAGAGSHAESHSRVWAVIVFPAVDIKNGQAVRLRQGRADDATVFSDQPADMALRWQNEGARFLHLVDLDGAFDGRSPNTLLVQSICSRLSIPVQLGGGIRNADSARRWFDLGVARLIIGTMALEEPDQFAALCRAFPGRIGVSLDAENGRFKSRSWVADTGLTLDQALPRLLIERSAFGHLY

SEQ ID NO: 78299 - DNA, 504 bp, Unknown
  Obtained from environmental sample
  misc_feature (1)..(504): n is a, c, g, or t
ttggtctggcatacagttcaaccgggttggttattgggcaagcctttagccgatgttgaacaattgttaaaatcacgaattcagcgcgaagtatctgatttttccgggttgattgatttgtgggatgccataaatgaagttgtgataatgccggtgttcgaaaacggagataatgcgattactccgttagcccgggaaaaagggcgaatcgaaatggtgcgccaggctttcgaggaagcccgggcggctaatcctaatgtcactctaattctcaatgatttcgatatgtcaaccgcatatgaatgtttaatcgaaggcgtattagccgcgggcataaaaattgacaagttgggtttgcaaagtcaccagcatcaaggttattggggcaaagaaaaaacactgaaagttttagatcgttttgcccggtataacatcccaatccatttcaccgagactactttactttcgggtgatttaatgcctaaaagaaatcgtggatcttaa

SEQ ID NO: 78300 - protein, 167 aa, Unknown
  Obtained from environmental sample
  misc_feature (1)..(167): Xaa is any amino acid
MVWHTVQPGWLLGKPLADVEQLLKSRIQREVSDFSGLIDLWDAINEVVIMPVFENGDNAITPLAREKGRIEMVRQAFEEARAANPNVTLILNDFDMSTAYECLIEGVLAAGIKIDKLGLQSHQHQGYWGKEKTLKVLDRFARYNIPIHFTETTLLSGDLMPKRNRGS

SEQ ID NO: 78301 - DNA, 315 bp, Unknown
  Obtained from environmental sample
  misc_feature (1)..(315): n is a, c, g, or t
atgattttaattcgttttcttctcccactcttactctgtaaccttcctgcccaagacccaaccctaaccaggctccaggtccacttctcgcctggcggtagccccacggcggcgattgtggccgagattgaccgtgccaagaccgccatccgcgtccaggcctacagcttcaccagtagcccgattgccggcgccctgaagcgggcacacgacaggggcgtcgatgtgcaggtgatcctcgataagtcgcagcctaagcagccctacacgtccacgacctttctcgtgaacgccaagatacccgtttgcgattga

SEQ ID NO: 78302 - protein, 104 aa, Unknown
  Obtained from environmental sample
  SIGNAL (1)...(17)
  misc_feature (1)..(104): Xaa is any amino acid
MILIRFLLPLLLCNLPAQDPTLTRLQVHFSPGGSPTAAIVAEIDRAKTAIRVQAYSFTSSPIAGALKRAHDRGVDVQVILDKSQPKQPYTSTTFLVNAKIPVCD

SEQ ID NO: 78303 - DNA, 591 bp, Unknown
  Obtained from environmental sample
  misc_feature (1)..(591): n is a, c, g, or t
ttggcggcggcgcttgccgcgacggcgctcgcctctgcggctgcagcgtcctctttccacatcaccgccgtacttataccgctgatgctcctcaccatgtactcaatctacataaagcgcacaaagctcgtcggaaacgtcatcgtagccgccctgaccgcctatgcgctcctattcggcgatttgccgcatccctatacaaaaatacttttcgccccggccttgttggcgtttttgcttaatttttgccgagagatggtcaaggacgtgcaggacgcggatggcgacagggcggcggggttcacgacctcggcggagttgccgcacccaacaatcaggcgcttcttagtctccgccggatgcgcgaccttggcggttatgtgggcgccgtcgctcattttggaggatttcgggatggtctacaccggcatctgcatagccttggtgctgccgttgcacattagttggatgatgctgacgctcagggccgactttgacaattacgtcgggcggatgggaagaatcctgaaggcggagatggtcgtagcgcttgcggcgctggcggcggataaatttatatgcactttgtag

SEQ ID NO: 78304 - protein, 196 aa, Unknown
  Obtained from environmental sample
  SIGNAL (1)...(23)
  misc_feature (1)..(196): Xaa is any amino acid
MAAALAATALASAAAASSFHITAVLIPLMLLTMYSIYIKRTKLVGNVIVAALTAYALLFGDLPHPYTKILFAPALLAFLLNFCREMVKDVQDADGDRAAGFTTSAELPHPTIRRFLVSAGCATLAVMWAPSLILEDFGMVYTGICIALVLPLHISWMMLTLRADFDNYVGRMGRILKAEMVVALAALAADKFICTL

SEQ ID NO: 78305 - DNA, 828 bp, Unknown
  Obtained from environmental sample
  misc_feature (1)..(828): n is a, c, g, or t
atggaaggtaaagccagcctcggtgaaaccatcgatattgttgatcatcagggaaaatggttagcacgcggcgcttattcgccagcttcgcaaatccgggcgcgcgtctggacgtttgacccgtctgagtctatcgacattgcttttttttcccgccgtttgcaacaagcacaaaaatggcgtgactggctggcgcaaaaagatggcctcgacagctatcgtttaatcgccggagaatctgatggcctgccgggtattactatcgatcgtttcggtaattttctggtgctgcaactgctgagtgctggggcagaatatcagcgcgcggcattaattagtgccctgcaaacgctgtacccggaatgttcgatttacgatcgcagcgacgtcgcggtacgtaaaaaagaaggaatggagctgacccagggccccgtcaccggcgagttgccacctgccctgctgccgattgaagaacacggaatgaaactgctggtggatattcagcacggacacaaaacgggctactacctggaccagcgtgatagccgcctggctacccgccgctacgttgaaaataaacgtgtgctgaactgtttctcctataccggtggtttcgccgtatcggcactgatgggcggttgcagccaggttgtcagcgttgatacctcccaggaagcgctggatattgcacggcagaacgttgagctgaacaaactggatctgagcaaggctgagtttgtccgtgatgatgtctttaaattgctgcgtacttatcgcgatcgcggtgaaaaatttgacgttatcgtgatggacccgccgaagttgtga

SEQ ID NO: 78306 - protein, 275 aa, Unknown
  Obtained from environmental sample
  misc_feature (1)..(275): Xaa is any amino acid
MEGKASLGETIDIVDHQGKWLARGAYSPASQIRARVWTFDPSESIDIAFFSRRLQQAQKWRDWLAQKDGLDSYRLIAGESDGLPGITIDRFGNFLVLQLLSAGAEYQRAALISALQTLYPECSIYDRSDVAVRKKEGMELTQGPVTGELPPALLPIEEHGMKLLVDIQHGHKTGYYLDQRDSRLATRRYVENKRVLNCFSYTGGFAVSALMGGCSQVVSVDTSQEALDIARQNVELNKLDLSKAEFVRDDVFKLLRTYRDRGEKFDVIVMDPPKL

SEQ ID NO: 78307 - DNA, 876 bp, Unknown
  Obtained from environmental sample
  misc_feature (1)..(876): n is a, c, g, or t
ttgcatnnnnnnnnnnnnnnnnnnnnnnnnnncactttaccccaacatcttaggagaaatgttatgtttagaaaatccctattttttgccctcgcattgtgtttaattttagcaacttcttgcgaagagaaaaaacctaaagccgcacctgacggcaaggtgaatatagttgccacaattttcccgctttacgatttttcaagagctattgcaaaagaacaagcaaatataacaatgctcactccacctggcagctccatacattcttatgaaccaagccccgcagatataaaaaacattcaaaatgcagatgtatttttattcataggtggtgaaaacgatgcgtggattgaccgtattttaagcacgctagataccacaaaaatgaaaattgtccgcttgtttgattttgttaaactctacgaagaacacgaaaaagaaggaatgcaacccgaacccgaagaagaaagcgacccattgcaacccgaagaacccggcaaacttgaagtagaatacgatgagcatatttggacaagccccaaaaatgcggttttgatgattaatgcaataaaggatgtgctttgcgaaaaagataccgcaaattgcgaaaagtacaaggagaatactcaagattatgtttcgctaattgaggatctatcaaatgaactatctcaaattgtaatttctgcaaagagaaagcaaattgtggtagcagatagattccccttccgctatttaaccagaggaatatggcttggactatgcagcagcattttctggctgttccaaccgtcagatgcttctccagcaacaatagcctatttgattaaaaccatcagaaccataaaattccctattatataccagttgaattga

SEQ ID NO: 78308 - protein, 291 aa, Unknown
  Obtained from environmental sample
  DOMAIN (29)...(291): Periplasmic solute binding protein family
  misc_feature (1)..(291): Xaa is any amino acid
MHXXXXXXXXXTLPQHLRRNVMFRKSLFFALALCLILATSCEEKKPKAAPDGKVNIVATIFPLYDFSRAIAKEQANITMLTPPGSSIHSYEPSPADIKNIQNADVFLFIGGENDAWIDRILSTLDTTKMKIVRLFDFVKLYEEHEKEGMQPEPEEESDPLQPEEPGKLEVEYDEHIWTSPKNAVLMINAIKDVLCEKDTANCEKYKENTQDYVSLIEDLSNELSQIVISAKRKQIVVADRFPFRYLTRGIWLGLCSSIFWLFQPSDASPATIAYLIKTIRTIKFPIIYQLN

SEQ ID NO: 78309 - DNA, 783 bp, Unknown
  Obtained from environmental sample
  misc_feature (1)..(783): n is a, c, g, or t
atgacgtcagagagtctttcgcgccgtcaattcatcggcacaggcgcagccctcggggggtccagcgcgctagcgctttctaatccggcgctcgcggcagcgcgagccgccgggataaagcctaacgatctaccagacctaactatcaaagaagttaaaatttacgtcaccgacatgagtggcgttcatagactcaacggcaccgagaccggtgaactggtatcggtcgtcacagccagcggcatcgagggcaattacactctgggtaaccgtaatcacactgatggctggctggattgggcaaagaacgttctactcggcaagaatgtaatcgacgtgttaccgaatctcgcagcgaccagcggcatgaaagggcctggtggattcgatgccaccgcttcgcgccggggctccggggtgcccggtttcggtgaagcgcccggtccgggaatgggaccggccttcggcggcgcagcggttgctggatctgcgctaatgccgcggggcgcaggcagctggccgaattactacaccgctgccgccgacgtgtgtctctgggacatcctaggaaaggcggtcgacaagcccatttatcgtttactaggtgggggtaccaaggatcgggtgctcgcctacgctagctcgcagcatttgcccaatatcgaggactacgtcccagatgttttgaaagccaaacaggctggttacaagggctacaaaatccatccgggcggcggccagcatcgtgatggagcacccctaccgacctataaccgggcataa

SEQ ID NO: 78310 - protein, 260 aa, Unknown
  Obtained from environmental sample
  SIGNAL (1)...(25)
  misc_feature (1)..(260): Xaa is any amino acid
MTSESLSRRQFIGTGAALGGSSALALSNPALAAARAAGIKPNDLPDLTIKEVKIYVTDMSGVHRLNGTETGELVSVVTASGIEGNYTLGNRNHTDGWLDWAKNVLLGKNVIDVLPNLAATSGMKGPGGFDATASRRGSGVPGFGEAPGPGMGPAFGGAAVAGSALMPRGAGSWPNYYTAAADVCLWDILGKAVDKPIYRLLGGGTKDRVLAYASSQHLPNIEDYVPDVLKAKQAGYKGYKIHPGGGQHRDGAPLPTYNRA

SEQ ID NO: 78311 - DNA, 675 bp, Unknown
  Obtained from environmental sample
  misc_feature (1)..(675): n is a, c, g, or t
ttgactgacagtgatagatacggaggagaaataaactcaatttcatacagatttgacggacaaaggcttgtttcaggggccggatacgcagacggaataattacaatatgggatacattaaaaggaatcgagataatgaagtttaataatcatcgtgaacatatatttaatattttatacagcccggacggcgataaaataatatcagcatctacacataatattaaaatatgggacgcaaataacggaatggaaataaaaacgctgcatgaaaaaaatgatactgacattatattaatagaaactaatgttatttacagccaggacaatacaaaaatattggcgagctggggaaaaataaaaggcggaataataaaaatatatgattcagataattatgatctgttatattcatataatattgaggcagaatcaatagcatttataacaaagatatcttttgttattaacagtaattttgttattatatgttacagagaaagaaatgatccgggttataatgacagaataaatattatagactatactgacggcactttaaaaaattcttttaaattatctgtccccgtggcgattagccctgacggaaaaaatatttgttatacagagaataatacagacattaaagtaatagagattttaagtgaaaattaa

SEQ ID NO: 78312 - protein, 224 aa, Unknown
  Obtained from environmental sample
  DOMAIN (43)...(79): WD domain, G-beta repeat
  misc_feature (1)..(224): Xaa is any amino acid
MTDSDRYGGEINSISYRFDGQRLVSGAGYADGIITIWDTLKGIEIMKFNNHREHIFNILYSPDGDKIISASTHNIKIWDANNGMEIKTLHEKNDTDIILIETNVIYSQDNTKILASWGKIKGGIIKIYDSDNYDLLYSYNIEAESIAFITKISFVINSNFVIICYRERNDPGYNDRINIIDYTDGTLKNSFKLSVPVAISPDGKNICYTENNTDIKVIEILSEN

SEQ ID NO: 78313 - DNA, 456 bp, Unknown
  Obtained from environmental sample
  misc_feature (1)..(456): n is a, c, g, or t
gtgccccaagatattaaagaagctggcaccgccatcgtgaaagcatataacttgcgggagcgttatttccacatcgaactatttaagcgccgcgataatggcaaagtggttgggttggaaatcaacttgcgcccgccgggggcttggatgactgacggctacaacttccggttatcaaccgatgtgtaccagcgttgggccgcgatggtagctggcgccgagcaaccttgggatggtccagaccgttactttgccccgtacgccagccgcaagtggttcaaccactaccggcacaatcaggagcagattgccgattacttgggcccgcgcttagccatgcacaaactggttgagcaggtactcgccgccgctgctggcgatgaggcctacatcgccaaggctcacagctacgatgaggccctcgacatcgtgcggtatatccaagaccgcgtgtag

SEQ ID NO: 78314 - protein, 151 aa, Unknown
  Obtained from environmental sample
  misc_feature (1)..(151): Xaa is any amino acid
MPQDIKEAGTAIVKAYNLRERYFHIELFKRRDNGKVVGLEINLRPPGAWMTDGYNFRLSTDVYQRWAAMVAGAEQPWDGPDRYFAPYASRKWFNHYRHNQEQIADYLGPRLAMHKLVEQVLAAAAGDEAYIAKAHSYDEALDIVRYIQDRV

SEQ ID NO: 78315 - DNA, 822 bp, Unknown
  Obtained from environmental sample
  misc_feature (1)..(822): n is a, c, g, or t
ttgggacaacgtagtagagggtttatttggttctttagttttatagtatggtttcataatataaagacgaaaggcaaaacaaatcttgtattattacttgatgaaccagggcttagtttacatgcacttgctcaatatgatttgttatcatatatagaagaattatcgaagaataaccaaattatttacacaacccattctccttttatgataatgaatgagagacttgatgttgcaagaacagttgaagatgttgaggaaaaaggaacaattatatcaggtgatctaaatggttcagatccaaatacaatattcccattacaagcggcaattggttatacattagcccaaaatttatttatatcaaaatacaatttgttggttgaaggtccggcagatttgctttacttaaaacatttttctatattgttagcggaaaaaggaaaaacatcgctaaatgataagattacaattgtccctgttggtggaatggataatattgcaacttttgttgctttattaaaaggtaacgatttgaatttcgttgtgttacatgattatgctggtaaaaatgttcaacgattaaataatcttgtaaaaaataatattttaaaacaaaaatctatattgaattatgccatgtttcgggatgggcatttttctgatgataactcaaaatggttagagagtgatattgaagatttaatgtctatcaatctctatattgaaatatttaacgacacgtttagagaaaaattgaatggtaaacaattgtctaatgagtgnnnnnnnnnnnnnnnnnnnnnnnnnnatgcaagctga

SEQ ID NO: 78316 - protein, 273 aa, Unknown
  Obtained from environmental sample
  misc_feature (1)..(273): Xaa is any amino acid
MGQRSRGFIWFFSFIVWFHNIKTKGKTNLVLLLDEPGLSLHALAQYDLLSYIEELSKNNQIIYTTHSPFMIMNERLDVARTVEDVEEKGTIISGDLNGSDPNTIFPLQAAIGYTLAQNLFISKYNLLVEGPADLLYLKHFSILLAEKGKTSLNDKITIVPVGGMDNIATFVALLKGNDLNFVVLHDYAGKNVQRLNNLVKNNILKQKSILNYAMFRDGHFSDDNSKWLESDIEDLMSINLYIEIFNDTFREKLNGKQLSNEXXXXXXXXXXAS

SEQ ID NO: 78317 - DNA, 828 bp, Unknown
  Obtained from environmental sample
  misc_feature (1)..(828): n is a, c, g, or t
ttggaattgttccagcgcgatgtttacggcaaggcgttttcgatactccacaaccaccacgacacggacgacgtagtccaagagacgtttctgcgtgcataccgcgcactgccaagcttcaggggcgagtccagcttcaggacttggctgctgacgatagccactaggcagtcattgaattacttggacagaaaccgctccaagtttgaaaacatcgaatatcccgtcctcgccgccgtccaccccgcccttcgcatagaagacaaccaattggcctcttttttggacagcgagtctttgtggctgatgcgcaaggcgttccccaaactccccaagacgcaaaaggaggcactgggcctgcggatagtgcgcggcctcaagtacgaccaagtggtcaaaagagatgggcaccaccgttggcagcgtgaaggcccacatattccacgcgatcaagaacctgacccgccaaatcgccggagaaaagccatgaaacaagaaaaaacggacacggtcattcccatcgaatgccaggacgccctgcggtccatagagagtgaccccatagaccttgacgtcgagacgctggggcacatttcaacctgccgcaagtgcagcctaacccgtgtcatgtggctggcactggaagactgtggcaacgttccaagtccccgccggttatttccaagcccttgccggggctggtgctgttcaaactgtccctccccaaccactaaggcaccaattctagaaaggcccttgctgtgcaccgctttccatccctgtctgatcattgccgtgaacactaggcggctactggttttcgtatag

SEQ ID NO: 78318 - protein, 275 aa, Unknown
  Obtained from environmental sample
  DOMAIN (3)...(68): Sigma-70 region 2
  misc_feature (1)..(275): Xaa is any amino acid
MELFQRDVYGKAFSILHNHHDTDDVVQETFLRAYRALPSFRGESSFRTWLLTIATRQSLNYLDRNRSKFENIEYPVLAAVHPALRIEDNQLASFLDSESLWLMRKAFPKLPKTQKEALGLRIVRGLKYDQVVKRDGHHRWQREGPHIPRDQEPDPPNRRRKAMKQEKTDTVIPIECQDALRSIESDPIDLDVETLGHISTCRKCSLTRVMWLALEDCGNVPSPRRLFPSPCRGWCCSNCPSPTTKAPILERPLLCTAFHPCLIIAVNTRRLLVFV

SEQ ID NO: 78319 - DNA, 516 bp, Unknown
  Obtained from environmental sample
  misc_feature (1)..(516): n is a, c, g, or t
atgctggctgtttcgggtcctataaacgaaatacttctttccataggaataataaaagagccgacaaatgtaatgattaaaccggaatatttttggtttatcgttactttcgctgacatatggaaagaaatgggctggaacgcgattatttatctggcggcaatggccggcattgatgcgcagatttatgaagccgcagagattgacggcgtaaacaggtttcagaaaatatggtatgttaccctgccgggcattcaggggacaattgttattttacttattctgagcattggcaatatcattaacaccggttttgaaagacagtttttgctgtccaacgcggttacatctcccaaagcacttgtgctggattattacgccttaaattacggcattggtatgttcaggtattcttacggcaccgctataggcgtttttaaatctgtagtcagtataattttgcttgtatcagcaaactggatagccaaaaaatccggtaataacagagttttttag

SEQ ID NO: 78320 - protein, 171 aa, Unknown
  Obtained from environmental sample
  misc_feature (1)..(171): Xaa is any amino acid
MLAVSGPINEILLSIGIIKEPTNVMIKPEYFWFIVTFADIWKEMGWNAIIYLAAMAGIDAQIYEAAEIDGVNRFQKIWYVTLPGIQGTIVILLILSIGNIINTGFERQFLLSNAVTSPKALVLDYYALNYGIGMFRYSYGTAIGVFKSVVSIILLVSANWIAKKSGNNRVF

SEQ ID NO: 78321 - DNA, 678 bp, Unknown
  Obtained from environmental sample
  misc_feature (1)..(678): n is a, c, g, or t
ttggattctaaaactggaatccttctagggattgcaggggtacaatgcctaataattggaactttctttttacaagaaactcttccaaacaaccaagcacatttaaattggaaatttggaagtgatatttcaaactattatcccaatagagggttaaaagtttacaaacctaacggggaagctcttaaacagattgtaaattatatagatccttctaatgctcaggctcatactgaaaaatacggaaatactgagtatgttaaactcggctatgttcgctacgcttcaactaataggaaatatcaaaaaattgatgatgtccctgtttttatttatccagcaaatttactttctcaaaaatctgctttgtttggaatgacaagaactggtaaatcaaacacaacaaaaattattgcaaagtcggtgtttgaattacgcaagcaaaacagtgaccataaaccattaagaattggacaaattatttttgatcctaatggagaatatgcaaatgaaaatgcacaagatagtgatgggaaaggcaatcctaatgctttaaaaaacgtatggaaacttattcctagtggagttaaaaaacaggaagtagtaacctatggtataacaaaacacccaaatgatccagacagaatactaacgttaataaattttttatttagatga

SEQ ID NO: 78322 - protein, 225 aa, Unknown
  Obtained from environmental sample
  misc_feature (1)..(225): Xaa is any amino acid
MDSKTGILLGIAGVQCLIIGTFFLQETLPNNQAHLNWKFGSDISNYYPNRGLKVYKPNGEALKQIVNYIDPSNAQAHTEKYGNTEYVKLGYVRYASTNRKYQKIDDVPVFIYPANLLSQKSALFGMTRTGKSNTTKIIAKSVFELRKQNSDHKPLRIGQIIFDPNGEYANENAQDSDGKGNPNALKNVWKLIPSGVKKQEVVTYGITKHPNDPDRILTLINFLFR

SEQ ID NO: 78323 - DNA, 483 bp, Unknown
  Obtained from environmental sample
  misc_feature (1)..(483): n is a, c, g, or t
ttgaagccgccatcgggtcagttcaccagcaccccgggccacggagggagatcgaagcctttttcaaggccgagcaggccctgttccagagcctggcccgccactaggggcgtccccggcggggtggcggcggcgatcataaagatagagtccgggtacggccgcgatgtaggccagcaaagggccgcatccatgctggcctccatgcaggccgccgcctcgaatttttccctgggggcgccggccgtggccgatctgggccaggacggcgaaaccctggcctttatgcgccagaccgccttagcgcggggcgactgggccctggacgcgctggaagccctcttgcgttacgcctatgacaacggcttggaccccgccgccttgcccggctcgcttcacggggccatcggctggggccagttcatgccctccaacatcctaaaaggcgctctggncggcgatggcgncggccgggtgacgtaa

SEQ ID NO: 78324 - protein, 160 aa, Unknown
  Obtained from environmental sample
  misc_feature (1)..(160): Xaa is any amino acid
MKPPSGQFTSTPGHGGRSKPFSRPSRPCSRAWPATRGVPGGVAAAIIKIESGYGRDVGQQRAASMLASMQAAASNFSLGAPAVADLGQDGETLAFMRQTALARGDWALDALEALLRYAYDNGLDPAALPGSLHGAIGWGQFMPSNILKGALXGDGXGRVT

SEQ ID NO: 78325 - DNA, 663 bp, Unknown
  Obtained from environmental sample
  misc_feature (1)..(663): n is a, c, g, or t
atgtcggcgtttaccagaactaccggcccagatgtcagtattcaagcgggaaacgaatcaacgtttaccgtcagatgcgaacctgttaaaatggggcaaaatgacgcggttttaaccattccatcaaatgacagttcccgtatggttgttgtcaatctgcgggtaaccggagtacaggggacggcaatattggaattgagccatgaaactacggttatttccaacaacgcgctgtctccttttgattttggcagagtgcttttggatggcagtaagtcattgacatttaccataaagaataccggtaatataaaccttatgttaaccggaacaccggcggttacatcgtctaacgcatcatttaccgtacttgcccagccctcaaatacaactattttgccgggatcgtctgtagaatttgccattggatataccccatcaggcgaaggcgtagacaccggttatttaaccattctgagtaatggcggtggggcatttacactaaatgttaaaggaaccggttatataaggaaaccgcagataaccataaagcagggcagtaccgttattaaccttaacaacgaatttaattttggaaccgttaccgcaggcatttcaaagaaattacttttatcctacataacacaggcgaagaatatttga

SEQ ID NO: 78326 - protein, 220 aa, Unknown
  Obtained from environmental sample
  misc_feature (1)..(220): Xaa is any amino acid
MSAFTRTTGPDVSIQAGNESTFTVRCEPVKMGQNDAVLTIPSNDSSRMVVVNLRVTGVQGTAILELSHETTVISNNALSPFDFGRVLLDGSKSLTFTIKNTGNINLMLTGTPAVTSSNASFTVLAQPSNTTILPGSSVEFAIGYTPSGEGVDTGYLTILSNGGGAFTLNVKGTGYIRKPQITIKQGSTVINLNNEFNFGTVTAGISKKLLLSYITQAKNI

SEQ ID NO: 78327 - DNA, 774 bp, Unknown
  Obtained from environmental sample
  misc_feature (1)..(774): n is a, c, g, or t
ttgggcagagacattaataaagacgatctcaatgatattaaaacaaaaatttcttatgcaaaggagatggttaaagatgaaatatggggtagttatcgttatactatcatctatgatgcgaaggaacctgactctctaaggactattgatcttggcgctggtcattcatcaagcagtgaaaccctctgtggtagaattatcaatgcattaaaatcaaatgggattcttaacgaaactgttacggcaggttatattgaacgaaattggccaccagctctaaaagaatccggttcatggcctctctcaagtctgcgacaaagttttctgaatggatctcttacacgcataattgatcctgatactgttttacgttccaatataacagaatttattcaacgcggggaattcggtcttgcttcaggtcgcatttctgatgacgcttacactcgtatatggtttgaggaaagaattaacagcatggaagtatcctttgaatcggatgtttatttaattttaaaaaccaaagcaaaatcactaaaaaaaccagaacaacaacaggaactagaattaccgtttcaaggttttttaacaccaaatatacccgtatctccacagccgtctgtagggaataatccatctttggaaacatctgctacaccgtcagaaaagaaaataaacctccacgggaaaataccgccaaatagctcaaaatacatcggttcaaaaaggtcggatcctcctgaatggacggccaggcaccaactctgtccttag

SEQ ID NO: 78328 - protein, 257 aa, Unknown
  Obtained from environmental sample
  misc_feature (1)..(257): Xaa is any amino acid
MGRDINKDDLNDIKTKISYAKEMVKDEIWGSYRYTIIYDAKEPDSLRTIDLGAGHSSSSETLCGRIINALKSNGILNETVTAGYIERNWPPALKESGSWPLSSLRQSFLNGSLTRIIDPDTVLRSNITEFIQRGEFGLASGRISDDAYTRIWFEERINSMEVSFESDVYLILKTKAKSLKKPEQQQELELPFQGFLTPNIPVSPQPSVGNNPSLETSATPSEKKINLHGKIPPNSSKYIGSKRSDPPEWTARHQLCP

SEQ ID NO: 78329 - DNA, 642 bp, Unknown
  Obtained from environmental sample
  misc_feature (1)..(642): n is a, c, g, or t
ttgatgcttgcagtactgtcagagtcggcaacgatagcgggtttggtgggcgctatcgcggccggagggcccggcgtggtgttctggatgtgggtttctgccttcttcggcatggcaaccaagtattcagaaattgtccttgcaattaaataccgccaggtagaaaaagacggaacttatcacggtggtccaatgtactacatagagcagggcatcgggagcaggagcccagcatggaaagggttcgcgaaaatattggcggcgatttttgctgttttcggcgggcttgcctgtttcggcattggcaacacgacccacgccggtgaaatttccgttgcgataaacaacctgaccggaagcaattttgactcttccattattaccggcgttgtactgaccatcatcgtcggcgtagtcattatcggaggcatcaagcgcatcggaacggttacttcttaccttgatccctttatgtcggcattctacattatctgcggcgtagttatcatattgctgatcatcgcccgggtaccggcatccctggcatacattgtaagagaagccttcagccttagggcggtcggctccggcgttttgggatacgcgtttatgcaggcaatgcgcacacgtattgctcgatga

SEQ ID NO: 78330 - protein, 213 aa, Unknown
  Obtained from environmental sample
  DOMAIN (2)...(213): Sodium:alanine symporter family
  misc_feature (1)..(213): Xaa is any amino acid
MMLAVLSESATIAGLVGAIAAGGPGVVFWMWVSAFFGMATKYSEIVLAIKYRQVEKDGTYHGGPMYYIEQGIGSRSPAWKGFAKILAAIFAVFGGLACFGIGNTTHAGEISVAINNLTGSNFDSSIITGVVLTIIVGVVIIGGIKRIGTVTSYLDPFMSAFYIICGVVIILLIIARVPASLAYIVREAFSLRAVGSGVLGYAFMQAMRTRIAR

SEQ ID NO: 78331 - DNA, 402 bp, Unknown
  Obtained from environmental sample
  misc_feature (1)..(402): n is a, c, g, or t
atgttggtatcgcttttacttattttgccctttgtatttgccttcttgatgctcgcttcatcgtctaaggatagttccgcttttcgcatggggcttctgtgctttgcaattccttttattttggcaactgctctagtagcgataggtgggcagcaaacggatatttacccttggttttccattttaggaatagatattgaattttcgttatatggttatgggctttctctgtggatggtttggctaaccacgctgctatcttttttggcttttgtctattccagagactctttgagtttggggataaataaatttgcaataggtttgctggctttggaaggcactataataggggcgtttctctccgcatataacatagtgcagttcctgtttttcttttga

SEQ ID NO: 78332 - protein, 133 aa, Unknown
  Obtained from environmental sample
  SIGNAL (1)...(22)
  misc_feature (1)..(133): Xaa is any amino acid
MLVSLLLILPFVFAFLMLASSSKDSSAFRMGLLCFAIPFILATALVAIGGQQTDIYPWFSILGIDIEFSLYGYGLSLWMVWLTTLLSFLAFVYSRDSLSLGINKFAIGLLALEGTIIGAFLSAYNIVQFLFFF

SEQ ID NO: 78333 - DNA, 360 bp, Unknown
  Obtained from environmental sample
  misc_feature (1)..(360): n is a, c, g, or t
gtgaagtctctccctattcagcaatgcaacctcgtgttgccaggctcaaattacgagcaaacatacaggaataaatcgatgactatgacaagactgaagatttcgaaaactctgctggctgtaatgttgacctctgccgtcgcgaccggctctgcctacgcggaaaacaacgcgcagactaccaatgaaagcgcagggcaaaaagtcgatagctctatgaataaagtcggtaatttcatggatgacagcgccatcaccgcgaaagtgaaggcggccctggtggatcatgacaacatcaagagcaccgatatctctgtaaaaaccgaatcaaaagtcgtgaccctggagcggtttcgttga

SEQ ID NO: 78334 - protein, 119 aa, Unknown
  Obtained from environmental sample
  misc_feature (1)..(119): Xaa is any amino acid
MKSLPIQQCNLVLPGSNYEQTYRNKSMTMTRLKISKTLLAVMLTSAVATGSAYAENNAQTTNESAGQKVDSSMNKVGNFMDDSAITAKVKAALVDHDNIKSTDISVKTESKVVTLERFR

SEQ ID NO: 78335 - DNA, 621 bp, Unknown
  Obtained from environmental sample
  misc_feature (1)..(621): n is a, c, g, or t
ttgctttggggaattgacggttttcattttaccatgcaccatttttcgttgcggcttgngatgggatatttgttgtttgcccgaagatttttttgtttttgggaaaatctgcaaaaagaatacagtttttccattccgcatattttgtttaaggaagtttcaacccgttttaaatctgtgaaaaacgcagtgaagctgcttcccgatacgggcctagtagccattcacgatgcggtgcgtccgcttgcgtcaaaacggtttatacagaatgctttttatgcagccagcaaactcggaaacgctgtgtctgccctgcctataacggattctctgcgattggttgataaagagataaatacaactgtgaacagaaatcttttttaccgcatgcaaacaccgcaaatttttcagtgtaaggagataaaaaaagcctatgaccagccttatcaacctcattttaccgatgatgcaactgtttttgaagcatctggcgggaaaattcacttgatagcgggtgaagaacagaatattaaaattactaccccgttagatttgtatctggctgaatatctgattaataaagggaagagaacaggaagaacaaaaaataagattgaataa

SEQ ID NO: 78336 - protein, 206 aa, Unknown
  Obtained from environmental sample
  DOMAIN (18)...(194): Uncharacterized protein family UPF0007
  misc_feature (1)..(206): Xaa is any amino acid
MLWGIDGFHFTMHHFSLRLXMGYLLFARRFFCFWENLQKEYSFSIPHILFKEVSTRFKSVKNAVKLLPDTGLVAIHDAVRPLASKRFIQNAFYAASKLGNAVSALPITDSLRLVDKEINTTVNRNLFYRMQTPQIFQCKEIKKAYDQPYQPHFTDDATVFEASGGKIHLIAGEEQNIKITTPLDLYLAEYLINKGKRTGRTKNKIE

SEQ ID NO: 78337 - DNA, 318 bp, Unknown
  Obtained from environmental sample
  misc_feature (1)..(318): n is a, c, g, or t
ttggaaacaaaggcggcggatttaaccgcccaattggaagaaatgcgcgaccaactactgagaaaaaccgcagattttgataattaccggaaaaggatgaaccaggaaaagcaaaaagccattgattttgccaatgagagccttcttttagatattattccggttatggacgactttgaacgggcaatccaatctgcggaaacctcggatgaactaaaaggattacccgctggaaaggccatgctggacggcatcaccataaaagagaaacagcttgcaggcaagcttgaaaataaatggaaacataaaacgttataa

SEQ ID NO: 78338 - protein, 105 aa, Unknown
  Obtained from environmental sample
  DOMAIN (1)...(95): GrpE
  misc_feature (1)..(105): Xaa is any amino acid
METKAADLTAQLEEMRDQLLRKTADFDNYRKRMNQEKQKAIDFANESLLLDIIPVMDDFERAIQSAETSDELKGLPAGKAMLDGITIKEKQLAGKLENKWKHKTL

SEQ ID NO: 78339 - DNA, 414 bp, Unknown
  Obtained from environmental sample
  misc_feature (1)..(414): n is a, c, g, or t
gtgagtccatcatacccccgtgcttccaatggaacgccagatcgcaaagacacaaaagcgtggctttgtgtagaaaccaatttcccaatggggggcttatttgcgccccgttgggcattttttgacaaacttatttttttggaggatagcatgaaagtaataccattgggagatcgggttctggtaaaacctgatgaaagcgaaacaaaatcgcccggcgggattatcatccctgacgcggcgcgggaaaaaactcatcagggctatgtcattgaaatcggtgacggtaaagaagtcagcgtgaaacccggtcagaaagtcatgtataacaaatacggtgggacatccatcaaaattgacggggaggaacatctgattctgaaaacagaagaccttattgctgtattcgagtag

SEQ ID NO: 78340 - protein, 137 aa, Unknown
  Obtained from environmental sample
  DOMAIN (52)...(136): Chaperonin 10 Kd subunit
  misc_feature (1)..(137): Xaa is any amino acid
MSPSYPRASNGTPDRKDTKAWLCVETNFPMGGLFAPRWAFFDKLIFLEDSMKVIPLGDRVLVKPDESETKSPGGIIIPDAAREKTHQGYVIEIGDGKEVSVKPGQKVMYNKYGGTSIKIDGEEHLILKTEDLIAVFE

SEQ ID NO: 78341 - DNA, 621 bp, Unknown
  Obtained from environmental sample
  misc_feature (1)..(621): n is a, c, g, or t
ttggggtcgtaccgatgcactgaaaacattgtcaattatccttggaaatatgatgattttcaagaagagcctatgccgacaagcggaactatttcacatgcaatagaacgcatttatccttatgtcgcacagcatgaaggttatatgactggtatgatgatgtctgataaatacgcggggtcattcatttcaagtcatcaaactatgcttgaaacaataattgttaagctggttgataatattgaacaaaaattctctacgtatgatcaattgctttctattccgcttactaattacagtttttggaaatatattaccaaaaataaaaacatttacttatatggagctggaaattatggtataaattttcttaattccttattatctcaaggaattaaaccaattggatttgtggtttctaatggtcataaaaaagaatcttttatcaatggacataaagtatatgaattatgtgaattgccaaaaaacgaagaatatgggttattgctcacagttgatagaaaaaatactactgctattatagaaaatttaaaccaacatggctttactaactattataatttttatgagagtacccctccaaaaggactagagatatga

SEQ ID NO: 78342 - protein, 206 aa, Unknown
  Obtained from environmental sample
  misc_feature (1)..(206): Xaa is any amino acid
MGSYRCTENIVNYPWKYDDFQEEPMPTSGTISHAIERIYPYVAQHEGYMTGMMMSDKYAGSFISSHQTMLETIIVKLVDNIEQKFSTYDQLLSIPLTNYSFWKYITKNKNIYLYGAGNYGINFLNSLLSQGIKPIGFVVSNGHKKESFINGHKVYELCELPKNEEYGLLLTVDRKNTTAIIENLNQHGFTNYYNFYESTPPKGLEI

SEQ ID NO: 78343 - DNA, 492 bp, Unknown
  Obtained from environmental sample
  misc_feature (1)..(492): n is a, c, g, or t
atgacctccgatccgcacgtgcccgatggcattcggctgcaaaaagtcctggcccaggcgggctacggctcgcgccgcaaggccgaggaactgatcgccgccgggcgggttagcgtggacggcaaacaggtgcgcgaactgggcattcgcgtggacccgagccgcaacgccatccacgtggacggcactcgagtgatcacggacaccgccgccagcctcaccctcgcgctgcataagccgcgcggcgtcatctccgcgatgagcgatccggaaggccgccccaccatcaccgatctgctgcccgaccacgccacgggtgccgaggctgggcggctgatgcacgtgggccgttctggacgccgactccgagggcccgctgctgatcaccaacgacggcgagcttgcgcatcggctggcgcaccccacttacgagatcccaaaaaaccttgtcgcccccgtgcgcggggggccaatgtacccgcgccctcgtaa

SEQ ID NO: 78344 - protein, 163 aa, Unknown
  Obtained from environmental sample
  DOMAIN (11)...(57): S4 domain
  misc_feature (1)..(163): Xaa is any amino acid
MTSDPHVPDGIRLQKVLAQAGYGSRRKAEELIAAGRVSVDGKQVRELGIRVDPSRNAIHVDGTRVITDTAASLTLALHKPRGVISAMSDPEGRPTITDLLPDHATGAEAGRLMHVGRSGRRLRGPAADHQRRRACASAGAPHLRDPKKPCRPRARGANVPAPS

SEQ ID NO: 78345 - DNA, 534 bp, Unknown
  Obtained from environmental sample
  misc_feature (1)..(534): n is a, c, g, or t
gtgatcgcccatcatcacttcgtatatactgtacattgtcctgggtttttcaagcaagctgacaaaacgcgagctaataaagtctttccgcatataaacccctttttagtgaatatcagacactattatagcatggagaaaaggtgtatactagcgtcaatgggcgataaggaagtagtcatcattacaggcggttcaaaaggtattgggcgcgcgactgcggccctgttccgcaaaaagggatatactgtatatacgctgtcccgcggcgcctgtgatttggaaggcgttaattcggttatctgcgatataacggacggagtcagactcatagaggcaattgacggtatttttaaaacggaaaaacgcatcgacgtactggttaacacgcccgcggcggcatttcaggctcggttgaaaaaaccgacccggcggacgcgaaaaaaattatttaaacttcaattttttccgcgcatttttgaagctatcagggcccacaatacccccatatgccgctgccgccttatgcggtaa

SEQ ID NO: 78346 - protein, 177 aa, Unknown
  Obtained from environmental sample
  misc_feature (1)..(177): Xaa is any amino acid
MIAHHHFVYTVHCPGFFKQADKTRANKVFPHINPFLVNIRHYYSMEKRCILASMGDKEVVIITGGSKGIGRATAALFRKKGYTVYTLSRGACDLEGVNSVICDITDGVRLIEAIDGIFKTEKRIDVLVNTPAAAFQARLKKPTRRTRKKLFKLQFFPRIFEAIRAHNTPICRCRLMR

SEQ ID NO: 78347 - DNA, 654 bp, Unknown
  Obtained from environmental sample
  misc_feature (1)..(654): n is a, c, g, or t
atgaccggattgtcatggaaaacttcctttatacagattgcccagtttatcgcaataaaagtttttatgaatattggttgcggtgggggtggattcgctgatttcatcaggggagcagctcggcaagtaattctggtagagccaaattccagctttgaccagcagctcactgaaaaaggatacgaagtattcccgtatgcggaagaggccttaaagaaatattccagttgtgttgaggtaataacttctttcgatgtgattgagcacgtgccagatccaggtgcgtttttgcagaccgtttacgatttgttgtgtgatggcgggattgcatttatcggtacccctaccgattatccagtactacgggctctgctcggccaaagtttcgattctttcgtttttacggtacagcacccctgggtgttctccccaaccagtctggagatgctggcagcgcgctgcggatttactggtattgaggtgcagttccaccagaagtttgggttgggcaacctgattgcctggctccagacaggtaaacccaaaggtgaagcagtctatgattttatcacccccgcacttgatggtttgtggcgaactgaaatgtcaagggagggtactgctgagtatctggttttgaaagttactaagtag

SEQ ID NO: 78348 - protein, 217 aa, Unknown
  Obtained from environmental sample
  DOMAIN (23)...(110): Methyltransferase domain
  misc_feature (1)..(217): Xaa is any amino acid
MTGLSWKTSFIQIAQFIAIKVFMNIGCGGGGFADFIRGAARQVILVEPNSSFDQQLTEKGYEVFPYAEEALKKYSSCVEVITSFDVIEHVPDPGAFLQTVYDLLCDGGIAFIGTPTDYPVLRALLGQSFDSFVFTVQHPWVFSPTSLEMLAARCGFTGIEVQFHQKFGLGNLIAWLQTGKPKGEAVYDFITPALDGLWRTEMSREGTAEYLVLKVTK

SEQ ID NO: 78349 - DNA, 573 bp, Unknown
  Obtained from environmental sample
  misc_feature (1)..(573): n is a, c, g, or t
ttggaaaatttttgcaatgaactacctaattttgaagataaagataaaacaattatttttgttgcacgtatggtagaaaaagaaaaacgcccatctcttgttctcaaaatttgggaattgctatatgaaaaaaatcctgaatggaatttgctctttttaggagatggagaagatttgcccatattaagagaaaaggcaaaaaatttgcctcgtgttgaatttttggggtttcagaaccctgaaccttattatgaaaaagcctctattctgctccaaacaagcgcgaaagattttgaaggttttggaatgacccttgccgaagcgcaaaaaaatgcctgcattcctatagcaatggattcatatctttcgctttccgatattattgaaaatgagaaaaatggctttataattcccaatgatgatataaatgcgatggcagaaaaaattcagattttgataaataaccctgcattgcgaagagaaattgcattgggtggagttcaaagcgcaagaaaatttgatattaaacttttggcaaatgaatgggaaaaaatctttgcggagattttatga

SEQ ID NO: 78350 - protein, 190 aa, Unknown
  Obtained from environmental sample
  DOMAIN (2)...(169): Glycosyl transferases group 1
  misc_feature (1)..(190): Xaa is any amino acid
MENFCNELPNFEDKDKTIIFVARMVEKEKRPSLVLKIWELLYEKNPEWNLLFLGDGEDLPILREKAKNLPRVEFLGFQNPEPYYEKASILLQTSAKDFEGFGMTLAEAQKNACIPIAMDSYLSLSDIIENEKNGFIIPNDDINAMAEKIQILINNPALRREIALGGVQSARKFDIKLLANEWEKIFAEIL

SEQ ID NO: 78351 - DNA, 633 bp, Unknown
  Obtained from environmental sample
  misc_feature (1)..(633): n is a, c, g, or t
gtgtcgggcggcaggagtagcataacacgcggcacaagtgtaactgttacggcaacctctaacacaggctacgactttttgaactggacagaaaacggcacgcaggtttccacaagcgcaagttatactttcacggctgaaggcaaccgcactttggttgcaaactttacacataaaacctacaatattgacgtttctgcaaacccaactgcgggcggcagtgtgtcgggcggtaatacttacactcacggcacaagcgtaaccgtgtccgcaactgcaagcattggttacgactttgtgaattggactgaaaacggtacttctgtaagcacaagcgcaagttacactttcaccgccactggcaaccgtactttggttgccaacttcacgcagaaaacgtacaacatttacgtaattcccgcccaaaatgagggcggcagtgtgtcgggcggcggcacaggcataacacacggcacaagcgtaactgtttctgcaactgcaaatacaggctacgactttttgaactggacagagggcggcactgctgtaagcacaagcgcaagttacactttcaccgccgaaggcaaccgcattttggttgcaaacttcacgcataaaacctaccaacattga

SEQ ID NO: 78352 - protein, 210 aa, Unknown
  Obtained from environmental sample
  misc_feature (1)..(210): Xaa is any amino acid
MSGGRSSITRGTSVTVTATSNTGYDFLNWTENGTQVSTSASYTFTAEGNRTLVANFTHKTYNIDVSANPTAGGSVSGGNTYTHGTSVTVSATASIGYDFVNWTENGTSVSTSASYTFTATGNRTLVANFTQKTYNIYVIPAQNEGGSVSGGGTGITHGTSVTVSATANTGYDFLNWTEGGTAVSTSASYTFTAEGNRILVANFTHKTYQH

SEQ ID NO: 78353 - DNA, 828 bp, Unknown
  Obtained from environmental sample
  misc_feature (1)..(828): n is a, c, g, or t
ttgggctaccattccgctgggaaagaaattttaaggattcaattgcgaattgaaaaatgcgttcagggcggcttagggcttgcccatttgcccgatggctctgtttgtcttgtggaaggggcgttgccgggtgaattagcagaaatagagataacagagcgaaaaaaagatttctcaaaggcagtagctgtaaaaattttggagactagcaaaggcagacgaaacccgcattgcgaatattacggcaaatgcgggggctgcaacgcgcaatacgcggaatttgaattgcaaatagagttattaaagcaaatagttttggatttattctcaagaacggcaaaagtgaatttgccgcaagactttgaaattcacagcggagaggaatggggctatcgctctcgggcgcaggttttcgctacggaaaaaaacattccctggggttttagggaacgagccacaaacaatgtggtgccaatagagaaatgccttgttctgtcgcagaatttaaacgaaaaactgaaagagaattcaaatttaaaaaaacgccatttatttgacaaccaaagcgaaaaatttttgggcaaatatattcatgcagatgaaaacgtattttttcaaagcaatttggaattgctccctaaattgatagatggagttaaaaaagctgcaaatggcggcgagcttcttttggatattttttgcggagtgggattgttttccgcatttttgcaagatatgtttgggcaggtcatagctattgagcaaaattcccattgtcaaaaattcgctgagctaaatttgggcaagaactgcgcatttttaacatga

SEQ ID NO: 78354 - protein, 275 aa, Unknown
  Obtained from environmental sample
  DOMAIN (6)...(65): TRAM domain
  misc_feature (1)..(275): Xaa is any amino acid
MGYHSAGKEILRIQLRIEKCVQGGLGLAHLPDGSVCLVEGALPGELAEIEITERKKDFSKAVAVKILETSKGRRNPHCEYYGKCGGCNAQYAEFELQIELLKQIVLDLFSRTAKVNLPQDFEIHSGEEWGYRSRAQVFATEKNIPWGFRERATNNVVPIEKCLVLSQNLNEKLKENSNLKKRHLFDNQSEKFLGKYIHADENVFFQSNLELLPKLIDGVKKAANGGELLLDIFCGVGLFSAFLQDMFGQVIAIEQNSHCQKFAELNLGKNCAFLT

SEQ ID NO: 78355 - DNA, 321 bp, Unknown
  Obtained from environmental sample
  misc_feature (1)..(321): n is a, c, g, or t
ttgagccggttacgattgatgaaattcgggctgcaatccgtgcgaacaattaaccaaaccaggcaatttaagcgcgacctgaaacgtgaagctaaaggcaaacaccacgccaccttggaagattcactaatgcatgtattggttgcgctggccgccgatgaaccgttgctccccaggcattgcgaccatcccttgacaggagatttaaaagatttccgggattgccatgttaaacccaacttggtgctgatttatcaaaaaccggatgacgatactttgctccctggtcgtattggttcacatgctggacttgggctttaa

SEQ ID NO: 78356 - protein, 106 aa, Unknown
  Obtained from environmental sample
  DOMAIN (17)...(105): Plasmid stabilisation system protein
  misc_feature (1)..(106): Xaa is any amino acid
MSRLRLMKFGLQSVRTINQTRQFKRDLKREAKGKHHATLEDSLMHVLVALAADEPLLPRHCDHPLTGDLKDFRDCHVKPNLVLIYQKPDDDTLLPGRIGSHAGLGL

SEQ ID NO: 78357 - DNA, 453 bp, Unknown
  Obtained from environmental sample
  misc_feature (1)..(453): n is a, c, g, or t
atgggcgccttgggcgtcatcttcctgggtgtaagccttctcgccatgcttctgcgcgtcctggcccccgacctgcgctggctgctcctgggcttcctgctcgtgatccccctgccctacctggccatactactgggctgggtggtcacggaagtgggccgccagccctgggtcgtctataacctcatgcggaccagcctggtcggcatccccggcgtggactggttccaggtggccgcctccctgaccgtcttggtcgctgtttactccgtcatcaccctcgtcggcctattcttcatgggtatatgccccttgagcgaccctaaatcggtcccggccggcctctatacaatgatggaactagaccatgttagcgtatcttgggagacatctggtttttcctctggtgccttttttgtggggcctcttttttcgccttgggccggcttttga

SEQ ID NO: 78358 - protein, 150 aa, Unknown
  Obtained from environmental sample
  SIGNAL (1)...(22)
  misc_feature (1)..(150): Xaa is any amino acid
MGALGVIFLGVSLLAMLLRVLAPDLRWLLLGFLLVIPLPYLAILLGWVVTEVGRQPWVVYNLMRTSLVGIPGVDWFQVAASLTVLVAVYSVITLVGLFFMGICPLSDPKSVPAGLYTMMELDHVSVSWETSGFSSGAFFVGPLFSPWAGF

SEQ ID NO: 78359 - DNA, 717 bp, Unknown
  Obtained from environmental sample
  misc_feature (1)..(717): n is a, c, g, or t
gtggaaaacgaaatgtggcgcgacatatgccgtaagggcaaacgaaccccagtccggccggtttgttttcttttgtccgaaggaacgcccgatcctccgccggccatgggaggccaggcggtcatggacggcctgatcatgcgcaacggctctgtttacgccttggccatgcgcctgccggacggaagcattatggccgagcgcacttcctggtacagcatgtccggcgccggagcggccggactgccttttgtacgcggctttcccatcctgctggaaaccatggtgaacggcataaaagccttgaaccgttccgccgagctttccgtgccgggcgaggaaaagggcctcagcaaaacgcaattggcttttaccctgctgtttgctctggttatggcgattgttctgtttgtggcggcgccccatgcgctttcactgggcatgaaaacactcggcttgggcggcgatgtggaaggtcttacattccatgtctgggacgggtttttcaaatttgtcgtttttttcggctacatccgctgtatttcccggatgaaggatatcccgcaccgtgtttctaataccctcgcgcctaacacaggtccaataactcgttacaaagcgggcggtggaaattccctcccggagagcggcccaattacattcgttggcaccccctttgctgcccccacatttttgctatttgccctgatccaatag

SEQ ID NO: 78360 - protein, 238 aa, Unknown
  Obtained from environmental sample
  DOMAIN (82)...(236): Protein of unknown function (DUF1385)
  misc_feature (1)..(238): Xaa is any amino acid
MENEMWRDICRKGKRTPVRPVCFLLSEGTPDPPPAMGGQAVMDGLIMRNGSVYALAMRLPDGSIMAERTSWYSMSGAGAAGLPFVRGFPILLETMVNGIKALNRSAELSVPGEEKGLSKTQLAFTLLFALVMAIVLFVAAPHALSLGMKTLGLGGDVEGLTFHVWDGFFKFVVFFGYIRCISRMKDIPHRVSNTLAPNTGPITRYKAGGGNSLPESGPITFVGTPFAAPTFLLFALIQ

SEQ ID NO: 78361 - DNA, 414 bp, Unknown
  Obtained from environmental sample
  misc_feature (1)..(414): n is a, c, g, or t
atgtacaatgccaaatatatcattcccggcctgctggtcttcatagggattatcaccatgccgttctggatcaatctgggaagccccaggtacgtctatcctgaagtggctgtgcccgcgcaggccgtgctgttcggcggcgaagcccgcacggattgcgtggagccgaaagaatggatgcgcgccgagcatatgagtttgctcatcgactggcgcgatcaggccttacgggaaacgaaaagagtctatgtcgccagtgacggcaaggaatgggaaaccagcctgcaaaacacctgtatggcctgtcatgccaacaaagtggagttctgcgacaagtgtcatgacaccaacagcgtgaatccgtactgctgggattgccacgtcataccccaggggaataacaatgaattctag

SEQ ID NO: 78362 - protein, 137 aa, Unknown
  Obtained from environmental sample
  misc_feature (1)..(137): Xaa is any amino acid
MYNAKYIIPGLLVFIGIITMPFWINLGSPRYVYPEVAVPAQAVLFGGEARTDCVEPKEWMRAEHMSLLIDWRDQALRETKRVYVASDGKEWETSLQNTCMACHANKVEFCDKCHDTNSVNPYCWDCHVIPQGNNNEF

SEQ ID NO: 78363 - DNA, 534 bp, Unknown
  Obtained from environmental sample
  misc_feature (1)..(534): n is a, c, g, or t
gtgatgctcctgggggggcgggtggccgaggaggtggcgaggaaccagatgaccaccggcgccggcaacgatattgaacgggccaccgatctggcccgcaacatggtcaggaaatggggcatgagcgagaccctgggcccccaggccttcggcaagaaggaagagcagattttcctgggccgggagatagcccagcacagcgactattccgaagccacggcccagcgcatcgaccaggaagtggccgaactgatgaacagcgcccatcaaaaggcccaggatatcatcgcccggcaccgggataccctggccgccttggccgaacggcttttggaaaaggagaccctggaggccgaggaggttctggacctctgcgccggggccctggcggccgaggggctgccccggccgaactgggcggaccggaacaagaaagccgagactttttccaggcccgagcaggccgcccccgaggacggggaagggcggcccgcggcgggagacaaggaagacggagatgaccccaacgcctga

SEQ ID NO: 78364 - protein, 177 aa, Unknown
  Obtained from environmental sample
  DOMAIN (1)...(124): Peptidase family M41
  misc_feature (1)..(177): Xaa is any amino acid
MMLLGGRVAEEVARNQMTTGAGNDIERATDLARNMVRKWGMSETLGPQAFGKKEEQIFLGREIAQHSDYSEATAQRIDQEVAELMNSAHQKAQDIIARHRDTLAALAERLLEKETLEAEEVLDLCAGALAAEGLPRPNWADRNKKAETFSRPEQAAPEDGEGRPAAGDKEDGDDPNA

SEQ ID NO: 78365 - DNA, 408 bp, Unknown
  Obtained from environmental sample
  misc_feature (1)..(408): n is a, c, g, or t
atggggcatgagcgagaccctgggcccccaggccttcggcaagaaggaagagcagattttcctgggccgggagatagcccagcacagcgactattccgaagccacggcccagcgcatcgaccaggaagtggccgaactgatgaacagcgcccatcaaaaggcccaggatatcatcgcccggcaccgggataccctggccgccttggccgaacggcttttggaaaaggagaccctggaggccgaggaggttctggacctctgcgccggggccctggcggccgaggggctgccccggccgaactgggcggaccggaacaagaaagccgagactttttccaggcccgagcaggccgcccccgaggacggggaagggcggcccgcggcgggagacaaggaagacggagatga

SEQ ID NO: 78366 - protein, 135 aa, Unknown
  Obtained from environmental sample
  misc_feature (1)..(135): Xaa is any amino acid
MGHERDPGPPGLRQEGRADFPGPGDSPAQRLFRSHGPAHRPGSGRTDEQRPSKGPGYHRPAPGYPGRLGRTAFGKGDPGGRGGSGPLRRGPGGRGAAPAELGGPEQESRDFFQARAGRPRGRGRAARGGRQGRRR

SEQ ID NO: 78367 - DNA, 618 bp, Unknown
  Obtained from environmental sample
  misc_feature (1)..(618): n is a, c, g, or t
ttggagggaggtacgccacagacccccaggggctttttgggcccacgccggccctgtaggggtttaatggaaaagggccggctggttcttcttccccaagggggtcaggcccggtttccagaggggcccacttttcatcttcgtccacgccccggggaaccaggccgggtcgattccgcgcccaagtcgaagaggtcgggcgccgtcggcttcctcgggacagggcccgccttccacggcctcttccggcttggcgaagcggccgccatcggaaaaggaatccggggtcaggttgaggatggacatgaggagcggccggctgaaatccaaggaccaagccccggctttggtcctccaggtcaaaaggtcaggcgttggggtcatctccgtcttccttgtctcccgccgcgggccgcccttccccgtcctcgggggcggcctgctcgggcctggaaaaagtctcggctttcttgttccggtccgcccagttcggccggggcagcccctcggccgccagggccccggcgcagaggtccagaacctcctcggcctccagggtctccttttccaaaagccgttcggccaaggcggccagggtatcccggtgccgggcgatga

SEQ ID NO: 78368 - protein, 205 aa, Unknown
  Obtained from environmental sample
  misc_feature (1)..(205): Xaa is any amino acid
MEGGTPQTPRGFLGPRRPCRGLMEKGRLVLLPQGGQARFPEGPTFHLRPRPGEPGRVDSAPKSKRSGAVGFLGTGPAFHGLFRLGEAAAIGKGIRGQVEDGHEERPAEIQGPSPGFGPPGQKVRRWGHLRLPCLPPRAALPRPRGRPARAWKKSRLSCSGPPSSAGAAPRPPGPRRRGPEPPRPPGSPFPKAVRPRRPGYPGAGR

SEQ ID NO: 78369 - DNA, 561 bp, Unknown
  Obtained from environmental sample
  misc_feature (1)..(561): n is a, c, g, or t
gtgccgtggcggcccccatctcaggagcgactcgcactcacatatagcttgcatggtgttttccagggcacggccctcacgcgccgaagcgtggcaaccttactggcggggatagccaaagagaaaatagcgatgctgcgcgaaaacccagaggagttcatcgtaaagactgtaggcatcatcaacaaccaaaaggcatcggtggtggtggagcacattgagtacaggcccagcgcggaagagccatacacgcaggacatattcaacatgagccgcgcatcggatgaatacgcaaaggcattccaagccaagcgctccatacaggactatgttttcacggatggaacggcaacggacagcgtagagaggcgcttcgcggaggacttggacaaggccaacgaggtgacggtatatgccaagctgccaaaggggccgcgcgcacttcacataccaacgccagtgggcaactactcccccgactgggccatttccttcaaaaagggcgtggtaaaacacatcttcttcattgccgagaccaagggcacgatggacggcctatag

SEQ ID NO: 78370 - protein, 186 aa, Unknown
  Obtained from environmental sample
  misc_feature (1)..(186): Xaa is any amino acid
MPWRPPSQERLALTYSLHGVFQGTALTRRSVATLLAGIAKEKIAMLRENPEEFIVKTVGIINNQKASVVVEHIEYRPSAEEPYTQDIFNMSRASDEYAKAFQAKRSIQDYVFTDGTATDSVERRFAEDLDKANEVTVYAKLPKGPRALHIPTPVGNYSPDWAISFKKGVVKHIFFIAETKGTMDGL

SEQ ID NO: 78371 - DNA, 594 bp, Unknown
  Obtained from environmental sample
  misc_feature (1)..(594): n is a, c, g, or t
ttgttggaaggaagtaatcttaaaaaaatagtttgtgatttatcttcagaagatagtataaatgaattctcggatcaactctcaattatgaacggaatcgtatatgcagccggaattgtgaaaactttacctttccaattcgtatcttcaaaggaaataaaaaatatatttgatgtaaattttcttgcgcctgtattgttgtcaaaaatattaattaaaactaaaaaaatgtcaaaagaggcttcaatcgtatttatatcatctatagacggacccattacggctcatatagggaactctatgtattcagcttccaaaggtgcagttgcagcaatggctaaaagtatggcggtagatttggcacctaaaaagataagagtaaattgtattttgcctggaatgactgaaacaccgcttatacatactggggatataacccaagaacaattagatatagatatgaaattatatcctctaaaaagatatggtaagcctgaagaaatagcctatgccgcagtttattttctttctgatgcaagtgcatggacaactggcacgaatttaattatagacggcggctttacgttgttataa

SEQ ID NO: 78372 - protein, 197 aa, Unknown
  Obtained from environmental sample
  misc_feature (1)..(197): Xaa is any amino acid
MLEGSNLKKIVCDLSSEDSINEFSDQLSIMNGIVYAAGIVKTLPFQFVSSKEIKNIFDVNFLAPVLLSKILIKTKKMSKEASIVFISSIDGPITAHIGNSMYSASKGAVAAMAKSMAVDLAPKKIRVNCILPGMTETPLIHTGDITQEQLDIDMKLYPLKRYGKPEEIAYAAVYFLSDASAWTTGTNLIIDGGFTLL

SEQ ID NO: 78373 - DNA, 336 bp, Unknown
  Obtained from environmental sample
  misc_feature (1)..(336): n is a, c, g, or t
atggacaactggcacgaatttaattatagacggcggctttacgttgttataaagaaatataaaatggctttcattacttataaaaatgttggtatacgtgcaatggcggcgtgcgtaccttctaatattttctacaacaaagatctcggttatctgattcctgaggaagaaattgaaaaaaccataaatacgattggaatacgggaacgccggataagcgacgtagacacatgttcttctgatctctgttttaaagcggcgaaaaaactgatagaagataatgggatagatgtaaatacgatagatgtttttgttgttcctcacccaaacgcctga

SEQ ID NO: 78374 - protein, 111 aa, Unknown
  Obtained from environmental sample
  misc_feature (1)..(111): Xaa is any amino acid
MDNWHEFNYRRRLYVVIKKYKMAFITYKNVGIRAMAACVPSNIFYNKDLGYLIPEEEIEKTINTIGIRERRISDVDTCSSDLCFKAAKKLIEDNGIDVNTIDVFVVPHPNA

SEQ ID NO: 78375 - DNA, 720 bp, Unknown
  Obtained from environmental sample
  misc_feature (1)..(720): n is a, c, g, or t
gtgcctgtggaatggggacaagaaatgcctttcaataataatttagaagataaaagttgccgagaaactaacaatggcagagtctggacaggttgtatgccaacagcaattgcacaaattatgtcttattggaaatatcctaccaacctaggcggtagcattacttataactggacgactttaaataactacgagcattacaatgatttttatccatcttcaggagataatactgctacaatactaagaaaagctctagcgagaaatcaagtagcagatttatttgaaagaataggtgcaacaggcacaggtgttggcacgaaatacggctgcgctgacagcggtacctccccacatgagaaggctataaattttctgacatctgtaggatttacgctttatagcggctttaatggtgctaaacttagaaattatgataatatatttgttcaaatggctttgcaggattacggacctttgtatacagtaggcagtgatcctaaagcagatcatgcttgggttattgatggcatggcttatgtatatgtgcctattccgcccgatccttacaaaatttattatgtacataataattggggatgggatggagcagacaacggttattatttagagggagtttatgatccggaggcctattatacaggttccggtgtctactatgatttctataatataagagtaggtttggtatatgcataa

SEQ ID NO: 78376 - protein, 239 aa, Unknown
  Obtained from environmental sample
  misc_feature (1)..(239): Xaa is any amino acid
MPVEWGQEMPFNNNLEDKSCRETNNGRVWTGCMPTAIAQIMSYWKYPTNLGGSITYNWTTLNNYEHYNDFYPSSGDNTATILRKALARNQVADLFERIGATGTGVGTKYGCADSGTSPHEKAINFLTSVGFTLYSGFNGAKLRNYDNIFVQMALQDYGPLYTVGSDPKADHAWVIDGMAYVYVPIPPDPYKIYYVHNNWGWDGADNGYYLEGVYDPEAYYTGSGVYYDFYNIRVGLVYA

SEQ ID NO: 78377 - DNA, 300 bp, Unknown
  Obtained from environmental sample
  misc_feature (1)..(300): n is a, c, g, or t
atgcgcattcttgtaaccggcggcgcaggttttttaggctcgcatttgtgcgataggctcattgagcaagggcacgaagttatttgccttgacaattatttcacaggcagcaaaaaaaacattgagcatttagcgagcaaccctcgctttgagcttattcgccacgatgtcacagaatcaatccttttggaggtggataggatttacaatctcctttgccctgcctctccggtgcattatcaatacaacaaccggaaaacaagnnnnnnnnnnnnnnnnnnnnnnnnnnnatgcagctga

SEQ ID NO: 78378 - protein, 99 aa, Unknown
  Obtained from environmental sample
  misc_feature (1)..(99): Xaa is any amino acid
MRILVTGGAGFLGSHLCDRLIEQGHEVICLDNYFTGSKKNIEHLASNPRFELIRHDVTESILLEVDRIYNLLCPASPVHYQYNNRKTXXXXXXXXXXCS

SEQ ID NO: 78379 - DNA, 483 bp, Unknown
  Obtained from environmental sample
  misc_feature (1)..(483): n is a, c, g, or t
atgtctcttttagaaatcttacccaagccgcaggcaaaagactgcctgctagactacgctgcaattttgcagcttttgccacatcgctttccttttttgctcatagacagagttctctcttttgagccagatgcagagaaggcaaaaataacttgcttgaaaaacgcgagttttaacgagccttattttatggggcacttcccgggcgacccagtgatgccgggtgttttgcaggtagaagctatggcgcaagctggttgcattttggcatacttaaaatttgaagaggagtccaaaggcaaacgccccgcttttatgggtgttgacggttgccgttttcgccgtgctgttagaccaggcgattctttgaggatagaagccgagttggaagaatttcgccgcggcataatcacatttgacggaaaaatttttgtgggcgaagaccgcgttgcagaagcaaagctaaaagccacaatggtgtga

SEQ ID NO: 78380 - protein, 160 aa, Unknown
  Obtained from environmental sample
  DOMAIN (26)...(154): FabA-like domain
  misc_feature (1)..(160): Xaa is any amino acid
MSLLEILPKPQAKDCLLDYAAILQLLPHRFPFLLIDRVLSFEPDAEKAKITCLKNASFNEPYFMGHFPGDPVMPGVLQVEAMAQAGCILAYLKFEEESKGKRPAFMGVDGCRFRRAVRPGDSLRIEAELEEFRRGIITFDGKIFVGEDRVAEAKLKATMV

SEQ ID NO: 78381 - DNA, 465 bp, Unknown
  Obtained from environmental sample
  misc_feature (1)..(465): n is a, c, g, or t
ttgttgttgaagccctttcctattttgaaccccgccttgaaatgctgggccgctggtggttgcagctccacggtgaaactgaggggaaaagagttgaagccatattacccaccctcctgcttttccgaagatctccatgctatcggtcaatattaccaggaaggcggacgtttcctttttgaaacctttctggatttttttaaacctaccggcacaataattcccggttccacctttgacgacggtttgtctgttcttgaaggtaaatcctttgataatctaaatcaagcagtttcaaaggctgtatcagaagcccattatgaagccggtataccggtactcagatttaaaactgacaaacttgatgaagaaagcataggtgaatttatgtatatgcagatgctttcagcgtatttctccgcagcgttcctggatgttgaaccttttgaccagaacgggtgttga

SEQ ID NO: 78382 - protein, 154 aa, Unknown
  Obtained from environmental sample
  misc_feature (1)..(154): Xaa is any amino acid
MLLKPFPILNPALKCWAAGGCSSTVKLRGKELKPYYPPSCFSEDLHAIGQYYQEGGRFLFETFLDFFKPTGTIIPGSTFDDGLSVLEGKSFDNLNQAVSKAVSEAHYEAGIPVLRFKTDKLDEESIGEFMYMQMLSAYFSAAFLDVEPFDQNGC

SEQ ID NO: 78383 - DNA, 408 bp, Unknown
  Obtained from environmental sample
  misc_feature (1)..(408): n is a, c, g, or t
ttgccaaatctaacggtttttcttttttttgaatttcctttggcagtaggtggacgcttttccgcattcactgcggtcagctttttcccaatggcggtaatgggtgttgacataagaagttttgttcaaggcgccgaaacctgcgaaaaactcctgaaagcagatccacggggaggaatagcggcaagatattcagttatacgacacctgttacagaagaaaggttttgttgttgaagccctttcctattttgaaccccgccttgaaatgctgggccgctggtggttgcagctccacggtgaaactgaggggaaaagagttgaagccatattacccaccctcctgcttttccgaagatctccatgctatcggtcaatattaccaggaaggcggacgtttcctttttga

SEQ ID NO: 78384 - protein, 135 aa, Unknown
  Obtained from environmental sample
  misc_feature (1)..(135): Xaa is any amino acid
MPNLTVFLFFEFPLAVGGRFSAFTAVSFFPMAVMGVDIRSFVQGAETCEKLLKADPRGGIAARYSVIRHLLQKKGFVVEALSYFEPRLEMLGRWWLQLHGETEGKRVEAILPTLLLFRRSPCYRSILPGRRTFPF

SEQ ID NO: 78385 - DNA, 771 bp, Unknown
  Obtained from environmental sample
  misc_feature (1)..(771): n is a, c, g, or t
atgtcaaatctcttcggccataatttccagatcatgaccttcggggaatcccacggcccggccctgggagtggtcatcgacggtcttccggccggtctgcgcctgcccctggaactgattcaggccgacttggaccgccgccgccccggccgttccccctacgccagcccccgccaagagccggacgaagcggagatcttgagcggcctggccgccgagggccgcaccaacggcgcgcccctggtccttttgattcgcaaccgcgatgcccgtgggagcgattacaaggccctgcgccgcaaattcacgcccggacaaagcgattggccctatttcatgaaatacgggcttatgccccagccaggcggcggtcgttcctgctgccgggagaccgtggcccgggtggcggccggggccgtggcccggattttagttgcctcccttggatcacctggctccgggttctttccttggctctgtggtctttatcattgtggtaataccccgactcccgctttctcccaatatcctacccccttgatcttctgtttactcgttctcttttcccccctttgtgtctatcattgctattggattcctggcccaaatctatatgcttattcccattgtcgttctgcttcttcaatttttgatgccaatcatcacctctcctttcccgttttttggcgtaattctggtctttctatttatcttgcattgccctcccctgggtatgttggtcccattttttctctttctcacattatctga

SEQ ID NO: 78386 - protein, 256 aa, Unknown
  Obtained from environmental sample
  DOMAIN (9)...(255): Chorismate synthase
  misc_feature (1)..(256): Xaa is any amino acid
MSNLFGHNFQIMTFGESHGPALGVVIDGLPAGLRLPLELIQADLDRRRPGRSPYASPRQEPDEAEILSGLAAEGRTNGAPLVLLIRNRDARGSDYKALRRKFTPGQSDWPYFMKYGLMPQPGGGRSCCRETVARVAAGAVARILVASLGSPGSGFFPWLCGLYHCGNTPTPAFSQYPTPLIFCLLVLFSPLCVYHCYWIPGPNLYAYSHCRSASSIFDANHHLSFPVFWRNSGLSIYLALPSPGYVGPIFSLSHII

SEQ ID NO: 78387 - DNA, 333 bp, Unknown
  Obtained from environmental sample
  misc_feature (1)..(333): n is a, c, g, or t
gtgtcaatccgttccccctttgagtttgctgagggagaatcagagttagtctctgggtttaaagaagaattcggatccgtggggttttccttgatttttatagccgagtacgctagtattctatttatagccatagtaacgtctgctgtattccttgggggtggccccaccaccactatagcctttcaaactattgttatttgtttcttcgtaaaaagggcccgggcttccgtccctcggttccgttgcgccctttttnttgttctgtcaaagnnnnggngtccccctcttagtgtgctttccttcnttnttcttaaaatcnccgccccttga

SEQ ID NO: 78388 - protein, 110 aa, Unknown
  Obtained from environmental sample
  misc_feature (1)..(110): Xaa is any amino acid
MSIRSPFEFAEGESELVSGFKEEFGSVGFSLIFIAEYASILFIAIVTSAVFLGGGPTTTIAFQTIVICFFVKRARASVPRFRCALFXVLSKXXXPPLSVLSFXXLKIXAP

SEQ ID NO: 78389 - DNA, 525 bp, Unknown
  Obtained from environmental sample
  misc_feature (1)..(525): n is a, c, g, or t
atggacggatcagaacaaaatatggcaagactaaaaacaaaaagctggtatggaaaatattctttaaaaaataaggccgtttttataacaaaagaaaatataaacggacttttagccgaaacgggatacaaaaatataggattgctgcatattgacattgacggaaacgatgcgcatattttgactgaattagatttgaaagaattaaatcccgcaataatcattatggaatataacgccgtctttggcaaagaaagggaaataactatcccctatgacaaagactttttcagaactgacaaacactacagtaatctatattatggggcatcattacccgcattaacatatattgccaaaaataaaggttatagtttaattggctgtaatttggctggaaataatgtttattatgtgcgaaaagatttgttgaatgaaacaatcagggaaaaaacaattgatgaggcatttattatgagtaaattccgggaaagcagaaataaggattccccattatcatattga

SEQ ID NO: 78390 - protein, 174 aa, Unknown
  Obtained from environmental sample
  misc_feature (1)..(174): Xaa is any amino acid
MDGSEQNMARLKTKSWYGKYSLKNKAVFITKENINGLLAETGYKNIGLLHIDIDGNDAHILTELDLKELNPAIIIMEYNAVFGKEREITIPYDKDFFRTDKHYSNLYYGASLPALTYIAKNKGYSLIGCNLAGNNVYYVRKDLLNETIREKTIDEAFIMSKFRESRNKDSPLSY

SEQ ID NO: 78391 - DNA, 615 bp, Unknown
  Obtained from environmental sample
  misc_feature (1)..(615): n is a, c, g, or t
gtgttccgcctgtccacaccccgggtttttgactacctgaccgatcttgtggccatcggatacaacgggacccttcccgcccatcaagcggccttgcggggcgtcatcagttccatcatgaacagcaccatcatggcggaccgcagcgtgttcgccgcggccacggcggccaacgccaacatggtggccgaaatcagcaagccggtggtcatagacgcttacgcctgcaccaacttctcgggcccgttctcggccactcaggcccagaacggctacggcttcggcgacctgaccagttggacggtggaccagcagggcatcctgcacggagtctattccaacggtatcaccctgcccctgtggcaggtgaccctgtacgatttcgtctgccttcagggcctgcgacgggagggcaataacctgttcagtcagacccgctattccggcaagactaaaacctgtccggcaggcgtggccagcttgtgctgcatcattatctacacccttgtaacaatcaacgtggacatgtccacggaattcttgccaatgatttcctcccagcgtgttttccaggtcaacattaaggtcatcatcactaccgaatctatggcttga

SEQ ID NO: 78392 - protein, 204 aa, Unknown
  Obtained from environmental sample
  misc_feature (1)..(204): Xaa is any amino acid
MFRLSTPRVFDYLTDLVAIGYNGTLPAHQAALRGVISSIMNSTIMADRSVFAAATAANANMVAEISKPVVIDAYACTNFSGPFSATQAQNGYGFGDLTSWTVDQQGILHGVYSNGITLPLWQVTLYDFVCLQGLRREGNNLFSQTRYSGKTKTCPAGVASLCCIIIYTLVTINVDMSTEFLPMISSQRVFQVNIKVIITTESMA

SEQ ID NO: 78393 - DNA, 567 bp, Unknown
  Obtained from environmental sample
  misc_feature (1)..(567): n is a, c, g, or t
ttggcgttgttgtgttggttttttccggccttttcgcgtgtggggcttggtctcttctggctggttggggccgtccctgtgtgtggtgcggttggccttgcctcttggccctcgttttttccggtgcgcgggttcgctctcttccctcgcgttgtccttccttccggttttgttttcccggggtgggttttccgcttcgttcccccggttgcccgtcncgtnggggcctttttcccttttggggccctggtcgttgtccgcgttttttctttttctgcgggctcggttctgttttntggccttttttccttgttntttgggtgtgncgtgccggttcggttgcgcgttggttttttcccttttgttgtncctgcgtttgnnntngntttgggctgccttgtgtgcggtggnngcggttgcngcgtttgccngcctgttggctggntngggtttntgcctggcggccncccgcccccccctgtgcttcgtgccgggggcttgcgccccgntgnnttcnctggtttttttgtgcccccccgtttngnccgcttggttntgntgcgttaa

SEQ ID NO: 78394 - protein, 188 aa, Unknown
  Obtained from environmental sample
  misc_feature (1)..(188): Xaa is any amino acid
MALLCWFFPAFSRVGLGLFWLVGAVPVCGAVGLASWPSFFPVRGFALFPRVVLPSGFVFPGWVFRFVPPVARXVGAFFPFGALVVVRVFSFSAGSVLFXGLFSLXFGCXVPVRLRVGFFPFVVPAFXXXLGCLVCGGXGCXVCXPVGWXGFXPGGXPPPPVLRAGGLRPXXFXGFFVPPRXXRLVXXR

SEQ ID NO: 78395 - DNA, 660 bp, Unknown
  Obtained from environmental sample
  misc_feature (1)..(660): n is a, c, g, or t
gtgcgagagcgtattgcgcgcgcggcgcgttcggccgggcgtgatccgcaggatgtgcgccttgttgcggtgtcgaagctccatccggcgtgggctgtggcaacgctggcagcggcggggcagcgtgatttcggcgaaaactatttgcaggaggctagttccaagcaggccgagcttgcgcatcttgccctgcgctggcactgcatcggacatgtgcagaccaacaaggccaaaaacgcggtcgggcgttttgcctgtattcacagcctggattctctgaagcttgccggggccttgcggcggcatattcccgcctcgcagcggcagcgggtgcttattcaggtcaatgtgggcaatgaggagcaaaaattcggcgtgcatccggaggaactgcccgttctggcggagcagctcgccgggatgccggaatttgagccggcgggcctgatgtgcctgccgcctttctttgatgacggcgcggcggcccgtccgtactttgcgcttttgcgcgaattgtgcgaacgtctgcgcatccggctggggcttgccctgccggagctttccatgggcatgtccggcgactttgtcgaagcgatagctgaaggggcgacgctcgtgcggataggaaccgatattttcggcccccgccccgtgcggtaa

SEQ ID NO: 78396 - protein, 219 aa, Unknown
  Obtained from environmental sample
  DOMAIN (2)...(218): Alanine racemase, N-terminal domain
  misc_feature (1)..(219): Xaa is any amino acid
MRERIARAARSAGRDPQDVRLVAVSKLHPAWAVATLAAAGQRDFGENYLQEASSKQAELAHLALRWHCIGHVQTNKAKNAVGRFACIHSLDSLKLAGALRRHIPASQRQRVLIQVNVGNEEQKFGVHPEELPVLAEQLAGMPEFEPAGLMCLPPFFDDGAAARPYFALLRELCERLRIRLGLALPELSMGMSGDFVEAIAEGATLVRIGTDIFGPRPVR

SEQ ID NO: 78397 - DNA, 489 bp, Unknown
  Obtained from environmental sample
  misc_feature (1)..(489): n is a, c, g, or t
atgaaggaacagaaaaatattttcagcgagaaggatcttgcacaactaaggaatatccgcgtgccttcgactaaattcgacgccctattaaaattgctccgcatagccatttctgagtacggaaaagtcaatatagtccagatgatcattttcaatgaacgcttaaaacaaattgtacataagtacaatgaccgagataatttaatacttacaaatcaagtaatagaagacttcataaacgggctgtccagcgaactcattactctttttaacgaactcaacaccgaaaaaaattcttttgaaaaaatgggcataacttttgaggaaaaggcattttatgacatccttacaaaagtgcgcgatgaccacggttttgaatatgaggacgaanaatgcaaattgctggccaaggagatcaaaaaactggttgaagacaagatgcagtttgccgactggtcaacacgtctagacattaaaaaaccactttaa

SEQ ID NO: 78398 - protein, 162 aa, Unknown
  Obtained from environmental sample
  misc_feature (1)..(162): Xaa is any amino acid
MKEQKNIFSEKDLAQLRNIRVPSTKFDALLKLLRIAISEYGKVNIVQMIIFNERLKQIVHKYNDRDNLILTNQVIEDFINGLSSELITLFNELNTEKNSFEKMGITFEEKAFYDILTKVRDDHGFEYEDEXCKLLAKEIKKLVEDKMQFADWSTRLDIKKPL

SEQ ID NO: 78399 - DNA, 597 bp, Unknown
  Obtained from environmental sample
  misc_feature (1)..(597): n is a, c, g, or t
atggttttgcataattttaacgaattggttgagaaaaccaagtccttttccaaaacgcgaagggtgatcgtggcgtccgcggatgacgaacattctttagaagccgtgtttcacgcgaaaaaagacggcattgtgagccccgttctggttggagacaagtcaaaaattctcgatattctctcgaatttgggcgccaatgttcctgatttttttctttacgacgcacccagcgtggaagaagcggcggataaagccgtggagcttgtccggaagggcaaaggcgattttctgatgaagggaaggctggagacggctcaaatgctcaaaccggtcgtcagcaaagaaaccggcctcggaacaggcaaacttatgtcccatgtcgtgatgtttcagtcgccctattatcacaaactttttgtcgtcaccgacggaggaatggtgacatacccgacactggagcagaagaaggcgattatcgaaaacgccgtcgacacgctgaaggcgctgggatacgagaaccccaaggtgggagttttggcggccgccgaaaaagcaatcccaaaatgccggaaaaattggacgccgacccccttataa

SEQ ID NO: 78400 - protein, 198 aa, Unknown
  Obtained from environmental sample
  DOMAIN (5)...(196): Phosphate acetyl/butaryl transferase
  misc_feature (1)..(198): Xaa is any amino acid
MVLHNFNELVEKTKSFSKTRRVIVASADDEHSLEAVFHAKKDGIVSPVLVGDKSKILDILSNLGANVPDFFLYDAPSVEEAADKAVELVRKGKGDFLMKGRLETAQMLKPVVSKETGLGTGKLMSHVVMFQSPYYHKLFVVTDGGMVTYPTLEQKKAIIENAVDTLKALGYENPKVGVLAAAEKAIPKCRKNWTPTPL

SEQ ID NO: 78401 - DNA, 822 bp, Unknown
  Obtained from environmental sample
  misc_feature (1)..(822): n is a, c, g, or t
ttggggctgggagctattgggaagaatataagtagggcccttgtaaaaaaagttgatattacctaccctaaatctctccccgaccaaaaacgcatggtttccatattagacaaatgctttcccgccatagacaaagcaaaatccaatgctgaaaaaaacttaaaaaatgcaaaagaactttttgagagttatttgcagagtgtgtttggaaaaaaagataaggattgggaaatggctagtttggatagcttgggaacaataacttcaagcaaacgaatttataaaagcgaatatgtaaaaaatggaattccgttttatagaacaaaggaaattaaagaactatccaataacaaaccaattagcttagaattattcatttcaagagaaagatacaacgaaattaaaaaatcgtttggtgttccgaaaataggtgatttgctattatctgctgttggaacgattggtgaaattatggttattgaaaatgatgatgaattttacttcaaagatggtaatatagtatggtttaaagactttaacaatattgacacaaattatttaaaatatgctttaactgcatttgtagaaaatataaaaagccttgccataggtgccgcgtataatgcattaaccatcgaaaaattgaataaatataaaatatcatttccaaaatctatcaaagagcaaaaagttattgtccgtcaattagactccctccattcccaaacgcaaaaattagaagcggtgtataaaaagaaaatatcaaatttagatgaattaaaaaaaagtatattacaaaatgcgtttagaggacaattatga

SEQ ID NO: 78402 - protein, 273 aa, Unknown
  Obtained from environmental sample
  DOMAIN (76)...(241): Type I restriction modification DNA specificity domain
  misc_feature (1)..(273): Xaa is any amino acid
MGLGAIGKNISRALVKKVDITYPKSLPDQKRMVSILDKCFPAIDKAKSNAEKNLKNAKELFESYLQSVFGKKDKDWEMASLDSLGTITSSKRIYKSEYVKNGIPFYRTKEIKELSNNKPISLELFISRERYNEIKKSFGVPKIGDLLLSAVGTIGEIMVIENDDEFYFKDGNIVWFKDFNNIDTNYLKYALTAFVENIKSLAIGAAYNALTIEKLNKYKISFPKSIKEQKVIVRQLDSLHSQTQKLEAVYKKKISNLDELKKSILQNAFRGQL

SEQ ID NO: 78403 - DNA, 825 bp, Unknown
  Obtained from environmental sample
  misc_feature (1)..(825): n is a, c, g, or t
atgtcagattttgacataaagaaaggcgaccgccttggcattatcgggaaaaacggtgcaggtaagagtaccctcttaaaaatactttcaaggataaccacccctaccgaggggacaataaagataaaaggaaaggtagcaagtcttttggaagtagggacaggatttcatcaggaattaaccggcagagaaaacatctaccttaacggcgcaatacttggaatgagaaagcggcgaattgatgaaaaactggacgaaataatcgcttttagcggtattgaacagcatatagacacccctgttaaacgctattccagcggtatgtatgtaagactggcctttgccgttgcggctcatttggacagtgatatattgattgccgatgaggtcttggcggttggggacgcggaatttcaagagaaggcattggggaaaatgcaggatttgagtactggtgaggggcggacggtgttgtttgtaagccataatatgggggcggtagcgaatctatgcgatttctctattttgcttcaaaatggaatcattgtcgcaagtggtaaaacttatgaagtaattaacaactatagagtaaaaaataataacaattgtattaataagataattcgtacaaaaaaagacgcacctgtttatataaattccatatctacatgtgatagagatggtatagaaaagtccctatttgcttttcctgatgacatacttttaagaattggcgtaactattgaaaaatttgatcctgcctttaagactttcttagtttttttatctatacaaccaaaatcccaagtattccccgatttttaa

SEQ ID NO: 78404 - protein, 274 aa, Unknown
  Obtained from environmental sample
  DOMAIN (9)...(180): ABC transporter
  misc_feature (1)..(274): Xaa is any amino acid
MSDFDIKKGDRLGIIGKNGAGKSTLLKILSRITTPTEGTIKIKGKVASLLEVGTGFHQELTGRENIYLNGAILGMRKRRIDEKLDEIIAFSGIEQHIDTPVKRYSSGMYVRLAFAVAAHLDSDILIADEVLAVGDAEFQEKALGKMQDLSTGEGRTVLFVSHNMGAVANLCDFSILLQNGIIVASGKTYEVINNYRVKNNNNCINKIIRTKKDAPVYINSISTCDRDGIEKSLFAFPDDILLRIGVTIEKFDPAFKTFLVFLSIQPKSQVFPDF

SEQ ID NO: 78405 - DNA, 492 bp, Unknown
  Obtained from environmental sample
  misc_feature (1)..(492): n is a, c, g, or t
atgattcaagtggatgaatacatagacgcgttgcgggcttcgcccggtaacggggcgccaggtcgcgcaccaccgggtgtaccaggcgcgcgccgcgacgcggggcgagacgcggcgcccttggccgcgcgccataagcggcgtgcttgcggcccagggcatacccgccttgtacagccatcaggcactggccgtggacgccgtccggagcggccggcacgtcatcgcggccacgccgacagccagcggcaagtcgctgatctacaacctccctgtattggaaaaattcgtcatcgatccggacgcccgcgccttgatgctgtttccgctcaaagccctggcccgcgatcagttggacgcctttgcggccctgaccgcgcactggcccgaagccgcccgccccacggccctgatctacgacggcgatacgccggacgccgccaggaggaagatacggaaaaacccgcccaacgtgttgatcagcaatcctga

SEQ ID NO: 78406 - protein, 163 aa, Unknown
  Obtained from environmental sample
  misc_feature (1)..(163): Xaa is any amino acid
MIQVDEYIDALRASPGNGAPGRAPPGVPGARRDAGRDAAPLAARHKRRACGPGHTRLVQPSGTGRGRRPERPARHRGHADSQRQVADLQPPCIGKIRHRSGRPRLDAVSAQSPGPRSVGRLCGPDRALARSRPPHGPDLRRRYAGRRQEEDTEKPAQRVDQQS

SEQ ID NO: 78407 - DNA, 390 bp, Unknown
  Obtained from environmental sample
  misc_feature (1)..(390): n is a, c, g, or t
ttgctcagtacaattcacaaccttatagacgataaaaaagaagaagagcatttaaccactccaggagtgttggaattatatgaattcgcatttcgcgcagttgaagctggttgcacagaacttgttatggaagtttccagccacgctattgttcaggggcgcgttatgggaattccttacaaagccgctctgttcaggaatttgagccatgaccatttggattttcacggcacaatggaaaactattaccaagccaaaaaactgttgtttatctcagaacttttgggcaaaggaataggatttataaatattgataattcttatggcaaccgtttgtatggagaantcctttttcagagagagagttggagtttcaaaaaaacaatttaa

SEQ ID NO: 78408 - protein, 129 aa, Unknown
  Obtained from environmental sample
  DOMAIN (1)...(129): Mur ligase middle domain
  misc_feature (1)..(129): Xaa is any amino acid
MLSTIHNLIDDKKEEEHLTTPGVLELYEFAFRAVEAGCTELVMEVSSHAIVQGRVMGIPYKAALFRNLSHDHLDFHGTMENYYQAKKLLFISELLGKGIGFINIDNSYGNRLYGEXLFQRESWSFKKTI

SEQ ID NO: 78409 - DNA, 390 bp, Unknown
  Obtained from environmental sample
  misc_feature (1)..(390): n is a, c, g, or t
atgaatggtggaactatatccaacaacatttttacgaatggcagtggagtctatgtatcttcgggaacaacttttaaaatgaccaacggaacgatttccaataatggcagtcgtggggtctctgtgtcttctggaacctttactatgaatggcggaactatctctggcaaccggagtggaggggtctctgtgaattctggaacgcttactatgagtgacgggactatttcaggtaataatgcgagtagtgttggtggagtgtatttggatggttattcacctactcttacttcatatgtatttcattttttatttcattaccgaattttttttttttcgtatactatttcttttaagtcatcttttgtacccccttccccactagtctaa

SEQ ID NO: 78410 - protein, 129 aa, Unknown
  Obtained from environmental sample
  misc_feature (1)..(129): Xaa is any amino acid
MNGGTISNNIFTNGSGVYVSSGTTFKMTNGTISNNGSRGVSVSSGTFTMNGGTISGNRSGGVSVNSGTLTMSDGTISGNNASSVGGVYLDGYSPTLTSYVFHFLFHYRIFFFSYTISFKSSFVPPSPLV

SEQ ID NO: 78411 - DNA, 843 bp, Unknown
  Obtained from environmental sample
  misc_feature (1)..(843): n is a, c, g, or t
ttgtttttccggagagatttgatttatctctggaaaagggctataaaggctgtatcgaaaggagtgagaatatctataggtacagattctcattctatgtatcatatgaactgtgctaaatatgctatagcggcgcttgaatatgcaggtttctcgaaagaagccgttttgaactgccggcctatagataagctaaaggaaattttaggagaaaagaaaagttatgatctaattgaatctgataatatctttgaaagaagttttaaaaattttaaacactatttctcggacaataatgatatttttacaggatccttaaaagttgttggtattgatttaacaagcagcgaaaaaaaaccaagcgggtttgccgtactttcgggaacaacggtacagacaatgactgtactcacggatgatgaaatggttaagcgtatttcagaaattaatccatcggtagtttcgatagattctcctctttcgcttcccgaagggcgatgttgctttgataaaaattgtgaatgttcaaaatacggcattatgcggtattgcgaacttttattaagacatttcgggataggagtttatccttgcttaattgattctatggcagaccttacaaaaagaggaatgaatctgactaatagactgcgcggccttggatttaatgttatagagagctatcccggagttgcacaagacctgcttcatatccccagaaaacgtaagggattagatctactgttaaatggaatgaaaaactttggaattgaaggcatacgtgagaatattacacatgatgaagcggacgcaattacatcggctcttgtgggttatttttaa

SEQ ID NO: 78412 - protein, 280 aa, Unknown
  Obtained from environmental sample
  DOMAIN (109)...(279): Protein of unknown function (DUF429)
  misc_feature (1)..(280): Xaa is any amino acid
MFFRRDLIYLWKRAIKAVSKGVRISIGTDSHSMYHMNCAKYAIAALEYAGFSKEAVLNCRPIDKLKEILGEKKSYDLIESDNIFERSFKNFKHYFSDNNDIFTGSLKVVGIDLTSSEKKPSGFAVLSGTTVQTMTVLTDDEMVKRISEINPSVVSIDSPLSLPEGRCCFDKNCECSKYGIMRYCELLLRHFGIGVYPCLIDSMADLTKRGMNLTNRLRGLGFNVIESYPGVAQDLLHIPRKRKGLDLLLNGMKNFGIEGIRENITHDEADAITSALVGYF

SEQ ID NO: 78413 - DNA, 363 bp, Unknown
  Obtained from environmental sample
  misc_feature (1)..(363): n is a, c, g, or t
atgaatattgatacaaaaacacaacactcagagagaaacaaaacaattatactcacagataatgaaattaatgaatatgttaaatcgtgtgttaatatatacaatattgaatgcgtaaatgatataattaatcgtatcatttgttgtgatgtttttgatgttctttctttgcttccagaaaattttgttgatttacttattgtggatcctccatataatcttaatagaccttatgggaataccatattcaaaaaaatgaattatgatgaatactcattatttacaaaaaaatctattgaaaaaattatgcatacgctgaaatcacacacaacaatatatgtttgtagtgactggaaaacgtag

SEQ ID NO: 78414 - protein, 120 aa, Unknown
  Obtained from environmental sample
  misc_feature (1)..(120): Xaa is any amino acid
MNIDTKTQHSERNKTIILTDNEINEYVKSCVNIYNIECVNDIINRIICCDVFDVLSLLPENFVDLLIVDPPYNLNRPYGNTIFKKMNYDEYSLFTKKSIEKIMHTLKSHTTIYVCSDWKT

SEQ ID NO: 78415 - DNA, 312 bp, Unknown
  Obtained from environmental sample
  misc_feature (1)..(312): n is a, c, g, or t
ttggcctttggcgaaatgatcatcggcatcatcaccggccttgacggctccggcttctccggtctgccgctgaccggcagccttgccgccgcgcttgcggggccagaaggctacaacgtgcagtatcttgccgctgtgggccagatgggcgccatctgggcgggcggcggcgtccttgtgccctggtgcttcggtctggccgcgacggcgggcatcgccggcgtggatccccgcgatctcgcgcgggcgaacctcgttcccgtcgcgatcgggctgttcgtgtgcacggttatcgccatattcatgatgtaa

SEQ ID NO: 78416 - protein, 103 aa, Unknown
  Obtained from environmental sample
  misc_feature (1)..(103): Xaa is any amino acid
MAFGEMIIGIITGLDGSGFSGLPLTGSLAAALAGPEGYNVQYLAAVGQMGAIWAGGGVLVPWCFGLAATAGIAGVDPRDLARANLVPVAIGLFVCTVIAIFMM

SEQ ID NO: 78417 - DNA, 498 bp, Unknown
  Obtained from environmental sample
  misc_feature (1)..(498): n is a, c, g, or t
gtgaacaaagggacgaaggaaggcagccacgaggtagctaaaaaagcgcgggcagacgcggtggccgaaggcgtgacggatatgatagccgacccggcgtgctggaaccggggcgacccttcctaccccgcgccgataacggcgttcaaggatgcggggttccgatgcgttaaagcgaataacgaccggaaggcggggctgcagcagttccacgattatctgaaacaggacgacgaaaacgggcagcccatgttccaggtgttcaacacctgctaccacacgatacggacgctgccggcgctgcttccggacccgcacaacccggaggacgtggacagcagacaggaagaccacatctacgacgcggaccgctacggcctgatgagccgttacgcgaaccatccggaccgctaccttcccggaaggcaggcggcgggaagcgcggatcacgggaacagatcggatgattatcctttattgtcccaggaggactggtga

SEQ ID NO: 78418 - protein, 165 aa, Unknown
  Obtained from environmental sample
  misc_feature (1)..(165): Xaa is any amino acid
MNKGTKEGSHEVAKKARADAVAEGVTDMIADPACWNRGDPSYPAPITAFKDAGFRCVKANNDRKAGLQQFHDYLKQDDENGQPMFQVFNTCYHTIRTLPALLPDPHNPEDVDSRQEDHIYDADRYGLMSRYANHPDRYLPGRQAAGSADHGNRSDDYPLLSQEDW

SEQ ID NO: 78419 - DNA, 651 bp, Unknown
  Obtained from environmental sample
  misc_feature (1)..(651): n is a, c, g, or t
atgccggatcttgctacgcgcctgaccgccgccaccgcccagatattcacgcagctgggccttgatgcgcgccatgctgtggtgcgtcgttccgaccgtccggagtgggacttccagtgcaacggcgcaatgcccgctgccaaggcgcagggccgcaaacccaccgagcttgccgcggccgtcgccgccgcctggaccgccacggagctggcagacacgcccacggtcgcgggccctggctttctgaacttccggatttccgatcgcgtgctgtcagagcgcgcccaggagatagttgctgacccgcgcgccggcgcggggacggttgagcgtaagcgccgagtgctggtggactacggcggccccaacgtcgccaagcccatgcatgtgggccacctgcgcgcctcgatcatcggcgagagcttgaagcgcatcttccgctttcgcggcgatgaggtcttcggcgacgcccatttcggcgactggggcttccagatgggcctcttgaccgtggctctctccgaccggctggagggccttgacaatgaggcgcggctcgatcaggcgctcaaggagctgaccctcgaggacctggacaccctgtacccggccgccgctgcccggggccaagacagacgaggcttttcgtga

SEQ ID NO: 78420 - protein, 216 aa, Unknown
  Obtained from environmental sample
  DOMAIN (2)...(86): Arginyl tRNA synthetase N terminal domain
  misc_feature (1)..(216): Xaa is any amino acid
MPDLATRLTAATAQIFTQLGLDARHAVVRRSDRPEWDFQCNGAMPAAKAQGRKPTELAAAVAAAWTATELADTPTVAGPGFLNFRISDRVLSERAQEIVADPRAGAGTVERKRRVLVDYGGPNVAKPMHVGHLRASIIGESLKRIFRFRGDEVFGDAHFGDWGFQMGLLTVALSDRLEGLDNEARLDQALKELTLEDLDTLYPAAAARGQDRRGFS

SEQ ID NO: 78421 - DNA, 360 bp, Unknown
  Obtained from environmental sample
  misc_feature (1)..(360): n is a, c, g, or t
ttgagcgggcacgacctggtgctggtcctcggtgcccccgcctttacctaccatgtcgagggcgcaggtccacacgtgccacccggggcgcgcttgtaccagatcgtcgatgacccccaggtggcctcctggaccgccgtcggcaccgcgctggtcagcagcttgaagcccgccctccgcgacctgctggccgggtctgagcctgctgcccgtgaggcgcccgcgcggcgcccggcgccgccgcacgtcgcggcagaggtcctgagcgagcgctatctggtgcagcagatcgcagcgctgcgtccacgcggctgcatccttgttgaggaggcccccggcacccgcgggcccgatgcatga

SEQ ID NO: 78422 - protein, 119 aa, Unknown
  Obtained from environmental sample
  misc_feature (1)..(119): Xaa is any amino acid
MSGHDLVLVLGAPAFTYHVEGAGPHVPPGARLYQIVDDPQVASWTAVGTALVSSLKPALRDLLAGSEPAAREAPARRPAPPHVAAEVLSERYLVQQIAALRPRGCILVEEAPGTRGPDA

SEQ ID NO: 78423 - DNA, 459 bp, Unknown
  Obtained from environmental sample
  misc_feature (1)..(459): n is a, c, g, or t
ttgttgaggaggcccccggcacccgcgggcccgatgcatgaccatctgcccattctcgagcgcgataccttctacacctgcgccagcggcggtctggggcatgggctgcctgcggccgccggtgttgcccttgggacgtcccggagagaaggtgatcgcgctgctcggggacggctcggccatgtatgccattcaggggttgtggagcgcggtgcatctgcagctgccgatcacctacatcatcgtcaacaaccgccgtttaccaggccttgcttcatttcggggctccattttggtcttgtgcgcaccgtggggaccctcctgccgggcatcgacttctgcgggcttgcgcgtgcccagggctgctatgctcttcgtgctcagcaggcctcgcgatttggtacgtcccttgccactaggctttttgccccccccccgtcccacaccttgttgaaatga

SEQ ID NO: 78424 - protein, 152 aa, Unknown
  Obtained from environmental sample
  misc_feature (1)..(152): Xaa is any amino acid
MLRRPPAPAGPMHDHLPILERDTFYTCASGGLGHGLPAAAGVALGTSRREGDRAARGRLGHVCHSGVVERGASAAADHLHHRQQPPFTRPCFISGLHFGLVRTVGTLLPGIDFCGLARAQGCYALRAQQASRFGTSLATRLFAPPPSHTLLK

SEQ ID NO: 78425 - DNA, 417 bp, Unknown
  Obtained from environmental sample
  misc_feature (1)..(417): n is a, c, g, or t
atgaccatctgcccattctcgagcgcgataccttctacacctgcgccagcggcggtctggggcatgggctgcctgcggccgccggtgttgcccttgggacgtcccggagagaaggtgatcgcgctgctcggggacggctcggccatgtatgccattcaggggttgtggagcgcggtgcatctgcagctgccgatcacctacatcatcgtcaacaaccgccgtttaccaggccttgcttcatttcggggctccattttggtcttgtgcgcaccgtggggaccctcctgccgggcatcgacttctgcgggcttgcgcgtgcccagggctgctatgctcttcgtgctcagcaggcctcgcgatttggtacgtcccttgccactaggctttttgccccccccccgtcccacaccttgttga

SEQ ID NO: 78426 - protein, 138 aa, Unknown
  Obtained from environmental sample
  SIGNAL (1)...(17)
  DOMAIN (21)...(115): Thiamine pyrophosphate enzyme, C-terminal TPP binding domain
  misc_feature (1)..(138): Xaa is any amino acid
MTICPFSSAIPSTPAPAAVWGMGCLRPPVLPLGRPGEKVIALLGDGSAMYAIQGLWSAVHLQLPITYIIVNNRRLPGLASFRGSILVLCAPWGPSCRASTSAGLRVPRAAMLFVLSRPRDLVRPLPLGFLPPPRPTPC

SEQ ID NO: 78427 - DNA, 831 bp, Unknown
  Obtained from environmental sample
  misc_feature (1)..(831): n is a, c, g, or t
atgcatctttccaaagccgccgctctgtttggcgccgtgagcctcatgctctcgaatcattgtctcacaaaggtttttccggggcatctcgcaaaatttatgacctttatctggattcccctggtttttctctttctgcgcaaggccgtgaaagagaatgcatggacgcactatatctactccggattctttttcgggtttgcgctggcggggcagttttatgaggcggtgctgtttttcggcgctctcgcgctttgctattggctctaccttcttgcgcaaaagcggccggaagagacccgcttcaaggcatattattttgccaactggaaggaactgctccggcataaacttggctttgcgtctcttgttgtcatcatgtttatgattggcgtacaactcttgccgcagatagccgcgctttcgggaaataccgagggattgcccatgaatagtcaggaaaaatgggattttgccacttcctggtcattgcctccggaagagaccattgagctttttgtgcctggtatattcggatggaagagttcagattccgaagtgccctattgggggcggatgggtaagcctaacgtgacttccggttataaactccaaccagagaatgtcggcgtcgccactcttttttttgcggggcttgcgctcatacttctccggaaaaagcgcggggggggaggcggtctttttggtttctggagctgtcatcgtcacgcttcattttctctttttgggacggcattctcccgaccctcttattggggcttttttccccgatttccccaacatggtatacaattcctcaatcccaattaa

SEQ ID NO: 78428 - protein, 276 aa, Unknown
  Obtained from environmental sample
  SIGNAL (1)...(23)
  misc_feature (1)..(276): Xaa is any amino acid
MHLSKAAALFGAVSLMLSNHCLTKVFPGHLAKFMTFIWIPLVFLFLRKAVKENAWTHYIYSGFFFGFALAGQFYEAVLFFGALALCYWLYLLAQKRPEETRFKAYYFANWKELLRHKLGFASLVVIMFMIGVQLLPQIAALSGNTEGLPMNSQEKWDFATSWSLPPEETIELFVPGIFGWKSSDSEVPYWGRMGKPNVTSGYKLQPENVGVATLFFAGLALILLRKKRGGGGGLFGFWSCHRHASFSLFGTAFSRPSYWGFFPRFPQHGIQFLNPN

SEQ ID NO: 78429 - DNA, 732 bp, Unknown
  Obtained from environmental sample
  misc_feature (1)..(732): n is a, c, g, or t
ttgccggacataaccgatgcaacggcaggggagaaaaaagccctgtttgttgcccttgccggaattgattatttgcaaaacttcgccgacagcgcaaatgaaaaagccaaagcggaagccgcgaaaacgcatgacgcggaaatcaaaatgcaaatgcttaaaaccgagattgacaaaaaacctgccgaggaagaatcattaggcaagttacaaaaatcaatcgaggaaaaaaacaaagaacttgctgatattacaaaacaaggcttatccgctaaagacgaagtagaaaagtgtcaaacggcatggaacgccgagcagttgcgccaacagaaagaaacagaggcaaagagcgcggtcgagacgttagaaacagaaatttgcgacttggcagacgaaattgacaaacttaaagaatactctgaaaacaaggcgaagtacgaaggcgagatagcggaatatgacgcgcagcaaaaaatcattgacaccgaaaaaatatcaaaacaggcggttgacgaagcaaaccttaaagcgcagcaggtctatataaagcaaagcgaaacacacgatgaaaaactgcgaagcgaagaagccaaaaaagagccgtttgttaaaaaacagaaggacgcggagaacataatcaaggacgcggagtacagcattaaactttttgagcgcgatgcccaagaaattaatgagaattgcccggagtgcggccagaaactgccgccctga

SEQ ID NO: 78430 - protein, 243 aa, Unknown
  Obtained from environmental sample
  misc_feature (1)..(243): Xaa is any amino acid
MPDITDATAGEKKALFVALAGIDYLQNFADSANEKAKAEAAKTHDAEIKMQMLKTEIDKKPAEEESLGKLQKSIEEKNKELADITKQGLSAKDEVEKCQTAWNAEQLRQQKETEAKSAVETLETEICDLADEIDKLKEYSENKAKYEGEIAEYDAQQKIIDTEKISKQAVDEANLKAQQVYIKQSETHDEKLRSEEAKKEPFVKKQKDAENIIKDAEYSIKLFERDAQEINENCPECGQKLPP

SEQ ID NO: 78431 - DNA, 690 bp, Unknown
  Obtained from environmental sample
  misc_feature (1)..(690): n is a, c, g, or t
gtggtggtggccgggggcaccgaagctccactacacccgatggtcattgccgcattttccgctgcccgggcactttctactcggaacgactcacccgctaccgcatcgcgaccgtttgacttagaccgcgacggctttgtgatgggcgaaggcgcagcggttttagttttggaatccgaagaacacgccttggctcgtggcgcgcacatttacgcccgcctggtaggcgctggtatcacgtccgatgcttaccatgtgacagctccggaaccatcgggcagaggacaaatcgcagctatgcaactcgccttgcaacaggcgggtgcgaggcccgatgaggtaacgcatgtcaacccgcacgccacctcaaccaagctgggcgatgcggtcgaggctcatgcgatccgaaccgtgctgggtaaagccgctgacgatgttactgtctcggcaaccaaatccatgaccgcgcacttacttggggctgctggggccttggaagcgatgttaaccgtgctggcactccattatcgggcagcaccgcccaccattaacctcgttgatttggacccagtcatcggtctaaaaataaccggcccaaaaccagtctccttgcccgatggcccgctcctagccctaaccaattccttcggcttcggcggccacaacgtcacccttgcgtttgcgatttag

SEQ ID NO: 78432 - protein, 229 aa, Unknown
  Obtained from environmental sample
  DOMAIN (71)...(228): Beta-ketoacyl synthase, C-terminal domain
  misc_feature (1)..(229): Xaa is any amino acid
MVVAGGTEAPLHPMVIAAFSAARALSTRNDSPATASRPFDLDRDGFVMGEGAAVLVLESEEHALARGAHIYARLVGAGITSDAYHVTAPEPSGRGQIAAMQLALQQAGARPDEVTHVNPHATSTKLGDAVEAHAIRTVLGKAADDVTVSATKSMTAHLLGAAGALEAMLTVLALHYRAAPPTINLVDLDPVIGLKITGPKPVSLPDGPLLALTNSFGFGGHNVTLAFAI

SEQ ID NO: 78433 - DNA, 621 bp, Unknown
  Obtained from environmental sample
  misc_feature (1)..(621): n is a, c, g, or t
atgaaattaatacaaaccgattatgaaaatctatatgaacagtataaaatccgtggggaacgtttacaaaatgaaaagcatcaagttttttatgaaattagaaataattataataaaaatcgcaattgttatgatttgctatttttatcgcgcacttgcgttaatgggcttatccgttttaataaaaatggcgaatttaataattcattacaccatacacgaaaagggatagagcctaatcggttgaaatctatattggcaaattggtcaaagcgactgcaaggtgtagaatttcgtaacggtgattattgggaaacaacgcaggatataaaaaaaggagattttatttatcttgatcctccgtattttaatactaaagggcgttactatggaacaattgattttgacagatttgttaattatctcgaattattgaataaaaacagtattaaatatattctttcttttgacggtaaacgtgaaaacaataattatatggtagaattaccaaaaaagttatacaaacgccatttaatgcttccatcaggtaattctagttttaaaaaagttatggataaaaaatctgaagcagtttttgaatcgctatatcttaattattag

SEQ ID NO: 78434 - protein, 206 aa, Unknown
  Obtained from environmental sample
  DOMAIN (1)...(187): D12 class N6 adenine-specific DNA methyltransferase
  misc_feature (1)..(206): Xaa is any amino acid
MKLIQTDYENLYEQYKIRGERLQNEKHQVFYEIRNNYNKNRNCYDLLFLSRTCVNGLIRFNKNGEFNNSLHHTRKGIEPNRLKSILANWSKRLQGVEFRNGDYWETTQDIKKGDFIYLDPPYFNTKGRYYGTIDFDRFVNYLELLNKNSIKYILSFDGKRENNNYMVELPKKLYKRHLMLPSGNSSFKKVMDKKSEAVFESLYLNY

SEQ ID NO: 78435 - DNA, 876 bp, Unknown
  Obtained from environmental sample
  misc_feature (1)..(876): n is a, c, g, or t
gtgataaaaaattattgcagacaaaaattttccttattaaaaagaaaaatacaatccaatatctttggatttaagaaaaaagatatggaacgatatttccatattgttttattcagagttggttctacgcaaatggtagcatcggattttgttttaatatcggcttttgttggcatatcacaagctggaatttactcaaactacactttaataattaatacaatttcattatttatatgcctgtttataagcggtgcagaagccagcattggaaatgccatagtatctttggataaagataatttatacgatgtgttcaaaaggctatcgttttttgttttttgcataagcggaatatctatggtttgccttttgaatttgttaaatccattcattgaactttggattggcaatgattttgttctgcaacgttcagttacggttgccataagcataaattttttctttatgcaaagccgtactttacttatagcatttaaacaaaacgctggtatttttagaccagacagatacaagccgctgattgaaattttctttaattttgggttatccataattttagtgaaatactatcaaatacttggagtgctgattggctctattgcaaatattatttttgtttgtatttgtccggaggcatatataattcataaacatctcttcaaacgcagttatctgatttatgcaaaatcttatcttattcaaattttggttttgctaattgcttgcgtaattagcatttacataaacacttttgttgatatgttcgtattaaaatgccttgtttcggtttttgtttccattggcgtttattttttatttttctttagaacaaaagaattgagtatttgctag

SEQ ID NO: 78436 - protein, 291 aa, Unknown
  Obtained from environmental sample
  misc_feature (1)..(291): Xaa is any amino acid
MIKNYCRQKFSLLKRKIQSNIFGFKKKDMERYFHIVLFRVGSTQMVASDFVLISAFVGISQAGIYSNYTLIINTISLFICLFISGAEASIGNAIVSLDKDNLYDVFKRLSFFVFCISGISMVCLLNLLNPFIELWIGNDFVLQRSVTVAISINFFFMQSRTLLIAFKQNAGIFRPDRYKPLIEIFFNFGLSIILVKYYQILGVLIGSIANIIFVCICPEAYIIHKHLFKRSYLIYAKSYLIQILVLLIACVISIYINTFVDMFVLKCLVSVFVSIGVYFLFFFRTKELSIC

SEQ ID NO: 78437 - DNA, 615 bp, Unknown
  Obtained from environmental sample
  misc_feature (1)..(615): n is a, c, g, or t
ttgttgaatccaggatcatgctttccaaaacagggatcgatatgtcatgcgatatgcgggaaacccaatatttggaccaggggggacgtgatgaaagtgagccgcgccatggttgcggctaacaaggccaatatacccttgcctttccagcgggctgcagccatggatctggcaggccgagacgttcttgaagcggtacgtaccggcgttaatcccaaggtaattgactgtccggatccatccaaggggaagcacactatcgatgcggtcgccaaggatggcattcagatctgtgtaaaagcgagggtagctgtacgctccaacatcgagcggcttgtcggtggcgctaccgaggaaaccataatcgccagggtaggcgaagggatcgttaccaccatcgggtcttcagagagctataaagcagtacaagaaaatcccgacaacatttccaagacagtcatggacaaggggctggacgccggaactgcctttgaaattctttccatcgacattgccgatgttgatgttgggcagaacatcggggccaaactctcttctgaacaggccgaggcggacaaacgccgctcccaggcggagggagagggatcctcatga

SEQ ID NO: 78438 - protein, 204 aa, Unknown
  Obtained from environmental sample
  DOMAIN (1)...(204): Protein of unknown function (DUF1432)
  misc_feature (1)..(204): Xaa is any amino acid
MLNPGSCFPKQGSICHAICGKPNIWTRGDVMKVSRAMVAANKANIPLPFQRAAAMDLAGRDVLEAVRTGVNPKVIDCPDPSKGKHTIDAVAKDGIQICVKARVAVRSNIERLVGGATEETIIARVGEGIVTTIGSSESYKAVQENPDNISKTVMDKGLDAGTAFEILSIDIADVDVGQNIGAKLSSEQAEADKRRSQAEGEGSS

SEQ ID NO: 78439 - DNA, 663 bp, Unknown
  Obtained from environmental sample
  misc_feature (1)..(663): n is a, c, g, or t
atgaaaacaagagccttgctcatgctgatgggtcaccgccttagtgaaattcttatatacaatgttgactgtatgacgggcgatgaccggataaacgaaatcaccagttttataacgatgcactattcggaaaagctcacgagtaaaatgaccgtttccgtaaatgtgttccgtttaaacagggtttatctgggttatcttttccgtcagcaaaccggcatgactatatatcaatacatcacgcaaatacgcgtccgcaacgccgagaccatgcttcaaagcggcaactacaaagtccaggaagtagccgagcattgcggtttcagcgacgtttatcatttttacaaatctttccgcgcgatacgggggttccctccgtcaaggtcgctagccgaacaaataaagatgggaaaaattacaataacaaaccgacttcttcttcgacatgggcgccgattatctcctgggcggatgggtctactattaaatccatgttttcaagaggaatggcttcctaacatgaccttcccggaaccatctacccaaggtcggcatgtcattgaacggcttttcccaatgaacatctaccggttctgctatttttaccctttccctttacatcgttcgcacatatttatctaccttgcttcccattacccctag

SEQ ID NO: 78440 - protein, 220 aa, Unknown
  Obtained from environmental sample
  DOMAIN (89)...(131): Bacterial regulatory helix-turn-helix proteins, AraC family
  misc_feature (1)..(220): Xaa is any amino acid
MKTRALLMLMGHRLSEILIYNVDCMTGDDRINEITSFITMHYSEKLTSKMTVSVNVFRLNRVYLGYLFRQQTGMTIYQYITQIRVRNAETMLQSGNYKVQEVAEHCGFSDVYHFYKSFRAIRGFPPSRSLAEQIKMGKITITNRLLLRHGRRLSPGRMGLLLNPCFQEEWLPNMTFPEPSTQGRHVIERLFPMNIYRFCYFYPFPLHRSHIFIYLASHYP

SEQ ID NO: 78441 - DNA, 600 bp, Unknown
  Obtained from environmental sample
  misc_feature (1)..(600): n is a, c, g, or t
atgactgataattttaattttgctatgtcaaaggcgataggtgaatatgtaatgtttataggctcagatgatgctctctacagccatgggctatatttattagataaacttatttctataactggagaaaaaatagtatcttggttatctaatagttattactggccagattttactgctccgcatttaaaagatatattattgttaaagaaaaaaaatataaatattataattaatacaagagaacagataagaaaaatggtaaatgaattgaattatgaggatattttcccaaatatctacactaaagctgttgttcataaaagcttaatagatgatttgagaaataaaacaggctttgtatttgattctattggtcctgatgcatattttgtatttgctatatcagcgataattaatcattatatggttattggtacacctatttgtttacctggactttctggaaaaagtacaactggcgcatctatttatgaaactaaaacagattcttcacatcctattaaaaatgaattagtaaaattatatacagaaaaaaatagaattataaacagtaaatttcattctgtggctttgtga

SEQ ID NO: 78442 - protein, 199 aa, Unknown
  Obtained from environmental sample
  misc_feature (1)..(199): Xaa is any amino acid
MTDNFNFAMSKAIGEYVMFIGSDDALYSHGLYLLDKLISITGEKIVSWLSNSYYWPDFTAPHLKDILLLKKKNINIIINTREQIRKMVNELNYEDIFPNIYTKAVVHKSLIDDLRNKTGFVFDSIGPDAYFVFAISAIINHYMVIGTPICLPGLSGKSTTGASIYETKTDSSHPIKNELVKLYTEKNRIINSKFHSVAL

SEQ ID NO: 78443 - DNA, 522 bp, Unknown
  Obtained from environmental sample
  misc_feature (1)..(522): n is a, c, g, or t
ttgccgatgccgggcttttctttgttgaaggcggcaaccataccaaagtttacgaccgggcgggctcgtatctcgccccggttggccggcatacggaaatcaaagaatgggacgtactcaaaattgaaaagcaaaccggggtcaagctccggtagggaggccgatatggcggagtattatttcgcagtgtttatgcctgccgtggagggcggctatgtcttgcagtttcctgatttcccggaagcgtttacccagggggaaagccttggcgagtgcctgaatatgggggctgaagtgctggcgattgccgttgaggaatacgccaaggcccgtaagcctgtgcctgtcccttcttcactggatcaagtcaaagaatgggcggagaaagaaaaatcgtctcccggcattgcagatgacggggagatggtttttcagctttttcatgctccccgtatggatttgacccctgtacgcatttcggtgagcttgactaaaaatgttctggacgctcctggacgctaa

SEQ ID NO: 78444 - protein, 173 aa, Unknown
  Obtained from environmental sample
  DOMAIN (59)...(106): Uncharacterised protein family (UPF0150)
  misc_feature (1)..(173): Xaa is any amino acid
MPMPGFSLLKAATIPKFTTGRARISPRLAGIRKSKNGTYSKLKSKPGSSSGREADMAEYYFAVFMPAVEGGYVLQFPDFPEAFTQGESLGECLNMGAEVLAIAVEEYAKARKPVPVPSSLDQVKEWAEKEKSSPGIADDGEMVFQLFHAPRMDLTPVRISVSLTKNVLDAPGR

SEQ ID NO: 78445 - DNA, 354 bp, Unknown
  Obtained from environmental sample
  misc_feature (1)..(354): n is a, c, g, or t
ttgaatgttgaaaattatcaggggaatgctgttgttaattatacagaacgcaatattccgtacattcgtattattgaacacaagcactttgaatttggctctggtaacatagataaaaccgttataacaaaggaatatcctgctgattggaaacgaggttctgagccgtactatcccattaatagtagccgtaataactcgctttacgaacaatacaaggcgctgtcaaaaaataggccggacatcatctttggaggccgactgggaaaatacaagtattatgacatggaccaagttatagctgatgcactcagtgaggcgggaaaggaaatacaattaagtgctgatggttga

SEQ ID NO: 78446 - protein, 117 aa, Unknown
  Obtained from environmental sample
  DOMAIN (2)...(93): UDP-galactopyranose mutase
  misc_feature (1)..(117): Xaa is any amino acid
MNVENYQGNAVVNYTERNIPYIRIIEHKHFEFGSGNIDKTVITKEYPADWKRGSEPYYPINSSRNNSLYEQYKALSKNRPDIIFGGRLGKYKYYDMDQVIADALSEAGKEIQLSADG

SEQ ID NO: 78447 - DNA, 519 bp, Unknown
  Obtained from environmental sample
  misc_feature (1)..(519): n is a, c, g, or t
atgattctatctggtcttgaaatcgaaaaaagcatcaaaaatggagatattgaaattaccccttttgaaagatcgctattaaattccaacagctacaatttacgtctatacgataaactgcttgtgtatacagatttcccgcttgatatgaagaagcctcagaatacacaggagataattattcccgaaagtggtttaataatacaacctggaactttgtatttgggtcgtacttttgaacatactgtaacaaaaaatcacgtgccgatgatccaaggtcgttcatcagtcggaagactaggtatttatatacatgttacagctggattcggcggtatcggattttgtggctactggacactagaaattgaatgcattcatccagtaaaaatatacccaatgataaaaatatgccagatatattatcacaccattaaaggtgattatttttcgtatgatggagggcgttaccaaaatactaatggaattcagcgccagtttattatacaaggattttga

SEQ ID NO: 78448 - protein, 172 aa, Unknown
  Obtained from environmental sample
  misc_feature (1)..(172): Xaa is any amino acid
MILSGLEIEKSIKNGDIEITPFERSLLNSNSYNLRLYDKLLVYTDFPLDMKKPQNTQEIIIPESGLIIQPGTLYLGRTFEHTVTKNHVPMIQGRSSVGRLGIYIHVTAGFGGIGFCGYWTLEIECIHPVKIYPMIKICQIYYHTIKGDYFSYDGGRYQNTNGIQRQFIIQGF

SEQ ID NO: 78449 - DNA, 588 bp, Unknown
  Obtained from environmental sample
  misc_feature (1)..(588): n is a, c, g, or t
atgggctttaccgctggtgcggcatacacctcttctgaccgcaccaatgaccaggttaaccatactgcggcgggtggtgataaagcatacgcgtggactgctggtctaaaataccatgctaactatatttacctggcaaccttgtattcagaaacgcataatatgaccccgtttggctacagcgattatgctgtgccaaacaaaacccagaattttgaagtcactgcacagtactactttgattttggtctgcgaccggaagtctctttcctgatgtctaaaggccgtgacctgcacgctgcttgtggtgcatacaactcgttaagtgttgatgataaacattcggattattacgccgtaattagcctcgacctactattgtcaataaaaacatgctccccctacttgactattaaatcatcctgttggatcaaaatgacagcttctacactaccattggtatctctacctataactcttgttccttttggtcttgtttatcatctccttaaccctccctgccctctgctttttctggtaccatttcctacatattcttcctccttggatctaactcaattaaggtaa

SEQ ID NO: 78450 - protein, 195 aa, Unknown
  Obtained from environmental sample
  misc_feature (1)..(195): Xaa is any amino acid
MGFTAGAAYTSSDRTNDQVNHTAAGGDKAYAWTAGLKYHANYIYLATLYSETHNMTPFGYSDYAVPNKTQNFEVTAQYYFDFGLRPEVSFLMSKGRDLHAACGAYNSLSVDDKHSDYYAVISLDLLLSIKTCSPYLTIKSSCWIKMTASTLPLVSLPITLVPFGLVYHLLNPPCPLLFLVPFPTYSSSLDLTQLR

SEQ ID NO: 78451 - DNA, 654 bp, Unknown
  Obtained from environmental sample
  misc_feature (1)..(654): n is a, c, g, or t
ttggcgcaaaccacaagggaacccctaaatgtcatcaacatgaccgttgaaattcctgaatatatctcaacccaaaaaaaatccacaccaaagcaggacgcaatgtgttcaaaggtcctaaaagaatataacccccaaagtaccttcaaatcaatcgatgtttccgacttggtgcgcaaacacattttgaaaaccgtaaactccggcgtaaagggctataatctctacatcatggtacggcttcttgcctaccttgttcccgaaatccccgacaaggtcctctacttcgacaccgacgtaatgttttgcaaagacatcaaacccctatgggatatcaatatggacaaatacgaacttgccgcccgccgcgatgttgtattcggaaactgcatgcatctgacatggccgttcaaatttctccaaagcggcgtcatgctcttaaatctgggccgaatccgcgaatccggctcttttgcgcgtgccataaagcactaccaaacaaaaaaatatcgcaacaacctccttgacataattgccatgaacaggtccataagtttttggcgcaagcgggtcctaaacaaaaaatacaactcctatccaaaatggaatcgtaacactgtcgcctaccatctgtgcgcattaatgacctcctag

SEQ ID NO: 78452 - protein, 217 aa, Unknown
  Obtained from environmental sample
  DOMAIN (10)...(217): Glycosyl transferase family 8
  misc_feature (1)..(217): Xaa is any amino acid
MAQTTREPLNVINMTVEIPEYISTQKKSTPKQDAMCSKVLKEYNPQSTFKSIDVSDLVRKHILKTVNSGVKGYNLYIMVRLLAYLVPEIPDKVLYFDTDVMFCKDIKPLWDINMDKYELAARRDVVFGNCMHLTWPFKFLQSGVMLLNLGRIRESGSFARAIKHYQTKKYRNNLLDIIAMNRSISFWRKRVLNKKYNSYPKWNRNTVAYHLCALMTS

SEQ ID NO: 78453 - DNA, 546 bp, Unknown
  Obtained from environmental sample
  misc_feature (1)..(546): n is a, c, g, or t
atggaagtgcgcgaatggggactcgcaaacggttacacatttggcggaggcgccggcgtcgaaggccatgggacaaccggaacaggcgcggtgggaactgccgcgcagcgggcatcgcggcccgtctccaacgtaagctggcgggatgccgttgtatggtgcaacgcctacactgaatattccaacgcaaaatttggaacgaattacgaagcggcatattacacagacgacacatatgccgccgttgtaaggattaccgacaactcaatactaggcggagatcccgccgattatacccccaccacggacgccggcagggcaacctacaacgcggtgttaaaaccggatgccgacggataccgcctccctatcgaagttgagacggaattcgccgcgcggggtggagacccgagcctcgccgagtggtcctatacctatccgggaagcaatgatgtttacgatgtggcctggtttgcggaaaacgcgtatacgccctatgttcccgcaagcgatgacaattacggcttgtctccggtaggaacctag

SEQ ID NO: 78454 - protein, 181 aa, Unknown
  Obtained from environmental sample
  misc_feature (1)..(181): Xaa is any amino acid
MEVREWGLANGYTFGGGAGVEGHGTTGTGAVGTAAQRASRPVSNVSWRDAVVWCNAYTEYSNAKFGTNYEAAYYTDDTYAAVVRITDNSILGGDPADYTPTTDAGRATYNAVLKPDADGYRLPIEVETEFAARGGDPSLAEWSYTYPGSNDVYDVAWFAENAYTPYVPASDDNYGLSPVGT

SEQ ID NO: 78455 - DNA, 339 bp, Unknown
  Obtained from environmental sample
  misc_feature (1)..(339): n is a, c, g, or t
ttggagatttttgggacggctgcgcggtacggcgaattggacacagaagggacggatgctgtggaggaagtcgtagagcctcataatttaactattgagcaggtggcaaagtccatagccgttcctgcgtggaggttatttgcaattatagacggtggcgagcctatggttgcggatttggatttgctgttgacaaaatatttcggattaacggaggggtattttttgagaatgcaggagttgtataatttgagactagcaaaacaaaagttaagaaaaaagttgtcaaatataattcccattttcaacttgccgaaacgagtagtggctgctttgtga

SEQ ID NO: 78456 - protein, 112 aa, Unknown
  Obtained from environmental sample
  misc_feature (1)..(112): Xaa is any amino acid
MEIFGTAARYGELDTEGTDAVEEVVEPHNLTIEQVAKSIAVPAWRLFAIIDGGEPMVADLDLLLTKYFGLTEGYFLRMQELYNLRLAKQKLRKKLSNIIPIFNLPKRVVAAL

SEQ ID NO: 78457 - DNA, 426 bp, Unknown
  Obtained from environmental sample
  misc_feature (1)..(426): n is a, c, g, or t
ttgatcgccgcccgctatgaggggctcgacgagcgggcgatcgagctcggcgtcgacgaggagctgtccgccggggactacgtgctgtccggcggcgagctgccggcgctcatggtcatcgatgcagttgcacgtttattgcctggggcgctcggctgcgagcgctccagcgtcgaggaatccttcaacgagggtttgctcgattggccgcattacacgcggccagaggtattcgaaggcttggccgtgcccgcggtgctattgtccggcaaccatgccgacatccgccgctggcggctggagcaggctgtgagccgcacactgcggcgccggccggacctggtggaccgcgggacgctcacgcccgaggcgagccttttgctgaaccagcttcgcgccgcgcaggcgggcgagagcccagattga

SEQ ID NO: 78458 - protein, 141 aa, Unknown
  Obtained from environmental sample
  DOMAIN (2)...(112): tRNA (Guanine-1)-methyltransferase
  misc_feature (1)..(141): Xaa is any amino acid
MIAARYEGLDERAIELGVDEELSAGDYVLSGGELPALMVIDAVARLLPGALGCERSSVEESFNEGLLDWPHYTRPEVFEGLAVPAVLLSGNHADIRRWRLEQAVSRTLRRRPDLVDRGTLTPEASLLLNQLRAAQAGESPD

SEQ ID NO: 78459 - DNA, 447 bp, Unknown
  Obtained from environmental sample
  misc_feature (1)..(447): n is a, c, g, or t
ttgctgtccgaacacagtagcaggcggttttttgttgtccgcccaccaacccatctaggaggcaccatgaataacgatcagaagcagcaattgaggctgttgcggcagcagggcttgggttacaccaagattgcggcgacgcttggcgtgaatgccaatacggtgaaatcgtattgccagcgaaacaatttaggtgccaatccggttggggtttgcgattattgtgctgcgccattgaggcagacgccgggggttaagaagcggcgtttttgcacggatcaatgccgcatggcttggtgggccaagcatcccgaaagggttaaccgtaaggccttctaccagtttatttgcaccggttgcgacaccaattttgaggcgtatgggaatggtaaccgcaggttctgctcgcgcgcttgtgctggtgctgcaaggcgggtgggccaatga

SEQ ID NO: 78460 - protein, 148 aa, Unknown
  Obtained from environmental sample
  misc_feature (1)..(148): Xaa is any amino acid
MLSEHSSRRFFVVRPPTHLGGTMNNDQKQQLRLLRQQGLGYTKIAATLGVNANTVKSYCQRNNLGANPVGVCDYCAAPLRQTPGVKKRRFCTDQCRMAWWAKHPERVNRKAFYQFICTGCDTNFEAYGNGNRRFCSRACAGAARRVGQ

SEQ ID NO: 78461 - DNA, 540 bp, Unknown
  Obtained from environmental sample
  misc_feature (1)..(540): n is a, c, g, or t
atggcggttctggatcaacgctccgaaatgattgctggtggcctgcaacaggccgagcaagtcaagctggccgctcaagaaactctggcgcaacgtcagcaaatgttggaagaagccagggctgaggccagcgacattagagctcaagcccgccaggaccgcgctgaaatagtcagcaccgcccgctcggctgcggaacaagaggtccgccgggtggaggaagactcggctcggcgtctggatgctcagcgccaagaagctgaaaaagctttgcggcaagatgtgggcaccttagctacgcaattagctgccaagattgtgggggcttcgttggcaaaagaatccaccaaaaaacagtccattgaccgtttcttggatgagttggaagcaagcctggatgtggccccggggcagcgtcaaccctctgcagcagagttagttgattcggtcgggctgcctataccgagtgacactcccattgttgaagctgtagtaaaagaccatcatcatttccacctatttagaggcaaagacaaatga

SEQ ID NO: 78462 - protein, 179 aa, Unknown
  Obtained from environmental sample
  DOMAIN (1)...(108): ATP synthase B/B' CF(0)
  misc_feature (1)..(179): Xaa is any amino acid
MAVLDQRSEMIAGGLQQAEQVKLAAQETLAQRQQMLEEARAEASDIRAQARQDRAEIVSTARSAAEQEVRRVEEDSARRLDAQRQEAEKALRQDVGTLATQLAAKIVGASLAKESTKKQSIDRFLDELEASLDVAPGQRQPSAAELVDSVGLPIPSDTPIVEAVVKDHHHFHLFRGKDK

SEQ ID NO: 78463 - DNA, 651 bp, Unknown
  Obtained from environmental sample
  misc_feature (1)..(651): n is a, c, g, or t
atggggcgggtcatcgccagcatcgcccacgaaatccgcaacccgctcggcatcatccgctccagcgccgaacttctgctgcgccgggctgaagcgggcgacccttcccggcgcatactggaagccgtttttgacgagagctgccgcttaagccagacagtcaacgactttctggattatgcccgcccccggcagcccaagtgcatgccggtggatgcgggccagcttctggatcagatctgcggctttctggaaagcgagttccgcagcaaagggatcgaactgagccgcgaagcggacggcgatctgacggtagcgggcgacaaggatttgctgtaccgtgccttttacaatgttctggccaacgccctccaggccttgcccggcgaggggctgatccgcatccgggcgcaaggcgggccggaagaagtgcgggtggagttccgggacaacggtcccggctttcctgacgacgcgctggacaaggtgctggatcccttcttcaccaccaaggacaacggcgccggcctcggcctgcccatcgtcaacaccatcgtgtccagtcacgggggagggcttgccctgtccaaccacccggctggcggcgcgcttgtcgttatcaccctgccccggcgcaaggatttttcatga

SEQ ID NO: 78464 - protein, 216 aa, Unknown
  Obtained from environmental sample
  DOMAIN (1)...(66): His Kinase A (phosphoacceptor) domain
  misc_feature (1)..(216): Xaa is any amino acid
MGRVIASIAHEIRNPLGIIRSSAELLLRRAEAGDPSRRILEAVFDESCRLSQTVNDFLDYARPRQPKCMPVDAGQLLDQICGFLESEFRSKGIELSREADGDLTVAGDKDLLYRAFYNVLANALQALPGEGLIRIRAQGGPEEVRVEFRDNGPGFPDDALDKVLDPFFTTKDNGAGLGLPIVNTIVSSHGGGLALSNHPAGGALVVITLPRRKDFS

SEQ ID NO: 78465 - DNA, 642 bp, Unknown
  Obtained from environmental sample
  misc_feature (1)..(642): n is a, c, g, or t
gtgtgtaataacactgcgcttacaaagttgttttgctgcggaaatcaaatcacgtgtttggacgttagtaaaaatactgcgttggcatggttgtcttgcaatgtgaatgaattaacaggttgtaacgttagcaataatcgtgcacgggcaaagtttaattgctcaaacaagacaatgacaataaagacgctgataacggaaaagaagaataaagttgaaattgggttagccggaacaggaattgcaataatagattggggagatggctcgaagtatatagagacacttgatgggtacaaatattttagtcatacttataaaagttctactatatacataattacggtaaacggtgataatattacaggattaaattgctcaaagaatcaaatcacaagtttagacgttagtaaaaaccgtgcgctgaaagtattgcattgcggaaataatcaaatcacgaatttagacgttagcaataatcgttcgttggcagagtttacctgctacaacaatcaaatcacgagtttagacgttcgcaataatagtgcgcttgcagagtttaacttatccaacaatcaaatcacaaatttgataatgcccaatgatacttcattgagattagtgtatgggtacatacaatag

SEQ ID NO: 78466 - protein, 213 aa, Unknown
  Obtained from environmental sample
  misc_feature (1)..(213): Xaa is any amino acid
MCNNTALTKLFCCGNQITCLDVSKNTALAWLSCNVNELTGCNVSNNRARAKFNCSNKTMTIKTLITEKKNKVEIGLAGTGIAIIDWGDGSKYIETLDGYKYFSHTYKSSTIYIITVNGDNITGLNCSKNQITSLDVSKNRALKVLHCGNNQITNLDVSNNRSLAEFTCYNNQITSLDVRNNSALAEFNLSNNQITNLIMPNDTSLRLVYGYIQ

SEQ ID NO: 78467 - DNA, 468 bp, Unknown
  Obtained from environmental sample
  misc_feature (1)..(468): n is a, c, g, or t
ttgccgcttgagcgccgggaaatgacgatcccgcggacgggtctggccgtattgagcgcggccgggctgtatggggtgttcgcgatagggcggctcgcgtccgtctgcctgcttcccttcgcctccgggcagattggcgccgtctatgcgatccggcaggaggccgcgccggctctgatcgctctcgtgctcatctttttgaccagtccgtgcgaggaattgttctggcggggctttcttcagcgttcatgcatggcccggcgcggcgaagtccggggttggctgctggccgcgctggcgtatgccggggcgcatgtggtttcgggcaacttcatgcttgttggggcggctctgacagccggtttgttctggggctgcctgtatctgcggacgcgcagcctgtatgtgtgcatcgcatcgcacgcgctgtggactgtggcgatttttttgctctggccgttgtcgtga

SEQ ID NO: 78468 - protein, 155 aa, Unknown
  Obtained from environmental sample
  DOMAIN (59)...(152): CAAX amino terminal protease family
  misc_feature (1)..(155): Xaa is any amino acid
MPLERREMTIPRTGLAVLSAAGLYGVFAIGRLASVCLLPFASGQIGAVYAIRQEAAPALIALVLIFLTSPCEELFWRGFLQRSCMARRGEVRGWLLAALAYAGAHVVSGNFMLVGAALTAGLFWGCLYLRTRSLYVCIASHALWTVAIFLLWPLS

SEQ ID NO: 78469 - DNA, 591 bp, Unknown
  Obtained from environmental sample
  misc_feature (1)..(591): n is a, c, g, or t
ttggcaagcggtacagttactggaaccacatatacacataccggtctacaggcaaatactatttattattactgtgttgtggcatctaacagttccggtgacagcgttttttcaacatccgcttccgccagaacattgcttagcgcccccgtcggagtaacccccaccggagggcagtttgtgacaagtatcagtttatcatggagccctgtaacaggagcgtccagttacaaagtatattacggaacaagcgcgtcttctgttactactctggccggttcaccatcaggaaccgcatatactcatacaggattgcagggtggtactacatactattaccgtgtagcagcgtatagcagcgctgccggtgatagcgattattcattaactgtttcggcaacaacaaaaactttcagccccctactattacttccgtatcaagagtttattcaggttataacagggtacaatatactttccgtaaccggatccacgagttacgaggtattttacacaacatgctgtccatcccggaaccaagctcaccctggtggacctgtggaacatcatatggtcatactacttcattaa

SEQ ID NO: 78470 - protein, 196 aa, Unknown
  Obtained from environmental sample
  DOMAIN (47)...(128): Fibronectin type III domain
  misc_feature (1)..(196): Xaa is any amino acid
MASGTVTGTTYTHTGLQANTIYYYCVVASNSSGDSVFSTSASARTLLSAPVGVTPTGGQFVTSISLSWSPVTGASSYKVYYGTSASSVTTLAGSPSGTAYTHTGLQGGTTYYYRVAAYSSAAGDSDYSLTVSATTKTFSPLLLLPYQEFIQVITGYNILSVTGSTSYEVFYTTCCPSRNQAHPGGPVEHHMVILLH

SEQ ID NO: 78471 - DNA, 792 bp, Unknown
  Obtained from environmental sample
  misc_feature (1)..(792): n is a, c, g, or t
atgcttgtggcggtggcaataaccacgccagcgtttgtggggtacaaaaataattggtacattgcctaccacgaccgcaaacttaggctaactaacggagtttggggcggagagtacaggagcgtgagcttggataaattggaatacaactcagatggtactataaagcaggtagtagctactaacgatgggcccgcgcagataaaaaactttaacccttatgataccgttttggcaactactatgttcaagcaatccggcagcataaaaacagcaatatgcagtgcccctaaccccggcaccatcgtcaacaacaacaatggtagcggtagtggcagcgcaggcacatctggtgataaatgcgtaatgctcatctcaatcacggatggaagctgggttaacctcaagagcgtgggctttacaaacggtgccacaaaattcttggtgcgtgctgcaagtaccaacgcaagtgccgcaattgaaataagaaccggaagcaataccggtactttagttggaacctgtactattggatctactggcggcttaactacatggcaagagaaagaatgtgatatcaatatgagtgctggcgtaaaagattacctagttctagttttcaaaggcaacaatttccgcgtaagcaagtatatgttcaaggcaagcgggtacctcaacgccatccagcagcagcagagttgcaagcagttcaagcgttgcaccttccttcagcagcaaggcagtgagtaccttcccactcagcggtttcgtccctcttctaacacaccctag

SEQ ID NO: 78472 - protein, 263 aa, Unknown
  Obtained from environmental sample
  DOMAIN (106)...(221): Carbohydrate binding module (family 6)
  misc_feature (1)..(263): Xaa is any amino acid
MLVAVAITTPAFVGYKNNWYIAYHDRKLRLTNGVWGGEYRSVSLDKLEYNSDGTIKQVVATNDGPAQIKNFNPYDTVLATTMFKQSGSIKTAICSAPNPGTIVNNNNGSGSGSAGTSGDKCVMLISITDGSWVNLKSVGFTNGATKFLVRAASTNASAAIEIRTGSNTGTLVGTCTIGSTGGLTTWQEKECDINMSAGVKDYLVLVFKGNNFRVSKYMFKASGYLNAIQQQQSCKQFKRCTFLQQQGSEYLPTQRFRPSSNTP

SEQ ID NO: 78473 - DNA, 708 bp, Unknown
  Obtained from environmental sample
  misc_feature (1)..(708): n is a, c, g, or t
atgtcacaaattatacagtgtcaagacacaaacaatgttgtagtgctaacgtttgacgatggttattcagacaattttgattatgttttaccagtacttgaaaaatacgaaatgacggctacattttttcccgtgttaaagccatgtattgaaaactgtgttttgccaatcgatatttattataaaattgcagacaacaaagatctttccgaagaagcttataataacatgattataggcaaaatgaagaaaaaattttattttatgcatccaaaaaaacaaatgaattatttgaatgaaaatttccccgaacatataagtatcagcgaacaagtaaaatatttaaatgaattagaaataaaaacaatttctaaaaaaggatttgaaattggttctcatactgtaacacattcattgcttacctcaggatatatgacaaaaaacgatataatttttgagctgtcatattcaaaaaaatatttagaaaaaataatagataaaacgataaattctttttgttttccttcaggatattacaactatgagataattagaatggcgaaagatatcggttataatttgttttgctcaataaaaaacagagaacttgccgatgtgccaacaatttatgagcgcttttttgtaaatgaaaattcaaagaaagaattatttgctacttatttgaatgacaaaaaaggagatagataa

SEQ ID NO: 78474 - protein, 235 aa, Unknown
  Obtained from environmental sample
  DOMAIN (7)...(195): Polysaccharide deacetylase
  misc_feature (1)..(235): Xaa is any amino acid
MSQIIQCQDTNNVVVLTFDDGYSDNFDYVLPVLEKYEMTATFFPVLKPCIENCVLPIDIYYKIADNKDLSEEAYNNMIIGKMKKKFYFMHPKKQMNYLNENFPEHISISEQVKYLNELEIKTISKKGFEIGSHTVTHSLLTSGYMTKNDIIFELSYSKKYLEKIIDKTINSFCFPSGYYNYEIIRMAKDIGYNLFCSIKNRELADVPTIYERFFVNENSKKELFATYLNDKKGDR

SEQ ID NO: 78475 - DNA, 342 bp, Unknown
  Obtained from environmental sample
  misc_feature (1)..(342): n is a, c, g, or t
atgattctagtccgtgacgtgcttaaagaacatatagccccctttttcgctgcgcttttcgtgactacatttttatttgtaataaattttttggtagaagtgctagacgaaattctctccaaggggattcccgctggtattgttttggaaatttttgcgctaaatgtggtttggatggtggggcttgccgtgcccatgtctgtgcttgccgcctctcttatgacttttggcaggctttcctctgatagggaaatagtggctatgcaatctgcgggaatttcgccgctttcgcttatgcggcccgttcttgtgttttctgccttgcccccccccctttactga

SEQ ID NO: 78476 - protein, 113 aa, Unknown
  Obtained from environmental sample
  misc_feature (1)..(113): Xaa is any amino acid
MILVRDVLKEHIAPFFAALFVTTFLFVINFLVEVLDEILSKGIPAGIVLEIFALNVVWMVGLAVPMSVLAASLMTFGRLSSDREIVAMQSAGISPLSLMRPVLVFSALPPPLY

SEQ ID NO: 78477 - DNA, 477 bp, Unknown
  Obtained from environmental sample
  misc_feature (1)..(477): n is a, c, g, or t
gtgtgcaacgtacagtttgagaatcctgtaacgcgaaggagaagcaagatgaaaaagttaacagtcgcaggcatcgtgagtatatcgctgaccttgctcatcggtttggttgttgccggtggcgcacaggccgccggcccgatcaaggtttcggtttcgcaaaccagctcggatcaaagcccctggcagaaaggcgctctggcttttgccaagcatctgaacgaaaaatcaggcggcagataccaggcgcaagttttcccgaacgcttcgctcagccagggaaactacaccatcatgatggagcagatccagtctggagcgctccaggttgccattgagtcgctcactgtgcttggcgcctacaacgaaaaggccggcatcctgaacataccttttacttttgccgatgttgcccaatcaagcttatcgaggccatcgacctggaggggcggcccggcaccagcttttgttccctaa

SEQ ID NO: 78478 - protein, 158 aa, Unknown
  Obtained from environmental sample
  misc_feature (1)..(158): Xaa is any amino acid
MCNVQFENPVTRRRSKMKKLTVAGIVSISLTLLIGLVVAGGAQAAGPIKVSVSQTSSDQSPWQKGALAFAKHLNEKSGGRYQAQVFPNASLSQGNYTIMMEQIQSGALQVAIESLTVLGAYNEKAGILNIPFTFADVAQSSLSRPSTWRGGPAPAFVP

SEQ ID NO: 78479 - DNA, 336 bp, Unknown
  Obtained from environmental sample
  misc_feature (1)..(336): n is a, c, g, or t
gtgaaatatgttatgaactcagatatctatgaaacaatttattatattgcaactttgcaaacggttttttatataacattcatgtataataaaatatttgacagcacattttatggagtaggcagatccgattacatgttaatacaatcagtttgtattgacttcttttattatgggatagcgtttgttttatacctaaataaaatattcattcgtacattgttcagtatttcaatgttgtttggttttggaatggttttggatttaataccaacattcattctatataatagattacttaaaaaattgaatatgaaaataataccagacgcgtga

SEQ ID NO: 78480 - protein, 111 aa, Unknown
  Obtained from environmental sample
  misc_feature (1)..(111): Xaa is any amino acid
MKYVMNSDIYETIYYIATLQTVFYITFMYNKIFDSTFYGVGRSDYMLIQSVCIDFFYYGIAFVLYLNKIFIRTLFSISMLFGFGMVLDLIPTFILYNRLLKKLNMKIIPDA

SEQ ID NO: 78481 - DNA, 807 bp, Unknown
  Obtained from environmental sample
  misc_feature (1)..(807): n is a, c, g, or t
gtgcaaacgatctctgccctcacgggggagaacggttggagaggaacgctctcaacgctatactggctatctaattcccttagccgatgctcatataacgctatgcccgtgttttccattttggctttgcttgcttattcgctcagcttggggctgattatcccaagtctggtgcggaaaaatagtgcttaccggcggttagcgctggtttctgccgacgagacactagtgtgccatgctattgccttgaaaaatcaaatttttgatgttggcgttggtcagaatcttacgttactgaacattggttctattgttgggctgatgatctgtacgattatgaccattgtcgcttcacaagggcgaggctggcttttactccctattgtctatagcttcgccatgatcaatctggcgcttgccagcctgcttccaggggagtttattacccctttggaagccagcccagagatatttatccacatcggactggcgctttttgcttatgccacgcttatcatcgcggcgctgtatgcgctacaactggcttggcttgattatcccttaaaacctaagaaactgacgtttaatgctgatatgccgccgttaatgaccattgaacgaaaaatgttccatatcacccaaattggggtggtattacttacactgacactttgtaccggtttgctttatatggataatctcttcagtaaagagaatgtccataaagcggcgatatcgattatggcctggtttgtctatatcgttttatcgcggcgccattatcatgaaggctggccctgggcgtaa

SEQ ID NO: 78482 - protein, 268 aa, Unknown
  Obtained from environmental sample
  DOMAIN (67)...(267): Cytochrome C assembly protein
  misc_feature (1)..(268): Xaa is any amino acid
MQTISALTGENGWRGTLSTLYWLSNSLSRCSYNAMPVFSILALLAYSLSLGLIIPSLVRKNSAYRRLALVSADETLVCHAIALKNQIFDVGVGQNLTLLNIGSIVGLMICTIMTIVASQGRGWLLLPIVYSFAMINLALASLLPGEFITPLEASPEIFIHIGLALFAYATLIIAALYALQLAWLDYPLKPKKLTFNADMPPLMTIERKMFHITQIGVVLLTLTLCTGLLYMDNLFSKENVHKAAISIMAWFVYIVLSRRHYHEGWPWA

SEQ ID NO: 78483 - DNA, 399 bp, Unknown
  Obtained from environmental sample
  misc_feature (1)..(399): n is a, c, g, or t
gtggaaatgctgcccaacttgatggccgtcatcgctgcttcttttgtgggcacggtgaccgccgcgatcctgggcctcaccacgctggcgtttgtgggcagcatccccntaaccaacctnaactggggcaccatcctgttttgggcccaacaaaacggcgcgttccccaatttctggtggtggtacatccccgccggtctggcgattgccctgatcggcatggcgctatcgctgatcaacttcgggatcgacgagtacgtgaatccgcggttgcgttcggctggcgagcgggcgcgcgagttgcgcaagcgcggcatgaaggcaaacagcagcgctaccgaggtgcgctcggtgcccggttttgacgacgatgtcgccacccccctcgcgattagttag

SEQ ID NO: 78484 - protein, 132 aa, Unknown
  Obtained from environmental sample
  SIGNAL (1)...(21)
  misc_feature (1)..(132): Xaa is any amino acid
MEMLPNLMAVIAASFVGTVTAAILGLTTLAFVGSIPXTNLNWGTILFWAQQNGAFPNFWWWYIPAGLAIALIGMALSLINFGIDEYVNPRLRSAGERARELRKRGMKANSSATEVRSVPGFDDDVATPLAIS

SEQ ID NO: 78485 - DNA, 462 bp, Unknown
  Obtained from environmental sample
  misc_feature (1)..(462): n is a, c, g, or t
atgatgctcaaccgggcggggcgcggctctccgttcgtagcgcgaggcacggtgcggcacggcgcgcgcgacgagtttgcgcaggaaaagtccaccgagttcgacgtgcgttcccagggcatccacacgcccgtgggcgatctttcgggcggcaacgcgcaaaaggtaatcattgcccgcgagctgtccaaaccgttgcggctgttcgtggcggcgcagcccacccgcggggtggatgtgggctccatcgagttcatccacaagcggatcatcgccacgcgcgatgcgggtatcccggtggtggtgatttcgaccgagctagatgaggctgtcgcactcgccgaccgaatcatggttatgtatcgcggcggcatcgtcggcatcgtcccgcccgataccccccgcgacgtgctcggcatgatgatggcgggcattcgccccgaggtaggagcggcagcatga

SEQ ID NO: 78486 - protein, 153 aa, Unknown
  Obtained from environmental sample
  DOMAIN (1)...(123): ABC transporter
  misc_feature (1)..(153): Xaa is any amino acid
MMLNRAGRGSPFVARGTVRHGARDEFAQEKSTEFDVRSQGIHTPVGDLSGGNAQKVIIARELSKPLRLFVAAQPTRGVDVGSIEFIHKRIIATRDAGIPVVVISTELDEAVALADRIMVMYRGGIVGIVPPDTPRDVLGMMMAGIRPEVGAAA

SEQ ID NO: 78487 - DNA, 450 bp, Unknown
  Obtained from environmental sample
  misc_feature (1)..(450): n is a, c, g, or t
atggaactttgccagcttaatccagtttactgtcacgatttgcgtcaataccaccatgttcttaagcaacgtaacattttgttaaaaacgtttcaaaaagaccatatgcaggatgatgtcctgtctgttttcgacgaacagctttgccggtacggaaaacgtatcatggcttcacgcgctaattttatcgaacgcgtttctgcggtctcgcacgagatacacgcaaggattaccggtggtactcaaacgctgtcaattaattaccaacctaatatcgaaaatcccgagctgtatgattctataatattcaaaaacaggggacgcgatttgatctctggaggaacatcgtccggtgtgcataaggacgatatctgcttcacaatcaacgggtataacgcgcgcgcgttcggttcacaaggccagcagcgtacggcggccgttgtcggctaa

SEQ ID NO: 78488 - protein, 149 aa, Unknown
  Obtained from environmental sample
  misc_feature (1)..(149): Xaa is any amino acid
MELCQLNPVYCHDLRQYHHVLKQRNILLKTFQKDHMQDDVLSVFDEQLCRYGKRIMASRANFIERVSAVSHEIHARITGGTQTLSINYQPNIENPELYDSIIFKNRGRDLISGGTSSGVHKDDICFTINGYNARAFGSQGQQRTAAVVG

SEQ ID NO: 78489 - DNA, 519 bp, Unknown
  Obtained from environmental sample
  misc_feature (1)..(519): n is a, c, g, or t
atggggccgcgtttcttttcatcattcaaaaaagacggagtgatgctcaatctgttcgccgcaagcatagtcatattaggcatagtaatagccggattgatacgccattttacaggaatatcaaattctgcggtggcgggacttttgtgcggagcggtaaccaacaccccaagtcttggcgcggtacagcaaatactcgccgaacagggtgctaccgccgacagcattgccgaaacaggtatggcttatgctatagcctatccgttcggtattttgggaataatatttacaatgttgttgcttcgggtgtttttcaggataaacactgtgaccgaaatagacgattataaatcatcgcttggcagcaacgaaacaaggctgcaaagcatagaaattaccgtagccaacccgggagtgttcggtaaaaacatagattatcttaaacgggtattaaatactgaatttgccgtttcacgaaaaatcccgcaccgaagaagctatgattgctaccgacaatga

SEQ ID NO: 78490 - protein, 172 aa, Unknown
  Obtained from environmental sample
  DOMAIN (1)...(103): Predicted Permease Membrane Region
  misc_feature (1)..(172): Xaa is any amino acid
MGPRFFSSFKKDGVMLNLFAASIVILGIVIAGLIRHFTGISNSAVAGLLCGAVTNTPSLGAVQQILAEQGATADSIAETGMAYAIAYPFGILGIIFTMLLLRVFFRINTVTEIDDYKSSLGSNETRLQSIEITVANPGVFGKNIDYLKRVLNTEFAVSRKIPHRRSYDCYRQ

SEQ ID NO: 78491 - DNA, 717 bp, Unknown
  Obtained from environmental sample
  misc_feature (1)..(717): n is a, c, g, or t
ttgaccgctcaagcccacaatgtagtgaatattaaatattacaattttgttttatcctcctttctcaatacaaaattcagcgcaaaacacaccaatagaacaggctttgttattaccaacatgaattacgacatgctgttaaaaaatgccggcgcaccgggaactcccctgcaaacgcttgtagataaaaacggtaacagtacgctcgcggcagcctacagccattctacgatcaatgtccacgaaaaaataaccattaatgcaggattaacggcacaatggtttatgcttaacaatgctttttccattgagccgagggcaggtataaaataccgatttgcaccgacacagacgttaagttttgcttatggcttgcacagccgcttggaacgattgaactattattttatcatagatgaaaacaatcaacgaatcaacgaaaagttgggctttaccaaggcgcatcactttatttttggttacgacatcagcacatcggaattaacacacctgaaaatcgaaacgtattatcagcatttgtttgatgtccctgtagtgctgggcggctctttttccttaatcaatcagcaaaatgattggtttttcagtcaaccacttcaaaatacaggctttggaagaaattacggaatagaccttacttttgaaaaatatctttccaatggttactattatatggcacacggcttccctgtttaa

SEQ ID NO: 78492 - protein, 238 aa, Unknown
  Obtained from environmental sample
  misc_feature (1)..(238): Xaa is any amino acid
MTAQAHNVVNIKYYNFVLSSFLNTKFSAKHTNRTGFVITNMNYDMLLKNAGAPGTPLQTLVDKNGNSTLAAAYSHSTINVHEKITINAGLTAQWFMLNNAFSIEPRAGIKYRFAPTQTLSFAYGLHSRLERLNYYFIIDENNQRINEKLGFTKAHHFIFGYDISTSELTHLKIETYYQHLFDVPVVLGGSFSLINQQNDWFFSQPLQNTGFGRNYGIDLTFEKYLSNGYYYMAHGFPV

SEQ ID NO: 78493 - DNA, 726 bp, Unknown
  Obtained from environmental sample
  misc_feature (1)..(726): n is a, c, g, or t
ttgtcantgctggatgctcgcctaaaggcttcgatactgaatctgcggcgcgcctgtggactgcaccttgagattttcccctgggacacaaaggcaaaggagttgctggcgccccgcttcgacggagtttttttgagcaacggaccaggcgatcccgcggccctgcccgccatgcgccaagaggtggccaagctcataggtcaaaagccgattttcggcatctgccttgggcaccaactgttggcggaggcgcttgggggttcaacgttcaagctgcccttcagtcatcgaggcgccaaccagcccgtgatagacctatccacgaccaccatacagataacagcgcagaaccacgggtttgcggtggacgaaaagagcctgccaaacgatttggaggtcacgcacaggcacctgtccgacgacaccgtggaaggcatcagacacaaaaagctgcccatcttctgcatccagcaccaccccgaggccagttctggtccgcacgacccgaggggcgcgtttgccaaagttcccagaaatgatggcgcgatgacagatgcccaaccgtacccatatttcttctgggctggtgcttgcatccagtcccataatcattgggcagctctgctaaattctactaatcaagcacacatgtccctcaaagcctctccactcaggcaaggcgtccgtaaaactcttcctcaaactcccacccctgccttacaataa

SEQ ID NO: 78494 - protein, 241 aa, Unknown
  Obtained from environmental sample
  DOMAIN (1)...(161): Peptidase C26
  misc_feature (1)..(241): Xaa is any amino acid
MSXLDARLKASILNLRRACGLHLEIFPWDTKAKELLAPRFDGVFLSNGPGDPAALPAMRQEVAKLIGQKPIFGICLGHQLLAEALGGSTFKLPFSHRGANQPVIDLSTTTIQITAQNHGFAVDEKSLPNDLEVTHRHLSDDTVEGIRHKKLPIFCIQHHPEASSGPHDPRGAFAKVPRNDGAMTDAQPYPYFFWAGACIQSHNHWAALLNSTNQAHMSLKASPLRQGVRKTLPQTPTPALQ

SEQ ID NO: 78495 - DNA, 744 bp, Unknown
  Obtained from environmental sample
  misc_feature (1)..(744): n is a, c, g, or t
atgctacaagatttttgcacaaaccgttgcacacctaaggagattttgaacatgagccaccataccacacttttctcccagacgctatccctcattcccagacatgtttttcaaaaactcgaacatcggcataaaaccggacgcgcctcacgcaaatttggtttcaaggagcaatttaccgtgatggctttcattcaactggccgcaaggcgttccatgcgcgatgggctacgctgtctggccgccgcaggaaagcgcctgtatcactgggggctggaaaacgtggcccgttccacttttgccgatgccaataactcccggcctgtgggctttttcaaagacatgttcgccgagatgtacagcttgtgccgtcctcatgcgcccagacacaagtttcgtttcaaatccaagctgttcagcttggacgccaccaccatcaaactttgcctgtcgctttttccttgggctgcgttcaggcagagaaagggcggcgtcaaaatgcataccctgcttgaccacgacggccatatcccggcttttgtcgccgtcaccaacgcccgaactcacgaaagccgcatcgccaaggcactggaattgcccaaaggctctatcgggggctttgaccggggttttatcccttacctctgggtttcgtcttcttggcgcaaaaggcgtttcctcctgacgccccctgagcagaacaccctatatcaccttgtaaagcgcccctccggggaaccgtaa

SEQ ID NO: 78496 - protein, 247 aa, Unknown
  Obtained from environmental sample
  misc_feature (1)..(247): Xaa is any amino acid
MLQDFCTNRCTPKEILNMSHHTTLFSQTLSLIPRHVFQKLEHRHKTGRASRKFGFKEQFTVMAFIQLAARRSMRDGLRCLAAAGKRLYHWGLENVARSTFADANNSRPVGFFKDMFAEMYSLCRPHAPRHKFRFKSKLFSLDATTIKLCLSLFPWAAFRQRKGGVKMHTLLDHDGHIPAFVAVTNARTHESRIAKALELPKGSIGGFDRGFIPYLWVSSSWRKRRFLLTPPEQNTLYHLVKRPSGEP

SEQ ID NO: 78497 - DNA, 603 bp, Unknown
  Obtained from environmental sample
  misc_feature (1)..(603): n is a, c, g, or t
atgaaggacgaccacattgcaagtactttgctgaaagacgagcaggacgacatgcgagaagtgttaaacccattgacgcattcgtcgtcgggatatttccacgtgacctacgaaagcatgggcgaaagggcgcaaccgatggttatcacgcagtcggaatttatgcgccgtatgaaggatatgtcggcgctcggcagcggaggtatgaatttctacggtacaatgcccgacagtttcaaccttgtggtgaactccgaccatccgttagtaaaaagggttattgccgaaaaagataacgagcttggtgaacagattaaaaccatagttggcgaattgcagcctgtcagcgccgaattgaacgcgctgagggaacaattgaaaggcaaaaaggatgaagaaatagaacaggcgcaaaaagacaaacgcgatgagttggaagataaagaagaagaaattcgtaacaaaaaaagggacattctgtcaggctatggcaaggaaaacaaacttgcccgtcaattagtagatttggctcttttggcaaacactatgcttaaaggcgaagaacttaacaagtttatacgccgaagggatagatatgaataa

SEQ ID NO: 78498 - protein, 200 aa, Unknown
  Obtained from environmental sample
  misc_feature (1)..(200): Xaa is any amino acid
MKDDHIASTLLKDEQDDMREVLNPLTHSSSGYFHVTYESMGERAQPMVITQSEFMRRMKDMSALGSGGMNFYGTMPDSFNLVVNSDHPLVKRVIAEKDNELGEQIKTIVGELQPVSAELNALREQLKGKKDEEIEQAQKDKRDELEDKEEEIRNKKRDILSGYGKENKLARQLVDLALLANTMLKGEELNKFIRRRDRYE

SEQ ID NO: 78499 - DNA, 480 bp, Unknown
  Obtained from environmental sample
  misc_feature (1)..(480): n is a, c, g, or t
ttgcttcctatgctaatgtgttaccctcgtctatttctctggtttccattgattggaactgaacatattggattgccaattattatcaattctaaggaatttgatcctcatactgaaagaaatgcaatatacttaacagaagattcaaaaacttatgagaaaaataaatcgatattaataaaggcattggaagatttaccaaaatttgcagaatatcttaaggaaaaaggggtaagaaatcttttgaatttactggcttttgattcaaataacgatgattggattaatcaggattggtttaatgatataaacaaacaaattttaggtaaaatgataaatttaccaatattatctttgggtgatttatcttccaatccttataaattagtagattttattattccatatacttccaaacatgaattgacaattgaactatgtaaactattatcaaataccaaagattggatttgttcctga

SEQ ID NO: 78500 - protein, 159 aa, Unknown
  Obtained from environmental sample
  misc_feature (1)..(159): Xaa is any amino acid
MLPMLMCYPRLFLWFPLIGTEHIGLPIIINSKEFDPHTERNAIYLTEDSKTYEKNKSILIKALEDLPKFAEYLKEKGVRNLLNLLAFDSNNDDWINQDWFNDINKQILGKMINLPILSLGDLSSNPYKLVDFIIPYTSKHELTIELCKLLSNTKDWICS

SEQ ID NO: 78501 - DNA, 339 bp, Unknown
  Obtained from environmental sample
  misc_feature (1)..(339): n is a, c, g, or t
gtggaggagagggggaggagggggaagaagaaaaggaaaaagagaagagaaagggtatggggggtgggggaggaagagaaaaggggagggggggtaaagaaggggggggagaaggggaggaagaggggagggaagaggaaggggggacgagggagagagggagaagaagagagagaggagagagagggcggggaaaaaaaggagggggcgggtgaaaggagagggggcaagaagggaggaaggaaagggaggaggggggacagggtggagacgaaaaggacagaaaggaaggggagaagagggaaaagggggaaaaaaggaaggataggggagaagtag

SEQ ID NO: 78502 - protein, 112 aa, Unknown
  Obtained from environmental sample
  misc_feature (1)..(112): Xaa is any amino acid
MEERGRRGKKKRKKRRERVWGVGEEEKRGGGVKKGGEKGRKRGGKRKGGRGREGEEEREEREGGEKKEGAGERRGGKKGGRKGRRGDRVETKRTERKGRRGKRGKKGRIGEK

SEQ ID NO: 78503 - DNA, 543 bp, Unknown
  Obtained from environmental sample
  misc_feature (1)..(543): n is a, c, g, or t
ttggggaccaaagctgttatagtcgatctgccttcctattccggcaccgacgtgaccggaactgtaataggcgggaactatgtcggcggatttgccgatgagccgaaaggcaaggttataggcgaggcgctgatcaaacagggcgcggacattattttcgtcgctgccggcgcgtcaggaaacggagttttcaccgcggcaaaagaagccaacggcgtttttgttatcggctgcgacgttgatcaatacaacgacggcgcctcgggcggacgcaatgtcgtgctgacctccgcgcttaaggttatgaataccaatatcacaagacaacttaccgccattgccgacgggacctttgcgggaaagaacgccttattgaacgcctcgaccgattcaaccggttatgtaagcacgccgggacgacatcagatgtcggcctctactcttgaaaaactcagcgcggcctacgctctgctaaagaagggcgagattgttccggcggcgaattttaacggacacaagcccgacaaattccccggcttataa

SEQ ID NO: 78504 - protein, 180 aa, Unknown
  Obtained from environmental sample
  misc_feature (1)..(180): Xaa is any amino acid
MGTKAVIVDLPSYSGTDVTGTVIGGNYVGGFADEPKGKVIGEALIKQGADIIFVAAGASGNGVFTAAKEANGVFVIGCDVDQYNDGASGGRNVVLTSALKVMNTNITRQLTAIADGTFAGKNALLNASTDSTGYVSTPGRHQMSASTLEKLSAAYALLKKGEIVPAANFNGHKPDKFPGL

SEQ ID NO: 78505 - DNA, 642 bp, Unknown
  Obtained from environmental sample
  misc_feature (1)..(642): n is a, c, g, or t
gtgtttgcccaaagcggcgtcttaaaggaactaacccgcgaagtggaactgaaacccgcgggggcatccgcgtttgcccccgctgttgcaggcgccccggatgcccttgatacagtcgtatccaccggctttaagagcaccgccataatcgtggtgggaagctctgttattacagtacggcccctgacccgtttaaccctggcggaaatacagacaacttcaaccacggaaaacattaacgtaaatttgcaggccggacgggtcaaagtggatgtcaagccgcccgcgggaacaaagacaaactttacagtacggagtcccagcgcaaccgcttctgtacggggaacgagttttgattttgatactattaacctgaagacatatgagggaaaggtagccttcagcggtaaattcggcgtaccgatgatggtacatgcgagaggcatgagctttatcggaagggatggtaaagcggctgatcctaacacggccggtataaagaatctccatccgccgtccatatcggaaggagccatagcccacattattggtgatagtacccggggttcatcgaatgttggcactgatgctggctacactggaattgatggctcccttggtgttgacgttggcgtacaataa

SEQ ID NO: 78506 - protein, 213 aa, Unknown
  Obtained from environmental sample
  misc_feature (1)..(213): Xaa is any amino acid
MFAQSGVLKELTREVELKPAGASAFAPAVAGAPDALDTVVSTGFKSTAIIVVGSSVITVRPLTRLTLAEIQTTSTTENINVNLQAGRVKVDVKPPAGTKTNFTVRSPSATASVRGTSFDFDTINLKTYEGKVAFSGKFGVPMMVHARGMSFIGRDGKAADPNTAGIKNLHPPSISEGAIAHIIGDSTRGSSNVGTDAGYTGIDGSLGVDVGVQ

SEQ ID NO: 78507 - DNA, 327 bp, Unknown
  Obtained from environmental sample
  misc_feature (1)..(327): n is a, c, g, or t
atgagtaagtgtccctggacggggagtaagcacatgcgtgacctgcctctagtcggcgaggaattcgccgggtaccgactactctcagttctgggccacggcggcatgagtaccgtctaccaggcccagaatccgcgcctcggcaacgtgatcgcgctgaaggtgctgtccccgcagctggcgggcaatgacctgttcctcccccggtttctggaggaatcccggatcgctgccagcctgaaccacccgaatgtcttgccgattcacgattcgggccccagtgactggttgctgtacatctccatgctctacgctcacgggcactga

SEQ ID NO: 78508 - protein, 108 aa, Unknown
  Obtained from environmental sample
  misc_feature (1)..(108): Xaa is any amino acid
MSKCPWTGSKHMRDLPLVGEEFAGYRLLSVLGHGGMSTVYQAQNPRLGNVIALKVLSPQLAGNDLFLPRFLEESRIAASLNHPNVLPIHDSGPSDWLLYISMLYAHGH

SEQ ID NO: 78509 - DNA, 654 bp, Unknown
  Obtained from environmental sample
  misc_feature (1)..(654): n is a, c, g, or t
gtggcacggatgacgagagcggagtcgaaagcgcgcacccgggagcgcatcatcggggaggcccggcgcctgttcgccgagcgcggctacgccgcgacccggctggagcaggtcgccgacgcggccggagtgaccaagggcgcgatctacgggcacttcgccagcaaggaagacctcatggtgaccgccatcgaagcggacccgacccccgacttcggcacggtgctggccaaggcgctggcccgggacgacctggcgccggacggcggggtgctgccggttcccggcaccgggatgccgccggagcgagaacggatgcgggacttcagccacgtcctggccgcggacgaggacctggcggacaccgccccgctggcggtccatctggagttcctcgcggtgctgctgcgcaacgaggaactccggtggcgctacgtcatcagtcggaaccagcggctgggggaactggccgcctccaaccccgaatcgttggtttcagggctgactctgggattaggtgtgggccctctgagcactcgcttgctggcctggcttgcctctagaatgggacgcttttgccccaatcattttccctcggacgtctttttctcgctgtcctttccttgtcgtaccaaccctgtacctcggaagtaa

SEQ ID NO: 78510 - protein, 217 aa, Unknown
  Obtained from environmental sample
  DOMAIN (17)...(63): Bacterial regulatory proteins, tetR family
  misc_feature (1)..(217): Xaa is any amino acid
MARMTRAESKARTRERIIGEARRLFAERGYAATRLEQVADAAGVTKGAIYGHFASKEDLMVTAIEADPTPDFGTVLAKALARDDLAPDGGVLPVPGTGMPPERERMRDFSHVLAADEDLADTAPLAVHLEFLAVLLRNEELRWRYVISRNQRLGELAASNPESLVSGLTLGLGVGPLSTRLLAWLASRMGRFCPNHFPSDVFFSLSFPCRTNPVPRK

SEQ ID NO: 78511 - DNA, 690 bp, Unknown
  Obtained from environmental sample
  misc_feature (1)..(690): n is a, c, g, or t
atgcctactggcagggcgagcggcagggttgttcttgacattgacaacaaaaacggcgcgagaggctcagaggcaatggcggcattggaggcccaacacggcatactgcccaaaaccaagcgccaacggacttgcaacggcggcacacactatctatttgaaaaccccgccaatgtggttttgaaaaacagcgcgggtaaacttggcaacggcattgacgttagagccaatggcggttacatcatacttgcgccgagcgagggatacgcatgggagacggacaaagatactccgctggctcccctgctccaatggatagtcaacgagcacacttccaaaccagtgccaaaggctcctaagaagcccacccacacgcgcggggactgcggcgcggggaattatggcagaaaggcacttgacggcatcttggcggacatgatggccgctactgagggtacacggaacgacaccctaaacaagctggcattccgcgctggatcgctggttgcgggcggcttctttccagagaacatggccggcgagttgaaacaggctgcgatggccatagggctggaacaagcccaagcggaaaaaacttctgcaagtggcttccaagctggcctactggtacccgccccaaaagtccaaaggccagaaagagagtatccccccccaaaacgtccaccatga

SEQ ID NO: 78512 - protein, 229 aa, Unknown
  Obtained from environmental sample
  misc_feature (1)..(229): Xaa is any amino acid
MPTGRASGRVVLDIDNKNGARGSEAMAALEAQHGILPKTKRQRTCNGGTHYLFENPANVVLKNSAGKLGNGIDVRANGGYIILAPSEGYAWETDKDTPLAPLLQWIVNEHTSKPVPKAPKKPTHTRGDCGAGNYGRKALDGILADMMAATEGTRNDTLNKLAFRAGSLVAGGFFPENMAGELKQAAMAIGLEQAQAEKTSASGFQAGLLVPAPKVQRPEREYPPPKRPP

SEQ ID NO: 78513 - DNA, 735 bp, Unknown
  Obtained from environmental sample
  misc_feature (1)..(735): n is a, c, g, or t
atggactttgggcgcttttcgacgtttgaccttgctgaggtacaagtggcaaaggggttcaactctgtggccttcgggcccaacacgattggtggggcgataaaccttgtcaccagaaagcccagcgaaaaatttgagggcaacgccattctgggggcctctgacggaaacatgaaaacggccgcagtgaacgttggcagcagactcgacaggttttatgtgcaggcgggcggcagcttccgcgacagcggcaatttcaaggtgtcttcagcgtcaaactttccaaacacggggcttgcagaggatgggcgacgcctcaatagtgattatagagattccaagatgtcggcaaaggtcggcttcgccccagccattggcgaatttgtcatcggctacatgacgcagaagggggaaaaggggcagccagtggcaacggaaggtagccgccaatttaggaggtggccgacttgggacaaggaagacatttactttctttccaatatcgcactgggggcggacagctatgtgaaggtgagggcctaccacgacacctacaaaaacatactgaacatgtacagatccaatgacattacgtacacacagcttcaaagcgtaagcatctatgacgatttcacaaatgggggcactttggaagtcggcaccgcaatgtttggcaagcagagcatcagagccatagcgcaatttaagacagacgtgcataggggccggggctga

SEQ ID NO: 78514 - protein, 244 aa, Unknown
  Obtained from environmental sample
  misc_feature (1)..(244): Xaa is any amino acid
MDFGRFSTFDLAEVQVAKGFNSVAFGPNTIGGAINLVTRKPSEKFEGNAILGASDGNMKTAAVNVGSRLDRFYVQAGGSFRDSGNFKVSSASNFPNTGLAEDGRRLNSDYRDSKMSAKVGFAPAIGEFVIGYMTQKGEKGQPVATEGSRQFRRWPTWDKEDIYFLSNIALGADSYVKVRAYHDTYKNILNMYRSNDITYTQLQSVSIYDDFTNGGTLEVGTAMFGKQSIRAIAQFKTDVHRGRG

SEQ ID NO: 78515 - DNA, 615 bp, Unknown
  Obtained from environmental sample
  misc_feature (1)..(615): n is a, c, g, or t
ttgaaaggtagtactgttgctacggagactgatcaacaacaactcactgtggacaatagtatcagttttaatataaatgggaataataatagtgtaaacttatcacaaaaaacaggtaacgttaacggtaattatttattaccaactccgaactattttattgaaggtaatggttctgtaacagaaaacggcatcattgcatatgtgagttctaaaaaagggactttaagtaataatgacagggccattatcaggaaatatatagaagaagcaaaatttgaaggtataaactctgatattgctatcgcccaaatgcttcattggacggattttcttagaaaccagcagcgtataacaaccaataattacggcggtttaagcagaattggtaattttaacggcaggtttaacaatatgactgagggtgttcgcgctcatattcagcatttaaaactttattcaaaccctaaagtcaaagggcagcttgttgatccaaggtacagtggattaagagataacggttatattggaatcgctgtaacagttcaagaatgtattcccttttgggttacgagggcatatagtaaaaattacgaaataggatattgggtataa

SEQ ID NO: 78516 - protein, 204 aa, Unknown
  Obtained from environmental sample
  misc_feature (1)..(204): Xaa is any amino acid
MKGSTVATETDQQQLTVDNSISFNINGNNNSVNLSQKTGNVNGNYLLPTPNYFIEGNGSVTENGIIAYVSSKKGTLSNNDRAIIRKYIEEAKFEGINSDIAIAQMLHWTDFLRNQQRITTNNYGGLSRIGNFNGRFNNMTEGVRAHIQHLKLYSNPKVKGQLVDPRYSGLRDNGYIGIAVTVQECIPFWVTRAYSKNYEIGYWV

SEQ ID NO: 78517 - DNA, 480 bp, Unknown
  Obtained from environmental sample
  misc_feature (1)..(480): n is a, c, g, or t
gtgggagcaataaaaaatgtaataacagaaatgccacgtattaaggtaatatatcctatccataaaaatcctgctataagagagattgcttacaacatatttggagaaaacaaacaaattagaataattgaaccattaaatgtaatagattttcataattttatatcaaaatcatttattatattaacagacagcggaggaatacaggaagaagcttctgcattaggaaaacccaccttagttttaagaaatacaacagaacgtcctgaaggtatagaaaccggatctttaaaattaataggtatagaagagcaaaatatttataatgagtttaagacattacttaataatgaaaatgaatataataaaatgaaaaattcattacatccatatggagatggacatgcaagtaaaaggattattgatattcttataaacgagaaatatgaggagtatttatataatgaatgtaaaatataa

SEQ ID NO: 78518 - protein, 159 aa, Unknown
  Obtained from environmental sample
  DOMAIN (1)...(145): UDP-N-acetylglucosamine 2-epimerase
  misc_feature (1)..(159): Xaa is any amino acid
MGAIKNVITEMPRIKVIYPIHKNPAIREIAYNIFGENKQIRIIEPLNVIDFHNFISKSFIILTDSGGIQEEASALGKPTLVLRNTTERPEGIETGSLKLIGIEEQNIYNEFKTLLNNENEYNKMKNSLHPYGDGHASKRIIDILINEKYEEYLYNECKI

SEQ ID NO: 78519 - DNA, 525 bp, Unknown
  Obtained from environmental sample
  misc_feature (1)..(525): n is a, c, g, or t
gtgtttcttgccgcgcatacagtgtcacggctgcctggcaaaggagaagtggtgcgttttttcacctgcacgatggtgcgggaagactcccttgagttgtttggtttcgaaacctgggatgagcgtgagacctttctggtgctgacatccatatccagggtaggagcacgtacggccatggccattttgtccgtgttccgaccggatgatctgcgtatcttggcggcgagcaatgacatgcttgccctgacgcgggttccgggcatcggcaagaaaaccggtcaacaaatttttcttgagcttaaatacaaactcagaaacgaaactgccgctgcaccgattgcgtctggaatctccaacacagcaggagtacaagctgatgccgttgccgggctgatgaaccttggctacgatgagaatgaagccgtgcgcgcagtgaaaaaagtgctggctgacaagcctgaacttgatgtgcccgaaactttgcgtaccaccttgaaagccttgggcagaagaatgttatga

SEQ ID NO: 78520 - protein, 174 aa, Unknown
  Obtained from environmental sample
  DOMAIN (123)...(170): RuvA, C-terminal domain
  misc_feature (1)..(174): Xaa is any amino acid
MFLAAHTVSRLPGKGEVVRFFTCTMVREDSLELFGFETWDERETFLVLTSISRVGARTAMAILSVFRPDDLRILAASNDMLALTRVPGIGKKTGQQIFLELKYKLRNETAAAPIASGISNTAGVQADAVAGLMNLGYDENEAVRAVKKVLADKPELDVPETLRTTLKALGRRML

SEQ ID NO: 78521 - DNA, 330 bp, Unknown
  Obtained from environmental sample
  misc_feature (1)..(330): n is a, c, g, or t
gtggacgcccccaggctgactttgggcgatattgtgtatcttgctcccggcgacaaggtccccgctgatctgcgactgtttcggacggaaaatttgcgcgtggaggaatctgcccttaccggtgaagcagttccttctgaaaagcatatacgacctcttgctcttgaaaccgtgcttggtgaccggtcaaacatggcctattgcgggaccacggtcagtgcgggcacagggtacggcgtccttgtggatattggcacggatacagaaataggacgtatcaaccagcttattgctgaggcgggtgagacgaccacgccgctgctcccgtag

SEQ ID NO: 78522 - protein, 109 aa, Unknown
  Obtained from environmental sample
  DOMAIN (2)...(109): E1-E2 ATPase
  misc_feature (1)..(109): Xaa is any amino acid
MDAPRLTLGDIVYLAPGDKVPADLRLFRTENLRVEESALTGEAVPSEKHIRPLALETVLGDRSNMAYCGTTVSAGTGYGVLVDIGTDTEIGRINQLIAEAGETTTPLLP

SEQ ID NO: 78523 - DNA, 462 bp, Unknown
  Obtained from environmental sample
  misc_feature (1)..(462): n is a, c, g, or t
atgctggaatataataatccgtttggacgggacagaagccaattttcagttaatatgagaaacaatctgattgctttcctggagcatataaaaaaagttgatatatcctttgttgcggaagatttcacgaaattgaaattttcgcggatgggtaataacgatatagtatactgtgatccgccttatctgataaccacaggcagttacaatgacggcaacaggggttttaaggactggaaagaagaacaggaattggcgctctatgaactgctggacaaactaaatcaacaaggtgtaaagtttgccctttccaatgtgctgacacataaaaaaagacgcaacaaaatattatcaggctggagtaagagatatagggtaacctttttggataacgattattccaattcaagttataacagcgcaaagggcaagagcgcggaagtcctgataacaaattattga

SEQ ID NO: 78524 - protein, 153 aa, Unknown
  Obtained from environmental sample
  misc_feature (1)..(153): Xaa is any amino acid
MLEYNNPFGRDRSQFSVNMRNNLIAFLEHIKKVDISFVAEDFTKLKFSRMGNNDIVYCDPPYLITTGSYNDGNRGFKDWKEEQELALYELLDKLNQQGVKFALSNVLTHKKRRNKILSGWSKRYRVTFLDNDYSNSSYNSAKGKSAEVLITNY

SEQ ID NO: 78525 - DNA, 546 bp, Unknown
  Obtained from environmental sample
  misc_feature (1)..(546): n is a, c, g, or t
gtggaaagaaaagaggaaagagnnaaagaagaagaaatggaggaagatnnagagnagggaaggaagnagaaggaggagagagagggnngggagaggnggganangggnaannnggaggaggaggnaaaannggngagannanggnngaaggagggnggggaagaaaaaaangnngaaannaaaaagaagaaanaanngaggagggagaaanaggnagnngnaaaggngggggaaggggaaaaagggggaggaggaaangttttttttttatnggngagaannaggaggangaaagatgtgggaggttggggaaaaaagattgaagagnttgtttgtgagggttgtgaagttgttagaataagagttttaatggttgatgatgtagaaaaattaaaagaaattggagaaaaagttagagaagatgggataaaaattagagtttntggagatatatattttaagnaaagaggggattatgaggtttttaaatgggttgaaaaggtgagagtaaatnngggnaattttggaaaggatgattttnngtaa

SEQ ID NO: 78526 - protein, 181 aa, Unknown
  Obtained from environmental sample
  misc_feature (1)..(181): Xaa is any amino acid
MERKEERXKEEEMEEDXEXGRKXKEEREGXERXXXGXXEEEXKXXRXXXKEGGEEKXXEXKKKKXXRREKXXXXKXGEGEKGGGGXVFFLXXRXRRXKDVGGWGKKIEEXVCEGCEVVRIRVLMVDDVEKLKEIGEKVREDGIKIRVXGDIYFKXRGDYEVFKWVEKVRVNXGNFGKDDFX

SEQ ID NO: 78527 - DNA, 627 bp, Unknown
  Obtained from environmental sample
  misc_feature (1)..(627): n is a, c, g, or t
ttgcatnnnnnnnnnnnnnnnnnnnnnnnnnncactcgagccgctaattcgatccgacgcctgtcgagctatcgtctttccgtagagggattttacatctttacgcccgtgaagtcgggtttgatgattattgatatttgtcgcgcccgccgccggattttgtacgaacggtttctcgaaaatgtagccaaccacctgcccgcaacgcagcaggatatttttccgcaaacagttgaattaacgccgatagactatacgctgctggaaagcgtgctgcccgaactggcgcaggctggttacgacattcgtccgtttggcaacaacacggtggtggtaaacggacagccgtcggatgcacccagcataccggccaaagacctgttggacgagttagtgcactcgcttcacgaaaatgccaatgacctgaacacacaacggcaggaaaaactggcgcaatcgctggccaaagccgccgtcggccactccaccgagccgctgactaacacggaagtacaggcgttgattgatgccctgtttgcctgcaaagagccttcactgtcgcccgaaggtaagcccacgctgcaaatgctgactaccgatgagttgaataagcgatttaattgttaa

SEQ ID NO: 78528 - protein, 208 aa, Unknown
  Obtained from environmental sample
  misc_feature (1)..(208): Xaa is any amino acid
MHXXXXXXXXXTRAANSIRRLSSYRLSVEGFYIFTPVKSGLMIIDICRARRRILYERFLENVANHLPATQQDIFPQTVELTPIDYTLLESVLPELAQAGYDIRPFGNNTVVVNGQPSDAPSIPAKDLLDELVHSLHENANDLNTQRQEKLAQSLAKAAVGHSTEPLTNTEVQALIDALFACKEPSLSPEGKPTLQMLTTDELNKRFNC

SEQ ID NO: 78529 - DNA, 684 bp, Unknown
  Obtained from environmental sample
  misc_feature (1)..(684): n is a, c, g, or t
ttgggccgggtcggcctcttccaggagacagtggaagttgctgccgccgaagccgaaggcgctgaccgcggccctccgaggctgcttgccggaactcacccaaggccgagcccgggccgacaggtggaagggcgaggcggcctggttcaggacggccaggggccgggagaccttgaccgcgggcggcagaattttatggtggagggccagggcggccttgatgaggccggccgcgccggcggccgccttggcgtggccgatctgggccttgaccgaacccaaggcgcaccagggccggttttttgtcgcccgggggctctgattgaagactcgggtcagggcctccacttccaccgtatcgcccacgctggtgcccgtgccgtgaccctccaccaattccacggtgccggggtctatgccggcggcttcgaaggtattgcggatagcccgttcctggccttggacggtgggggcgaaaatggccgcctcccggccatcgctggaggccccgacttcccggattacggtatatactcgtccgccgccccctttggcctcgccctggcgcttcaagaccaggagccccacgccccttcctcccgtatggtgccgtcgccatcctggtcaaagggccggaactttccgcttgggagactgggtcggggttttggacaagccggttaa

SEQ ID NO: 78530 - protein, 227 aa, Unknown
  Obtained from environmental sample
  misc_feature (1)..(227): Xaa is any amino acid
MGRVGLFQETVEVAAAEAEGADRGPPRLLAGTHPRPSPGRQVEGRGGLVQDGQGPGDLDRGRQNFMVEGQGGLDEAGRAGGRLGVADLGLDRTQGAPGPVFCRPGALIEDSGQGLHFHRIAHAGARAVTLHQFHGAGVYAGGFEGIADSPFLALDGGGENGRLPAIAGGPDFPDYGIYSSAAPFGLALALQDQEPHAPSSRMVPSPSWSKGRNFPLGRLGRGFGQAG

SEQ ID NO: 78531 - DNA, 435 bp, Unknown
  Obtained from environmental sample
  misc_feature (1)..(435): n is a, c, g, or t
ttgaccaggatggcgacggcaccatacgggaggaaggggcgtggggctcctggtcttgaagcgccagggcgaggccaaagggggcggcggacgagtatataccgtaatccgggaagtcggggcctccagcgatggccgggaggcggccattttcgcccccaccgtccaaggccaggaacgggctatccgcaataccttcgaagccgccggcatagaccccggcaccgtggaattggtggagggtcacggcacgggcaccagcgtgggcgatacggtggaagtggaggccctgacccgagtcttcaatcagagcccccgggcgacaaaaaaccggccctggtgcgccttgggttcggtcaaggcccagatcggccacgccaaggcggccgccggcgcggccggcctcatcaaggccgccctggccctccaccataa

SEQ ID NO: 78532 - protein, 144 aa, Unknown
  Obtained from environmental sample
  misc_feature (1)..(144): Xaa is any amino acid
MTRMATAPYGRKGRGAPGLEAPGRGQRGRRTSIYRNPGSRGLQRWPGGGHFRPHRPRPGTGYPQYLRSRRHRPRHRGIGGGSRHGHQRGRYGGSGGPDPSLQSEPPGDKKPALVRLGFGQGPDRPRQGGRRRGRPHQGRPGPPP

SEQ ID NO: 78533 - DNA, 528 bp, Unknown
  Obtained from environmental sample
  misc_feature (1)..(528): n is a, c, g, or t
ttgagacgccacgaaacaacgccagacccacaacaacacacagccaataaaggggggaccaancancaaanannccagaggacccctagagggagcannaacgaaaaaaaaaancaagccaaagcacaaagccggaaagcgaaagacaaaagnacacgangacagaagaggannccgcacaaanngacccacaaaaaaacgaccacggacnncagcgagcacaaacgagaaaggagacaacccgggacccaaagaagacaccgaaaaaagacccggacngcagaaaanangaaaaaggaacgaaaacaaccaaccacaaagaacaagcggccggaaagcnncaacaanacaacgccaacagaacagnaaaacngccgacccacgaagagatcagcaaagaaacgatttccgcaaacagaaaaaaaaccctccacagaaacaaagaagcccagagagcgatacaaaaaggggacgccccaaaagaggcggcaatcagagacaaattacaaaaaacaaggaacaaggtga

SEQ ID NO: 78534 - protein, 175 aa, Unknown
  Obtained from environmental sample
  misc_feature (1)..(175): Xaa is any amino acid
MRRHETTPDPQQHTANKGGTXXQXXQRTPRGSXNEKKXQAKAQSRKAKDKXTRXQKRXPHKXTHKKTTTDXSEHKRERRQPGTQRRHRKKTRTAEXXKKERKQPTTKNKRPESXNXTTPTEQXNXRPTKRSAKKRFPQTEKKPSTETKKPRERYKKGTPQKRRQSETNYKKQGTR

SEQ ID NO: 78535 - DNA, 597 bp, Unknown
  Obtained from environmental sample
  misc_feature (1)..(597): n is a, c, g, or t
atggggccgaacanatccgcaagcnccggcgggggggccattgaaagggaccngcnnccanaccagcacgcaaccgcacgcggcaaaaaagggcaaagcggcgaaaacagcgcacggacggcacggnaaccagaaagnnccgccccggaccggaaaacgaccgggaaagggagaccnagcaggnccgacccnagcccccggagangcanagcccgcgccggaaccaaacaggacacgcagggccgggagcanagcagcaccgcggccgaccaggaggcgacccgggccgggnacgacccggaaaagaccgaagcgccgcacgagaccgggcaacccaaggattttttcccggcctacgggagggagaccgccctgaagcgggagggggcgaagctgttcgcgcgattcgcgcacgtcccggcggaaacgaaaagtttggggcaggaccggcgctatcgctatgtggccatgagcctttcgccagacaagcggcggctcctgcacgtggggctgctcggcacgacggcgccggccatagacggacttgggccggtggaaattgaggcggacggcataacggtaaactttacgacctaa

SEQ ID NO: 78536 - protein, 198 aa, Unknown
  Obtained from environmental sample
  misc_feature (1)..(198): Xaa is any amino acid
MGPNXSASXGGGAIERDXXPXQHATARGKKGQSGENSARTARXPEXXAPDRKTTGKGRPSRXDPSPRRXXARAGTKQDTQGREXSSTAADQEATRAGXDPEKTEAPHETGQPKDFFPAYGRETALKREGAKLFARFAHVPAETKSLGQDRRYRYVAMSLSPDKRRLLHVGLLGTTAPAIDGLGPVEIEADGITVNFTT

SEQ ID NO: 78537 - DNA, 396 bp, Unknown
  Obtained from environmental sample
  misc_feature (1)..(396): n is a, c, g, or t
atgaccgaggcaccgctcccatacgtcatggtcgaatacggcgacaagaacgtcaccgcgcaggtggagccgtatctcataagcctagaatactcggacagcctcgaaggcaaggcgtccgacacgctcaaggtgacactggaggacagccagcggaaattccagggggagctatacccgctgccgggcgcggcgctctacttcgaattcggctacgacaaggacaacgccttcaagagcggcaggggctacatgatagaccgcgtcgaagtcaggggcggcgggggcggcggcgaagaaaagggcggcgggggcggcggcgacacagtggtctcgacggcgctggccaacgccgtggccggcagcatacacacaaagagaaccaaggcgggatga

SEQ ID NO: 78538 - protein, 131 aa, Unknown
  Obtained from environmental sample
  misc_feature (1)..(131): Xaa is any amino acid
MTEAPLPYVMVEYGDKNVTAQVEPYLISLEYSDSLEGKASDTLKVTLEDSQRKFQGELYPLPGAALYFEFGYDKDNAFKSGRGYMIDRVEVRGGGGGGEEKGGGGGGDTVVSTALANAVAGSIHTKRTKAG

SEQ ID NO: 78539 - DNA, 726 bp, Unknown
  Obtained from environmental sample
  misc_feature (1)..(726): n is a, c, g, or t
ttgggggaaacacggcngccaagagcaacaccggagccgccagcggaggaagagccgcagcaggcaaaagggctaaggcgagccgccgnaaaaaaagccggggaccacggggcggggggaggaccagggagagcacccacgcgggcagagacggcgagcgcaccaacaggcaacacncaaaaaagccggnccaggagcaggngccgnagaacccccaccaacagcaacagnnaaaacacgcagcccagaaaccaccgaaacaggcgcgggagaaagcgcgggcgcaggcgcgccgccaattattttaggtttgaccccaacaacatgctctaccgccggcgaaagtgcagcagtgggtgcagccgctcccgctgcggctgccacggcaacagcgggtgtcgctgcgccaacagaatgtgccacaggtccaaaactcgctgcaagagcagaaagccctgcaagagctacagctcgaagcccagaaactgcaacgggaggcaccgcggcgcgcgcagcgctagcagcggctggcgcaaccaaaagacgagcgcagccgcccacaatagcgacagaaggcacgtcncgcaaaagccgcgaaagcgtccaccactggagggagcaccaaaaccagggagtggtagagccccggcagccccaaccaagaacaagaagcgcaacaaaaaacaggagaaaaaaatcgtggaaaacccgagaaaaccccgctaa

SEQ ID NO: 78540 - protein, 241 aa, Unknown
  Obtained from environmental sample
  misc_feature (1)..(241): Xaa is any amino acid
MGETRXPRATPEPPAEEEPQQAKGLRRAAXKKAGDHGAGGGPGRAPTRAETASAPTGNTQKSRXRSRXRRTPTNSNXXNTQPRNHRNRRGRKRGRRRAANYFRFDPNNMLYRRRKCSSGCSRSRCGCHGNSGCRCANRMCHRSKTRCKSRKPCKSYSSKPRNCNGRHRGARSASSGWRNQKTSAAAHNSDRRHVXQKPRKRPPLEGAPKPGSGRAPAAPTKNKKRNKKQEKKIVENPRKPR

SEQ ID NO: 78541 - DNA, 819 bp, Unknown
  Obtained from environmental sample
  misc_feature (1)..(819): n is a, c, g, or t
ttgggttcccccgtttgttttccgatggtgtcgggatttttgtctgtttttttggggccgcctttcggtcttccttgcggtgggttctttgcccgggttttttttggctgttcgcttgcncttgtccccccttgctttctcttgggtgggttccctcgcccccctttagcggggttttctcgggttttccacgatttttttctcctgttttttgttgcgcttcttgttcttggttggggctgccggggctctaccactccctggttttggtgctccctccagtggtggacgctttcgcggcttttgcgngacgtgccttctgtcgctattgtgggcggctgcgctcgtcttttggttgcgccagccgctgctagcgctgcgcgcgccgcggtgcctcccgttgcagtttctgggcttcgagctgtagctcttgcagggctttctgctcttgcagcgagttttggacctgtggcacattctgttggcgcagcgacacccgctgttgccgtggcagccgcagcgggagcggctgcacccactgctgcactttcgccggcggtagagcatgttgttggggtcaaacctaaaataattggcggcgcgcctgcgcccgcgctttctcccgcgcctgtttcggtggtttctgggctgcgtgttttnnctgttgctgttggtgggggttctncggcncctgctcctggnccggcttttttgngtgttgcctgttggtgcgctcgccgtctctgcccgcgtgggtgctctccctggtcctccccccgccccgtggtccccggctttttttncggcggctcgccttag

SEQ ID NO: 78542 - protein, 272 aa, Unknown
  Obtained from environmental sample
  misc_feature (1)..(272): Xaa is any amino acid
MGSPVCFPMVSGFLSVFLGPPFGLPCGGFFARVFFGCSLALVPPCFLLGGFPRPPLAGFSRVFHDFFLLFFVALLVLGWGCRGSTTPWFWCSLQWWTLSRLLRDVPSVAIVGGCARLLVAPAAASAARAAVPPVAVSGLRAVALAGLSALAASFGPVAHSVGAATPAVAVAAAAGAAAPTAALSPAVEHVVGVKPKIIGGAPAPALSPAPVSVVSGLRVXXVAVGGGSXAPAPGPAFLXVACWCARRLCPRGCSPWSSPRPVVPGFFXGGSP

SEQ ID NO: 78543 - DNA, 468 bp, Unknown
  Obtained from environmental sample
  misc_feature (1)..(468): n is a, c, g, or t
gtgcaagtggcgtcgaacccacgcgagaattccatgggctacacgctcgccatcctgctagtcatgatggtgaccttgggggttttcatcgtgaacagggcgcacctttgggcgccgacgcagatcaacagggagagggaggcagagctaatctacaggggcgagcacctggcgcgcggcatcgccgcctacaggcagaagatgggcaggtaccccacttcgctcggcgaggtggccgccatgaggccaaaggtcatcaggcaggtgtacagagacccgatgtcggagagcggcgaatggatatatgtctacaacgtccccaccgcgccgtcgggcaacaacgagggtctgcccatcgttggcgtgcgcaccagcagtaacaaagacgcgatcaagctctaccgcggcaaaagcctgcacagcgaatgggaatcttcggcacttgatccgcttctgggcggactgtaa

SEQ ID NO: 78544 - protein, 155 aa, Unknown
  Obtained from environmental sample
  misc_feature (1)..(155): Xaa is any amino acid
MQVASNPRENSMGYTLAILLVMMVTLGVFIVNRAHLWAPTQINREREAELIYRGEHLARGIAAYRQKMGRYPTSLGEVAAMRPKVIRQVYRDPMSESGEWIYVYNVPTAPSGNNEGLPIVGVRTSSNKDAIKLYRGKSLHSEWESSALDPLLGGL

SEQ ID NO: 78545 - DNA, 516 bp, Unknown
  Obtained from environmental sample
  misc_feature (1)..(516): n is a, c, g, or t
atgaacctttcagagcacattcggacggttcccgattttcctgtaccgggaattcttttttacgacatcacaacgctgatcgaacacaaggaagcctttcgggagtcgatccggcaactcgccgctacggttgctccgtggggaccgttcgatgccattgcggcaccggaggctcgcggctttatctgtgcggctccgctggccgtcgaactcggcatcggtctgattccgattcgcaagccaggcaaactgccgtacaaaacggtgtcgaagtcctacgatctcgaatacgggagcaacacgattcagatccacgccgacgccgtgcaaccgggaaaccgtatcctgttgatcgacgacctgttggcaaccggcggaaccatcgacgcctgccgtcagttgatcgaagaaaacagcggcaccgtcgtcggtatcgcgttccttatcgaactgctgtttctcaacggacgcgacaaaatcaagacaccgaacattgcgtcgctgattcagtattag

SEQ ID NO: 78546 - protein, 171 aa, Unknown
  Obtained from environmental sample
  DOMAIN (22)...(159): Phosphoribosyl transferase domain
  misc_feature (1)..(171): Xaa is any amino acid
MNLSEHIRTVPDFPVPGILFYDITTLIEHKEAFRESIRQLAATVAPWGPFDAIAAPEARGFICAAPLAVELGIGLIPIRKPGKLPYKTVSKSYDLEYGSNTIQIHADAVQPGNRILLIDDLLATGGTIDACRQLIEENSGTVVGIAFLIELLFLNGRDKIKTPNIASLIQY

SEQ ID NO: 78547 - DNA, 735 bp, Unknown
  Obtained from environmental sample
  misc_feature (1)..(735): n is a, c, g, or t
atgaaactccatgaaagaggcgttttgcccgaacccaatatctattttcatatttactcttatataaaaaaagatgtaatatcattaaggatgacaattaaacaaatagctaatttggccggagtatcccgtggaacagtggatagggtactgcacaaccgtgcaggtgtagatccgccagtacggatgcgtgttcaaaaaatattaaccgatgttaattataagcctaattcagttgctctggccttaaagcgtcttgagaaatcaatgactttcggatttattattaatttgaaaaatccgttctggtttggtattgtacgtggctttcccaatgcagaaaaagagtttaaatctcatggggtaaagcttatgcagcttaacatgagagaaataagtcctaaagagcaaataaaatgcatggacgaacttctgggaggaggcgagaaaataaacggtatgtttattgccggaatcaacagcacgataataaccgattatgtaaataaggtatctgacacaattcctgttattacgttcaatacggatattagcggtagtcgacgactctgttttgtgggtcagaatcatctggaggcaagtcatgtagcatgccgcctaatggccatgctactacccaaagatgggaaaatagccccatttgcaaatataaaccaaacactttgctcatgtaaagcgcttcgaaggtttcagggaatgtttacggaaaactag

SEQ ID NO: 78548 - protein, 244 aa, Unknown
  Obtained from environmental sample
  DOMAIN (31)...(56): Bacterial regulatory proteins, lacI family
  misc_feature (1)..(244): Xaa is any amino acid
MKLHERGVLPEPNIYFHIYSYIKKDVISLRMTIKQIANLAGVSRGTVDRVLHNRAGVDPPVRMRVQKILTDVNYKPNSVALALKRLEKSMTFGFIINLKNPFWFGIVRGFPNAEKEFKSHGVKLMQLNMREISPKEQIKCMDELLGGGEKINGMFIAGINSTIITDYVNKVSDTIPVITFNTDISGSRRLCFVGQNHLEASHVACRLMAMLLPKDGKIAPFANINQTLCSCKALRRFQGMFTEN

SEQ ID NO: 78549 - DNA, 681 bp, Unknown
  Obtained from environmental sample
  misc_feature (1)..(681): n is a, c, g, or t
ttgcgaggaaggagatatccgagattcaattacagacaggtacgacccgacacagttgaaccgaatggggttgaaagggagccaaattcgtcgggaggtagttgtcacagcacaagggttacgaacaggcaccaaatctggaagggcgattttcggaccaagccacaacagggcggattccttgaacgtactggacgaggcgcaacgggccccggatatggacagtcgcgatccgcccaggtgcgcgggcggcccagctggtccaaggaccgtgacgccgacttggaggaccgcgccgacatgcaggtggtgtccgagcggcgcccctccgatgccgagtgggcggcgctgacgttcgcctggaaggtctgcaagcacgtgcgctccaacgcgatcgtgctggcctccgaggacgcgacggtcgggatcggcgccggccagacctcgcgggtggacgcggtgcggatcgccgtggagaaggcgcggtcgccgctggacggcacggcgctggcctcggacgcgttcttcccgttcgcggatggggtcgagctggccgtggatgccggcgtgacggccgtgatccagccgggcggctcggttcgcgaccccgaggtggtcgagacgatcgacagggccgggctggcgatggtcttcaccggccggaggcacttccggcattga

SEQ ID NO: 78550 - protein, 226 aa, Unknown
  Obtained from environmental sample
  DOMAIN (10)...(161): AICARFT/IMPCHase bienzyme
  misc_feature (1)..(226): Xaa is any amino acid
MRGRRYPRFNYRQVRPDTVEPNGVEREPNSSGGSCHSTRVTNRHQIWKGDFRTKPQQGGFLERTGRGATGPGYGQSRSAQVRGRPSWSKDRDADLEDRADMQVVSERRPSDAEWAALTFAWKVCKHVRSNAIVLASEDATVGIGAGQTSRVDAVRIAVEKARSPLDGTALASDAFFPFADGVELAVDAGVTAVIQPGGSVRDPEVVETIDRAGLAMVFTGRRHFRH

SEQ ID NO: 78551 - DNA, 681 bp, Unknown
  Obtained from environmental sample
  misc_feature (1)..(681): n is a, c, g, or t
atgccggaagtgcctccggccggtgaagaccatcgccagcccggccctgtcgatcgtctcgaccacctcggggtcgcgaaccgagccgcccggctggatcacggccgtcacgccggcatccacggccagctcgaccccatccgcgaacgggaagaacgcgtccgaggccagcgccgtgccgtccagcggcgaccgcgccttctccacggcgatccgcaccgcgtccacccgcgaggtctggccggcgccgatcccgaccgtcgcgtcctcggaggccagcacgatcgcgttggagcgcacgtgcttgcagaccttccaggcgaacgtcagcgccgcccactcggcatcggaggggcgccgctcggacaccacctgcatgtcggcgcggtcctccaagtcggcgtcacggtccttggaccagctgggccgcccgcgcacctgggcggatcgcgactgtccatatccggggcccgttgcgcctcgtccagtacgttcaaggaatccgccctgttgtggcttggtccgaaaatcgcccttccagatttggtgcctgttcgtaacccttgtgctgtgacaactacctcccgacgaatttggctccctttcaaccccattcggttcaactgtgtcgggtcgtacctgtctgtaattgaatctcggatatctccttcctcgcaatga

SEQ ID NO: 78552 - protein, 226 aa, Unknown
  Obtained from environmental sample
  misc_feature (1)..(226): Xaa is any amino acid
MPEVPPAGEDHRQPGPVDRLDHLGVANRAARLDHGRHAGIHGQLDPIREREERVRGQRRAVQRRPRLLHGDPHRVHPRGLAGADPDRRVLGGQHDRVGAHVLADLPGERQRRPLGIGGAPLGHHLHVGAVLQVGVTVLGPAGPPAHLGGSRLSISGARCASSSTFKESALLWLGPKIALPDLVPVRNPCAVTTTSRRIWLPFNPIRFNCVGSYLSVIESRISPSSQ

SEQ ID NO: 78553 - DNA, 870 bp, Unknown
  Obtained from environmental sample
  misc_feature (1)..(870): n is a, c, g, or t
ttgacgtgcggcgccgcgaaatttttccgcttgttttccgcacaatttttgcgtccggcaggtgctgtgaaaccatgtgactgttgccgaaaatcccggtctcttttccgcctccttgttcgggctgcgatattgtgcgtgatactgccgcatgacgcttccgccgtgacttggcaatggacgcaaaacggcaaccgcgaacgcgtcaccatcactttggacggcgcgaaccaacaggctgaaattgcccgaagcggtacgcaaaccttaagcctcgtccttacccctcccccttcggatataaccgcccaaggaacgtcacccggcgggcaatccctggtatccggccttggcttggaggacggccggcttcaactgactgccggatcccccgcgttcggctttattatgacccgtcctgccgcaaaccaactggttctcgacatctaccaagatccgctcggtatgcgctggcagccttcagggggtctggctcccgcaggcgccattcctccgccgtctcccgacccggcaacccaacccccggcaggagcgcagacaccggacggacaaacgccggacggcgcacctgacgctcccacaccgatcactcaacccccgcccggagtgcaggcgcctactcccataacgcaacgccccgcggggagcaccgacaccggccgccacaccccggtactttccaccccgttccccccaaccttctttcggggagcgcaaacgtctaattgctcacccctcggggcttccactttctttcaattcaaaccctctgtcagggatcacagggcaccgggccggactctacctggtgctctccgtgctcaaaaacccattccttctcacgggtaa

SEQ ID NO: 78554 - protein, 289 aa, Unknown
  Obtained from environmental sample
  misc_feature (1)..(289): Xaa is any amino acid
MTCGAAKFFRLFSAQFLRPAGAVKPCDCCRKSRSLFRLLVRAAILCVILPHDASAVTWQWTQNGNRERVTITLDGANQQAEIARSGTQTLSLVLTPPPSDITAQGTSPGGQSLVSGLGLEDGRLQLTAGSPAFGFIMTRPAANQLVLDIYQDPLGMRWQPSGGLAPAGAIPPPSPDPATQPPAGAQTPDGQTPDGAPDAPTPITQPPPGVQAPTPITQRPAGSTDTGRHTPVLSTPFPPTFFRGAQTSNCSPLGASTFFQFKPSVRDHRAPGRTLPGALRAQKPIPSHG

SEQ ID NO: 78555 - DNA, 546 bp, Unknown
  Obtained from environmental sample
  misc_feature (1)..(546): n is a, c, g, or t
atgcccgctgaggtttccagtaatctggcgcgctttgacggcgtgcgttatggcctgcgagttactccggaaggtggcggcacggccgaacaaatgatggcggctacccgcggcgccgggtttggcgatgaagtaaagcggcgcattattctcggcacttatgcgttaagcgctggttattacgatgcctattatggcagcgcgcaaaaggtgcgcacgctgattcagcaggacttcaataatgcgtttgaaaaggccgacgttttagtttcgcctactgcgccgacggtcgcgttcaagctgggtgaaaagctggacgatccgctggcaatgtatctcaacgatattgctacgattcccgctaacctggccggcggacccgggatctcgattccaaatggtctggtggacggcttaccatcgggcttccagatcctcgctccggcccgggccgatgatcggatgtactttgttgccgccgcgctggaaatggcgctggaacgcgaatggggcggccctattttgaacctggcccccgagctttag

SEQ ID NO: 78556 - protein, 181 aa, Unknown
  Obtained from environmental sample
  misc_feature (1)..(181): Xaa is any amino acid
MPAEVSSNLARFDGVRYGLRVTPEGGGTAEQMMAATRGAGFGDEVKRRIILGTYALSAGYYDAYYGSAQKVRTLIQQDFNNAFEKADVLVSPTAPTVAFKLGEKLDDPLAMYLNDIATIPANLAGGPGISIPNGLVDGLPSGFQILAPARADDRMYFVAAALEMALEREWGGPILNLAPEL

SEQ ID NO: 78557 - DNA, 456 bp, Unknown
  Obtained from environmental sample
  misc_feature (1)..(456): n is a, c, g, or t
gtggtagcctcgccaacactgcacgcgatgaccagcgccgcggaccgcgttgtcgaaacggcagttgtgcacgatgacttcgttgggcagcctggggtggttgggcagcctggggtgcccccggccagcgaaaccaccggtactgcacagcgtgccggagccaaggcgtcaacccaggtcatctccgcgcaggacgtcgatgccgcgaatcatccgcagccggacccggcgctactgactggcccggtgctcaccggaccgcgctggacgccccagcaagctggcagccccgaaacgtcgctgacggatctgcaacgcatcgcgtacgaggcaccgcacctgcggcccgtggtcgcggcaaacccggtggcctaccccggcctgctcgaatggttgggtgccctaggcgacccagatgttgacctggccctgcaacgccgtaattcaggtgtttga

SEQ ID NO: 78558 - protein, 151 aa, Unknown
  Obtained from environmental sample
  misc_feature (1)..(151): Xaa is any amino acid
MVASPTLHAMTSAADRVVETAVVHDDFVGQPGVVGQPGVPPASETTGTAQRAGAKASTQVISAQDVDAANHPQPDPALLTGPVLTGPRWTPQQAGSPETSLTDLQRIAYEAPHLRPVVAANPVAYPGLLEWLGALGDPDVDLALQRRNSGV

SEQ ID NO: 78559 - DNA, 816 bp, Unknown
  Obtained from environmental sample
  misc_feature (1)..(816): n is a, c, g, or t
ttgtctgtttataaggatggcgatggaaaagtgcaatacggattttttccaagggctgagttccagttcactttacttaaagatatttttattccgtttgttggaattgacggctatctgaaacaaaatacatatcgcagcatagttgccgaaaatccgttcaccacgcctggacttgccgttccaatgacaaagaccaagctgcagatatacgcaggtttaaagggtactgctttttcaaaactgtcgtattattttcgcgctgatttcctgaattcagataatgaacatttctttgtaaacgatatagactattcactattacaaaatcatttcacagtaataaccgataacatgcaaacgttaagtttcaaaggggaattgtatttcaatccgactgaaaatgttgatttgggtttaaaagccaattatttcgtatataaaccgaagaatgaagaaaaagcatggcacaaaccggcttttactcttgatttctttgctaaatacattctgcgcgataacaatcagcgtcctaaaatcattgttaatttggatatgatatgtatcggagaacgttatgcaaaaaaagtgcactacatatttcacgaccagactcaaattattattgatccgggtgatcctaataatcctaataaccataataagtattacacactcaaaagcgctgtctctttcaatctcggagccgaataccgatatacaaagagtctttcattttttgtgaaactcaacaatatcggaacgcaatatgaacggtggaatttttatccgtcatacgggttcaatctcatatag

SEQ ID NO: 78560 - protein, 271 aa, Unknown
  Obtained from environmental sample
  misc_feature (1)..(271): Xaa is any amino acid
MSVYKDGDGKVQYGFFPRAEFQFTLLKDIFIPFVGIDGYLKQNTYRSIVAENPFTTPGLAVPMTKTKLQIYAGLKGTAFSKLSYYFRADFLNSDNEHFFVNDIDYSLLQNHFTVITDNMQTLSFKGELYFNPTENVDLGLKANYFVYKPKNEEKAWHKPAFTLDFFAKYILRDNNQRPKIIVNLDMICIGERYAKKVHYIFHDQTQIIIDPGDPNNPNNHNKYYTLKSAVSFNLGAEYRYTKSLSFFVKLNNIGTQYERWNFYPSYGFNLI

SEQ ID NO: 78561 - DNA, 480 bp, Unknown
  Obtained from environmental sample
  misc_feature (1)..(480): n is a, c, g, or t
ttggttcacgagcaaaaaaaggaaattcaaaaaagagagataagggaaattccgcgaagcaccccgtttaaacccaaccaagcacagaacagccttaacaaaggaataaagggtttctctatggatttatcccttgcaggagcgggggagagcggagtttcaataggcagcggtgggatggagaacgccatttacgatgcatcggaagttgaagttgaggcaaaattgttgaaagaagttttggcggaatatcctgtgcaggcaaagaaacgcggaatttccggctatgccaaaatttatatggtaatagacagaaacgggaatgtctcggaggcttttgcaacggcggttgaaccggctggcttgggctttgagaaagaggcattggcggcggttaagcaatacaaattttcaccagcccttgtgggcggagttccagttcagcagaggtttacaaaagaattcaggttcgtgccgtga

SEQ ID NO: 78562 - protein, 159 aa, Unknown
  Obtained from environmental sample
  misc_feature (1)..(159): Xaa is any amino acid
MVHEQKKEIQKREIREIPRSTPFKPNQAQNSLNKGIKGFSMDLSLAGAGESGVSIGSGGMENAIYDASEVEVEAKLLKEVLAEYPVQAKKRGISGYAKIYMVIDRNGNVSEAFATAVEPAGLGFEKEALAAVKQYKFSPALVGGVPVQQRFTKEFRFVP

SEQ ID NO: 78563 - DNA, 657 bp, Unknown
  Obtained from environmental sample
  misc_feature (1)..(657): n is a, c, g, or t
gtggaaatccaattggaaggaaatggattaaccgccatagttggcccaaatggttgcggaaaatccaatatagtagatgctattcgctgggttatgggcgagcaaagagccggactgctaagaatggacaaaatgcagggggttattttttctggaacagaagaaaggcctgctatgagcatggcagaggtttcgcttgtaattgagaacgatagagggcttttgccgtctgaatatgcagaggttatgataaccagaaaagcctttagcgatggcgagtctaaatatttgataaaccctcacgagtgccggcttgcagatataaaaaatctctttgcagataccggcatgggtgcaggttcatattcgcaaatggaccaacgaatggtagatgccctattaagcgacaaagcagatgaacgcagaacaatttttgaagaagccgcaggtgtgagcaaatacaaaaaatcaaaaaaagaagcaatgtctcaacttgagcgcattaacgaaactatggaacgcataaccattgaactgccacacgccaaataccagttcaagcaatcagagagaatgctagcccgtgcccaagaattgcgtacactaaaaaccccgccaaaagaacttgatgtttccattatctctgcccaatactaa

SEQ ID NO: 78564 - protein, 218 aa, Unknown
  Obtained from environmental sample
  DOMAIN (1)...(203): RecF/RecN/SMC N terminal domain
  misc_feature (1)..(218): Xaa is any amino acid
MEIQLEGNGLTAIVGPNGCGKSNIVDAIRWVMGEQRAGLLRMDKMQGVIFSGTEERPAMSMAEVSLVIENDRGLLPSEYAEVMITRKAFSDGESKYLINPHECRLADIKNLFADTGMGAGSYSQMDQRMVDALLSDKADERRTIFEEAAGVSKYKKSKKEAMSQLERINETMERITIELPHAKYQFKQSERMLARAQELRTLKTPPKELDVSIISAQY

SEQ ID NO: 78565 - DNA, 924 bp, Unknown
  Obtained from environmental sample
  misc_feature (1)..(924): n is a, c, g, or t
ttggaggcaagccagttaatgaccggcgcgctgggcggggcgcaaatgctcgcccagatgttcggcgcgaacaaaaacgagctcggcgccaagctcaacggcaccgcccgctaccgggtgttagcgcgcgacgtcgagcccgaacagcagcgtgagatccgctcgctggggctccaggcatacatctcgacggagttgacctccaagcgcgtgtaccccgcgggttccttggcgggcccggtggtcggattcgtcgacaccgagcaggtgggccggggcggcatcgagcgcacgtttgacgagctgttggcaggcacgcccggcgtcgagcagtacgagcgaggtcgcgacggcgtgccgatccccggcggggttcgcgaggtcacgcccgcaaagacgggcggcgacgtagtgctcaccatcgactcggagatccagtggaaggccgaggaagagctcaacaaggccgtgcgcaacagcggcgcggcgtatggcatggtggtggtgaagcacatcgcgacgggcgagatcctggcactggcggactcgggcgccgttgacccgaacaaccgcgagaacgcagcggtggcgcgcgggtcgcgtgccgtgcaggacacgttcgaaccgggctcgacgggcaaggtcatcacgatggcggccgcgctggagacgggcgtgtgggcgcccgatagccaattcgtcgtgccgtactggtacaccacgcctaacaagcaaaagttccacgattcgcacgagcatcccacccagcacctcacgctgaccggcatcctcgctacctcgtcaaacagcgggacggtgcaggtagcggagaagatcccgcccaaggtgcattacgaatacctgaagaagttcggcctcgggggtgnnnnnnnnnnnnnnnnnnnnnnnnnnatgcaagcttga

SEQ ID NO: 78566 - protein, 307 aa, Unknown
  Obtained from environmental sample
  DOMAIN (4)...(125): Penicillin-binding Protein dimerisation domain
  misc_feature (1)..(307): Xaa is any amino acid
MEASQLMTGALGGAQMLAQMFGANKNELGAKLNGTARYRVLARDVEPEQQREIRSLGLQAYISTELTSKRVYPAGSLAGPVVGFVDTEQVGRGGIERTFDELLAGTPGVEQYERGRDGVPIPGGVREVTPAKTGGDVVLTIDSEIQWKAEEELNKAVRNSGAAYGMVVVKHIATGEILALADSGAVDPNNRENAAVARGSRAVQDTFEPGSTGKVITMAAALETGVWAPDSQFVVPYWYTTPNKQKFHDSHEHPTQHLTLTGILATSSNSGTVQVAEKIPPKVHYEYLKKFGLGGXXXXXXXXXMQA

SEQ ID NO: 78567 - DNA, 735 bp, Unknown
  Obtained from environmental sample
  misc_feature (1)..(735): n is a, c, g, or t
ttgggcgggatcttctccgctacctgcaccgtcccgctgtttgacgaggtagcgaggatgccggtcagcgtgaggtgctgggtgggatgctcgtgcgaatcgtggaacttttgcttgttaggcgtggtgtaccagtacggcacgacgaattggctatcgggcgcccacacgcccgtctccagcgcggccgccatcgtgatgaccttgcccgtcgagcccggttcgaacgtgtcctgcacggcacgcgacccgcgcgccaccgctgcgttctcgcggttgttcgggtcaacggcgcccgagtccgccagtgccaggatctcgcccgtcgcgatgtgcttcaccaccaccatgccatacgccgcgccgctgttgcgcacggccttgttgagctcttcctcggccttccactggatctccgagtcgatggtgagcactacgtcgccgcccgtctttgcgggcgtgacctcgcgaaccccgccggggatcggcacgccgtcgcgacctcgctcgtactgctcgacgccgggcgtgcctgccaacagctcgtcaaacgtgcgctcgatgccgccccggcccacctgctcggtgtcgacgaatccgaccaccgggcccgccaaggaacccgcggggtacacgcgcttggaggtcaactccgtcgagatgtatgcctggagccccagcgagcggatctcacgctgctgttcgggctcgacgtcgcgcgctaacacccggtag

SEQ ID NO: 78568 - protein, 244 aa, Unknown
  Obtained from environmental sample
  misc_feature (1)..(244): Xaa is any amino acid
MGGIFSATCTVPLFDEVARMPVSVRCWVGCSCESWNFCLLGVVYQYGTTNWLSGAHTPVSSAAAIVMTLPVEPGSNVSCTARDPRATAAFSRLFGSTAPESASARISPVAMCFTTTMPYAAPLLRTALLSSSSAFHWISESMVSTTSPPVFAGVTSRTPPGIGTPSRPRSYCSTPGVPANSSSNVRSMPPRPTCSVSTNPTTGPAKEPAGYTRLEVNSVEMYAWSPSERISRCCSGSTSRANTR

SEQ ID NO: 78569 - DNA, 384 bp, Unknown
  Obtained from environmental sample
  misc_feature (1)..(384): n is a, c, g, or t
ttgaaatacgttgtgaaaattgccaatcactataagaagtataaaatccctattatcgaactgatatcagaagggaatgaggggttactttatgctattgataaatttgattatgagaaggcaaatgttaaaatattttcttatgcaacacactggattcgatatacaataagtgcagcagttgctgaaataatgaataaaaacactgaatataacgaatctgataataagattcaaagattatctttagaaacagattatgacaactatcatgaaacaactcacccattattggataatgagccaaatcaaactgaagaatacgccaatataactgaacaactaatggtttgttatggacgaaagagaaatgaagattattaa

SEQ ID NO: 78570 - protein, 127 aa, Unknown
  Obtained from environmental sample
  misc_feature (1)..(127): Xaa is any amino acid
MKYVVKIANHYKKYKIPIIELISEGNEGLLYAIDKFDYEKANVKIFSYATHWIRYTISAAVAEIMNKNTEYNESDNKIQRLSLETDYDNYHETTHPLLDNEPNQTEEYANITEQLMVCYGRKRNEDY

SEQ ID NO: 78571 - DNA, 840 bp, Unknown
  Obtained from environmental sample
  misc_feature (1)..(840): n is a, c, g, or t
ttgatgcctgcaggtcgactcaggaggatcccacttgccagcgttgacggcaacggcgtagtgacggctgtgggcaatggttctgcgacaatcagagtgacgacacaagatggaggcaagactgcaaaccgatattttaacgttgtccagacacttgtcacactcaacaagacttccaccaccatagacgtcggcggcagtgagaagctcatagctaccacaaaccccagcaacaaaggcgtgatatggagcagtggcaaccaatccatagccactgttgatggcaacggggttgtgacaggcgtggcgccgggacgcacaacaatttctgttcgtgcccaggacaccagctacagcacggcttcttgcgctgtctcagtcaagccccccgacgggcccttggtgccagtgaccagcgtctcgctcaacaagacaaccgcaacgctggctgtcggccagacagaggccctagtagccaccgttctgcccagcaacgccacaaacaaaaatgtgacatggtcaagcactaagggggggagcgtggtcacggtgaacagtagcggcttggtgacggccgttgccccaggcacggcacaaatacaggtcatgacccaagacaaccaatatagtgcttattgcaatgtcacagtgacgggcggcgggcagggcatcattggcaacgccaaggctgacggcgaaagcccattggccgcaactggcccagagccggcagacggtgacaagcgggccatctggcacaggttcttggaaatgccgatggtaccagccgcaatgcccgcgccgcctttcacggccctcaagccgaaacagttaaattaa

SEQ ID NO: 78572 - protein, 279 aa, Unknown
  Obtained from environmental sample
  DOMAIN (49)...(125): Bacterial Ig-like domain (group 2)
  misc_feature (1)..(279): Xaa is any amino acid
MMPAGRLRRIPLASVDGNGVVTAVGNGSATIRVTTQDGGKTANRYFNVVQTLVTLNKTSTTIDVGGSEKLIATTNPSNKGVIWSSGNQSIATVDGNGVVTGVAPGRTTISVRAQDTSYSTASCAVSVKPPDGPLVPVTSVSLNKTTATLAVGQTEALVATVLPSNATNKNVTWSSTKGGSVVTVNSSGLVTAVAPGTAQIQVMTQDNQYSAYCNVTVTGGGQGIIGNAKADGESPLAATGPEPADGDKRAIWHRFLEMPMVPAAMPAPPFTALKPKQLN

SEQ ID NO: 78573 - DNA, 564 bp, Unknown
  Obtained from environmental sample
  misc_feature (1)..(564): n is a, c, g, or t
gtgagtctaaattcgatttatgaaaataccggccaccggattaggtatgaaatttttgtcgtggacaataactcgcaggatcagaccctcaagatgctacaggaaaattatcccggcatccgggtcatcgacaatcaggaaaacctaggttttgcccgcgcgaataatcaggctctggcgctggccaaagggcgttatttgctgttattgaataatgatacttttgtgctgggcggcgcgctggaaaaaatgaccgagtatatggacgcgcaccgggaagccggcgcgctctcgccgcgtttgctgaacggcgacagcaagaccgtgcagacgcatggtagtgttctgcaaagccggttgtttctgcggaacacgccgcacaaagtccggtttatcagcggcgcggctttcttactgcgccgggagacctacagaaatgtcggcggtctggatgaaaatttcttcttttataatgaagacctggactggtgccggcggattcttgcgcaacggctgggaaatccattattacccggaagcggccgtcattcattacggcggtaa

SEQ ID NO: 78574 - protein, 187 aa, Unknown
  Obtained from environmental sample
  misc_feature (1)..(187): Xaa is any amino acid
MSLNSIYENTGHRIRYEIFVVDNNSQDQTLKMLQENYPGIRVIDNQENLGFARANNQALALAKGRYLLLLNNDTFVLGGALEKMTEYMDAHREAGALSPRLLNGDSKTVQTHGSVLQSRLFLRNTPHKVRFISGAAFLLRRETYRNVGGLDENFFFYNEDLDWCRRILAQRLGNPLLPGSGRHSLRR

SEQ ID NO: 78575 - DNA, 540 bp, Unknown
  Obtained from environmental sample
  misc_feature (1)..(540): n is a, c, g, or t
atgagcgcgaataacctgatgctcaatgatattgcacaagtgataaataccgcaggcaaatatgtgagtcttgacctttcatcaagtagcgaactgactgtcattgaaagtgatgctttttatggatgtaaggtactcaccagtatcaccattccctcaactgttacgtctatcggtgtaggcacattcgcaggctgtacaagccttaccagcattgccattccctcaagtgtcacgtctatcggcgtaggcgcgtttgcaggctgcacaagccttgccagcattgccattccctcaagtgtcacgtctatcggtgaaaacgcgttctatggctgcacaagccttgccagcattgccattccctcaagtgtcacgtctatcggcaaccgcgcgttctataattggacttcctcgcagagaatcaccgttgagggttatggtagccaggcggctgccgaccaggcgtggggctctgattggcggaatggctgtaacgccactattgcctatgaggggcagcaaacgtccgaagacgaataa

SEQ ID NO: 78576 - protein, 179 aa, Unknown
  Obtained from environmental sample
  misc_feature (1)..(179): Xaa is any amino acid
MSANNLMLNDIAQVINTAGKYVSLDLSSSSELTVIESDAFYGCKVLTSITIPSTVTSIGVGTFAGCTSLTSIAIPSSVTSIGVGAFAGCTSLASIAIPSSVTSIGENAFYGCTSLASIAIPSSVTSIGNRAFYNWTSSQRITVEGYGSQAAADQAWGSDWRNGCNATIAYEGQQTSEDE

SEQ ID NO: 78577 - DNA, 432 bp, Unknown
  Obtained from environmental sample
  misc_feature (1)..(432): n is a, c, g, or t
ttggttttccagccggtagtagtgactccggcccccatttggtgctcttttacgggtctaactcatttacccgaaactcatgaactttgcactaatccccgcaacaataatgaggaccagaatcgcgcgctgggtcagtatctcaccgcgcaacgcggctgggtgggggaccaatggcagtgcatggacaacttgatgatgcgcgaatcccgttggcgccacaatgcggccaacccggtaactgccgcccggggcattccgcagaaaatgatgagcgttcactatggtgccaactggcggaattctgcgactgccgcagcgtggatggctgaccccgaagcccaaattgagtgggggctgaactacattgaacgccgctactccaacccctgcggggcgtggacattcttcctccgcaatggctggtactaa

SEQ ID NO: 78578 - protein, 143 aa, Unknown
  Obtained from environmental sample
  misc_feature (1)..(143): Xaa is any amino acid
MVFQPVVVTPAPIWCSFTGLTHLPETHELCTNPRNNNEDQNRALGQYLTAQRGWVGDQWQCMDNLMMRESRWRHNAANPVTAARGIPQKMMSVHYGANWRNSATAAAWMADPEAQIEWGLNYIERRYSNPCGAWTFFLRNGWY

SEQ ID NO: 78579 - DNA, 525 bp, Unknown
  Obtained from environmental sample
  misc_feature (1)..(525): n is a, c, g, or t
atgagagagggtaaagaagaagacgctctcaaagaattttccattgcggaagaatactcgtccgaagaaacaaagatgcttgaaaacctcggcgacgtgtacggcaaactcgggcgttatgacaagagcgtaagcctgtatgaaaggatattaaagagcaactcacgcaacgtgcgcattctggcgcgtataggcgaaatattttataaaaacggtgagcttgacaaagcctttgacgcgtacaaaaaaataacaatggtagaaccggcgagcgaaaacgcaagaaacgcgtatctgaacatgggcaacatcttggatgatgtccagcgttttgatgaagcggccgaggcctaccaaaaagccataagccttaacgccaaggatgagaacgccttttacaatctgggtatagtctatcagcactcgaacaagcctgaacttgcgatttcggcttggaaagagtcggcgcgccttgacactacgaacccgtcgccaagacttgccgtcgccaactattactactag

SEQ ID NO: 78580 - protein, 174 aa, Unknown
  Obtained from environmental sample
  DOMAIN (24)...(57): Tetratricopeptide repeat
  misc_feature (1)..(174): Xaa is any amino acid
MREGKEEDALKEFSIAEEYSSEETKMLENLGDVYGKLGRYDKSVSLYERILKSNSRNVRILARIGEIFYKNGELDKAFDAYKKITMVEPASENARNAYLNMGNILDDVQRFDEAAEAYQKAISLNAKDENAFYNLGIVYQHSNKPELAISAWKESARLDTTNPSPRLAVANYYY

SEQ ID NO: 78581 - DNA, 804 bp, Unknown
  Obtained from environmental sample
  misc_feature (1)..(804): n is a, c, g, or t
gtgtccatagccaaactcaaggatgaaggcaaatacgagcgcttgatcgaaggctatctgccttccgcttccgtggttttccttgatgaaatatggaaagccggaccggccattcaaaataccctgctcaccgtgctcaatgaaaaaatttttcgcaacggggcgcaagtagaaaaaatacccttgaaggcgctgctcagcgcctccaacgagctgcccgcccaagaccaggggcttgaagctctctgggatcgctttcttttgcgccttaaagttgacaacatagaagacagaaaaaactttgaggctatgatccgtgagccgcaaggcgctgatgacgatgtgcttgaggagcagaaaatcacgcttgaagaatatgagaagtggaaaaaagacattgaagcggttgcagttccgtccaatgtgcttgcggtgatcgacgccatcagaaaaaaagtgatcatatataatgaagatgaaaagaataaggataaacccatttatatatcagacagacgctggagaaaaatagtcaggctcttgcgggcatcagcttttttgaatgacaggaaagaagttgatttgatggactgctttctcatcaagcactgcatatggaatgatgacgcccagattgacgcggtgcatcagatcctcgttgaggctgttgaacataaagcaggccctgacgatattgattttcaatccattcatcatgagttggatgaattgaagaaaaagattgaaaatcatatcataaaagaacccggttttggaacagatagaatccagagaacgctttga

SEQ ID NO: 78582 - protein, 267 aa, Unknown
  Obtained from environmental sample
  misc_feature (1)..(267): Xaa is any amino acid
MSIAKLKDEGKYERLIEGYLPSASVVFLDEIWKAGPAIQNTLLTVLNEKIFRNGAQVEKIPLKALLSASNELPAQDQGLEALWDRFLLRLKVDNIEDRKNFEAMIREPQGADDDVLEEQKITLEEYEKWKKDIEAVAVPSNVLAVIDAIRKKVIIYNEDEKNKDKPIYISDRRWRKIVRLLRASAFLNDRKEVDLMDCFLIKHCIWNDDAQIDAVHQILVEAVEHKAGPDDIDFQSIHHELDELKKKIENHIIKEPGFGTDRIQRTL

SEQ ID NO: 78583 - DNA, 735 bp, Unknown
  Obtained from environmental sample
  misc_feature (1)..(735): n is a, c, g, or t
ttgcgcaattgccgattcattggccttggcgaacttaacgaagcaattttgcagctcgttggccagattaatgtccgcccgttccaaaaacgcgaaggttcccgattggaggtattccaacgcgacgagcagcaactgttgatcccattgcctccggtcaggtttgaacaggcgactttgaagaaagcaaaagtggggccgaactatcatgttcaagtcgacggcaatttcttttcggttccatctgctttgattgccaagcgccttgacatccgggttacttcccggattattgaggtctttgaccatgggcagcgggttgccagtcacccacgtatcatgggcaaaggccgctatcaaaccatcccagaacatatgccttcaaaccataaggctcaactggcgggctggacgccagaacgattcaagaactgggctgccgacatcggaccggccactgttgaagttgttgaagcgatcttgaagtcacgcaaaattccccaacactctttccgctccctgatggggttaatggccctggctaagaagcctggcggctccaccaggttggaagaatcttgcgccatcgctttggccatcacccctacaccgtcatacacgatggtgaagaacatttgcgctgagtggaagcccagcgaacctgcccctaactcgataggcgatgcgggtttcgttcgcggcgccagctactacggcggtgataacgatgattga

SEQ ID NO: 78584 - protein, 244 aa, Unknown
  Obtained from environmental sample
  misc_feature (1)..(244): Xaa is any amino acid
MRNCRFIGLGELNEAILQLVGQINVRPFQKREGSRLEVFQRDEQQLLIPLPPVRFEQATLKKAKVGPNYHVQVDGNFFSVPSALIAKRLDIRVTSRIIEVFDHGQRVASHPRIMGKGRYQTIPEHMPSNHKAQLAGWTPERFKNWAADIGPATVEVVEAILKSRKIPQHSFRSLMGLMALAKKPGGSTRLEESCAIALAITPTPSYTMVKNICAEWKPSEPAPNSIGDAGFVRGASYYGGDNDD

SEQ ID NO: 78585 - DNA, 540 bp, Unknown
  Obtained from environmental sample
  misc_feature (1)..(540): n is a, c, g, or t
atgatggtgcgcggtgggtgcggcgtgtcctccatcgggacgggtcgccgtcgtcgcttgaagagaacgtcacgcgtcacgacacgacgtcacccgtcgtcatcatcaggcgaaacacgacgaaacgcacccccggacagacgtggctggccattgctgccgccgccgcactgttcacgaccggcggggcattcgcgctgtggcagtccagcaccaccgtcaccggcggcgtcatcaccgcaggcaacctcgacctcgccatcaccggcccacgcgacgacaacaccttcacctggtatgacgtgtcctccgaccgcactgacgacgacaaaaagacccgcaccttcctcaaccaggtcaccgactgcaccgacaccaccggcggcaactgcttcagcaaggcgcacatcatcgacgacatcacgacgtggaagatcgtccccggcgacaccgtcgtcggcctgctgcgcgcccgcatcaccctcgaaggcgacaacctcgtcgccggactcgaataccgctgcgactcgccgctcgtag

SEQ ID NO: 78586 - protein, 179 aa, Unknown
  Obtained from environmental sample
  misc_feature (1)..(179): Xaa is any amino acid
MMVRGGCGVSSIGTGRRRRLKRTSRVTTRRHPSSSSGETRRNAPPDRRGWPLLPPPHCSRPAGHSRCGSPAPPSPAASSPQATSTSPSPAHATTTPSPGMTCPPTALTTTKRPAPSSTRSPTAPTPPAATASARRTSSTTSRRGRSSPATPSSACCAPASPSKATTSSPDSNTAATRRS

SEQ ID NO: 78587 - DNA, 384 bp, Unknown
  Obtained from environmental sample
  misc_feature (1)..(384): n is a, c, g, or t
gtgggaaaatacccattgcataaaggagcgatcatgctttttcacaggaatgaactaaaatccgaaacccgggaaaagccccggggcggtaacggcaccgctgctttcctccacctggtggaaggaaagggagcagcccagaaaaacaccaacctgctggcggaaataactttgcctccgggagcttccatcggcccccattcccatacggaagacacggaattttatatcatcctgaaaggaacgggcacggtagacgacaacggtactgaaaaacccgttaccgaatgggacgtaatgatcaccggaaacggcgaaacccacagcatcgccaataccggcgatgtacctctcgtactccatgcggtaattataaaaaactga

SEQ ID NO: 78588 - protein, 127 aa, Unknown
  Obtained from environmental sample
  DOMAIN (54)...(124): Cupin domain
  misc_feature (1)..(127): Xaa is any amino acid
MGKYPLHKGAIMLFHRNELKSETREKPRGGNGTAAFLHLVEGKGAAQKNTNLLAEITLPPGASIGPHSHTEDTEFYIILKGTGTVDDNGTEKPVTEWDVMITGNGETHSIANTGDVPLVLHAVIIKN

SEQ ID NO: 78589 - DNA, 438 bp, Unknown
  Obtained from environmental sample
  misc_feature (1)..(438): n is a, c, g, or t
atgaatgataatacaataaagcatcttgaatttattcaaaatataataactcgtatgaatactaattcatttcaaataaaaggaatgtcagttacaattactgcggctttattggctttatatgccggtagtaataaaccgctctatcttgccgttccaataataccaacaatattattttggtttcttgatgcttattatttgcagcaagagcgtaaatttagaggtatctataatgatgttgcagaactgagcaaaccaaaacataaaattagtgttagaccatttgaaatgcccattcaaaagtatattgatgaaaagtattcatattttaatgtctttatttcaaaaacaatatggcctttctattttattaaaaaaactctatctttgttggttatcatatttatcctaatcaaaaacatgtatttttattaa

SEQ ID NO: 78590 - protein, 145 aa, Unknown
  Obtained from environmental sample
  misc_feature (1)..(145): Xaa is any amino acid
MNDNTIKHLEFIQNIITRMNTNSFQIKGMSVTITAALLALYAGSNKPLYLAVPIIPTILFWFLDAYYLQQERKFRGIYNDVAELSKPKHKISVRPFEMPIQKYIDEKYSYFNVFISKTIWPFYFIKKTLSLLVIIFILIKNMYFY

SEQ ID NO: 78591 - DNA, 450 bp, Unknown
  Obtained from environmental sample
  misc_feature (1)..(450): n is a, c, g, or t
ttgtgcaacaatctggcaggttttttaggccaatcagagaactggccgagcgatataacgtcctgcagacggccatggcttccagcgagagaattttctggctgctggacaacgatgactaaattccagaaatgcgcgactcccaaacgccttttcttgaaaaagatatccgattccaagatgtctcatttgcgtctgagcatggagggcggcgcgcgctcagcgcgccttcatggttcgatcccccaggggaagagaatagcggtcgtaggacacacgcgcaccccgcaaaagcacttcttgatcaacattttgatgcggttctatgacccatccgatggcttgcgtaccctggacggggcggacattaaaaaactggacgttgcaaaatatataggtctattcggactgctcctccaagacatattcttcttccgcggcacgctataa

SEQ ID NO: 78592 - protein, 149 aa, Unknown
  Obtained from environmental sample
  misc_feature (1)..(149): Xaa is any amino acid
MCNNLAGFLGQSENWPSDITSCRRPWLPAREFSGCWTTMTKFQKCATPKRLFLKKISDSKMSHLRLSMEGGARSARLHGSIPQGKRIAVVGHTRTPQKHFLINILMRFYDPSDGLRTLDGADIKKLDVAKYIGLFGLLLQDIFFFRGTL

SEQ ID NO: 78593 - DNA, 753 bp, Unknown
  Obtained from environmental sample
  misc_feature (1)..(753): n is a, c, g, or t
ttggtgttcagcgaccctgtgtatggcggcaccgagtacctgttccacaacctattgccccagttcaacatcaaaactaggcacttccccatagaagcgggccttggcgcgctggaatcactgctaaaagatgatcccgccgtcaaggtcatctatctggaatcccccgccaacccaacgatgatgatatgcgacatccccggggccgcggctctggcaaaaaaatattccactaaagaccgccaaattttggtcatggttgacaacacgttcatgggcccaatcttttccagcccgctgaagctgggcgcggacatagttctgtactctgccacaaagttctttggcggccactccgatttggttgcggggctttctatgggaagcagggaacacatagagccgataaaggcgtaccgaaccatacttggctctatatcagaccccgacacggcatggctcatacaccgctccctcggcacgctccaactgaggatggagagccagcaaaagagcgcggcgaagatagtagagttccttatgtcgcacccatccgtggaaaaggtggcctacccagggctggagtgcatgggcccgcagcaggtggagctatggaagcgccagttcacgggcactggcagcctaatcagcttcttcgtgaagggcggccaggccgaagcattccgcgtcctccatgcggtagagcacgtcaagctggctgtgaaccttggcggcatcgaatccctcatctag

SEQ ID NO: 78594 - protein, 250 aa, Unknown
  Obtained from environmental sample
  DOMAIN (2)...(250): Cys/Met metabolism PLP-dependent enzyme
  misc_feature (1)..(250): Xaa is any amino acid
MVFSDPVYGGTEYLFHNLLPQFNIKTRHFPIEAGLGALESLLKDDPAVKVIYLESPANPTMMICDIPGAAALAKKYSTKDRQILVMVDNTFMGPIFSSPLKLGADIVLYSATKFFGGHSDLVAGLSMGSREHIEPIKAYRTILGSISDPDTAWLIHRSLGTLQLRMESQQKSAAKIVEFLMSHPSVEKVAYPGLECMGPQQVELWKRQFTGTGSLISFFVKGGQAEAFRVLHAVEHVKLAVNLGGIESLI

SEQ ID NO: 78595 - DNA, 774 bp, Unknown
  Obtained from environmental sample
  misc_feature (1)..(774): n is a, c, g, or t
ttgtttatggattcgctgggcaatgttacgcagcccggtaaaaacatacttgaagtggcagatgtgaacggcaaaaaatttgccaaagaaatgattgacaaagccgttagcaaagacttttcttcaataaaattcaaatactttaagccaggcgcaagttcccctcctgtggagggtcttgcaaaaagcatttatattgaagactgggactgggttgtggcaactggtagctattcagataaaataaatagggtagcggagtttttcacaaaaaaattcaaagatagccgcttgaaacttataggaaacttgtttggcataatgcttgtttcatttttagtgggcttgtttatgatttttaggcaaatgaattcatttgttgttccactgaataatttgtctgactatttgcataaattggcaagcgagggtattcgctttggcgatttcaatatggatttgaattcgcaagaagaacttaaaacccttgctgcagatataaacgccttgattcgcaacgttggttcttttattgataatgtgcgcattagcgcagacaaggtttctgatttaagcggttcgtgcaccgatatgctagacattgtggattacgatgccaagttggttggccagcgcactgtggaaatgtctgtttattccgaagatgttatagacaatgtgaacggcatggcggttggcatagaagaaatatacatcaatttagatggtttaaaaaagttgacctcgcacattcgccgaaaatacnacggataa

SEQ ID NO: 78596 - protein, 257 aa, Unknown
  Obtained from environmental sample
  misc_feature (1)..(257): Xaa is any amino acid
MFMDSLGNVTQPGKNILEVADVNGKKFAKEMIDKAVSKDFSSIKFKYFKPGASSPPVEGLAKSIYIEDWDWVVATGSYSDKINRVAEFFTKKFKDSRLKLIGNLFGIMLVSFLVGLFMIFRQMNSFVVPLNNLSDYLHKLASEGIRFGDFNMDLNSQEELKTLAADINALIRNVGSFIDNVRISADKVSDLSGSCTDMLDIVDYDAKLVGQRTVEMSVYSEDVIDNVNGMAVGIEEIYINLDGLKKLTSHIRRKYXG

SEQ ID NO: 78597 - DNA, 897 bp, Unknown
  Obtained from environmental sample
  misc_feature (1)..(897): n is a, c, g, or t
atgaagaacgcactggccttggcatattccaaggtgacgggtcccccgggtttatgcacggcgattcaaaaaacactttcgggcttttatgaaggactggcagctgttgtcagtgagaacggctggcatcatatttacccatcgggtgtgtccgcatatgctgaaggctatgcctggtgcggtaattttcaaggcggaaggtgtcctgtccgatattttgacgatttttactcacacatcagtcctgatggtaaaccggcgtattccagacgctggcggtatgccggtgattaccgggaggaaaccgccgttgtgcaggctgtggacgggcgagccacccatatcgacccggcgggagaattcgttcatgaccaatggtttgaggatctcgacatttttcataagggtcttgcccgtgcccgtgatcgcgatggatggacacatatctccaaaacggggaaaccggtctatcaccaccggtttgcggcggttgaaccgttttataacggtcaggcgcgcgtggaacgctttgatggcggatttgaagttattgacgaatccggacacacgataatggaactacgccctggaagacgttcggagttttccgggctctccggcgacatggttggcttctggcgtacccagacaatcggcgccgcagtgcggcttggaattattgaagcgctgcccggcgccgatgcggagattgccgcacgatgtacactgacactggacggcgccagtcgtattcttcgcgccttgggtgagcttcaactggttatttatgatggcgcgcagtggatcctggctgagaaaggatcatacttacgagttgatcatccgcttacccttgccgatgcggcgctggaatataccggcccgtgtcgaaactga

SEQ ID NO: 78598 - protein, 298 aa, Unknown
  Obtained from environmental sample
  misc_feature (1)..(298): Xaa is any amino acid
MKNALALAYSKVTGPPGLCTAIQKTLSGFYEGLAAVVSENGWHHIYPSGVSAYAEGYAWCGNFQGGRCPVRYFDDFYSHISPDGKPAYSRRWRYAGDYREETAVVQAVDGRATHIDPAGEFVHDQWFEDLDIFHKGLARARDRDGWTHISKTGKPVYHHRFAAVEPFYNGQARVERFDGGFEVIDESGHTIMELRPGRRSEFSGLSGDMVGFWRTQTIGAAVRLGIIEALPGADAEIAARCTLTLDGASRILRALGELQLVIYDGAQWILAEKGSYLRVDHPLTLADAALEYTGPCRN

SEQ ID NO: 78599 - DNA, 606 bp, Unknown
  Obtained from environmental sample
  misc_feature (1)..(606): n is a, c, g, or t
ttgatgccaaccgctccaacagacgtaaaaaccggcgcctttgaaacggtcctgggttctttcagggacacgctgaaaaagccgggcttgtacctcaatattcttggcattttcggcttcgggtttgtgtggtatttgcttaccgagcacttcaaacttccgctgttcaacaaactgcctggccctctggccagcttcagggaatggatatctccgaatcccgtgtacggcatatccctttataccgttgaatattaccagcacatcggcatcagcatctggcgcgtgttgcaggcctttttcctggccacggttctgggagtgcccatcggcctgttcatggggtggaaaaaaaccttcaaagactataccttccccttgctggaagttcttcgtcccatccccatgctggcctgggttcccctgtccatcctcatgtggccgggccgcgaagcgtccatcatcttcctgacctttctcggttcttttttcgccaccgtcctcaacaccctgctcgggggtctagtcgatcgactaggtgtatttcaatgccactctcctgtaattgactatactatattcttccttttgtgtgtcacactataa

SEQ ID NO: 78600 - protein, 201 aa, Unknown
  Obtained from environmental sample
  misc_feature (1)..(201): Xaa is any amino acid
MMPTAPTDVKTGAFETVLGSFRDTLKKPGLYLNILGIFGFGFVWYLLTEHFKLPLFNKLPGPLASFREWISPNPVYGISLYTVEYYQHIGISIWRVLQAFFLATVLGVPIGLFMGWKKTFKDYTFPLLEVLRPIPMLAWVPLSILMWPGREASIIFLTFLGSFFATVLNTLLGGLVDRLGVFQCHSPVIDYTIFFLLCVTL

SEQ ID NO: 78601 - DNA, 387 bp, Unknown
  Obtained from environmental sample
  misc_feature (1)..(387): n is a, c, g, or t
ttgctgactgtaggctggtgtcagaacaaacatttctatgccgccccacgcgagacccccaaagctgccgccagctaccaagactacatcggccgcggacaagaatgccaaatcctgggcaatgggggtgaagccatttttttctacacatccgccatacaacttgatccaaccccgcccaatggttactatctgcgcggcgttatgtacattgcccaagggcttttcgaccaggccattgctgatctaaccaaaaccatggatctcatgcccccattctccgaggcgcaccaccagcgcggaaaagcatatttgatgaaatatctttctacgccggcgggggacaaagctgcacggcaatcactgacggaaagtgcctcatcttga

SEQ ID NO: 78602 - protein, 128 aa, Unknown
  Obtained from environmental sample
  DOMAIN (60)...(93): Tetratricopeptide repeat
  misc_feature (1)..(128): Xaa is any amino acid
MLTVGWCQNKHFYAAPRETPKAAASYQDYIGRGQECQILGNGGEAIFFYTSAIQLDPTPPNGYYLRGVMYIAQGLFDQAIADLTKTMDLMPPFSEAHHQRGKAYLMKYLSTPAGDKAARQSLTESASS

SEQ ID NO: 78603 - DNA, 609 bp, Unknown
  Obtained from environmental sample
  misc_feature (1)..(609): n is a, c, g, or t
atggatttagcgatgaaaggcggctggatcatgattccgttgctgtttcttttggttctgaccatctacatttttatcgaacgtgtgattctcatcaaccaatcgtcgaaagaaccgggcaatttcatgagtaccattcgtgattttgttcatgatggccgtttggattccgcgaaagcgctttgcgccaacaccaatacgccaattgcacgcatgattggcaaaggtatttcgcgtatcggaaaaccgctgaacgatattaacgccgtgattgaaaatgtcggaaagtttgaagtgtcgaaactcgaacgccgtttggcctggctttctacatcggccggcgccggtccgatgattggctttttgggcacagtagtcggtatggtacgcgtgtttttcgatatggctgcaaaaggcaacaacattgacgttgcaacgctttcggccggcatgtatcaagccatggttaccacagtggccggtttgattgtcggcgtactggcttacatcgcctacaactacttagtgtcgcgtatcgaaaaggttgttttcattctcgaaatgcgcgtaaccgaatttatggatttgttgaacgaacctgtaaaataa

SEQ ID NO: 78604 - protein, 202 aa, Unknown
  Obtained from environmental sample
  DOMAIN (55)...(191): MotA/TolQ/ExbB proton channel family
  misc_feature (1)..(202): Xaa is any amino acid
MDLAMKGGWIMIPLLFLLVLTIYIFIERVILINQSSKEPGNFMSTIRDFVHDGRLDSAKALCANTNTPIARMIGKGISRIGKPLNDINAVIENVGKFEVSKLERRLAWLSTSAGAGPMIGFLGTVVGMVRVFFDMAAKGNNIDVATLSAGMYQAMVTTVAGLIVGVLAYIAYNYLVSRIEKVVFILEMRVTEFMDLLNEPVK

SEQ ID NO: 78605 - DNA, 414 bp, Unknown
  Obtained from environmental sample
  misc_feature (1)..(414): n is a, c, g, or t
ttgcatagcattcgcgttagttctaactttcgccagcgagtcgaaaataaaaagcagaaagtacttaatttaattccagccattaaaccacttcaaagcaaaaaaacaccgcagtatatcgtatcacttacttcatataaaaaacgactaaccgacacggctccttatgcgataacaacattgtttaaccaagcaatccagccagacaaaattattttgtgggttgcaaacgaagacaaagaaaaaattccgcaaattatggaaaaattagcagaaaaaggacttgaaattcgattttgcgaagatataaaatcgtacaaaaaacttattcctgctttgtatgaatttccaaatgattacataatcaccgccgacgacgatgtttattatcctgaaaactggtttgaacaataa

SEQ ID NO: 78606 - protein, 137 aa, Unknown
  Obtained from environmental sample
  misc_feature (1)..(137): Xaa is any amino acid
MHSIRVSSNFRQRVENKKQKVLNLIPAIKPLQSKKTPQYIVSLTSYKKRLTDTAPYAITTLFNQAIQPDKIILWVANEDKEKIPQIMEKLAEKGLEIRFCEDIKSYKKLIPALYEFPNDYIITADDDVYYPENWFEQ

SEQ ID NO: 78607 - DNA, 387 bp, Unknown
  Obtained from environmental sample
  misc_feature (1)..(387): n is a, c, g, or t
atggacgtgagtcagccgaacaactggccgcgtgtggaagagttgttccgccgcaaaatctggcaactgaaagagctgggttatgcagccgtggatgatgaaaccacgcaacagacaatgcgtgagttaaaagaactgggctacacttcggagccgcacgctgccgtagcttatcgtgcgctgcgtgatcagttgaatccaggcgaatatggcttgttcctcggcaccgcgcatccggcgaaatttaaagagagcgtggaagcgattctcggtgatacgttggatctgccaaaagagctggcagaacgtgctgatttacccttgctttcacataatctgcccgccgattttgctgcgttgcgtaaattgatgatgaatcatcagtaa

SEQ ID NO: 78608 - protein, 128 aa, Unknown
  Obtained from environmental sample
  misc_feature (1)..(128): Xaa is any amino acid
MDVSQPNNWPRVEELFRRKIWQLKELGYAAVDDETTQQTMRELKELGYTSEPHAAVAYRALRDQLNPGEYGLFLGTAHPAKFKESVEAILGDTLDLPKELAERADLPLLSHNLPADFAALRKLMMNHQ

SEQ ID NO: 78609 - DNA, 597 bp, Unknown
  Obtained from environmental sample
  misc_feature (1)..(597): n is a, c, g, or t
gtgtgtctcttcttccaagtcttgcccgtaaaggggcaagccggcttccatgatcagggtgtcgcgcgcgcccaggccggcgggtttgacccgctcgtcggccacgagcgcctcccagagaagcgcggtcttgtcccagggcagatacatctcgtagccgagttcgcctgtgtagccggtgcggctgaccagcagatcgactccccgccagggcatgcggcggaaggcgaagtacgcgatgtcgcggatgttcaggccgagcgccgcttccatgacgccggcggacagagggccttgcagatcgatcttgcctgtgcgggaggaggcgtcatcgaatgcgacggactccttcaggcgggaagccaggatgcgtttgtccttgtccgtgcacgcgccgttgaccacgatcatgtacgaggcatccgaaaagcagtacacgatgcattcgtccgccatgccgccgtcgtcggtcagaatgaagccgtagcggcaacgccccgagctgagcgcgtccaggttgtgggtcacggacaggctcagcgcgcgccgcgcgcctggaccggaatgcaagaactcgcccatgtggcagatgtctaa

SEQ ID NO: 78610 - protein, 198 aa, Unknown
  Obtained from environmental sample
  misc_feature (1)..(198): Xaa is any amino acid
MCLFFQVLPVKGQAGFHDQGVARAQAGGFDPLVGHERLPEKRGLVPGQIHLVAEFACVAGAADQQIDSPPGHAAEGEVRDVADVQAERRFHDAGGQRALQIDLACAGGGVIECDGLLQAGSQDAFVLVRARAVDHDHVRGIRKAVHDAFVRHAAVVGQNEAVAATPRAERVQVVGHGQAQRAPRAWTGMQELAHVADV

SEQ ID NO: 78611 - DNA, 330 bp, Unknown
  Obtained from environmental sample
  misc_feature (1)..(330): n is a, c, g, or t
atgccggggagcgcttcagcaaacgggagcgttctccgcatgccaagcatcaagggagcgacaatggcgagaatgcttgaaggcgccgtgcaggcggcgaacggtgtggaattgaacggcgtgcagcttgcgcccgtcgtggaacagtgctcgggctgcgaccgcgtccgcgcgttcgcggaacaggaattttgcagcagctaccccagcccggcccgaaaatgggccggcggccgctgcaacttcgccacgcacctgaagaccgccgcagccgccggcgccaaggtgaatccgctcaaggcgtccaagcgcgccgccaaggggcgttga

SEQ ID NO: 78612 - protein, 109 aa, Unknown
  Obtained from environmental sample
  misc_feature (1)..(109): Xaa is any amino acid
MPGSASANGSVLRMPSIKGATMARMLEGAVQAANGVELNGVQLAPVVEQCSGCDRVRAFAEQEFCSSYPSPARKWAGGRCNFATHLKTAAAAGAKVNPLKASKRAAKGR

SEQ ID NO: 78613 - DNA, 561 bp, Unknown
  Obtained from environmental sample
  misc_feature (1)..(561): n is a, c, g, or t
gtggctctcgcggacctcggcgcgattttgctgccggtcaagccgggcctccaggtgcgcatggagatcgatcgcgccacccgcaagatcaccggcatcaccgtgatcatcgggcaggccgcggtgcaggtgcaggcgttcgccgccccgcgctccgagggcatctgggacgaggtgcgcgccgagatttctgccggcctcaacgccgccggcggcggtcagatcgacgacgtccccggccggtttggccgcgagctggtggcccggattccgggtaagacgccggacggagcggactcagtgttttccgcgcggtttatcggcttcaacggcccacgttggcccctgcggggcgtgctagacgggcaaggccgcctccgatccaaacgcgggcaaggaactcgaagacatcatcaccaacattgtcgtggtgcgcgacaattcgactcgacgctccgaggcgatatgcacactaagactctaccgggattaggccctgatttcggagacaagtggaacttctgggtatgcacgggtgaaagaacctcggctcaccgataa

SEQ ID NO: 78614 - protein, 186 aa, Unknown
  Obtained from environmental sample
  misc_feature (1)..(186): Xaa is any amino acid
MALADLGAILLPVKPGLQVRMEIDRATRKITGITVIIGQAAVQVQAFAAPRSEGIWDEVRAEISAGLNAAGGGQIDDVPGRFGRELVARIPGKTPDGADSVFSARFIGFNGPRWPLRGVLDGQGRLRSKRGQGTRRHHHQHCRGARQFDSTLRGDMHTKTLPGLGPDFGDKWNFWVCTGERTSAHR

SEQ ID NO: 78615 - DNA, 435 bp, Unknown
  Obtained from environmental sample
  misc_feature (1)..(435): n is a, c, g, or t
atgtggaaaccgaaacgtccaacccgtacgcgaccgctcgcgtacgtatgcgctttcttatccttatcggcgttgatactgctcccaatggcggcggctaaggcctacgccgtgccggtctatatcaactcagaaaaaacggccttccctttcccgcagtttttgccctacgtgcaccccgacggcggcgttttgtacaatctgggcacgaacaatcccgccggggtcacccacgccgagatggagaagaccatccgcgacgcctaccaaataatgatgaaccgcgcctcctactaccaaaatatcgccttgaacggggtcaaatacataaagttcgcctccaacccggactgctccgagggcaccggttacgcgctcctgggcgccgccatgatggccgacaagacgactttcgacgggctgtggctcttctaa

SEQ ID NO: 78616 - protein, 144 aa, Unknown
  Obtained from environmental sample
  SIGNAL (1)...(24)
  misc_feature (1)..(144): Xaa is any amino acid
MWKPKRPTRTRPLAYVCAFLSLSALILLPMAAAKAYAVPVYINSEKTAFPFPQFLPYVHPDGGVLYNLGTNNPAGVTHAEMEKTIRDAYQIMMNRASYYQNIALNGVKYIKFASNPDCSEGTGYALLGAAMMADKTTFDGLWLF

SEQ ID NO: 78617 - DNA, 657 bp, Unknown
  Obtained from environmental sample
  misc_feature (1)..(657): n is a, c, g, or t
gtgtccctgtccggggccatgttaagcgccgtgtacgaagtgcccggcgtccggagcgtggtcttccgtgaaaacacgaccggggagcccaagacggtggacggcaaactccttgccccgcacagcatctatctttgcgtccacggcggagaagacgaagctgtggccagagccatcttcacaaacaagagcaacggctgcggctataacggcgccgtcaccgtgccggttttggatgaggtgagcgggcagcagtaccccataaccttcgataggccggaaatcgtgcaggtgcgcgcgcgcgtgaccgtcaagcctctgcgcacgggcgcggtagatatccagcttgcggtccgcgaagcgattgtgagctatgcccaaggcgaactgaagggctttgaaagcgcgttggaaagccccaacgcgaacgcaaaagaagccggcaagggtctggagggctttgtgacgggcgcgggagtgagtccttttgaaatagcggccgctgtagccttttgctgtccttccctgttcgtcgtgaacatggaagtgggcttgcttgcgggcggtgtgcagggtctgcatgtggagaccctgcctatggccatctggcagaaacccgacatcggccacggcgccatagaggtcatcggagcctag

SEQ ID NO: 78618 - protein, 218 aa, Unknown
  Obtained from environmental sample
  misc_feature (1)..(218): Xaa is any amino acid
MSLSGAMLSAVYEVPGVRSVVFRENTTGEPKTVDGKLLAPHSIYLCVHGGEDEAVARAIFTNKSNGCGYNGAVTVPVLDEVSGQQYPITFDRPEIVQVRARVTVKPLRTGAVDIQLAVREAIVSYAQGELKGFESALESPNANAKEAGKGLEGFVTGAGVSPFEIAAAVAFCCPSLFVVNMEVGLLAGGVQGLHVETLPMAIWQKPDIGHGAIEVIGA

SEQ ID NO: 78619 - DNA, 762 bp, Unknown
  Obtained from environmental sample
  misc_feature (1)..(762): n is a, c, g, or t
ttgccggggaagccaagcggaaaattccgttctaggggcttatccataactacgcgttttgcgggcgaatattttgtcaaagccctgaatttgaatgtgatggctgtatatcggatacctgaagattgcatccggtttccgccggttgaagcggcggagccggacgggctgctcggcgtggggggcgatcttgcgccgcaacgcctgttgacggcctatgccctcggcattttcccctggtattcggaagaggacggccccatcctctggtggtcgcccgatccccgcagcgttcttcccctggatgccgtgcatgtgccgcgcagcttgcagcgcgtgatgcgccgccgcctttttcgctgcactctcaaccatgcgttcggggaggtcattcgaggctgcgccgcgagttttcggcccggacagggggggacatggctggggggcgcgatgatcgaagcctatgaagggctgcatcaaaagggctatgcgctttccgtggaagcctggcgggaaggggcgcttgcgggcggcatttatggcgtggcgttgggacgggcttttttcggggagtccatgttttaccgcatccccgatgcatccaaggcggcgcttgtgtatttgacggactatctgcgcggacagggctatgtgttgtttgactgtcagcagcacacgccgcatatgcgccgtttcggcgcggtggaaattcctcgtgctgaatttatgcgcaggctgcgtgaggccctggcagcgggttga

SEQ ID NO: 78620 - protein, 253 aa, Unknown
  Obtained from environmental sample
  DOMAIN (65)...(239): Leucyl/phenylalanyl-tRNA protein transferase
  misc_feature (1)..(253): Xaa is any amino acid
MPGKPSGKFRSRGLSITTRFAGEYFVKALNLNVMAVYRIPEDCIRFPPVEAAEPDGLLGVGGDLAPQRLLTAYALGIFPWYSEEDGPILWWSPDPRSVLPLDAVHVPRSLQRVMRRRLFRCTLNHAFGEVIRGCAASFRPGQGGTWLGGAMIEAYEGLHQKGYALSVEAWREGALAGGIYGVALGRAFFGESMFYRIPDASKAALVYLTDYLRGQGYVLFDCQQHTPHMRRFGAVEIPRAEFMRRLREALAAG

SEQ ID NO: 78621 - DNA, 354 bp, Unknown
  Obtained from environmental sample
  misc_feature (1)..(354): n is a, c, g, or t
atgatgcgtttagcttaccgcaccacacttccggcagggcttttcttggcagggtttttcttggcaggctgtttcggcggcactccccctccgccgccgccccctcctaccccccttgtggcctttatgtcttcagcgccgcccgcaacgtcgacgcaactggatgaccccgctttcgggaacggcgtcctggtcacgcaggaagaggcgttcctttccgcaagcggcgaggattgccgccgggccacggtcgtcgcgcgcgaacgtgaggcggaaatggttgttgtctgccgtgcggcgggaggacaaacctggaagatgatgcccagaattatgggatccgtccgtccctga

SEQ ID NO: 78622 - protein, 117 aa, Unknown
  Obtained from environmental sample
  SIGNAL (1)...(26)
  misc_feature (1)..(117): Xaa is any amino acid
MMRLAYRTTLPAGLFLAGFFLAGCFGGTPPPPPPPPTPLVAFMSSAPPATSTQLDDPAFGNGVLVTQEEAFLSASGEDCRRATVVAREREAEMVVVCRAAGGQTWKMMPRIMGSVRP

SEQ ID NO: 78623 - DNA, 594 bp, Unknown
  Obtained from environmental sample
  misc_feature (1)..(594): n is a, c, g, or t
ttgggagcgccggtttggtctaggcaaggtgggcgctgcgcgacacaatccattccagcatggatttattgtaggggaccggctataatttccggaaaggcacaactcttgatactgaccatccccaacctactcacgctgctgcggatactgatcgtgcccatcttcgccatttcggtgatgtacgggcgcttggaaatcgcgtgcgctctgttcatgctggcggcgctcaccgacctgctggacggcttcatagccaggcgcttcaaccaggcttcgtcgctgggggcctttctgaaaaaaaagaccgacaagctgctgatggtgacggccttcgtgttgctctgcataccatccgggcacgtcacgcgccacataccgctctgggtgatgatcctggccataaccagggacgtgatcattggtctctttgcgctgcagtcctacccgaactataacccatcgcatttccgtccgtcgctcttgggcaaaatgaccgccgttgtcgagatggccgtcatctccctcacgctgctggacaacgccgtaggctatgtggcgagcttggaagctgtcttccagtggtctttatag

SEQ ID NO: 78624 - protein, 197 aa, Unknown
  Obtained from environmental sample
  DOMAIN (69)...(197): CDP-alcohol phosphatidyltransferase
  misc_feature (1)..(197): Xaa is any amino acid
MGAPVWSRQGGRCATQSIPAWIYCRGPAIISGKAQLLILTIPNLLTLLRILIVPIFAISVMYGRLEIACALFMLAALTDLLDGFIARRFNQASSLGAFLKKKTDKLLMVTAFVLLCIPSGHVTRHIPLWVMILAITRDVIIGLFALQSYPNYNPSHFRPSLLGKMTAVVEMAVISLTLLDNAVGYVASLEAVFQWSL

SEQ ID NO: 78625 - DNA, 789 bp, Unknown
  Obtained from environmental sample
  misc_feature (1)..(789): n is a, c, g, or t
gtgccgctcttcaacgaatttgacgccggctatgactttttgggcaacgacggcaaaaccttttacatacgcacggacaacggcgccccccgagggagggtgatagcggttgacctggaccgccccgcgcccaccgcgtggcgggagatagtcccgcaggcgggcgggcgcgacgtgatggcgggcgcctcgctgttcggcgaccagatcgcggtcacatggaagatagacgcgctgaaccaagtgaagctgtacgacattttttacggcaggcccatcaagcagataaggatcggcggcgtggggaccatgaccggctttggcggaaggcggcacgacgacgaagcgtttttcgcgttcacatccttcaacgagccgcccacgatataccgctacgacttcaaaaaggggaaagactccgttttccgcaaacccaagctggacatgaacccaagcgactttgaagtcaagcaggacttctacgccagcaaggacggcacaagggtgccgatcttcctggcctaccggaaaggcaccaagctggacggctcaaacccgacgttgctctatggctacggaggcttcaactccgccgtcggccctaccttcagtcctggtcaacctccgtgtgaatggaaatgggcgggctttctatctctgtttctggcttattccggggcaaacgattcacccctagcatttgtctgtaactatttttttcctcccattaacatttcactattttttttttacctatttccatattctgcttcccccaattggccctaa

SEQ ID NO: 78626 - protein, 262 aa, Unknown
  Obtained from environmental sample
  misc_feature (1)..(262): Xaa is any amino acid
MPLFNEFDAGYDFLGNDGKTFYIRTDNGAPRGRVIAVDLDRPAPTAWREIVPQAGGRDVMAGASLFGDQIAVTWKIDALNQVKLYDIFYGRPIKQIRIGGVGTMTGFGGRRHDDEAFFAFTSFNEPPTIYRYDFKKGKDSVFRKPKLDMNPSDFEVKQDFYASKDGTRVPIFLAYRKGTKLDGSNPTLLYGYGGFNSAVGPTFSPGQPPCEWKWAGFLSLFLAYSGANDSPLAFVCNYFFPPINISLFFFYLFPYSASPNWP

SEQ ID NO: 78627 - DNA, 579 bp, Unknown
  Obtained from environmental sample
  misc_feature (1)..(579): n is a, c, g, or t
gtgtgtggaaccatatcagtgacagattgcgaatataaatgtgagttctgcggaaatacagtagcatcatttaacaacatttcacataacactactaattatccaaccactgttgggcaatgcttattcatcagcaattttgaaacaatccaacctaatttgaattcaacggttctcataaacggagtggaaaatgcctgcggaggtacttggcatgggggtaattgtccttataatcctgtaccccctaaagcagatggcggttattacgtgtatttgaaaaaagggacaatcaacacatatcaatccaacggctggaaaaacattgtttctggaaacaagagcaatctttgcaataataagcaatgtaccccaacacaaactagtagttcctctggggctagtagcagtcctgttagcataacttgtaattttgtaggttccaacgatgtcgtttttaatggtacagacacttacgaaagaggagacaataaaggatgcaaaaatatcccacgtccagaggttaaatgcaatggtgtatctgcttatatccgttcttttgaccttgacggtacttaa

SEQ ID NO: 78628 - protein, 192 aa, Unknown
  Obtained from environmental sample
  misc_feature (1)..(192): Xaa is any amino acid
MCGTISVTDCEYKCEFCGNTVASFNNISHNTTNYPTTVGQCLFISNFETIQPNLNSTVLINGVENACGGTWHGGNCPYNPVPPKADGGYYVYLKKGTINTYQSNGWKNIVSGNKSNLCNNKQCTPTQTSSSSGASSSPVSITCNFVGSNDVVFNGTDTYERGDNKGCKNIPRPEVKCNGVSAYIRSFDLDGT

SEQ ID NO: 78629 - DNA, 621 bp, Unknown
  Obtained from environmental sample
  misc_feature (1)..(621): n is a, c, g, or t
atggtaaatatatcattaaacagaattacgctatacggaaatgggcaaaataaagaaattctgctaaacgatatttctctagaagtaaaagcaggtgaattcataactataaccggccccattaacagcggaaaatctcgcatattgagaattgtggcaggcttaaccgaacccgattccggagacgtacttttcaacggaaaaagtttaggcgaattttctcccaaatacgaaaatctggcaatggtgtttcgctcccaagctctttaccctcatttaaccgtgcgaaagaatctcgaatttgggcttaaactagccaatatccccaaaagcacaataaacacaagaatagccgaaattgaagatttgctggatatacaaaacataatggatttaaaaccggatgcgctacctatttcggaaaggcagcttgtggcactcgctcgcgcttttgttaaacaccctcaggttctgattctggacgaacctatttccgagctagattctcaatccaagataaaaatacaatccataataaagcgtttctgcataaatttgcaagcaaccgttatgtatgcaacgcataatccttccgaggccatgaccctaagcaaccgctaa

SEQ ID NO: 78630 - protein, 206 aa, Unknown
  Obtained from environmental sample
  DOMAIN (32)...(206): ABC transporter
  misc_feature (1)..(206): Xaa is any amino acid
MVNISLNRITLYGNGQNKEILLNDISLEVKAGEFITITGPINSGKSRILRIVAGLTEPDSGDVLFNGKSLGEFSPKYENLAMVFRSQALYPHLTVRKNLEFGLKLANIPKSTINTRIAEIEDLLDIQNIMDLKPDALPISERQLVALARAFVKHPQVLILDEPISELDSQSKIKIQSIIKRFCINLQATVMYATHNPSEAMTLSNR

SEQ ID NO: 78631 - DNA, 414 bp, Unknown
  Obtained from environmental sample
  misc_feature (1)..(414): n is a, c, g, or t
gtgtttggggcggnccgangnccgggagcgcgacaangacggcncgggangagccggagacggcgcaaagnnccccatagccagcaggcccagcgaaccaagcanagccccaagcgcgggggaccggcacgacaacggcggagaccggggaaagggccgcgcccgaggagacgcaggccgcagcgcgccaaagcgccgcgccgccgccgaaaggggcggagcagcgcccagcgaccgcgcgggagaccaagcccggcaccagcgccgacgccgcgacaaacgaccggccaaggaggccgttttttagaccggcaacgcccaaggaagccagcgggccaagggccacccaaaacacggaaacggaagcgccgctggggattttgccgccagcgccagcgggtaacgattgagtaa

SEQ ID NO: 78632 - protein, 137 aa, Unknown
  Obtained from environmental sample
  misc_feature (1)..(137): Xaa is any amino acid
MFGAXRXPGARQXRXGXSRRRRKXPHSQQAQRTKXSPKRGGPARQRRRPGKGPRPRRRRPQRAKAPRRRRKGRSSAQRPRGRPSPAPAPTPRQTTGQGGRFLDRQRPRKPAGQGPPKTRKRKRRWGFCRQRQRVTIE

SEQ ID NO: 78633 - DNA, 462 bp, Unknown
  Obtained from environmental sample
  misc_feature (1)..(462): n is a, c, g, or t
gtggaacaaaaattcgcacccgtgtttggcagagaatattctgggcttgtggaagcatatcgctttgatgatgccgattatatattgataactctaggttctatattcgggttgtgcatcgatgtggcagatgagttgagaaatgaaggcgtaaaagcaggggtgatacgtcttagatatatgcgccctcttccaaatgaagaaattgtagatattgtgcgtagtgcaaaggcaattgctatattggaaaaagatatttcttttggcaatgagggcactgtttatacaaatgtgaattccgcttggcaaaaagcagggctagccattccctctttgaatttcatcggagggttgggggggcgtgatatttccgaagaagatattcgggaaatgtttagcgagattcgccaaggcaacactgcggtgcattttataggtatggaagaggaggatataatatga

SEQ ID NO: 78634 - protein, 153 aa, Unknown
  Obtained from environmental sample
  misc_feature (1)..(153): Xaa is any amino acid
MEQKFAPVFGREYSGLVEAYRFDDADYILITLGSIFGLCIDVADELRNEGVKAGVIRLRYMRPLPNEEIVDIVRSAKAIAILEKDISFGNEGTVYTNVNSAWQKAGLAIPSLNFIGGLGGRDISEEDIREMFSEIRQGNTAVHFIGMEEEDII

SEQ ID NO: 78635 - DNA, 741 bp, Unknown
  Obtained from environmental sample
  misc_feature (1)..(741): n is a, c, g, or t
gtgataaccataaaaaataggaaacccgttttgccgcaaaagaatcccattgccgtgagccgcaaagccaaaacctatttgcgaatggtaggggatctatccgcttccgaccctagcggttcaaatcttgagctttctgctgtttccatttcaccctcttctgctggaacagttgctattacagataagtggaaagattccatcgttttcactccagcagcttctcttgctaatgctgagcctaccgaggcaactcttagctacaccgttaaaaatgcgaatgggcagagcagttccgcagaagttgttttgaaaattcaaaattttgcccccacactaaccgccatgaccaacacaacctgttgcggaatgggaaatgtgtcaaatactggaccagttacccttggaatgactcagtttggcggcaaagacaaagatggtgatgatttatcgtttgtcactgtgtatttagaccctagatatcctgggcggattgagaaggtgaaaaatgacgaatatgtttatcatccagaccctgacaaaatagggaaggttgtgcttttggcggttataacagacggcactgctaattcagctactgggagagcaaacataacgctcacaggcagcggttcttccattggcgacattccggcaccaacagaaatacccgggtgtaatagaccccggagcccccctgatgcgggtatttcaatttccatgcctgctagggagcaatag

SEQ ID NO: 78636 - protein, 246 aa, Unknown
  Obtained from environmental sample
  misc_feature (1)..(246): Xaa is any amino acid
MITIKNRKPVLPQKNPIAVSRKAKTYLRMVGDLSASDPSGSNLELSAVSISPSSAGTVAITDKWKDSIVFTPAASLANAEPTEATLSYTVKNANGQSSSAEVVLKIQNFAPTLTAMTNTTCCGMGNVSNTGPVTLGMTQFGGKDKDGDDLSFVTVYLDPRYPGRIEKVKNDEYVYHPDPDKIGKVVLLAVITDGTANSATGRANITLTGSGSSIGDIPAPTEIPGCNRPRSPPDAGISISMPAREQ

SEQ ID NO: 78637 - DNA, 630 bp, Unknown
  Obtained from environmental sample
  misc_feature (1)..(630): n is a, c, g, or t
gtgcgccatgagggcggcagcgtctccccccgcggtgttaaaaaacaccagataggtgggggcattgtccagaaaggaggaaagcgcgccggtcatccagaaatacatggcattgatgggttctccaccggcatccgtaaccatattgatcacggaagccagagatccttcggcgcccgccctcagaatggaaatggccggaatcatgctgaggaagatgccgatgaacagtttggccacttccaaaatgggatcccaggtaaactcgttgcgtttgcggcattcacggtcggtgacgagccaagaggcagccgcgatggccagatacagcacatcgcgaagcacatcctgcatttccatgggcagaccaaagacatggaattcaggccctttccattgtccggaaatcagtgtgttggcaaccacgcacagcagaaacagaaaattgatgccgccttcaattcccagtttttcctcgttttcggaagtacccgcctgatgcagggggcgtccttccttgccgaacagcacggtgtcaagggcgaagaacagagccagcaaaataacggaagtaagtatggtcttcgccaacaaatgggaagtggtccagaaaaaatcaacgccttttag

SEQ ID NO: 78638 - protein, 209 aa, Unknown
  Obtained from environmental sample
  misc_feature (1)..(209): Xaa is any amino acid
MRHEGGSVSPRGVKKHQIGGGIVQKGGKRAGHPEIHGIDGFSTGIRNHIDHGSQRSFGARPQNGNGRNHAEEDADEQFGHFQNGIPGKLVAFAAFTVGDEPRGSRDGQIQHIAKHILHFHGQTKDMEFRPFPLSGNQCVGNHAQQKQKIDAAFNSQFFLVFGSTRLMQGASFLAEQHGVKGEEQSQQNNGSKYGLRQQMGSGPEKINAF

SEQ ID NO: 78639 - DNA, 651 bp, Unknown
  Obtained from environmental sample
  misc_feature (1)..(651): n is a, c, g, or t
atgcaatactatcgctacaactgcatgcggattcccgccatgacgggcgacctcattccggaggcggttttcacgcccgaggcgtatgaggccgacattctgcaacccctgtacgagcagtccgcgccgctcgatcccacgggcattctgcgcgacgaatgggccaacgcgcggggcgccatagcccgcttcgatcgcagcgccgtcgaaatccgagtggcggacagccaggaatacccgacggccgatctggccgtctgcttcgcggtggcggaaaccgtccgcctgttcaccgacgagactctgctttcctatgcggaacaaaaaagctggagcgtcgcccgcctgtaccggctgttctttgacgccgtacgcgaagccgaacaagcgccggtactggacccgcaatatgccgcccttttcgggcttgcctcggcaaagcccaccttccgggatatctgggccaagctgctggcaatgcccggtctccggtccacaaccttcgatccctggtacaagctctatctggaacacggcccgctggcgcggcggatgctgaaacaggcgggaaccagccctgaccgaaccgccctgtttgccgtggcggaaaagctctgcggctgtctggcggaaaaaaaaccgtttttgtaa

SEQ ID NO: 78640 - protein, 216 aa, Unknown
  Obtained from environmental sample
  misc_feature (1)..(216): Xaa is any amino acid
MQYYRYNCMRIPAMTGDLIPEAVFTPEAYEADILQPLYEQSAPLDPTGILRDEWANARGAIARFDRSAVEIRVADSQEYPTADLAVCFAVAETVRLFTDETLLSYAEQKSWSVARLYRLFFDAVREAEQAPVLDPQYAALFGLASAKPTFRDIWAKLLAMPGLRSTTFDPWYKLYLEHGPLARRMLKQAGTSPDRTALFAVAEKLCGCLAEKKPFL

SEQ ID NO: 78641 - DNA, 345 bp, Unknown
  Obtained from environmental sample
  misc_feature (1)..(345): n is a, c, g, or t
ttgttctcaaccaccggagagtattttcccagaatgtggaataaccacgttgttggcccttgcaaagcgagttatggaatccaagagtataacaacatcatcgcctcgctcaacaagtctcttggctttttccaaaaccatgtctgcaacttgggtatggcgttctggcggctcgtcaaatgtggaagccagtacttcgcctttaacatttctgcgcatatcggtgacttcttcggggcgctcatctatcagcaaaaccaagagctttatctcaggatggtttttgcttatggcgttagttttttgttgcaaaagaaccgttttgcccgtgcggggcggcgctag

SEQ ID NO: 78642 - protein, 114 aa, Unknown
  Obtained from environmental sample
  misc_feature (1)..(114): Xaa is any amino acid
MFSTTGEYFPRMWNNHVVGPCKASYGIQEYNNIIASLNKSLGFFQNHVCNLGMAFWRLVKCGSQYFAFNISAHIGDFFGALIYQQNQELYLRMVFAYGVSFLLQKNRFARAGRR

SEQ ID NO: 78643 - DNA, 444 bp, Unknown
  Obtained from environmental sample
  misc_feature (1)..(444): n is a, c, g, or t
ttgcatccgtttgagcgaataaatttggaatacgattccgctgaactttcaaccaggataatgaacttattcacgcctataggcaaaggtcagcgcggagttattctagcgccgccccgcacgggcaaaacggttcttttgcaacaaaaaactaacgccataagcaaaaaccatcctgagataaagctcttggttttgctgatagatgagcgccccgaagaagtcaccgatatgcgcagaaatgttaaaggcgaagtactggcttccacatttgacgagccgccagaacgccatacccaagttgcagacatggttttggaaaaagccaagagacttgttgagcgaggcgatgatgttgttatactcttggattccataactcgctttgcaagggccaacaacgtggttattccacattctgggaaaatactctccggtggttga

SEQ ID NO: 78644 - protein, 147 aa, Unknown
  Obtained from environmental sample
  DOMAIN (16)...(146): ATP synthase alpha/beta family, nucleotide-binding domain
  misc_feature (1)..(147): Xaa is any amino acid
MHPFERINLEYDSAELSTRIMNLFTPIGKGQRGVILAPPRTGKTVLLQQKTNAISKNHPEIKLLVLLIDERPEEVTDMRRNVKGEVLASTFDEPPERHTQVADMVLEKAKRLVERGDDVVILLDSITRFARANNVVIPHSGKILSGG

SEQ ID NO: 78645 - DNA, 405 bp, Unknown
  Obtained from environmental sample
  misc_feature (1)..(405): n is a, c, g, or t
gtgatcgtggctgctgcggagccccgcgacacccaccacgcctcgtgttcgcgcttgttgagggatctttgcgcatctggtgagatgctgattttgcctgcgaccgtagcggcggaagtcggctacatgttgaacctatttcaaggacccgaacttgaagtggagtttcttcagaatgtttctaaaggagatttccagcctgtggagttactggatactgattacgagcgaatggctgaactagcggagaagtatattgacttctcgctcgggacgaccgatgcctcgattatcgccattgctgaaagattgaatatcaacaccatcgccacaatcgaccgtaaacacttcaccgtaatccgtccaaagcatgtagatcatttccacctattacccgagagataa

SEQ ID NO: 78646 - protein, 134 aa, Unknown
  Obtained from environmental sample
  misc_feature (1)..(134): Xaa is any amino acid
MIVAAAEPRDTHHASCSRLLRDLCASGEMLILPATVAAEVGYMLNLFQGPELEVEFLQNVSKGDFQPVELLDTDYERMAELAEKYIDFSLGTTDASIIAIAERLNINTIATIDRKHFTVIRPKHVDHFHLLPER

SEQ ID NO: 78647 - DNA, 666 bp, Unknown
  Obtained from environmental sample
  misc_feature (1)..(666): n is a, c, g, or t
ttgaaacccgtcagggcgttctggtggttgaggttggccttggcggcgatccggctcagcagccgcgacgagacgatggaattggccaccgtcgcatcggaggccagcgtctgcgccgaattcgtcaccgcatatccgagcagcgctccgacctcgtcgccgtgcagcatccgccaggctccgccgtcgcccgcgcgggggtcgaacacggccacggcgcaccggtcggcgtccgggtcgttcgcgatgaccagatcggccttgacctctgccgcgagcgccagcgccatgtcgatcgcgccgggttcctcgggattggggaacgagacggtggggaaggtcgggtccgggtccaactgctcggcgactgggaacacgtcctcgaagccggcgtcgtcgaggactcgagccaggacctctccgcccacgccgtgcatcgaggtggtgacgatgcgcaggtcgcgcgcgtcgtcgtcggcaagccgatggaccgcgttgacgtactcatcgacgatctcttcgccgagttgcagatacccggcctgcgccatcgggacggctttggcgggcggcgctgcggcgattttgtcggcgatgaggccgtcatacggcggcacgatctgggcgccctgccccgcgccgcgcaccacgcggccgccgagatag

SEQ ID NO: 78648 - protein, 221 aa, Unknown
  Obtained from environmental sample
  misc_feature (1)..(221): Xaa is any amino acid
MKPVRAFWWLRLALAAIRLSSRDETMELATVASEASVCAEFVTAYPSSAPTSSPCSIRQAPPSPARGSNTATAHRSASGSFAMTRSALTSAASASAMSIAPGSSGLGNETVGKVGSGSNCSATGNTSSKPASSRTRARTSPPTPCIEVVTMRRSRASSSASRWTALTYSSTISSPSCRYPACAIGTALAGGAAAILSAMRPSYGGTIWAPCPAPRTTRPPR

SEQ ID NO: 78649 - DNA, 804 bp, Unknown
  Obtained from environmental sample
  misc_feature (1)..(804): n is a, c, g, or t
gtggtgcgcggcgcggggcagggcgcccagatcgtgccgccgtatgacggcctcatcgccgacaaaatcgccgcagcgccgcccgccaaagccgtcccgatggcgcaggccgggtatctgcaactcggcgaagagatcgtcgatgagtacgtcaacgcggtccatcggcttgccgacgacgacgcgcgcgacctgcgcatcgtcaccacctcgatgcacggcgtgggcggagaggtcctggctcgagtcctcgacgacgccggcttcgaggacgtgttcccagtcgccgagcagttggacccggacccgaccttccccaccgtctcgttccccaatcccgaggaacccggcgcgatcgacatggcgctggcgctcgcggcagaggtcaaggccgatctggtcatcgcgaacgacccggacgccgaccggtgcgccgtggccgtgttcgacccccgcgcgggcgacggcggagcctggcggatgctgcacggcgacgaggtcggagcgctgctcggatatgcggtgacgaattcggcgcagacgctggcctccgatgcgacggtggccaattccatcgtctcgtcgcggctgctgagccggatcgccgccaaggccaacctcaaccaccagaacgccctgacgggtttcaagtggatctcgcgcgcgccgggactagttttcggctacgaggaggcgctcggctattgcgtggacccggataccgtgcgcgacaaggacggcatctccgctgcgcttgtgatcgcgcagctggggaagatctcaaagccaagggtcggacgctga

SEQ ID NO: 78650 - protein, 267 aa, Unknown
  Obtained from environmental sample
  DOMAIN (48)...(153): Phosphoglucomutase/phosphomannomutase, alpha/beta/alpha domain II
  misc_feature (1)..(267): Xaa is any amino acid
MVRGAGQGAQIVPPYDGLIADKIAAAPPAKAVPMAQAGYLQLGEEIVDEYVNAVHRLADDDARDLRIVTTSMHGVGGEVLARVLDDAGFEDVFPVAEQLDPDPTFPTVSFPNPEEPGAIDMALALAAEVKADLVIANDPDADRCAVAVFDPRAGDGGAWRMLHGDEVGALLGYAVTNSAQTLASDATVANSIVSSRLLSRIAAKANLNHQNALTGFKWISRAPGLVFGYEEALGYCVDPDTVRDKDGISAALVIAQLGKISKPRVGR

SEQ ID NO: 78651 - DNA, 483 bp, Unknown
  Obtained from environmental sample
  misc_feature (1)..(483): n is a, c, g, or t
atgacggcctcatcgccgacaaaatcgccgcagcgccgcccgccaaagccgtcccgatggcgcaggccgggtatctgcaactcggcgaagagatcgtcgatgagtacgtcaacgcggtccatcggcttgccgacgacgacgcgcgcgacctgcgcatcgtcaccacctcgatgcacggcgtgggcggagaggtcctggctcgagtcctcgacgacgccggcttcgaggacgtgttcccagtcgccgagcagttggacccggacccgaccttccccaccgtctcgttccccaatcccgaggaacccggcgcgatcgacatggcgctggcgctcgcggcagaggtcaaggccgatctggtcatcgcgaacgacccggacgccgaccggtgcgccgtggccgtgttcgacccccgcgcgggcgacggcggagcctggcggatgctgcacggcgacgaggtcggagcgctgctcggatatgcggtga

SEQ ID NO: 78652 - protein, 160 aa, Unknown
  Obtained from environmental sample
  misc_feature (1)..(160): Xaa is any amino acid
MTASSPTKSPQRRPPKPSRWRRPGICNSAKRSSMSTSTRSIGLPTTTRATCASSPPRCTAWAERSWLESSTTPASRTCSQSPSSWTRTRPSPPSRSPIPRNPARSTWRWRSRQRSRPIWSSRTTRTPTGAPWPCSTPARATAEPGGCCTATRSERCSDMR

SEQ ID NO: 78653 - DNA, 843 bp, Unknown
  Obtained from environmental sample
  misc_feature (1)..(843): n is a, c, g, or t
ttgttgcttcaggccccggtttcatcggaataccggggggttatgaatggtactcctaatgttgtacgtggtgatgacagtaccggcactggcaataaacttacttttaccgccgaatacgacacaaaattcatcaagagcatcgccctcggcacaatagccgctccgtctaacggtggtactccggcaagtgcggctgttacttcaccagcatcgccaacgataactgccaataccgtctggtcagagtgggttagtagtgcttggaatgctactgttggtagttgggccgctggatcaagtcaatttacaggtggggagaaataccaggtagtagttactctgacgttaccagtcgcctacagctttgccaacggtttaacacttgttgcttcaggcacaggcatcagtggaataccggcgggttatgatggtactcctactgtcgtacgtggtgatgacagtaccggcactggtaataaacttactattaccgccgaatacgacacatccatcatcaaaagcgtcaccctcggcacaatagccgctccggctaatggtgttgctccggcaagtgcggctgttactgcaccagcatcgccaacgataactgccagtaccgtctggtcagagtgggttggtagtgcttgggatgctactgttgctaattgggccgctacatcaagcgaatttacaaatggggagaaggaccaggttgtagttactctgacgttaccagtcgcctacagttttgctaacggtttaacacttgttgcttcaggtacaggcatcagtggaataccgccgggtctatactggtactcctactgttgtacgtggtaa

SEQ ID NO: 78654 - protein, 280 aa, Unknown
  Obtained from environmental sample
  misc_feature (1)..(280): Xaa is any amino acid
MLLQAPVSSEYRGVMNGTPNVVRGDDSTGTGNKLTFTAEYDTKFIKSIALGTIAAPSNGGTPASAAVTSPASPTITANTVWSEWVSSAWNATVGSWAAGSSQFTGGEKYQVVVTLTLPVAYSFANGLTLVASGTGISGIPAGYDGTPTVVRGDDSTGTGNKLTITAEYDTSIIKSVTLGTIAAPANGVAPASAAVTAPASPTITASTVWSEWVGSAWDATVANWAATSSEFTNGEKDQVVVTLTLPVAYSFANGLTLVASGTGISGIPPGLYWYSYCCTW

SEQ ID NO: 78655 - DNA, 432 bp, Unknown
  Obtained from environmental sample
  misc_feature (1)..(432): n is a, c, g, or t
atgccaaaggttacagtactaacaacaacttataaccacaaagagtttataaagcaagctttggacagctttatgatgcaaaaaacagatttggattttgaagttatagtaggtgatgatgcatctagtgatgggaaagcagaaatcatagccgagtatgcgaaaaagcatccatctattataaaacctgtttttagagaaaaaaatgcaggtgcagacggcgcaaataattttttggatatagcgtcaagagtaaaatcagaatatgttgcgatttgcgaaggcgatgattattttacagaccctgtgaagctgcccaaacaagttgattttctggatagtcatcccgattattccatttgctttcataaagtgagagtgttttttgaggatagttccctcccggatgacgttttccctgcgcctgcttga

SEQ ID NO: 78656 - protein, 143 aa, Unknown
  Obtained from environmental sample
  DOMAIN (5)...(143): Glycosyl transferase family 2
  misc_feature (1)..(143): Xaa is any amino acid
MPKVTVLTTTYNHKEFIKQALDSFMMQKTDLDFEVIVGDDASSDGKAEIIAEYAKKHPSIIKPVFREKNAGADGANNFLDIASRVKSEYVAICEGDDYFTDPVKLPKQVDFLDSHPDYSICFHKVRVFFEDSSLPDDVFPAPA

SEQ ID NO: 78657 - DNA, 369 bp, Unknown
  Obtained from environmental sample
  misc_feature (1)..(369): n is a, c, g, or t
gtggctagaattgcgggtgttgaactgccgcgcgacaaacgcgcggatattgcgctgacctatattttcggcatcggccgcgcgacggccctgaaaatactggactccaccggcgtaaactggacgcggagcattgacgatctgtctgcggacgaagtcaatgaaatccgcaaggagcttgagcagcactacaaggtagaaggcgatatgcgccgtgaactcggggccggcatcaagcgcctcatggacatcggctgctatcgcggcttgcgccaccgtcgcggcttgcccgcgcgcggacagcgcacccacaccaacgcgcgcacccgtaaggggccgcggcgcggcgcggtgggcaaaaagaaataa

SEQ ID NO: 78658 - protein, 122 aa, Unknown
  Obtained from environmental sample
  DOMAIN (3)...(109): Ribosomal protein S13/S18
  misc_feature (1)..(122): Xaa is any amino acid
MARIAGVELPRDKRADIALTYIFGIGRATALKILDSTGVNWTRSIDDLSADEVNEIRKELEQHYKVEGDMRRELGAGIKRLMDIGCYRGLRHRRGLPARGQRTHTNARTRKGPRRGAVGKKK

SEQ ID NO: 78659 - DNA, 402 bp, Unknown
  Obtained from environmental sample
  misc_feature (1)..(402): n is a, c, g, or t
ttgcccgcctattttgtggcgggagggggtaagccctttctccaggtcaaatatccccggacggagggaggcccggacctcgcccgcgttggcaggaccaccgtgttcaagggaggaaacccctgcgcattgttcgcgacgacccgggaaatgctcagcgggggactgtgggaccttgggtggtcacgtttggcggagccgggcgaacttcctccatgttccgaccacccgcgggcgggcctcccgcccggcgaattgtttgaacagctcctgcgcaggggcatcatcatccggcccctgaacagttacggtctgccggatctgctgcgcgtcagcgtgggaacggagcgggagaatctgcgctttttggaagtctgcaacgagcttgtgcgttccgggtga

SEQ ID NO: 78660 - protein, 133 aa, Unknown
  Obtained from environmental sample
  misc_feature (1)..(133): Xaa is any amino acid
MPAYFVAGGGKPFLQVKYPRTEGGPDLARVGRTTVFKGGNPCALFATTREMLSGGLWDLGWSRLAEPGELPPCSDHPRAGLPPGELFEQLLRRGIIIRPLNSYGLPDLLRVSVGTERENLRFLEVCNELVRSG

SEQ ID NO: 78661 - DNA, 537 bp, Unknown
  Obtained from environmental sample
  misc_feature (1)..(537): n is a, c, g, or t
atgatcaacaagctcaacgctctcgggtttaaggccggcgtatatggctcttgcggcgacttcgcctgcgaggatatgcccggccggtatgggtatgaacaaattgacgcgcggacttgggccatgtggggcattgaatatctacagtacgatttctgccatattgtcgacctggagaccgatcctcacttcaccccgaacggatttgccgccgggacgccgccgattttgtatattggaatctctctgattgacagcgggagcggggaaatccgtatccccgttcgcaatactgaaataactccgcctgcgtcaatacaggatggcacgattactgggttgagctgcccttgcgccaccgcccggtttacggtaaacgtaccggtgtcaggcgaatcccatgcctcaattgaattatcgataattgccgtcatgtatctcgcccgttctctatgctcctgggggacggcggtcaaagtttctatgtatgttttccccctccaatcgcctgtccatcacgcgctggccttatgctaa

SEQ ID NO: 78662 - protein, 178 aa, Unknown
  Obtained from environmental sample
  misc_feature (1)..(178): Xaa is any amino acid
MINKLNALGFKAGVYGSCGDFACEDMPGRYGYEQIDARTWAMWGIEYLQYDFCHIVDLETDPHFTPNGFAAGTPPILYIGISLIDSGSGEIRIPVRNTEITPPASIQDGTITGLSCPCATARFTVNVPVSGESHASIELSIIAVMYLARSLCSWGTAVKVSMYVFPLQSPVHHALALC

SEQ ID NO: 78663 - DNA, 312 bp, Unknown
  Obtained from environmental sample
  misc_feature (1)..(312): n is a, c, g, or t
ttggaacaccacgcaaatattgttccctggcagtgggttgcccaagaaaaaggagcaaaaataaccgtcattccctgcaatgataatgggcatttgcaaatatcacaactcgcaaatttactctgcgaaaaaaccaaaatcctagccgttgcaaatatagccaacagcataaggacagaaaatcccttaactgaaattatacccctaatccgaacatttgcgcccaaaaccaaagttcttgtggatgccgctcagggagctggacaatcacaatttccgttaaaaactagactgcaaaattttggcatttaa

SEQ ID NO: 78664 - protein, 103 aa, Unknown
  Obtained from environmental sample
  misc_feature (1)..(103): Xaa is any amino acid
MEHHANIVPWQWVAQEKGAKITVIPCNDNGHLQISQLANLLCEKTKILAVANIANSIRTENPLTEIIPLIRTFAPKTKVLVDAAQGAGQSQFPLKTRLQNFGI

SEQ ID NO: 78665 - DNA, 456 bp, Unknown
  Obtained from environmental sample
  misc_feature (1)..(456): n is a, c, g, or t
atgccggaggttcgtagtctagactgcaaggccaggaaaagcatggccgaaccgcaatggaccgacatagatttcgggcccatagaatatgacagtctgaattatttcaacagcgcggggccaaaaaacaattccgacctggccgaaacatataaaaaaatggggcttccagagcaagagcaaaaagcccttttgggcatggccgtcgacaccgtcatagacagcaagtccgtgcatacatccttttccgaaatgcttgacaggctgggaatcatattcctccccttttcagaggccgtccaaaaacatcccgatatggtaagggaatattttgaggccgtcattccgcgcggcgacaactttttcgccgcccttaacgccgccgtattttcggacgggactttcgtttacgtcccgaaaaacgtcaagtgccccatagaccttgcgtcctattaa

SEQ ID NO: 78666 - protein, 151 aa, Unknown
  Obtained from environmental sample
  misc_feature (1)..(151): Xaa is any amino acid
MPEVRSLDCKARKSMAEPQWTDIDFGPIEYDSLNYFNSAGPKNNSDLAETYKKMGLPEQEQKALLGMAVDTVIDSKSVHTSFSEMLDRLGIIFLPFSEAVQKHPDMVREYFEAVIPRGDNFFAALNAAVFSDGTFVYVPKNVKCPIDLASY

SEQ ID NO: 78667 - DNA, 534 bp, Unknown
  Obtained from environmental sample
  misc_feature (1)..(534): n is a, c, g, or t
atgacaaatctccaggatcttgacgccaaacggattgaagattcgatactgtatccacaaacgttcgccccaagtgccacaaatcctgcgccagattcgcaaaaccccttcgcatctgcacctaattccgctgcaggagccactcaccaaccttttgttggctccaatggcgcaccaacttattatggcgccccaatgtattccagcgcagttgcaccgagcactgagaacctctgggcgatattcgcgcatctgggtggagtgtttctgacttggctcgtaccgctgattatctggttagttttccgcgaccgcagttggtatattgcagatcaggccaaagaagcactaaatttccaaatcactttatttattggttacgcaatttccatcgtgcttgcagtgatcattattggggcgattatggcgccagttatcggaattatgtcgctcgtctttgcgattatggctgccgtggccgcctcgcgacatcaggcgtatcgttacccattctgtatccgattcatcaagtag

SEQ ID NO: 78668 - protein, 177 aa, Unknown
  Obtained from environmental sample
  misc_feature (1)..(177): Xaa is any amino acid
MTNLQDLDAKRIEDSILYPQTFAPSATNPAPDSQNPFASAPNSAAGATHQPFVGSNGAPTYYGAPMYSSAVAPSTENLWAIFAHLGGVFLTWLVPLIIWLVFRDRSWYIADQAKEALNFQITLFIGYAISIVLAVIIIGAIMAPVIGIMSLVFAIMAAVAASRHQAYRYPFCIRFIK

SEQ ID NO: 78669 - DNA, 711 bp, Unknown
  Obtained from environmental sample
  misc_feature (1)..(711): n is a, c, g, or t
gtgtctgttttgggaggaaatgtaagaaccccaaaaatggaatttcattccaaaaattacgatatggcctttcttttatcccctgagtttttaagagaactcattgcgggggatgatgcgggggtgtcgggggttcttgatttactgcgattcaatagtcccctggaagctgccctgaatattgcgccaaggcagcttgatatgagcctcattacttctctcgtttcaaaacaggcggacctggaaaaaattatcgccaggacttcgccgtcagcgaacctcatccgtatggttccggataatacccagtacctgacgctcttggccgcaggttccctggaggaggttctcaacgccgccgccgtgattcccggctcacaaatagccggcccctggagaagggcggattccgcgtccaggagttttctcagcatgggtctggaagagctcctgttttcctggacaggctctgaattcgccgtcttcggcatggaaggccgtcccagcccggtcatccttgtggaagtaaaggacgaaaaaaaacggcaggaagcctttaataaggtgtttcgttcggcttttgtaaacgagaatatccaactcaaccttgatgggacccggcttcccaggatagagctgcctgcttttctttcaaacgtgctcctcatcatgggtataaaattaccttctccctattatgcccctttatga

SEQ ID NO: 78670 - protein, 236 aa, Unknown
  Obtained from environmental sample
  misc_feature (1)..(236): Xaa is any amino acid
MSVLGGNVRTPKMEFHSKNYDMAFLLSPEFLRELIAGDDAGVSGVLDLLRFNSPLEAALNIAPRQLDMSLITSLVSKQADLEKIIARTSPSANLIRMVPDNTQYLTLLAAGSLEEVLNAAAVIPGSQIAGPWRRADSASRSFLSMGLEELLFSWTGSEFAVFGMEGRPSPVILVEVKDEKKRQEAFNKVFRSAFVNENIQLNLDGTRLPRIELPAFLSNVLLIMGIKLPSPYYAPL

SEQ ID NO: 78671 - DNA, 786 bp, Unknown
  Obtained from environmental sample
  misc_feature (1)..(786): n is a, c, g, or t
ttgcatnnnnnnnnnnnnnnnnnnnnnnnnnncaccgacagtgcttcaatgttatacgtggatatgggcgcaactttgatgctgcatttgatttatggcgaaaatcactttgttgaccccaaagaccctgagcgttattttagaattcgctttgcaaatcaagactttgctgtgcaaaacattgatgaccgctttgaacgcaccgacaacaaaagccgcggcaaccgtgaaatgactatagaggagatgcttgtggtgttgaaagaagccgacaaagaagaacaaacactgatggaggagtttctgccgcaaatttggagaaacatgagcattttgaatttggttcttaaaaacgatactattttgccagaagagttgagaaacaaagaaattttacccgatgaggaaaaacataaaatatttgcagcatttgtgaaacgggaagaagaagaagttttgactagagtaaaccgaatgggaaacagacgcgagaacatattaaagcgtatagctatatacaaggttgaaattcataaaaaaataagtactgctgtagcctgtgttgtatttgctcttataggtgccccgcttggcataatagcacggcgaggtgggcttggaccaggcactgtttatagccttggattttttgctgtttattgggtatgccttattggtggcgaaaatttggcagaccgtttgataatttcaccggcggtttctatgtgggcttgtaatgcgcttattggaacaataggttttgtttttaacttggcgggtagctag

SEQ ID NO: 78672 - protein, 261 aa, Unknown
  Obtained from environmental sample
  misc_feature (1)..(261): Xaa is any amino acid
MHXXXXXXXXXTDSASMLYVDMGATLMLHLIYGENHFVDPKDPERYFRIRFANQDFAVQNIDDRFERTDNKSRGNREMTIEEMLVVLKEADKEEQTLMEEFLPQIWRNMSILNLVLKNDTILPEELRNKEILPDEEKHKIFAAFVKREEEEVLTRVNRMGNRRENILKRIAIYKVEIHKKISTAVACVVFALIGAPLGIIARRGGLGPGTVYSLGFFAVYWVCLIGGENLADRLIISPAVSMWACNALIGTIGFVFNLAGS

SEQ ID NO: 78673 - DNA, 840 bp, Unknown
  Obtained from environmental sample
  misc_feature (1)..(840): n is a, c, g, or t
atggccgcgcccgaacaggacgaggccggaggcagtcccctgaccgccaacacgaggaaggacgcagaaaagcacacggcaaagcacacggagaaggacagagggaaggacggcgaaacggcggaagccggacgcgccgcgcagcacggcacacgggccgaagaggcgggcagggcggaaggctctcccgccccggcccggccgcgctccgtgccgacctatgaggaagccctcgccgcccaggacaaaaaggccgcctccgcgcctgaagacaatgccgcgcccggcaagcccgccgcctccggccgggaacacagcggggccgccgccagcgaagaccggaaaaatttacagcccacgcgcggcgaacaggacggcccaggcgaacgcaatggcgaacgcaggcaggatgcgcgcgacgcgcggggggacgccacttccgcccgcgtcgaaatccgcccccacgcgcaaggcgcggacggcagcgccctctccgccttcaccctgtccgcccagacgccccagtcccaagaagccgcagcgcccggacaaagcgccacccccgccccgctcatccgccaggctttgcagcaggtggagcaggggagcttaagcaagctcgcggacggcgggcagcgccttgaagtgcagcttgcgccgagcgaactgggcgccctcaccctgatcctcaccagcggcaagggcggcgaaatcagcgccaccatccgctcccgaaaaagcgagaccgcggaagctgttcccccgccccctggacgttatcccgcgtcagcctcgaaaaacaggggcctgaaggtgggaccaagctgggagttgccataa

SEQ ID NO: 78674 - protein, 279 aa, Unknown
  Obtained from environmental sample
  misc_feature (1)..(279): Xaa is any amino acid
MAAPEQDEAGGSPLTANTRKDAEKHTAKHTEKDRGKDGETAEAGRAAQHGTRAEEAGRAEGSPAPARPRSVPTYEEALAAQDKKAASAPEDNAAPGKPAASGREHSGAAASEDRKNLQPTRGEQDGPGERNGERRQDARDARGDATSARVEIRPHAQGADGSALSAFTLSAQTPQSQEAAAPGQSATPAPLIRQALQQVEQGSLSKLADGGQRLEVQLAPSELGALTLILTSGKGGEISATIRSRKSETAEAVPPPPGRYPASASKNRGLKVGPSWELP

SEQ ID NO: 78675 - DNA, 393 bp, Unknown
  Obtained from environmental sample
  misc_feature (1)..(393): n is a, c, g, or t
atgaggaagccctcgccgcccaggacaaaaaggccgcctccgcgcctgaagacaatgccgcgcccggcaagcccgccgcctccggccgggaacacagcggggccgccgccagcgaagaccggaaaaatttacagcccacgcgcggcgaacaggacggcccaggcgaacgcaatggcgaacgcaggcaggatgcgcgcgacgcgcggggggacgccacttccgcccgcgtcgaaatccgcccccacgcgcaaggcgcggacggcagcgccctctccgccttcaccctgtccgcccagacgccccagtcccaagaagccgcagcgcccggacaaagcgccacccccgccccgctcatccgccaggctttgcagcaggtggagcaggggagcttaa

SEQ ID NO: 78676 - protein, 130 aa, Unknown
  Obtained from environmental sample
  misc_feature (1)..(130): Xaa is any amino acid
MRKPSPPRTKRPPPRLKTMPRPASPPPPAGNTAGPPPAKTGKIYSPRAANRTAQANAMANAGRMRATRGGTPLPPASKSAPTRKARTAAPSPPSPCPPRRPSPKKPQRPDKAPPPPRSSARLCSRWSRGA

SEQ ID NO: 78677 - DNA, 372 bp, Unknown
  Obtained from environmental sample
  misc_feature (1)..(372): n is a, c, g, or t
atgcccttgggagcgctgattccacatcatcccgaccgcggctgtcagttcttcatcagtttcaacgcgatgtcgccagatgatctagtttcgcggcgcttcgtagacacggaccgcccggacgcgatcgccaggcgtgtgacgtacaaggacaatcctcatcttaacgaggagatgctcaacgaaatccacctgcttgagcggtctgatccggatactttcgggcacgtctgggaaggctacccgcgcgtcggcggcgaggacgccatcatcccgggcatctggatcacgagcgccatcgacgtccacatcaagcttggcatcgagccgcgcgtcatcctggtcgaccacttgatcacttgggagagctga

SEQ ID NO: 78678 - protein, 123 aa, Unknown
  Obtained from environmental sample
  misc_feature (1)..(123): Xaa is any amino acid
MPLGALIPHHPDRGCQFFISFNAMSPDDLVSRRFVDTDRPDAIARRVTYKDNPHLNEEMLNEIHLLERSDPDTFGHVWEGYPRVGGEDAIIPGIWITSAIDVHIKLGIEPRVILVDHLITWES

SEQ ID NO: 78679 - DNA, 393 bp, Unknown
  Obtained from environmental sample
  misc_feature (1)..(393): n is a, c, g, or t
ttggactctcccgggatgcagcagcttctgcgcaccatgaaaccggacttctttaacgagatcatcgccttaaacgccctgcacagaccggggccgctcaaaaagggtatgcacacgcgtttttgcgagcgcaaattcggccgtgagcgcgtggaatacctcctccccgtaacagaaaatatcctgaaggatacccatgggatcatcatctaccaggaacaggtgatgcagatatcccaggtcgtgggcgggttcacgatggcggaagcggacgagctcccccaagcgatgggaaaaaagcaaaagcaaacccttacgcaaatgcgccaaacatttctttgcggcgcgcgcgaacgttatattgacaagggcaaagcggtaaaagctctttga

SEQ ID NO: 78680 - protein, 130 aa, Unknown
  Obtained from environmental sample
  misc_feature (1)..(130): Xaa is any amino acid
MDSPGMQQLLRTMKPDFFNEIIALNALHRPGPLKKGMHTRFCERKFGRERVEYLLPVTENILKDTHGIIIYQEQVMQISQVVGGFTMAEADELPQAMGKKQKQTLTQMRQTFLCGARERYIDKGKAVKAL

SEQ ID NO: 78681 - DNA, 324 bp, Unknown
  Obtained from environmental sample
  misc_feature (1)..(324): n is a, c, g, or t
atgtatttcagggggcagggcgtcactcaggacgaagagaaagggatcgagtggctgctgaaagcagcgaagcaagggcatgcaggggcgcagtgcgaactgggccacatatatctgcttgattcatcgggctacatggattatgcgaatgccgccagatggctgcagaagtctgccgaccaaggacacgctgacgggcagtactggctcggcaggatgcacctggaaggcctctgcgtccccaagatcttggccttggccgtcggactgctccagaagtctgcggagcatggcaacaggttcgcgataaggtacctcggctaa

SEQ ID NO: 78682 - protein, 107 aa, Unknown
  Obtained from environmental sample
  DOMAIN (64)...(99): Sel1 repeat
  misc_feature (1)..(107): Xaa is any amino acid
MYFRGQGVTQDEEKGIEWLLKAAKQGHAGAQCELGHIYLLDSSGYMDYANAARWLQKSADQGHADGQYWLGRMHLEGLCVPKILALAVGLLQKSAEHGNRFAIRYLG

SEQ ID NO: 78683 - DNA, 1047 bp, Unknown
  Obtained from environmental sample
  misc_feature (1)..(1047): n is a, c, g, or t
atggagggaagtatgcgagggcggattttgcaggcgcagtttgctgctttaataattttggctggtttcttgctgctctcatgtgaaaacgacaggcttgtctccgtggacaagcggggacggacagtagtagaacgcttcggccagctcagggtggaagggacaaaactgctggccgccgacggaaaacccgtccagttacgggggataagttccgctggtctgcaatacgcggggaaatatgccaacgaagaggtacttcgctggcttcgcgacgattggaatatgcaggtttggcgggccgcgctgtatcttagcgaggggggctacatatcacagcggtcgcttaagtccaaagtggtagattcagtggaagcggcgatcaaacttgggctgtacgtcattatcgactggcatgttcacctggatcgcgacccccggatgtaccagcagtactcaatcgaattttttggcgaaatggcccagcgttacggttcctatcccaacgtactatacgaaatatgcaacgaacctaacgggcaggatgtaacctggagcggggcggtaaagccctacgcggaagcggttatcgccgagatacggaagtacgatccgaacaacataatcattgtgggaacgcccacctggagccaggacgttgataaagcggcggaagacccgattcgaagctccgcaaacataatgtataccctccatttttatgccggaacccacggcgatgaactccggaacaaggcgaaaaccgccattgacaagggcctgccgctctttgttaccgaatgtggcacctcccaggccacaggcggtggcggggtctacgaggaaaagtatttggagtggctttccttccttaaaaaaaaccaaatctcgtgggtaaactggtctttgaccaataagggggaagattcgggaattctggtaatgaacgcggacagggaaggcaaaggcggctggacggataaccagctatcccaatcgggtaaatttatcaggaaaatactccgaaacgaggtaaaagttaaataa

SEQ ID NO: 78684 - protein, 348 aa, Unknown
  Obtained from environmental sample
  DOMAIN (55)...(311): Cellulase (glycosyl hydrolase family 5)
  SITE (172)...(181): Glycosyl hydrolases family 5 signature. Prosite id = PS00659
  SITE (304)...(307): N-glycosylation site. Prosite id = PS00001
  misc_feature (1)..(348): Xaa is any amino acid
MEGSMRGRILQAQFAALIILAGFLLLSCENDRLVSVDKRGRTVVERFGQLRVEGTKLLAADGKPVQLRGISSAGLQYAGKYANEEVLRWLRDDWNMQVWRAALYLSEGGYISQRSLKSKVVDSVEAAIKLGLYVIIDWHVHLDRDPRMYQQYSIEFFGEMAQRYGSYPNVLYEICNEPNGQDVTWSGAVKPYAEAVIAEIRKYDPNNIIIVGTPTWSQDVDKAAEDPIRSSANIMYTLHFYAGTHGDELRNKAKTAIDKGLPLFVTECGTSQATGGGGVYEEKYLEWLSFLKKNQISWVNWSLTNKGEDSGILVMNADREGKGGWTDNQLSQSGKFIRKILRNEVKVK

SEQ ID NO: 78685 - DNA, 1068 bp, Unknown
  Obtained from environmental sample
  misc_feature (1)..(1068): n is a, c, g, or t
atgagccggatgcgcggaataaatataggcggatggttaagccagattgacgctatacaggaaaaagaccccgataaatttccggggatagacaagcacatggaaacatttatcggcgcgggggattttgacaatgtgaaaaattggggctttgatcatgtgcgtatccctgttgactcatacctgttttttaccgaagaagaacagccgcttgaaaacaggtttgttcatcttgataacgccgtaaaatacgctaagcaaaacggccttaaatttatattggacctgcatgagtgtccggggcacgatttttccgaagcggctaaaactcccgttcaaaaacttttctccggcgatgatacctatatcaaaaaaaccgaaaaaatctgggcatatcttgcggagcgttacgcgggcaatgatcatgttctgtttgaaacgcttaatgagcctgtcgcccctgctcctgagatttggaacaatgtaaaggacaggctctgccgcgaaatacgcaaacacgcgcctaaatcaacgataataaccggttccaatatgtggaacgttccgggtacattcaacttccttactccctttgacgacggcaacatgatctactgcgtgcatttttacgagccgcttctttttactcaccagaacgcgccatggatcgataatcctgaaattaaaatcccaagaccgtaccccggcgattacggtcccggtcttgtccgcaaatacggacatgcgcattcggacggcgtttgggataaacagcggcttataaatgaatttacgccggtcaacactttcagaaaaaaatacaacgcgcaggtaatctgtaacgagttcggcgtttatactcccgtcgagcttcaatcccaactgcgctggtatgaggatattctttccgtactcaaagagatggagatcggcttttcatactggaactataaaaacctcgactttggaattatttccataggagagaaactgcacgaaaaccttcctcagtacaacaacagcgaaaggattaatcatcctgttcttgatgtgttaagaagatattga

SEQ ID NO: 78686 - protein, 355 aa, Unknown
  Obtained from environmental sample
  DOMAIN (19)...(325): Cellulase (glycosyl hydrolase family 5)
  SITE (145)...(154): Glycosyl hydrolases family 5 signature. Prosite id = PS00659
  SITE (344)...(347): N-glycosylation site. Prosite id = PS00001
  misc_feature (1)..(355): Xaa is any amino acid
MSRMRGINIGGWLSQIDAIQEKDPDKFPGIDKHMETFIGAGDFDNVKNWGFDHVRIPVDSYLFFTEEEQPLENRFVHLDNAVKYAKQNGLKFILDLHECPGHDFSEAAKTPVQKLFSGDDTYIKKTEKIWAYLAERYAGNDHVLFETLNEPVAPAPEIWNNVKDRLCREIRKHAPKSTIITGSNMWNVPGTFNFLTPFDDGNMIYCVHFYEPLLFTHQNAPWIDNPEIKIPRPYPGDYGPGLVRKYGHAHSDGVWDKQRLINEFTPVNTFRKKYNAQVICNEFGVYTPVELQSQLRWYEDILSVLKEMEIGFSYWNYKNLDFGIISIGEKLHENLPQYNNSERINHPVLDVLRRY

SEQ ID NO: 78687 - DNA, 1068 bp, Unknown
  Obtained from environmental sample
  misc_feature (1)..(1068): n is a, c, g, or t
atggcacggatgcgcgggataaatataggcggctggttaagccagattgacgctattcaggaaaaagacccggataaatttcccgggatagacaggcatatggaaacttttataggcgcggcggattttgccaatgtaaaaaattggggctttgatcatgtgcgtatcccggttgactcgtacctgttttttaccgaagaagaacagccgcttgaaaacaggtttgttcatcttgataaggccgtagagtacgcaaagcaaaacggccttaagctgatattggacctgcatgagtgtccggggcatgatttttcagaagcggctaaaacgcctgttcaaaagcttttctccggcgacgatacctatatcaaaaaaaccgaaaaaatctgggcttgccttgcggagcgttacgcaggcaatgatcatgttctctttgaaacgcttaacgagcctgtcgcccccgctcctgatatttggaacaatgtaaaagacaggctatgccgcgaaatacgcaaacacgcgcctaagtcaacgataatgaccggttccaacatgtggaacgttccggctacattcggcttccttactccctttgacgacgaaaacatgatctactgcgtgcatttttacgagccgcttctttttacccaccagaacgcgccctggattgataatcctgaaattaaaatcccaagaccgtaccccggcgattacggccccggcattgtccgccaatacgggcatgcgcattcggacggcatttgggacaaacagcggctggtgaatgaatttacccctgtaaacacattcaggaaaaaatacaacgcgcaggtaatctgcaacgagttcggcgtttacacgcccgtcgagcttcaatcccaactgcgctggtatgatgaccttctttcggttcttaaggaaatggagataggtttctcttactggaactataaaaacctcgattttggcattatttccataggggaaaaactgcatgaaaacctgccccagtacaacaacagcgaaaggataaatcatccggttcttgaggtgttaagaaaatattga

SEQ ID NO: 78688 - protein, 355 aa, Unknown
  Obtained from environmental sample
  DOMAIN (19)...(325): Cellulase (glycosyl hydrolase family 5)
  SITE (145)...(154): Glycosyl hydrolases family 5 signature. Prosite id = PS00659
  SITE (344)...(347): N-glycosylation site. Prosite id = PS00001
  misc_feature (1)..(355): Xaa is any amino acid
MARMRGINIGGWLSQIDAIQEKDPDKFPGIDRHMETFIGAADFANVKNWGFDHVRIPVDSYLFFTEEEQPLENRFVHLDKAVEYAKQNGLKLILDLHECPGHDFSEAAKTPVQKLFSGDDTYIKKTEKIWACLAERYAGNDHVLFETLNEPVAPAPDIWNNVKDRLCREIRKHAPKSTIMTGSNMWNVPATFGFLTPFDDENMIYCVHFYEPLLFTHQNAPWIDNPEIKIPRPYPGDYGPGIVRQYGHAHSDGIWDKQRLVNEFTPVNTFRKKYNAQVICNEFGVYTPVELQSQLRWYDDLLSVLKEMEIGFSYWNYKNLDFGIISIGEKLHENLPQYNNSERINHPVLEVLRKY

SEQ ID NO: 78689 - DNA, 1641 bp, Unknown
  Obtained from environmental sample
  misc_feature (1)..(1641): n is a, c, g, or t
atggcctgcaattcaacaaacacctcaattgaaacccaaacgcctgacgcggtccttaacgcggctcccttttcacgggggataaatttttcacagtggtttgaaactcccaacgcgcagtctattcaatttacccggtttattgagcaggattttatcaacgtgaaaagcatgggggtagacgtgatccggcttccgattagaatgcacagcatgacacggggcgcgcccgaatacgttcttgatccgctgctgctgaaattactggacaccgttgtcgattgggcggaaaaacaccagatgtatttaattattgacaaccattcctttgatcctgtggcgcctaccgatacaaacatagacgggattctcctgaaagtttgggcgcagatcgcgcagcgatataaaaaccgcgggaagtatgttgtttatgagattctcaacgagccccacggcatttccgacagcaggtggggtgaaatccaggggatggcaatagaaacaataaggaaaatcgatacgacgcacgccataattgtcggcggcaccgattacaattccattaataaactgttctctataccggagtattcggatcccaacctcatctatacgtttcatttttacgatccccatttatttacccaccagggcgcctcctggggggagccctcgttagcatcattggccggcgtcccctttccggcggatgtcttacgcatacctaaaactcccgatgatcttaaaggaacatgggttgaaggcgctctaagaaattacaaaaacgacgccgctttttccacactcctgggaagacttgataaaacggtggctttttcaagggaacggaaggctcccgtattttgcggcgaattcggcgtttatatgatccaaagccccgcgaaagaccgggttaaatggtacgaagttgtcgccggcgcgctgggaaggcggaagatcgcccgcgcaagctgggattatttcggcggtttcggcatattcaacaatcagacggggggagatttccactccgatgtcaatgtcgatgttgtccgcgctttaggttttctccctcctccccagcggacgcggattcaaaaaccgctcaattccgggtttaccatgtatggcgattatccgtccaatgatttttcaatggggtactggggtgaagacgccgttttcagcatgtatgataccaacgccgacgaaggggaatacgccatccgctggggaaacgccggtcaatacgacattttctggatcgcgtttgatcggaacggcgatttcagttatctggcggaggcgggatactgccttgaattcagggcaaggacggagaaaccggtaagttttgacgtccgctttgtaaaccctgaaaacgcgtcttccattccctggcgcatgcggtattcgataaatgaaaaaacgctcctccccaacgggaagtggcagaccatccgcgtaccgcttgccaatatgactgaacacggcgcatgggtaaacgcgacgcagtcatggcttggcccgcagggcaaattttcatggaagaatgttaagcagttggagtttgtagccgaagacggcgatctgaaaaatcgtgatatttggtttgattccataagaattatgaagccctga

SEQ ID NO: 78690 - protein, 546 aa, Unknown
  Obtained from environmental sample
  DOMAIN (12)...(339): Cellulase (glycosyl hydrolase family 5)
  SITE (4)...(7): N-glycosylation site. Prosite id = PS00001
  SITE (29)...(32): N-glycosylation site. Prosite id = PS00001
  SITE (108)...(111): N-glycosylation site. Prosite id = PS00001
  SITE (144)...(153): Glycosyl hydrolases family 5 signature. Prosite id = PS00659
  SITE (341)...(344): N-glycosylation site. Prosite id = PS00001
  SITE (468)...(471): N-glycosylation site. Prosite id = PS00001
  SITE (500)...(503): N-glycosylation site. Prosite id = PS00001
  SITE (509)...(512): N-glycosylation site. Prosite id = PS00001
  misc_feature (1)..(546): Xaa is any amino acid
MACNSTNTSIETQTPDAVLNAAPFSRGINFSQWFETPNAQSIQFTRFIEQDFINVKSMGVDVIRLPIRMHSMTRGAPEYVLDPLLLKLLDTVVDWAEKHQMYLIIDNHSFDPVAPTDTNIDGILLKVWAQIAQRYKNRGKYVVYEILNEPHGISDSRWGEIQGMAIETIRKIDTTHAIIVGGTDYNSINKLFSIPEYSDPNLIYTFHFYDPHLFTHQGASWGEPSLASLAGVPFPADVLRIPKTPDDLKGTWVEGALRNYKNDAAFSTLLGRLDKTVAFSRERKAPVFCGEFGVYMIQSPAKDRVKWYEVVAGALGRRKIARASWDYFGGFGIFNNQTGGDFHSDVNVDVVRALGFLPPPQRTRIQKPLNSGFTMYGDYPSNDFSMGYWGEDAVFSMYDTNADEGEYAIRWGNAGQYDIFWIAFDRNGDFSYLAEAGYCLEFRARTEKPVSFDVRFVNPENASSIPWRMRYSINEKTLLPNGKWQTIRVPLANMTEHGAWVNATQSWLGPQGKFSWKNVKQLEFVAEDGDLKNRDIWFDSIRIMKP

SEQ ID NO: 78691 - DNA, 1005 bp, Unknown
  Obtained from environmental sample
  misc_feature (1)..(1005): n is a, c, g, or t
gtggcaaatatcaaagtcggctggaatttaggtaacacgcttgacgcggttaagtttggttcggatctgactgtttctgatcttgaaacagcatggggaaatcctgttactacaacaggacatatcacggcaataaaaaacgcaggctttaacgcgattcgaattcccgtttcgtgggcaaaatgcgccgatgccgattttaatattcgcgcggattggatggagagagttacccaagtggtcaattacgcggttgaaaacgatatgtatattttgcttaacacccaccatgatgagagcatatttaaatttacaaacaaagaaaaagacgcgtcaataaacgcgttcagaaaaatatggatgcagatcgccgttaatttccaaaattacgatgaaaaactaatttttgaaggattaaacgagccaagaacaagaggcagttcggctgaatggaacggtggaacctctgcagaacgcgccaatctgaatgaccattatgcggtttttgtaaaaacagtgcgcgcctgcggcggaaataacaacaagcgttttctggtgatcaatacctatgctgcttccggcgaggcagtggcgatgagcggcttaaagattccggcggataccgcgcaaaacaaaatcatcgcgtcttaccacgcttatgagccatactattttgctttacatgaaggtagtaattcggtaaagacatggagtcagagtaaattatcggacactactcctattacaagccggattgctcaagcaaattctacttttatcaacaagggcatacctgtcataatcggtgaattcggcgcccttaatagagacaatgaaccggcaagagccgcgtgggttgaattttacgtgaaatccgcggcggcaaaaggtattaagtgcttctggtgggatgacggcggtaattttaaattatacgacaggagaaacgatacattttattttccgcaaataagagacgggttaataaagggcgcgggtaactaa

SEQ ID NO: 78692 - protein, 334 aa, Unknown
  Obtained from environmental sample
  DOMAIN (11)...(313): Cellulase (glycosyl hydrolase family 5)
  SITE (136)...(145): Glycosyl hydrolases family 5 signature. Prosite id = PS00659
  SITE (259)...(262): N-glycosylation site. Prosite id = PS00001
  SITE (320)...(323): N-glycosylation site. Prosite id = PS00001
  misc_feature (1)..(334): Xaa is any amino acid
MANIKVGWNLGNTLDAVKFGSDLTVSDLETAWGNPVTTTGHITAIKNAGFNAIRIPVSWAKCADADFNIRADWMERVTQVVNYAVENDMYILLNTHHDESIFKFTNKEKDASINAFRKIWMQIAVNFQNYDEKLIFEGLNEPRTRGSSAEWNGGTSAERANLNDHYAVFVKTVRACGGNNNKRFLVINTYAASGEAVAMSGLKIPADTAQNKIIASYHAYEPYYFALHEGSNSVKTWSQSKLSDTTPITSRIAQANSTFINKGIPVIIGEFGALNRDNEPARAAWVEFYVKSAAAKGIKCFWWDDGGNFKLYDRRNDTFYFPQIRDGLIKGAGN

SEQ ID NO: 78693 - DNA, 1473 bp, Unknown
  Obtained from environmental sample
  misc_feature (1)..(1473): n is a, c, g, or t
atgggagcggacgtgatacggcttcctatccgtatgcacagcatgacaggcggctctcccgattatacgattgatccgctgttgtttaaatttctggacatggctgtaaattgggcggaaaagtacgaaatatatatcataatagacaaccattcgtttgatcctgtaaaaaacacggaaaacaatatcgacaaaatcttaattcctgtttgggagcaaatcgcgcgccgttacaaagatcgaagcaattatataatttatgaaatcttaaacgagccgcacgggataagcgactcaagatggggagaagtacaggggcttgcgatagacgcaatccgtaggcatgataccaaacattttattattgtgggcggcaccgaatacaattctatcggaaaactttcttcaattccggcttataaagatgataaaatcatctgcacttttcatttttatgatccgtatctttttacccatcagggcgcgagctggggcgggccgcctttattgacaactcttgccggagttccctttccgtacgacagcaagcgtatgcctaaagtatcttcacagctaagtggaacatggatagaaagttctttgaaaaatgattacaaaagggcgtccgatccaaagacgctttacagcacattggacaaggcggtttcattttccagagagcgtaatgttcctgttttttgcggcgaattcggcgtgtatatgattaacagcctgaacgaagatcgcgtcaggtggtatgagatagttacaacagccattgccagacgtaatatttcaaggacaagctgggattattacggaggtttcggcgtctttaattcagaaagcggcggggatttttacgcggatttaaatactgacgtggtacgcgcaatggggtttacgccgcccgtccagactccgcgccggcaggaaccgcttagaaaaagcattacaatttatgacgattatcctgacagggaaatttcatgcgggtattgggacgaaacaactgattttagcttatatgacgccaatgccgccgcgggagaattttcgataagatggggaaacgccaaacaatataatattttttattttgcgtttaacaatggcgctaatttaagcgaaatcgcggacaaaggaattcttgaattaaaagcgcgcgctgaaaagcctgttaattttgatatacgctttgtaaatcctgaaaacctaaattcaattccctggcggatgcgttatacgattaatgaaaagatactcccgcccgacggcaagtggcacacaatacgtataccgcttaaaaaaatggaagacatgggagcgtggttaaatacaacgcagaaatggcttccttcgcagaataaattttcatggagcaatataaagcaattggaaattgtcgctgaacacggggacatgaagggcatttgcatccggtttgacgatataaaattacttgttccctaa

SEQ ID NO: 78694 - protein, 490 aa, Unknown
  Obtained from environmental sample
  DOMAIN (1)...(280): Cellulase (glycosyl hydrolase family 5)
  SITE (50)...(53): N-glycosylation site. Prosite id = PS00001
  SITE (86)...(95): Glycosyl hydrolases family 5 signature. Prosite id = PS00659
  SITE (268)...(271): N-glycosylation site. Prosite id = PS00001
  SITE (379)...(382): N-glycosylation site. Prosite id = PS00001
  SITE (452)...(455): N-glycosylation site. Prosite id = PS00001
  misc_feature (1)..(490): Xaa is any amino acid
MGADVIRLPIRMHSMTGGSPDYTIDPLLFKFLDMAVNWAEKYEIYIIIDNHSFDPVKNTENNIDKILIPVWEQIARRYKDRSNYIIYEILNEPHGISDSRWGEVQGLAIDAIRRHDTKHFIIVGGTEYNSIGKLSSIPAYKDDKIICTFHFYDPYLFTHQGASWGGPPLLTTLAGVPFPYDSKRMPKVSSQLSGTWIESSLKNDYKRASDPKTLYSTLDKAVSFSRERNVPVFCGEFGVYMINSLNEDRVRWYEIVTTAIARRNISRTSWDYYGGFGVFNSESGGDFYADLNTDVVRAMGFTPPVQTPRRQEPLRKSITIYDDYPDREISCGYWDETTDFSLYDANAAAGEFSIRWGNAKQYNIFYFAFNNGANLSEIADKGILELKARAEKPVNFDIRFVNPENLNSIPWRMRYTINEKILPPDGKWHTIRIPLKKMEDMGAWLNTTQKWLPSQNKFSWSNIKQLEIVAEHGDMKGICIRFDDIKLLVP

SEQ ID NO: 78695 - DNA, 1335 bp, Unknown
  Obtained from environmental sample
  misc_feature (1)..(1335): n is a, c, g, or t
atgaccgcttttgataacgcaatcagcgcggcgaaaagcgcgctcgcctcggcagcgactcaaggggcgttggattcggcggtaaccgccctgcaatccgcgattacaacttttagcggcgcgcggcagcaaggcactaaagaaggcggtggcacacaaaatttcagggacataacggccgcgcaattagccgctgaaataaaaatcggctggaatttgggcaacacgcttgacgcttacaacttaacgtggcttggcgcaaacccaacggttaaccaaatggaaacagcgtggggtgttcccactacgacaaaggcaaatattaccgcgttaaaaaacgccggctttaacgctatcagaattcccgtatcctggacaaaggccgcgagcggagcgccgaattacaccatacgcgccgactggatggcgagggttaaggaaattgtcaattacgccgtagacaacgatatgtatatcattttaaacacccaccatgacgaagacgtgctcacatttatgaattcaaacgcggcggcgggaaaagcggctttccagaaactctgggagcagattgccgctgccttcaaggactacaacgaaaaactgatctttgagggattgaacgaaccaagaacccccggcagttccagtgaatggaacggcggcactgccgaagaacgcgccaatttgaattcctattaccccatcttcgttaatacggtaagaaactcaggcggtaataacggcaagcgcgtattgatgattaacgcctatgcagcttccgctgaagcggtcgcaatgaacgcgttaacgctccctacagacagcgcggtaaataaacttattgtttctttccattcttacagtccctataattttgctctgaataaagactccccaataaatacgtggagcagcgacaattccgcggatacttcgccaattaccggcccgattgaccggtattatactaaatttataagtcagggcattcccgtaataatcggcgaatttggcgccatgaataaaagcaatgaagctgtcagggcgcaatgggccgaatattatattagttatgcctggagtaaaggcattaaatgtttttggtgggataacggcgttacaagcggcgacggcgaaaaatttggcctgcttaacaggcagaacaatacttttacatataacgctttacttaacggtatgatgagtgggacaggcggcgctggtccaaacccgccgactcctctggttacgccaaccccgccaactactattaccggaaatttaggtacctaccaatttggtacacaggaagacggcgtttctcccaactaa

SEQ ID NO: 78696 - protein, 444 aa, Unknown
  Obtained from environmental sample
  DOMAIN (74)...(380): Cellulase (glycosyl hydrolase family 5)
  SITE (82)...(85): N-glycosylation site. Prosite id = PS00001
  SITE (108)...(111): N-glycosylation site. Prosite id = PS00001
  SITE (136)...(139): N-glycosylation site. Prosite id = PS00001
  SITE (205)...(214): Glycosyl hydrolases family 5 signature. Prosite id = PS00659
  SITE (347)...(350): N-glycosylation site. Prosite id = PS00001
  SITE (395)...(398): N-glycosylation site. Prosite id = PS00001
  misc_feature (1)..(444): Xaa is any amino acid
MTAFDNAISAAKSALASAATQGALDSAVTALQSAITTFSGARQQGTKEGGGTQNFRDITAAQLAAEIKIGWNLGNTLDAYNLTWLGANPTVNQMETAWGVPTTTKANITALKNAGFNAIRIPVSWTKAASGAPNYTIRADWMARVKEIVNYAVDNDMYIILNTHHDEDVLTFMNSNAAAGKAAFQKLWEQIAAAFKDYNEKLIFEGLNEPRTPGSSSEWNGGTAEERANLNSYYPIFVNTVRNSGGNNGKRVLMINAYAASAEAVAMNALTLPTDSAVNKLIVSFHSYSPYNFALNKDSPINTWSSDNSADTSPITGPIDRYYTKFISQGIPVIIGEFGAMNKSNEAVRAQWAEYYISYAWSKGIKCFWWDNGVTSGDGEKFGLLNRQNNTFTYNALLNGMMSGTGGAGPNPPTPLVTPTPPTTITGNLGTYQFGTQEDGVSPN

SEQ ID NO: 78697 - protein, 94 aa, Unknown
  Obtained from environmental sample
  misc_feature (1)..(94): Xaa is any amino acid
LGAAAAGAAAGAGAPAAGAGAAAGALGAAAAGAAVGAGAAAGALGAVAGAGVAAGAGVAAVPGAPAIPKIARIAVTKKGLKHLFMKNLLWDIWH

SEQ ID NO: 78698 - protein, 305 aa, Unknown
  Obtained from environmental sample
  misc_feature (1)..(305): Xaa is any amino acid
MKATSILSPRLMKQNGIWYYFTDDGSAIFTDTFAYFPKMADTVPFMENIGFAETEKRLRDGNESETPRQEYLYGDEFGESVYALTSISAVIPKNVRLRNQNYRTPETPPEGASESVCKSDGAWGSVYEYGGAFKNDEEGKRLASLYITRLQTENLRTVGSGRCAAFRAGEIIFINGVGEFLLLSVEHEGGQGGDRGMGRAGSGDREYTYNNHFSCIDSTKKTYAPPLRAKPPVASGIITAPIDALGEDLPNIDEMGRYRVKLPFDLSETPEYGATKDIRLSQISGGDGYGVHFPSTRPSDHVGGI

SEQ ID NO: 78699 - protein, 166 aa, Unknown
  Obtained from environmental sample
  DOMAIN (15)...(164): Respiratory-chain NADH dehydrogenase 24 Kd subunit
  misc_feature (1)..(166): Xaa is any amino acid
GKIRAEAIGAEGAGTFPPELISFIDVWKVKPGSLIMILHKIQETFGFISRESADKLSQITGIPLARIYGVITFYHFFKTTKPGKNKISVCLGTACYLKGGQDLIEEARKILNLAPGGVTEDGLFSIDEVRCVGCCGLSPVITVGPDTYGKLTAEMLPEIIAKYKNA

SEQ ID NO: 78700 - protein, 65 aa, Unknown
  Obtained from environmental sample
  misc_feature (1)..(65): Xaa is any amino acid
VRDGDAISIDIPGQTLHVDVSDATLAERRASWQAPAPRVTEGYLYLYSRLAESAAKGAIIKNRAD

SEQ ID NO: 78701 - protein, 228 aa, Unknown
  Obtained from environmental sample
  misc_feature (1)..(228): Xaa is any amino acid
MSVKLEEGLVKTKGRELINVRTKSVLTQILQSKELYLFCLPGILVMLIFHYWPLYGAQIAFRSYSARRGIWGSPWVGLYHFARFFRSANAVRIILNTLVLSFYSLAAGFPIPIILALLLNSFRHERYTRVIQTVTYAPHFISTVVMCGMIILFLSPRVGAVNMIMGLLGIQPVNIMGERTIWRHVYIWPSVWQNMGWSSVVYFAPLSGVNPDYPKSPQWTARPSSTGS

SEQ ID NO: 78702 - protein, 277 aa, Unknown
  Obtained from environmental sample
  DOMAIN (1)...(266): Branched-chain amino acid transport system / permease component
  misc_feature (1)..(277): Xaa is any amino acid
MSLGSLYALIAIGYTMVYGILRLINFAHGDVFMLGGYIAFYSITIFFMPWWVGFIVALGLTGILGIGLERVAYRPLRHSPKISIMISAIGASFLLQNLATVIFGGRPKGFPVPELFNKVVSVAIKGGDAVSVLNVSLIIPVLTAILLTILLIIVHKTKTGMAMRAVSTDIAAARLMAIDVNKVVSFTFGAGSVLAAIGGIMWALRYPQLNPTMGMIPGLKCFIAAVIGGIGNIAGAVLGGLLSGFIEIMVIAALPTLTGYRDAFALNCSLSYFWLNH

SEQ ID NO: 78703 - protein, 214 aa, Unknown
  Obtained from environmental sample
  DOMAIN (14)...(213): Binding-protein-dependent transport system inner membrane component
  misc_feature (1)..(214): Xaa is any amino acid
MEIKTVIYFWIPQLLKGARVTVGLTVTAACAGLVLGFFLALGKMSKKFILNKLCGAYIFFFRGTPLLMQLFFIYYALPQIFPPFTIKSRFLAAFTAFALNSAAYCAEIIRAAIQSIDKGQFEASRVLGLSRAQTLRYVIIPQSVRRLIPPVGNEFIMMLKDASLVSMIALVDITRAMSNIFNSTSSALVYIPRAGFIFDYYGARPILSLGKEIQ

SEQ ID NO: 78704 - protein, 69 aa, Unknown
  Obtained from environmental sample
  misc_feature (1)..(69): Xaa is any amino acid
MKHFTVIEINAELLNRALYSKIDDFEDAVIEVSANEKNVDYIVTRNTKDFNKSIIPAKTPEEIILLINN

SEQ ID NO: 78705 - protein, 106 aa, Unknown
  Obtained from environmental sample
  misc_feature (1)..(106): Xaa is any amino acid
MKRVFNFSPGPSMLPLPVLEKAAAEMCDANGSGQSVMEMSHRSKDFKPIIEKAEALLRELMGIPANYKVLFLQGGASLQFSMIPLNLAGSDTRGRKPCILIPASGR

SEQ ID NO: 78706 - protein, 276 aa, Unknown
  Obtained from environmental sample
  DOMAIN (1)...(276): UvrD/REP helicase
  misc_feature (1)..(276): Xaa is any amino acid
MDGAQKAEVKRAAYNISRAKDYFLSPEDPSLKLIDSNEKFRRLYAEYERRLKITGNVDFGDLIKKPVEILRKEPDVCRRFRERFSVIMVDEYQDANVAQFEMLKELAGPGTYVCVVGDDDQSIYRFRGAEVKNILEFPEKFSDADIIRLESNYRSTSPILQAASSVVDHNKGRLGKTLRSERGDGKLPVLAFLPDQEEEANFCASLIEQSPQAQWSDWAILYRTNAQSFGFETEFLRRGIPYKVVGSLKSTSARRSRTPSPFFRSWETLATRWPSA

SEQ ID NO: 78707 - protein, 251 aa, Unknown
  Obtained from environmental sample
  DOMAIN (1)...(218): Poxvirus D5 protein-like
  misc_feature (1)..(251): Xaa is any amino acid
MYLLGDYAIATPTETFMKKSGDNYSNDVARLRGTRFVTTTEVEQGRRLSEPLIKKITGNDEMTARFLYGEFFNFKPTFKIFMATNHKPVIKGTDHGIWRRIKLIPFTERIPEEKQDKHLELKLREEASGILNWLLEGMANWKQERLKTPKAVLFATDEYRGEMDVIGNFIKEKCGQKKEMTIAIKKLYKAYSDWCEENNEHAVSDRFFTLRLKEMGFEQGRTSAERFWVGIGLGLEPASMPISNLEVLRCP

SEQ ID NO: 78708 - protein, 149 aa, Unknown
  Obtained from environmental sample
  misc_feature (1)..(149): Xaa is any amino acid
MVFKIDCPVIEEPGFPWLVKDLALLAQTGFRIVIVPGAKEAIDQVLQGQNIVSSFNADSVEPVRITEARAMPFVEMAAFHVATRFMPFLSGSRVDAIIGNFVRARGLGVVNGIDMGHTGAVDKIFTESISRVLDLGAVPILPCIGWSPA

SEQ ID NO: 78709 - protein, 331 aa, Unknown
  Obtained from environmental sample
  DOMAIN (176)...(331): Peptidase M16 inactive domain
  misc_feature (1)..(331): Xaa is any amino acid
LGEHDKTGAEVFHVLNDDIENLFAFAFATTPQDNTGVSHILEHSVLCGSERYPLKDAFLVLAQGSLQTYLNAWTFPDKTVYPASSVNERDYFNLMSVYGDAVFRPLLAEWTFLQEGHRYEYGKDGEGLSVTGVVYNEMKGAYSSLDSYAHLWTVKAVLPDTPYSFESGGAPEHIPELTWEGLKDFHRRRYSPANCRVFLAGNIPTEKQLAFLNDNFFSLIEGGTASARIGKQKRWTAPKELNVPCPAGSDGENKSTVFLSWLLCDAADTNENIALIALTEILLGHDGSPLTKALIQSGLGEDISPFPALEANLGKRFLLPACAGLAVPGQK

SEQ ID NO: 78710 - protein, 330 aa, Unknown
  Obtained from environmental sample
  DOMAIN (11)...(132): DEAD/DEAH box helicase
  misc_feature (1)..(330): Xaa is any amino acid
EEGDALFRGAAGAQQRSAGGVDGAHGDLAKQTKSAWEGYLAGLGVRVGYVGAGDAPEKRRALGDLASGDLRFVVGTHALFMPSVRFRNLGMVIIDEQHKFGAAQRLKLQEKGPASDFLLMSATPIPQTLAKTLYGDLDVVEIGSRPSAAPVPTHIVPEGKRAGMEGFIFERISVGARVFYVVPRIDRQPSDDLEDEGGGLPVKTVDSVAEALGKGPLSSAPIHKLHGRMSADERDAAIRAFKEGPPGVLVSTTIVEVGIDVADAAVMVIENPEFFGLAQLHQIRGRVGRGSMASHCFLLPGPGACRDARTMERLKFLCGCRLGRSDTRWK

SEQ ID NO: 78711 - protein, 86 aa, Unknown
  Obtained from environmental sample
  misc_feature (1)..(86): Xaa is any amino acid
MEKKSGNFVSDIHNEDYESVYLETRLDASTLINIAGRETESLKRKWNFAADLYDTCRRAHWYRSKRFDTDGRESPLDFDWEGWDRL

SEQ ID NO: 78712 - protein, 139 aa, Unknown
  Obtained from environmental sample
  DOMAIN (2)...(122): Polypeptide deformylase
  misc_feature (1)..(139): Xaa is any amino acid
MQILTLGNELLRQKAKKIDKIDNEIKDAAKQMFEIIKQDKGVGIAGPQIGLMKRIFVVHIEGDEERVFINPSILETSQETVKYEEGCLSVPGIYVDVVRSESVKIQAWNEKGQTFYNGSKRGFWRGFSAQWSRDIPGGI

SEQ ID NO: 78713 - protein, 61 aa, Unknown
  Obtained from environmental sample
  misc_feature (1)..(61): Xaa is any amino acid
TRGVTGWIISFPKDMEEVTGYRWESWHYRYMGKELAKFINDYFEGVQQYALQFLKEWNVNF

SEQ ID NO: 78714 - protein, 73 aa, Unknown
  Obtained from environmental sample
  DOMAIN (1)...(62): DNA gyrase B subunit, carboxyl terminus
  misc_feature (1)..(73): Xaa is any amino acid
LIASVVALQGLGEMNPDQLCDTTMDPGKRNIIQVHLDDTVEAERIFTTLMGEVVQPRREFIEENALLVSNLDV

SEQ ID NO: 78715 - protein, 181 aa, Unknown
  Obtained from environmental sample
  misc_feature (1)..(181): Xaa is any amino acid
MKTNSRFLLAASLGLAMALTFGCSDNGGGPINDNGQGGNNHQVVADLTITTAEQLIEFASLVNRGNYFRDKIVRLGANIMLNDTTNWQNWANNPPDNEWTSMGSYSGLEDCFNGTFDGNGYVISGIYINSQMPREGLFKCLGGTIKNLGVIASYIKSENDEVGGLVGLNYFGTITRRSCRG

SEQ ID NO: 78716 - protein, 176 aa, Unknown
  Obtained from environmental sample
  misc_feature (1)..(176): Xaa is any amino acid
MAGPQVKSAILIVNLHKEDAAAAAEEIRRELEGAGVQTTLFAFEGRPASPPEGQWDVAFSLGGDGTVLYTARILAHTGTPILPVHLGTLGFIAGVERHEWFSVYRRWLSGEIKPSRRCMLEFSIERGGKYAVNNSVCLNDVVISSLGDSETDTFAGKNRGCPRAILLKIGSYRSDG

SEQ ID NO: 78717 - protein, 115 aa, Unknown
  Obtained from environmental sample
  misc_feature (1)..(115): Xaa is any amino acid
MVFSWMPQLVKGARVTIALTVLAVSAGLVLSLFLALGKMSKNVILNKFSSGYIFFFRGTPLLMQLFFVYYALPMIAPFLTINNRFLARFIAFTMNSAAYCAEIIRPAIQSIDKGQ

SEQ ID NO: 78718 - protein, 77 aa, Unknown
  Obtained from environmental sample
  misc_feature (1)..(77): Xaa is any amino acid
MESFEIKKVYRQEVSEICFIGKKTYDWGVMFQPGGFDVLEKYMNKEFKERYEDFDAYLGLYRFKEGDTPARPINGGG

SEQ ID NO: 78719 - protein, 279 aa, Unknown
  Obtained from environmental sample
  DOMAIN (55)...(217): Alpha-2-macroglobulin family N-terminal region
  misc_feature (1)..(279): Xaa is any amino acid
VSANGIISGVFNFTPDKSGLWELRLSSRDQKQRTAATRSRFYVSGAGWVRWGSDDVDTITLTTDRPSYAPGETAKIMIRSPLEKGKYLLTLEREGIISQKIIELNGSALTIDIPIEESYIPIIYATLSSYTVRSGPAQNSYYEPDLDKPKGIFGVTPIYVDNKSRHYQIEIDTGRNAYRPAEQAEVKLTVLLNGRPAPNTEVSFMAVDRGVVDLIDYHVPDPLAFFYHPRHFPLGVRRADSRSLLIDPVTYNISDLQGGDSDDNGKLEERKDWRPTAVF

SEQ ID NO: 78720 - protein, 111 aa, Unknown
  Obtained from environmental sample
  DOMAIN (1)...(111): HDOD domain
  misc_feature (1)..(111): Xaa is any amino acid
MPSLPTSVTKVLEICNNPQTSPMDLNHVISLDPVLVGRVLKLINSAYYGVGQPVTSLARAIIMLGINTVKNLALSTTVIGQLSPQKNLWAWILEASGDIPFAWGVAAKFLP

SEQ ID NO: 78721 - protein, 208 aa, Unknown
  Obtained from environmental sample
  misc_feature (1)..(208): Xaa is any amino acid
MGSAWMLNCLCSLESAMNTSHTALFAILFAAMMPIVAQQKAQQPKQPSATQLSSANAEIASLRKQIKELAEERDALKQELDDVPLIMRQEHAELLRQIDEITAQRDEASAKAGRLEAMLKENQSGGNSLLKELRQAREDLRDSNDKVETLEKEMESLQTSLDDATKIREGALVHIGPDIIPARCLKFKADDALGQKSVGGDRRELPDQ

SEQ ID NO: 78722 - protein, 291 aa, Unknown
  Obtained from environmental sample
  misc_feature (1)..(291): Xaa is any amino acid
MVRLAEKRGGYSEVCSRKATGDISILFKYKPKPSHPLCTYELQIGLDGNKNPVINKEKLSYRRGAGIGKPWDFINFSKGRGQAITNEGTLKFSLAAPDILAIKSLGQMARFGAVVEFRKFLEDWFIADFQIDKMRFAQETSYNESLNRRGDNIANVAQYLYDQHRDKFNSILKKMQERIPGIKKVEAKTTEDGNILLKFHDGRFTDPFSAKYVSDGTIKMFAYLVMLADPKPHKLLCIEEPRNQLYPHLLEILVEEFREYTNFRGQVLISSHSPDFVNAFGTRLIYLYKKN

SEQ ID NO: 78723 - protein, 197 aa, Unknown
  Obtained from environmental sample
  misc_feature (1)..(197): Xaa is any amino acid
MRHQHEPVKFQWITPGNIVTAVILGVGGLLTLIRFTQGIGSITNLDDNFPWGMWIAFDLLCGVCLAAGGYFTSSACYLFGMKRFHSAVRPAILTAFLGYFFVVVALLYDLGHWYRLPYPIFWSPGTTSVLYEVGLCVACYVTVLFVEFSPAAMEWLNDHPYPRLTFIKKIPWQKIRKVVVHWTLPLTISRVCLSPCT

SEQ ID NO: 78724 - protein, 248 aa, Unknown
  Obtained from environmental sample
  DOMAIN (51)...(192): Histidine kinase-, DNA gyrase B-, and HSP90-like ATPase
  misc_feature (1)..(248): Xaa is any amino acid
MAVKKIKTKKQSLVKGGPGVYDESKIKTLSSLEHIRARTGMYIGRLGDGSNPDDGIYVLLKEIIDNGIDEFIMGNGKNIEVAVKDGAKPGAASVKVRDYGRGIPLGKLVDCVSIINTGGKFNDDVFQFSVGLNGVGTKAVNALSVHFRVVAMRNGEFAEAIFERGKLKSDRKGKLKDKQKDGTYVEFIPDPDIFKDYLFNLEFIEQRLQNYAYLNAGLTLSFTESILFQAGPVRSVVRGDGDDCLYPL

SEQ ID NO: 78725 - protein, 74 aa, Unknown
  Obtained from environmental sample
  misc_feature (1)..(74): Xaa is any amino acid
MGTQELFKPNSYVYFVGIKGTGVCALAELVLNWGIKVSGSDISEKFYTDEILQDLKIPYYEEFDAASADLSMWK

SEQ ID NO: 78726 - protein, 73 aa, Unknown
  Obtained from environmental sample
  misc_feature (1)..(73): Xaa is any amino acid
MLRERARIIRQVRSFFDDRGYLELDTPLLSPNLIPESCLEVFETRRILPSGSDEPLWLIPSPEIWMKKSSPAT

SEQ ID NO: 78727 - protein, 210 aa, Unknown
  Obtained from environmental sample
  DOMAIN (3)...(76): Biotin-requiring enzyme
  misc_feature (1)..(210): Xaa is any amino acid
MAERIIMPKQGLQMTEGTVVEWLVQEGGEVVEGQPLFTIETDKLTITIDALVSGTLLKIVAGPGDTVPITALIAVVGKPGEDISAILAEAPAASPAPGERVFISPRAKTLVEERGLDWRSLRGSGPDGMIVERDVLAAQECRSGVKATPLAAKVASIAGVDLADVRGSGDRGKIVRSDGERVPRARKAGEKKACPMRGMRKLIAERMKQN

SEQ ID NO: 78728 - protein, 112 aa, Unknown
  Obtained from environmental sample
  misc_feature (1)..(112): Xaa is any amino acid
MRKLILTATAVTAAIAGAFAGEPSFGTFTDSRDGQTYKTVKLKSKSGWDENENGTDDYGFSALPCGYRNDDGFFYDAGDYGNWWTATEGNSDNAYGRDMGYDYRHVNEGSNI

SEQ ID NO: 78729 - protein, 302 aa, Unknown
  Obtained from environmental sample
  DOMAIN (31)...(107): Helicase conserved C-terminal domain
  misc_feature (1)..(302): Xaa is any amino acid
KLLLGFLKREQPESAIIFCNTKRYTEIIAKRLRMNGYTCEFIVGDLPQSRRLKVIDDIKAGKTKLLVATDVAARGLDIEGLAMVVNYDLPNEAENYVHRIGRTARAGKTGRAITLASEQDVYELPAIERYIGKKLPSEIASADLHAEDSSAGQQIRTELYEDRREERHVHGKGMRPHVQKGRGGHDDSRGKKPSRESGVGSRESGDGKAVSRKQGKAPANEKHVKQHEPQDLSHLSFEERMALYKQKYHKSDKPAPQKHPRQIPTKKPHNQKLPKHAKREPITAPENRYLGDAALSIIWGKT

SEQ ID NO: 78730 - protein, 138 aa, Unknown
  Obtained from environmental sample
  misc_feature (1)..(138): Xaa is any amino acid
MIILIDTNILLDFLQNRETNGEYANKIIELCAKKTISGFMAAHSISNAFYILRTDYSVKERKEMLLGLCYIIDIVDIDKQKIITSLLNEDFTDIEDGLQIECAKRVNADYIVTRDLLGFSESGIEAISPIDFIKNCHN

SEQ ID NO: 78731 - protein, 319 aa, Unknown
  Obtained from environmental sample
  DOMAIN (150)...(301): UvrC Helix-hairpin-helix N-terminal
  misc_feature (1)..(319): Xaa is any amino acid
KRLENFSEGQRDRKILTPENKGLHGVAQGGSAPTFTVFPMEAARDRRAFFVPARRREVDFWKFLFDIYDSAGPPHAKIYLQNNEDTLLLSERNSELIKSWFNRQFGYEPQLLLPTEKHHSVILAMARQNAVEDLRKRLKERGAGPALDELLRVLNLQTKPERIEGFDISHLDGKHPVASLICFKNGVPDRKNYRYFKLRTVIGKKNDFAAMREAVQRRYSRLLREEKELPNLILVDGGIGQVNAAKTVLDDLGINCDIAGLAKREEELWMPGAKEPVVLSRQSEALKVLQFVRDECPRFATGPTRKLRSEALFFPVLDA

SEQ ID NO: 78732 - protein, 196 aa, Unknown
  Obtained from environmental sample
  DOMAIN (35)...(189): Domain of unknown function (DUF323)
  misc_feature (1)..(196): Xaa is any amino acid
MKNKLWVIVILTAFTLSATSCSAQSGGGGTTTSPTGIVMVSIPAGTFIMGSPTSETNRESNETQHSVTLSGFKMSKYQVTQEQYQAVMGSNPSVFSSNPQNLETQGKRPVERVSWYDALVFCNKLSIKEGLTPAYSISGKTNPAEWGTVPTSRNDATWDAVVIVSGSTGYRLPTEAQWEYACRARADLIHGGGDAG

SEQ ID NO: 78733 - protein, 165 aa, Unknown
  Obtained from environmental sample
  DOMAIN (1)...(154): Bacterial conjugation TrbI-like protein
  misc_feature (1)..(165): Xaa is any amino acid
MTGKKLVHTAGNHFAGKLFKLLPLESQKVQIAWESMVVNYGGVAYQVSLGGMAGVDKRGRAGIAGTLDDHYFEWLKAAGIVSLFTVLNSEITYQTKSQNNPQMRELMDINQGIVNRFGARLMERALDIQPSVKVANGTAVSVAVNTVVNLRPFPAIRAEEKWVRK

SEQ ID NO: 78734 - protein, 322 aa, Unknown
  Obtained from environmental sample
  DOMAIN (1)...(142): GAF domain
  misc_feature (1)..(322): Xaa is any amino acid
VMTNGIRPVADTAGLDRIVFYALTEVDGIKRLGQVYRWDKSEGGLMHLADELRVLPNTPVLEKWISVTSQGGYIRLRESDYSEDVAALARIYGIRSILIVPIFTHGNFWGVVNFQDHTNDRYFDEDCADLLYSAARVFANAIVREGYERNAQKTLKALERREKMSDTLNKVSIMFLSQREDTFEETMTAGVREIADLFNLDRLSIWRNMKKNNALHASQIYRWDRDTGGTTVPTPGLEDVAYSKLAPRWETVFANNEIINSPINLLPEAAMLRAFGVVSAFIAPDFINNDYGVSPSRRRHTERFFKKTAPNDAPRNLLCAIP

SEQ ID NO: 78735 - protein, 225 aa, Unknown
  Obtained from environmental sample
  DOMAIN (1)...(224): Domain of unknown function (DUF323)
  misc_feature (1)..(225): Xaa is any amino acid
MGSPANTNEARFFPDERPQHQVTVSSFYIGKYEVTQKEYQEVMGTNPSNFKGDNLPVEQVSWYDAVEYCNKRSQKEGLTPAYTRNGDNVTWNRNANGYRLPTEAEWEYACRAGTTTPFNTGNNITTSQANYDGNNPYPNNAKGTYREKTTTVGSFSPNVWGLYDMHGNVFEWCWDWYGAYGSGAQIDPMGADSGAYRMYRGGGWNYPAVGLRSSYRSCSSPSARE

SEQ ID NO: 78736 - protein, 303 aa, Unknown
  Obtained from environmental sample
  misc_feature (1)..(303): Xaa is any amino acid
MGATGDSYVLTIKQQGKQDKESKGTVSTIKADGELTLKPTKADDTFGVRISDGKMAAINGTITLEDGEKITAPGFFSVADMAAWVSAQPDNTADTPYTVKLNVNDLASIVSTLKANDTKYVSLDLSGATFTNIEDNVFSGCTSLAGITIPVSVTGIGNDAFSGCTSLASVTFEGMITSDNFGANPFLGDLRAKYITTGGGAGTYTTTVPVGGSSVWTKQGNSGNNDIVFTSIADMAAWLSAQPDNTADTAYAVKLNVNSLGGDAKTSGSAGNALSTNNTKYVSLDLSGSTMTTSCRSADLIIG

SEQ ID NO: 78737 - protein, 281 aa, Unknown
  Obtained from environmental sample
  DOMAIN (50)...(130): Cache domain
  misc_feature (1)..(281): Xaa is any amino acid
LGVNGFTVYLNVLEGVFLPGDVIGKPPDNFDLENRPFYIAAVEANGDIGVTQPYFNIAAEGEIITFVRSIFNEVNQPLGIICLNIFIERVKQHAINTQFAEKGYGFLLNQNMELIAHPDPSLLGKRLRNVRSYIAAYENELEKNGFIYEIIATDYRGIKSIVFIERLYNGWYMGVVTPYDKYYQTTRNMALFLTALGTALALILIIILGRISAEIREVTKKQADTEAQANQSKQSLSILTNILNGIDAQIYAVVPHTGEILFINDFMKKHYNLEGNRTGKF

SEQ ID NO: 78738 - protein, 261 aa, Unknown
  Obtained from environmental sample
  misc_feature (1)..(261): Xaa is any amino acid
GASCSVPPSDTAGSSAAGADGSAATGAGEAGSDFLADALPGLAGSAAFAAPSDFAGSAGLCAASALAGSVGLDGVSDLAGSVGLGVTSDLAGSAGLDGAGSVLAGSACLGGSAGLTGSDLTGSDLAGSGFTGSDLAGSAGFAAGSGLAGSACFAAGSGLTGSDLAGSAGFAAGSGLAGSACFAAGSGLTDSDLTGSAGFAAGSGLAGSGCFLDSAGGADLAGSGCFFGSAGGGAAGCGAVCAGASASGAGALAAAPPAFFS

SEQ ID NO: 78739 - protein, 319 aa, Unknown
  Obtained from environmental sample
  DOMAIN (133)...(297): Alpha-2-macroglobulin family N-terminal region
  misc_feature (1)..(319): Xaa is any amino acid
ALAAVYTRHPRQSAYSKWEYDIAKIAPSGVKDSLIAGQKVAVELKRVTWASYLTDSDFSSGKPKYMTNESVDLVEEREVVTGTNPTAIEFKNQKPGVYILALSSRDRLGRLQTVKIDLYLAGGEQQQAWKKAEQSVFETVMDRNSYEPGQQAKILLKSPYKKALALAVTEMPNGELSYKWVSVDNGQGTFTLDIKQEMAPRVPVSFLLMRPRASAPRRSSDGSSVDAGRPETVGNTTWLTVNPVANMLDVKLSHVPTVTPGSTLEVTINLRDIQGKARPGEVALWLVDEAVLSLRKEYSLDPLEAFRKRSRRTEHNDSR

SEQ ID NO: 78740 - protein, 211 aa, Unknown
  Obtained from environmental sample
  DOMAIN (5)...(205): Transketolase, thiamine diphosphate binding domain
  misc_feature (1)..(211): Xaa is any amino acid
MDIKALEKTALSVRALSIDAIEKANSGHPGLPLGAAELGAILYGELLKHDPSDPAWTDRDRFILSAGHGSMFLYSLLCLSGYKDMTLEQIKNFRQLGSRAAGHPEYGMAAGIEATSGPLGQGLAMAVGMAVAETMLAARFNTAAHKIVDHYTYALCGDGCLMEGVASEASSFAGHHGLGKLIVFYDSTRSPLTAARTSPLPRMSPNATKLT

SEQ ID NO: 78741 - protein, 298 aa, Unknown
  Obtained from environmental sample
  DOMAIN (73)...(297): tRNA synthetases class II core domain (F)
  misc_feature (1)..(298): Xaa is any amino acid
MSGIAKKRGAADAPFRQIDRETVVFAFTSEGGCVPAQEAAQALKAAGITGDEAGSLTQAMLESGSWKGKTFRSYNVKTPPVRLNPGRSSPYAKFLENVKDKLAALGFEEFDGPLVETEFWNSDALFMPQFHSARDIHDVYSIADPSSKSGNCGNSASGIALAKAIDEPWLSNVAAAHENGGKTGSRGWNYGFDRDFTRRLILRSQGTVLSAKSLPTAKVPGKYFGIVRCFRYDRVDATHLPDFYQTEGIVLGENVNLRTLLGMLDIFAREVAGAKEVKYVPGYFPLLNIRRSVWGGMP

SEQ ID NO: 78742 - protein, 87 aa, Unknown
  Obtained from environmental sample
  misc_feature (1)..(87): Xaa is any amino acid
MIICGQLTKLFDANSGIKNINLQFSPGTIYGIIGYNGSGKTTLLNCIEGLYIPTSGFVSHDDVKTTKIKISPIEKNRFSVHKRGKKR

SEQ ID NO: 78743 - protein, 306 aa, Unknown
  Obtained from environmental sample
  DOMAIN (78)...(215): ATPase family associated with various cellular activities (AAA)
  misc_feature (1)..(306): Xaa is any amino acid
NTTVSVILLVIYVDVDFKELDFLASGEGCMSADITELNERVKEESSFVSLLKAEMAKVIVGQSKMVDRLLVGLLTRGHILLEGVPGLAKTLAISTLAKAVDTGFKRIQFTPDLLPADIVGTMVYNQKSGEFVPKKGPIFSNIVLADEINRAPAKVQSALLEAMQECQVTIGDECYKLEEPFLVLATQNPIEQEGTYPLPEAQVDRFMLKLKVVYPSRDEEKEILKRMAAGPIPEVSPVIKVDKLLAARKLVTEIYMDSKVEDYIVNIVFATREPEAVGLGDMKSLISYGASPRATLSSRPDTVNVK

SEQ ID NO: 78744 - protein, 179 aa, Unknown
  Obtained from environmental sample
  misc_feature (1)..(179): Xaa is any amino acid
MNIAMAYVVSKQLEKSIVGKTICNVIANQNPHTFVWFATEPAQAFKDAKAAGDVAKYLINKTIESVNVNTGGYGLFNFINFGKRALLSDIVPRYTNIGEKHTKKHQLLLEFNNGSFLSFSASLGGALFLFEVDKNGDAIGYEPSSPLINSHEFTHDYLLALIDNNKGKILSVKQLLVIK

SEQ ID NO: 78745 - protein, 145 aa, Unknown
  Obtained from environmental sample
  misc_feature (1)..(145): Xaa is any amino acid
MDQIGRGLADARRYCRYGMAGFEIKRPQILNKNKKLRDTQEANIIYVREEQQDKAVEPLEWFLMTNEPVKSVEDAYEKAVWYMQRWKVEQFHYVLKSGCTVEKLQERSMEKTTMLVLMYSIIASAIMNITYVARIHPLLPCTVFF

SEQ ID NO: 78746 - protein, 62 aa, Unknown
  Obtained from environmental sample
  misc_feature (1)..(62): Xaa is any amino acid
ALRYKTGKNYPDNCMTANVFREDVEKCLQAGMNNHIGKPIDFDEIMNCLNTYIGAGEKQKKT

SEQ ID NO: 78747 - protein, 225 aa, Unknown
  Obtained from environmental sample
  misc_feature (1)..(225): Xaa is any amino acid
MKKEKTIIYKCSSCGHEEVKWLGRCPECGEWNTLVETVLKNENLNRRASAGKDSGVAQTMPLSAVDPMEGSRIGSGIGELDRVLGGGIMKRSAILVGGEPGIGKSTLLLQTAAAALTKGRVLYVSGEESAGQLRLRADRLGLSADKSVMERIEILCSGNLEEIETVLNKVKPVLVLVDSTQTLYSEQADSAPGGVSQMKFCTFELISGRRNMTLLLCHHPGGKTG

SEQ ID NO: 78748 - protein, 87 aa, Unknown
  Obtained from environmental sample
  misc_feature (1)..(87): Xaa is any amino acid
MEKKKSVSVSLEGVTKVFKNTKGKSDVIAVHESNFTVEAGELVTLLGPSGCGKTTTLRMIGGLELPTPGKILIGSEDVRSANLTHGK

SEQ ID NO: 78749 - protein, 203 aa, Unknown
  Obtained from environmental sample
  DOMAIN (9)...(75): ATP synthase alpha/beta family, beta-barrel domain
  misc_feature (1)..(203): Xaa is any amino acid
MRGVEYKGLSRIEGPVVVVARSRNVGFNEVVAIYDREKGRRLGRVVDMSEDWTAVQVFGSTTGLSADHSRVEFLGEPMKLRVGPGLLGRIFNGIGEPVDGYGDIFSSTCLDVNGLPINPYARTYPRDFIQTGISAIDGMNTLIRGQKLPIFSGNGLPHNRLAAQIVKQAKILHGSSESVNTNALLSYCAPWGSSNISWCPVRN

SEQ ID NO: 78750 - protein, 231 aa, Unknown
  Obtained from environmental sample
  DOMAIN (4)...(188): Queuosine biosynthesis protein
  misc_feature (1)..(231): Xaa is any amino acid
MVEELPEILCKSEFLSKDGRLPLLVFNNSKVRKARLIGVSEETGARVEFLLVEKLKSGSWKTIVKHAKRRRPLSRYVFYDTAGAQIARARIVLGINEFRILEFENPVSEDWLEKYGHVPLPPYIKREDVPSDAQRYQTIFAKETGSSAAPTAGLHFTREILDRLCANGIESVFITLHVGMGTFYPVRSENIEDHPMHSEAFSIDEDTARKNRSGEVLGGGKLSRVGDDQAY

SEQ ID NO: 78751 - protein, 61 aa, Unknown
  Obtained from environmental sample
  misc_feature (1)..(61): Xaa is any amino acid
MEKTLYQKIFEKYTVAKLPSGQYQLFIGLHLLHEVTSPQAFSMIREDGLPVLYTKSLFSNG

SEQ ID NO: 78752 - protein, 308 aa, Unknown
  Obtained from environmental sample
  DOMAIN (50)...(159): PCRF domain
  misc_feature (1)..(308): Xaa is any amino acid
EIEAKTAEPGFWNDQETVEKTMASLKSLKNRYEPWKALREETSDLQTLHELAIEAKDESEAAGIEKTFKNLTAKYEKHNLFELMAGEMDKNACFLTVHSGAGGTEACDWTQMLYRMYLRWAEQKGFSVEEVDQQEAEGGLKSATCRVDGEYAYGYLKGESGIHRLVRISPFDANARRHTSFASVYIFPVIDDTIEVDIKPEDLRVDTYRSGGAGGQHVNKTDSAVRFTHLPTGIVVACQNERSQIKNRAIAMSMLKARLYEYYRQEKEKENAKFSQEKKDISWGHQIRSYVFQPIRGKRSVDLSGGKW

SEQ ID NO: 78753 - protein, 177 aa, Unknown
  Obtained from environmental sample
  DOMAIN (1)...(162): TatD related DNase
  misc_feature (1)..(177): Xaa is any amino acid
MLVDAHCHPFDLVGHLENAEEERRNLGVICASSATTLKEFEYCEKLSLKAKKDNAPPLLPCFAVHPQMPLTLGNGTQMFLQDSLSVLDMLAAKKRLCAIGETGFDLYNAAFKETEGIQDELFAAHLETALRYDLPLVIHSRRAMHKVFANAAALKNAGRYFSFMVRHSRGGRSFANA

SEQ ID NO: 78754 - protein, 157 aa, Unknown
  Obtained from environmental sample
  DOMAIN (21)...(156): Sir2 family
  misc_feature (1)..(157): Xaa is any amino acid
MSVGELYKWICEAKHLVAFTGAGVSTLSGIRDFRGKNGIANGETVFNIDIFEEDPSVYYDNARSLIYNIDEKEPSVVHTVLGELEKRGILKAVITQNIDLLHQKGGSSNVIEVHGSPKIHYCLRCPGVRMAFKEAAAIVRSGGMPQCPKCGRLLKPA

SEQ ID NO: 78755 - protein, 336 aa, Unknown
  Obtained from environmental sample
  DOMAIN (173)...(232): KH domain
  misc_feature (1)..(336): Xaa is any amino acid
FLPRVYGERPSANPDAIKEAEAKRKEILLEAKEKVIQERNQQEKETRERRAELQRLERRVVQKEDALDKKVAQIERTEQSLADKEKQCQERENALSREEERYRAELERISGLSAEEAKALIIKDLENEARHDAQALINKIEQEANLAGEKKAKDILVATIQRFASEVTGDVTVTTVNLPNDEMKGRIIGREGRNIRTLETLTGVDIIIDDTPEAVVISCFDPVRREIAKVALERLILDGRIHPARIEEIVTKVSKDTSQKIFEEGEKVLFDLGIHNIKQDAIRALGRLYFRTSYGQNVLKHSREVAVIAGMLAAEHRCNRDLTQRGGPSARHRAGH

SEQ ID NO: 78756 - protein, 317 aa, Unknown
  Obtained from environmental sample
  DOMAIN (169)...(256): Hpt domain
  misc_feature (1)..(317): Xaa is any amino acid
MATVNACVNGLQAIELIKQHEYDVCFMDHMMPDMDGIETTAVIRLWEKELQKKSEINRKQIPIIALTANAVVGMREMFIENGFNDFLSKPIDVSKLDEMLDRWIPKERRDQGPDNSEQLTINNEQLAISNEGQDTHPPVPGPQSLIPIPGLDVQKGIYMTGGTVDVYTQVLSLFCIDARDRLPLLQKAPEITALSAFITQVHALKSALASIGAAGISTIAAGLEAAGKAADMAFIREHLPAFAQQLEELIKNIQTALQLNEPAAPQSPVPKAALPPPQSLFQELADALRAQKISEIKRILNDLNQQTRDQNSGTRPI

SEQ ID NO: 78757 - protein, 77 aa, Unknown
  Obtained from environmental sample
  misc_feature (1)..(77): Xaa is any amino acid
MDQIGRADAREFQTTIEDVAHWAGVSVSEAREILHTFVVQNRLEMYSTRMVVKNINDFARIVTARRKQAKNPTGIKT

SEQ ID NO: 78758 - protein, 326 aa, Unknown
  Obtained from environmental sample
  DOMAIN (238)...(325): Histidine kinase-, DNA gyrase B-, and HSP90-like ATPase
  misc_feature (1)..(326): Xaa is any amino acid
MAEFLISSLYYIIYFRFLRRNRKKSIEDDGDEASDLHIGGILIGMVLSYLCGNFDILDALFFRMSIRLFTYSIFAVHIGMVFILSQRFSGMYKRLEQSNAMLENKVHERTLELEKQAIIALQASMSKSDFLAKMSHEIRTPMNAIIGMAELALREDRHEAAQEHIITIKQAGNNLVSIINDILDFSKIEAGKLEIIPVSYMLSSLINDTVNIIRMRLMEKPMRFFTNIDGNIPNNLIGDEARLRQILLNLLSNAVKYSEKGHIGLTITVDKRDDKQVWLTIAVADTGKGIKPEDHARLLDEFVQVDMKKKQRVEGTGLGLAIQPSL

SEQ ID NO: 78759 - protein, 85 aa, Unknown
  Obtained from environmental sample
  misc_feature (1)..(85): Xaa is any amino acid
VYLKGSKNIDIAHKFIDFIQRPEIYAEFADIFGFPATANIPARSFKTGDSWYTEAELANVEVKKDIGNDLELYNEAWFNSIRIDK

SEQ ID NO: 78760 - protein, 330 aa, Unknown
  Obtained from environmental sample
  misc_feature (1)..(330): Xaa is any amino acid
LSARISRRIFKPNPAFLVPALNLGLLDDIDAVEELFAARNSAPASSAESAADSAADSAADSAQPAAVLDKDIIVNVWKLLRSERGRNHLARKLQVFSGVITEDEDHDGYAESRTVYKQGVIEEYYFDADQDRIEDVAITFNSGAPQWARMPALPAVVFWESYPSVQRAVLESGYYLPAPGGFRFAPLEFIEICASDTTPGLLYPQREPLQQNITRRMLASFAVSVQQPSVEFAGGIEHIYLENGIPLRAEVILDNKIVSFTEFENGRPVIQWLDLDADGRMETVPRFRRTFFTGRFALNWDELQARLSQTGPGFQPTAGIIGKRLETATA

SEQ ID NO: 78761 - protein, 272 aa, Unknown
  Obtained from environmental sample
  DOMAIN (4)...(257): Phage portal protein
  misc_feature (1)..(272): Xaa is any amino acid
FPRVYGRDYWNCKYTGGSNYKNKPHRWFYHDNTELIPILSDEIIHFRDFNPFNPVRGVNPLLSLALELEQDFYANKANSQLLKNNAIPQGILKTEQTLRPEEADQLERRWESKYGAVKAGRKIAVLGRGTEFKPVTFSPDVIKLFELKKWNLYTILAKYGIPPRVANISDKTTSLSGKDTAEQHAAFWKYTLIPTLKQFEQILETQFFIRFGLKERGIFDLFDIPELPENEDQQSKRDIAENNAGIKTINDVLRERGKKLNRGATFGINLKI

SEQ ID NO: 78762 - protein, 117 aa, Unknown
  Obtained from environmental sample
  misc_feature (1)..(117): Xaa is any amino acid
MLPLYPNLIPINLDLREQIQNIILESKTDASAFTFANLYLFRTKYNFNMSLLENSLFITGAEKGQTFFSILGNLPQKEVLTELLKKHDYWKSISQEAAVKLNALLPSETVSEDRNIL

SEQ ID NO: 78763 - protein, 258 aa, Unknown
  Obtained from environmental sample
  misc_feature (1)..(258): Xaa is any amino acid
MVKTIFRTMLLALLSSAPLFAAADVTEERVCTVAGVMGSVQVRYSPNANKMRREPAVAKGMAVAHVSGSITDVWSNLRQGMVVGEKCEIKTGPESEVRLETADGTILKVEENAFVEVAALQAVTKKAKAKGAAPETTVNAKFKLIYGSLVGNIKKLTHENPNVKFETPTATAAIRGTVIEVEVDRSSNTLIRAFEGTIHVSPVGSKRIVEVGDGKMVEIAPKQTALLVRDVPKGYKRKSFLLRGEKASAAIKESKRSD

SEQ ID NO: 78764 - protein, 294 aa, Unknown
  Obtained from environmental sample
  misc_feature (1)..(294): Xaa is any amino acid
MGAGLRDDLYHNGELLTCILEEYYFKNGWFLVLNGDIEELHRYSLDEIRENWAGLYRVFNLFNRENRLYKIIGNHDDKLLFLRNTSYTYPIHTLIKIETGVIPAYVYHGHQLSSFYVKFNWLLGLLVRFILKPFGIKNITDSRSPLKRFQIEKMAYAFSLKNNCLSIIGHTHRALFESLGRFDYIKFEIERLCHDYPSSSGEDRNRIENEVTALRKELGKLKRKERRDVLRQSLYGDELPVPCLFNSGCAVGKKGLTAIEMTQQDIALVYWLTERKSKKFVTRGGLRHRKHPPQ

SEQ ID NO: 78765 - protein, 122 aa, Unknown
  Obtained from environmental sample
  misc_feature (1)..(122): Xaa is any amino acid
MKEKKTDTEDTALIREDGVHTLGVVNLHKKFGKKEVVKGVNFTMQNGEVAGLLGPNGAGKTTIFYMIVGFLAPTQGIVTMNDINITPKHMYRRARMGIAYLPQEASIFASSRLGHLIMGGEF

SEQ ID NO: 78766 - protein, 330 aa, Unknown
  Obtained from environmental sample
  misc_feature (1)..(330): Xaa is any amino acid
DQNRSGFFLLVRQGEGSFTGEWSEHPNFGNQFFVASCEVLQPEGENGLIDYLASGIFTGIGEKTAEKLVGVFGENLPRILDTNPMQLRGAVKGLSGKRLEKFIDDWGLQQESRKSLLFLYKLGFTGAKAMLAWNLYKTQTEDIVSENPYTMCEEPFAYPFEIADNAAKKIGFEESSGLRLRAAILHVLREAKFDGGHSFMPPENLLQNALNFLRITPSFPDDDIFDYLYSALSDLKKAEKVIIQQERVWLPELYEAEKYIGTFIRRALNFGELEALHSDAEINAAASSLEISYSNEQLKAIKDAVSNMFFVITGGPGTGKTTILKGILHI

SEQ ID NO: 78767 - protein, 303 aa, Unknown
  Obtained from environmental sample
  DOMAIN (1)...(283): Isocitrate/isopropylmalate dehydrogenase
  misc_feature (1)..(303): Xaa is any amino acid
MGETEALLLGAVGDPRVKPGPLEQELLLALRFHFDQYLNLRPARSFPGAPTPLPLPDGRRLDAVVVRENTEDFYMGLGGRGQGRLETDLRTRRGLYGLTGRLTLSLDPAAEAAASIGLLTRPGVARITRRAGELARRRGERNLTVATKANAVPQLYGFWNEVTRETAAAEFPNLTLDYQNVDALAYLLPRQPVDFGVILCPNLFGDIISDLLSALAGGLGLAASGNIGDGLSMFEPVHGSAPDPGRHRPGQPTGGHTLHALMLRHLGEDPARPGPGNRPGPTIWPGPDQPWGTGPAGTRRETG

SEQ ID NO: 78768 - protein, 100 aa, Unknown
  Obtained from environmental sample
  misc_feature (1)..(100): Xaa is any amino acid
MVFSKIQSDGFQEKIKAFVADFGWPRLIIFFFVVALFIVAPFVGINIDSSFKDVLVRFGQNGIMVLALVPMMQSGSGLNFGLPVGMSPASWSTRHNPGKN

SEQ ID NO: 78769 - protein, 146 aa, Unknown
  Obtained from environmental sample
  DOMAIN (1)...(104): Methylpurine-DNA glycosylase (MPG)
  misc_feature (1)..(146): Xaa is any amino acid
LPKYCKRKKSEREAVLIRALEPVSGIEIMQKRRKTKKPENLCNGPGKLTQAFGITRKQNNKSLLTGDFRIYDSKIKPEITITTRIGLTLGKELPLRFYITGNPFVSGRLHTKITKVHKDHKGNIKKSFIQAAGNSLCCPSRIFPSV

SEQ ID NO: 78770 - protein, 86 aa, Unknown
  Obtained from environmental sample
  misc_feature (1)..(86): Xaa is any amino acid
WSPNDRSAEHRRGEEGVLDRLTVKTEVGPSIFMDDARPLNALKERIRETLQASISISPRVELHESGSLPVSEGKAVRVQDTRPKDV

SEQ ID NO: 78771 - protein, 304 aa, Unknown
  Obtained from environmental sample
  DOMAIN (14)...(101): OB-fold nucleic acid binding domain
  misc_feature (1)..(304): Xaa is any amino acid
LAWSCERADTGKTVIFKGRVLRKWESGPVFFLLTCATDYGVTQVSVNNRGKAGGLPPFGMNYANDYVIAVEGNVSLRPDGMVNPAMETGEIEVTASKLVILYKAEILPFQIDEESKASEETRLKYRYLDLRSAAMQKTIKMRSETAFAVREWMTSNGFYEIETPTFIKSSPEGARDYLVPSRLSPGKFYALPQSPQLYKQILMVAGFDKYFQIARCYRDEDSRGDRQPEFTQIDTEMSFVSRDDVLTVTEGLMRHVFKKVLGKDIPQKFTRLTREDPMEFYGSDKPDTPFLMSAILLSRRPGTN

SEQ ID NO: 78772 - protein, 126 aa, Unknown
  Obtained from environmental sample
  misc_feature (1)..(126): Xaa is any amino acid
MTFNIASRDSSSSARTGVLKLPHGPVSTPVFMPVGTCGTVKAITVEDLKEIGFEIILSNTYHLYLRPGMDVMSAAGGLHQFMAWDRNLLTDSGGFQVFSLSLLRKVLPEGVCSSRNLGQSDTWGGK

SEQ ID NO: 78773 - protein, 255 aa, Unknown
  Obtained from environmental sample
  DOMAIN (15)...(107): Isoamylase N-terminal domain
  misc_feature (1)..(255): Xaa is any amino acid
MHLDNIVAENGKALPLGAELVGDGVNFAVFSRNASAITLILFESAEPGSKWVEIPLDKRGNKTGNIWHCFIKGLKAGTCYLYRADGPYFPEKGLRFNRNKTLIDPYAKALTDISGWDYGKCAGYDFDKPGHDLTYSYVDNIDSQPRSIVIDDKFDWQGDTPVNYPLRFSVIYEAHVKGLTAHHSSKVKHPGTYRGVIEKIPYLKDLRITSIEFLPVQDFTKRNFRIHPDTGEELSNFWGYFTASFFAPKVLTLRQ

SEQ ID NO: 78774 - protein, 164 aa, Unknown
  Obtained from environmental sample
  misc_feature (1)..(164): Xaa is any amino acid
NPRLAAASTTRWIPWAERIQGTVFWSYRFNSRILKDRFFMLLFIPRVLTITDIPATYASMINIDNTNPEIALDSPADGSLSIGRLSLMGRVIDANLDNVNIEIRSLEGATVTPTVRTRKLGATDTIKQDYELTGMKDGLYNIEIVSTDKAGNLSRNSRNFALAR

SEQ ID NO: 78775 - protein, 263 aa, Unknown
  Obtained from environmental sample
  DOMAIN (1)...(263): Glycosyl hydrolase family 20, catalytic domain
  misc_feature (1)..(263): Xaa is any amino acid
LDALSLHHISIFHWHLTDDQGWRLPVRQYPLLTEIGSKRRDHRRHDEFTGGFYTEAEIRDIVEYAALRHIEVVPEIDLPGHTSAVLAAYPGLGCTGGPYRVEDRYSIFEDVLCAGNDDIFSLTEALFDTLSELFPSKYVHIGGDEVRFNRWAECPKCKKRLHELDLKKPAQLQSWITSRLAAMLQQRGKTAIGWDEVLENNEKFPLPDEFIVMSWRGQKGGAKAAARGHRVIMAPYQTAVIWIYNTSTILKNPASSTSTQSRN

SEQ ID NO: 78776 - protein, 251 aa, Unknown
  Obtained from environmental sample
  misc_feature (1)..(251): Xaa is any amino acid
LGLALVLAIWLSDVRLHLAGKGLFRAVVYMPNLLTAASVALLFRSIFGYGGHVTAPANQFLRLFNIQDTVRLFDSVLNKFVEQKEAFNFFRSVAFSRGLVSFIQWWMWYGYTLIILMAGITTISPSLYESAVIDGANSRQTTWYITLPLLRPIMLYILVTSAIGGMQMFDIPFLLTDMQGAPAYKIRNFTVYQYNMALGRGANDYAYGAAISIGIFLVTIVLALLIFFSLQDRSGFKKQKGAGNGFNRGRS

SEQ ID NO: 78777 - protein, 146 aa, Unknown
  Obtained from environmental sample
  misc_feature (1)..(146): Xaa is any amino acid
MFGTALEISAAIKAKKISVAEAVSAYIEKAEKNDKQFNAFLALSKESALKRAKEIQALIDKGEELSPLAGTPIALKDNISTIGLETTCASKILRGINSVHATITENFDRRNDRYRNSHGRVALGGQRDGGVRAAHTMGTTESAEVS

SEQ ID NO: 78778 - protein, 63 aa, Unknown
  Obtained from environmental sample
  misc_feature (1)..(63): Xaa is any amino acid
GSPIDQIGRGTACYTIDVPYGTQLGGNIHDMQRYIIDNIEHYTGILIEEVNIIIDKITEQNAN

SEQ ID NO: 78779 - protein, 128 aa, Unknown
  Obtained from environmental sample
  misc_feature (1)..(128): Xaa is any amino acid
GFTTLRFGTREGGGKLGIGFQILDDVKNLTTGIPGKKRGDDIVEGKKSLPVLLFLKRQPEKKEMVCRCFAASRANGVSAPETEELIQALAACGVIKEAEEQGLALIAGARKVFEKTSAPLAGLLDLIS

SEQ ID NO: 78780 - protein, 167 aa, Unknown
  Obtained from environmental sample
  misc_feature (1)..(167): Xaa is any amino acid
TGYYRLNYPNVEVRQTLAQFLSTIISKADGALKNSASVRFVKTLLDGKPDDFMNLLKNYLQKVDYSLSSKITEYYFEFAVSNIINMLGLVCVNEVHTANGRMDSVIFAGDYIYILEFKTDKPVEDALWQIEEKDYASIYSDKGKKPVKIGIVFSREARNIVEWKSDL

SEQ ID NO: 78781 - protein, 97 aa, Unknown
  Obtained from environmental sample
  misc_feature (1)..(97): Xaa is any amino acid
NGQIILPKEMREALGIESGGHVALVRKDKQVVMMNPVLQAMSELQEHMNGKFEEAGLYTDDDIMELVREIRYEIEGIPYEPPTRAPQTADTVSQAAV

SEQ ID NO: 78782 - protein, 93 aa, Unknown
  Obtained from environmental sample
  misc_feature (1)..(93): Xaa is any amino acid
EYFQDLFTGRFSFASTLVYVAMGWLLLVAGNRFFVVLPTPVLIMVMVGGVLYTLGSVFYLNKKIYHNHAIWHLFVLSAAICHYVAVLLAVILK

SEQ ID NO: 78783 - protein, 77 aa, Unknown
  Obtained from environmental sample
  misc_feature (1)..(77): Xaa is any amino acid
MRIERKLNEACAVFGVSLTTEEAAGVTYNGLLSLQHRGQEGAGIAVVNGEHILCHKDTGLVSEVFSGTELEHLLKGR

SEQ ID NO: 78784 - protein, 331 aa, Unknown
  Obtained from environmental sample
  DOMAIN (136)...(293): Integrase core domain
  misc_feature (1)..(331): Xaa is any amino acid
MTPKTRILEEFCAVCGYNRKYAIRLLNATPRYGKVARGRKPKYTGKRFTQVLQAIWKASDFMCSDRLKAVIPLWLPHYEQTHGNIEDDTKTLLLSVSPATLDRILKPIRSRYGKGLSGTKPGLMLRNQIPVRTSHWNIDSPGYMEADTVAHCGSNLAGEFVWSLTMTDIHTGWTVCRAVWNKSAEGIVVQIVDIERNLPFELLGFDCDNGAEFINHSLMRFLTNRPKPVEFTRSRPYKKNDNAHVEQKNWTHARQLFGYYRVDDPNAVALINDLYATEWSLYQNYYCPSQKLITKTKIGSKYCKTYEKPLHRIKDFLNSTLYRRKQKAFGY

SEQ ID NO: 78785 - protein, 127 aa, Unknown
  Obtained from environmental sample
  DOMAIN (5)...(67): DnaJ domain
  misc_feature (1)..(127): Xaa is any amino acid
MAKRDYYEVLGVPKDASADDIKRAYKKLAIKYHPDKNPGDKEAEAKFKEAAEAYDVLSDSQKKAQYDRFGHEGLNSGGFGGGFSSGGFSFEDIFSHFGDIFADIGGFGGFSGSHQVREAGGLPPAKI

SEQ ID NO: 78786 - protein, 122 aa, Unknown
  Obtained from environmental sample
  DOMAIN (4)...(86): ATP synthase, Delta/Epsilon chain, beta-sandwich domain
  misc_feature (1)..(122): Xaa is any amino acid
MSALFTFEVHTPKRLFYSGKVQAITINLDDGEIGIYANHAPFSAHSVTGMLRIKDDSGNWRSAFVCGGILEVKEHKNVLMVESAQWPEEIDVERVLELKKQAEETLKDTHLKLDLGRSVMGN

SEQ ID NO: 78787 - protein, 134 aa, Unknown
  Obtained from environmental sample
  misc_feature (1)..(134): Xaa is any amino acid
MICFTGVFMRRIAVIFIIACNITAGAFGQNKKVPDAVIKAFKGTGIQAAAEGIDPIDFTLPLLDGTTITLSQFKGKVVFLNFWATWCGPCRSEMPSMEAVYQRLKSRGFEILAVNLGESKDKVSALELAIKPKK

SEQ ID NO: 78788 - protein, 328 aa, Unknown
  Obtained from environmental sample
  misc_feature (1)..(328): Xaa is any amino acid
VCRGALVGKRFKGFMPSTDDDELPGTVDIDDAFADNAPEPETSDTKSADVKSSDIKSDDFDLPETSFDEGLDLGGDTSSDVPSVDVPSADIPFEAEPPEEHIDLGGESPDFDMPEFSAEPSASEDFGFEGDTSSGSGLPDESEFTQTEPDGLDLPDFDMGEPAESSGADDSGGLPDMDLGGEFSSDQIDLENEPQAEGESAGGAPAADFGDDSFDLPGLDDLFDKKTEAAPKPAPKKSFFKRKKEPVVEEEEEHELGDSDEINLSQSDVDKLLATIASYPLNLRVACQELIAEQVILPQQLSKLIPMPNPRRPCKRNGGVPRQILGKE

SEQ ID NO: 78789 - protein, 305 aa, Unknown
  Obtained from environmental sample
  misc_feature (1)..(305): Xaa is any amino acid
MAEGLRDEIAAMKDSMKIGLFFMDSNLVIQDHYSRYLEEMLSETELFGRTFTDVIADSVTPNELKSIKDYFEMVIEQTFDQEMLDDINPLNELHYVNARTNDRKVFQCGFATVEQARGDVFILVTVYDITAKVELQKRLAEEQNKRQEEMQSVFELIQVEPSVFADFKEDIEYEFNAIDKVLKDKQLSTHEALVKIYQSVHAIKSNAVILGLNVFGTKVHALESMIKKLREQEEEVPFSEMLNLTMNIEKLSNEREGFKIILDKLQSHTKGGDQKQNVNILIESLAKTVEKARRRYGKESTVCQQ

SEQ ID NO: 78790 - protein, 63 aa, Unknown
  Obtained from environmental sample
  misc_feature (1)..(63): Xaa is any amino acid
MTKRLLVRDGDSVEAGEPLCMGAINPHDIFHILVKSNFQRYLMNESSRCTTFRACPSTINTSA

SEQ ID NO: 78791 - protein, 335 aa, Unknown
  Obtained from environmental sample
  DOMAIN (114)...(321): Nicotinate phosphoribosyltransferase (NAPRTase) family
  misc_feature (1)..(335): Xaa is any amino acid
VGSRSTAGYAIFAVLETLLDNLESFSFSDEDIGYLKSLGMFEDGFTEYLRNFRFSGSVWAMDEGTVIFPQEPLVRIEGSLIECQIIEGMLLNTINFQSLIATKARRVWLASGKGSFMEFGLRRAQGPDGALSASRAAYIGGAVGTSNALAGKTFDIPVMGTMAHSWVMSFPSEEEAFQAYAELYPDKAIFLIDTYDTLKSGVISAINVGKKLKERGKNFGIRLDSGDIQYLSTEVRKLLNNAGLNDATITASNDLDESIIETLVNSGVPVDIWGVGTRLVTGGDDAAFTGVYKMTACEDANGHMIPVMKFSDNPEKTTNPGPKQVWLGQSDTWEP

SEQ ID NO: 78792 - protein, 90 aa, Unknown
  Obtained from environmental sample
  DOMAIN (1)...(88): Elongation factor TS
  misc_feature (1)..(90): Xaa is any amino acid
MIAGSSLRQEEIFSKQMEQDEKLKGKPENVLKGILQGKVNKYLSEICLLEQGYVKDEKLTVAKAVEECAKKSGAKLSINDFVYYKVGTAE

SEQ ID NO: 78793 - protein, 63 aa, Unknown
  Obtained from environmental sample
  misc_feature (1)..(63): Xaa is any amino acid
MQKPLHVGIIMDGNGRWAKHRGLVRTKGHLEGLAAAKRNVKAASEMGHKIFDRFTRFSTENWK

SEQ ID NO: 78794 - protein, 174 aa, Unknown
  Obtained from environmental sample
  misc_feature (1)..(174): Xaa is any amino acid
LVKFKHRFNDGDDIAALLEAVKTAVLRHGSLGGCFSDCLTRSGGQFKAALTLFTDELKGVLKDGAASRPSFEYLIPSPARGSACKRMALYLRWMVRKDDGIDLGVWKDVPPSILLVPVDTHVAQIARHYGLTTRNAADWKMAEEITSALRKFDPEDPVRFDFSLCHAGMVSYRN

SEQ ID NO: 78795 - protein, 333 aa, Unknown
  Obtained from environmental sample
  DOMAIN (1)...(326): Histidinol dehydrogenase
  misc_feature (1)..(333): Xaa is any amino acid
MIRSAEAVYVPGGRFPLFSSVLMCVIPALCAGVDEVLFSSPPTADGLPDLKILAAAAIAAKAAGITIADNENAHNNRFRVFTVGGAQAIAAFAFGTESVPRADVIAGPGNKYVAAAKRLLYGQVGIDFIAGPSDVLVIADNTSIQSADIIAADMIAQAEHDPDARARAIVPDREFADKIIAAIEKRLTILSTAKTAGASLENGLIIICNNKEESVRIANKIAPEHLELQTADTDSWIPQLKNYGSLFIGSLSAEVLGDYSAGINHTLPTSGSARFTGGLAVRHFLKTVTTLRCASGEALKKAERGGILAAPNGWKPCASAASRKRNKVHYVFY

SEQ ID NO: 78796 - protein, 311 aa, Unknown
  Obtained from environmental sample
  DOMAIN (18)...(84): His Kinase A (phosphoacceptor) domain
  misc_feature (1)..(311): Xaa is any amino acid
MLQDKERQKEEAQAANRAKSTFLANMSHELRTPLNVIIGLTGLMMEDRHLDKSVTDNLIKISNAGSTLLSIVNDILDLSKIESGKLEITPDEYYMASILNDTVTLTLARIGEKNLKFHLNIDDNLPYKLYGDDLRVKQIFTNLLTNAVKYTDEGSVELNVRCERESDTVWINAAVTDTGIGISAEDMENLFLDYQRIDSKSNHHVEGTGLGLSITKNLVEMMGGKIKAESEYGKGSTFSFRIKQGFISEAVLGAEISDKLRNFCYTDDKRVVSQKLVRIDLSYANVLVVDDITMNLDVASRILSSYKMKVD

SEQ ID NO: 78797 - protein, 338 aa, Unknown
  Obtained from environmental sample
  misc_feature (1)..(338): Xaa is any amino acid
WYNKRADLMLTGRTLVGAPSRNEWQAEDQRDGSINERVITYMKEVISHNGNTIFHNVSTLNQYKTTFPIEHDLVLPEIMDKVAMRHKLVFLPHEKPFSGVSGSGKRVIWSLFDDNSGNLFETGGTMEEKLLFLTLAVSVIHAAYRHGDLLRAAAASAGNERRLGVNEAPSAIMSVSLGGQLTKIITAIDAGKAEKGKKRDLAEICAALPPKFTNDKTESNRTSPVAFTGTEFEFRMPGGSMNVSTAVTVINTIVADAMKTICDRIKKELNKCKGDKHAAAACESEAKDTDGSGESGGQHGNIGNQAAAAVMNVLSAIIKESKPVLLTATTRANLSMGN

SEQ ID NO: 78798 - protein, 179 aa, Unknown
  Obtained from environmental sample
  misc_feature (1)..(179): Xaa is any amino acid
MPFTRRVECEFEAQYLEELTEIAKKANHIEPELYKKYSVMRGLRKADSTGVLVGLTNIGSVHGYIMDEGEKVPVTGRLRYRGIDVIDIVEGFQRDKRFGYNEVAYLLLFGSLPNEGQIKHFRGMLDACRDLPDGFMENMIPQAPTPNIMNSLARSVLASYSYDTDPGFIDIKKRFAPLH

SEQ ID NO: 78799 - protein, 196 aa, Unknown
  Obtained from environmental sample
  misc_feature (1)..(196): Xaa is any amino acid
MWQTSFGSGMFDKVAETAGGLDLCVSNAGVLRAGSVLEQELADFKFVTDINYTGFFIISKFAGRLLRAQHYTAPDWKTDIIQINSKSGLEGSNKNGAYAGGKFGGLGLVASFAMELVEYNIKVNAVCPGNFLDGPLWSHPEKGLFAQYLNTGKVPGAKTVADVRAFYESKVPMKRGCTGKDLVRAIYYIVEQARPI

SEQ ID NO: 78800 - protein, 304 aa, Unknown
  Obtained from environmental sample
  DOMAIN (39)...(159): Glycosyl hydrolase family 20, domain 2
  misc_feature (1)..(304): Xaa is any amino acid
PGLWRDPDRFLHIIPEFPCRGLPLPELSENNEVQVFNAQLINTWGKKACTENSSKIKLQESCVNVNATDTANYVGTANYVGTANYVGTANYVGTANYVGTANAVGEESYQLEILPDEIRLSAAAGTGMFRGLQTLRQLFLSGYNGGVLSVPCGIIGDKPRFPWRGFMLDCSRYFYSTEFIKKILDALSLHHINIFHWHLTDDQGWRLPVKKYPLLTEIGSKRRDHRLHDEFVGGYYTEAEIQDIVEYAAARHIEVVPEIDLPGHTSAILAAYPGLGCTGGPYRVEDRYSIFEDVLCAGNDDIFP

SEQ ID NO: 78801 - protein, 326 aa, Unknown
  Obtained from environmental sample
  DOMAIN (3)...(302): Glycosyl hydrolases family 8
  misc_feature (1)..(326): Xaa is any amino acid
SPPVNLAVVWLYRQRYKIFGVYKGWEGEHDGYTGFTITKNGLKTAPFTRDPEDGDSATDGDMDIIYSLIIADKQWGSDGRYNYLEIARAMLADLWQYCVHSTYKTMLLGDWASKGGDKGNPALAQIQMNATRPSDFIISHLKAYKAVDSAHNWQEVIDATYGVIKDVYADVKAKHGAGRGLLPDFVIRNNANTAWVVPEGHVLEEDTDGSYSYNSCRIPWRLGVDFLLYGGNTTIAGYDMFAETIQPLDKLATEIYEKSDLDTFGPLTITGDGIWNTDNWDEFWDDAPSFTAPFLVTAAATGNKDLVNEMGNGRHKELGRSDPCFP

SEQ ID NO: 78802 - protein, 93 aa, Unknown
  Obtained from environmental sample
  DOMAIN (5)...(69): Heavy-metal-associated domain
  misc_feature (1)..(93): Xaa is any amino acid
MNSETLSIGGMTCAACSARVERALRKLEGVESAAVNLATEKATVVYDSHTLRLSAIKEAVIKAGYQVLEVSSDTVDEDKRPQQKGNKTLWIKL

SEQ ID NO: 78803 - protein, 99 aa, Unknown
  Obtained from environmental sample
  misc_feature (1)..(99): Xaa is any amino acid
KRQRALSISFPQWAYRAFGAKIATDLASMSGASVSVTNIPAAIGFGIHTPSQAAQMAGIADGVIVGSAIVKIIAEHGGAAGPHIYRYVKEMKEAAGGKK

SEQ ID NO: 78804 - protein, 73 aa, Unknown
  Obtained from environmental sample
  DOMAIN (4)...(68): Surface presentation of antigens (SPOA) protein
  misc_feature (1)..(73): Xaa is any amino acid
MHASRRDWSPQLSVRDFLQLSVGDVMVLDKLAQSDLTMYIEDRPKFLGKPGVIGRSKSFQITGIIDREVGDDD

SEQ ID NO: 78805 - protein, 307 aa, Unknown
  Obtained from environmental sample
  misc_feature (1)..(307): Xaa is any amino acid
LNAKRALQCQTLVNLQWQEIDALPLIERISAIENQIREMRDGNKVLREISGRINGQKAIVSRADEDLREARMEHENTIRQLKESNTDLGRLQNDPSIVPLTPFQKKGLDAYFARITDNIRLDNLGDITTSVVQVLGEERKDVSRDIAGYEKQIESIFTEFKRSWPQDAGDLDTSLSSASDFFSKLTRLETDGLPAYEQRFFDLLQDQSNQNLAALSTYLNDARKTIHERMELVNESLSQVPFNKSINQQTYLHIDASDRQLPEVKEFKQDLQQALSHAWGEERDLAEARDSYTAKTRANLYMGGEWG

SEQ ID NO: 78806 - protein, 338 aa, Unknown
  Obtained from environmental sample
  misc_feature (1)..(338): Xaa is any amino acid
MAEIVFDEPPDMFDESQDVFNEPADVINEHGGGVERDSQGEMSTQLLMKIADELSSIRTELTTLKKEFTGIRAESGYSGTEKPRSGFFAEDDEEKVALTGDEMENILSSADLSSEESLPFDPLREEDEAALKRLSEQNEAINNLSEQEEAASPEEDAVAEEIEFDFEDLGIQLDSDDDTDAQSIEAEGMSDDFPTLDDTDELQELREEGVSPLTEDDPFSLSDAGSGDISLNEDNTDVRLAPQPSLQGVEPEVRGSPLAPQPSLQGVEPEVRGSPLAPQPSLQGEGSPLDETDFSFHFDDISIDTQTTDDTLSLDDTLSLDDPLSLDDTLSLDDTASL

SEQ ID NO: 78807 - protein, 65 aa, Unknown
  Obtained from environmental sample
  misc_feature (1)..(65): Xaa is any amino acid
GLSPVDGGTTATSVRHSFGFRSELRNILSYMDQLLESLPEEKIEEFAKSEYFDSYKKLFKDLGLV

SEQ ID NO: 78808 - protein, 80 aa, Unknown
  Obtained from environmental sample
  misc_feature (1)..(80): Xaa is any amino acid
MRSRKIAENWGAMIPKEVLLREPAGTEKLDRQGCHRDEARVTFLSMSGADFVEKFVVVEATRVRGIIQTGKKHSALYYFY

SEQ ID NO: 78809 - protein, 241 aa, Unknown
  Obtained from environmental sample
  DOMAIN (1)...(114): TruB family pseudouridylate synthase (N terminal domain)
  misc_feature (1)..(241): Xaa is any amino acid
IPPFKSCTKEYTATFFLGEKTDTLDPEGNVIAEAEVPSLEAVEAVLESFRGDILQAPPAYSAKHINGRRSYELAREGKVPEMKKQPVTVHELSLLSWTPPEACFRFRVSSGTYIRSLARDIALAAGTRARLSHLRRDMVGPFLLEDAVDKDSLDANDALRPIDVSLFKKIQLPCFILDRKAEEGFIHGRSLDGILTAENLSAWAEASAEAVGVFSRDRLEFLGFLERKNGKWSYGHVFAGD

SEQ ID NO: 78810 - protein, 161 aa, Unknown
  Obtained from environmental sample
  DOMAIN (9)...(76): Sigma-70 region 2
  misc_feature (1)..(161): Xaa is any amino acid
MAGKTAETLVSLRQRLLNFIRSRVNRLEDAEDILQDVFYQFSRVNDLINPIENISAWLYRAARNRIIDHHRKKKDEPLPASYDEDNDEYIFDEIADIMYGEEATPETDMLRSLVFEEIQTAFADLPKEQREVFEMTELLDFSVKETAEKHTRRLTPFFAQA

SEQ ID NO: 78811 - protein, 336 aa, Unknown
  Obtained from environmental sample
  DOMAIN (137)...(333): ATPase family associated with various cellular activities (AAA)
  misc_feature (1)..(336): Xaa is any amino acid
FPDLRGPYVKFQRPIEKQSFTSAPIFRKTPPAVPLLYRELKKPDNNIKSVNGYLAIKEAQAITGRYYLRKASDKIILPEDITGQVDEKKSIQEIMAELEAIIGMTALKKEIKSLYTQLNQIAEMEKKGVKTEKPAQHFVITGNPGTGKTTVARLLGKIFEGLGLLDSGHVVEVDRSKLVAGYVGQTAPLTNNACDQAAGGILFIDEVYTLKQNDSDSFGQECIDTLLKRMEDDRGKFMVVVAGYKSPMEKFLTANEGLKSRFTKYFNLEDYSPEELAAIFESLAKKQRFIVPPQTRVKIVAFFKDRCARKTKDFANGREARNLMDEARLGQSIMGI

SEQ ID NO: 78812 - protein, 159 aa, Unknown
  Obtained from environmental sample
  DOMAIN (4)...(103): S-adenosylmethionine synthetase, N-terminal domain
  misc_feature (1)..(159): Xaa is any amino acid
MKSNRYFFTSESVGEGHPDKLCDQISDAILDACIKDDPQSRVACETFASTSLVLIGGEITTNTFIDFHHLVRDVARDIGYTDPSYGLDCNSMAVLDMIHNQSSDISQGVSGQGLEKIKSPQGARDQGMMFGFCWHQTKELMPLPIMPAQQILIPAAKLK

SEQ ID NO: 78813 - protein, 148 aa, Unknown
  Obtained from environmental sample
  DOMAIN (5)...(145): Cytidylyltransferase
  misc_feature (1)..(148): Xaa is any amino acid
MRLAILGGSFNPIHLGHLFLADAVLSELRYDRVVMVPEYKSPFKLAAPGMEDNALHRLEMIAASIGIDPGLALDDCEIKREGVSYTVDTIADIIRRYNPDGKPGVIMGEDLIDDFPKWHKSGEILSMADMIIAWRIHSGTYGSSRGSH

SEQ ID NO: 78814 - protein, 86 aa, Unknown
  Obtained from environmental sample
  misc_feature (1)..(86): Xaa is any amino acid
GGPPGYRETKGFRALSRNGIPLTARLASVADVYDALVCARVYKAAIPYSEAVNIIKDGRGTQFDPVVCDALIEIQGEFRKIAEQYV

SEQ ID NO: 78815 - protein, 119 aa, Unknown
  Obtained from environmental sample
  misc_feature (1)..(119): Xaa is any amino acid
MGITRSTVWVGQKPPKEVIKRIKEIAKKPIHYTEDCPESTPEALAEFAAMARARRQRKVKPMVALRVEPEALEKYKSLGDGYTGIMADVLNYVANNPEILSRASGATVPQAARHNPGET

SEQ ID NO: 78816 - protein, 269 aa, Unknown
  Obtained from environmental sample
  misc_feature (1)..(269): Xaa is any amino acid
MIAIVLIVSGGLTVLQMREATDISMDLSIRGIKYLAQEQAKFWQGRENGYISQLNGIADIMGEYEKIRPEERRDLYDNMLLAVLNNNPRFARIFSIWKPNAMDGMDARYIGRPGSTPTGQYAMTWGRDTGTIEVKPNLVLNEVNEWMNGPNALKTRVENPTPFKNHGDDTFIIRIGVPITRGTSNEVVGHLCVLVDIIPIQEGVDKALTDYEEIAQMSIYSRNGCIMGNLNADRVGKMLPEVERYTVFIKQPQTRLFFDASRLAVQVIQ

SEQ ID NO: 78817 - protein, 300 aa, Unknown
  Obtained from environmental sample
  DOMAIN (8)...(300): Protein of unknown function (DUF1703)
  misc_feature (1)..(300): Xaa is any amino acid
MDRSAETMATPKRLLPVGIQDFSDIRTRGFVYVDKTARAYDLITGSGKAFFLSRPRRFGKSLLCSTFGAIFEGRRELFGEIAGRPALAIDGLDWEWKAHPVIRIDLSAGNYGKGVETLHSTINAEMRSEAEKYGVTLDREDQPAGQFKYLIEKAHEKTGEKAVVIIDEYDSPLTGTLTKRDVHIELLEELRAFYSVIKSCDAHLRFIFLTGISKFSQVSVFSALNQLSDLTLDPRYADICGLTQEELEANFGPEIDSILESTGRSREEYMDKLRRFYNGYRFSRNRSRSTILSVCSTISR

SEQ ID NO: 78818 - protein, 294 aa, Unknown
  Obtained from environmental sample
  DOMAIN (1)...(283): Aminopeptidase I zinc metalloprotease (M18)
  misc_feature (1)..(294): Xaa is any amino acid
MHGVFVDSKGKKTSVSIGEDDDDPVFTITDLLPHLAQDQMQKKASEVVEGEDLDVLSGSRPYVDEKVKEKVKLRFLSILNEKFGLDEKGFASAEIEFVPAAKARDLGLDRSMIGAYGHDDRSGAYPALRALMEIAAQKEAPEKTVLCYFSDKEEIGSVGNTGAQSWGFENFIAALAGEDDLRRCLSNSSMLSCDVSPAFDPSYSSVYEKRNSSYMGKGLVINKYTGSRGKVGASDANAEYCARVLAVFDKIKSPGSSAKWARWTKAAAAPSPFTRQNTASKFLTAAPLSCRCIP

SEQ ID NO: 78819 - protein, 82 aa, Unknown
  Obtained from environmental sample
  misc_feature (1)..(82): Xaa is any amino acid
MENKELNAFINDFSKINGVLAIALGGSRTAKCSDIKSDYDFYVYYENIIDQEIRRKLFSNYCGYYEIRNSYWELEDMVNKIR

SEQ ID NO: 78820 - protein, 126 aa, Unknown
  Obtained from environmental sample
  misc_feature (1)..(126): Xaa is any amino acid
MGNEAIALGALRAGVSVVTGYPGTPSTEALETAAKHNDGSVYIEWSVNEKAALEVAAGAAYSGARVMVTMKQVGLNVASDALVNLTISALRVAWLSLSQMIPGPISSQNEQDTAPFFKVRKNSVIP

SEQ ID NO: 78821 - protein, 330 aa, Unknown
  Obtained from environmental sample
  DOMAIN (171)...(330): E1-E2 ATPase
  misc_feature (1)..(330): Xaa is any amino acid
VIIATEKATVSFDPAAIRLSAIKEAIVGVGFVPLDAAKEAAGADKVRRAREIKVLRTKFIVAAVFGLPLLYIAMSPMIPWFTLPLPRALSMMRYPLTYGLAQLLLVMPIVAVGYKFYTVGFKNLVMRCPNMDSLIAIGTSAAVFYSVYNLFRIVTGDFKAVESLYFETAGVIIALILLGKTLEAVSKGRTGEAIKKLMGLTPKTAVIIDNGAEKEIPVDDVMPGDVVVVKPGAKIPVDGTVTEGQSAVDESMLTGESLPIDKKPGDTVYGATINANGLLRFKAEKVGAETALAQIIKLVEDAQGSKAPIAKMADIVSGYLLGHHPGGKTP

SEQ ID NO: 78822 - protein, 185 aa, Unknown
  Obtained from environmental sample
  DOMAIN (2)...(143): Thiamine pyrophosphate enzyme, N-terminal TPP binding domain
  misc_feature (1)..(185): Xaa is any amino acid
MYDELFKHSDKIRHILVSHEQHAAHAADGYARSTGKTGVCLATSGPGATNLITGIATAYMDSIPIVAITGNVPTGILGKDSFQEVDITGISMPIVKHNWIVKNVDDLAEVIREAFELASSGRPGPVLIDIPKDITALTAEWSPLESKKGRLKDSTLSARAQRLDERTARVRLPASCRSVMGGGMG

SEQ ID NO: 78823 - protein, 290 aa, Unknown
  Obtained from environmental sample
  misc_feature (1)..(290): Xaa is any amino acid
MIESFETEVLEILNYLKIDFHVTEHVQLFSLPPSSLYNKTMNSQFRINRLQVFNWGTFSDLHDVPISERGFLFVGGSGSGKTTLLDAFSTLLIPPRWVDFNAAARETERNSRDRSLVSYIRGAWAEQKDEGSGVIATRYLRSGTTWSSLALSYQNKTGQTVVLVQIFWLRGSANGSADVKRHYFIFEREFDLRELKDFGESNFDIRKLKQSFPDSFSRDEFRSYCDHFCHLLGIENDIALRLLHKTQSAKNLGDLNTFLRDFMLDKPETFDVADRLVNEFGETHAAHHAV

SEQ ID NO: 78824 - protein, 324 aa, Unknown
  Obtained from environmental sample
  misc_feature (1)..(324): Xaa is any amino acid
KFFPAYRERKGFKYAGEYKTGSQPKSAYFSPDGRWLFVPLLNEKGIDVFRVAGQSLQYEKRLEAGNKPGFVEVMFDERRRELWVSNMEENKVYIFNLDTLELKSSYTTGGTFPKVITQSPDGALTLVSNWITRDISVFDSNTKTLLRRIPVGGTPRGMAFSPDGSFLYAAIYDAALVAVVDMKTNTVVKKWRFNEGEGAARHIIYRGDKLYVSDMFRGTVNILNASTGALLKSARVGPNINTITMSPDGNYIFASSRGRNNAVDYLLPGPDFGAVYMLNAHDLTVIDKVWGRNQPTGLAVSPDGKLLAFYDFLDANLELYKIEM

SEQ ID NO: 78825 - protein, 89 aa, Unknown
  Obtained from environmental sample
  misc_feature (1)..(89): Xaa is any amino acid
MPSNEVLLDVKNLTVEFGTRHKRFRAVDNVSFHIFKGETFGLVGESGSGKTTIGRSIIRINPAKEGEVLFKSETYHARSPKSGTGWVRT

SEQ ID NO: 78826 - protein, 255 aa, Unknown
  Obtained from environmental sample
  misc_feature (1)..(255): Xaa is any amino acid
MKSDESGDSIAYVDTDTVTVKGQNGEKADKFACRLTLMTEDENVTPTVRLVTATFKHAPEDQKTKKIPDDVSQNTIDIIDSIEAFTGTLDVKPYSQMIRDPQFSSVICSAVSSCMILDYKGVHILPEMAALGVLDTYYDGYGNWSFNSAFIASFGFESYIEYCAGLDDIKRELMMNNPVICSVRYKRDDSVDGNLPVLSAAPIDRTPGHLIVIVGYERDHRRKTYVIVNDPAAKDDAGVRRRYDESNLWRHGALP

SEQ ID NO: 78827 - protein, 253 aa, Unknown
  Obtained from environmental sample
  misc_feature (1)..(253): Xaa is any amino acid
LLKKTLNYIGEPVAIILGPNKAKLEEISTRCEILADEEEAVFIYGNETTPVLTREINIGDAFESFQETGKILTGSYKTGIQEHWYAEPIGAISWINKEKDIKNLKGGKYDSVIIRTATQWPYHVKRAAARVLKIDPSFVAVEPTALNIHMDGKLWYPSLIACHAAIGTYITKKPVRLILTREEDFLYTPKRFSANINITSAINENGNINAADIDITVNLGAYEVNGNEILDQVCLGAIGFTISQLLGQSDMDL

SEQ ID NO: 78828 - protein, 126 aa, Unknown
  Obtained from environmental sample
  DOMAIN (15)...(125): Glucosamine-6-phosphate isomerases/6-phosphogluconolactonase
  misc_feature (1)..(126): Xaa is any amino acid
MRIVIHKNHEEASRWAASYIAGRINGYGKTPDRPFVLGLPTGSSPLLIYREFIKLNREGKLSFANVHTFNMDEYAGLPPDHPHSYHYYMTENLFKHIDIKPAHTHILDGMGEDPVEECRLFEEAIA

SEQ ID NO: 78829 - protein, 283 aa, Unknown
  Obtained from environmental sample
  misc_feature (1)..(283): Xaa is any amino acid
VFPPVYGRELCGAGIEYGPRIRGDTEKPADLNVNAPGKGGILGHCADNDTFEQIACDALSINQTILKTHPGIPLFLMGHSWGSFIAQHYIENHDCKDLAGCILSGTRGPGGLIISAGIPLMIFLAAVRGSRRGSSISRALADGPYNRPFRPNRTSFDWISRDEAEVDAYVNDPLCGFLCSSGFYRDLAKGLGRIHRKKAMARIRRDLPVYIFCGGDDPVGNMGASPAALVNAYRSLGLQNLEFVQYPEARHETLNETNREEVMGNLSSWISRIIDRKQEFGHP

SEQ ID NO: 78830 - protein, 161 aa, Unknown
  Obtained from environmental sample
  DOMAIN (18)...(154): ECF sigma factor
  misc_feature (1)..(161): Xaa is any amino acid
VEIEKAFREYRDSMIRAMTLFSGDDEAALDGVSHAFTQALVNKLMLEAMPEPAMKAWLYAAARNAVVDIKRREARFSRFTGENNDCGLADPRPDDPLGKAITELLIEKLPESLRVPVELKYYDGMNATEIGEAMKVPAATVRTRLRAALRQLREEKQFLGS

SEQ ID NO: 78831 - protein, 180 aa, Unknown
  Obtained from environmental sample
  misc_feature (1)..(180): Xaa is any amino acid
MTYIAGISMRYIVCLASCICLTGLLTVLPLWQTHILRRSLSTLQLLINPRLIVIAVLALSLIIGIALFGFLKYKKRYFFWIVYAFTIVVFSLGASYAARILLKPYQIMRLIVFLDPNIDPRGAGWHILQSITAIGSGGFAGQGYLKGTQSHYRFLPEQSTDFIFSIFSEETLGRICTCFK

SEQ ID NO: 78832 - protein, 65 aa, Unknown
  Obtained from environmental sample
  misc_feature (1)..(65): Xaa is any amino acid
MANTMKGVYLPPNSTVEIQDVSIPQPGHGAVLVKMKACTICGSDIRAIYREHTGQGPARVSDWYR

SEQ ID NO: 78833 - protein, 336 aa, Unknown
  Obtained from environmental sample
  DOMAIN (38)...(330): Aldo/keto reductase family
  misc_feature (1)..(336): Xaa is any amino acid
MKLTASWMRGIAVKLLSAQMRIKMTEAMIFNKVPATKLASGRFIPSIGMGTFGSDRYSPTEVSAAVLGAIRFGYRFFDCASVYGNEDLIGNVFEEAFRSGAVKREELFITSKVWNNMHGPGKVLSSINKTLADLRLSYVDAYFVHWPFPNYHAPGCDGDSRNPDSVPFSADRFMATWEQMEEIYNKGLARHLGMSNMTIPKLEAVLPRCKIKPELIEMEQHPSFQQQALFDYCKKNNITVIGYCPIGSPNRPERDKAPGDVADTELPEVVSVANAHNIHPALVCLKWAVQRGSIPIPFSVHEKNYKSNLLTVTEDPLSAGEMLLLKRQSECSPSTG

SEQ ID NO: 78834 - protein, 74 aa, Unknown
  Obtained from environmental sample
  misc_feature (1)..(74): Xaa is any amino acid
MSSFDLIVVGSGPGGYVAAIRGAQLGLSTAIVEKDAAMGGTCLHRGCVPAKAWLESGAPLEQNAAGSADLTLGL

SEQ ID NO: 78835 - protein, 257 aa, Unknown
  Obtained from environmental sample
  DOMAIN (6)...(197): CobQ/CobB/MinD/ParA nucleotide binding domain
  misc_feature (1)..(257): Xaa is any amino acid
MKKPRLLLAGAHSGAGKTSVAAGLMSALVRRGLTVQPYKAGPDYIDPAFHTFVTGRQSRNLDSWMLDQATVMALFGHNAPEAGQGLSIIEGVMGLFDGHLEDAAGSSAHLARILAAPVVLVINGAGLARSAAALVRGFDRFEPGLRLAGVIINQTSSTAHYEMLKAFVENEAGVPCFGHLLKNSALALESRHLGLVPAGEVADLSARLGCLAEAAAATLDLDGLVKLAEAAPGLDIPPLPGPVEPPSPVRLGLARDA

SEQ ID NO: 78836 - protein, 135 aa, Unknown
  Obtained from environmental sample
  DOMAIN (13)...(131): Response regulator receiver domain
  misc_feature (1)..(135): Xaa is any amino acid
MIVHNFNGIYAGRRILLAEDVEINREIVLTLLEPSRLEIDCAENGMQAVSKFAEAPEKYDMIFMDIQMPEMDGYEATRRIRALDVPAAKTIPIIAMSANVFREDIEKCLEAGMNDHIGKPLDFMAVMEKLHIYLT

SEQ ID NO: 78837 - protein, 131 aa, Unknown
  Obtained from environmental sample
  DOMAIN (27)...(130): TruB family pseudouridylate synthase (N terminal domain)
  misc_feature (1)..(131): Xaa is any amino acid
MNPHTDGLILLHKPPGLTSFDALRDIKRILGTGKVGHTGTLDKFAEGLLLVLVGRALKLSQWFTHCDKQYEGTICFGAETDTLDPEGAVIANAPLPSRETVEQVIPQFLGKSKQRPRPIQRYTLNESGLRR

SEQ ID NO: 78838 - protein, 339 aa, Unknown
  Obtained from environmental sample
  misc_feature (1)..(339): Xaa is any amino acid
MMAELLTLAGSVGGGQQTPGFFGCGKVFLTSRKFLSAEGGFARVVWMPKELKDLLRDDLLKRFDEKGLTGFIDQIADETIAVAAEDVRTFMEKVKHPALKMQDMAQYAQSAESEAVSADAAPTKTVTVGAAEGSIPIAGNVDIAAITEQVKSAVTKEIINSIIDILSERFLGQAAAKPEAPESKAEPLAKPVISASTRISGIKSFALPVESSGSATYAVQLGNLKNSGGTRGKTRIVGGANCMPFHFWEGRMPNRPLVAMEVYDSVSVKYPDILREAYKGLLDKPAEMANACVESMGPNSSVSGLMVSIPIGKTESAPKRRACQIHTGGCGCTADHYGI

SEQ ID NO: 78839 - protein, 311 aa, Unknown
  Obtained from environmental sample
  DOMAIN (240)...(309): Bacterial flagellin C-terminus
  misc_feature (1)..(311): Xaa is any amino acid
RSSGGSVIPGDIKLLSEGSILAKSSYIDMIDDGTSTTTIRIMVSGNELNITYNSVDGILKVGNDIVAPGRSITLDDGTVLVHASTLAEPNEPTGRIFVDVGRITLAEDITAIDGNVQGFSLAKDSTMTAKTKITDGIHLMAGTVITTSDKFYPGSVTMAHEGRSVQFSANADVMLGARYYDMAVSESMTYIFSRYEPASSNLKDSVMAQIGANSGQTAFVSMGDMRAVALNVHNIDISSKWGAATAIETVNNALQRVSHQRALLGAMQNRLEHTIKNLDASTENLQAAESRIRDVDMAKEIMSSANLTMRK

SEQ ID NO: 78840 - protein, 250 aa, Unknown
  Obtained from environmental sample
  DOMAIN (2)...(249): Hsp70 protein
  misc_feature (1)..(250): Xaa is any amino acid
VKVGIDFGTSTSEIAYVDDNGKIIIIPNHLGELITASVVYIADDGTPIVGLEAKEKALIEPENIFLEVKRLFGQNIELQARDKVYSPVDVAAMIIRYLTECAQKHTGKTVDSAVITVPAYFNDSQRKDVIAAGEAAGLKVERIINEPTAASLDYGIEHMRDCKYMLVYDLGGGTLDVTVLELFEGVVEVKSSCGNNALGGKDFDQAIMDHIIGTIKKRDKIDVSGDARAMIRIKIAAEQCKIALSSETET

SEQ ID NO: 78841 - protein, 150 aa, Unknown
  Obtained from environmental sample
  misc_feature (1)..(150): Xaa is any amino acid
MAAITGKKLKKLKGGKRLNRSYGGDAFIITIIVVFGLFFAYPLIYAINNAFKPLNEIFLFPPRLWVRQPTTANFQDLFVILNKSWVTFSRYVFNTVFITAVGTVGLIFVASMGAFVVSKYRFPGSKLFFNPGNYNTECLRAMLGHQNPKK

SEQ ID NO: 78842 - protein, 172 aa, Unknown
  Obtained from environmental sample
  misc_feature (1)..(172): Xaa is any amino acid
MLINPFTRVKNFANSNPVAARYALDGLLAALAVNIAANNNNLFALRLGAGDYQLSLVQFLPQIFTMLILIPGGLFAGSLHNKRRLIIGALITGAVGYLFCAFSPFFKFANAGNEPSSPIYLFLVSLALSVGAVATYNLSWQSFFPEGVNKSERNYVLTDASTWTFYQHTPAL

SEQ ID NO: 78843 - protein, 70 aa, Unknown
  Obtained from environmental sample
  misc_feature (1)..(70): Xaa is any amino acid
LEKQYNPATVEDRLYAEWLKKGYFHADPSSPKPKYSIVIPPPNVTGVLHIGHALNNTIQDLAIIPGGKPG

SEQ ID NO: 78844 - protein, 191 aa, Unknown
  Obtained from environmental sample
  misc_feature (1)..(191): Xaa is any amino acid
VVAQFPENGQVNVNARASVEIRFSEWINRASVAGAVSVYPAVPQGVAVRVVKNRLTVTPKEPFSGNTTYHVSVSAALQDLRGNAMARPIDVVFSTGAALDSGRVDGAIAALKQKVAVNRVMLFRVDSGWTDGRYFSPPEYATQTDSSGAFGFSYIKEGRYRIVAFVDQYRVGKVRVGDTCFTSLGKIIHVT

SEQ ID NO: 78845 - protein, 103 aa, Unknown
  Obtained from environmental sample
  DOMAIN (2)...(58): DnaJ domain
  misc_feature (1)..(103): Xaa is any amino acid
VNYYELLNIERGANANEIKRAYFSAVKMHSPDSDPEGFKVIRTAYETLYDPKKRVEYDAYFVTSGDLQDALLTARSLIHENKYKQAAEFLIEFSCRILSLRGP

SEQ ID NO: 78846 - protein, 147 aa, Unknown
  Obtained from environmental sample
  DOMAIN (15)...(147): Glucosamine-6-phosphate isomerases/6-phosphogluconolactonase
  misc_feature (1)..(147): Xaa is any amino acid
MRIVIHKTHEEASRWAASYIAGRINDFGATAEKPFVLGLPTGSSPLLIYKEFIRLNREKKISFANVHTFNMDEYAGLPPDHPQSYHYYMMDHLFNHIDIDPANIHLLDGMAKDRMEECRRYEKAITDKRRHRAVPRGPKQRRAYRFQ

SEQ ID NO: 78847 - protein, 187 aa, Unknown
  Obtained from environmental sample
  DOMAIN (1)...(185): Hsp70 protein
  misc_feature (1)..(187): Xaa is any amino acid
MALQRLRQASEEAKIQLSAMQTSDINLPYITADQSGPKHLQKSLTRAKFEQMVSDLLERSKEPCIKALRDANLTAEQIDEVILVGGSTRIPAVQQLVKDLFKKEPNKGVNPDEAVAVGAAIQGGILGGDVKDVLLLDVTPLSLGIETLGGVMTKLIPAHTTIPTRKSRFSRQPPTASPRFHKCLQGE

SEQ ID NO: 78848 - protein, 114 aa, Unknown
  Obtained from environmental sample
  misc_feature (1)..(114): Xaa is any amino acid
LSDDETRETIVKVHGETGYFLDPHSAVGWKGADKLLAENSANSKLLSEAAVGILSTAHPAKFSETVEPLIGSAPIPESLARAMGRSVRSQTIPAEVSALIEVLKKENSPSREDG

SEQ ID NO: 78849 - protein, 58 aa, Unknown
  Obtained from environmental sample
  misc_feature (1)..(58): Xaa is any amino acid
MRARHLKKVTQEITEGMNEMASGAEQVNVAVHNVNEISVRNRESIDKLIKEVARFKVE

SEQ ID NO: 78850 - protein, 127 aa, Unknown
  Obtained from environmental sample
  misc_feature (1)..(127): Xaa is any amino acid
MPKVINIEQTPNPNALKFVVKEPFMLGGARSFQNFASAVGDPMGSAIFAIGNVVSVFYMDKFVTVNKLETAQWSDMIDPICEAIEESRIDIAQDSAVEQVEANDKFQKIMDVVNSRIRPGLAGDGGG

SEQ ID NO: 78851 - protein, 285 aa, Unknown
  Obtained from environmental sample
  DOMAIN (2)...(281): Methylenetetrahydrofolate reductase
  misc_feature (1)..(285): Xaa is any amino acid
MKISDILNTGKITISCELFPPKHGSGLAGAHNIVRETAALRPSFISITYGAGGGTSDYTEDLAVETQKHGVPALAHLTCVSSDRQTIRDVLSKLAADKIENILALRGDMPNGLPADAQYHHACDLMKEIQSAGDFCIGGACYPEGHPESESLEKDIESLKIKMDCGCSFFTTQMFFDNNILYNFLYRLLHHKINVPVIAGIMPVINGRQIARICKISGTILPPRFKAIVEKFSDNSAAMAQAGIAYATEQIIDLIANDVYNIHIYTMNKPDIAGKIMQNLSEIFK

SEQ ID NO: 78852 - protein, 294 aa, Unknown
  Obtained from environmental sample
  misc_feature (1)..(294): Xaa is any amino acid
MPHHIDRIGAYQEDGSVTVYPDDYIDETLRGKPKHPQIKHLERYKWNKGGGAAFDEFRKRWLEEIARLERSPQKNASLTVCFNLSAGEEFWKKLRKDNPRDEDYYSKCEEYFYDCRVVLDELYPYGKTIKWATHYEEKEPHMHCLKIPIVKAPKRLSKKDIAAKKKPGEAMLKFSSGEFLGGREGLAKLQDTIFEKVGKKWGLERGERGSEARHTDQVEWQRELSLKDKELTAGLKIINEIRDKFHRDSEELVALKAKIKERGSEAVAERESIIKEGQEKQKRLIEEGQKEPPE

SEQ ID NO: 78853 - protein, 255 aa, Unknown
  Obtained from environmental sample
  misc_feature (1)..(255): Xaa is any amino acid
GFSPAYRGAIKGLDAIISCISAKDPNLRSSAVAALGPFSGSNVENAIFDAFRDSYYRTRIAAAQASRDRKLAAAVPFLKFRAERDDVPTVKDEAIRALGAIADDEAIAVLEGLFTERKNTDRVRTLAADMLCKNSGGKYFSKIVVELDEAKKRNQTGLYNGLLKIVGETVAENDKSEIETVTRRFLSTGGIMEKLYGLDMANNNKLTGLKEEIIALTKDKNESLSRKAKRTAENLGIEIPETETPAAKTPRAKTP

SEQ ID NO: 78854 - protein, 322 aa, Unknown
  Obtained from environmental sample
  DOMAIN (237)...(264): The GLUG motif
  misc_feature (1)..(322): Xaa is any amino acid
ITMTGGNFTPIGNNTTKFTGVYDGGGHTVTGLSMTISSTYIGLFGYNSGTVKNMNVSGTVTTDGTNRTYIGGIAGANDGTIDNCSFSGTINGSATTNDEVGGIVGRNTTTGTVKNSKNNATVTGRNQTGGIAGWNYGKIENSCNTGAVTGNTQVGGITGLNNGEIDNSYNTGAVTGSQYIGGIAGRNANNGKYIKNCYNTGNVTATAASDSRAGGIAGDNQSSATVEYCYNTGNVTGSTAVGGIVGSSDNSTVQYCVSLGAKVTGGTNTCRVVGVMSGTATLTTNRARADMIIGTSGSEAIPTINIGATERNGADALGHQSG

SEQ ID NO: 78855 - protein, 70 aa, Unknown
  Obtained from environmental sample
  misc_feature (1)..(70): Xaa is any amino acid
KAKGPVTRPIVKVVGRFLAKEFDYCLFTGAGPEIAVVRTKAFSAQLVLLYILAIWFAARWGKYRRQRNRD

SEQ ID NO: 78856 - protein, 295 aa, Unknown
  Obtained from environmental sample
  DOMAIN (138)...(295): Glycosyl hydrolase family 3 C terminal domain
  misc_feature (1)..(295): Xaa is any amino acid
MTGWLKTELGFDGYIISDWQGIANSTQPGYTECDYGSSCTGPSLTSDAVRKAINAGVDLAMEPGSHTSFINYLTALVNNGQVSEDRINDAVRRILRAKFRAGRMDKPAGISSEVKAAYGDIGSAAHRDVAREAVRKSLVLLKNDNALPISKTAKVFVTGSHATNTGYLCGGWTGNGCETSGFNQTCYGWTNTRDNVQGATSVKDGFNKVVANSTVDNASNAQIIVYVTGEKPYAEWHGDIQSLTFHDNLSSPNLATLKSQNPGKKIVTVFISGRAGENSEMINNSYAFVAAWLPG

SEQ ID NO: 78857 - protein, 265 aa, Unknown
  Obtained from environmental sample
  DOMAIN (122)...(198): Helicase conserved C-terminal domain
  misc_feature (1)..(265): Xaa is any amino acid
MNLMEIAFLVLDEADRMFDMGFYPDLRKLIKVVPSTDRRQTMLFSATLNAWVKNLAWEYTKKPFEIDIEPEVVTVEEVTQILYHVPSEEKMPLLLGIIQREQPESIIIFCNTKKSTEIVAKRLKINGYDCEFIIGDLPQSKRLKIIDDVKAGKIKTLVATDVAARGLDIESLAMVINYDLPVEAENYVHRIGRTARAGKTGKANTLFSEQDVYELPAIERYIGKKIPSEIARQELYAQDKSAGQTIQSIFTRDAITAELKRPGES

SEQ ID NO: 78858 - protein, 64 aa, Unknown
  Obtained from environmental sample
  DOMAIN (1)...(62): Cupin domain
  misc_feature (1)..(64): Xaa is any amino acid
MKLTLHSHDGQEFDYMLSGKMEFHFDKAFYVLNEGDSVYFDSSVPHAMKALGNQAATFLAVVIK

SEQ ID NO: 78859 - protein, 71 aa, Unknown
  Obtained from environmental sample
  misc_feature (1)..(71): Xaa is any amino acid
MTRNEIPELVNKARKAQSLWAELSYNERARRITKAGHSLAEKRDEVTEIIHSENGKLKIDALAAEVISALM

SEQ ID NO: 78860 - protein, 337 aa, Unknown
  Obtained from environmental sample
  DOMAIN (80)...(245): ABC transporter
  misc_feature (1)..(337): Xaa is any amino acid
MAEPYSPLPLQATKAAFAQELIKRLEKMERIEIPENLKKISISFPPPPHSPRVALTLEAISKSYGERQVLSYLDLALDAGERLLVAGPNGAGKTTLLRIIAGGDTDYEGIVKYGAGISTSYFSQNAAENLSGSQTVEQYIESEAPTHLIPKVRGMLGAFLFRGDDVFKSLSVLSGGEKSRLAMLRMLLKPMNLLILDEPTNHLDLQSKDILLDCLKAFEGTIIFVSHDRGFMEALSTKTLELSIGKLAGEAEPKRRHRLFYGNYAYYLDRIAKEESGEISTADTPEMKPPKSPATAAPVIRCSPEPLPRLFLLKQAINRCLAPQNAGDRKNKAGSYT

SEQ ID NO: 78861 - protein, 340 aa, Unknown
  Obtained from environmental sample
  DOMAIN (63)...(339): Aminotransferase class I and II
  misc_feature (1)..(340): Xaa is any amino acid
MFWKAADLLILPPKLRPKAGVGFQEILDEIDRRPQKVSFWSEYWNPRIKNLSPYFPGDQRKDRRFIKLNTNENPYPPSPKVIEAIQKRANESLRLYPDPECIEFREAVAARYGVKTEQVFAGNGSDEILAFAFGAFFESDKDGVIGKSGEKMPPILFPDITYSFYPVYANLWDIPYRLMPLRDDFTINIDEYKVQSGGVILPNPNAPTGIALPLEDILSLAKYLAGMGKVFIADEAYIAFSGAKSAKLGSLSAVPHINANPNLLTVHTLSKSASLAGLRAGFAIGNEKLIEALCRIRDSFNSYTMDRIALAGASAAVSDAASLRNKSVSRNKQRLECSPS

SEQ ID NO: 78862 - protein, 329 aa, Unknown
  Obtained from environmental sample
  DOMAIN (82)...(261): AIR synthase related protein, N-terminal domain
  misc_feature (1)..(329): Xaa is any amino acid
ALSRFSVLEQGKAALEKANSELGLALSSDEMDYLTKRLKGLKRNPSDVELMMFAQANSEHCRHKIFNAQWEINGEKQDLSLFQMIKNTYKCSPDGILSAYKDNAAVMEGFEAARFYAEPKSNEYAWHREPVHILMKVETHNHPTAISPFPGAATGSGGEIRDEGATGIGSKPKAGLCGFSVSNLKIPGYVQPWERDFGKPGRIESPLQIMIDGPLGAAAFNNEFGRPNICGYFRTYEQEVNGKIRGYHKPIMLAGGIGNIKARHVQKGSLKEGDLLIVLGGPAMLIGLGGGAASSMATGSGGEDLDFASVQRGNAEMQRRLGRSDPWGP

SEQ ID NO: 78863 - protein, 72 aa, Unknown
  Obtained from environmental sample
  misc_feature (1)..(72): Xaa is any amino acid
VDVKIFPARLNGDVNVIPSKSQAHRALICAALADEPTRVECNGESEDILATAACLSALALSADLVHGKENAG

SEQ ID NO: 78864 - protein, 205 aa, Unknown
  Obtained from environmental sample
  DOMAIN (1)...(170): 3-dehydroquinate synthase
  misc_feature (1)..(205): Xaa is any amino acid
LSAGKNQFGAFYQPDLVLCDIGTLKTLPDEVFHDGCAEMIKHGVILSAELFELLKKPIRSQMEDIIARNVTIKRDIVVADEKDTGIRQILNFGHTIGHGIEKHSNYGVTHGKAVAIGMVIASRGAARMDLCGEDCHTEIVEAVRCYQLPTETDIPPDKLIEAAFFDKKRSGQRITLILPEKIGKCVAKSFSMDELANFIHLGMSK

SEQ ID NO: 78865 - protein, 333 aa, Unknown
  Obtained from environmental sample
  DOMAIN (257)...(333): MutS family domain IV
  misc_feature (1)..(333): Xaa is any amino acid
AKRNSGASGAGISANIQALINHDKIMLTELPRKQFEAEFCNSVLEKHFGTQNELSNLSISASGALLFYLLEQKKSGLSHIIKIESIPWSDYMALDPATQRNLELTAPLHPEDSNSTLLSVMDFTKTAMGGRTLREWISHPLISIEHILGRLSCVEELVDNPMSIDEIGEALKPIPDMERAMGRVGSSRANARDVQSLGKSLLQAEQIARMLKKLKGKKFGEIASKLELAKGKGQEIYALLKDELPLTIKEGNLIREGASDEIEDFRQEIKSKKNWLANLESKEKERLGIPSLKVGYNKVFGYYIEITSTHSHKKIPPEYIRKQTLAGHQAGKK

SEQ ID NO: 78866 - protein, 295 aa, Unknown
  Obtained from environmental sample
  misc_feature (1)..(295): Xaa is any amino acid
LGLVFSKKLARFLKLFKHGFDFSILALGIALILAGVFEKHGLAMIIGAYIAGLSLSRTDIAAVIQERIRGIYEFFVPVFFAVMGMMVNVKEIVSPQALMFGAVYTGVAVLSKIAGCGGPAMLMGFNVRGSLRIGAGMVPRGEVALIIAGIGLASGILDQQIFAAVILMTLITTLAAPPLLSATLKIAGAGTRKPVKGDDSVLLKWEFSSAEIADVVINTLLNDLRSEGFYVQMMSLDEGLSHARKDDIVLSINETDNIIIIETRRADVPFVKRSFTRLLSNCMTRSRTQGFFDPK

SEQ ID NO: 78867 - protein, 318 aa, Unknown
  Obtained from environmental sample
  misc_feature (1)..(318): Xaa is any amino acid
MTDWPSFPLSYLPMEGIVPGPNERGWVTVEELAAKYAAMQQDNPEGLSRDVTVNDAISVINAIGSAPRYKDCRLFAYTNNIDLDQEKQFAAYCVIIGRKRLSRKMLVVYRGTDMTLIGWKESFNMSFITSVPSQKEAVSYLEKISRRFLYPLIIAGHSKGGNLAIYASSFCGKLVRRRIIAIYSNDAPGFHKEVIQSSGYQAICPRIRAFIPQSSLVGMLFEHGETPMVIKSGASGPMQHDLCSWEVTYNNMVDAGELTPQSRFIDQIICEWINRMTRGIGSSLSRLYIRYLVSCDAGIRDPTLPTTGKSTASGIINA

SEQ ID NO: 78868 - protein, 63 aa, Unknown
  Obtained from environmental sample
  misc_feature (1)..(63): Xaa is any amino acid
MRLLLTNDDGISSPGLLLLAAALRKAGHRVFVLAPASDRSGVSHSITFLNGPNKIIQVDEDAW

SEQ ID NO: 78869 - protein, 123 aa, Unknown
  Obtained from environmental sample
  DOMAIN (1)...(92): ABC transporter
  misc_feature (1)..(123): Xaa is any amino acid
IRFFEIESYLNKNFKDCSTGMKKKVQIVISLIGEIDTIIWDEPNDGLDIVSNMKIKNLLKSYKSKNVTILFSSHVLEFLNDFVDHCILLNEGNIIENKDIKDIASLETLFLNNLPQNILSINL

SEQ ID NO: 78870 - protein, 205 aa, Unknown
  Obtained from environmental sample
  DOMAIN (72)...(105): Tetratricopeptide repeat
  misc_feature (1)..(205): Xaa is any amino acid
MAGVFFKSDGKFRLFSVFFSLILLVSMFSGCAGLAASAQEYYSIGMAYYELGKYEEAEKWLNRAKLADRTMTASQYNLGRIAFETKDYEEAAKHFEGILRKDPDNLLALRAAAFTRIKMNEIEKAEKHYNKILALVPESADDGYHHALVLFAMERYGKAEEVLVKYPFALQDNNDMILLYARTQKALNKIEAIDTYAKWLAGNFQ

SEQ ID NO: 78871 - protein, 316 aa, Unknown
  Obtained from environmental sample
  misc_feature (1)..(316): Xaa is any amino acid
MLENDITQGNPGSAFGRQDTPSVEQIVRAAIYKEMKNLDYRALEYAQEDSRICEKFVKINPLRPYSFQVWQKYISRISEEKLEKFMIAMNKIAISEGLEDVREFRQDTTVIETDIHYPTNNSLVWDCIKECERLLSLLKEEVETLEFEEYRKKAKKIHFKINVEKNEEKRVKLFKKQLEMFTNSIKQVSNIVKKKKEYGGTTKSDGIIAAMEELIPVMEKVFRMTERREILKEKVPVEEKIFSIYERHTDIIVKGGREAQFGHKVNLGSGSSNLILTCEILEGNPKDSELYEGTLKKLKKFTADAGASVRGRPVCE

SEQ ID NO: 78872 - protein, 106 aa, Unknown
  Obtained from environmental sample
  DOMAIN (4)...(106): Protein of unknown function (DUF554)
  misc_feature (1)..(106): Xaa is any amino acid
VAALSGTIVNAVAVVLGSLAGLVLPRMPERMREVVMQGLGLAILFIGMDMGLKTRNFILVIISLALGGIVGSLLRLDELLDWTGRRLEAAVKKGGGRAARCDSRSW

SEQ ID NO: 78873 - protein, 265 aa, Unknown
  Obtained from environmental sample
  DOMAIN (107)...(265): GGDEF domain
  misc_feature (1)..(265): Xaa is any amino acid
VNISVFGIYLGVWANKGMIAGTYPGILISALLLFYIPAVYHLCLTLCSMVIVTALVVLFKSHEIYRIDILNIFFAGAVSMVIGWQVIMNRVSLVSHAGNMEDERNNYYDQSTIDELTQLKNRRHFTHTIQRTVTNFRHSDNYLCVAILDIDYFKNYNDYYGHPEGDECLRKVGGALMDLYNNMNIYAARIGGEEFALIWFQKEITETRNVASCVCEKIRSLNIRHERSEAASYVTVSVGSNVTRCGALSDIETLYNSVDKALYTG

SEQ ID NO: 78874 - protein, 296 aa, Unknown
  Obtained from environmental sample
  DOMAIN (50)...(296): Citrate synthase
  misc_feature (1)..(296): Xaa is any amino acid
VDGDGMTATAKINLGGKDYSLPVVKGTLNELAIDISKLRDQTGYITLDDGFGNTGSCTSAITYIDGDKGILRYRGYPIEELAEKSTFIETAWTIIWGRLPTQAELRRFSTLLTEHELIHEGLRHHFDGFPIDAPPMAILSAMIQAMSCYDNALLRNHLNDEEFEAAAAKLISKVRTIAAAAYKMSTGSPIIYAVPEYGYVNNFLHMMFTLPNRPYIADPDIVKALNLILILHADHEQNCSTSAVRTIASGGAHLFASASSGVSALWGNLHGGANQAVVENVEEIRKTRTSVKDFGE

SEQ ID NO: 78875 - protein, 113 aa, Unknown
  Obtained from environmental sample
  misc_feature (1)..(113): Xaa is any amino acid
MGQNGLYARRHLEAERVRLYDNLKKLENINTDYPNIRNNLMHDQDSLSVYARQLGYGREGEEYIRIMGLGIAINTDMPVGQVNYTESPAFISDTTIKIISLLFGMAVLCVLLS

SEQ ID NO: 78876 - protein, 309 aa, Unknown
  Obtained from environmental sample
  DOMAIN (144)...(236): Mur ligase family, glutamate ligase domain
  misc_feature (1)..(309): Xaa is any amino acid
FLKPRVVWPRFTAPGEQYRDDKANLFRALDRGQLKFPAFPDPFGVINADDPSAEFFENATQRETLSFSVKGKDADLMVKSIESGAMGNSYKVYIRKERTNIDIRDNLPGAFNTGNVLASLLVVSGLTKIPVRELTPLCPKLLPVRGRMTAVDKGQNFEVLVDYAHTPSSFQTIFPPLRARLDSSGSPRRRIITLFGSAGERDTQKRAEQGKIAARYSDIIILTDEDPRGEVPIDILNEIARGVYAEKSALFKQNENVFFIPDRPAAIRKAFSLAREGDLVLLLGKGHENTIIYKDHVMPYDEIGEAEKR

SEQ ID NO: 78877 - protein, 315 aa, Unknown
  Obtained from environmental sample
  DOMAIN (80)...(259): Peptidase family S41
  misc_feature (1)..(315): Xaa is any amino acid
KQASDRPRQQSVWQYLKVYSIFHERLPKTPGSMSPYDMFIAINDSLGRGRYTEYIDDRPGGGVMFDPDTEFDDPVELTPSTVYFYLPEFSDIALEFFNASMRRLSKYPNIIIDVRDNGGGLLNVTDAILGELLPYNTQYIKNRYRRYNSGKYAGETTEDTSRTTVRRPQLLDSDRRPKKIAVLMNGGSASASEILAAGLKDGADAFLVGGKSYGKGIGQVIITRGDGRKRLSITFLEISGLTDRTGQYHRVGIEPDSVPKRITNYVNEHIPNASQQDTIQAGIEEIQAEYPNISADVIQRYFEIGLESGTTRSCS

SEQ ID NO: 78878 - protein, 211 aa, Unknown
  Obtained from environmental sample
  misc_feature (1)..(211): Xaa is any amino acid
VPFKRYSVAVLLDRVYANYASLFKPLDKTPRHSLLKVFAAVDAGILHQNLGDLDFLALQLFPDTAEGDYLRQHWSSRVTPLYAIASSGDALLKGLPNKPVPSGLVFAAASGERYYTEKAYRIGEDGTVAITLKSQGTGLITNLAPGEELPLVSSKIAGIESKAIVIGDGIIGGADAESDEEYLARVLLWLRNPVRYGKPALAAGSADLTLG

SEQ ID NO: 78879 - protein, 179 aa, Unknown
  Obtained from environmental sample
  misc_feature (1)..(179): Xaa is any amino acid
MGDRLLFTSFVPPSWILKKSDQNKFLFKRGSIVLVDMGRYKEKKIPLRVIDGVVRFFTAQRQSIFSGKKQYYIKRVIALPGDEISMSNYVFKVKAAGSAYSLTEFELSEKPYQPYIPHTPELWDDSIPFSGNMDTIILGYNECFVISDDRKHTNDSRTWGAVPVFVITAKALLRFWPFM

SEQ ID NO: 78880 - protein, 315 aa, Unknown
  Obtained from environmental sample
  DOMAIN (70)...(135): His Kinase A (phosphoacceptor) domain
  misc_feature (1)..(315): Xaa is any amino acid
MEWYLMFSYPSPGLLSVNHAMNTVFFGMLFLILFLFVIINVFISRSENEIAKQNLRLLEVNKRAESASRAKSDFLAKMSHEIRTPMNAITGMAELLLRGELSYEARSYAQDIKQAGNNLVSIINDILDLSKIEAGKLEIVSAKYMLSSLINDTINIIRTRLKEKPVRFFTNIDGNIPNSLIGDEVRMRQILINLLSNAVKYTERGHIGLTITMDKHDDKQVLLRMDVIDTGQGIKPEHQVNLFDEFVRVDMKRNQGIEGTGLGLPITRRLCAAMYGKLSMESEYGKGSLFTVIIPQSMNQKSLCRGKTRHKPGEK

SEQ ID NO: 78881 - protein, 270 aa, Unknown
  Obtained from environmental sample
  DOMAIN (3)...(180): Domain of unknown function DUF21
  misc_feature (1)..(270): Xaa is any amino acid
MLMLVVIVICVVGVSGMCSLIEAVLYAVPWSTIERLRGEARRSGEVLHGLRSQVSRPIAAVVTLNTLTHTAGAVVAGVAAAGVLGQEYMTAFVALFSILIVIFGEIIPKTLGVVYASPLAPLLAAPLQLLTRVFTPMIWFFGLINRLLLPKGSPHAQATEADIMALVSLSRKEGVIRPTEEAIIGNILELDQKRVHDIMTPRPVVFSLPVTMSLEEARTVRGLWSFSRIPLYAEHNEDLVGLVSRRRLDRPPGFGATLRHSLGETDASPS

SEQ ID NO: 78882 - protein, 81 aa, Unknown
  Obtained from environmental sample
  DOMAIN (1)...(81): Tetrahydrofolate dehydrogenase/cyclohydrolase, NAD(P)-binding domain
  misc_feature (1)..(81): Xaa is any amino acid
AAAGKAGFINREMVKEGATVIDVGINRVPDSSAAKGYRVCGDVDPAVMQKAAFFSPVPGGVGPMTIAMLLQNVAEAAEKIV

SEQ ID NO: 78883 - protein, 179 aa, Unknown
  Obtained from environmental sample
  misc_feature (1)..(179): Xaa is any amino acid
DRSSTIKCYSKGEVIGKKSVGGLAGDINYHDTVAQCYSSGKVSGKVDVGGLVGRTGWVGDISQCYSIGAVSGEENVGGLVGSCGGGNTITQCYSTGEVGQKEGRGGLVGFAGDIGKITDCYWDVATSDTTDSQGGKGKITAKMQSRATYENWDFDTVWQIDEGKDYPRLRALAEEPAAT

SEQ ID NO: 78884 - protein, 302 aa, Unknown
  Obtained from environmental sample
  DOMAIN (43)...(141): 5'-3' exonuclease, C-terminal SAM fold
  misc_feature (1)..(302): Xaa is any amino acid
LVGEGTYALRPAKTAKSEISSGQNSGPVWEIIGPAQVKAEWGVVPEKILDLLSLTGDSSDNVPGVKGIGEKTAVELMTRYGSLDEIYKNIAGIEGAKGRKLAEGKESAYFSQSLIRLDTSVPLPVSDIEKLSAENLNRLAAARILFREGLRQSAKQLDPDVGAHNAPDSAPVPDSAPTGVGVSADAGAPSSKAPSGEQQAPDIYSTYSSDKSLFGAGVYKIILDLAELESILAEAHKQKLLALDFETDSLDAWNSRPIGISLALKPKEAYYAPVVPHGVKQDGTAAEPNHNDPEKVRALLAP

SEQ ID NO: 78885 - protein, 326 aa, Unknown
  Obtained from environmental sample
  DOMAIN (82)...(326): DAHP synthetase I family
  misc_feature (1)..(326): Xaa is any amino acid
WVFPWDRIRHEKEKIDKFISDWESKGFSTIYSVGTEHTAVCLIGNTAEVDMDHIVQTNEIVSYGKRITEQYKAVNRSVHEASTIIRVGGAVVGEGHFTVISGPCSVESNEQISEIARSVKESGAKILRGGAFKPRTSPYAFQGRQEEGLEMLCAAKKETGLPVVSEIMNQTQIDLFEDIDIVQVGARNMQNFDLLKAVGALKKPVLLKRGLANTIEELLMSAEYIVSAGNSQVILCERGIRTFETMTRNTLDLSAVVILKQKSHLPVIADPSHASGIRSLVAPLAKAALAVRADGLMIETHNNPAQALCDGAQSLDLKQFRTLMEE

SEQ ID NO: 78886 - protein, 96 aa, Unknown
  Obtained from environmental sample
  DOMAIN (9)...(96): Class II Aldolase and Adducin N-terminal domain
  misc_feature (1)..(96): Xaa is any amino acid
MDVYKTLREEAFQANLEIQKQNLAIYTWGNASAFDPEKAVFAIKPSGVPYDKLKPESMVLVDLEGKIVEGKLKPSSDTKTHQVLYREFRRKLLAPA

SEQ ID NO: 78887 - protein, 158 aa, Unknown
  Obtained from environmental sample
  DOMAIN (69)...(94): Tetratricopeptide repeat
  misc_feature (1)..(158): Xaa is any amino acid
MGKDLKILKYLLCLLLVLPGLGRLEAQTGANAAGAAALYERGREFMAREEWYSAAEALLDCLRQNPAHAEATAALADCYYELGEFDEALAWVRKARVLARGNTSIINLEAVTLIALGRLDARASVISELLCRAPVYPRSAVYRRGAGHCQGQDLEALL

SEQ ID NO: 78888 - protein, 102 aa, Unknown
  Obtained from environmental sample
  misc_feature (1)..(102): Xaa is any amino acid
ANTQRGMKRKQGGITKTGTGHIRKLLTERAWHYTRPVKVSIRLAERRVGTSETVISYADRALNRLHGKYVKLLFKGKSKQAAVTAVARELSGFLWGVMTEVA

SEQ ID NO: 78889 - protein, 282 aa, Unknown
  Obtained from environmental sample
  misc_feature (1)..(282): Xaa is any amino acid
MIVTTHHGILKNYGYTRQSVENASVEFDAQTLSPTYKIINGLPGESRAIDIAASNGLDGSIVNSARKYIDEKKSDVSGLIKGLEQKQRELIGIEHKSAMEQNRLKEEKRKADLKELRLKQKETELKRESLGKLQVFLGESRKTLENLVRELKEGEVTREKTLKVKGFLNDLAHNAEMESAALDEEERLVREQFLKARKGGEENDDSESSGVAASSAAKSEIFAPGTEVFVGASKQRGRYCPRRPEKHGWKFMDSKDWFLKISFPEDELVPATPGNIKKSSSR

SEQ ID NO: 78890 - protein, 197 aa, Unknown
  Obtained from environmental sample
  misc_feature (1)..(197): Xaa is any amino acid
MDNNSYVNPLSDRYAGPEMLRLFSPQYKFSTWRRLWCALAEAERDLGLPISEEQIAEMRKRVDDIDFAAAREFEKQTRHDVMAHIAAFGAACPAAKPIIHLGATSAFVGDNTDLIQTREGCRILLGRLASLVSVLKKFALDNAETATLGFTHFQPAQLTTVGKRACLWIYDLLMDFEDLRRFESTLKFSRREGGHRN

SEQ ID NO: 78891 - protein, 301 aa, Unknown
  Obtained from environmental sample
  misc_feature (1)..(301): Xaa is any amino acid
MGNMPGFEASGDVFLAGCQSINMSTGLVTLVKISNGRVSLPMWKAESKTSVSRYSGNDTITQNGNTNEYVSLGISDNPTITWENEADLIAAVEFNSITFNKGSATISANEGTLISKGGGDMKWTAVVDSTFGYSEINAITYGGGKFVAGGRGGKMAYSSNGVTWTAVTNSTFGNSDITAIAYGNNKFVAGGSGGKMAYSTDGVTWTAVTDSILGKNSPGAIAYGNGKFIAGSGNKMATSMDGITWTDVANSPYSGSSSDLAFAFGNGKFVAHNSLQAMMYSSHGVTWTGRQTRRDSTGTSM

SEQ ID NO: 78892 - protein, 280 aa, Unknown
  Obtained from environmental sample
  DOMAIN (40)...(276): alpha/beta hydrolase fold
  misc_feature (1)..(280): Xaa is any amino acid
AVSQKLFPQQPNRAIVLFHALGDEADTWRHVFPLLAAAGCRVIAPDLPGFWAFVWEGKDRYAPPLCGDPPALTKAGDAGQAGIASPENPAILAGSSLGAVISELAACKRPDLVKALIFIDGCFPIDNKIDNSLLPLMLPSVGSKWYRSFRKNHKAAWESLYPYYGDLDAMNGEDREFLRERVIARVESENQERGYLSTLRSMSIFFMFNKRFVSRKIKTYPGKIAILWGEKDRVLPVDKAALFRGLRPDAQMTLISGAGHLPHQEKYEETAAEMLRFLNK

SEQ ID NO: 78893 - protein, 256 aa, Unknown
  Obtained from environmental sample
  DOMAIN (17)...(144): Integral membrane protein DUF6
  misc_feature (1)..(256): Xaa is any amino acid
MNQRALRADVLLLLTAGIWGFGFVAQRSGMEYVGPFAFNGIRFILGSLSLLPLIFFRNRSASGTHQGSIKKFLLYSFSAGSCLFIAVILQQIGIMFTTAGNAGFITGLYVVLTPIFGIFLGRKTGPATWLGSVFTLSGLYFICAVGKQGFNPGDIIVLASAVFWACHVLLIDRLVQNIDPIELSSGQFAVCGILMLIGTFLVEPFIMPIVEKLNPALLETGTFSWLPLTVLVNGISTQNIAFPVNAINSDSVWRAG

SEQ ID NO: 78894 - protein, 103 aa, Unknown
  Obtained from environmental sample
  DOMAIN (1)...(97): Homoserine O-succinyltransferase
  misc_feature (1)..(103): Xaa is any amino acid
VPAEKAITVQSETREGGVFIATARDGREIYVTGHLEYDALTLDREYRRDLGKGLPIEVPINYYPGDDPSQEPLVRWRAHAHLFFSNWLNYVYQETPYDLATLK

SEQ ID NO: 78895 - protein, 95 aa, Unknown
  Obtained from environmental sample
  DOMAIN (8)...(84): Uncharacterised ACR, YggU family COG1872
  misc_feature (1)..(95): Xaa is any amino acid
MNNYFRVDGDTIKLEIKAVPGASKTEFAGIKDGRLRIRLAAAPEDGKANAELLSFLSKALGCAKRDLRLVSGEKSRLKVVELPLDCRERVEKVFW

SEQ ID NO: 78896 - protein, 348 aa, Unknown
  Obtained from environmental sample
  DOMAIN (225)...(348): chorismate binding enzyme
  misc_feature (1)..(348): Xaa is any amino acid
MVIKPTLEEQRQIAKSSAGKYNVVPISAEIFADTATPICVLRKLKAISRHCFILESAEDTKNWGRYTFLGFDPSSEITCIDGAMKITEPDGTVKSFQTNDPNKHIQEILDQHRSVKIEGLPHFTGGLVGYFAYDYAKYAEPSLKLDSRDEEHFQDIDLMLFDKVIAFDHYRQKIVLIANIGTSDIDAEYGRGVEALMRLKGLIEGCVPERIAQASLKSELKALFTKEEFCAMVDKAKWHIKEGDIFQVVLSNRFEADFDGSLFDAYRVLRTINPSPYMFYFSGSDLEIAGASPETLVKLKDGKLYTFPLAGTRPRGATEEEDAELEKGLLADEKELANPGDNPGGGTG

SEQ ID NO: 78897 - protein, 98 aa, Unknown
  Obtained from environmental sample
  misc_feature (1)..(98): Xaa is any amino acid
MTQSSLDDSVRRAAAPGAPAPSFDILIIGSGGAGLRAAVAALEANPQAKVCVVSKVMPSRCATCMAEGGINGVTDFSQGDSYELHAFDTVKGGDYLVD

SEQ ID NO: 78898 - protein, 326 aa, Unknown
  Obtained from environmental sample
  DOMAIN (139)...(280): Flagellar hook-length control protein
  misc_feature (1)..(326): Xaa is any amino acid
GPPIDQIGRDGDIQVYAKAIPGEDAELPQNFFGVEIPEQSADFSEEALTAAAVPVQETDIADARGKEVKKDGDLFQFEKNEVSLLNSAGKEAAPLQKETEKDSRVKPGEAQSRSRRDKLSFEVRDMRSGMDNQNNVTQIKAGAQIERTQNIPVRELTLELRLPGNAQSTAQTAWEVKAGGAAVENMLARELHQNFNGDIVRHASMALHDGGEGVIKLALKPDSLGNVKIHLKMSENKITGHIVVESEEALNAFRKEITSLEQAFRDSGFENARLDLSLTADQRNTDWQEQKAPSPFTGDAASRYDESYAGGSLPIVNVFFGQRHGS

SEQ ID NO: 78899 - protein, 310 aa, Unknown
  Obtained from environmental sample
  DOMAIN (1)...(127): FGGY family of carbohydrate kinases, N-terminal domain
  misc_feature (1)..(310): Xaa is any amino acid
IEKAGLPMRPGYTAPKVLWLKKHKSSAFAKLRHILLPHNYINFLLTGEYWAEYGDASGTALFDVRGRKWSSEICKLISPDVEKYLPPLTTSEKTAGKVSKAAAALYGLNEGTLVSSGGGDNMMGAIGTGAVKDGFLTMSLGTSGTLFGFSNAPVIDPTGNLAAFCSSSGGWLPLLCTMNCTVASEEFRKLMDLDVKAFDAEAEKSPVGADGIVILPFFNGERTPNLPNGRASVNGITAANFNRQNLARAALESAIFGMRIGLDGFKSLGFKPKEIRLTGGGAKSKLWQSIVANVTDLPIRILQIPRPSTP

SEQ ID NO: 78900 - protein, 317 aa, Unknown
  Obtained from environmental sample
  misc_feature (1)..(317): Xaa is any amino acid
MAEWEINGTVSLLKLFDDRDYDIDGVKSDLSVEQLIFAACRGGWPASLFKKTDKASLFTASSYIDNICESDASTVDGVSRDPRRTREILRSYARNISTLSGNQTIIKDITANFGTISENTFYSYLNALNRLFVIDEVPAWSPAIRSASAIRASRKREFIDPSIAAAALKISPEILMQDLNTFGYIFENLCIRDLKAYSHAHGGEVSYYHDRHGLEADCVLRLNDGRYTLIEFKLGSRQIEEGAEHLLTLQNLIRTYNAVESVKIKEPEFLTIITGGEMSYRRKDGIYIIPVGCLKEYPSIHRLSSQRVINLLSYNKS

SEQ ID NO: 78901 - protein, 134 aa, Unknown
  Obtained from environmental sample
  misc_feature (1)..(134): Xaa is any amino acid
FFPRIIAEPLRLVAFVEERFDTANKKEKKEIVKKYIGIFRAEGADTLVLGCTHFLYLLKEFKRYSFPFIKIFSSLDGVTRRIEYLLNANSGELTAGKNSQPVNRLILTGTEPADAGWKNRAKKMGFKLYLSDEL

SEQ ID NO: 78902 - protein, 185 aa, Unknown
  Obtained from environmental sample
  DOMAIN (22)...(159): Exonuclease
  misc_feature (1)..(185): Xaa is any amino acid
VDDFCNNRLENRKVLTRERLLCGLCKFQDGKATDTYYSLIRPPKLYIRPDFTEIHGLTVDDVRDAPTFINIWDSDIKPFIGDYPLAAHNAAFDMGVLGAVLDWYDLDIPRLLYFCTCNLARNTWAGLKSYSLTNLANYFGIVYNAHNALEDAMTCGKLVQMAAEKFGCTNVEELLESARLKMKVL

SEQ ID NO: 78903 - protein, 79 aa, Unknown
  Obtained from environmental sample
  misc_feature (1)..(79): Xaa is any amino acid
MKANPKIEIAPSTPDGKWLRVCGNVAFNPNKAAKEKALETMPVLKNMYSPDDGIFEIFHFENALAVFSDMQGGKREVKI

SEQ ID NO: 78904 - protein, 205 aa, Unknown
  Obtained from environmental sample
  misc_feature (1)..(205): Xaa is any amino acid
NYPPFDGEDFSATILAYYTEYVYSRPDITPLAMMILLLTAMICIPISVLISKKIGKKRTYQICFVALSTASMIIFLLGHRLGPNFFLGMMVYAGIGVGFMYVAPFAMIPDAVDYGAAQTGERDEGAYYGIWTFISKLGTSFSVFVSGLILSAGGYIANVAQSDSAIFAIKLIIGPIPAVILIGALLVIEKYPLDEKSFNALQKTS

SEQ ID NO: 78905 - protein, 214 aa, Unknown
  Obtained from environmental sample
  misc_feature (1)..(214): Xaa is any amino acid
VGTVTVKYNNVQRRFSDGTLWGRLAVQSPVYPGDLIRVAEYSAATLNVNDDIIDINENSLIRIHALVDDEGRVVIDLGSGSLSVSGGGTGAVNGGVALRITGSVIAPKAGTVLSASAGENGVTVQVNGGSALIIKEDGRSGVLVMGETLTLDTGGVERAVPSAVVLSPRPNACLVNKNAGTLNVRFAWDTANMEQKKPLRLEISAAPNFYALRV

SEQ ID NO: 78906 - protein, 198 aa, Unknown
  Obtained from environmental sample
  DOMAIN (6)...(185): ABC transporter
  misc_feature (1)..(198): Xaa is any amino acid
LEIANNDFIAITGNNGCGKTTLLKCITGLLRPSEGDIFIHGKNTKKLSVCDISKDVGFVMQNPNTQIFTDSVYKEVTFALKNMRLSKTEIKQRVETALKTVGLNDEDAFPPALSRSDKVKTLIACVIAMGCKIIILDEVDAGNDYPGRLKVRDIARDLHSRGFSKIFVTIKSFWGRIPQQIDKNGKRTGSYLEGRTEN

SEQ ID NO: 78907 - protein, 102 aa, Unknown
  Obtained from environmental sample
  misc_feature (1)..(102): Xaa is any amino acid
MSNKSVFKSAAAVILAALFLAIAGCGPDPFFIHVVSIEGVPETGEAGTPLALTGNIRPAFASNKSIVWSVTDGGNTGAGLSGNILNTAASGTVQLGQSVHDL

SEQ ID NO: 78908 - protein, 316 aa, Unknown
  Obtained from environmental sample
  DOMAIN (1)...(65): PEP-utilising enzyme, mobile domain
  misc_feature (1)..(316): Xaa is any amino acid
MRAAQGILTARGGMTSHAALVARGWGKCCIVGAADFHIDAKAKTIVIKGKTLKEGDIVTLNGTKGSVYEGALPMIDATENPRFQSFLKLAEKYKSMKVRANADTPADAKVARSFGAEGIGLFRTEHMFYGEGSDEPLSYLRQMILSKSVQERRAALDKLFPFVKRDIKATMHAMAGFPVTIRLLDPPLHEFVPESQEKVSDLAKKLGIDYGDVRKRGESLKEVNPMLGHRGVRLGITYPELTEMQVRAILEAAAELNKEGTKVTPEIMIPVTCTPKELAHQKTIVDKVADEVKRSTRSRTRIPLRHDDRDPPRGAS

SEQ ID NO: 78909 - protein, 161 aa, Unknown
  Obtained from environmental sample
  DOMAIN (4)...(154): PHP domain
  misc_feature (1)..(161): Xaa is any amino acid
MILFDLHVHTLFSHCGIHTALEVLARANELGMRGIAITDHGPALPGGRLNNPFFERFKSPYPNVELLKGMECNVADDQGNIDLPPQFKKFMDVVLLGLHPNIPTGQSKETYTAMLVNAIEKNPCVDIITHPNDPNYPVDYKRLAQAAKVAGGPFGDNWGGG

SEQ ID NO: 78910 - protein, 324 aa, Unknown
  Obtained from environmental sample
  DOMAIN (83)...(154): HAMP domain
  misc_feature (1)..(324): Xaa is any amino acid
FWGPDYGRVDRKRTYGSYLKEVKDVIKNAQEWEGTAYDPELKTNMVMAIANIPIGVSPTTWSVMVGSTEAYILKDVNAMRNFVIILALIALVAAVALIYLVLSRTTRPIVKLADTLKDISEGEGDLTRTITVNSKDEIGDLAMYFNKTLDKIKNMIIHIKDEADGLSVIGNDLASNMTETAAAINQITANIQSIKGRVINQSASVTETNATMEQVISNINKLNDHVEDQSTNISRASSAIEEMVANVGSVTQTLVKNVDNVNSLKEASEVGRSGLQGVVADIKGIAIESEDLLKINAVIEDIASQTNLLSNDAAIEAAHAGGSG

SEQ ID NO: 78911 - protein, 273 aa, Unknown
  Obtained from environmental sample
  DOMAIN (3)...(263): UbiA prenyltransferase family
  misc_feature (1)..(273): Xaa is any amino acid
VRFPFALASMLAAANGYLSAKVFLLIWAGMFVAENGAMAFNRFADAKFDSLNPRTASRHLPAGKLSKNGVIAFIVLNGAAFVFFAWLLNPFAFYCSLPLFLFLLSYSLWKRFSSLSHFMLGFAIGASPLGAWIAVRGEPALFPFMLGIILAFWMAGFDIIYASQDMESDKALGLHSIPAKFGIVKSMRISLFCHIAMLLLAAFTGVHWNLGLPWLISFAVIFIALLYIHLFRKSNDLDCMNRDFFLANIAISFLVLLGLGTSIFIGDTNAFIP

SEQ ID NO: 78912 - protein, 316 aa, Unknown
  Obtained from environmental sample
  DOMAIN (135)...(316): Methyl-accepting chemotaxis protein (MCP) signaling domain
  misc_feature (1)..(316): Xaa is any amino acid
AVYFHAFTLKKNAGAVYTSIIAQLENLSSEQKDLTKRISICSVDELGTIAGMVNVFCEHLGDGIETIKYKINGLNHTSFELSANMEKTSTAVNQISSNLDNIENLVVKQENGALVAGEAVGIIKKNIDSLNKMIEQQAESVDMSSSAIEEMTANIRSVTQTLAENSKNVGVLVEASENGRTGLQTVAQEIKEIAHDSEGLLEINSVMNNIASQTNLLSMNAAIEAAHAGEAGKGFAVVADEIRKLAESSGQQSKTTVVMLKKIKASIDSITKSSNDVLDRFGAIDSSVKTVSEHEQNILHTMQEQEIGGKQISRPI

SEQ ID NO: 78913 - protein, 298 aa, Unknown
  Obtained from environmental sample
  misc_feature (1)..(298): Xaa is any amino acid
MNGQALDLFTAGRHTLKTQNIPLIKRLLNIPTGGQTPFHCEVYFINKTEQMAIKWGTDSQVQYMEPTYKFPLKIGASGEMSLRVEDSRKLLLKIIGTERSFNQSGITQMFRAFLMAKVKPYLAQTMQSSDFSIFEVDSHMLKLSEALHKQLAPDFMDYGVSLERFWVTTVVKPDGDSAYEKFRDIHVRQYSDVAEAQLRQKVEIIDQQTNAQKMIIDSQAIATKRTQEGYTYQQERGFDVAEKVAQNEGVGNFTNTGIGLGMMGGVAGGVRPTVAGITTDALNQVMPQPGGLSSPIVG

SEQ ID NO: 78914 - protein, 285 aa, Unknown
  Obtained from environmental sample
  misc_feature (1)..(285): Xaa is any amino acid
MGCGNVFGYLIWRAQSKLTGTSKATVGAEIMEAGNYKFAAAETLNTNVTIGNGINLTTGTTGQITSLATGSVLAKGSSIDMLTGTMGTASSSTIKIEVSGKEVDISYSVDAAGAGTLKVGGELVAAGKSITLEDGTVLMHNATTAATGKIFVEQGSIKMVTELNPATSGGNVKAFSVTKDSTLAAGTKLAANTTLMGGTVVTDEKTTVGGSIDFNGSNIQFSANVKTALAADYNKAAVGDSVTYIFSNYQAPSSQLNDSVMAQIGANSGQTTFGRWLADHPGGQP

SEQ ID NO: 78915 - protein, 79 aa, Unknown
  Obtained from environmental sample
  misc_feature (1)..(79): Xaa is any amino acid
VNIGYDQEDVAASSELPSGQYELRDFVRNYFTRKYASELQPENEARLNRDIKEILNTRFLDTGKVRIIVFDKLDVMEVF

SEQ ID NO: 78916 - protein, 137 aa, Unknown
  Obtained from environmental sample
  DOMAIN (1)...(126): Bacitracin resistance protein BacA
  misc_feature (1)..(137): Xaa is any amino acid
FFPWTDWPSWLDALIIGIFQAIAIPPGISRSGATISGALSRRLDRDFAARFSFLLSIPAILGALVLNLKDLAKNGGAAGGMGAEVIAGTITAAIIGFFAVKIMLKIVKEKSLFGFAVYTAVLGGLILFDQFVTHLVF

SEQ ID NO: 78917 - protein, 134 aa, Unknown
  Obtained from environmental sample
  misc_feature (1)..(134): Xaa is any amino acid
MPESPKPIIVIRSLSAAYTIHSFGWFGKKEIKPVLNNINLNINAAEIFGLTGESGCGKTTLARCILGLIDYEGEIFIDGLKQDGFNPKHNIQMVFQDTASSLNPVKKIGWLLEEPLVHKGSCRGSVPWGGGNAG

SEQ ID NO: 78918 - protein, 113 aa, Unknown
  Obtained from environmental sample
  misc_feature (1)..(113): Xaa is any amino acid
MDSRYAISFVLAAHVPFVREYRKDDDLSQSGEEGRFFEYVSETLLPLLGVLDRLENDHVPFCLALAVSPILMFLLGDEHLQNKYMLYTDKQIEFGKQEIERTSGYARNETAGA

SEQ ID NO: 78919 - protein, 95 aa, Unknown
  Obtained from environmental sample
  misc_feature (1)..(95): Xaa is any amino acid
EGHRGGDYPEGVPWKSAWKERFDPKRGRGATSIFLYPGYKSNVADALFTNFHTPESTLVMLVSAFAGRELILESYAEAIAEGYRFFSYGDAMLIV

SEQ ID NO: 78920 - protein, 174 aa, Unknown
  Obtained from environmental sample
  misc_feature (1)..(174): Xaa is any amino acid
TVIVSSFLLFSCKTETDQNDTDVEDVKVYFSPDGKCDEKIITIINNASSEINVAVYSFNRIPIINALVAADARGVTVRVIVDANEAKDSAQSHATPLLEAANFEFRKKSFPRNTTAMHDKFMIVDKKIVTTGSYNWTTNATENNDENLIIITSKSTAAVYNDEFNRIWNSAAGE

SEQ ID NO: 78921 - protein, 90 aa, Unknown
  Obtained from environmental sample
  misc_feature (1)..(90): Xaa is any amino acid
MDSWSKYKGIFSEEKVGYAHGFMRRGTEVEQMMKVVGEEGTSIEDYVIYLKGDLIDSVYFQQNSFDEVDAAVKPERQIYTLTNCCARRSS

SEQ ID NO: 78922 - protein, 80 aa, Unknown
  Obtained from environmental sample
  DOMAIN (5)...(69): Heavy-metal-associated domain
  misc_feature (1)..(80): Xaa is any amino acid
MNKETITVGGMHCAACSARVEKALRKLEGVQSAVVNLATEKATVVYDSKALRGSVIKEAIINAGYEVIENFQKCVRRKIS

SEQ ID NO: 78923 - protein, 225 aa, Unknown
  Obtained from environmental sample
  DOMAIN (1)...(140): tRNA synthetase class II core domain (G, H, P, S and T)
  misc_feature (1)..(225): Xaa is any amino acid
LFGLIAGPAARINVYTLEGENACLVGTAEITLGGYYSDTIFAKDKLPIRMAGLSHCFRREAGAAGQFSKGLYRVHQFTKLEMFVYCLPEESGKFHEELRLTEEEIFKGLDIPFRVVDTCTGDLGAPAYRKWDLEAWMPGRNNGEWGEVTSTSNCTDYQSRRLNIRYKDDDGKNKFVHMLNGTAIAISRAIIAILENFQQADGSVRIPPALVPYVGFDVIKKSNEQ

SEQ ID NO: 78924 - protein, 75 aa, Unknown
  Obtained from environmental sample
  misc_feature (1)..(75): Xaa is any amino acid
MNNIVNVSEGKIALYSTPGGNVYVDVVFKDETFWMTQKAMSELFEVDKSVISRHLKNLFAEEELEERQLLQKWHS

SEQ ID NO: 78925 - protein, 125 aa, Unknown
  Obtained from environmental sample
  misc_feature (1)..(125): Xaa is any amino acid
MSILKEGYPFIIPAFIAGAAAAAISRFVPFPPGKIACIEAGSLLINFSFYGMFLIRDPKIKITQSEGIILSPCKGTVLEVTEENGEKVIRVFLSIFSVHLQRSPVAGTVVDVKHHNPEISRGMGS

SEQ ID NO: 78926 - protein, 184 aa, Unknown
  Obtained from environmental sample
  DOMAIN (65)...(135): Sigma-70 region 2
  misc_feature (1)..(184): Xaa is any amino acid
LKANPEKNLKTERAVDRITNQQKERRKHTVHLLKEINSIPLLSREEEDAIARAAAGGSLTARNKLVKSNLRFVVNVAKKYQGHGMPLPDLISEGNIGLIKAVEKYDANRGFHFISYAVWWIRQTILKALADQSRLIRLPVNRANDIIQIEKAKKLLAGSSNCETDVRELAQLLSMLGRSDTWEK

SEQ ID NO: 78927 - protein, 211 aa, Unknown
  Obtained from environmental sample
  DOMAIN (140)...(210): Sigma-54 interaction domain
  misc_feature (1)..(211): Xaa is any amino acid
MAAILIIDDELGIRQALTAILEDEKYRVFSAEDAMAGMKILEDKKIDIVFLDVLLPKLGGLEALEQIHANWPGLEVVMISGHANIDMAVRAVKGGAFDFLEKPLSLDKVLTVCRNALALRKLREENRKLKKSASLIHSDIIGTSDAMNSIRELVRQAASTDARVLITGENGTGKEVVARAIHSGSSRVSALLWDELRRHTRPRPSDHVGGC

SEQ ID NO: 78928 - protein, 276 aa, Unknown
  Obtained from environmental sample
  misc_feature (1)..(276): Xaa is any amino acid
MTPDYGKLCKALSDYLAKLPLSDNKEAKTTNAAIIGRLMASVKMGYYPTDMEHTKLIARSIEFPEGVTANLFDPCCGCGLALQTIAREHECNTYGVELDLHRAEEALTRLNRVGFGSYFHSRISQEAFHLMLLNPPYLSVMTEGGSNARSEKRFLIDCYSHLMYGGLMIYVIPYYRLTSDVCRVLCDNFDDLSVWKFMDGEFKKYKQVAVMGLRCKRRDGSKMVQELSSLALKPDTLRELSELPEGRYRLPETEGKVNTFKGAKFNVHELAEQLKR

SEQ ID NO: 78929 - protein, 174 aa, Unknown
  Obtained from environmental sample
  misc_feature (1)..(174): Xaa is any amino acid
VEKSEQERAEFAARLKRIPKDKRIYVDECGILAYLQREYARALRGEIVEETKPGKKLDRVNVIGALCNGEHSAIECYRHATDSAFFEGWFKNNLLKELPKGYTVIMDNASFHRKKELRKIARGKARLLFLPPYSPDYNPIEKSWANMKRFLRNSLKDFQSVDFGIYNHFGLIES

SEQ ID NO: 78930 - protein, 115 aa, Unknown
  Obtained from environmental sample
  misc_feature (1)..(115): Xaa is any amino acid
MTEAFISTLAVDEDRLIKGIAETLAVNQAQVAAVVALFAEGCTVPFISRYRKEKTGGLDEVQVRGIEHKFNSGKNLETRRIEIIRVIFEQGKLTEALYNTSATRRHKRSLRYFPS

SEQ ID NO: 78931 - protein, 131 aa, Unknown
  Obtained from environmental sample
  DOMAIN (3)...(123): PIN domain
  misc_feature (1)..(131): Xaa is any amino acid
VKYLLDTNIISETRKPNCNPKVKGFLDSLAGEDLYISSITVGEICYGIEKLPAGKKKHELYVWLYSKLPEWFSGRVISLDADVMAEWGKIRGNTTRTLPAADAMIALAGNTHHMTLGYRKLRISRNKRAYV

SEQ ID NO: 78932 - protein, 327 aa, Unknown
  Obtained from environmental sample
  DOMAIN (40)...(327): Cytosol aminopeptidase family, catalytic domain
  misc_feature (1)..(327): Xaa is any amino acid
PKRGSDSAEPTTLTGLRLWGWDVKDEPERVRLAEATAEAVILARSLGDEPGNLLYPESFARRAVSLARARDMKTQVLDEKGLAREKLNLLLAVGGGSRRPPRLVTLTYQGDRASPLVVLVGKGLTYDSGGLSLKPAANLAAMHTDMVGAAAVLAVILAAAELKWPLNLAAILPLAENMPGGGAYRVGDIHLSRSGRSVEITNTDAEGRLVLAEALTWAGEMKPAQIIDVATLTGACSIALGGNCAGLFTDDDGLRADLMAAAGASGENLWPLPLLDEYEEHLESQVADLLHAPAAAGGAINAALFLRKFVPPGCPLGPPGHSRARPA

SEQ ID NO: 78933 - protein, 171 aa, Unknown
  Obtained from environmental sample
  DOMAIN (110)...(167): Threonyl and Alanyl tRNA synthetase second additional domain
  misc_feature (1)..(171): Xaa is any amino acid
MSENNKQQEKLAVIRHSVSHIMAQAVVNLFPGTKVAIGPSIENGFYYDFLLPKPVSPGELAAIETEMKRIIDSKQDFAPVTVSREEALRRFAAEEFKTELINDLPGGAEITIYENRDADGKVLWADLCRGPHVAHTREINSAAFKLQNIAGAYWRGDKKRAMLTRIYGNAW

SEQ ID NO: 78934 - protein, 171 aa, Unknown
  Obtained from environmental sample
  misc_feature (1)..(171): Xaa is any amino acid
LTIRELNTLAQEIREQIVSTVSSNGGHLSANLGIVELTIALHRVFDSPSDKIVWDVGHQCYAHKLITGRYDLFSSLRKKGGIAGFPKRTENPHDAFNTGHASTSISAGLGLLAADRIQGGNSRAIAVIGDGALTGGMAYEALSHCGHLGPSVIVILNDNKMFISRKCRGLS

SEQ ID NO: 78935 - protein, 144 aa, Unknown
  Obtained from environmental sample
  misc_feature (1)..(144): Xaa is any amino acid
GPQGQIRHEEPDYRHVKKGKIAVISREEGSGTRGAFEELVGFQGKLLAGANESTSTGAIKASIAQNPEAIGYISLGSVDNSVKAISVNGIAPTNENVKKGTYKIARPFIVLTGKNARPESAAFIDWMLSPEGQAIVSKSWITIK

SEQ ID NO: 78936 - protein, 202 aa, Unknown
  Obtained from environmental sample
  misc_feature (1)..(202): Xaa is any amino acid
MRELHQRLLKMHGKPYGVYKSLQGQFFSFGDFTLKFTHIQGDPHAQPSRIMLSAKMDALGFAEELHNTREKEIALADFLLRQFTRNAENISIVKAHCQIMQRNSLYIENGIVRILASVNLPGESRRIEGEKASELLIGTLSDWITTAMYWNNLAKEKCKAHLECYTNRNFLLVQIKEKNLAAFVPHGGYFAEGIRHFRNCLC

SEQ ID NO: 78937 - protein, 118 aa, Unknown
  Obtained from environmental sample
  misc_feature (1)..(118): Xaa is any amino acid
MTKSLLIDLQWFSDNAEEEGRTEQPTEHKIQRLREEGQVSKSQELIGAVTLFLPALMLLFIAPYMLRTCVEMLRFFLLRAVELDPTKDAILVVAFFRYMARLALPILAVAVLPRCFQY

SEQ ID NO: 78938 - protein, 104 aa, Unknown
  Obtained from environmental sample
  misc_feature (1)..(104): Xaa is any amino acid
MRARFFAVVLISVWAFSACGSSNPDVMRVDAGTQIDLSGYWNDTDVRIVCEALIKDCLNSPRVDQAIKAKAGNLPGGKTPVVLVGRFRNESDEHIDTRIISNTM

SEQ ID NO: 78939 - protein, 283 aa, Unknown
  Obtained from environmental sample
  DOMAIN (33)...(223): ABC transporter
  misc_feature (1)..(283): Xaa is any amino acid
MEDNVLSFEQFSFKYRAQTEPTLIDINLKVSRGEKILILGPSGSGKSTLIHCINGIIPHAFKGESSGSLSLMGSDISGMNIFDISKTAGTVLQDTDGQFVGLSAAEDIAFALENDCVPVEEMHRRVTEASRLVDMTAHLGKSPQDLSGGQKQRVSLAGVLVDNVEVLLFDEPLANLDPAAGKDAIELIDELHKKTGKTILIVEHRLEDVLHRPVDRILLIDKGRIKADKKPADILASGLFKGNRHTRGSVPQRPRLLRYYSRFSNVARNLGTLGLEFEPLRDG

SEQ ID NO: 78940 - protein, 164 aa, Unknown
  Obtained from environmental sample
  DOMAIN (1)...(164): Fumarate hydratase (Fumerase)
  misc_feature (1)..(164): Xaa is any amino acid
MCITAAHDLPADVLSRIREARADEPFPRAQGILDSIIENAGIASTRRIPICQDTGTAVFFVTLGDGVRIEGGGLLDAINEGVRQGYADGNLRSSIVDDPVFDRINTGGNTPAVTHVDLASGDKLSVTLLPKGGGCENMSALAMLKPSEGSAGVAKVVCDTVTRA

SEQ ID NO: 78941 - protein, 329 aa, Unknown
  Obtained from environmental sample
  DOMAIN (3)...(294): 3-dehydroquinate synthase
  misc_feature (1)..(329): Xaa is any amino acid
VPLFAFIIADENTAYIAAKISNGIDYPCVILKSGEENKTWQSVETILFAANKASLGRDCVFIAVGGGVIGDMAGFAASIYMRGCCFVLVSTTLLGMVDASVGGKTGFDLFGIKNFVGSFYPAQSVYISLDALCTLPQAEIKSGMAELIKTAVLCGDDFIEQLTPLAENFNNLNKFLEDGTLHKCIERAVLYKGGVASEDFRESGKRMLLNLGHTFGHALESAAGLGNITHGEAVAWGMVRACELGTALGVTPRERAKKIINLIKSSGYECSCPHPSAGDKDLLLNAMKSDKKKKSGRLTFIVPDEKSARIVFLGTEEIKILENILIGGV

SEQ ID NO: 78942 - protein, 62 aa, Unknown
  Obtained from environmental sample
  misc_feature (1)..(62): Xaa is any amino acid
VSVMAYAPYGAGGVIIRVEADIRRGIPGIDISGLAEGAVREAKERVRAAFRNSDSLFRWTGF

SEQ ID NO: 78943 - protein, 132 aa, Unknown
  Obtained from environmental sample
  DOMAIN (3)...(132): Glycosyl hydrolase family 3 C terminal domain
  misc_feature (1)..(132): Xaa is any amino acid
VQKGKDITYAENGKADGVFDAVIAVIGEDPYAETEGDRMQINIRQRDMDMLREVYGYNCPVIVIMLSGRPMTIGDENKNWDAFIAAWLPGSEGDGIADVLFGDKDFTGRTPYTWRKTVNGEVLFPFGSGLTK

SEQ ID NO: 78944 - protein, 242 aa, Unknown
  Obtained from environmental sample
  DOMAIN (150)...(235): FR47-like protein
  misc_feature (1)..(242): Xaa is any amino acid
GFPVWTLGQGVPLGACYTGQTDPAACVTRSKNGSPAAFLRGIFGGKVLLHSLQGRKEDALVMEKALEEMGLYPSEKKDYDIMCLDHAPLSCHSTAPVNLVIRKPAPQDMDELATLHAGYEQEEVLPAASEFRPAASRLNIERIFAEEQMLVAELEGRLVGKINTNAISFTRCQIGGVYVHPDYRGLGIAGRMTFEFAESLRSQGRGVSLFVQKTNIAARRVYQRVGFEIQGDYRIDYFSNNN

SEQ ID NO: 78945 - protein, 251 aa, Unknown
  Obtained from environmental sample
  misc_feature (1)..(251): Xaa is any amino acid
PGFPRLDCERPRLPVDSDAVDSDTVISDTVISDTVISDTVVSDPVDSDPVDSDTVISDTVVSDLVDSDTVISDTVVSDPVINNLVDIDTPSPAAAPVAADDDAIVEERLRQLLIDEGPDPDLPLGSLDVDDDVIDPALVPAAASAAASAAASATPPPPPPPMPVGAGSAAAEGTTVIAPPDDRDTPFDLPDHVLTSTLADIYYQQGQPQLALHIYERVVLRDPADRRLLAKVEEYKGGFARAWGWWHSGAR

SEQ ID NO: 78946 - protein, 217 aa, Unknown
  Obtained from environmental sample
  misc_feature (1)..(217): Xaa is any amino acid
MDDQILRKLFDACIRAAGILGITDCNTEFRSIHSRLAPPRIHSNGTICEWNEEYEEAEPGHRHFSNLWALWPGGAMSPDEEPELAAAARKTLERRLAHSGGHTGWSRAWLVNFFARLNDGNAALENLNAIFSEFTLPNLLNNGPPFQIDGNFGALAGITQMLVQSRVHYSNTDTVLVLDILPALPPSWPSGRLKGARVKGNLELDLEWQNGKINSLV

SEQ ID NO: 78947 - protein, 345 aa, Unknown
  Obtained from environmental sample
  DOMAIN (251)...(324): S1 RNA binding domain
  misc_feature (1)..(345): Xaa is any amino acid
TASREVQEIISSLIADNGLEVWYTVGDEDGASVYSASDIAREEFPELDLTIRGAISIGRRLQDPLAELVKIDPKSIGVGLYQHDVNQKKLSDTLDEVVSSVVNNVGVNLNTASASLLKYVSGINSSLARKIVQYRDTQGRIASRAALSDIPGMGPKSFEQCAGFLKIPESAEPLDNTWVHPENYPVAREIHATITATAGLSADTINTLKEKHGVGETTIRDIAEELKKPNRDPRDSYPKPIMQKGVVNFEDLYEGMMITGKIKNVVDFGAFVDLGIKETALVHISEMGDHFIKDPLATVKVGDVLEFRIISLDIQRRRIGLSRRGSGTRDQGLGELGRSDPWGTQ

SEQ ID NO: 78948 - protein, 209 aa, Unknown
  Obtained from environmental sample
  misc_feature (1)..(209): Xaa is any amino acid
MARKKKSEEAIPSTWLNTYADMITLCLCFFVILFNPDEVTQAQLDAISASVQTGGIGAMPGGLTISAGRMAELGNTIMSLPSMERGRLMGTAIRRAVSVFSPEIRSNKIKITHDERGLVITLAGDAFFNPASARINIDATRDILLRLGTYLSSEELRGRKFRIEGHTDAVDVDPNGPWGDNWQLSVERSRAILRYLAALGVDETAFQNY

SEQ ID NO: 78949 - protein, 147 aa, Unknown
  Obtained from environmental sample
  misc_feature (1)..(147): Xaa is any amino acid
MKLGVMTVLLGQKSVDEAFRYLSSLKVQTVEIGTGGYPGTAHLNPKEFLADSGSAAAYKEMLKRYNLEISALSTHSNHVHPQKEIAAKAHEDFINTCKVAEKLNVDTVVTFSGCPGDHEGAKYSNWVTCSWPEDFQKYWDTSGTRFL

SEQ ID NO: 78950 - protein, 230 aa, Unknown
  Obtained from environmental sample
  misc_feature (1)..(230): Xaa is any amino acid
MEIAKGVVATGQQIGAGWTPALSVVKALAANIEAKRRGLRPVYWLADEDHDRMEVSSVVAFDGDRLIRHRFNFASPQGTATGWLEWTDAHQQEAQELWGQLPAPTEPNLRGHVLALGDALWRRGIAPYSPTVDADRAAIQGELERWRSLDLENELCIQADALESKGEKVILDPRRQSAWFSLDPVTGQRRPLERGQVCPDGHWLSPGAALRPLMQSLLLPVEVVVLGPGE

SEQ ID NO: 78951 - protein, 100 aa, Unknown
  Obtained from environmental sample
  DOMAIN (2)...(56): Helicase conserved C-terminal domain
  misc_feature (1)..(100): Xaa is any amino acid
KKALVFFRDGSIEGVVSHGLGARRLDIKDVSHVIALDVPQDSENYIHRCGRTGRAGKSGVMVTIGDETQMRLLASLEKKLKIRVMPKELYGGQIRAPVLD

SEQ ID NO: 78952 - protein, 99 aa, Unknown
  Obtained from environmental sample
  misc_feature (1)..(99): Xaa is any amino acid
FRGKTHRKIVIFPEGARSKQGEMGTWKSGAFRMAVELKATVLPIAIKGTAASFEKKKSSKSVYEVSSQILEPFDVAQWEKENGKEIEYKDLMARMREAI

SEQ ID NO: 78953 - protein, 266 aa, Unknown
  Obtained from environmental sample
  DOMAIN (1)...(222): Pyridine nucleotide-disulphide oxidoreductase
  misc_feature (1)..(266): Xaa is any amino acid
MEDLRKQAERFGADIRSGIVTAVDLSKRPFLVTVDDSKQLLAETLIISTGASANWLGLESEKKFQGLGVSACATCDGFFYRNHDVCVIGGGDTATEEASYLANLCNKVYLIVRRDELRASKAMQHRVLNNPKIEVVWKHKPKEILGDDSGVTGILLHHSDTGEERKLNVTGVFVAIGHTPNTALFKGQLDLHPEGYITTVPGSTKTNVAGVFAAGDVHDLHYRQGINAGGTGCMAALRRNGFAVRRGAPRLYNKKYGAPFIKNLNH

SEQ ID NO: 78954 - protein, 296 aa, Unknown
  Obtained from environmental sample
  DOMAIN (17)...(296): Histidinol dehydrogenase
  misc_feature (1)..(296): Xaa is any amino acid
MDERGVKYSSIDFDSYWKNETKRSDDTKTEKVVKKIIEQVRANGDAAIRKFASKFDKSSPQRLEVPLAEAKRALNQLRESDRALVDAMELAALHIKRFSEKQREQFANFEFEMEPSLVTGQRIIPVQRAAIYVPGGRFPLFSSVLMCMIPAFCSGVEEVILSSPPTLDGLPDKKILAATMVAAEITHKNNVRIFAMGGAQAIAALALGTESVPRADVIAGPGNKFVATAKRLLFGEVMIDFIAGPTDVLIIADERSSDGDIEKTAELVAADMLGQAEHDPDARARALVQAKKCRTI

SEQ ID NO: 78955 - protein, 96 aa, Unknown
  Obtained from environmental sample
  misc_feature (1)..(96): Xaa is any amino acid
MMMMSDGALSKAEIDALLSGVDSSLGGLGSATATAAPSGGGSISSEQKKALETFFASTTDAQSSHLFMLTGTQISLKGPQITVNGRDAFLGQLPES

SEQ ID NO: 78956 - protein, 314 aa, Unknown
  Obtained from environmental sample
  misc_feature (1)..(314): Xaa is any amino acid
MAVLTAVYVVIGGYFATAANDFIQGIIMLIGIVAIIGAVLGSNGGLINALAKLAEVKGNNVNNVPVPGIFTSFFGPDPLSLLGVIILTSLGTWGLPQMVSKFYSIKSEKMISKGAIVSTFFGLVVAGGCYFLGSFGRLYDNPNIRNPSGAIVYDAIVPAMLSKFPDFMIGIVIVLVFAASISTLSSLVMASSSTLTLDFLKGHVIKKMSEKSQLLIIRSLIVVFIVIASFIAIIQYKGGISFIAQLMGISWGALAGSFLLHSPTDCIGSALQNRPVWCNFIFSGALMTLIIFSGLPSRRFNSRRLTPARFNGWR

SEQ ID NO: 78957 - protein, 176 aa, Unknown
  Obtained from environmental sample
  misc_feature (1)..(176): Xaa is any amino acid
MRDRYIDPVAELGGKLLKVDKPARYTGGEYGIRINKDASFRTLIAFPDLYEIGMGNQALKIIYNRMNTIQDISCDRAFAPAPDFEKLLRENNIPLYGLDTGIALSCLDLLMFTIGYELGLGGLLFMLEASFIPLRCQQRGGGHPICIAGRPAVSNPGSFSPFVDPFWIGEGGSRFL

SEQ ID NO: 78958 - protein, 319 aa, Unknown
  Obtained from environmental sample
  DOMAIN (1)...(262): Pyridoxal-phosphate dependent enzyme
  misc_feature (1)..(319): Xaa is any amino acid
AQIAAVRALSSGKDTVACSSTGNAASSLAGAAASLGLKSVIFVPERAPQGKLTQLLIFGATVVSVKGDYEATFRLSAQAIEKYGWYNRNAAINPYLSEGKKTVSMEIAEQLGFAAPDFVAVSVGDGCTIAGVWKGFKDLYATGLIDKLPRLISVQAEGCCPINRAIENNTAIEKMEENTLADSIAVGVPRNGDKAMAAIRESKGITVNVSDDEILAAMQFLGKNAGVFGEPAGVTGTAGLAKAAAKGLIPKDALVVSIVTGNGLKDVASAQKAAAAANLIRIEPDMALLTKEFSKHGVITLFPRISTTCNTRPICHGNP

SEQ ID NO: 78959 - protein, 124 aa, Unknown
  Obtained from environmental sample
  misc_feature (1)..(124): Xaa is any amino acid
GGHNRYTTDPAHMPESHGAVCDWSPGRVVFLGGKVRRANKKFIALLLERKEHPEQAYRTCAGILRLAATVKPQQMEAACIEAMARNLYSYSCCARLIENLKLQEPVRHENLRGSAYYKEDDHVR

SEQ ID NO: 78960 - protein, 158 aa, Unknown
  Obtained from environmental sample
  misc_feature (1)..(158): Xaa is any amino acid
MNIGDYSVKRPVTIVILYALALGIAVTLVLNLAVDLYPSTVRPVLSIFTRFPGSGPADVEKNVTERLERALSTSVGLVNMTSNSQFETSNINLEFAYGTDMDKAANNAQLLVNRLCHSLPDGVQTPPVRRFDMSAMPIMRLGVPPHYPPDRSVISARN

SEQ ID NO: 78961 - protein, 226 aa, Unknown
  Obtained from environmental sample
  DOMAIN (8)...(108): tRNA pseudouridine synthase
  misc_feature (1)..(226): Xaa is any amino acid
MEGRNIRLLLAYDGTDFCGWQRQSEENRTVQGVIEQALEKMHGFHVSLTGSGRTDTGVHAIGQVANFFTNIDSIPCERFVPALNSLLPQDVRILESREEKKEFHARFSACARTYRYHFICRDLMPHERNYNICLRRFPRIEILNAYGRHLLGETDCSIFAGAGDASLETGKSRNRYIYRAHFYAEGDRLIFEICANAFLRNMVRSVAGTFLHYEEKDLGRFCQWGT

SEQ ID NO: 78962 - protein, 274 aa, Unknown
  Obtained from environmental sample
  misc_feature (1)..(274): Xaa is any amino acid
VEAFLDIIDGYRAKKNELEAERFDNGWRFVAEKQADGKFDLRIDNTKNGEKVPIVGNRRVKVLLSNMGAISTEYMGAAVRSQGINAEALPVATAKTIQIARAHASGKECVPSHLVLGSALEFFFSNKYRKDELYLLFVPITTGPCRTGQYYVYYENLFRDLRLENVVVFILSADNSYTELGGDFAKEMWKGLVLSDYLKDIQCALKACAVDPKKAQQEFEHSWRRVMHAVEHNPKYLWKELKNVANDVRKIPLKRKVADCPRLGAVRYVMGKNG

SEQ ID NO: 78963 - protein, 92 aa, Unknown
  Obtained from environmental sample
  misc_feature (1)..(92): Xaa is any amino acid
MASLRDVRLRMRAIEQTLKVTKAMNLISTAKLRKGRKMLADTVPYFSRIQKSMFDIISSEGHVKSEFFRKSDALKSYRTAIYVINSDKGAGG

SEQ ID NO: 78964 - protein, 76 aa, Unknown
  Obtained from environmental sample
  misc_feature (1)..(76): Xaa is any amino acid
GRRITEELSSQGISFDNRSFSPHITLGREIKHETPIIIPKQEIIYPVNRISLMKSERINGKLTYTEIFGMILAPDH

SEQ ID NO: 78965 - protein, 178 aa, Unknown
  Obtained from environmental sample
  misc_feature (1)..(178): Xaa is any amino acid
MQKLSDRTAGFTDSVIRRMTRISLRHGAVNLSQGFPDFDPPKEILNRLSEIAHTGPHQYSITWGAQNFREALSEKQSKWMGRKIDPEREIVVTCGSTEAMMAAMMTVANTGDKVIVFSPFYENYGANTILSGAEPIYVPLRPPVFAFDANELEAALSKPQSTDPLHPFHPCGKFYRYE

SEQ ID NO: 78966 - protein, 104 aa, Unknown
  Obtained from environmental sample
  misc_feature (1)..(104): Xaa is any amino acid
MIESVIAQTYGNWELCLVDGSDVTHKNIMYVCKVYAMNDKRIKYQKLNKNLGISENSNKAIEMSGGDYIGLLDHDDVLHPSALYEIMKVIARMTLGHQSGGGKG

SEQ ID NO: 78967 - protein, 53 aa, Unknown
  Obtained from environmental sample
  misc_feature (1)..(53): Xaa is any amino acid
VIINVKDLWKIYPMGNVEINALKGINLEIAKSEIVSIAGPSGSRKTTLMDILG

SEQ ID NO: 78968 - protein, 186 aa, Unknown
  Obtained from environmental sample
  misc_feature (1)..(186): Xaa is any amino acid
LSDAVIETAAKDVFLVGENGQGKTNFLEALYFCSYASSFRGARDSDIAQNEKKDFSASITTAAMPSEKNVSGEVLVKFDRGKKTVFIDGKKAEDRKELLSIVPCVVFCHEDMEFVAGSPERCRWFFDQALSLYDPVYLDDLRGYRKVLKSRNSVLRDNRQGFNYMPDTLLDALDQQAALYGFRLWK

SEQ ID NO: 78969 - protein, 323 aa, Unknown
  Obtained from environmental sample
  DOMAIN (74)...(237): Glycosyl transferase family 4
  misc_feature (1)..(323): Xaa is any amino acid
MEKLSPYTWAVICLILRTRLTHLFADTPNHRKAHSDPIPRVGGVAMVAATLAATLAWYAVSQRSEGGPVPGGMLVSIIVAAICIGALGFLDDTRFVNVRVRHKILVTAALAALTVFGLGVRPGVISVFGLFTIPELAGDLIAVLWIMWLINGYNLIDGLDGFAGTVSALSLLGVAAVLYIAGDFQAAALSLFVAGAAAGFMVHNAPPAKVFMGDTGSCFLGYIIALLTIRAAFDLNGSGKVMALMPLLAGVPIIEVLTTILRRYVRAGHRGPVSTFKFIVTADSFPLHHRFLLRGFSHRDGCVLTRILTATMVCGGICVALTQ

SEQ ID NO: 78970 - protein, 158 aa, Unknown
  Obtained from environmental sample
  DOMAIN (4)...(158): Type I 3-dehydroquinase
  misc_feature (1)..(158): Xaa is any amino acid
VAKTCLCMTAKTLGRNLEILEKYRKYADMAELRVDYLDPDERLLIRRFPELAGMPVILTIRRDTDGGLFVGGEGARISLMARGLAYAEADRRRNFAYLDIEEDLNVSSLEEAARTFGTRIIRSYHNIKGTDADLPVKIRFMRPSRDEIVKVAGMANST

SEQ ID NO: 78971 - protein, 335 aa, Unknown
  Obtained from environmental sample
  DOMAIN (60)...(335): CO dehydrogenase/acetyl-CoA synthase complex beta subunit
  misc_feature (1)..(335): Xaa is any amino acid
LFFPGLDRRIIRFSVISDANIPEILPTGVCTYEHLVSNVPHDKIVEKALEVRGCKIKIVKVPVPVAYGPAFEGERIRKEDTHVEFGGNKTIAFEFVTSVDYDSINDGEIKIIGPDIDTVKPGGRLPLGIWVEVAGRKMQTDFEPILERQIHHMINGAEGIWHMGQRDIVWTRVSKTGFEKGIRLKHYGEILHAKLLADYPAIVDKVRVTLITDQVEVEKRLAIARKAYDDRNRRLEAMTDESVDTFYSCLLCQSFAPNHVCVITPERLGLCGAYNWLDGKAAYEIDETGPHQPLVKSECLDPVKGIWSGVDDYVFTNSHKTIDAFLRLFNHGTGP

SEQ ID NO: 78972 - protein, 185 aa, Unknown
  Obtained from environmental sample
  misc_feature (1)..(185): Xaa is any amino acid
LVTHVQIGRAARDSAGSALRRSDRCVILDLSGSTFTTALGITPFSNTDILLKDVIIPNSVTRIGNSAFYGTALRSVTIPNSVISIGDSAFADCFALKSVIIGNSVTTIEAWAFSGNGGLTSVIIPASVTSIGYNAFSHNPNLTQVTFQRADTTIDNAFGGSSLETVYKAGGAGTYTLSGETWTKR

SEQ ID NO: 78973 - protein, 323 aa, Unknown
  Obtained from environmental sample
  misc_feature (1)..(323): Xaa is any amino acid
MLIQQKLDLCKNSLDLFLSHSWNKSILAAIEMSKNPEAIKAIRERDTGKGIRIFTEALGVYGVNYFTITDENGYAICRTHEPEIFGDSLATQANIANGMQGRISTFYEPGNIVMVSVRTGAPVFDDDGSQIGIIVAGIRVDTNETAEDLKEILGADVMVFYGNKEISTTIAKKGKLLEGETVSPEIRKIIYDDKRTFSGTVKVAGTDFTGYYLPILNSQNQVFAAIFVGIPKGDLNREINFMFVQTLLIGVISVFLSIVLLRALRGAIAASLAKSNFLANMSHEIRTPMNAIIGMVAIGKDAQDSERKNYSFIKKRKRPSICS

SEQ ID NO: 78974 - protein, 97 aa, Unknown
  Obtained from environmental sample
  misc_feature (1)..(97): Xaa is any amino acid
MKAVELEKAYDPKGFEKRIYALWKKAGAFKPENATGGKNVEDKYVIVIPPPNVTGVLHVGHGLGISIMDTGIRYHRMKGEPTLWVPGTDHAGIATHH

SEQ ID NO: 78975 - protein, 305 aa, Unknown
  Obtained from environmental sample
  DOMAIN (102)...(303): MutS domain V
  misc_feature (1)..(305): Xaa is any amino acid
RYIDLIGYFFEVTNVHLNKVPKHFVRRQGIAGGERYTTDRLASLESDINGASDKLIELEKKLFLEIREQTKKVLQHLAAAAHRIAEFDAAQSLAKAASIRNWTRPVLNESTNMEIREGRHPVVEAHLGRGEYIPNDIILHTDNKDGISFVMITGPNMAGKSTYLRSAALITVMAQAGSFVPANEANIGLCDRIYCRVGASDNLARGESTFLVEMNETAFILNTATEKSLVIMDEVGRGTGTNDGLSIAWAVSEELLNRIKCRTLFATHFHELSLLSHPNLANRSMEVLDNDGKMSPRTAITRGEA

SEQ ID NO: 78976 - protein, 202 aa, Unknown
  Obtained from environmental sample
  DOMAIN (5)...(179): Phage integrase family
  misc_feature (1)..(202): Xaa is any amino acid
EVQNLFPEDWKKIWDSYEIYLFNKLAACTGMRLSEIIGLQINHIHDDHIHVCSQYSQKYGSRPLKTKDSRNIPIAAALREELLNIIKDNTNGFLFTEKSGEPISHRRIYRETSAAFDRIGIGKEERRERGLALHHWRHFLNTALLMANVSTLKVQKVTGHKSMSMTRHYAHFDSREFSEVLDVQNSLLRPGRTKEAGEEEKT

SEQ ID NO: 78977 - protein, 301 aa, Unknown
  Obtained from environmental sample
  misc_feature (1)..(301): Xaa is any amino acid
QQSNDQIGRGLLLAGINAQGQHTLTIFRKTPTTQSAGREAAETELFRKIAEFSIEGTITVKETERGIAYQSGQSKGVSFTISAFGRDFDSSNILDQVEITYTYNPRSGVYEQTKASRIPGSQVEQRRVRELLGSRQLFEEFISGLWYFVTPQGKINKNQYIYFSPSSQEIIFYGDEILQVFNWTNSIATRYGLYVASQNISVTTLKRTIDIELESLESIRIRVQEDVSLRIGVNNTWDGSYCKAPPPEKRTALPPINAHLEASYDGPIGKNHFLANGSFRLTNGSHFRQGKNAFFYFNDQQ

SEQ ID NO: 78978 - protein, 157 aa, Unknown
  Obtained from environmental sample
  misc_feature (1)..(157): Xaa is any amino acid
LAPPSFFLRGGAFPFGFCPPGPPPGIFPKPQKKGNPPPPRNFFVRGEKENPRLKKNHPFFGKILPPPFKKTPPPPLFFGAPFVGPPPLKKKKGPPPQRGGGGFLKKKTPPPPPSRGGGRNYFFPPGGGFFFFSPRGGRKKYFCGGEAQTKGGGFCFF

SEQ ID NO: 78979 - protein, 301 aa, Unknown
  Obtained from environmental sample
  DOMAIN (26)...(169): GAF domain
  misc_feature (1)..(301): Xaa is any amino acid
MLKRREKMPDTLNRAAVMFLSQNEKTFEETMTAGVKEIADVFNLDRLSIWRNKPRPDAMHVSQIYRWDRDSGGTTVATKGLEDTTYARFAPRWEKLFTSGESINSPVRLLPEAEMLKSFGCVSAFVTPIFINNAVWGFALLEDRHNERFFEDDSVEMMRSGILLCTNTVIRADMEREIANANDFNRVILDASPLGFTIFDENARVIDCNDIVWKILGTTKSYYLEHFNEFSPKYQSDGVLSLDKTVEIIRRAINGEKLLFEWTHCTPMGELIPIEVTTVRAMYNGRYVAMSINSANLTLGN

SEQ ID NO: 78980 - protein, 261 aa, Unknown
  Obtained from environmental sample
  DOMAIN (8)...(257): 3-beta hydroxysteroid dehydrogenase/isomerase family
  misc_feature (1)..(261): Xaa is any amino acid
MRKLTNILVTGGAGFIGCNFIRFLLEKADGFSGRVINLDALTYAGNSMSLADIETKYAPQGDIKGRYFFEHGDICDRAFVESLFRKYEIDTVVHFAAESHVDRSILGPEAFIKTNVTGTFTLLDVARNVWKDAQPGQDTLFHHISTDEVYGSLGETGYFTEKTPYDPRSPYSASKAASDHLAMAYSHTYGLPVTLSNCSNNYGPYQFPEKLIPLMILNMLEGKPPAGCTGDGKKVSADWLYVEDHNAAVCLSAESVMGGGG

SEQ ID NO: 78981 - protein, 63 aa, Unknown
  Obtained from environmental sample
  misc_feature (1)..(63): Xaa is any amino acid
FRQGRELARIAKDCAVKPCASAEFPAKVKRPAFSVLDKSKIKAELGIDVPDWKKSLSGFLKNA

SEQ ID NO: 78982 - protein, 155 aa, Unknown
  Obtained from environmental sample
  DOMAIN (35)...(154): ABC transporter
  misc_feature (1)..(155): Xaa is any amino acid
MEIECLSIENLTCDFLTVEGIVYALNGVNLQLKRGEIHGLVGESGCGKSVTSRSILGLVDKKYTRIRGVVRFDGEDLLSLPEKEMRSIRGERISMIFQDPLNSLSPIETVGSQIEEAMTNHLDLSREELRRRTAELWRKWVSPRYRKLAIIRGKR

SEQ ID NO: 78983 - protein, 293 aa, Unknown
  Obtained from environmental sample
  misc_feature (1)..(293): Xaa is any amino acid
ESGNFIFLWGQKEIISGGDLWLVSARSAASSRKKANPDLNEWDIFKANMDALAALGAMGCIRSAYPVVSGGIAASLALMAFGNNTGIEAQPCAFAAGLPYQGSVLVEIDGAAFRENPRVAEILGVSGCWEIAALTIADHVFRIAEEHDGKMEAGGVLMETLRLAYESPLAHVYPQTSTGATVAEQVDNGTRNQGRGIGKYCLQASHDTIKNNYLTTIPSPQSPVPPKKRTRTGERVDEQMQHGVGQIKVAVTEKSAGPPNPQSPLVVLPVFPGTNCEWDMERAFRELVPLGRC

SEQ ID NO: 78984 - protein, 265 aa, Unknown
  Obtained from environmental sample
  DOMAIN (175)...(264): CO dehydrogenase flavoprotein C-terminal domain
  misc_feature (1)..(265): Xaa is any amino acid
LEAESPAHAVELLRQHPDAKIIAGGSDVLIEIREGRLAGRTLVSIQKLDELRGVRLVADGAIRIGALTSFSHVAQDPVIQKNIPVLAEAVLTVGGPQLRNIGTIGGNVCNGVTSADSASTLVAYDVVMEYLGPNGIRQVPISAHYISAGKTALAHDEILQAILIPKESYENCFGNYIKYAMREALDIATLGCSANVRLSKDRKNIDRLRLAYGVAGPVPMRVPTAEQAAAGKTANAETAAAVAKLVLNDINPRSSGGRLRYPGKT

SEQ ID NO: 78985 - protein, 97 aa, Unknown
  Obtained from environmental sample
  DOMAIN (3)...(76): Peptidase family M41
  misc_feature (1)..(97): Xaa is any amino acid
GSPEGREPIFLGKEIARHKDYSEETAQKIDRAIKRILDEGQRQAEEILSSHKEELQKLSDALLVRETLVDDEVRSLLGFPPRENSTSLIDKPASPES

SEQ ID NO: 78986 - protein, 304 aa, Unknown
  Obtained from environmental sample
  misc_feature (1)..(304): Xaa is any amino acid
VAATLLAEGCTVPFIARYRKEKTGGLDEVQVRDIEHKLASARNLETRRIEIIRGIFEQGKLTQALFDNIRKAATLTELEDIYLPYKRKKKTRGMMALERGLEPLAVAMREMQAAPLLAKAAEFVRQDENPELAVPTVEDALQGAMDIIAESISQDPENRARVKAFYVKDGFIIVTGSGKAGKGDEEARKTSVYQMYWDYKEAISLIKDHRILAINRGEREGALDVTIDVDENTAAQMLQQQYTLHNDYHKTAIEDGLKRLLSPAVIREIRGDQSDAADEHGISVFSENPQNLLLQQPPQGKARF

SEQ ID NO: 78987 - protein, 200 aa, Unknown
  Obtained from environmental sample
  DOMAIN (5)...(138): Phosphoribosyl transferase domain
  misc_feature (1)..(200): Xaa is any amino acid
VSPAYRRLRYPRLVHEQNIINDNLVVVSPDTGAVDRNKFYATALKKPLALLYKERDYSLVSTDAVKNNISEMKMLGDVSGKNVLMADDMLGTGGTLLKAMTFLKDQGAGKVICAISLPLFSGDAIKYFDEAYKNGLFYRIIGTNAVYHEEVLKREWYISVNITKLFAKTISRLHRGLSLSSILDNRDIIVKHFQENPEKA

SEQ ID NO: 78988 - protein, 140 aa, Unknown
  Obtained from environmental sample
  misc_feature (1)..(140): Xaa is any amino acid
MLKPNIKYRVTLTEDERKTLQNLVRTGNTAGNRIRHAQILLALDEIPENESWTDEKISKAYGSHIRTIGNIRKRFVEEGMQAALERKERENPPFSKIDGEAEANIIALTCSQPPEGYCRCDPELIAKQAVELGILDSISD

SEQ ID NO: 78989 - protein, 321 aa, Unknown
  Obtained from environmental sample
  DOMAIN (29)...(236): ABC transporter
  misc_feature (1)..(321): Xaa is any amino acid
MALVSFSEVSRFYGRQDVLAGVTLALSPGERVGLVGRNGAGKTTLIRLLLDLESPDAGTVTRAKGLRTGYLPQELAARRGLSLLELVLDTAEEYRKVEAELALVSEELAQSREAGELLELAERHGHLLQLFEALGGWGKEAEAKKILSGLGFAEADFGRDLGEFSGGWLMRGVLARLLLASPDLLVLDEPTNHLDLDSLLWLENHLKNSASALLLVSHDRVFLNNVAQKIIEIRQGRAQTYAGNYEWFLAEKEQRLATEAAAFENQRERIKQIEKFIERNRVRASTARRARAASRCWKKWTGCLPPRTGRQSFNCACLPGP

SEQ ID NO: 78990 - protein, 281 aa, Unknown
  Obtained from environmental sample
  misc_feature (1)..(281): Xaa is any amino acid
LTQDESAREYIPKKLKATVEAALKNAFSTEAFCLAEVQKSGRALQYVPEEFKTEAVCFAAVQKDGRALEYVPDAVKTEALCLAAAQQNGCLLKLVPDAVKTKELCFAAVRQSGWALEYVPDVMKTEAMCLVAVQQDGRTLEYVPETLMTEELCLPAVQNDWHMMQYVPDAVKTEALCLAALEQYDGYFIPELLQLIPDALMTEVVCLAIVQKNGGALQYLTDAQKTEAVCLAAVLQYTSAEEYIPKGLKAKVKEALKDAFRTEAFCLGVLRKMERALRNIP

SEQ ID NO: 78991 - protein, 58 aa, Unknown
  Obtained from environmental sample
  misc_feature (1)..(58): Xaa is any amino acid
MTGGGPEVATELMPTYMYKMSLSAFNMGYGAAVASGMFILIPLAALIVVNTLNRKQEM

SEQ ID NO: 78992 - protein, 236 aa, Unknown
  Obtained from environmental sample
  DOMAIN (17)...(82): His Kinase A (phosphoacceptor) domain
  misc_feature (1)..(236): Xaa is any amino acid
LQKVTHELEVSRSGSKSKSAYYINISNEIMTILNSIVGFLVTAVDSNASQKTSDSLSNIRINAERLMQIVNDIMDISKIESGEMSLKKNPCDMHELLAGCRTLVMPKAVEKGLLLHFYAEPSVGKRPVGDISRLRQIFVNLLFNAVKYTNSGMVKLVSDILSIDDKSITIHFEVKDSGVGMTQEQIANIFRPFSQVAKSYKNGATGLSLPITKSIIEKMGGALSVTVRPDGSRGIP

SEQ ID NO: 78993 - protein, 345 aa, Unknown
  Obtained from environmental sample
  DOMAIN (173)...(243): Elongation factor Tu domain 2
  misc_feature (1)..(345): Xaa is any amino acid
GQRLSDSDPGHHGYGRERGITIRSQPVCIPYTALDGPEYNLNLVDTPGHVDFSYEVSRAINSCEGALLLVDATQGVQAQTLSNMYLALEHNLEIIPVINKIDMQAANVPETKTQIDKDLGLDSSEAVLVSAKTGAGVDELFEAIVKRLPPPSGSVDAPLRALIFDCHYDPYRGVVIHLRLFDGAIKKGMMIRFMSNGAEYEVETVGVFKLALVETEVLSAGEVGYFIGGIKTVSDVRVGDTVTGALFPCDKPLPGFREVKPVVFSSIYPVDSNDYEELKASIDKLKLNDASLVYEKDSSAALGFGFRCGFLGLLHLEVIQERLEREFDQSGSHRPIVTRDQAGKK

SEQ ID NO: 78994 - protein, 133 aa, Unknown
  Obtained from environmental sample
  misc_feature (1)..(133): Xaa is any amino acid
VNITQYRDNDIDLAGLLNLLLEGAGTIALRLSSLEPERIDERLSSVLAHPGIRPHFHLSVQSGSDAILQGMRRAYKVHTVEKAISLLRSAKNDPFIACDIITGFPGETEAEFARTLDFCEKHISRGYTRSLIK

SEQ ID NO: 78995 - protein, 148 aa, Unknown
  Obtained from environmental sample
  DOMAIN (12)...(148): BPG-independent PGAM N-terminus (iPGM_N)
  misc_feature (1)..(148): Xaa is any amino acid
MEALKKNPSWKGRRGPVVLVIMDGVGYGKYKEGDAVADSKMDHLLAIRAKSPNTKLKAHGKAVGLPSDEDMGNSEVGHNAMGCGRVFNQGAALVSKSIETGAMFEGKAWKELVSNVKSSGSRTLHFLGLFSDGNVHSHLVRNLSLGDP

SEQ ID NO: 78996 - protein, 125 aa, Unknown
  Obtained from environmental sample
  DOMAIN (3)...(123): NADP oxidoreductase coenzyme F420-dependent
  misc_feature (1)..(125): Xaa is any amino acid
MSIISCIGSGNMGFALMSAAKGADIYITDSDTEKAKSAAASLGAKVLSSNIEAVEKGDIIFLAVKPQVLQQVLAEIAPAADKKLASGNAPVFVSMAAGWSIAKIQGVREQKYPRAESVHAGGNAG

SEQ ID NO: 78997 - protein, 124 aa, Unknown
  Obtained from environmental sample
  misc_feature (1)..(124): Xaa is any amino acid
MGEIHYSRLPVDEWRNALLKMKAGGINIAASYSFWIHHEEIKDEWNFSGSRNLRLFTETVKDCDLYMFYRIGPWSHGEARNGGFPDWLLNAGCELRSNNVQYLKYVEEYYKKLYEQARGLLFKT

SEQ ID NO: 78998 - protein, 271 aa, Unknown
  Obtained from environmental sample
  DOMAIN (107)...(256): Poly A polymerase family
  misc_feature (1)..(271): Xaa is any amino acid
MRFRYSEENGRLVKKALVYTADEHGISIDDVDKEAISIVHRLKEAGYDSYIVGGAVRDLLIKKKPKDFDIVSEAIPTRIKKIFRNSRIIGRRFKLVHVYFGPRIFEVSTFRSLKNGLTSNTFGSINEDVLRRDFTMNALFYDPAQQTVVDYVGGIKDIRAKLVRPIIPLSKIFTDDPVRMIRAVKYGAATGFTLPFPLKWKIKKQSHLLSTISPSRLTEEIFKIIHSPQASRIVEALDSMGIYAYLQPEAARRRRSRAPFAALGRICQWET

SEQ ID NO: 78999 - protein, 307 aa, Unknown
  Obtained from environmental sample
  misc_feature (1)..(307): Xaa is any amino acid
LDKTSIGEFIRLTHDAFKKRFGKDFGGIIPAIFTDEPQFTRMGTLSFAREEKDITLPWTTDIEDTFKAAYNGESLISTLPELLWDLSGGKASKARYYYHDHVAERFTAAFADQCGEWCDKNGIMLTGHLMEEPALESQTAALGDAMRSYRSFQFPGIDMLCDRREYTTAKQAQSAARQMGVPGVLSEIYGVTNWNFDFRGHKLQGDWQAALGVTVRAPHLSWVSMNGEAKRDYPSTFNYQSPWFEEYPYVENHFARVASVLTRGKAVCRLGVIHPIESYWLHWGTREIQPPCGKRWTKKSRNSAGGS

SEQ ID NO: 79000 - protein, 248 aa, Unknown
  Obtained from environmental sample
  misc_feature (1)..(248): Xaa is any amino acid
IYPDYGGRAKNVFRAIFIDDYQAQVMAYFALNSLKAKTAVVLMNKNNDGFIHLVEVFAETFKKRGGSIMAVETYSTWNDFAGILRKYANNPPDVIFCPEDYVPAAKLANTAYEAGLVNTPILGSDAWDGLLTYIYNPDTMKNVYYSAPFSFDDQDANVVKFVRDYFDCFSQMPLSGSATAYTCVYILTEAIIKAGGVDKDAFVSAIKENEIDSITGHIRFDENNNPHTNVYIIHLKGGEYSTYEKLRL

SEQ ID NO: 79001 - protein, 278 aa, Unknown
  Obtained from environmental sample
  DOMAIN (2)...(276): NAD-dependent DNA ligase adenylation domain
  misc_feature (1)..(278): Xaa is any amino acid
MGSKEQRISELEKLIQKYQAPYYDGEAEISDGEFDLLWDELKVLSPDSAVLKKIGDGSKRIIEERQNDDGSELKKTDVESHVDGFPEAFHLIPMGSQEKASDPQEFIIWAKKMGMEGSNLPQDKVNTASLTNKKNKLTKKFIVQYKLDGASLELQYEKGKLVRAVTRGNGIKGDEITENAKRMNGVVQKMDVSFTGGVRGEVVMTHDVWEGKYPTKANCRNAAHGLMRKTDGEGCEDLNIIAYDASRACDDLFFKDEFAKIQWLKQRGFQTTETKTFT

SEQ ID NO: 79002 - protein, 244 aa, Unknown
  Obtained from environmental sample
  DOMAIN (1)...(198): Pyruvate flavodoxin/ferredoxin oxidoreductase, thiamine diP-binding domain
  misc_feature (1)..(244): Xaa is any amino acid
MAEYLPAFGGFAYQAEDEMSALGAVAGAWFFDTPAMTATSGPGLSLMQEFLGYCSMTETPAVVIDVQRAGPSTGMPTKHSQDDMMAAIFGGHGEGQRIVLSAATIDECFHMTIEAFNMARRFRCPVILLTDSALGNLQMTCKRPDPTVDVNGHPLLAAPVTGAVAESRKAVRRITGLEHDAGGMPSNTANKRVRQQYKRFSKMDKVEAYYKYMQMLDIGDLKRRCRNRGSPQMLREKTRPPTSA

SEQ ID NO: 79003 - protein, 225 aa, Unknown
  Obtained from environmental sample
  DOMAIN (54)...(224): Cellulase (glycosyl hydrolase family 5)
  misc_feature (1)..(225): Xaa is any amino acid
MHSLKLILINASVFALFCFSACFDVPDKGASGEPDRIISAKDFVKDMGLGFNIGNSLDSWGGETAWGNVAVNQAFIKALKKYGYKTVRLPVTWADKMGPSPDYLIDEAWLDRVETIVNWCLAEDLYIIINIHHDGHGNAKSWIQNAQKNYPNNGENVTAVAKQLAAVWTQIAGRFLQYPDKLIFEGMNEVGFDDIWNRYSGGQAERKTEAYRILMALGRSVLGGP

SEQ ID NO: 79004 - protein, 312 aa, Unknown
  Obtained from environmental sample
  DOMAIN (65)...(311): Bacterial DNA polymerase III alpha subunit
  misc_feature (1)..(312): Xaa is any amino acid
MPPGLWPANKPLLEISRRTGIPLVATNDVHYLDREDNVAHDILLCIGTGKVRTEEKRKKYYGEQFFFKSGEEMAALFPDYDEAIANTVRIAARCKTDVPDIKVKELPKYLPDFEIPAGFDNADAYIRHLVSAGIAVRYANEKAAGGEKWRKITDRAEYELGVIIQMGFTGYFLIVADFINWARNNNISVGPGRGSGAGSIVAYALRITDIDPLKYGLLFERFLNPERISMPDFDVDFANEGRDDVIKYVTEKYGQDKVGQIITFGTLGAKAVIKDVARTLGISIPESDMITKLIPRDPKITLQKAIDGESRL

SEQ ID NO: 79005 - protein, 115 aa, Unknown
  Obtained from environmental sample
  misc_feature (1)..(115): Xaa is any amino acid
MGFYRPVKIGSLELTGNLFLAPVAGYTDRAFRSICAEEGADFSFTELVSAEALYRNFGRYGLGVDTGESSSGNTAAINLVRRGEKRKHYAIQLFGAESESIYKAAILLAPLKADA

SEQ ID NO: 79006 - protein, 236 aa, Unknown
  Obtained from environmental sample
  misc_feature (1)..(236): Xaa is any amino acid
MNAPAHTIAALSTPPGRGALAVIRLTGDEALEVFAKVIAEKEKFEEEAPRRIGIYTVIDVAKTAIDEVTAIKYKAPNSYTGEDMVEIFCHGGAIIPTKILDGLFYQGAKAAGRGEFSRRALINGKIGILKAESIRELIDSQTETHLRSAQLAYFGKQSESIERLKQEIIAALSDIESRIEFDEDDDVAESKQQQISVNKKTLASIVTKLQDELWRGDRGKALDDRIIVTIAGPADA

SEQ ID NO: 79007 - protein, 152 aa, Unknown
  Obtained from environmental sample
  misc_feature (1)..(152): Xaa is any amino acid
VAQWFDLAFDIPADQAFTYRVDEKGAAAVGKRALAPFGKRGRDTLGYIIAERDAPPRGIDESAIKPIRRVADADPVFDARDIELARWIAAYYLCGIRQAIAAMIPSRRRMVSYSSLSVDHDDLAETALELSEEQKAALKSIIGNREQLAVSS

SEQ ID NO: 79008 - protein, 304 aa, Unknown
  Obtained from environmental sample
  misc_feature (1)..(304): Xaa is any amino acid
GLPNDQIGRVAEEAKKYQNERYIAERKKDEAADLLRDIRSELADLERGILRYPDAPRELHAALEKVGIEAFFLAEAAEITAPDWVDAVEGWLNTRRFAILVDPVHFQKAIEVYNRLPRSVAGAFIPNIEKMRDAVVRQGSLAEIVKAEGYARIYIDYTLGKVMRSDLANLKTYDSSVTKECMTYMNHTASRIKEEVYRRHYLGRAALEERRKFLAAEAERVEAELISSEREEKEARVREDCCNRVIRFLPQLMLLYPSIAGAELLAGQLAASEKETAAIDTQSFKELENKRGGIREIPWTIKRR

SEQ ID NO: 79009 - protein, 275 aa, Unknown
  Obtained from environmental sample
  DOMAIN (1)...(275): UvrD/REP helicase
  misc_feature (1)..(275): Xaa is any amino acid
VNEHAYAEYRKQLHFLGAVDYDGLIAGTVRLLAMREDILKYYCQKFNFIFVDEYQDINFAQYALIRLLVHNREAAPSLWVIGDPNQAIYGFRGSDKAFIDRFLQDYPDAGRFELRKSFRCAEPIIKAAGQLASAGCLAQTELKGADVNSSAPVSLFRRTYPTDKSEAEGIARIIASLVGGTSFFALDSKTTKGIDSNNADFSPSDCAVLVRASALTEPIAKALNDHGIPFEIAGAPTWWEEEPVKTLLENLRTRQSEDIRAVWESLKMKEKNPRT

SEQ ID NO: 79010 - protein, 107 aa, Unknown
  Obtained from environmental sample
  misc_feature (1)..(107): Xaa is any amino acid
MNSYLKRFTDTILKNRLHDSGAVLIQGAKGCGKTETALQAAKSSVRLDVDSDVRMRMELDPKSVLEGAVPRLIDEWQEHPQIWNYVRREVDEPEEKGQFILTGSANP

SEQ ID NO: 79011 - protein, 233 aa, Unknown
  Obtained from environmental sample
  DOMAIN (37)...(211): Calcineurin-like phosphoesterase
  misc_feature (1)..(233): Xaa is any amino acid
VDIGGLFVSNDLSERLKEKNNPDSLSRLSPLTLEDEYSFIVITDTHIEDGNAHGLENIKTVIENNPEIKFAVFCGDLTQNGKEQDLNKFLEIADSLDIPAYPVIGNHDIYFGNWPVWKRLIGSTSYRVNGDSATLFILDSANSFLGKEQLDWLENELKSAQGRVFVFSHHNLFVDSPVSIQHMSDTREIARLISLVRGKRGIMFTGHSHERLVKEVGGSLFISIEDFISNKNL

SEQ ID NO: 79012 - protein, 93 aa, Unknown
  Obtained from environmental sample
  misc_feature (1)..(93): Xaa is any amino acid
MLTAKVDFSDVKLSFIRNFPNAYVALTDLVVTGTDEFEGETLVAFKSFSVTVDIMSVIKMDQYNVKAVLLDHAEVNAYISQDRRPTWDIMKRR

SEQ ID NO: 79013 - protein, 264 aa, Unknown
  Obtained from environmental sample
  misc_feature (1)..(264): Xaa is any amino acid
MPLVFVKGPADFDKYLDQSLNRLKTNYIDYYLMHMITDSGLWEKLKGWGIEDWILRKKKEGKIRQIGYSYHGSRNEFLKVLDDYDWEMCLIQYNYSDENFQAGVTGLKKAAEKMPVMIMEPLLGGKLATGLPKEAVEIFKKAKPDLSPAAWGLNWVWNQEEVTLLLSGMSDMAQLEENLRLADKVKAGMLGKAESDTYRQALEVINRSCKIRCTGCNYCMPCPKGVNIPGCFTALYAVYSMGYFAGMHQFVSSTGPDVERSSSP

SEQ ID NO: 79014 - protein, 315 aa, Unknown
  Obtained from environmental sample
  misc_feature (1)..(315): Xaa is any amino acid
GTSKIINQSVPPALEALGYTRQAIEEIVAYATGRKTLNGAPAINPDTLKARGFTPEAIAAAEEAVKTALGLEGVFNPWILGRDFVEKILHIPESTWSLQGFSLLRHLDFSSEDIAEAELYACGTMGLEGAPGLNTEHYAVFDTATPSGKNGRRSISWTAHISMMAAVQPFISGAISKTINMPNGANYEDVKGAYMLSWKNALKAVALYRDGSKLSQPLSSLAPGTDPLADTILKVEKGIDLQSLTADPRKPAVRGIRKPLPNRRMGYTQKAKIGGHSIFIRTGEYEDGNLGEIFLDMHKEGAASVALGDKRGAPP

SEQ ID NO: 79015 - protein, 205 aa, Unknown
  Obtained from environmental sample
  DOMAIN (21)...(202): Clp protease
  misc_feature (1)..(205): Xaa is any amino acid
GSPNDQIGRESDDDDDDIDDEKPENWQDLLAGKMLKTRTILLSGEIRKGLAEKTIRQLLLMEATGNEPVRIFIDSPGGDADAGYAIFDMIRFITPPVWTIGMGLVASAAAIIQLAAPKERRMGLPNSHYLIHQPLSGIRGVATDIEIHARELEKLRAKINRLIAEETGNPAEQVEKDTDRDYWMNAQEAVKYGLINKVITNRDEM

SEQ ID NO: 79016 - protein, 108 aa, Unknown
  Obtained from environmental sample
  misc_feature (1)..(108): Xaa is any amino acid
SDTSSNLRIDGGLMRSEVGPDFVGLDLLNPGANIHMGAVYLAYLETRMGDPLLALLAYNGGMNRVRRWRNSMPVRFPPDLFLETVEYAETMEYGRAVMGAAAIYDTLY

SEQ ID NO: 79017 - protein, 212 aa, Unknown
  Obtained from environmental sample
  DOMAIN (11)...(129): GTPase of unknown function
  misc_feature (1)..(212): Xaa is any amino acid
MLTNLKYRNLPTVVLAGRPNVGKSTLFNRLLHKRRAITDPTPGVTRDPVEADCLIDGNPLRLIDTGGFKLADCNALDNLVVERTLETIKKAELVVLLLEVGEITSEDEELINILRPYRKKLIVTVNKTEGGRHEADAWNVLTFGFDKVLMISAEHGDNIGELQQEILKRLDFSKVEEVQEEKLIKIALLGKPNRQAKSRAEVLTHVRGGIPG

SEQ ID NO: 79018 - protein, 320 aa, Unknown
  Obtained from environmental sample
  misc_feature (1)..(320): Xaa is any amino acid
FFPRLSRDIFGIIGSGGSILGSIEGTIWEKVNVPGFVLENFYTPEEIRKISLHAAQKNDQIIELNPANDPAHFTLGMNIWIDDKLYGAIGSVDMNKPFTEGQKETFVIIAKVLKLYFQNHSIYMRIAEDKTNWLDSLLNGVDISPEIISNYLFKYKWKVDDHFCIVTFTASSDLKIPIISILDIKQINELFPEALVSVYDECVVMIIRCNDKQRLNEKNKQQLEQFLRKDIILHCGVSMVFNNFLHLRYYYIQGKFAASKCKPTLSSAICFYDDYQTDHVLNALSQTADLRCFCHPGILSLWESGNESQRDLAPMSVSYF

SEQ ID NO: 79019 - protein, 174 aa, Unknown
  Obtained from environmental sample
  DOMAIN (10)...(170): ABC transporter
  misc_feature (1)..(174): Xaa is any amino acid
GFPPGIIAEGIPNLVSGKVYIDDTAITDDNIRAWRKKIGYIPQSIYLFDGTVAENVSFGSMPDDGRIKKALQMANIWDFLAAKDGINTLVGEGGIQLSGGQQQRIGIARALYDDPDVLVLDEATSALDTETEQKIMDEIYSVSVNKTLIVIAHRLSTVERCGRRIRIENGKIIS

SEQ ID NO: 79020 - protein, 209 aa, Unknown
  Obtained from environmental sample
  DOMAIN (9)...(207): CobQ/CobB/MinD/ParA nucleotide binding domain
  misc_feature (1)..(209): Xaa is any amino acid
MSEKKNSKLIAITGKGGVGKTTICALLIKNLLAAGKTPVLAIDADPNSCLDAALGVCVTDTVGRAREDVRNSAGADINVSKKELLRLKLENALVEEKGFDLIAMGRPEGEGCYCYANNVLKEIIAEISSGYPYIVLDNEAGLENLSRRIVQKVDLMILVSDASNSGLQTLLRLFELVGEMKMAYGKLALVGTNCEAITPTNSANLSWEP

SEQ ID NO: 79021 - protein, 312 aa, Unknown
  Obtained from environmental sample
  DOMAIN (153)...(306): Predicted permease
  misc_feature (1)..(312): Xaa is any amino acid
MQVFSFVGLDILKGAADKIRKIDGVRGVWLEQRGMGVLVGKKGKTGASIRAIDPSFWEEQGSKEYLKLIDGTARIETDRQMLLGESMAASIGAEIGDTVRLMTILAGDGGMNIPKITPFTVSGIVSAGYHELDALWCVISGEGGRRILPPEASSSLIVKVDNPYKNVDTLTWQLYAALDSGFSVYTWKDLMRSQFSSYESTRQILLLIMALVVIVAAVNVSSATSMLVIERQRDIAVLKVTGAGAKGITNVFLWGSFLTGLCGAVMGIAAGLLLGKFINHIIRTLEKIFSFFSRLGGGSDVKILDPGFYLET

SEQ ID NO: 79022 - protein, 119 aa, Unknown
  Obtained from environmental sample
  DOMAIN (70)...(103): Tetratricopeptide repeat
  misc_feature (1)..(119): Xaa is any amino acid
PGFPPGLIAGRHCYQSDYDRAIADYTQALRLNPNDAGAYNNRGNAHSNKGDYDRAIADYDQALRINPNHALVYNNRGETYRNKGENDKAIADFEAALRINPNDADARQMLEDARRQQGR

SEQ ID NO: 79023 - protein, 181 aa, Unknown
  Obtained from environmental sample
  DOMAIN (2)...(115): Response regulator receiver domain
  misc_feature (1)..(181): Xaa is any amino acid
MKTIFVVDDSDTCLSKVEEVLESQYSVMTLPSAAKMFAMLEKIVPDLILLDISMPEMDGYTALDLLKKNPKTANIPVIFLTGQADALVEARSFDLGVIDFIVKPFSALVLLNRVKMHIDMDGVIRERTEHLEQRTKHMESLYDNIVSILADVVESRDHATGGHIERNTISTKILIDAMIER

SEQ ID NO: 79024 - protein, 77 aa, Unknown
  Obtained from environmental sample
  DOMAIN (1)...(75): HisG, C-terminal domain
  misc_feature (1)..(77): Xaa is any amino acid
MAATGLMLEMNIPKDRFDAVVSGLPAMRSPTVSPLLGDTGYAVKIAVNKNEVPVIIPRLKKLGALDIVEYDLRKVVP

SEQ ID NO: 79025 - protein, 95 aa, Unknown
  Obtained from environmental sample
  misc_feature (1)..(95): Xaa is any amino acid
MAVQNIFNKLAGKPRVAELVNALPWAYCVKRDEYVTDTLKIENCVVIHKDGCVQQSYGFRGNDLDSFSASYINSVSAYFNEAVKRLGDGWMVSVE

SEQ ID NO: 79026 - protein, 294 aa, Unknown
  Obtained from environmental sample
  DOMAIN (206)...(281): Acetyltransferase (GNAT) family
  misc_feature (1)..(294): Xaa is any amino acid
MDMEHTGAVDKISTDSISRVLNLSMVPILPCIGWSPSGKPYNVSSDEIALAVSSALGAIKLFIVSVDGGLRRGNFLLPESIETRDDGSIVRLTPQEAKAIVTAYTAQNTGVMPAALRELKLALRASRAGVDRVHIIDGREEGAILKELFSNLGAGTMIYADEYESIRPFRSGDMSDILRLMEPLMQTGILIRRTAEQIQEKKDDYVVFEIDGSVHACAALYDWGENQGEIAAVATEPLYSGMNLGRRIVSYLVEKARKNRMNRVFILTTQTQDWFESLGFREAPVDSRRNARPI

SEQ ID NO: 79027 - protein, 156 aa, Unknown
  Obtained from environmental sample
  DOMAIN (13)...(156): Alpha amylase, catalytic domain
  misc_feature (1)..(156): Xaa is any amino acid
MGTQWWKKAVVYQIYPRSFCDSNGDGIGDINGITSKLSYIKKLGVDVIWLSPVYQSPMRDNGYDISDYTAINPEFGTMADFDRLLNEAHNQGLKIVMDLVVNHSSDQHPWFLESRSNKESPKRDYYIWRDGKNGGPPNNWQACSAAPRDKSSAINP

SEQ ID NO: 79028 - protein, 329 aa, Unknown
  Obtained from environmental sample
  DOMAIN (54)...(136): HRDC domain
  misc_feature (1)..(329): Xaa is any amino acid
MLKTSMQKLEKLGRMEWLRESCETLLINSKKNKSEFSENDAKENWRIKGSNSFKPLELQLLRAAWNWRNEIAKKRDVAPYRVLNPYLMLDIVKAIAKNKGKINEHNLPKIPRNLKGTLLQSFIKELSEAAAAPAEEFPGQVPRKAAPRTNINEDLRERLRELRNEKAVQLKIDSGLLAKQSQLNVLADALCGTWEEKFRVAEFMNWQKEIWQSLIHKAVLPKTPAELRNWAKERLSAMSEESRAEESEKLLAELASHPVLENGYIAAFYPAMFEPQIIPFSKKLAMKAGCFCQGAGKQKWNLSDTDIENDCTGDFWNMEQKQITRYEIC

SEQ ID NO: 79029 - protein, 176 aa, Unknown
  Obtained from environmental sample
  misc_feature (1)..(176): Xaa is any amino acid
VRSGAYAKAINSIDPGIKVYGKPCPLFVPLVEEGLIDSDITRLAVQHYLYEMVDLGIDCLILGCTHYPILMEVIQSTVGNRIQLVDSALWTAKEAQHIMKAMGTEYPPPQGGPLGQKEQPKRSDQFTVEASEGFAASRFLVSDVTPNFESVAETLLGAGLPSIEKVSVEELEEKEA

SEQ ID NO: 79030 - protein, 73 aa, Unknown
  Obtained from environmental sample
  DOMAIN (6)...(72): Biotin-requiring enzyme
  misc_feature (1)..(73): Xaa is any amino acid
VSVGGTKVLAPVAGVVIRYAVAEGAAVKSGDNVVIMESMKMELEIKATAAGKVHFLVPTGSQVASQQPIAEIG

SEQ ID NO: 79031 - protein, 129 aa, Unknown
  Obtained from environmental sample
  misc_feature (1)..(129): Xaa is any amino acid
DGQTYSFKQIASQKLAELIYGGFWFTPLREHGSAFIDVTQETVTGTVRLKLYKGSVSSAGASSPYSLYNASIASFTTGELYNHADARGFIRLYGLPTLVRALMQNDAKSKKPVKKVQEKSDSKSQGISG

SEQ ID NO: 79032 - protein, 129 aa, Unknown
  Obtained from environmental sample
  misc_feature (1)..(129): Xaa is any amino acid
MNEIISRYLPRIDFDSYEDFYENYRCNVPDNFNFAYDVADEWAKLQPEKLALLWTDDTQEMKSFTFAEIKRLSDKAANALLSLGIKKGDVVMLILKQRPGVWVLMCALSKIGAIAFPDNQRLAITGGNP

SEQ ID NO: 79033 - protein, 62 aa, Unknown
  Obtained from environmental sample
  misc_feature (1)..(62): Xaa is any amino acid
LTKTIDPVLKEIAAIFNNNGKQVYLVGGAVRDMLMGKKNHDWDLATDALPEEVLPLSKTQKE

SEQ ID NO: 79034 - protein, 135 aa, Unknown
  Obtained from environmental sample
  DOMAIN (5)...(102): CHC2 zinc finger
  misc_feature (1)..(135): Xaa is any amino acid
MNFQYNDDAKELVRRRANIADVVGRYVNLKQRGRVMVGLCPFHKEKTPSFQVNPEMGFYYCFGCGKGGDVFRFVQEMEGLDFREALETLAETVGVELPRYERRESPGEGGRGGGASKTDLLGSTRGGGDTRPPSI

SEQ ID NO: 79035 - protein, 65 aa, Unknown
  Obtained from environmental sample
  misc_feature (1)..(65): Xaa is any amino acid
MKNVLKLLGIIALVAVIGFSMSCGGDDGGGGGGGGGGGSGGGGSGGGGGGGSGGGGSGGGGNQIT

SEQ ID NO: 79036 - protein, 305 aa, Unknown
  Obtained from environmental sample
  DOMAIN (30)...(256): Bacterial extracellular solute-binding proteins, family 3
  misc_feature (1)..(305): Xaa is any amino acid
MIKKAVLITVLANLLFCAEINAQSRYPQTVNISYVITPFNMQIMVMKERRMLEQAFAPLGVDVRWHMINNGPAQAMAMAAGSLDIAPVINSASVILANAAGNPVEIAALVSRPRQTFALMVGPKGPRNIRELRGKTVAGAKGSVLHQMLIAALVKEGMKASDIKFIQMDINEARSALLANRVDAALQTSSLIIRNEEAGMRTLFTADGYITPLLFTAVRPAFAKNYPELLQIYLDQQNKAYDWIIANTTEAVEIGSRIHQISIEEGMKLYRWSGLTKAMEAEDVSSLEADVDFLYQQDMIEQTRP

SEQ ID NO: 79037 - protein, 222 aa, Unknown
  Obtained from environmental sample
  DOMAIN (1)...(81): 3-Oxoacyl-[acyl-carrier-protein (ACP)] synthase III
  misc_feature (1)..(222): Xaa is any amino acid
MDITAGCTGFVYGLETAAGLVSFNSERKRALLIGSEILTKVVNWNERKVCVLFGDGAGAVVVEKTEADNKGILQSILHADGSGSESLVMRRGGTRNPFIKGESIDLPVHIEMNGQEVYNFAVGAIAETIEELMKAGNIGIDDIAWIVPHQANARIIQAARRRLHIPSEKFYLNIEEYANTSSASIPIALDEMNRGGKLKKGDLILTVGFGGGLTYGGNIIIW

SEQ ID NO: 79038 - protein, 349 aa, Unknown
  Obtained from environmental sample
  misc_feature (1)..(349): Xaa is any amino acid
FPAKTSRRTWHWFKAGLTRPGKLKDLGGVSYLSELTSLPGTYASFIPHYADTLIKQPGEKEIHRAILEAAEMVKTAPALLDVNSLINKLAVKETERAAFKLTRIGKISIKPPEWVARHFLEKDSFCSIYGDSGAGKSFLAIELAACIATGTPFYGLPVKQGPVFYIAGEGNAGVARRLLAWSIMRGVSLERAQLYLSTGAVSLIEPMAMGAVNAAIEKLIREIGNPALVIMDTWSRVLGGDDSSPQDAAAGVSAMDGLRERHGNFAAVVIHHCGNSEKNRSRGWSGLRAAVDMEYRAERGADGILRLECTKAKDSAPIDPMAFQFTEVELPIRTDSGDSANLYMGGGIW

SEQ ID NO: 79039 - protein, 77 aa, Unknown
  Obtained from environmental sample
  misc_feature (1)..(77): Xaa is any amino acid
MNVNSQYKDSVFSLLFSDPDVLRELYCALENITLPPDTPVTHHTLQNVLFMDSHHDISFVIGGRLVVLVETQSSIYP

SEQ ID NO: 79040 - protein, 58 aa, Unknown
  Obtained from environmental sample
  misc_feature (1)..(58): Xaa is any amino acid
VDLFPLYNSLRITVIAVPFAFVLGILAAYAILRMPQMLKSVCDTIFAIPLVLPPTVIG

SEQ ID NO: 79041 - protein, 99 aa, Unknown
  Obtained from environmental sample
  misc_feature (1)..(99): Xaa is any amino acid
GFGPRLDGRDTFGFKNAKKKNCQAELPAENAQITRDILGGAKGPRRDAVLLNSAAAIHIARPEIAMKDAVELAAQTIDTGKAQAQLEEFIKLSRAAETV

SEQ ID NO: 79042 - protein, 261 aa, Unknown
  Obtained from environmental sample
  misc_feature (1)..(261): Xaa is any amino acid
MTVPGANLAAKLAWLKTNAVSGNFYCIEVSADENLAPSDLSYSGKTGIAVMLNGDGIVRTVSLSSSGSLFTVGSGVTLLLGSNVTFRGRSDNNNSLVYVNSGGALEMRMGSVISDNTCGGVYVDSGTFTMNGGKISGNTGGVYVDSGTFTMNGGEISGNTADGGDGGVNVDSGTFTMNGGKISGNTTVNGGGGVFVWGSEATFTMSGGEISGNTSGNISYYGGGGVAVYRGNFTMSGGEISGHIAPGRSYTGQYGGRRVFV

SEQ ID NO: 79043 - protein, 183 aa, Unknown
  Obtained from environmental sample
  misc_feature (1)..(183): Xaa is any amino acid
WARFISAIRYNFPTGKPYKDLQIIVRGKAYFVLTTNTDGQFLKSGFSRDKICSPQGDLAYFQCSRPCNNNIYPNEQMIKEMLLNILPDEFRLPTEHIPRCPQCGDCLVPNIRTGNNFVEKPWIKNYATLNELITVCRRKNILLLELGVGVNTPGIIRYPFEQLALQRKNTTLFRINMNIDHLT

SEQ ID NO: 79044 - protein, 339 aa, Unknown
  Obtained from environmental sample
  misc_feature (1)..(339): Xaa is any amino acid
VNGLPSRLALMNDISENVIFRNAKSANPKVNVIIKYPNWYDSFQANGYNLEDEPKMCDMIYTGTETRDPHYTHQNLPRYLSFFLPRLLEHIKPGKNGGGWYDLFECTLEDYVQQAYLTLFSKCREQMLFCFPLLVHAPLYTAAVGAFYDEADQFMGQIGEPVGVACYKPYHSYGERLLHEFIGMSGVPLDPYPYYPENAKTVFLTADAAWDGEIVGKIKQSLLNGSKVFITSGLYEKLSGKGIEDILPVEITNRKITTDTFTNSGFGRGNCGYVKAASQITLPHVAYNENDLWVLTSAVTPYSSHSLLLCGAYGKGSLYILTVPDALPILGRSDHWGTP

SEQ ID NO: 79045 - protein, 287 aa, Unknown
  Obtained from environmental sample
  DOMAIN (194)...(286): Phosphoribosylglycinamide synthetase, C domain
  misc_feature (1)..(287): Xaa is any amino acid
KREAGLFRCNKADVWRWQRGIIAETLEQAIDAVNSIMREKKFGDSGASVVIEEFLTGPEVSVLAFTDGKTVVPMVSSMDHKRAYDGNEGPNTGGMGVIAPNPHYTDEIAAICEKTIFLPSINAMREEGCPFKGCLYFGLMLTSKGPVVIEYNCRFGDPEAQAVLPLLETSLLEVMEAVTDERLSEIKINWKNEHCACVILASGGYPLSYKTGFVIAGLPGAEKSGAEVYHAGTEYRQAESSFYTSGGRVLSVSALEKTLKTALEKAYKAVDFINFEGIHYRKDIGKY

SEQ ID NO: 79046 - protein, 335 aa, Unknown
  Obtained from environmental sample
  misc_feature (1)..(335): Xaa is any amino acid
MIVKMRKVDILLYHREQEKFLEELRGLGVVHITSEQPVDSPAAQEMSSNVQRAQRVVGALSKLQKEKGVTTVSVSPTAVPELLSNFESCEAQRDRIDQELATIKKDTIALEPWGNFDPKAIKRLSEAGVKFTFYTAPQKKFAQIDRKELRIEVIAERGTTVYFVVVYRGEAPEVPGAEIVRLPDIGPKEMAAKAVALESERKEVLAKIERMVGSIPSIEKYRNDQLNNLKYEEARLSMTGAADGKILKLSGWVPKQNEAKLVIFLQDYPAYVEFRDPGPDDNVPVKLKNGKFLKLFEPVVGMYSLPSYREMDVTCFIRPFLVVFYGLCLTTWATD

SEQ ID NO: 79047 - protein, 299 aa, Unknown
  Obtained from environmental sample
  DOMAIN (1)...(283): AMP-binding enzyme
  misc_feature (1)..(299): Xaa is any amino acid
MSFSSGTTGYPKMVAHDYTYPLGHLMTGVFWHRVEKGGLHFTISDTGWLKSLWGKMYGQWLGECAVLTYDFDKFNARDILKVIEKYHVTSFCAPPTMYRFIMNEDVPSYDLSSLKHCTAAGEALSQDLFKKWETMTGLNIYEGFGQTETTICCGTLYPFTEPHASSMGMGIPGYDMTLLDAEGNKVPTGATGEICMKAERSKPGVPRHPVGLFMGYHKNDEATDKSWRGGYFHTGDLAYYDEHGYLWYVGRNDDVIKSSGYRIGPFEVESVLLKHPAVAETAVTGIPDPYAPRHKPGKY

SEQ ID NO: 79048 - protein, 63 aa, Unknown
  Obtained from environmental sample
  misc_feature (1)..(63): Xaa is any amino acid
METDMLMYEKYIGKNRDDFKSYEDLMENYKVTYNDDFYFAYDVLDELAKNQPGHLCMLWISMR

SEQ ID NO: 79049 - protein, 299 aa, Unknown
  Obtained from environmental sample
  misc_feature (1)..(299): Xaa is any amino acid
MGNPLGEQFAFSVTMGIVSALGRTGGPGGNINDFIQTDASINQGNSGGPLVNIYGEVIGINTWIASNQGGGSVGLGFAIPINNAKRAMDEIIASGSVKDGWLGVSLTDADRDTLQALGIAAGQRGALALQVFLGSPADKGGIRPGDFITHVNKNEVRGTTQLTQMVGNIKPGDRGVFTVIRDGASMDFTVTIEVRNDTVATENNKLWPGVMVAILTDEVRSSLNLDKDAQGLYVAQVIAESPAAIIGMQRGDRITAVNDTPVKDLQSFYKALREKADKELWFSFIRGTAAIWIRLSIDA

SEQ ID NO: 79050 - protein, 214 aa, Unknown
  Obtained from environmental sample
  misc_feature (1)..(214): Xaa is any amino acid
NGDKTGGENPKGPRGRGGGKENQAKPRGRKKKPRGQRKKAGGPGRREKRPRQPPAGKRREKPAEGEQTEAGEAGRDTETRRGKPKKGNHTGGDRRGQQAGAQGAQPRRERTPADARSGSRPGRNAHQDRGRAKRQHEEGKTQGEDRDPEKGKDTASQATGKQRGGETGKEKPGTAGRRKGGKRGRKGEGGARQGEQGTGQGGGGSGEHNPPYVQ

SEQ ID NO: 79051 - protein, 228 aa, Unknown
  Obtained from environmental sample
  misc_feature (1)..(228): Xaa is any amino acid
MKTEKGGQSPAKYIYDKTYESKFLVEAAGNTGWFEASYMKFSRTGACGVTIPAGSYTLDLMATPTSGGTASKSPSSSYYSSGSTVTVTAKAESGWQFDSWSGDAEGKTNPLSVTMNKNKVITAKFTPIIDTDKNIVTNGTFKNTDSWTFNKGSSYGSSEGTFSVSGNKATLSVTAIGKNPCEPQLVQNGITLVEGMKYRLTFDASATAARKMGVIIQMASESWTTYFE

SEQ ID NO: 79052 - protein, 238 aa, Unknown
  Obtained from environmental sample
  misc_feature (1)..(238): Xaa is any amino acid
MNGKVEKVYFDYNDTVKAGDVLAVLNTDMLKVKREQQLAALTKVRSNYELQLVYYQSQEVLAQKNFISEYEFKTSLNALENLEADLRVAEGNLKAIETEINQYAYIISPIDGIVLDRNVNVGDTVVESSSSNSASVFTLAENLREMQIEAVVGQLDVVSLYKGQAVRFTLESLPGRSFTGRVENIRMVPVVSNNVVSYTVIISVENSDGVLMPGMTCTVNFIVETREDVLLGFQRRPA

SEQ ID NO: 79053 - protein, 294 aa, Unknown
  Obtained from environmental sample
  misc_feature (1)..(294): Xaa is any amino acid
LLVYFAIFTTLVSVQFARRESTTRRAGNFVVSGRYRLPTEDDSPASSNEYIVEGDVHISFGGMDFNIVKISDGLSVCLLGREGSRAEILPERMIIQDNSISLTFANGTELIFTAQNTGGSPEMRINAVFSDDVLGIELPFRPQSRTGIRYTGSGQFIVSAGKTDYTFGNSPIDNERRLLLIEAGGRQVSYRAIPETKGLTIQDFILPQAETAEAYNEAIKWWRDQNYSLWNRSVSTQNNEDLVIALIGEAFVRGNFAAAVVAIPQTFLNGNARTYESSVYLGNLDQAYRSLNTA

SEQ ID NO: 79054 - protein, 148 aa, Unknown
  Obtained from environmental sample
  DOMAIN (16)...(148): Cobalamin adenosyltransferase
  misc_feature (1)..(148): Xaa is any amino acid
MVDLITKFTKMRLTKIYTRTGDKGSTSLIGGERVPKSHLRLECYGTIDELNAFIGKLKSLCKTNPATSENLNNIQKMLLNIGAVLATPEGKKWKGMPSINKEHIKELETEIDKMNSKLKPLKEFTIPGENEINAEAHICRTVCRRAER

SEQ ID NO: 79055 - protein, 268 aa, Unknown
  Obtained from environmental sample
  DOMAIN (136)...(267): GGDEF domain
  misc_feature (1)..(268): Xaa is any amino acid
MYQEIGVLLMSKEKRIYIADDETNIRLAIRKFLENAGFVVEDFENGDLLMEAFLKSEADLVILDVMMPGSNGFVICKELRKKSQVPVIMLTARDSDLDYATGLDLGSDDYLTKPFSPMALIMRVKALFRRMEYDRLIYAERDLLTNVYNKISGTDIAENELKVNDEKSLHALFIIDLDDFKGVNDNLGHAVGDRVLVEAAKTISGIFREADIVSRFGGDEFVIFASHISDMSFMEEKAVKLCSELRKSYSDGGMYRIIGSSANLSCQK

SEQ ID NO: 79056 - protein, 313 aa, Unknown
  Obtained from environmental sample
  DOMAIN (16)...(196): Trypsin
  misc_feature (1)..(313): Xaa is any amino acid
RLNSAVVNITTETMALNWFLEPVPQEGGSGSGSIIDTRGYVLTNNHVIRNANKVYINLADGSQYEGTVAGADPDNDLAVVKFDPPAGMVLKTVPYGDSGNLKVGQKVLAIGNPFAMERTLTVGIVSGLGRPIQITRQHIVRDMIQTDASINPGNSGGPLLDSRGRMIGINTIIFSPSGGSVGVGFAIPVNTAKRVVNELIQYGKVRRGWFDATMVQLFPALVRYAKLPVASGLLVSRTKRGGLADKAGLKQGSDPVQYGRSAIYLGGDIITSVDGVKITALSDLYSALENSKPGDKVKVGIIRGDQLGQSVMP

SEQ ID NO: 79057 - protein, 112 aa, Unknown
  Obtained from environmental sample
  DOMAIN (2)...(110): Formyl transferase
  misc_feature (1)..(112): Xaa is any amino acid
MTRIAVLVSGGGTNLQALIDAGSGGELGGGELSLVISTKAAVQALERAQKAGIKTKTIERKKYSNPEEYDAAFAARVSEEQYDLVVLAGFLSILGPKTLKLFKNKLIMCIRR

SEQ ID NO: 79058 - protein, 102 aa, Unknown
  Obtained from environmental sample
  DOMAIN (6)...(101): Endoribonuclease L-PSP
  misc_feature (1)..(102): Xaa is any amino acid
MKVIQTEAAPAAIGPYSQAVVSGNLVFTSGQIPLSAQNGQVIGSSITEQTEQVIRNLGAVLEAAGSSFAKVVKTTCFLADMNDFAAFNEVYATRPNLILGEP

SEQ ID NO: 79059 - protein, 119 aa, Unknown
  Obtained from environmental sample
  misc_feature (1)..(119): Xaa is any amino acid
VEKLVAAYDIGSVVIPNSAEGQVEGGLLMGMGYALTEDFPVKGGYPKAKYGTLGLLRATEAPQMEIIFVKPKSPPPLAHGAKGVGELAAIPVTPAIAGAYYAKDKKLRTKLPMENTFYK

SEQ ID NO: 79060 - protein, 97 aa, Unknown
  Obtained from environmental sample
  misc_feature (1)..(97): Xaa is any amino acid
GTKPVLWPSEINGNEQIRSFAEDKYLLYGGYEPLTVKLTQIMNQTAGIGWTSYSHTGVPVPVFAKGVHQEIFGGYYDNTDLFFKLASVMNLNVPVKR

SEQ ID NO: 79061 - protein, 240 aa, Unknown
  Obtained from environmental sample
  misc_feature (1)..(240): Xaa is any amino acid
LKIKNNKLKDLLARFSFLGNYKESGKDTVFIVVASLLTILVLLIPTGFEGSGVYSNAVRAKVRVVEVNNERLKIIGPVRQGEQQLEVEILSKRFRGQIHPTSNNMIGKMELDKAYVKGNIAFAIINLTEDGEIANVQIIDHYRTDKTIILGALFIIAMIIIMGWMGFKILITFVFSAAMLVRVLYPMILPGWESDIGRGNHYYAELPRLSWFLGGGPYTGPLLRGFWPPPAGVIFTTIMG

SEQ ID NO: 79062 - protein, 89 aa, Unknown
  Obtained from environmental sample
  DOMAIN (21)...(84): DHHA1 domain
  misc_feature (1)..(89): Xaa is any amino acid
MGAVNDDADGFVNVPLRAREIMVSIMVKESKKGKVKCSMRSKGAIDISKVAHDFGGGGHINASGFNSEFNIDQTLSLTLAKITAYLGIK

SEQ ID NO: 79063 - protein, 177 aa, Unknown
  Obtained from environmental sample
  DOMAIN (119)...(174): R3H domain
  misc_feature (1)..(177): Xaa is any amino acid
LGQGQGRAPARNVSAPRFSAIPWPQNELKKKVIDFVEELIKKMGYERKVSVMFRDEFKLGLKIDSDHSSILIGKKGKNLDALQLLVNIYAGRQGREDTRVILDSENYRIRREESLVRLAYTVADRVRESRTSILLEPMNPFDRRLIHTTLNDITDIETKSEGDGLYKQVRVFFRGVK

SEQ ID NO: 79064 - protein, 277 aa, Unknown
  Obtained from environmental sample
  DOMAIN (17)...(83): His Kinase A (phosphoacceptor) domain
  misc_feature (1)..(277): Xaa is any amino acid
MIAEMRRAEVAEESNKAKSEFLAKMSHEIRTPMNAILGITEIQLQDANLPNTIKEALERIYNSGDLLLGIINDILDLSKIEAGKLELFPTQYDVSSLIYDTVKLNVMRYESKPIEFLLEVDENLPSSLVGDELRIKQILNNLISNAFKYTHEGRINMRLTIEKGGNSSEIILIFVVSDTGQGMTAEQVRKLGDKFSRFNAEANRKTEGTGLGMNITQNLISLMKRDMKIESTPGMGSTFTVTLPQKYEGAPPIGKEHADHLMKLTIKNTSKFRNAQI

SEQ ID NO: 79065 - protein, 104 aa, Unknown
  Obtained from environmental sample
  misc_feature (1)..(104): Xaa is any amino acid
GQPKIRSAELPRVIREFETGYPETHKSFWNEEMFSFHSLDWWRHLWEKTGIVDIISGYNISDPKDIWYPWAHWAKEHLKFDDVEFLNADTENQITLFVLSAVKK

SEQ ID NO: 79066 - protein, 226 aa, Unknown
  Obtained from environmental sample
  misc_feature (1)..(226): Xaa is any amino acid
VLVYLHDQNEEASFCADKISASVKKKETAWSDWAILYRTNDQSRTFETLFTKEKIPHRLVGSLRFYEREEIKDSLALLAFLVNPRDEVAFRRVVNKPTRGVGAATVDKLTEACAEHNGDLLETSRAMNCSAKARKGLNEFIKVIEDAKNLLSNPAQPPEEDENGSLISGDSLSLLVKKIVHDSGLYEYHKTHDEITGKTKISNLDELLNAVSIYPNSREGLLNFLE

SEQ ID NO: 79067 - protein, 136 aa, Unknown
  Obtained from environmental sample
  misc_feature (1)..(136): Xaa is any amino acid
MIEDQGWRITAFKIILIILIAVYSVKLFTMQILSGEVYLSRAQDISRRTFTIPAQRGEIYDRNYIKQLAMNKDSFAVNITPAEVPKGKMEEIIYAVSGIIGVPTDEITAKLPKQYCSLPACEIASTRPNLSWGGGL

SEQ ID NO: 79068 - protein, 153 aa, Unknown
  Obtained from environmental sample
  misc_feature (1)..(153): Xaa is any amino acid
MRHGYSGDFNSGSVSQKGGGRLSSAIFNSSFYVFISLVIVSIGLLLFSGGNFIFHLKNTGLSLFSGVRGGIYEFTSAVSRTVLSVKELANLRKEYAELLKQLERYEELERSNAEIYQENIRLREQLGFAQTLRYKRIPRKFQAATRIIFFRGS

SEQ ID NO: 79069 - protein, 279 aa, Unknown
  Obtained from environmental sample
  DOMAIN (99)...(167): GHMP kinases N terminal domain
  misc_feature (1)..(279): Xaa is any amino acid
MIIRSKAPLRLGLAGGGTDIADYYNRYGGYVLNATVDMYAYCTIEPNDSDKVEFIAADLGKQEEYPSCEKLPVSPSLPLHCGIYNRIISDFVKKPLSFKMTTYSDAPAGSGLGSSSTMVVAIIKAFEEWLNLPLGEYDIAALACKIEREDIGLAGGKQDQYAATFGGFNFMEFYENERVIVNPLRLKRWIRNEIESSLVLYYTGVSRESANIIDEQIKHTQKGDAKSIESMHEMKRQSLIMKEALLKGDFRGFSDCLLNGLACQKKRRSQYLCDLSWGT

SEQ ID NO: 79070 - protein, 69 aa, Unknown
  Obtained from environmental sample
  misc_feature (1)..(69): Xaa is any amino acid
MSDVDYEFQMAYTNRNMLNSAETVFLMPSAEYAYLNSTLVKQIARHGGDISGFVTESVKKKLLEKIACE

SEQ ID NO: 79071 - protein, 109 aa, Unknown
  Obtained from environmental sample
  misc_feature (1)..(109): Xaa is any amino acid
NSWLTGTAAWTFVSISQYILGVRPCFDGLMLDPCIPSNMKGFAVTRHFRGADYHITVDNSAGVEKGIKSITVDGKPLNGGASNNAALKNALLPVFGDNKVHKIVVIMGR

SEQ ID NO: 79072 - protein, 180 aa, Unknown
  Obtained from environmental sample
  misc_feature (1)..(180): Xaa is any amino acid
RYFPGLSRGQAAAIVKEAKAQAEKLVADARKQAEDLKRNAESELKNSGAQAIASIKNRIVNLISAKVLDGSVGKTLSDPAALKEFVSAAIHNWKMAGGEAPNLEVLLPAAKQSELQASFNAGAGQALGAGVTVSFSSDIKAGFRIGPSDGTYKISLTDEDFKEFFKEYLRPKTRAYLFGE

SEQ ID NO: 79073 - protein, 163 aa, Unknown
  Obtained from environmental sample
  misc_feature (1)..(163): Xaa is any amino acid
MARNYYYLIAGLPDLMREESKNVPPFRLVAEEIRQEVAPSDFEFVRAMTLPVDNRNLVNILTHSGEEFDSRGNFSKEELAKGSIDLPEYMQVFLAAHKENRQLFPGLTPLDQLTWLFYEEMAGLQNTFVREVVDFELSLRNVIVGLKRRKGLGAYRCDRHRRG

SEQ ID NO: 79074 - protein, 186 aa, Unknown
  Obtained from environmental sample
  DOMAIN (13)...(156): AIR synthase related protein, N-terminal domain
  misc_feature (1)..(186): Xaa is any amino acid
MTEKTDSLLANCTSGGCGAKIGPGELSVLLGKFPAVRDERLLVGFDCSDDAAVYALNNDKAIVSTVDFFSPMIDDPFVFGQIAAANALSDVYAMGGTPFLALNLVCFPEKFPKSILADILAGGTDKIAEAGAVLGGGHSIYDKETKYGLAVTGLVERKNIIRNNTPRIGDSLILTKPLSADLTWVE

SEQ ID NO: 79075 - protein, 103 aa, Unknown
  Obtained from environmental sample
  DOMAIN (9)...(98): Cyclic nucleotide-binding domain
  misc_feature (1)..(103): Xaa is any amino acid
MSAEFQPVTVHLKKDAYIFVEGKQNADKFYIIKHGDVRIIREALNDGIGSVLGTGEMFGLISTMAAHGYIESAIAMSNVTLLAVERQHTETLSVKPILSPLIV

SEQ ID NO: 79076 - protein, 343 aa, Unknown
  Obtained from environmental sample
  DOMAIN (1)...(308): Periplasmic solute binding protein family
  misc_feature (1)..(343): Xaa is any amino acid
LRPIAFSVAAEHKPATDNAKISIVTTIFPPYDFARAIAGDKADIAMLLPPGSESHSFEPRPQDIVKIQKSGVFIHVGGESDAWVKDILKSIDNPKMKVITLMDCVETVEEEIVEGMQEEEGEDKKDGEGEEGPEYDEHVWTSPRNAKLIVQKISETLREADPANADVYQKNTEAYLSRLDELDAKFKGVVDSAARKTIVFGDRFPFRYFADAYGLKYFAAFPGCATETDASAKTVAFLIDKIKKEKIPVVFHIELSNEKMANTIREATGAKVRLLHACHHVTKADFESGKTYMDFMTANVDVLREALKISWALSLVRTRDLHTTARPPSADSISPWRRKLFVR

SEQ ID NO: 79077 - protein, 254 aa, Unknown
  Obtained from environmental sample
  DOMAIN (94)...(207): Response regulator receiver domain
  misc_feature (1)..(254): Xaa is any amino acid
MSTPRFNTEANRTIEGTGLGMNITKQLVNMMGGDISVESEPGKGSVFTVCLPQETVDAEVLGREVSKNLVQFRNNRAEQMKKGPQIIREFMPYGRVLIVDDVETNLYVVKGLMAPYGLSVETASSGFEAVDKIRNGSTYDVIFMDHFMPKMDGIEAVKIIRGLGYTRPIIALTANALAGQAEMFMENGFDGFISKPVDIRQLNISLNKLIRDKYPPEVVEAARQQAAKNNELKTAAMNEQSATGRNWRLFRAGR

SEQ ID NO: 79078 - protein, 58 aa, Unknown
  Obtained from environmental sample
  DOMAIN (7)...(58): Thioredoxin
  misc_feature (1)..(58): Xaa is any amino acid
MDNAQDSLLEFNDQNFADSVLANPKPVVVDFWAPWCGPCKMLTPIIHELAGEYADRVA

SEQ ID NO: 79079 - protein, 218 aa, Unknown
  Obtained from environmental sample
  misc_feature (1)..(218): Xaa is any amino acid
MKVWIKLLIGSILGIILGHFLPDNQRVMESLVWLEQFVLSIGRYAIIPVLVFSLAISIYELRQDGQFWSLVIKNLFLIAGISMLVIGIGVLATLAFSPGRIPVMAEEQLDVIRLDVAENIKELFPYNMFSVLTGEGVYLFPVYVFAFFFGMGLSYDKSYSKPIISITDSLSRIFLYILSFFIEILGFMMIVLSSYWMIRFRGVCRPAFLNSANLSLAD

SEQ ID NO: 79080 - protein, 227 aa, Unknown
  Obtained from environmental sample
  misc_feature (1)..(227): Xaa is any amino acid
MPAADETGKFALNISAALAILCCCILMIPQTQSVIVESGGKLLPGRNWDYAAWTSKISTFSLAASICLGVYFVLQIKRLRPFLEKYGEKICIAALTAIIAIGILVRIVMYAKCRSLWLDEAMLVESIASRNWSTLLASSLSNDQSAPILYVVAVKIICSVLGYSEFSLRFFSFISFIGLLTGEFILLKKYLKIRHIKTAPRLTMTAVLPTYFYYSTNQTLYGRRFFC

SEQ ID NO: 79081 - protein, 69 aa, Unknown
  Obtained from environmental sample
  misc_feature (1)..(69): Xaa is any amino acid
MKKVYSKIESITGSVITVRAEGVRYGDLAEVDTVFGSSLAEVNRLEKDVVSLQVLPAARANLYMGEENA

SEQ ID NO: 79082 - protein, 227 aa, Unknown
  Obtained from environmental sample
  misc_feature (1)..(227): Xaa is any amino acid
AFPAYLESTIASFYERAGIVRLKDGSLGSVTIGGTVSPAGGNFEEPVTQATLKVVGAFHGLSRERSDARKFPAIHPLDSWSKYKGIISGEKVAYAHSFMRRGTEVEQMMKVVGEEGTSIEDYIIFLKGDLIDSVYFQQNSFDEVDAAVKPDRQKYTFDKLLVILASKFSFPDKNEARSWFNRLRQKFLDYNGSKWKEERFNTLEREIEDTVKTQSQGLDKAAEKILG

SEQ ID NO: 79083 - protein, 108 aa, Unknown
  Obtained from environmental sample
  DOMAIN (6)...(107): Carbamoyl-phosphate synthase L chain, N-terminal domain
  misc_feature (1)..(108): Xaa is any amino acid
MPLDKNIKKIMVIGSGPIVIGQAAEFDYAGTQACRVLREDGIEIVLVNSNPATIMTDKNIADRIYIEPLNLTNWQRIIKKKTAPPTSFRGLGGQTGLTLCMQLSPNGN

SEQ ID NO: 79084 - protein, 138 aa, Unknown
  Obtained from environmental sample
  DOMAIN (11)...(112): Hpt domain
  misc_feature (1)..(138): Xaa is any amino acid
MSDYLDPNNEEVLKDFFSEAQMQVDTLEQNLLVLEQEGANKDAVGEIFRAAHTLKGGSATVEFMELSHFTHLVEDVFDAIRSDQLSVNEDVVDTLLQAIDVIKAMLEKRMSGSVYEHDTSAITKELNALLPEGRQYNK

SEQ ID NO: 79085 - protein, 322 aa, Unknown
  Obtained from environmental sample
  DOMAIN (56)...(221): Radical SAM superfamily
  misc_feature (1)..(322): Xaa is any amino acid
ERGSPTGTAPERYAKTRRRPYIENLDDIPFVSEVYHKFLDINPYFYGHSRHPLIVIVTGRGCPFHCTYCVLPQTMQGHKYRKRSTESIVQEFLYIRDNFPGVKEIMIEDDTLTADRKRCRELSEALIATGGHRIPWSANSRADVDYETMCLMRRAGCRLFCVGFESGDQTILDNIKKSITLDKITAFTRDAKRAGILVHGCFMVGNRGETRETLETTLRFAKELNPDTAQFYPIMVYPGTSDYEHFGEKGWIVSNDFRRWLTDDGLHSSVVSNPDLRYEELVAFCDRARRAFYLRPTYIFAKLKQMAVTPGVKRITGITGGP

SEQ ID NO: 79086 - protein, 342 aa, Unknown
  Obtained from environmental sample
  DOMAIN (201)...(338): Glutamine amidotransferase class-I
  misc_feature (1)..(342): Xaa is any amino acid
GFSPGIDGRGTLQLIPHITETIKQFIYGGASQSGADVMITEVGGTVGDIEGQPFLEAIRQVPLEKGRENCLFIHLTLVPNLRSSGEQKTKPTQHSVKELLSMGISPDIIVARADEPLRDGTKEKISQFCNVKLDCVIENTTMTSLYEVPLMLHRNGLDEVACRELGIKAPPPDLGEWEAMAASISKKQKEASIAIVGKYIQLHDAYLSIIESLNHAGIETGANVNIRWMDCEDVTIESAPRLFSGINGMIVPGGFGDRGIEGKIAACRYARENNVPFLGICLGMQIAVIEFSRDVCGLGGAHSPPSHETSPHPVIHIMPEPVRREGTGGTMRLGAYPCPDAP

SEQ ID NO: 79087 - protein, 319 aa, Unknown
  Obtained from environmental sample
  DOMAIN (109)...(281): B3/4 domain
  misc_feature (1)..(319): Xaa is any amino acid
LRGVKSYGMICASSKIGLADLFPATEDSTIVDLSAFDATAGTNLAEALGLNDVILEIDNKSLTNRPDLWGHYGIAREISALYNLPLKECEPFAPQSVPDLEITLEDTQRSPRYIGVKIEGLSIKPSPFKIQSRIWRVGMHPINAIVDITNYVMLAIGQPTHAFDSDNIEGHITVRRAKESEKLLLLNGKELSLSVNDLVIADNEASVGLAGVMGGSKDSVLPKTTKVILEIANFDSIGIRHTAMRYEVRTEAAIRYEKGIDPERCDIALSLAMQMFADFFPKLSITGFSDSYPKHLKSKEIDVSLDWLEKRLRQTHFKR

SEQ ID NO: 79088 - protein, 335 aa, Unknown
  Obtained from environmental sample
  misc_feature (1)..(335): Xaa is any amino acid
GLRAQKLTYPFRAKPQGHKVSVCDPFVSMLEGILSRGDERAGNMVKQAFRLGTRLDPWQEFISKDAWQTVLEQNPGLADEFLAQKDIAAPLPWSVINAGVSPAYLRKEFDKSNRGELTPPCVEDCIERCGVCNEQLTMNGEQRTMSNEQSLRTKTPVPSPQSPLPIKRPDPVIWRLLFGFSKEGSAVFHGHLSLIEIFSMALCRAGLDARYTQGFNPLAKLEIVSPLSVGISAGGEIAAVEFLHTVQPREFIEKMNATLPEGIKITKAECYCIPSGSKKHSLSSLLWGFGYAGTDGETIYVPATGEKAHREKHLSSGQTLSPARSGSAICLGGNP

SEQ ID NO: 79089 - protein, 152 aa, Unknown
  Obtained from environmental sample
  misc_feature (1)..(152): Xaa is any amino acid
MADNFTLLTTDSYILDIVNHPAFKGFGERLLPYDDNSAYYNTRISDAASLMPYHQNVNPVVIVKALNYMIKEARDGKTIFYDFYTERQKKADPAKTHIGLFFFRGKPGAPFAIVCPGGGFSYVGSLHGGFPLAWRKQKKINVCTLDNPGENW

SEQ ID NO: 79090 - protein, 131 aa, Unknown
  Obtained from environmental sample
  misc_feature (1)..(131): Xaa is any amino acid
MSRIKLILGSHAHVPYGSNTVDFENVYINLLRPFVTSLYRYPGIQAVLHYSGVLLHWIERSHPELFMLINDMIARKQAEILGGGFYEPMLAIIPLQDKIGQIEMLTTYIRKQLGSGLRAAGYRAFLGSRGW

SEQ ID NO: 79091 - protein, 221 aa, Unknown
  Obtained from environmental sample
  misc_feature (1)..(221): Xaa is any amino acid
LPVVQVILFETNHHLEGKAVLAQPCITDVWEKKFYGENPVFMLDPKAKSNEPVPDKHQGAVKRWPFLPPYLRDTFIKAFSKEAMNDPALRVLERDWVQVFVRMRGEVKKKKICGEVYFADPVTPNPCPSCNKPYAFPFYIKTSSGYNVPAHQRTVLYQCHTTTDAAGEDFDIKTGEMMVKGDEIGLKNISSERWSRIKDGVQAPVEKGRAARLEKGVTFTK

SEQ ID NO: 79092 - protein, 315 aa, Unknown
  Obtained from environmental sample
  misc_feature (1)..(315): Xaa is any amino acid
LPNKDGRWFTGSYAINPVNNEKIPIWIADYVLISYGTGAIMAVPAHDERDWEFAKTFKLPIVQVVAEEQPHSPLPTPHSLCTKEEPSECTTADGYSVNSGSYDGLPTEETKKRITQWLEDNKLGKNMVNFKLRDWVFSRQRYWGEPIPVVHCESCGIVPLSEKDLPLKLPDVQSYAPTGTGESPLAAITEWVNTVCPKCGKPAKRETNTMPQWAGSCWYYLRYLDPHNDREFASKDKMEYWAPVDLYVGGVEHAVLHLLYARFWHKVLYDAGLVNSKEPFMRLVNQGMILSFAYQRKEQTLVPVDQIEKKAGRAF

SEQ ID NO: 79093 - protein, 36 aa, Unknown
  Obtained from environmental sample
  misc_feature (1)..(36): Xaa is any amino acid
MKKKIILAYSGGLDTTVIIPWLKENHDCDVSPSRPI

SEQ ID NO: 79094 - protein, 58 aa, Unknown
  Obtained from environmental sample
  misc_feature (1)..(58): Xaa is any amino acid
ESVGQSVKLSGGVDTIRDHGGVTFLDLRDQYGITQIVLHNEELESKSARKALSPFPAP

SEQ ID NO: 79095 - protein, 218 aa, Unknown
  Obtained from environmental sample
  DOMAIN (1)...(218): Cys/Met metabolism PLP-dependent enzyme
  misc_feature (1)..(218): Xaa is any amino acid
GFPPLSQRTVIGGVIVDSGKFNWAANDKFPGLSKPNPSYHGVVLTQAVGNLAYIIKIRVTLMRDTGATVSPFHSFLFLQGLETLSLRTERHVQNALKVVSYLQKHPQVESVNHPSLPNHPDHTLYNKYFPNGAGSIFTFEIKGGAEQAKKFIDKLELHSLLANVADSKSLVIHPASTTHSQLSGDELLDQGIKPNTIRLSVGTEHIDDIIADLEQAFK

SEQ ID NO: 79096 - protein, 69 aa, Unknown
  Obtained from environmental sample
  misc_feature (1)..(69): Xaa is any amino acid
MAKKIKQIAVYGKGGIGKSTTTSNLSAALSNTGIKLCSLGAILKPTAPIRFEAELISPPCLIRLGKKEP

SEQ ID NO: 79097 - protein, 134 aa, Unknown
  Obtained from environmental sample
  DOMAIN (11)...(134): 6,7-dimethyl-8-ribityllumazine synthase
  misc_feature (1)..(134): Xaa is any amino acid
MTKIVQGMFSGAGKKIGIVAGRFNEFIVGKLLEGAYDCLERHGVQLDDVTVCWVPGSFEIPSAVQRMARSKKYDAVIALGAVIRGSTPHFDYVAAEVSKGIAQISLDEGLPDIFGVLTTDTIEQAVDARGLKPG

SEQ ID NO: 79098 - protein, 323 aa, Unknown
  Obtained from environmental sample
  DOMAIN (49)...(279): Glycosyl hydrolase family 3 C terminal domain
  misc_feature (1)..(323): Xaa is any amino acid
AALTRLLRTRFKLGMFDPPNSGKYRKLGRKVINCEKHKQLALKAAEKSIVLLKNDDNLLPLDSSPKAIAVIGPAAANAHALFGNYYGVSPRFVTILEGLADKVKDAFGINLNYRQGCLMYTDINKSNVVYGEAKVTDIVIAVMGLDGAIEGEEGDAIASDSNGDRAAIELPPWQVKFLKAVRAAGKKIVLVLTGGSPIAFPEDLADAVIFAWYPGELGGTAVADIIFGDTVPSGKLPITFPASTDQLPPYEDYSMKGRTYRYMTEKPQYPFGFGLSYTSFRFDSIKLSDPPVSADYVVKASVTLSNTGKRDADNSRPSIPGEK

SEQ ID NO: 79099 - protein, 128 aa, Unknown
  Obtained from environmental sample
  misc_feature (1)..(128): Xaa is any amino acid
MNVLAVCEKPQVLQFKPQEASVSLKVVSANENREIIKARNDVPAVIKVISLGGGGGNALNRMIEAEIPGVEFIAANTDIQDLHKKSRAKVKVQIGVELTAGRGAGGNPEKGEKLVPLGRICTWGGEWG

SEQ ID NO: 79100 - protein, 318 aa, Unknown
  Obtained from environmental sample
  misc_feature (1)..(318): Xaa is any amino acid
LSRGYTLPDPGQEEALYDFLDSVTGSFELDEVVSFIQMIEPKRKSLLAQEVESYINHRNMAFLVRNKCWMSRRGYFAPLSFVISPSRLELVNGILIPGHRCVPFANTSLLPHEYIFSWQGSVIPCTTTEGPPEEFYPYYSILGEEYAPQYVAKDNSENEEAFNGDPFDDPPEVSIRTMDMRNIYRETSFVPGDRFVVKTLDWKQGSFELEKVSKDEWSAADLDAWLLAAEEGFENSFSKLGPGSCTEEQIAYAYWYGSPRMREVPAYSLEDYIYEKPNRIETSAYGIETRSWYAGRKIPDRKELDLSAVSSNMTPVVL

SEQ ID NO: 79101 - protein, 127 aa, Unknown
  Obtained from environmental sample
  DOMAIN (1)...(124): NUDIX domain
  misc_feature (1)..(127): Xaa is any amino acid
LRPLYYHYYQRKGRSRTGAYKKFTSNFYSFIAGFNEAGESLEETVAREIKEEINIVVKDIRYILSQPWPFPGSLMLGFSASYDGGEIKPDGIEIDDARWFSREALPNLPGSASVSRFLIDLWIIGKL

SEQ ID NO: 79102 - protein, 188 aa, Unknown
  Obtained from environmental sample
  misc_feature (1)..(188): Xaa is any amino acid
VSPGLSRHDKPPFLRGFQALAETQLIEEDAALLNCLSIDPDPEGKIVPSYAELTPSTGCDFIDSWREWERSLRLNLARNRASKLKRDNLSASEPPFYPVEAVAAALKAVNAEVSPLEGEFLIDKARWNAIDMLAGTNYFDRNSVYAYFLKLMLIERRMSFNTERGFAEYKSLYASIIESEHNSLGVPK

SEQ ID NO: 79103 - protein, 310 aa, Unknown
  Obtained from environmental sample
  DOMAIN (1)...(310): Amidase
  misc_feature (1)..(310): Xaa is any amino acid
VSKEKALARAKEVQSQIDKGEEISPLAGAPIAIKDNISTTGIETTCASKMLKGYTPVFNAAVIEKLEKAGMVVIGKVNMDEYAMGGSSETGVKGPVHNPWDVSRVAGGSSGGSAVAVAAGEAPIALGSDTGGSIRQPCGFCGVTGIKPTYGSVSRYGLLAYASSLDQIGPIGQNIEDCAALLSIISGPDPRDSTCVIEKPFEFGDGKKGLGGVKIGLPRNYYGSGIDDEVKNAVLAVSKELEAAGATIEEFEMPLMDYMIPTYYIIACAEASSNLFAYDGLKYGYRSPNAGSLSGMDRLSPHEGFGAGNK

SEQ ID NO: 79104 - protein, 80 aa, Unknown
  Obtained from environmental sample
  misc_feature (1)..(80): Xaa is any amino acid
MRIIPVASGKGGVGKSLVSANLGVAFAQAGQRVILADLDLGASNLHLVLGHQSPKTGIGVFLMTSDRISGMSLSIRMYVG

SEQ ID NO: 79105 - protein, 110 aa, Unknown
  Obtained from environmental sample
  misc_feature (1)..(110): Xaa is any amino acid
MKKKIILAYSGGLDTTVIIPWLKENHDCDVIAVCVDVGQAADWKAITKRAMTTGASACYIADVKNEYVEEYIWPALKAEPFMKTSIYLARQQQGRLSQRCLSNTREKKKP

SEQ ID NO: 79106 - protein, 264 aa, Unknown
  Obtained from environmental sample
  DOMAIN (1)...(76): CTP synthase N-terminus
  misc_feature (1)..(264): Xaa is any amino acid
MGISPDVIIARADEPLSKGIKDKIALFCNVKPDCVIENMTLPTLYEAPLMLHRNGLDGVVCRGLSLDVPEPDLREWQSMTGRIGSRERAVNIAIVGKYIKLRDAYLSVIESLNHAGFETAANVNIKWIDSENQIGQNAADALGGIDGMIIPGGFGDRGIEGKIAACRYARENDVPYLGICLGMQVAVIEYARNVCGLEGANSIEFDELSLHKGIDFLSGLTGQMGTGRPDASRGVTPAKPPPDSLWGMFLWRSSQSGERLPLLL

SEQ ID NO: 79107 - protein, 321 aa, Unknown
  Obtained from environmental sample
  DOMAIN (1)...(313): Glycine cleavage system P-protein
  misc_feature (1)..(321): Xaa is any amino acid
MPFISVTDAQRAEMLRACGVSSIGGLFTDIPDSLAPHPSAKEFFDTEGLSELEATAECERLASENDTRLVSFLGGGFYDHFIPAAVDAIASRSEFYTAYTPYQPELSQGTLQAIYEYQSQICRLTGMEVSNASLYDGGTAVFEACKMALAATDRHTIVIDCGVNPIYGKMLKSHTVNLGIDIAEIHAMYDGTLDREAINSRIDDKTAAVVLQNPNFFGIIDDHSDVVDKCKSVGAIAVQSVNPLALALIKSPGEQGFDIAVGEGQPLRIPLSFGGPYLGFIGAKKALARKCRKDSRANHDASGRGGSFYRLQRGDSTSDAK

SEQ ID NO: 79108 - protein, 141 aa, Unknown
  Obtained from environmental sample
  misc_feature (1)..(141): Xaa is any amino acid
LKRLPITPFLLLMLLFCGTSFVYAQAETAESVLTRVAELLSTSKFNEAVALFDAIPPPEKDSSNIKLLKASVLSSAGKYAEARALAEAVAAAEPHNTEPLFVLASIEAVSGRQRQQQAALEKIIKLQPGNTEALIAPGNVS

SEQ ID NO: 79109 - protein, 126 aa, Unknown
  Obtained from environmental sample
  misc_feature (1)..(126): Xaa is any amino acid
MKDKLFSWIDSAIPLAVELETGLTKHPAISPESGGEGELDKCLFLENWLKAQGITNLEHYDAPDKSAKGGIRPNLIATITGNSEKQLWIMSHLDVVPPGEEKLWESDPWTVYARISSRALSVHNQG

SEQ ID NO: 79110 - protein, 91 aa, Unknown
  Obtained from environmental sample
  misc_feature (1)..(91): Xaa is any amino acid
FSRLSRPSHTGVQVGGSQQQRNGVLCSVTGFPSIAVPAGFSAPTPEAPLGVPVGMEIIGRPWSEPLLIELAYGFEQASRFRKVPVSVPELK

SEQ ID NO: 79111 - protein, 98 aa, Unknown
  Obtained from environmental sample
  misc_feature (1)..(98): Xaa is any amino acid
MPEIILAAINAKWIHPSLALRLLKANLGSLGDRCDIVEFALRQPLCEKTEPILAARPRILGLSVSIWNHLATLELLKKLWETWAVEAVQKPVVILWRA

SEQ ID NO: 79112 - protein, 183 aa, Unknown
  Obtained from environmental sample
  misc_feature (1)..(183): Xaa is any amino acid
MPYYLNLSVLSNNLNYPQKTERKMRLSDEARRILSLCEGRPLTNEDIAREAGGRPFFPGSDTDFSISHSGDLAAVSLVRGKGLRTGCDVELVRPRAKAREIAEDFFSIPDKEYIESGGSFDLTRFYQIWTFKECFLQLRGLSVFDMRKAPSFVSGVSPISFSQYELTVAAGGRYILATAYEGT

SEQ ID NO: 79113 - protein, 124 aa, Unknown
  Obtained from environmental sample
  misc_feature (1)..(124): Xaa is any amino acid
MKIIAGLMEPDGGEVFFQGQPLYNKKYARNSTIKRLRGTLGLILQDADAQIVGETVMEDARFGPENLGWPASDVNTAAEKALFDMGLIEKHDNSSRQLSRRGETPPPYNPSRPPGQQHDNIGRT

SEQ ID NO: 79114 - protein, 317 aa, Unknown
  Obtained from environmental sample
  DOMAIN (1)...(251): Elongation factor Tu GTP binding domain
  misc_feature (1)..(317): Xaa is any amino acid
LIRSAEGYPKAETVESGKTTSDSSPEEIERKISIYAAMGHVERNGTKINFFDTPGSSDFAGNVILSFRASEFALLMVDGRSGVQIETVKLWRNLDAKKKPRGVFISKLDNDQTDFNKALADVKEKFKMEPVPVTIPMGAGGSFKGVIDVLHDKAYMAGGDGVEKEGPIPDEFKDAVAAAREKLIEAAAEGDDTLMEHYIDKGSLSPEEMKKGLVEALAENKYIPAFAGSALKNSGLIPFMDFIADVAPNPRSAKDAVIGGDRKAHEVSIDPDKPPCALVIKTTYDPFSGKLSWVKNISRKLFRGTGAFYISENKKSA

SEQ ID NO: 79115 - protein, 305 aa, Unknown
  Obtained from environmental sample
  DOMAIN (143)...(303): Transposase IS66 family
  misc_feature (1)..(305): Xaa is any amino acid
GSRVSDRPRRLINELETKYQQIEIRNHELQNQVIEIETNHKQDYQQLYNEYLILKEQYDLLVYKRFARSAEQLLEDEKQQLLFAEEDEQPETNEEKPEELQTVKSFTRKKNGGRKPISANLERRPRVIDIPESEKTCACGANLTRIGEETSEKLVIIPPQIYVDQIVRPKYACRQCEGTEEEEEPAVRIAPVEPSIIPRSIASPSLLATIFTQKFEMHLPYYRQEKQFEQIGVAISRQDMSNWQQQAYEKLKPLLDMLEETVKCGPVMQMDETDVQVIGEEERSDLQKSICGLPVALLYAKKYFV

SEQ ID NO: 79116 - protein, 62 aa, Unknown
  Obtained from environmental sample
  misc_feature (1)..(62): Xaa is any amino acid
SLASFTTGELFNHADAKGFIKLYGLPVLVRSLMEQGKKDGVRASGAKAKSGSSRGTGARKKS

SEQ ID NO: 79117 - protein, 86 aa, Unknown
  Obtained from environmental sample
  misc_feature (1)..(86): Xaa is any amino acid
MDVKQAIIENKTSLGIEFGSTRIKAILIDTQYTPIAQGSHDWENRLEERSWTYHLNDVWAGMQDCFKKLALDVKNRYGIGSFFRRQ

SEQ ID NO: 79118 - protein, 318 aa, Unknown
  Obtained from environmental sample
  misc_feature (1)..(318): Xaa is any amino acid
FFPGLSRASWGKFYYTFLEGMNPHTDEIKALSNKMRSLAGMDIPINRRYMAYAEALDFFEKNHQNDTALLLAGRNESKVLMNECADFADLYIAPLVHRTGLLTAFELMAYQEGFLLRYPHTGRGRMIEPFEDSPKIFCVYNEYKKWGRIVGVHAVGHLNRLISQRNIRDYIRIAEAFQEKKLAEIADQIYEKKESVKAVLIAGPSSSGKTTTAKRLSVALKVLGIEPIAISLDDYYVGTDKTPLDEKGEPDFECLEALDIPFLNEQLLSLFMGDEVTLPVFDFKTGRRKETGGRTIKLERRTMLIIEGIHGLNDALTP

SEQ ID NO: 79119 - protein, 61 aa, Unknown
  Obtained from environmental sample
  misc_feature (1)..(61): Xaa is any amino acid
VLSIPVYSVADIIDTWVYRQGLLQFQFGLATVVGISKGVIGLLLVLTSNWMVKKVSDSALF

SEQ ID NO: 79120 - protein, 127 aa, Unknown
  Obtained from environmental sample
  misc_feature (1)..(127): Xaa is any amino acid
MPVIEMRGIKREYRMEGRKGEDGVVVRALRGVDFSAEAGEFVSVMGPSGSGKSTLMNILGCLDKPSAGTYTLDGIETSKSNSDTFAFIRNRKIGFVFQSFICWRGLPRWKTWNSPCFTAAGGKAEKG

SEQ ID NO: 79121 - protein, 228 aa, Unknown
  Obtained from environmental sample
  DOMAIN (1)...(225): Glycerate kinase family
  misc_feature (1)..(228): Xaa is any amino acid
MEAARFLASAGDLLLPLSDGGDGFIECLQNKLGGAVEELPAADPFGHVRPVPILVLPDGAIAVECAKVIGMAGLKELKPLIASSDGLGELLRQLQSAPKLLVGLGGSATVDGGMGWPKIALPPTKVFCDVTTDLSDAVRLFAPQKGACPADLPALYDRLMALGLPTGKHTGAAGGLGAKLKSLGAELLDGAKAMLETLGFDEALQACDAVVTGERRLARLTLERKLPI

SEQ ID NO: 79122 - protein, 158 aa, Unknown
  Obtained from environmental sample
  misc_feature (1)..(158): Xaa is any amino acid
MITPNDYGLPDPKELEQWALPYFPEFQGNRADDAQAAYSPVVAPYASAPVGTLSEGGYKGSPLGTGGFNVNRIRQDFPILSEKVAGGNPLVWLDNGATTQKPNAVVDRISYFYRHEKSNVPPGGARLGSPFPRRLRSGAGNIAKFLGSPSKVISCLCA

SEQ ID NO: 79123 - protein, 63 aa, Unknown
  Obtained from environmental sample
  misc_feature (1)..(63): Xaa is any amino acid
MESRLNPGNIEKAYELAKPVYAAFGIDTDKAISAVVDIPISIHCWQGDDVTGFEGADGLFSGG

SEQ ID NO: 79124 - protein, 298 aa, Unknown
  Obtained from environmental sample
  DOMAIN (218)...(294): Helicase associated domain (HA2)
  misc_feature (1)..(298): Xaa is any amino acid
MIRSAERHEPTVSDNGAANAAEELLLKIEKIVTRFIGEKREGDILVFLSGEKAIKDCMNRLSLCRVGSKLYLLPLYGRLGKEEHERVFEAAPKGKTKVVLSTNIAETSVTIEGITAVIDSGLSKLNWYNPNTFTSSLVEAPISIASANQRKGRAGRTCEGSCYRLYTRGDFEKRPLFTTEEIFRTDLSEVILRMADLGITDFEDFDFISTPGREGIEAGIETLNLLSALESDRSLSNISKMMTEFPLAPRQSRIIVEAILHYPKALRETLIAAAFLSTLSPHILRPGVIHRSAQSSQP

SEQ ID NO: 79125 - protein, 314 aa, Unknown
  Obtained from environmental sample
  DOMAIN (166)...(312): Predicted permease
  misc_feature (1)..(314): Xaa is any amino acid
NKSATNNTKAADKPRRIKFQMRMSGFSKKDVQKLKEESSFAAAISGVVNSNANVIGTEGNAQVSIMGVEPDYIIARNYDINTGAFFDEEDLRNRSMVAVLGPTTANNLFGDAESAMSQRIRIGTNYFTVIGILASKGAGMGGGNQDDVVMIPLDTAMTRLSNTQSIAQIVMSVKSKEYMDAAQKETIAILCESRRITDTANADFDIMNQADMIDMASATMKTLTTLLAAIAGVSLLVGGIGIMNIMLVSVTERTREIGIRMAIGGRKRDILFQFLYESVILSLMGGLIGVGLAFLACSALSKIGIPSANLTMGN

SEQ ID NO: 79126 - protein, 163 aa, Unknown
  Obtained from environmental sample
  DOMAIN (57)...(162): Response regulator receiver domain
  misc_feature (1)..(163): Xaa is any amino acid
VFVFWAEYGENAVNTEGVKTLEMPVHSISIANLLNGATDAAYTENPQGATPFMAPSARILIVDDLMTNLRVAEGLMLPYKMQIDVCQSGAEAIEHVKEKDYDIVFMDHMMPEMDGIEATVKIRSLEGDEYKNLPIVALTANAVSGVKEIFAERFSADLSMGNQ

SEQ ID NO: 79127 - protein, 64 aa, Unknown
  Obtained from environmental sample
  misc_feature (1)..(64): Xaa is any amino acid
LAERQTKLIIGLVNNEFVHLPIKMVITHRNQVDPESNLWRDTLDATHQPAMMVNRFGDSEFKKS

SEQ ID NO: 79128 - protein, 243 aa, Unknown
  Obtained from environmental sample
  DOMAIN (41)...(243): Lon protease (S16) C-terminal proteolytic domain
  misc_feature (1)..(243): Xaa is any amino acid
GHKWILKGYTREAGVREWRESGNNGSQTGYEIVSKEKFTPQIVQKQLSAYLGVPDFAGPRLIDEKRAGITTGLAWTPVGGDVLHIECILLPGKGKLQLTGHLGDVMKESAQIALSLVRERAKKYKIPEDKFRKSDVHLHFPEGATPKDGPSAGIAITIAMLSAFTGHLISPFIAFTGEVSLIGRLIAIGGLKEKSLAALDSGVKRLFLPKDNQKNVEDLPDLVKNGLEINMHTHIDEVIEKLF

SEQ ID NO: 79129 - protein, 64 aa, Unknown
  Obtained from environmental sample
  misc_feature (1)..(64): Xaa is any amino acid
MQFDDEYKKWLTDLKSRIRQSQIKAAIKVNSELLLLYWDLGYDIVIRQMEKTGGSGFFEQLSSD

SEQ ID NO: 79130 - protein, 322 aa, Unknown
  Obtained from environmental sample
  DOMAIN (226)...(322): S-adenosyl-L-homocysteine hydrolase, NAD binding domain
  misc_feature (1)..(322): Xaa is any amino acid
MANVDKDTKIKDIALADWGRKEISIAEVEMPALMAIREEFAGKQPLKGAKIAGSLHMTIQTAVLIETLVALGAQVRWASCNIFSTQDHAAAAIAQDGLPVFAFKGESLEEYWGFTHKIFEFDGGANMILDDGGDATLLLHLGAKAEKDIHVLDSPGSEEATVLYASIKNRLKSDPTWYSRQLAGIKGITEETTTGVHRLYEMNKNGELKVPAINVNDSVTKSKFDNLYGCRESLVDGIKRATDVMVAGKIAVVCGYGDVGKGCAQALSSLCAQVWVTEIDPICALQAAMQGYRVMTMEEARPPGRTYCHRPRQLQRDTLRAH

SEQ ID NO: 79131 - protein, 138 aa, Unknown
  Obtained from environmental sample
  DOMAIN (2)...(133): Chromate transporter
  misc_feature (1)..(138): Xaa is any amino acid
VIGLFLLYIEFFKIGVFAVGGGLATLPFLFLMANDRFTFIRQTGWLSAEQLGNFIAIAQCSPGAVGVNISAQTGFLYGGISGGIIAVLGLISPAVIIITVIAGALQSIKNNKVSVAVFSGLRPAAAGLLCPPRPWGMA

SEQ ID NO: 79132 - protein, 281 aa, Unknown
  Obtained from environmental sample
  misc_feature (1)..(281): Xaa is any amino acid
VCPFYNGLISYILIGALFAGEFIVRKIVQGKMPKSIPLSAFKNNSRPLSTVLCYEGKWSDAVYRTWGDFLEGTSELRRVINTHNGEKWLLHCEDCWYFLLALTALLQCKKEILLSAYVCPAYIEEIRCSAANGSEQSTVPFLTDHIFPEGESTQNTFNIPSLLKSPQKTDAPAEEAPAINADETSIIMYTSGSTGKPKAVQQRLTEFEADNRFIISKWGDEFLKRKLLSTVSQHHIYGILFSIFLPFTLGTPFRKRRIEFPEEMEKCSDTEYMIITVPAFP

SEQ ID NO: 79133 - protein, 321 aa, Unknown
  Obtained from environmental sample
  misc_feature (1)..(321): Xaa is any amino acid
VAVFVPLALAGGFAGKIAQPLALTVCAGLGASLLVAITIVPMLASVFFKRRTKKSKKTGKYGVVTDDVVPVGAPMIAPENQVLGEFSDNTAVGHAVDHTFDKEAHGGSIFQAFQHGYEAMLGWVLRHRFIVVFVTLALFVASILAMAKVGGEFMADSDRGMGTISIKLPVGTNLEETNRLVKTIEDRILTVPEARTVCALIGRLSEEGATGMDGDVNEATVFFRLKQFKYRTRSTKEVVDEIRKSIPELYDVVIDFASGGMMGSSSTPIELKFFGSDLSALKTYADSAKAMMDKIPGLNDVIVSMREGKPELRIIPDRDRP

SEQ ID NO: 79134 - protein, 239 aa, Unknown
  Obtained from environmental sample
  DOMAIN (94)...(239): Alpha amylase, catalytic domain
  misc_feature (1)..(239): Xaa is any amino acid
MLSLHSKIRDVYAHPLGRDIVDKLLLEMGKPAWLVDNPIVGGLTLGAVQKLLPKSIGSGFLTTVIDLLNTEADTPDKNPVASQPAWWKEAVFYQIYPRSFGNNGTSCVLRGILSKLDYLRALGIDAVWLSPVYDSPNDDNGYDIRDYYKILPEYGTMEDMDALLAGLHERGMKLVMDLVVNHTSDEHPWFQSALNDENSPYRDFYFFRKSKDKPPNNWTSFFSGPAGILSKQLRICLGN

SEQ ID NO: 79135 - protein, 151 aa, Unknown
  Obtained from environmental sample
  DOMAIN (20)...(147): Putative small multi-drug export protein
  misc_feature (1)..(151): Xaa is any amino acid
VSTAVCLFWTAVLSFMPISELRGAIPFAVANGIPWYWAFSFAVMCNILVAPVCWLFLATVHRLLYGTETRNGIGWYKNIFDKLIKRAREKLSSGFEKWGWLGIAVFVGIPFPLTGAWTGILGAWVLGVSRKRTMLAVIPGVIVSGTIVTAV

SEQ ID NO: 79136 - protein, 241 aa, Unknown
  Obtained from environmental sample
  DOMAIN (1)...(222): Phage portal protein
  misc_feature (1)..(241): Xaa is any amino acid
VCKPSLLGSVVNNKRRWFYHAGAELVPIFSDELIHFKDWNPWNPLRGVNPLVSLALELEQDYFANKANSTLLKNNAIPQGLLKTDQTLRPEEADAIERRWESKYGQAKAGRKIAVLGKGTSFEALSFNPDVVKLFELKRWNLYTILAKFGIPPRVANISDKSTALSGKDTKEQHSAFWQYTLIPLLRQFEQILESNFFMRFNLKEAGRFDLWDIPELQDNEDAQSSRDLVPLGRSDTWLTQ

SEQ ID NO: 79137 - protein, 142 aa, Unknown
  Obtained from environmental sample
  DOMAIN (1)...(138): Putative undecaprenyl diphosphate synthase
  misc_feature (1)..(142): Xaa is any amino acid
GLTLTDSAEFLGDLDTMPDGIRTDALALQEATSAAGRMVFHLAVNYGSRMELVMAARVCLEDGLSAADVDEAAINARLWTAGVPDVDLLIRTSGEQRISNFLLWQCAYAEFYFADAHWPDFDAEQFRLALAVFATREKEVSS

SEQ ID NO: 79138 - protein, 288 aa, Unknown
  Obtained from environmental sample
  misc_feature (1)..(288): Xaa is any amino acid
LTKVFRPAGNETPFLLGAEAELIGRLKAAGSEGLDLKSLAAEGLGQAARRLISSGQARPGWRLDLKTAGTRTEWWLAPAASPPASPRRLGPREEALWCLAREGPAKPLSYFAHYVPNPLPQARSLAAKGLLELTAREVFRDDPDRALAPVGPGPPPALTGQQGQALAALETALAAESGREFLLFGVTGSGKTEVYLRAAAKTLEVGRGVLWLTPEIGLTLGLEGLLKSRLGGERVAVLHSGLSAAQRHDQWRRIRRGLAPVVLGARSAVFAPLENLGRGGACPSVWEQ

SEQ ID NO: 79139 - protein, 316 aa, Unknown
  Obtained from environmental sample
  DOMAIN (144)...(221): Helicase conserved C-terminal domain
  misc_feature (1)..(316): Xaa is any amino acid
LLKNLAAGNIDIIVGTHALFSKDVEYKNLKLVVIDEQHRFGVTQRALIMAKGQQPGLLMMSATPIPRTLALTVFGDMDVTVIKDMPVGRKPVITHLAKESNEKKVYDFVRKELEKGRQAYFVYPLIEGGEEIKDAVSMAHRLADEVFPKYKTALIHSKLPEEEKKQIMDDFRKGAIKILAATSVVEVGVDVPNAACMVIEHAERFGLSALHQLRGRVGRGGEQSYCFLIFSDDLTEEGKTRLKVMLENSDGFVIAEEDLKLRGPGQIAGTEHRAILSWIATPSRHGNLAKSRATCFHFRNDPICTGKHRVMRGTGT

SEQ ID NO: 79140 - protein, 301 aa, Unknown
  Obtained from environmental sample
  DOMAIN (12)...(186): Glycosyl transferase family 2
  misc_feature (1)..(301): Xaa is any amino acid
MTDWPSDGPMVSVLVPARNEEQNIERCLNSLRNQVYTKYEILALNDNSTDGTLEIMNRIAASDNKVRIINGKPLPDDWYGKPYALHQLTQEAKGEILIFTDADTIHTPTSIAWAVTNMQDLKADMISGYVGQIFHSFGEIVTVPLMFFLTGFVIPLFVNRYTKLHWFSAAIGQFIVVRKAVFDAIGGCESFKKKTSEDIYMSRYIKRKGYNTRFLNITEHVRCRMYNGYHAAIEGIGKNIFDFLGKSTLLIFFIMLLIIIFLVLPFPLLFICILTSNPWTWEIIAVTALHTPTWLFMFLRQ

SEQ ID NO: 79141 - protein, 91 aa, Unknown
  Obtained from environmental sample
  misc_feature (1)..(91): Xaa is any amino acid
MSNQIVPIDQLLPNKLPLVALMGRPIFPGNFTPIMIGNPVDVKVIDDALAGDAMIGLVMLQNHTETPPSGIFAKWGTPQKSSRKSPCPTGG

SEQ ID NO: 79142 - protein, 304 aa, Unknown
  Obtained from environmental sample
  DOMAIN (1)...(293): tRNA synthetases class I (W and Y)
  misc_feature (1)..(304): Xaa is any amino acid
MDEGPVTFYEGTDPTGGSLHIGHMVPYFAFRHLRGAGHKGVALLGGGTARIGDPSGKSSVRKMLSYEQLDINTENIRKQLDRFVGFDGKTAFTVNNKDWLANLNYIDFLRDIGSHFSVNRMLSFEAYKMRLETGLSFIEFNYQLLQSYDFLELYRRHGCRLQIGGDDQWGNIVAGVELIRRIEGAEVFGLTFPLVTTADGKKMGKTEKGALFLDPAVTSPYDFFQYWRNVQDQDILRFLLMFTFLPVDECKALCASDKNPNDAKERLAWEVTSLIHGKDEADKARSGAKAASAGRETRDNPGNA

SEQ ID NO: 79143 - protein, 127 aa, Unknown
  Obtained from environmental sample
  DOMAIN (4)...(55): Uncharacterised protein family (UPF0150)
  misc_feature (1)..(127): Xaa is any amino acid
NREHYGICLPRDFSLDKDKSYTVTYPDLPGCISEGKTLGNAMYMAQSALTQWLGYLVDKKQEVPGASPIEEVKPSDGEFVNLIRAELRDARAVKRTVSIPKWMDDKVIQSGLSLSRVLQDALRERLG

SEQ ID NO: 79144 - protein, 93 aa, Unknown
  Obtained from environmental sample
  misc_feature (1)..(93): Xaa is any amino acid
KTNDIEHILRQFEPFNYQSVLLTKMDETRTVGNIISALAEKGKPVSFITNGQQIHKYIKKANVVGFLINLEGFNVDRDEMEKRFPDTEADQFF

SEQ ID NO: 79145 - protein, 263 aa, Unknown
  Obtained from environmental sample
  DOMAIN (142)...(263): ATP synthase alpha/beta family, nucleotide-binding domain
  misc_feature (1)..(263): Xaa is any amino acid
MTYKSLKERIEDWKGVALSGSSGFVVQVGDSVATVYGLNDAVYGEMVEFASGAHGIVFNLEEENAGCVILTGEDLVKDGEEVKRTGRVVSIPTGDSFFGRVINPLGEPLDGKGPITAEAFMPMEAPAAPVIDRGSVDTPLQTGCLSIDAMIPIGRGQRELIIGDRQTGKTAIAIDTIINQKGKNVICVYCAIGQKSSSVVAIVNNLEKHGAMDYTFVVLASASDSAALQYIAPYSAVAMAEHFLQQGKDVLVITLGRSDQCET

SEQ ID NO: 79146 - protein, 162 aa, Unknown
  Obtained from environmental sample
  DOMAIN (12)...(156): Adenylate and Guanylate cyclase catalytic domain
  misc_feature (1)..(162): Xaa is any amino acid
MCKNNEHPKLGGEKRVCTAYFTDIEGFSTFSEALKDPERLVTLLNEYLSVLTDILTDLHHGTLDKYEGDAIIVFFGAPNNLPNHAHEACYTALIMQRELGRLPHKWRLEGDQWPPIVLNMRMRIGIYTGEILLGILCSDLINNYSMMGDSLYFVCPFWRAPL

SEQ ID NO: 79147 - protein, 268 aa, Unknown
  Obtained from environmental sample
  DOMAIN (4)...(86): Tetrahydrofolate dehydrogenase/cyclohydrolase, catalytic domain
  misc_feature (1)..(268): Xaa is any amino acid
FPPVYGQARPASLSYVRGKEKALAEAGMESRDFRFPAGVSEAELLALIAKLNQEKTVHGILVQLPLPRHIDEQRLIVAINPAKDVDGFHPVSVGNMVMGRPSFLPCTPHGVMVLLRELNIPLSGAHAVVVGRSNIVGKPLANLLSNRNVNATVTICHTGTKDLARHTQQADILIAAAGKPGLIRADMVRPGAVVIDVGVNRVEDPSAKKGYLLVGDVEFAPVAGKASYITPVPGGVGPMTIAMLLQNTVQAAEVSAFTEVSAKAESAK

SEQ ID NO: 79148 - protein, 105 aa, Unknown
  Obtained from environmental sample
  DOMAIN (26)...(104): Transporter associated domain
  misc_feature (1)..(105): Xaa is any amino acid
MCAGRLIEEIVGDIQDEFDHETEDVISIGEKAWLCDARVNLSDLAEKTGLELPVDDFDTLGGFVFDLFGKIPVKYEKTVYRGTELIVQEMDGHKIKSVKIVGSEQ

SEQ ID NO: 79149 - protein, 65 aa, Unknown
  Obtained from environmental sample
  misc_feature (1)..(65): Xaa is any amino acid
MPDIKPILEVNGEHPIVAGLKNVDDEEQIADTATVLLEQALLVEGVKLNDPADFVKRLNRLLAGR

SEQ ID NO: 79150 - protein, 323 aa, Unknown
  Obtained from environmental sample
  DOMAIN (232)...(265): Tetratricopeptide repeat
  misc_feature (1)..(323): Xaa is any amino acid
SVIFGGGHPPEKGAGKEHPNYGTSLTSLGILYKNMKEYARRERYYRKAAAIREKALGREHPNYATSLNSLGLLYYSMGDYAKAERYYLEAAAIREKALGREHPNYATSLNNLGVLYKSMGDYAKAERYMLETTAIQEKALGKEHPDYALSLNNLGALYQSMGDYAKAERYHLEATAIREKALGKEHPDYATSLNNLGELYRNMGDYIQAERYMLEATAIREKALGKEHPDYALSLNNLGALYASMGDYTKAEQYYLETTAIWEKALGKEHLNYGLSLNNLGELYQNMGDYAQAERYKLEAAAIREKALGKEHPDISADLINEA

SEQ ID NO: 79151 - protein, 266 aa, Unknown
  Obtained from environmental sample
  misc_feature (1)..(266): Xaa is any amino acid
MNPLRIDIGYNYNEDKQQSFLFGVYFNNPFRAFGYYWNLTFDNTVQYRVDAPVYYQNKTGLSVELPFKSTTFTLGIDEKFLLNDENSDWAKNQGFGTYQDGLYMSSNLYVSWKIPTGLTVSKFGDLIYTPEISSTLVHELPKWPLDDYRKGPFLGFSHSLGFEKIDWHSNYREGLSVSADNSYRYDFNRMLYSISFDFTGIGHFIVKDFFAISARLMYKYWYSSDVSWEGGYASNYLRGVADKSITAYQMFSLNMDFPSGCLFLAL

SEQ ID NO: 79152 - protein, 67 aa, Unknown
  Obtained from environmental sample
  misc_feature (1)..(67): Xaa is any amino acid
FFPGLWTVDNTTVALLLPCILSCPYGAVSPSDDGAVQKCELCVKTAKGQPACVSGCPNGAIVFEERG

SEQ ID NO: 79153 - protein, 271 aa, Unknown
  Obtained from environmental sample
  DOMAIN (143)...(232): Pyridine nucleotide-disulphide oxidoreductase
  misc_feature (1)..(271): Xaa is any amino acid
MKYVIIGNSAAGIGAVEGIRQVDKEGEITIIANEPHHTYSRPLISYLLLGKVTEEKMKYRSDGFYSENRVSMLHAVVTGVDTGKQQVILSNDDRIPYNKLLVATGSQPFVPPFEGLDSVAEKVTFMSLDDARKLGGMINKNKRVLIIGAGLIGLKCAEGISGKAALITVLDLAPRILSSILDDDGAKTVQSHLESKGIKFRLAASTKKFEGNTAVLDNGDRIDFDVLVLAVGVRPNTALLKDIAKIDRGIVVDEKSQTTAANIYAAGECTQ

SEQ ID NO: 79154 - protein, 194 aa, Unknown
  Obtained from environmental sample
  misc_feature (1)..(194): Xaa is any amino acid
MYMGRDAMGSVRSVTAGTGALEGRYEYDAFGQPYKGDLTGGMNLGYASKPYDTVTGLYNYGYRDYKPQAARFTTVDPIRDGNNWFAYVNNDPVNWVDLWGLDIMRSTYTQGSGKITTVYIPTKSDGSMELENAKTYKFDATNNVTTNLNMTMHKTGTQVDTGYGLHASSSSVTAGCIKFGDHEESQQFAAISDP

SEQ ID NO: 79155 - protein, 308 aa, Unknown
  Obtained from environmental sample
  DOMAIN (36)...(246): haloacid dehalogenase-like hydrolase
  misc_feature (1)..(308): Xaa is any amino acid
MDISIIEHAREKNLTDLWDGYKKVDEIPFDFNRRRMSVAVEDKNGQVELITKGAIEEMLAISTNAEDNGETIPLNDDMRKKIIDTCYNLNEKGMRVLGLARKPVNNNSTALSVTDENEMIFVGYLAFLDPPKDSATAAIKALNEFGVRVKVLTGDNDAVTVAVCKRVGLDIKHILLGSQIEEMNDEALKKAVEETDVFAKLSPVQKARIVTALRSNGHTVGFMGDGINDATAMKAADVGISVDTAVDIAKESANIILLEKDLMVLEEGVIEGRKTYANTIKYIKMTASSNFGQYVLCFGGISFSTRSA

SEQ ID NO: 79156 - protein, 111 aa, Unknown
  Obtained from environmental sample
  misc_feature (1)..(111): Xaa is any amino acid
MENALIVSNSEKSVAFFTEMLNAASCGAVTVLKTGAEARSVLSEREFDIAIIYVPLPDESGESLSRHIASKETSQVILVVKSEYFDKMCAATEDAGVLVVASSAESVNGNP

SEQ ID NO: 79157 - protein, 173 aa, Unknown
  Obtained from environmental sample
  DOMAIN (1)...(145): GXGXG motif
  misc_feature (1)..(173): Xaa is any amino acid
NGNAQDAAGDTMSDGKIMSTGNAGDALGYAMRGGRIFVQGNAGYRTGIHMKEYKDKKPVIVIGGRVGSFLGEYLAGGLIVVLGIDCDAVPVGNFTGTGMHGGKIFIRTSKELSNFPEQVAAEKASGEDLKEIEPYVSEFADCFGIKAAPILKDNFYVLRPNAKNPYKQLYTAN

SEQ ID NO: 79158 - protein, 143 aa, Unknown
  Obtained from environmental sample
  misc_feature (1)..(143): Xaa is any amino acid
MEIKRAIEFGDNIREKLGEIYVNAFYDEVLNYFSKDKAKLKKVFACGFLPEYFYVAIMDNEIVGMIACMGKDEFCIKLELKTIVKYLGIFRGLIINFWFKQFLKGFPKLDEKTALFECLAVDTKHLRKRDCFNARAEFDSMVK

SEQ ID NO: 79159 - protein, 249 aa, Unknown
  Obtained from environmental sample
  DOMAIN (133)...(247): Response regulator receiver domain
  misc_feature (1)..(249): Xaa is any amino acid
MGMLLSPYGMTVTTVKSGQQAIDKIMGGLVYDIIFMDYYMPEMDGTQATKILRQLGYEKPIIALTANALVGQEKFFLENGFDDYIAKPIDIRQLDTALNKFVRDKYPIETVEAARKLKNPNDEEEDLPDLSGVKALVVDDFKPNLNGEAAMLKEYKMYVDCLLNGQEAVDRIKSGEPKYDIVFMDLLMPVMDGEEATKTIRSLGTDYANTVPIIALTAMPADDAAGKEKSLSENGFQAVMYKPFTLKPS

SEQ ID NO: 79160 - protein, 335 aa, Unknown
  Obtained from environmental sample
  DOMAIN (231)...(335): LeuA allosteric (dimerisation) domain
  misc_feature (1)..(335): Xaa is any amino acid
WFARTDWPSEYALTCLKTAKEAGAERIILCDTNGGTFPDTIEKAVKEAAKIIVGNSCLLGIHAHNDADMASANAITAVLAGCRHVQGTLVGFGERCGNTSLAAVMPSLELKLGFRCLPEGKMEKLSEITRIVAETANVAVPGNMPYVGSHAFTHKAGMHADGILKVSKSFEHIDPSLVGNDRHFLMSEVGGRSAIAERAKKIDPSITKDHPVTAALAHKLKTLEAGGWQFEGADGSFDLMVRRELGRYKPLFNIKAYRVVSEHPTGETIACSHAWVKVHVEGQEEVAAAEGDGPVNAMDGALRRALKHFYPQLQEGRLIAYKVRVIDGKRRDRGE

SEQ ID NO: 79161 - protein, 296 aa, Unknown
  Obtained from environmental sample
  misc_feature (1)..(296): Xaa is any amino acid
MPLRLVPLFPVTIFGLYCLYLLYTGHLNLWAAVWIFSFPLIVIFLCQIVVGIVESSITLAGIIFLLFAPFTPLAQQEFTIRIRFVIGYILITGLAIVYEYISIKKDQKEKILIAELAHERNVIQTMKDNINQGIFMMDSELKILPLYSKPLISILSYHDSELAGKNFLDILASSLDIKQLQTMKGYFSMIFTKAKKTRVLESANPISEFEYRIEDQMKTLATKFHLIEQPDAEPVIIGIIQDITREKEYERDLQAQKEAQQLEMKKHIDVLQVDPLAINDFIENTESNFRYINSIL

SEQ ID NO: 79162 - protein, 309 aa, Unknown
  Obtained from environmental sample
  DOMAIN (128)...(195): Phosphopantetheine attachment site
  misc_feature (1)..(309): Xaa is any amino acid
VERYCILGLNDKGNEKIAIVVEAKKDADNEKGFEEISNIVNTANGQLPFLKRIKLIYAAKEPMPLANGMKVKRQKLKEMLENNTFPAAEIQMNASSQTPSMAAPAVERVKTSGHTETELDGRFIQIREQVMECFVKVLDTTSDKIGLDMRFAEDLGGDSLDSLELLTMAEARFGVMIEESEYFRCRTVNDVSRLIYEKITGLSAGQESRGQASPRQENVKPITRFVDTPEYKSFEARLESLKETKNPYYIPHDSALRDTSVVMGKEVINFGSYHYLGLSGDPRVSRAAIEAINKLGTSASGKRLLARER

SEQ ID NO: 79163 - protein, 64 aa, Unknown
  Obtained from environmental sample
  misc_feature (1)..(64): Xaa is any amino acid
MVGMKVIAVFYITAMKGILLAGGAGSRLYPLSAVASKQLQPVYDKPIVYYPLSTVSTGGIKDIS

SEQ ID NO: 79164 - protein, 340 aa, Unknown
  Obtained from environmental sample
  misc_feature (1)..(340): Xaa is any amino acid
SVSVVSAADTGGVSASSISAASANVVVARDDTPKVRMGHPAADEYHANPPPFERKESRSPDGPLGSLFPSSPTVGTAMSFWIESSYGNGIFVQKTATLKALGTYGNIWVINDLTTFTSARAQEMAQKFDQIYPIETNLLGDDFGGWDIDSKIQLLVYDIGYDPAGTTLGYFWGKDMRMDTGSGQRSNEAAMFYINGNENVFTKFGADTLYSTLIHEFQHMIHHARKSMKGLNSAAWYNEMLSMITEDVISPLIGIGPTNQGHPIQRRIPGTNGFLNRYYTAGITEWGNTLDSYAVAYAFGAYLLRNYGGASLLQEMLANNSTDISSKRLVRNLYMGGGMR

SEQ ID NO: 79165 - protein, 212 aa, Unknown
  Obtained from environmental sample
  misc_feature (1)..(212): Xaa is any amino acid
LIKRYGAAAVVMLIDEKGQAVNFDRKIEIAGRAYRLLVDSDFPPENIVFDPNVLAVATGISEHDACAVDFIRACAWIRDNCPGVNISGGISNLSYSFRGNNKVREAMHSVFLVHAQAAGLTMAIVNPATLIAPNTIEEDLRNAVEDVILNHDPGAAERLLALAEKISAASSVPHSSFLIPHSSSDWRNQPVEERIVHAMLPGIDDFIETDVL

SEQ ID NO: 79166 - protein, 283 aa, Unknown
  Obtained from environmental sample
  DOMAIN (5)...(237): Histidine biosynthesis protein
  misc_feature (1)..(283): Xaa is any amino acid
MLTKRLIACFDIVKGMVTKAVQFQDNINVAPAEELAETMYNEQIDELIFYDITASAEKRGIDIETVKKVARRLFIPFTVGGGIKNLQDMYDALKAGAEKISVDSMAVRNPQIITEGSKAFGAQCIVLSTQVKRTGLTPSGFEVYIDGARLATGMDAIEWVKRGQELGAGEICLNSIDRDGTLSGYDIELMKLAEAAVSVPLIASGGAGKPEHLKDLFTATEAQAAIISSMLYSPRLERNFPVRELKDYLIQNGVAARPVLDTKDNELLQMETFSCRMLSHGYI

SEQ ID NO: 79167 - protein, 329 aa, Unknown
  Obtained from environmental sample
  DOMAIN (177)...(274): PPIC-type PPIASE domain
  misc_feature (1)..(329): Xaa is any amino acid
VALVTLTKSEPITVRQLKTEIEKLVWQNIVASAGRVPTTTEINSEVQKVSIDVRKQILEVMINDRLAIQAAERDKITVTDNEVNQQITQLKAQMAQQIGRQPTDEEFATAIKNETGQDLPAFRDSLKRQSIIQKYLLAKKQSLFSSVKEPTNEEIVNAYNLAKAQFVRPETVRISMIQVPYGSDTASKNRAKETADRLVREIGSDPSKFDEAVIKSRAPNSGYQAGDGGYIQRNQEYQQYMGANFMNTAFSLRQGEVSKLIEGLPGYQIIKITETLPMKPLELDEIAILGTSVNGRQYIAASLLEQDSRKFWKSDRELTTDSGPGIHLD

SEQ ID NO: 79168 - protein, 47 aa, Unknown
  Obtained from environmental sample
  misc_feature (1)..(47): Xaa is any amino acid
MSDVPLLRLEDITKDFYGATVLSGVSYSLNPGEILGLVGENGAGKRP

SEQ ID NO: 79169 - protein, 112 aa, Unknown
  Obtained from environmental sample
  misc_feature (1)..(112): Xaa is any amino acid
MIDLRARQPRGSLGGDLGWTEKGLLLSAIEDAALALAPDEVSDVIETDKDYILVQLIAKETAGSKPFEAVKAQIMDKLREPKAKNALQLYLQAQRLRANIRYMVPKEQIIKG

SEQ ID NO: 79170 - protein, 287 aa, Unknown
  Obtained from environmental sample
  DOMAIN (183)...(278): Peptidase family M23
  misc_feature (1)..(287): Xaa is any amino acid
MKKGHSVYLMPPGGSSLRAFRLPIWAIVIVALLAVAGVVGFFVPLDQMMLADQERAQGNTLRQQNDRLSSNIGFTLKHLSALKERMGRLQGAKEQHFESIGLPDKPQPIKPPQKTPAVGLSPAAVLRHIGEYEKVVAGFALAVGSERRNLFDTIPVCRPVQPSRSVLSRRFGMTVDPFTSKPKMHYGVDIAAENGVPVVATAVGVVTHVDVDPIWGKRVTITHGRGFRTVYAHLGTIKAVKGKTVARGQEIRAMGMSGLTTGPHLHYELWRDDKQQNPEEYFFPEEM

SEQ ID NO: 79171 - protein, 136 aa, Unknown
  Obtained from environmental sample
  misc_feature (1)..(136): Xaa is any amino acid
MADPKKRREGNGTFLKINGASEHNLKNISVEIPLGSFTCITGVSGSSKSTLLSDVLYPALAYKINGSNYTEGAYKKIEGGEFIDKIIDIDQSPIGKTPRSNPITYVEGFYPDKRPFPGTCLEAKVKGLPTRGVFFF

SEQ ID NO: 79172 - protein, 332 aa, Unknown
  Obtained from environmental sample
  DOMAIN (1)...(164): von Willebrand factor type A domain
  misc_feature (1)..(332): Xaa is any amino acid
MESRNRLPPGIESLKMLVEELNGADKVAICVYAGAAGTVLPPTSIDNKNVIMSALNKLKSGGSTAGGAGIQLAYNLAEQNFNPQAINRVILCTDGDFNVGITNRGDLIDLITQKAKTGVYLTVLGFGMDNFQDGTLKQLASKGNGNYGYIDTIEEARKILVNQLSGTLITIAEDVKIQVEFNPANVGAYRLIGYENRVMRDEDFNNDAEDAGDIGARHTVTAFYEIIPPGTEAGALPRRDPLKYAPPTAPPPADYKPEYPDELLTVKIRYKLPGESVSNLISFPVGTASIREAGQESHEFRFAASVARFRMLLRGSPYKGNAEYDGIINMAR

SEQ ID NO: 79173 - protein, 296 aa, Unknown
  Obtained from environmental sample
  DOMAIN (1)...(187): Serine hydroxymethyltransferase
  misc_feature (1)..(296): Xaa is any amino acid
MMVDMAHIAGLVATGHHPSPVPHADFVTTTTHKTLRGPRGGLVLCKEKYAKDLDKAVFPGVQGGPLMHVIAAKAVALGEALEPSFKDYQDQVVRNAAALAKTLAAKGWRIVSGGTDNHLMLVDVFANGMLGSEAEKALDKAGITVNKNGIPFDPNPPLKPSGIRLGSPAVTTRGLKEADMERVPAWIDEALRNRDKDDVLKRIYREVEALTAKHPIPRVTASLSTPSAHDISFLRTTFLKLKLFKPQLGFPPPPAGRRGRLFSPPPTGMPVWAPPSGWASAKMLIWKWGLPNIQGN

SEQ ID NO: 79174 - protein, 188 aa, Unknown
  Obtained from environmental sample
  misc_feature (1)..(188): Xaa is any amino acid
MYIKIPGILKKRPLYVQILFTVFAFLLMVVLSYIYTAKIVRINIARYAESELDSMERKINSELLESRTILDDYAQSIQYLINNGSNAGKLIAYNEDISNHLLSKENGAFSSNGPFGYIEKLPDGPVFINGIGWKMPDDFSPTTRPWFKAAVEAAGGIAEIAPYTDTVTGETVLTFSRALFAGNGGRLG

SEQ ID NO: 79175 - protein, 316 aa, Unknown
  Obtained from environmental sample
  DOMAIN (18)...(252): Carbamoyl-phosphate synthase L chain, ATP binding domain
  misc_feature (1)..(316): Xaa is any amino acid
MNVRLLGSSPEAIDRREDRKIFKETMQGIGQPCVPSVIAHDTETAVKFADELGYSVIVRPAFTLGGTGGGIADNEAQLLEIAANGLSLSPIHQILVEKSIAGWKEIEFEVMRDRAGNVITVCSMENFDPVGIHTGDSIVIAPAVTLADKEYQMLRSAALNIIQALGVEGGCNVQFALHPQSFDYAVIEVNPRVSRSSALASKATGYPIAKVATKIAVGYTLDEIVNAVTGNTFAAFEPTLDYVAVKFPKWPFDKFVYANKELGTQMKATGEVMAIADTFEEALLKAVRGAEIGLNSLTFPACRKSSGKSRHQPGGK

SEQ ID NO: 79176 - protein, 80 aa, Unknown
  Obtained from environmental sample
  misc_feature (1)..(80): Xaa is any amino acid
YQIVRAVFEDGRGKSIWDIFSHIKGNTADGESGDISCDHYHRYREDVELMRGLGVKNYRLFYRMAQDFPDRIGRGKPERT

SEQ ID NO: 79177 - protein, 117 aa, Unknown
  Obtained from environmental sample
  misc_feature (1)..(117): Xaa is any amino acid
MSLYTFRKLCIAAIAALFIPLPSAAQEASPLKFAVVIGNANYTDVSKLQNPINDAHDMEQILRELDFQVEKVHNGNLEQMEAAIGNLKRRLGAAKMPMAFFITPAPRLNQKAKTISF

SEQ ID NO: 79178 - protein, 111 aa, Unknown
  Obtained from environmental sample
  misc_feature (1)..(111): Xaa is any amino acid
MPAAQETFPHPRASTPLAGSGALPVRDAAVPGAAPLKFAVVIGNANYTDIAGLRNPINDANDMNTALTELGFKVEMILNGSLEQMETAIIISSAGSARPKIPWLGDNPGEI

SEQ ID NO: 79179 - protein, 68 aa, Unknown
  Obtained from environmental sample
  misc_feature (1)..(68): Xaa is any amino acid
MEPKMVKKSAIKITGFAIKTKTKEGENTKVIPKFWRDYCIDGRQEKLHKELFPYKHEEYGVCFPENPE

SEQ ID NO: 79180 - protein, 179 aa, Unknown
  Obtained from environmental sample
  misc_feature (1)..(179): Xaa is any amino acid
MNKIQYDNAGRELMQTIEIERLKLEASINSEIAIARRMADSPLIRRHFLDPEDEDIKQITLEEIAGYRRAFAGNNVFWISDTDKKYYFNDEYVYTINPSDESSWWYNSIMENPTPYIFNVNFDIGIKKTMLWINAPVFDNNQKPAGIVGTGINLSDFHHAINHNNSRIEDNCISFTHTG

SEQ ID NO: 79181 - protein, 148 aa, Unknown
  Obtained from environmental sample
  misc_feature (1)..(148): Xaa is any amino acid
MKNNDKQVLWAGRLEEKPEAEAFAFQASIAVDRRLVQEDIAGSRAHAAMLAKQGIISAETAQALDRELERIAREIASGALPIDQNAEDIHSFIEGVLTDRLGDAGRMVHAGRSRNDQVALDFRLYLKKAIPGLRAELAETIAALLDKA

SEQ ID NO: 79182 - protein, 299 aa, Unknown
  Obtained from environmental sample
  DOMAIN (1)...(68): RNA polymerase Rpb2, domain 3
  misc_feature (1)..(299): Xaa is any amino acid
MDQVKPLAELTHKRRLNALGPGGLSRERAGFEVRDVHYTHYGRMCPIETPEGPNIGLIVSLANYTRVNEYGFLETPYREISKGVATRDVKYLDAIEEDRYFIAQASAKLKDNGSFAEGQVSCRRQGDYTNRSPEDIQFMDVSPKQIISVSASLIPFLEHDDANRALMGSNMQRQAVPLVFPEAPRVGTGMEAKCAYDSGVLVKACRSGTALRVTSNEIVIRPDKPGASRPLSQVLTDDDGNDVYKLVKFQRTNQDTCYNQRPIIKAGDKITAGQVIADGPATQNGGALPCSCRSAINPG

SEQ ID NO: 79183 - protein, 301 aa, Unknown
  Obtained from environmental sample
  DOMAIN (1)...(293): EPSP synthase (3-phosphoshikimate 1-carboxyvinyltransferase)
  misc_feature (1)..(301): Xaa is any amino acid
MRPLLNALEQLGAVVNVEVAEQDLPFVIHGPLKGGRATVDGISSQFVSSLLFAAPLMPKDTHITVHNLHEQPYVEMTLWWLAGQEIEIEYSKELTSYKVRGGQSYKPIDTVIPADFSSAVFAAAAAAIGGAPIELCGLDFSDTQGDKEVFRHLETMGATVERSSDTVIVTGGNLNGTIIDLNRTPDALPALAVAAAAAVGETVFTNVAQARIKETDRIAVMVEELGKMGISVKELPDGMVVRGGKLTGAKVNSHKDHRVAMALALAGMNADGETEIDGAEAAEVTYPTFVEDFVRIGANIV

SEQ ID NO: 79184 - protein, 84 aa, Unknown
  Obtained from environmental sample
  misc_feature (1)..(84): Xaa is any amino acid
ARDLCKARERREMPRGEGSTAIFIYPGYKFKIVDALFTNFHTPESTLLMLVSACAGRELILESYAEAVRERYRFFSYGDAMLII

SEQ ID NO: 79185 - protein, 270 aa, Unknown
  Obtained from environmental sample
  misc_feature (1)..(270): Xaa is any amino acid
VAKDVFAPNAQLDSAVSRLAKMGCNMLRLHHMDAPWTSPNIFGNTAGTRALSDESMRQLDYLISRCKERGIYIFLDFLVHREFTAADGVFDPPPDLGGKQVGFFSRKLINLQKEYITSLMNHVNQFTGIAYKDEPAIAASEFINESTIFTAFSGDILTQTYRRELEDMWEERLLKIEAAESDKASRNFAKPSPIKSSSKKSTAAKSSSSKSATAKAEFAKFKSTYKESAARLEPETAEPDLRPSRFAKIEPPEFVNLALTYKSLALFGLE

SEQ ID NO: 79186 - protein, 270 aa, Unknown
  Obtained from environmental sample
  DOMAIN (51)...(270): Methyl-accepting chemotaxis protein (MCP) signaling domain
  misc_feature (1)..(270): Xaa is any amino acid
MTQTAAAVNKITASIQSIKGRVINQSASVSETHATMEQVVVNINKLNDHVENQSHNVSQASSAIEEMVANINSVTDTLVKNSGNVKILTEASEVGKTGLQEVATDIQEIARDSEGLMEINAVMENIASQTNLLSMNAAIEAAHAGEAGKGFAVVADEIRKLAESSSEQSKTIGTVLKKIKGSMDKITYSTENVLTKFEAIDSSVKVVSQQEENVRSAMEEQGEGSKQILKGVGNLNDISRQVKGGSNEMLEGAKEVIQESKISADLINGK

SEQ ID NO: 79187 - protein, 330 aa, Unknown
  Obtained from environmental sample
  DOMAIN (45)...(134): GAD domain
  misc_feature (1)..(330): Xaa is any amino acid
KPSAFHKIPYAKAMLNTGTDKPDLRNPLVIADLTALFADVEFQPFKNIPVRGIVAKRAALQPKSFFEKMLVFAMEIGMKGLGYISVQEDSSLKGPIVKFLSAGKQDKLKKDLCLEKSDTLFFIADAPDRVNSLAGQIRTALGSQLNLIKKDSFEFCFIVDFPMYGVSEETSASREAAASEEAGKVEFTHNPFSMPQGGLEALETKSPLDILAWQYDIVCNGVELSSGAVRNHLPEVMAKAFEIAGYTQADIEKKFPALYNALHYGAPPHAGMAPGIDRIVMLLAGEENIREVVAFPMNSAAQDLLMGAPCEVTEQQLREVTLGRICQWGG

SEQ ID NO: 79188 - protein, 180 aa, Unknown
  Obtained from environmental sample
  DOMAIN (8)...(91): ACT domain
  misc_feature (1)..(180): Xaa is any amino acid
DSISLEAVFGSVYSIGRWWKTGAGTLSRVSGLFSRRGYNIDSLTVGVTEDPSVSRMTIAINGTGQKSDKRVLDQIVKQLEKLVDVIAVKELENESCLRREIMLVKIKTDEKTRPAVMEITGIFRARVVDVSPETITVEATGNMEKLNGLLLLLRPYGILELARTGMVALERGSSVLSINK

SEQ ID NO: 79189 - protein, 296 aa, Unknown
  Obtained from environmental sample
  DOMAIN (56)...(122): His Kinase A (phosphoacceptor) domain
  misc_feature (1)..(296): Xaa is any amino acid
MAEYVALIAPAHKYYREVRRMGLVLTVLGMMMATVLSIILWRINNSKKKVEEENRQKSDFLAKMSHEIRTPISAILGITEIQLQDRTIREDIREALGRIYSSGDLLLGIINDILDFSKIEAGKMGLVPVKYYVSSMINDIVQLNKIKNENKPIEFKLQVDENLPAELIGDELRIKQIMNNLLSNAFKYTDKGEVTLSVAAEQARAGLSANATIVFKVSDTGQGMTAEQIQKVFDEYSRFNMEVNRATQGTGLGMNITRNLVYMMDGSISVKSAPGKGTEVTVKLPQRIEGSRVMIG

SEQ ID NO: 79190 - protein, 136 aa, Unknown
  Obtained from environmental sample
  misc_feature (1)..(136): Xaa is any amino acid
DAERVCIYPGGQSGYINRVKGPKPSVSDSPLTDVFQALIAGPNAGEKSSGLISLIPPATKLLSASVRGNTAYISFNEEFQYNTYGVEGYAGQLRQVVFTATEFPNVTDVQILIEGRRIDYLGEGVWVGSPVSREML

SEQ ID NO: 79191 - protein, 309 aa, Unknown
  Obtained from environmental sample
  misc_feature (1)..(309): Xaa is any amino acid
KLVQGKAERDGCTLLISLNPSPPLITVSGNAAKKGRCRPEHPDCIATREALKDIMRFCLQGDKGRGCDGFRVDMADSLGKFDNNEKSATSAIWRNIREMLDGEFPEAAIISEWSSPPLSLKAGFHADFLLDHGTSGYRSLVRHYEDGGKDNSYFKKDGTGSITRFLDQYMPWYEATKNDGFISMISGNHDTPRVSHGLSTREVSLFYAMLFTMPGVPFLYYGDEIGMRYLYKLPTKEGGYSRTGSRSPMQWNSGANVGFSNAAPEKLYLPVDTEGGAPDVESQEKEPQSLINTVKDLLRLRNGNEELAS

SEQ ID NO: 79192 - protein, 330 aa, Unknown
  Obtained from environmental sample
  DOMAIN (1)...(327): Nitrogenase component 1 type Oxidoreductase
  misc_feature (1)..(330): Xaa is any amino acid
MEKAQSAPKLVFVYATCIVGVIGDDVEAVCRAAEAKYGIRAIPVKAPGFSGTKSQGYKLACEAIMTLIKPHKSQAKKFGVNILGDYNLAGEMWIIKGYLEQIGIPVISTITGDSSYEKLINSPGAALNIVQCAGSSAYLAERMSGEMGIPYVKVSFFGIEDTTSSLFRVADALGKPGLREKARQLVASRIADVMPVIEKYKPRLAGKKAAIFVGGGFKAISLIRQFDELGIKTVVVGTQTGKKDEYEIINSLVDEDAVVLDDANPAELERFMLEKQADILVGGVKERPLAYKLGMAFCDHNHERKHPLAGFEGIENFVKEIPRPSSGGGK

SEQ ID NO: 79193 - protein, 98 aa, Unknown
  Obtained from environmental sample
  DOMAIN (68)...(95): NHL repeat
  misc_feature (1)..(98): Xaa is any amino acid
MAGYADGTETAARFSAPQGIAVDSGGNIYVSDTGNNRIRKITPLGAVSNLAGNGTAGYTEGSGTAAKFSAPQGIAVNTDGVIYIADTGNNRIRKIVKK

SEQ ID NO: 79194 - protein, 86 aa, Unknown
  Obtained from environmental sample
  misc_feature (1)..(86): Xaa is any amino acid
MSGILILADDLTGAHDTAIQFVKQGFSSLVVINSDSANAGLFGGYDVISVNCDSRRLDADEAYSAVYKTAKHFEAASFVLQKVDSV

SEQ ID NO: 79195 - protein, 311 aa, Unknown
  Obtained from environmental sample
  misc_feature (1)..(311): Xaa is any amino acid
SQSTAAGGIALRGEVWDIFRGEESEAYRILFDFDRIESIRRFEPLSQSGMEKIPELVIHPFKELVWTEDRIEALKANLESFEEFPSNGKEILEELNTRRAINGEEYLFPLAFEKPAALADYFFSSSGESKGKGEALGGAIAVYLERERLENAQESLEKEYQSLYSKTRRSKEIPLPNRILLNFKKLSSSIPRCISFTSLKSGGEENAQYINAACDPPRSFFGNVNYLKEEFASLKKQSWDLAVAAESDVQAGRIAELLKDEDVFVGALPFSSGFALPDIKFMLIQENEIFGRRRRPPKSLKPRGAPQSTPL

SEQ ID NO: 79196 - protein, 311 aa, Unknown
  Obtained from environmental sample
  DOMAIN (72)...(291): Peptidase family U32
  misc_feature (1)..(311): Xaa is any amino acid
MELLAPAGSPEALDAAIGEGADAVYLGLKDFNARLRSANFTYAQFESALRSLRRIRKKVYVTVNTVFEQREADRMYQFLKYLASQEPDALIVQDFGVIAMARAEFPSLRLHASTQMNIASARGANALSRHGVSRVVLARELSLEELKSVKSETNLELEVFVHGALCISVSGICLFSSFLGGKSANRGMCTQACRRLYHRANGESGYYFSPNDLQLLERLPQLAAAGISALKIEGRMKSAAYVGTVVSAYRLVTDAVTNGDEDEIRRSIEQGKEILRNDFARPKTQYFFGGYQKPARQTRNLNNGTQKCQRR

SEQ ID NO: 79197 - protein, 307 aa, Unknown
  Obtained from environmental sample
  DOMAIN (83)...(295): MutS domain V
  misc_feature (1)..(307): Xaa is any amino acid
VPKHFIRRQGITGGERYSTERLAELESEINGASDKVIELEKKLFLEIREQVKKYLAQLSAAARRLAELDVAQSLAKAAGLRGWTRPELNETGNLEIIEGRHPVVEAHLGRGEYIPNDIILNTGEGGISFAMITGPNMAGKSTYLRSAALITIMAQAGSFVPAREARIGICDRIYCRVGASDNLARGESTFLVEMNETAFILNTATDKSLVIMDEVGRGTGTNDGLSIAWAVSEELLNRIGCRTLFATHFHELSILSHPRLANRSMEVLDKDGKIIFLRRLKESPRRRIIRHPRSPPCRPLRKPSCQG

SEQ ID NO: 79198 - protein, 139 aa, Unknown
  Obtained from environmental sample
  DOMAIN (1)...(139): Rnf-Nqr subunit, membrane protein
  misc_feature (1)..(139): Xaa is any amino acid
MNKRLSVLTNGIIKENPVLVLILGICPTLAVSTMAENAIGMGLATTFVLLGSNVAVSILRKAIPDKVRIPCYIVFIAGFTTIVKMVVEAYAYNLYEALGIFLPPIPLTASSWGGRECSPIKRRTGFTLDAIGRGAGFTL

SEQ ID NO: 79199 - protein, 313 aa, Unknown
  Obtained from environmental sample
  misc_feature (1)..(313): Xaa is any amino acid
MSDFEETPAEHRGATPFDKMLQSVLEDQPNFIRISAVFKPNALDGMDARYIGRPGSTPTGQYAMTWGRDTGQIISTPNLNVQETMAHLNGPNARKDRVEDPTPFTVMGKQTYVFRLGVPVINDSNNEVVGSVTCLLAIDGAQPMVEKIIKEEEAVVSMSIYTNTGFIIANLSPERIGKKLIDAETLYGKYLQEANNAVLKGEEKQFPNLYSQVLKTNVSVDLMPFTVGNSDVTWTIMMAADDDYVLKDINRITVFVIILSVVALIIAAAIVYSVMHFTTKPIVHVADTLKDISEGEGDLTRHIDNNSKDEIGD

SEQ ID NO: 79200 - protein, 229 aa, Unknown
  Obtained from environmental sample
  DOMAIN (84)...(229): GGDEF domain
  misc_feature (1)..(229): Xaa is any amino acid
MFINPPQFNLCLTLGAIIVFTISTIYVKSPYFNPDVKSPDNWILDLINTFLTGVITLYFTWYIGKLRLGLELSTTMLEDERDSYFDQSIIDELTQLKNRRDFQQTFRRYLTNYRTSDNWLCVAIIDIDFFKFYNDHYGHPGGDECLRAVGRVLNSLKDSHDVYAARVGGEEFALLWFETDAPHVDVVVSHLQGLIKGLKIPHEKSKVAPYVTISMGVFVENAALPRYAD

SEQ ID NO: 79201 - protein, 197 aa, Unknown
  Obtained from environmental sample
  DOMAIN (14)...(130): RNA pseudouridylate synthase
  misc_feature (1)..(197): Xaa is any amino acid
MDNNVPFIVDETDDFAVVFKPSKIHSIPLKKKNSETLFEWFASQSSSVFDLMHRLDFETNGLVLFAKNAESYDFFKTLQNNGGFIKEYSAVCNNAEYQGVDSGGGYPKPPILYIEDYKPSLKEPLVIESYFPPFGAGRKLVRPVTEIKKHREIAADKGDFYRTEIININKNVFTVRIKRGFPPQYLAPLLDPLPNLM

SEQ ID NO: 79202 - protein, 212 aa, Unknown
  Obtained from environmental sample
  DOMAIN (11)...(146): Histidine kinase-, DNA gyrase B-, and HSP90-like ATPase
  misc_feature (1)..(212): Xaa is any amino acid
MYIGRLGDGSNPDDGIYVLLKEIIDNGIDEFIMGNGSQIEIVIKDGTAKVRDYGRGIPLGKLVECVSVINTGAKYNDDVFQFSVGLNGVGTKAVNALSSHFRVVAIRDGEFAEAVFQRGELVSEKKGRLKEKQKNGTYVEFTPDAEIFGFYEFYPEFVEKRILNYAYLNAGSTLSYNGKPYVSKARAFRSFKQRNRPQLYFTPGFTTRGEPL

SEQ ID NO: 79203 - protein, 226 aa, Unknown
  Obtained from environmental sample
  DOMAIN (34)...(99): His Kinase A (phosphoacceptor) domain
  misc_feature (1)..(226): Xaa is any amino acid
MEHEIQIEHLLELKTDEVKLRELAELEAEDASRAKGEFHSHMSHEILFSLNAVIGMINVANDEKDIEAIKLYLGKADNAAKHVLGVINDILDMSKIETNKLELSYSEFDFAKMMTSIVDVISIRAQEKHIQVVVNMNPNIPTFVISDELRLSQVITNLMTNAIKFTPENGKVQLSAEKLDGKDSEITVRIEVADSGIGISPEQQEKLFSANNRLDTVSQKNTAGQG

SEQ ID NO: 79204 - protein, 256 aa, Unknown
  Obtained from environmental sample
  misc_feature (1)..(256): Xaa is any amino acid
GSPKVRFRRGQSLISDGRQERTFAYLPIQIDERFQPGTTMDSGFSGGYGIAITTSCKDPDRAFEFLDWMASEEACILREWGLEGVNYTYVNGKRVQNEQDRLDRISDPNYGRRTGIGLWYHPFPRRGTGWIDSTGNYITTTTPELIKQNFLDVERETLAAYGAELWTDLFPSSESLGISRHGQAWQYTLPPDLQAKTTEADDYMKTALSNIVIGPQASFDATWDKIMSDLRAMGIDEANKALTALVKDKVKLWETP

SEQ ID NO: 79205 - protein, 127 aa, Unknown
  Obtained from environmental sample
  misc_feature (1)..(127): Xaa is any amino acid
MINENDAGAKSDVLGTDFISEFIKEDLAAGKFNHVHTRFPPEPNGWLHIGHCKAFYIDFSMAERFGGKCNLRFDDTNPEKEDISYVEAIKRDIKWMGYDWEDANLRFRIIRYLYEVAVKISKKGKLC

SEQ ID NO: 79206 - protein, 90 aa, Unknown
  Obtained from environmental sample
  misc_feature (1)..(90): Xaa is any amino acid
RVARIMAGPIRRAITRKSEPLRGGEKDSINLSPEAKEKAELYQVIELIKSAPELSDSEIVALREKINDPSYLNERTIGATADRILDAFGL

SEQ ID NO: 79207 - protein, 336 aa, Unknown
  Obtained from environmental sample
  misc_feature (1)..(336): Xaa is any amino acid
VTKHDFPKIHFYDQDFVDIYDKTWAWIEDCWNNEGVKNGIEGKFFSYPESPVVTQADAVFSSFFLVYSNRIYQANSTLDLFYSRQEPDGAIRCAYDIAAGSPAVDRDNPEGLGIPLFAWAEYNIYHKSGNKKRVKDVLPVLCKYSTWIDSVFKKPNGLYKPPLCATGMINLPRGETCYPMDFNTMMAVNMLYISALADILNDKETSFQYKRQYFSLKTRINSLMYNPADGFYYDICKNEKHIPIKTIAGFWPLLAEIPNGEKAERIIAKLSDPEFFGTPHPFPSLSVSDKDFDENGRGYRGSVFPHLVFRAVKSLGPLPAVGHCKGERIRHVYFML

SEQ ID NO: 79208 - protein, 83 aa, Unknown
  Obtained from environmental sample
  misc_feature (1)..(83): Xaa is any amino acid
MTDWPRQINESLEFTEREAEKGNVILIRPSKDLKVKRTESDIPKIEQLYELGKRDAEAACTFIQPPTPHVPSPTLHTSPKPAL

SEQ ID NO: 79209 - protein, 275 aa, Unknown
  Obtained from environmental sample
  DOMAIN (44)...(101): Threonyl and Alanyl tRNA synthetase second additional domain
  misc_feature (1)..(275): Xaa is any amino acid
MKKIIDSRQDFVKVTVSRKDALTQFAAEEFKTELINELPEGEDISIYENRDADGKVQWSDLCRGPHVGNTREINSAAFKLQNIAGAYWRGDEKRPMLTRIYGTAWENPKDLKAHLAFLEEVEKRDHRRIGKEMDLYSIHEEAGAGLIYWHPHGGRMRVALEDFWRQEHFRNGYEILYTPHIGKSWLWETSGHLGFYKGNMYSPMEIDNQDYYIKPMNCPFHILIYNNKGHSYRDLPLRWAELGTVYRYERSGVLHGLLRVRGFTQDDAHIICTPR

SEQ ID NO: 79210 - protein, 349 aa, Unknown
  Obtained from environmental sample
  DOMAIN (201)...(315): HD domain
  misc_feature (1)..(349): Xaa is any amino acid
VEVGGAPPEIMLLRRGQMVAAHSLKWGTIIIDQRSRYGIGAGLVYERFLNENIRNTLGMLNLEMDFAHVRTVVAAGTDARIAADQAGKELNSNCRIIEREDFFKFTEKVCSYSIERCINEFGSSYADAEGLIPGLLVLKLFLERTGAANVAVPYVTIRDGYLADLASGVDSKLQDEFFSQIIASAVNLGRKFHFDEAHGRYVANCCMTLFDALTKEHGMNRRHRIMLEIAAILHDIGAYVKSSGHQKHGQYLVANSEIFGLHNDELNIIANVISYHRGEPPSQSDIEYVKLQREERVLVLKMASILRVADALDRGHSQQIKNITVERRRESGCSSCGQNISPINPGGKT

SEQ ID NO: 79211 - protein, 346 aa, Unknown
  Obtained from environmental sample
  misc_feature (1)..(346): Xaa is any amino acid
VGQVSDSAEVITAFEFDIKGRTRPYALIHAGEFREGETLHGLANLEKYIIDKTQILINQRVLKDNASMSYSIGVQSEDGAYPVIITINVEDSWNFIVLPKPGYSTNTGFELIAKARDYNFLGTMNPLRIDLGYYYDENSRHSFMLGVYSSTPFRALGYTWNIKFDNTFNYRPQVEEPYYYQNITGLSVEVPFRTTTFTFGFEESVNLNEENSDGNKEKYGNFQNGLYMSTSLFTSWEIPTGLIISRFGELTYTPGISATFNHELPEWYLQEIRRGPFMNFSHSLGFEKIDWHANYRERLSVSVSNSFNYDFFRFHADKDPLFFLLAVNVTGHPILSKFFAISSRLG

SEQ ID NO: 79212 - protein, 339 aa, Unknown
  Obtained from environmental sample
  DOMAIN (26)...(316): ABC transporter transmembrane region
  misc_feature (1)..(339): Xaa is any amino acid
MTYLIKFFNKASIKRSITLLTRRYKILMLLLLIMTIGCSLVETVGISAIMPFISIVSNPKLLEAGFYKTAFEFLGFATTEKFIIVFGIGIIIFYLFRGVYSIILAYVTKRYSTALYTHFSKRLFKIVLSVPYKVYVQKNSAELILSIGGETSAIGKVVFHFLNVCSEFFTILMVYAVIVYLNWKMTIIITSILLVLVILMLSYLAKINSAQGEIRFTSGRNMNRALKESLGNLKYVKLKGNEDELLKTYNDALEKHNRSELITYVFGAMPKSILESLGFSFLIAVVVFIVWLYNDASLVIPIISMYALALYRILPSVHRMLQEINGILFPSSAINPGKK

SEQ ID NO: 79213 - protein, 317 aa, Unknown
  Obtained from environmental sample
  DOMAIN (1)...(141): Domain of unknown function DUF21
  misc_feature (1)..(317): Xaa is any amino acid
ARAGFLWQLLESYDKFLFSILIGNTIVNVVTSALAAMLFIGLFGAKGVGIASVVVTVLVLVFGEISPKTLAKESPELTALRCAPLLRFFIVIFSPLNYLASAWRNIIVKIFPPGADRQITEDELLTFVEEVRQEGGINKREEQMIRQAIEFDDMTAAEIMTPRMDLAAVAETDTAGHIETLFEDTGFSRLPVYRENIDNITGIILLKDFHREVIIKGKSPSEIIKPVVLVTKTMKIPRLLQTLKEKQSHMAVLVDEFGGTLGIVTVEDILEELVGEIWDEHDRVVEPVKHNADGSFSALAVCSFRIWESRPSDHWGP

SEQ ID NO: 79214 - protein, 289 aa, Unknown
  Obtained from environmental sample
  DOMAIN (1)...(287): Uncharacterized ACR (DUF711)
  misc_feature (1)..(289): Xaa is any amino acid
MDAVRLMGEIIKKTAEATADRCGIGCAKLVVFCNAPEDNPFMAGAFHGVGEAESVLNVGVSGPGVIKAALENCREMSFDALADTIKKTAFKITRMGHLVGFEAARRIGVPFGILDLSLAPTPAVGDSVARILEEMGLEAAGTHGTTAALAMLTDMVKKGGVMASTHVGGFSGAFIPVSEDEGMVAAVKGGSLSLDKLEAMTCVCSVGLDMIPLPGETSAATIAAIIADEMAIRLVQHITPAGRRNSRPRAKNGPSGPEFGRASWEGFPDNCGVNPREEGTPFHNPRVDR

SEQ ID NO: 79215 - protein, 276 aa, Unknown
  Obtained from environmental sample
  DOMAIN (38)...(276): eubacterial secY protein
  misc_feature (1)..(276): Xaa is any amino acid
VPTPGVNADVLSQFMSSNADGLFGLYDMFVGGNFGRFTVFALGIMPYITASIILQLMGTIFPYFHKLQREGAEGRKKLTQYTRYGTVIFGAIQAAGISIFISSIQGEGGASAVIPQMKGFLFMFTTVVSLTTGTVITMWLGEQITARGVGNGISLLIFIGIVARIPNQILSEVQQIMADRMHLAKSLAIVAVVVAATVAVVIMTQAMRRIPIQTPKKVVGAKMYAGQNTVLPLRLNMAGVIPIIFASSIMTFPGMIIRAFPGRILISWTICSAGSG

SEQ ID NO: 79216 - protein, 94 aa, Unknown
  Obtained from environmental sample
  misc_feature (1)..(94): Xaa is any amino acid
MPKKADLGEGGKLLQVARDMVPSLASASEDATAEVYIKEQAEKAAVKLGDLMMPLRVAITGSRVSPPLFVSLRILGTQESLARVEKALRVLENK

SEQ ID NO: 79217 - protein, 356 aa, Unknown
  Obtained from environmental sample
  DOMAIN (203)...(325): Transketolase, C-terminal domain
  misc_feature (1)..(356): Xaa is any amino acid
VSPGLWRVPPSTVRRKNVRNTHAVNAAQEHILAENKNAFLFGQDVGRYGSPFKTCKGLIDKFGEGRVIDVPICEAGTVGFCLGASQAGARPIMEFQFADFSTEAVSQLGLNAGTWYFRSDKAAPLLFRLPNGAGVTLGAFHSGEFEGLWSRFPGLKLFYPATPQETYEALMIGFYDDNPCVVFEHKLLYWGRPADIEFDGDLSKVCRPRQYTEGSDITVIATGAMVDQTLRAAEEGKYSAEVWNPFVLNPLNFGPIAESIRKTGRLLVVQESGATAGLGDHFISLAVRECFTDLRRAPELVAAPDTPVPFAQELETAFLPDSGKIAAGIEKMIEDISGAQTFSARDSSSRPGGGGN

SEQ ID NO: 79218 - protein, 240 aa, Unknown
  Obtained from environmental sample
  DOMAIN (26)...(238): Respiratory-chain NADH dehydrogenase 51 Kd subunit
  misc_feature (1)..(240): Xaa is any amino acid
MPRLEFRLLTNSLLSDPFSIEQYIKTDGFSALKEAAAMKSEDVISEISKAKLLGRGGAAYPAGKKWEHLLHIKETPKYIVCNADEGEPGTFKDRFIMEKMPFKLLEGIIIAGFVFRAKAGFIYIRGEYRKIQKRFVEAIKSIHEAGFLGANILGTGYDFDIHVISGAGAYVCGENSALLNSTEGKVGRPRIKPPHLAEVGLFQKPTLVNNVESFTNIPFIINTSAEAFRAILLSRRPGTN

SEQ ID NO: 79219 - protein, 238 aa, Unknown
  Obtained from environmental sample
  DOMAIN (6)...(238): Binding-protein-dependent transport system inner membrane component
  misc_feature (1)..(238): Xaa is any amino acid
SGHNLFKNPVEGTVIWAFLSTFTNYAFGLFQAVLLRAKGLRFIKFWRGIFILPWAVPGIVSMMIFRVMFNKEGALNQILLNFGLVKEAISFMSDPNWAKTVLVLVNMWLGFPYFMALIAGIMTTIPEEQYEAAQIDGANAFQQFRSITLPFILSSTAPQIMMSLTFNFNNFNLIYFLTGGGPPNSTLQMAGSTDILISWIFKLTLDQRMYNYAAAMSIFIFAIVASISGWNLMRTPRV

SEQ ID NO: 79220 - protein, 88 aa, Unknown
  Obtained from environmental sample
  misc_feature (1)..(88): Xaa is any amino acid
MQHEMLTHKIIGCAMKVHSVLGNGFQEVIYQRALEIEMQLASLNFAREMEMPIFYRDIQIGTRRVDFFIENLIMVELKHSADLILGKP

SEQ ID NO: 79221 - protein, 154 aa, Unknown
  Obtained from environmental sample
  misc_feature (1)..(154): Xaa is any amino acid
CGRRNQETANQSALSADDIARRIESIQVSTNEAVKVIDDVSGIITKINHSVKSISTHVGEQTKASNEIANNVAQANAGAKRVASSIAEVAKNSHNIAHNANEAANGAGNISQSVNSIAQDAKNSAQGAKQTNENADELARIANDLKDVLNQFKV

SEQ ID NO: 79222 - protein, 230 aa, Unknown
  Obtained from environmental sample
  DOMAIN (88)...(227): Peptidase family M20/M25/M40
  misc_feature (1)..(230): Xaa is any amino acid
MKEKIFSWIDNASPLAVELQTGLTKWPAISPDSGGEGELEKCVFLEAWLKAQGITQLERYDAPDERAKGGVRPNLIATIPGETKNCLWIISHTDVVPPGEISLWNTDPWTVVEANDPPGHRVIGRGVEDNQQGLTSSVLAALALVKLGLRPRRTIKLLFAADEETGSVLGIGWLLENHSHLFQKDDIALIPDAGDRKGETIEIAEKNLIWARFVVKGAQTHRSRADLGIN

SEQ ID NO: 79223 - protein, 98 aa, Unknown
  Obtained from environmental sample
  misc_feature (1)..(98): Xaa is any amino acid
MLKPYDLLENILLDIENGIKNNINAAALSKKYNFSEGHLRRLFSFAFKQSIASYIRSRRLAASLKNILETNTNIPDIALEYGFDYEQSYIRTFQREFG

SEQ ID NO: 79224 - protein, 327 aa, Unknown
  Obtained from environmental sample
  DOMAIN (38)...(267): Protein of unknown function (DUF1538)
  misc_feature (1)..(327): Xaa is any amino acid
GGPGLSQFGRDKDNLVFQESFSLIKIYAFSKIKPQFKAVFMVSVFLAAVQYFVLDTPIKNAISIAVCIAAAILGLSFFLEGLFLGIMPLGEQCGMRLPSKIGAAGVTVFSIIVGITATLAEPAVAVLQQQGSVIPAWNAPLLYLLLNRGTSWLVAAIAIGVGISVVLGVYRFMFGWAFKPPVFIIIPIIVAVSCIFDENPILRPLVNLAWDTGGAATGAVTVPIILALGLGVAKIGGKNSDTSGLGLVTLASALPVASVLLLAAVLGPKVPSPCDAAAFFSANPDQRAKAVYVAGGRNELYNMARKGRLLGRSFSRRIRVFVFRRKK

SEQ ID NO: 79225 - protein, 129 aa, Unknown
  Obtained from environmental sample
  misc_feature (1)..(129): Xaa is any amino acid
MGTINLTKDWQRLNIPAHVRDILSSNRGLLFPANRAELLKLAMGGTGNKSYDVCYDVPGKGSVVEATVVQCKNGLSVNYSEPYMRRRDPDCTVVGDSKPSDQERFLERFGRDFDKVRGDTFDWLENQEL

SEQ ID NO: 79226 - protein, 68 aa, Unknown
  Obtained from environmental sample
  misc_feature (1)..(68): Xaa is any amino acid
GSIELLHSRPSIASAGHVPLIGEFAAGTPILAEKNIEDTLTMDKAVLPRSGQIFALRVQGDSMTGDGI

SEQ ID NO: 79227 - protein, 51 aa, Unknown
  Obtained from environmental sample
  misc_feature (1)..(51): Xaa is any amino acid
VATELMATYMYKTSFIRFNMGYGATIASGMFILITLTALIVVNTLNKKAEV

SEQ ID NO: 79228 - protein, 272 aa, Unknown
  Obtained from environmental sample
  DOMAIN (1)...(255): SAICAR synthetase
  misc_feature (1)..(272): Xaa is any amino acid
VREVYEVPDDRLVIVITDRISAFDVILPKPVLNKGKVLNAVSLFWFNFTKDIIPNHIISSQLRDMPEFFQKDEFEGRTVMVKKLKILPFECIVRGYMFGNMWSAYSKGEEFCGQKIRSGYKLAERLDAPLFTPSTKAHVGHDEYITVKHVADAIGADLAKKIEKASFEIYNACYNYAYKKNIIIADTKFEFGLDADSNLVLADEVLTPDSSRFWDLSDYQVGVSPKSYDKQFVRDWLLNNKKDGEMQFDKVPDDVLQKTSEIYAECLKKITG

SEQ ID NO: 79229 - protein, 65 aa, Unknown
  Obtained from environmental sample
  misc_feature (1)..(65): Xaa is any amino acid
AFRRRQTYSEFGESLKQIFLTQDERENRDIGRTLDLGWKVLKEIPREDLLRVKEEYIEKYMKQAV

SEQ ID NO: 79230 - protein, 318 aa, Unknown
  Obtained from environmental sample
  DOMAIN (123)...(264): Exonuclease VII, large subunit
  misc_feature (1)..(318): Xaa is any amino acid
GFLGGGGKAFRGTRPRGSYSIVCGRDGLPRKRGTYSEGGKKENKKLAAEGLFDESRKPALPRFPQAIGIVSSPTGAALRDILNILGRRAAGVKIVILPAPVQGSDAAPIIARRIEQANQWKLADVLIVGRGGGSLEDLLPFSEESVVRAVAESKIPVISAVGHEIDWALCDFAAALRAPTPSAAAELVSAELTTILSNINSISESLTASIKARIEKAKLLLRPFSVEDLEYRFRSILQPRLVRFDDAKENLVDGMAALVDGLRKRHELALAILEAGSPLAVMERGFSVVLNRRTGAIVRGGSDARPGDRLDIRPLHAS

SEQ ID NO: 79231 - protein, 352 aa, Unknown
  Obtained from environmental sample
  DOMAIN (1)...(352): Carbohydrate phosphorylase
  misc_feature (1)..(352): Xaa is any amino acid
GPGERGVLPDYQNHKTTLGPARKNLSRAINKGAFPEEDVRRAHDLRIRQQYFLVSAVIQDIIRRHKQNGNNIADLGAKTAIHLNGSRCALAIPEMMRLLVDQEGMEWKEAWKMTQSIFSYSSSAVQREHVETWPVYKITQLLPRVMQVIFDINLEHLDLIRARGCNDVDLLRNLSLIEEGEVKRIRFADMAVLGSNSVNGVSAAHTEILKKHLFPNYYSQYPEKFYCKTNGVSHRRWLYCANRPLSALISRPIGDGWVRRPEELSKLEFYAENPEILKGFWNVKNRAKSELCAVLREKVGVALDPAMLFDVNCRPIHTMKRQVLHILYILHSYLKIKKGETLPSADLIIEGP

SEQ ID NO: 79232 - protein, 344 aa, Unknown
  Obtained from environmental sample
  DOMAIN (1)...(343): AMP-binding enzyme
  misc_feature (1)..(344): Xaa is any amino acid
MIRSAEIRRTYQLTAKDLEYRCNIAEVKLLVTIDDPGLLADIAAARPKCSGLEHIAVVYDREKRNDTSAFIDLQAEIEKASDKFKYIATKTEEPMLIYFSSGTTGMPKMVLHNHSLPLGHIVTAKYWQCVEDGKVHLTQTDSGWAKFAWGKIYGQWICGAAIGAYDTEKFTPKGMLDALQRLKPATFCAPATVFRYLIKEDLSGYDFSFIRHTSVAGEPLSPEVYNKLKSLTGLEIREGFGQSETSVMAAVFKWLPVRPGSMGKPAPLFKLVLIDEDGGACDDGIIGNMSITAAGQNMYELGYTAPDTGLPVIGPSDFPGPFRGYWKDQDSTASSWNKGTYRTG

SEQ ID NO: 79233 - protein, 339 aa, Unknown
  Obtained from environmental sample
  DOMAIN (230)...(309): Surface antigen variable number repeat
  misc_feature (1)..(339): Xaa is any amino acid
LPNPDAVSDAVMFRPGSAFTPADLQESVRRVYKLGHFRKVDFFVDEESDSSVSLKLTVEEFPLVDKIEFFGNKKIKKKELEEKKLLRIYAPLSDAHLYKSKQTILDMYAEKGYLLAEVDAQVIPTSVPGNAIVKYDIKEGPRVRVKSIVFHGNRDVTAKWLSRRFKTKENRWWRSGDFNYDLYRSHLDTLIMQYNDRGLLDAAIERDTVWHSEDKRDIFIEITVNEGRKYFAGDVAFSGNSIIDSDTLALRVALTKGRPFRKSQFDMTRYMLETTYREEGYLWVRVDDKRSYRGENADTIDLLFEISEGRPAIIRKIDIRGNSKTWLVPLVPILSLGGP

SEQ ID NO: 79234 - protein, 159 aa, Unknown
  Obtained from environmental sample
  misc_feature (1)..(159): Xaa is any amino acid
MRLLPRIGPYIAGAIACFAYNDPSVFIETNIRSTVIHCFFPGRDDVKDSEIFPILEAALDKKDPRTWYYALMDYGVSLKKLTENPGRRSAHYTRQSSFIGSFRQARGKVIKALASIGSSNAEELRLACGLEEEKLYRVLDRLEEESLVAEKDGIYRIKD

SEQ ID NO: 79235 - protein, 318 aa, Unknown
  Obtained from environmental sample
  DOMAIN (99)...(279): Trypsin
  misc_feature (1)..(318): Xaa is any amino acid
MAETLRGGNRIFKFPKSGDKIEIDIAPETASENLVQTSNRNSGNEDFFNEIYETGVNTRLLQRNAADLSAYTEEERQNITIYEQLNAGVVNITTETVAINWFLEPVPQAGGSGSGSIINTRGYVLTNNHVIENANKVFINLADGSQFEGTVVGTDPENDIAVLKFEPPRGMELKVIPFGSSDNLLVGQRVLAIGNPFALERTLTVGIISGLGRPIQNSANHIIKNMIQTDASINPGNSGGPLLNTQGQMIGINTMIYSPSGGSVGIGFAVPVNTAKRVVAEIIEFGKSGADGLTRRSFSFSPLGAVPQFACHRGGFWF

SEQ ID NO: 79236 - protein, 117 aa, Unknown
  Obtained from environmental sample
  misc_feature (1)..(117): Xaa is any amino acid
MKKVVFTAALIISVMLAVSCKSSPKDIDGQYKDLYDANTGLDLTGADTYTVKWGDTLSGISRNAYDDGFYYPIIMLASRGVVENPDKILPGMELTIPDLKEIKPMPALGQSCRRAPH

SEQ ID NO: 79237 - protein, 279 aa, Unknown
  Obtained from environmental sample
  DOMAIN (66)...(250): ABC transporter
  misc_feature (1)..(279): Xaa is any amino acid
LESAQQSLAGAERVIEILDAPHSVKDSPNAKSIGKAEGRISFENVSFSYIQGVPVLDNVSFEIKPGQMAALVGATGVGKTTLSKLISRFYDPTGGRVCLDGHDLKEITLESLRSNISLVLQDTFLFNGTIEENIAFARSDASIDEIKAAAQTARIHDDITQMPQAYQTQIGERGVKLSGGQKQRIAIARAVLCSSPVLILDEATASVDVHTEEQIQQAINEIAGSRTIVTIAHRLSTIRNADVIYVFEKGRIIQSGSHDELIEQGRLLPEFVQDGKITK

SEQ ID NO: 79238 - protein, 126 aa, Unknown
  Obtained from environmental sample
  DOMAIN (4)...(103): S-adenosylmethionine synthetase, N-terminal domain
  misc_feature (1)..(126): Xaa is any amino acid
MKSNRYFFTSESVGEGHPDKLCDQISDAILDACIKDDPQSRVACETFASTSLVLIGGEITTNTFIDFHHLVRDVARDIGYTDPSYGLDCNSMAVLDMIHNQSSDISQGVSGKGLKNQSSAINRGKK

SEQ ID NO: 79239 - protein, 265 aa, Unknown
  Obtained from environmental sample
  DOMAIN (12)...(247): PcrB family
  misc_feature (1)..(265): Xaa is any amino acid
MNNGPILSSIRKAKAENRRAHWVLLDPDDFTTERAVEVARVSQESGVDALLVGGSLLQSNRIDAFVKPLREAVSIPVILFPGDATQLSKHASALLYLSLISGRNPVNLIGEQVKAAPIIRQYGLEPISTGYMLVESGTVTSVEFMSGTRPLPRSKPNIAAAHALAAMYLGMDMIYLEAGSGASLTVPPEMIEAVRGCVDIPIIVGGGIRDEETALEKLRAGADIIVTGNLLQKDNGLERMKGIAGCVAKFCSSADGCKNSRICCQ

SEQ ID NO: 79240 - protein, 54 aa, Unknown
  Obtained from environmental sample
  misc_feature (1)..(54): Xaa is any amino acid
GSPLRRLVKAAAKCAGGGGGGSPTRAQAGGKETGKLGEALSELTKLITAKAGGK

SEQ ID NO: 79241 - protein, 266 aa, Unknown
  Obtained from environmental sample
  DOMAIN (1)...(266): Alpha amylase, catalytic domain
  misc_feature (1)..(266): Xaa is any amino acid
APPYDYYRVDRRLAYYNEFGELVKTLHENGISVILDGVFNHTIMDFFAFQDIKEKKENSQYKNWYLNINFFQNNEYNDGFSYEGWAGHKSLAKLNLDCRDVRDHILGAVKYWIDEFDIDGLRLDAANVISVNFLRELSSFVKKINPSFWLMGEIVAGDYRSLVHEGCLDSVTNYELYKSLWSSFQNQNIYELSWTLKRQFSNGGLYQDLALYNFVDNHDVNRVASSLQEQAHLFPLYGNIILCTRYSFYILWQLNMVFIEKRNDLR

SEQ ID NO: 79242 - protein, 176 aa, Unknown
  Obtained from environmental sample
  DOMAIN (1)...(141): DEAD/DEAH box helicase
  misc_feature (1)..(176): Xaa is any amino acid
MDRLICGDVGYGKTEVAVRACFKAIMGGKQIAFLAPTTILAEQHYENFQERFSQFPVRVAMLSRFVDKKSVRKILEELKNGEIDLLVGTHRIIQKDVAFKNLGLIVIDEDQRFGVKDKERLKELKTNVDCLTLFRTPIPRTFAIELFKIRGLNLLANPLRTAIRLRPPLKNLTRSP

SEQ ID NO: 79243 - protein, 107 aa, Unknown
  Obtained from environmental sample
  DOMAIN (12)...(96): Methyltransferase domain
  misc_feature (1)..(107): Xaa is any amino acid
MGQDVKTTKRVLNVGGISKAIPLPPQYAGFEHILLDIDEKASPDILCDAREVGSLEASQFDAIYCSHTLEHFYPHAVPKVLSGFLHVLNDDGFAQIVPPQHHYGRDA

SEQ ID NO: 79244 - protein, 296 aa, Unknown
  Obtained from environmental sample
  misc_feature (1)..(296): Xaa is any amino acid
VAKEIKAGVELNLKDLFSAGMSKAAKATDDFAGKTIGALNKVDKVLSGTAAKLGALGVTLSLGAAAKGIIEMDHRMTRLGLSVNASAEQVSELKRALFEAAQAPDVKIDVSDLQRGIDTIISGTSDLEYAKESIRNVALAIQATGESGDSIGAIFTEFKKFGYTSDQISSLMDDMVAQSNEGAFSLAEFAKAAPQIFSSYSRIGSAPENIKKANAALQIINAGTKSPLKAVSTFNAAMEELADVEQQKKLTQLGISVRDSAGNFRDFHDIMFDIVAKADEAGKHRSVQQHIQRIYH

SEQ ID NO: 79245 - protein, 71 aa, Unknown
  Obtained from environmental sample
  misc_feature (1)..(71): Xaa is any amino acid
MKTSDFFFELPDHLIAQYPPEQRGQSRLMTLNRGTGRRTHRIVNDLPEILCGPELRNKDGRLPLLVLRIQK

SEQ ID NO: 79246 - protein, 93 aa, Unknown
  Obtained from environmental sample
  misc_feature (1)..(93): Xaa is any amino acid
MSVINLEYVIFLYSQTYKHALKGINLSVSQGEFLAVMGENGAGKTTFCKLLNGIIPHISGGYLSGKVEIDGADIIKSSVPQLAVKVGYYVRRS

SEQ ID NO: 79247 - protein, 248 aa, Unknown
  Obtained from environmental sample
  misc_feature (1)..(248): Xaa is any amino acid
YTLLRKPCLNKKPLSLCFLIACADGAPGGNGLGRSHAAYIHKLGANVITWGECCFYKKDLAEDMEKIPYVLRPENISGDSPGIGEKIYKTENEKIAVIVLLGQNGFNRLHANNPFTALPPLLDRLKKQTPYIIVDFHAQATAEKKTLFYAADGNCSAVIGSHTKVQTADETILPNGTAVITDAGRTGSVQSVGGSDINSRIKEYITGIPDWTKEAWDQPELQGVYLDIGKDGKALSIERVRIPVQAPD

SEQ ID NO: 79248 - protein, 339 aa, Unknown
  Obtained from environmental sample
  DOMAIN (1)...(336): Carbon starvation protein CstA
  misc_feature (1)..(339): Xaa is any amino acid
MNGLTLLIISVVTLFFAILLYGRFLAKKWGIDPSRKTPAVRMEDGQEYVPTSPAVLFGHEFASIAGAGPINGPIIAAMFGWVPAFLWLLFGSVFFGAVHDFAALYTSVHNKGKSIGYVIERYVGKAGKRLFLIFVWLFSILIAAAFADIVAGTFAGFGDMGILNNVNASVASSSCLFVLAAIGLGFFIRKRRASGLASGIVAVDLLIICIVGGMFFPVFFDKAIWLYMVFGYIFIASIVPVWALGQPRNYLNSFLLLAMLLAAFIGVVFTAPVIRIPAFTGFIINGNYLFPALFVTIACGAISGFHSLVATGAASKQINNEKYMLPILLGRGHQPGGTR

SEQ ID NO: 79249 - protein, 113 aa, Unknown
  Obtained from environmental sample
  misc_feature (1)..(113): Xaa is any amino acid
MSTDGFFAGKPVGLVDTGGFRLERSFDRGAASENSNAIEDVVVTKTLEAIKKASLIVVMVEAGEITSEDEEFIALLRRYQKRLIVAVNKTEGGRKEADSWRGWSYGFEKVFMI

SEQ ID NO: 79250 - protein, 116 aa, Unknown
  Obtained from environmental sample
  DOMAIN (19)...(101): OB-fold nucleic acid binding domain
  misc_feature (1)..(116): Xaa is any amino acid
MLPKLIKYILSEPPQSQETEISGWVRTKRDMKNLVFIEVNDGSCFSGIQCTFDRSAGLDVQTEAALSSVTTGASVKIKGRLTPSPASGQKVEIAAGSLAIIGETPAENVNGKTREL

SEQ ID NO: 79251 - protein, 288 aa, Unknown
  Obtained from environmental sample
  misc_feature (1)..(288): Xaa is any amino acid
IPCYEAARRGGVSEFTFSGLYLYRNKYDYRVSRNVPNNGRDEGGFIISGKQNGKSFFSTPCEAPNDEILESLFKTHDYWKNIPESVLLPVKEKLEKKGIVFAEDRDNFDYLYYRSDLAELAGKKYHKKKNHVNNFLSTYPDHELRQMNAEHIPAAIEILDRWHKDKNEDGDYRAPREALDLFDILPLKGAIFFIGGQPAAYCLGESIARGKMFAVHFEKAIEEYKGIYQYVNQAFAASLPRFFLSHKTANKDPWERKVLRAGKRMTLPPAGGFWGQKFSRKKTSWRVF

SEQ ID NO: 79252 - protein, 75 aa, Unknown
  Obtained from environmental sample
  DOMAIN (8)...(59): Ribosomal protein L11, N-terminal domain
  misc_feature (1)..(75): Xaa is any amino acid
VAKKVVGQVKLQITGGAATPAPPVGPALGQQGVNIMEFCKAFNAKTKDSAGMTIPDGHHGLLRQVLLGQSDLEGP

SEQ ID NO: 79253 - protein, 110 aa, Unknown
  Obtained from environmental sample
  DOMAIN (2)...(58): DnaJ domain
  misc_feature (1)..(110): Xaa is any amino acid
VNYYELLNIERGADANEIKRAYFSAVKLHSPDSDPQGFKAIRLAYETLYDQKRRAEYDAYFVTSGGAQNDLLVARSLIREHKYKQAAEFLTELSGKNPDLGRSANLSWGT

SEQ ID NO: 79254 - protein, 156 aa, Unknown
  Obtained from environmental sample
  misc_feature (1)..(156): Xaa is any amino acid
FFPAYRRDDCQRPYYPTLKFGYIYQDKVIRRAAVIINKIEESEIEETEEIDETEEVDEIEEIDEIAKYKETNKIEEAEESEEVEELEETNEIEETEESEETNEIEEVEELEETNEIEETEESEEVEETNEIGESEKTEENEDKIDEKTEPPHIIYL

SEQ ID NO: 79255 - protein, 92 aa, Unknown
  Obtained from environmental sample
  misc_feature (1)..(92): Xaa is any amino acid
MPVIEMKGIKREYRMETRGKKSKDKEEAVVVRALRGVDFSAEEGEFVSVMGPSGSGKSTLMNIIGCLDKPTAGTYTLDGMKLPLPVPNFARP

SEQ ID NO: 79256 - protein, 295 aa, Unknown
  Obtained from environmental sample
  DOMAIN (1)...(295): Phosphoenolpyruvate carboxykinase
  misc_feature (1)..(295): Xaa is any amino acid
LTKGRALRVLEGSWEKTGFFVPRLHSIAKPLKPGEKDTSGPCEPDVNKKYISHFPDTYEIWSYGSGYGGNALLGKKCLALRIASVLARDEGWLAEHMLILKLTNPQGKVKYITGALPSACGKTNLAMLIPTLPGWKVETIGDDIAWMKFGKDGQLYAINPEAGFFGVAPGTSDQSNKSAMDSIKKNTIFTNTGLTEDGDIWWEQIGYPAPGDTITNWKGEKKPAPKTDKAVKGEEIAHPNARFTVPASQCPVIASEWEDPKGVPISAFLFGGRRAKTIPLVNQSKDWIQDVFMGS

SEQ ID NO: 79257 - protein, 323 aa, Unknown
  Obtained from environmental sample
  DOMAIN (121)...(294): Mur ligase middle domain
  misc_feature (1)..(323): Xaa is any amino acid
MDYAGMKVLIMGLGLHGGGLESARFLLKRGAELTVTDLRDEQTLAPSIEQLEAACKDGSRRASVRYVLGKHEIDDFKNADMVIKNPGVPPDSPFLQAARLASRRIETDISLFLEVSPARLTAVTGSKGKSTTASALHWALAQSGEKKTGGKAYLGGNITVSPLTFLDELKEGDDVVLELSSWQLGDLKGRCRADKNHANSMLLKPKAAVLTAIMPDHLDRYGSMEAYIADKRVIYQGQDTADFTVAGDDSWGRSFLAEEQAVPLYTPMRLYRKGFPAAGLKTPTVPAMPVLAMGNWLSRFPRALLFRARIRNKTPRRPSWPVG

SEQ ID NO: 79258 - protein, 331 aa, Unknown
  Obtained from environmental sample
  DOMAIN (99)...(211): PAS fold
  misc_feature (1)..(331): Xaa is any amino acid
FSPDYRELCFKSIIDKSLKLIKISGISNQWMNKSYDYRAKMTAARLPWLVGVSVLIFLILILVLSLLTRSRSIGRELEDLVKERTRELTFETSKLQAVIDSIPDILFCKDTDFKYTQCNHSFERFVGIKEEQIKGMTDKEGVWFQPEDMKNIHEKEKSVIINNKAITFEEKIHSPLTGKEKYFETVKAPIKQNGEVVGIVAIKRDITGRKEMEQELAFKTAKLQMIIDTIPDILFCKDTSLKYTQCNKPFENFFGISEADMLGKADEDSPWFSPDMLKDITVTELAVMEHNKSFTSELNLSAPLTGKKAVFEIVLSPLKQKREVVRNMGIA

SEQ ID NO: 79259 - protein, 167 aa, Unknown
  Obtained from environmental sample
  DOMAIN (31)...(167): ABC transporter
  misc_feature (1)..(167): Xaa is any amino acid
MSGEKLQVRNLDLFYGEVQALQNIFFDLGNNEAAALIGPSGCGKSTFIRVINRMNDLIPSCRITGDVILDGENIYGPMNVSELRTRVGMVFQKPNPFNMSIFDNVAYGRRMQGMKDKKKLTELVEQSLIKAALWDEVKDRLKKSAQSLSAASSSGCALRAVFHVPGN

SEQ ID NO: 79260 - protein, 96 aa, Unknown
  Obtained from environmental sample
  misc_feature (1)..(96): Xaa is any amino acid
MVETAQKCSNRRFPPTLPEDSDSARRAAALDDKIDAEHKALTEEVLAFIKEQPQMVKASVRLLRLSGYMERLGDHITNLCEGIIYMIEGSHEELND

SEQ ID NO: 79261 - protein, 286 aa, Unknown
  Obtained from environmental sample
  misc_feature (1)..(286): Xaa is any amino acid
MQIDNSYKYGFVTNVETESFEKGLSEDIIRRASRIRKEPEFLLKFRLKSYEKFLSMKAPNWGELKYAPIDLQNIVYYSAPKNKKEHASIEDVDPELLETFEKLGIPLDEQKRLAGVAVDAVFDSVSIYTSHKKKLLEQGVIFCSFGEAVQEYPELIEEYLGSVVPPGDNYYSALNSAVFSDGSFVYIPAGIKCPMELSTYFRINNKEAGQFERTLIIADANSQVSYLEGCTAPEFSSNQMHSAVVELVALENGKYKIQHSAKAGTQATSKPEKAALSRPNLSMGAP

SEQ ID NO: 79262 - protein, 74 aa, Unknown
  Obtained from environmental sample
  misc_feature (1)..(74): Xaa is any amino acid
MRAYLDIVEKILSQGVCKKNRTGIDALTVAGAMFEHDMASGFPLLTTKKVPFRLVFSELEFFSRGITDSRAARQ

SEQ ID NO: 79263 - protein, 120 aa, Unknown
  Obtained from environmental sample
  DOMAIN (1)...(32): Rubredoxin
  misc_feature (1)..(120): Xaa is any amino acid
MKKWICAVCGYVHTGDEPPEACPQCKAPASKFSEQKAGSSYASEHVVGVAKGVDADIIKDLQAHFNGECCEVGMYLAMSRVAFREGYGEIGLYWEKALTKKRTRRQGRRALGEGLTTAQR

SEQ ID NO: 79264 - protein, 87 aa, Unknown
  Obtained from environmental sample
  DOMAIN (6)...(74): ATP synthase subunit C
  misc_feature (1)..(87): Xaa is any amino acid
MDLQVLIAIGAGIAVFTGVGAGIGIGIATSGFLQAISRQPEASGKMTPMFFVGVALAESTAIYGLVISILLITSWVEKSRLIMLEFS

SEQ ID NO: 79265 - protein, 317 aa, Unknown
  Obtained from environmental sample
  misc_feature (1)..(317): Xaa is any amino acid
MLEIQKTLVSIVHGLDDRPVTCALEPHVHPKTLIGAPAAELVKVTKKLAKDVDALGLNYHEDLFKDYSAAIDRPIIATECYDYYSGTAVNYEDITTKNPWAYVLENDNVLGQFIWAGIDYLGESAWPAKGWTGSVLDICGFRKPNAWFRKSIWSDEPVVYLAFHDQNVKPDYCRGRWSFPPLSSHLNHDHFKRRTVTAVIFSNCETVSLWINGKKLGSRAPGDFANNIIEWTFEYAEGEIKTAGYRNGKEVCNYCLKTAGEAKNIRLVPDKTTIAPSDVAHIEVNITDKNGILCPNEEVQIGFSLSGDGSAESVIVP

SEQ ID NO: 79266 - protein, 113 aa, Unknown
  Obtained from environmental sample
  misc_feature (1)..(113): Xaa is any amino acid
MHLKEVKSILSAQNGMNLSRGCTHGCIYCDSRSKCYRIEHDFEDVEIKSNAPALLNTALAKKRNKCMIGTGAMSDPYIPIRESLCHTRECLEIINTHGFGLCIQTSLTLLCVI

SEQ ID NO: 79267 - protein, 74 aa, Unknown
  Obtained from environmental sample
  misc_feature (1)..(74): Xaa is any amino acid
MENENPFSIPVKIKEPQNKLPDFLIENLPEHLQATLRELGWNELMPVQKKTIPYMLQGRDMLIQSKTSADLIHG

SEQ ID NO: 79268 - protein, 303 aa, Unknown
  Obtained from environmental sample
  DOMAIN (16)...(187): DNA gyrase B
  misc_feature (1)..(303): Xaa is any amino acid
VDERLEEKHLFRAEGGIPQFVKDLNSGEGGIHAVISAEGRFENVMVDFALQYNAGYKENVLAFANNIRTKEGGTHLGGFRTALTRAVNGYIKSQADLSKKFKGTVLSGDDVREGLTCVLSVKLPQPQFEGQTKTKLGNSEITGIVAGIVYERLNTHFEENPKDARLIIDKAADAARARDAARRAKELVRREGALSDNALPGKLRDCQSQRTRGIGTLHRGRRQRGPFGQSRPPTRPNRAILPLRGKTLKLRTNLPLKNARPTTKAKTPSSRPIGRGPFRPSITPPLMPSLALIHKNWSIPERD

SEQ ID NO: 79269 - protein, 239 aa, Unknown
  Obtained from environmental sample
  misc_feature (1)..(239): Xaa is any amino acid
DSPGLSRGFAKQAYASLSEEEKKNLETLLEKHRLDSEKIWEAEGKKLLSVLTSSSSMLPCAEDLGAVPPCVPKVLTQLNILGLRVVRWHRDWGKEGQPYIPFEDYPELSVCTPAVHDSSCLREWWDREADQQRFAGLIGVPSLPRVYNPGTARVILSKIASAASRFRIFQIQDLLHISNLWYAADAAAERINVPGTDNTFNWTYRLPAPISELAKDEGLIRSVSELAAVKPATKKKAKT

SEQ ID NO: 79270 - protein, 54 aa, Unknown
  Obtained from environmental sample
  misc_feature (1)..(54): Xaa is any amino acid
MELDYTYWKAKDGWFVGYLNIWPDHLTQGKNIPELEEMLIDLYEFYKGRKIRNN

SEQ ID NO: 79271 - protein, 281 aa, Unknown
  Obtained from environmental sample
  DOMAIN (97)...(265): Peptidase family M20/M25/M40
  misc_feature (1)..(281): Xaa is any amino acid
MKEKIFEFIDNSSELAVELETGLCKYPAISPESEGEGELDKCEFLAAWLKAQGITQLERYDAPDPRAKGGVRPNLVATIPGKDDPMGKPTGNAPRFWVMSHIDVVPPGEASFWNSDPWKAIVAEGGVRSDGTPLGKRVIGRGVEDNQQGLCSSVIAALAMVKQGITPSRTVKLLFASDEEIGSVYGLQWLIKNHPDLFHKNDMAIVPDSGCASGAEIEIAEKSHVWATFTTKGIQTHAAHPEYGANAYLAGADLTVRLHFGLSEKFSGKARANLIHGGENG

SEQ ID NO: 79272 - protein, 86 aa, Unknown
  Obtained from environmental sample
  misc_feature (1)..(86): Xaa is any amino acid
MLGPIVNAAAVVVFSLAGTFLVKGIPERIEDIIKKAIGLSIIFLGIKGAFENEKILLLIMSMVFGGIIGEVIDIDQWMNNLGKWAE

SEQ ID NO: 79273 - protein, 124 aa, Unknown
  Obtained from environmental sample
  misc_feature (1)..(124): Xaa is any amino acid
MSIFIHESAYISPDAKIGDGTKIWINSQIREHASIGKNCIISKDTYIDEYVIIGNRVKIQNGVSVYHGVIIEDDVFVGPNATFTNDHVPRSFNSSWKISKTIVKKGASIGANATMYCSPSPQNW

SEQ ID NO: 79274 - protein, 344 aa, Unknown
  Obtained from environmental sample
  DOMAIN (1)...(315): tRNA methyl transferase
  misc_feature (1)..(344): Xaa is any amino acid
GFPIDRFGRECCSLEDINDARDAAWKLKIPHYVLNYTEDFTRRVIEPFIESYENGETPNPCIECNRYLKFSLLLRRALELEAEKLVTGHYARIEKSGDRWLLKKGVDAHKDQSYVLYMMSQKTLSHTLFPLGELTKEKAREIAAAKGLSNADKEESQDICFVDNGDYAGFIENYTGKTYPEGDITDAEGNVLGRHHGLIRYTLGQRRGTGVARNYPVYVAAKNTAANTLVLGDNSSLYSSSFTVRQINLIACENLFQPRRLAVKIRYLQKEQQAMVEQTAPDTIHVEFEEPQRAITPGQAAVFYDGDVVVRGAHIEGYTNNHRTGNPFPERYFQFSRFCGARSF

SEQ ID NO: 79275 - protein, 288 aa, Unknown
  Obtained from environmental sample
  DOMAIN (33)...(282): MCM2/3/5 family
  misc_feature (1)..(288): Xaa is any amino acid
MAEGRSEIAKAFIGQSYLVNNALITLAAGGHLLVEGVPGLGKTLLVRALAKAIGGDSKRIQFTPDLMPSDITGNIMLDPATGKFVTRKGPVFSNLLIADEINRAPAKTQAALFEAMQEFQVSLDGEAHPLPSPFMVLATQNPFEHEGTYPLPDAQKDRFLMKIIAAYPSIDEEKTMVAKVLDGDTGAELTVAAVNTVLDTGVFTAIKNLAASLHVDPLVIDYAVRMSTATRETPAVETGAGPRGSLALIRCARARALLLGRDFVLPDDVKAIACEVLAHRLTLSAESE

SEQ ID NO: 79276 - protein, 308 aa, Unknown
  Obtained from environmental sample
  DOMAIN (165)...(249): Type III restriction enzyme, res subunit
  misc_feature (1)..(308): Xaa is any amino acid
VRAEEARAAILPFAELEKSPEHIHTYHITPLSLWNAASAGLTPANVAQVLNEYTRYSIPSGITESFADTMSRYGKIRIVAAVEGKTDLLLLTAQDKAVLAEIGAAKSLGKYLEKTASGFTLKLVDRGSVKRELIRLGWPVKDEAPFASGEALELSLRETTASSMPFAKRDYQLEAARAVLGDGGPGTGYGVVVLPCGSGKTIVGMIIMALLKTNTLILTTNVAAAHQWMEELLDKTDLKSEEIAEYPGNSKSVGPGYWWLPNQIITWAARTGIPDFPAFSSFFKGTVPGGSKSILGTKVSPFLAGRPG

SEQ ID NO: 79277 - protein, 51 aa, Unknown
  Obtained from environmental sample
  misc_feature (1)..(51): Xaa is any amino acid
MLLYVSCDPATLARDSRILTAGKYSLRELRFYDFYPQTSHIESLAVFASGD

SEQ ID NO: 79278 - protein, 211 aa, Unknown
  Obtained from environmental sample
  DOMAIN (25)...(201): Protein of unknown function (DUF1287)
  misc_feature (1)..(211): Xaa is any amino acid
ENNQNNNASERLIFALSQYLLLPPNPTAGEKSFYIRLPDSAPTLPAQKVHYDPAYTVIGYPNGDVAPDKGVCTDVVIRAYRKLGIDLQKEVHEDMKTNFDKYRKKWGLKRPDTNIDHRRVPNLMTFFAKYGTVKEKTYKPDDYLPGDIVCWDLGGGITHIGIVSGKKSSDGRRYLIVHNIGGGQVLEDCLFRFEIIGHYQYEKKSGAPSKP

SEQ ID NO: 79279 - protein, 59 aa, Unknown
  Obtained from environmental sample
  misc_feature (1)..(59): Xaa is any amino acid
MSIIKLENVGFMYPRAQKHALEGINLSVSQGEFVAVMGENGAGKTTFCKLLNGISLVPI

SEQ ID NO: 79280 - protein, 248 aa, Unknown
  Obtained from environmental sample
  DOMAIN (206)...(241): UvrB/uvrC motif
  misc_feature (1)..(248): Xaa is any amino acid
MSTQQQLLADTSRFPETPGVYLMKDADGGLLYVGKAVNLRSRVRSYFISDHADRAQIPGMLRLLDHIDLIVTNTEAEALILEANLIRKHKPKYNIELRDDKHYPYLKVTVDEPFPRLLVVRRVEHDGAKYYGPYTDVGTMRRMADFAKRIFLLRNCNKNMPLKRAVRPCINHSMKRCSAPCAAKIDADAYRRNVGDLERFLKGKRTDLTKELEGRMEAASSELRFEEAARLRDQIKLIGEASRPSGSI

SEQ ID NO: 79281 - protein, 258 aa, Unknown
  Obtained from environmental sample
  misc_feature (1)..(258): Xaa is any amino acid
VLVSCTHTDSNTRQKPDNVNGFFADANSFNIINYEGRKNVIRVNGANTQWAILMYSLSEYIGKEIIIQFSADVKRTGAAGNLNWQVNNVPYYPSAAFIENAAQGIWHNMSGRLFVTPANDAPYLYLTNWENNAQKTVYYISDPVVIILEGDSLNPDLSLKPLKSIYEKDFLIGNITDGTYMSGKYFDLLKHHYNAVTLTSTYPFFLAPSKGAYQWETADQQISLMRSNNMYIHGHCLVWHELAPKWMTTGTRAEVKKT

SEQ ID NO: 79282 - protein, 211 aa, Unknown
  Obtained from environmental sample
  DOMAIN (13)...(208): Conjugal transfer protein
  misc_feature (1)..(211): Xaa is any amino acid
MRIQAREIFKQAKGPAQSRFSSLIGQYDDYVNKLMRDNRTWQLTGLCAVVMLVLTVIGWFYLSSRKTETVMVIEVNEFGRAKYAGKVSGGTFLDGYGIKDYMIESVISDFIEYTRSVFTDGDVMNSNYRKAANHLSNELKEKLRNELIEEDPFSQIGRTKRTVLIESAIRMTKATWQYDWYDIVTDMSGRELRRERMRGMFSCRILTHGGG

SEQ ID NO: 79283 - protein, 292 aa, Unknown
  Obtained from environmental sample
  DOMAIN (78)...(160): Cache domain
  misc_feature (1)..(292): Xaa is any amino acid
MILHGASEKEVRTYLNEITKYLLTEGDQLADFDGLFGYFNVFDGALIDGQNRKPPEGYNPLERPWYKEAVAAHGEIVFIQPHLSVMSAKPTIIIAYGRALYDRDGNLLGVVAMNMNFERVKGYIVNFSKGKAWFGILLDEHFNFIFHRKAELEGTNFADINGDTANLVELLKSGNDYVYEYRMKNYLNIPSITFIEKLENGWYLGIVTPKDEYFTEVRRVRFFLIILGTLLSAIFSFILAHIIAENRRSDKKVNEAEKAIVANRVKTNFLAKMSHEIRSPMNVSCRSDTWGT

SEQ ID NO: 79284 - protein, 87 aa, Unknown
  Obtained from environmental sample
  misc_feature (1)..(87): Xaa is any amino acid
MGNEQIRSFAEDKYLLYGGYEPLTVKLTQIMNQTAGIGWTSYSHTGVPVPVFAKGVHQEIFGGYYDNTDLFFKLASVMNLNVPEKNK

SEQ ID NO: 79285 - protein, 83 aa, Unknown
  Obtained from environmental sample
  misc_feature (1)..(83): Xaa is any amino acid
MKSPVSFKYLDVVASFFVVILVVSNIASSAKIVDLGFSIFSIPLVFDGGTLLFPFAYVLGDVLTEVYGLKLVPNADPMGGALL

SEQ ID NO: 79286 - protein, 135 aa, Unknown
  Obtained from environmental sample
  misc_feature (1)..(135): Xaa is any amino acid
LNPQKSHQIAEPTEVAEAAEPIEVAEPAEVAEVAEPVEAAEVTELVEPAETAEVAETVEPAETAESAEAAEAVEPVEVETPVAEPVEPVETAALSDDSVVQLAVDKLVPNPASPVKILTRQNSRNWRPLLKNTAS

SEQ ID NO: 79287 - protein, 228 aa, Unknown
  Obtained from environmental sample
  DOMAIN (5)...(155): UvrC Helix-hairpin-helix N-terminal
  misc_feature (1)..(228): Xaa is any amino acid
AVEDLQKALWRPRPPLIIEAFDISNLGESFAVAGMVRFKGGLPDKSAYRRYKIKTVEGQNDFAMMMETVSRRLRRLQDEGSAFPDLLLIDGGKGQLHAAMEALKNFENPPLIASLAKKEEILFSPCLDEPLSLPETHPARRLVERIRDEVHRYAITYHRKVRGKQFTRSALENLPGIGSVRARLLLARFGSMKRLMEAEVSEIAGVRGFSEEAAQRLKEALAAFESGR

SEQ ID NO: 79288 - protein, 157 aa, Unknown
  Obtained from environmental sample
  DOMAIN (31)...(157): Polysaccharide deacetylase
  misc_feature (1)..(157): Xaa is any amino acid
MKNKYTKLFTPLFALILFSSCMSINRNRAELNIPPSVVYLSFDDGPNAKDDTTALLLDVLNKYQIKGIFCLLGGNVEHNPKLVKRMYDEGHCIVNHGYSDKWASGMKPDEFRDNLVRGGVAISAALGHDMYPKLYRPQGGFYSSAQEKIIRDEGFLL

SEQ ID NO: 79289 - protein, 93 aa, Unknown
  Obtained from environmental sample
  misc_feature (1)..(93): Xaa is any amino acid
MLGPIVNAAAVVIFSLIGTFLVKGIPDRIEEIIKKAIGLSIIFLGIKGAFENEKLLLLIMSMVFGGDNRRTNRHRTMDEPIRQVGEKLLVKNT

SEQ ID NO: 79290 - protein, 309 aa, Unknown
  Obtained from environmental sample
  misc_feature (1)..(309): Xaa is any amino acid
APGPGTDPGSGSSPGSGTYTIKINKSGAVQGDSVTFSPASGQVGTEITLNYTIAGSANNNKLVFSGPNAVIAQVDSAGTGTKKYTINAQDAVENYITINAAFIHAAQTIEVPRTTIVDFEADALNKTYESTRGGSAPTVKVVADPVNAGQKSLQISSNNYNQAAVIPFNLPVELQNYKSFSFRFSLVSSTGTNLNNQSIMVYAAKNTTAFKDNGFGNAAGNSGNYPEFEANLLGKAPATAVNFDDTYKNKWTDYTITISNPGAAIKDLKGDIYIAIGINTNNNAVILFDDLKFEMKERLVPNSDPWGGP

SEQ ID NO: 79291 - protein, 185 aa, Unknown
  Obtained from environmental sample
  DOMAIN (1)...(153): Conserved region in glutamate synthase
  misc_feature (1)..(185): Xaa is any amino acid
FDRRGQRHCRSGADIIAIDGFRGGTGAAPTRIRDHVGIPIELALAGVDKRLRDEGIRDNVSIVVGGSIRSSADIVKAVALGADCVYVGTAALLALGCHLCRSCHGGKCNWGIATQVPELVKRLNPEIGYKRLVNLMTAWKHEIKEMMGGMGINSIESLKGNRLMLRGVGLNQKELDILGIKHAGE

SEQ ID NO: 79292 - protein, 118 aa, Unknown
  Obtained from environmental sample
  DOMAIN (3)...(118): Delta-aminolevulinic acid dehydratase
  misc_feature (1)..(118): Xaa is any amino acid
MNTRFFRGRRLRRSPAMRDIMRETRLAAADLIMPYFVADTDDETFRKEIGSMPGQFQLSPAALKKQVAEAVDAGLRSALLFGLPQEQDPQGSEAWNADGIVQRNVRMLKAAWPELVVI

SEQ ID NO: 79293 - protein, 139 aa, Unknown
  Obtained from environmental sample
  DOMAIN (5)...(71): 4'-phosphopantetheinyl transferase superfamily
  misc_feature (1)..(139): Xaa is any amino acid
MITGIGIDAVYIKRMEKWVTNRKLLEKFFHQDEVAYVTSRGKSAAQSLAARFAAQEAFGKALGTGLANITLKDIMVINNGSGRPEIKLFNSARDAFEKTGANRAHISLTHERDSAIAMVVLEKYKMGLRFAKKKVEEDR

SEQ ID NO: 79294 - protein, 161 aa, Unknown
  Obtained from environmental sample
  misc_feature (1)..(161): Xaa is any amino acid
LTIKLNKVENKILELFTGGDGVTSVIAVVLGFLTATILLVAIGKNPSGMYQAILQVVSGFDSRRGTWNVRYIGEWLVSSVPLILCGLSMGFASRSGLFNIGAEGQYIAGLTAAQVIALFFPPVHVLHWIVAVTGAALAGALWGGIAGFLKRGTKFRKLFST

SEQ ID NO: 79295 - protein, 107 aa, Unknown
  Obtained from environmental sample
  misc_feature (1)..(107): Xaa is any amino acid
MSLKAVLEYRLSAWLVAAGQSLTMLFAFISLDLMFRRFGSLAGWSFEETALCFGVTYMAFSLSECFARGFDSFSRMVIQGEFDRVLLRPRSTIIQVLGTKRTLPVSA

SEQ ID NO: 79296 - protein, 191 aa, Unknown
  Obtained from environmental sample
  misc_feature (1)..(191): Xaa is any amino acid
MPVYKKDKLCLAKGTGKLCHIHRPEIIDARNRRCWGDLSIFGNELHITIPEQWLADAKYPVVVDPTVGTTTVGAQISARFTTIENFQETGLQAAIAVNRYYLNQEFVVSTVAIAYLWLTSSSYGLTKPVLYSDYNISPNYRLSKDENNFDFSNFQVPEWRTAEFSVNSTIQSNYIWFGLSSAYFNLDLIMA

SEQ ID NO: 79297 - protein, 325 aa, Unknown
  Obtained from environmental sample
  misc_feature (1)..(325): Xaa is any amino acid
ARPYNIVTGDGGRWVTIDSFKFADFSYDRAYLSGRTGYTLSEEDTQLLADKTADKETRAKILAKTPNFTEISFDNGRSFIKTSKAFAKDVDYRFRLEDSEMPEGYHYIVIRTTMKNGEFAVTRMIVQIDKTFPVIRLISPEEGSKYNEKIAYSASAADDIELVSLTYHLRKGDKAMYAVPGFLQGLYFEGIIPPFVRQIAPDTVPTVFAGGATYTDIGFGLSFYDDNVKIQGQYGIMTQDLREALGGTGPMRFGGNVFGFKILANVYSLPFGSFAGPDFDWLHASFSFGANFSYFEIAQSGEPTWVSALLAQMEFPKVKVPKKEF

SEQ ID NO: 79298 - protein, 304 aa, Unknown
  Obtained from environmental sample
  DOMAIN (2)...(295): 4-alpha-glucanotransferase
  misc_feature (1)..(304): Xaa is any amino acid
MSLLREIYKENESAIEKKAGPKSSLGAWIKDNPWIKPFAVYRRLKEAHEEKSWKEWKDHRDVTPEEIEAMWEDPKLRGDHLFWAWLQEALDTQFGAAAKAVAEAGIVLEGDLPILMNDDSCDVWAHKEIFDQELSAGAPPDMYSPEGQNWGFPLHNWAEQEKDNFAWWKQRLAVAGKYYQAYRIDHVLGFFRIWASSPRDYSSALGRYIPYTPITNSDLKKLGFDKGRIKWISLPHIPTNELLDAMRANHINEADIPAATKKIFSKALEQVGSEELWLFKKKIKGKKILTPLGCTVRPVIPDPR

SEQ ID NO: 79299 - protein, 127 aa, Unknown
  Obtained from environmental sample
  misc_feature (1)..(127): Xaa is any amino acid
RCGHLGSNRIWDALQQRACTTGSNAVGIKAIIAESYSEIFFGNCVSIGIPCFVANHETAEEILDCIEKNPSVEFSVSVKELKAKFGEKSYELKLADGPRGQFLDGSWHARSVLLLNKEKIEALANSL

SEQ ID NO: 79300 - protein, 319 aa, Unknown
  Obtained from environmental sample
  misc_feature (1)..(319): Xaa is any amino acid
MAEGDIENPISPGKMEEFAEYVYEGTFYDSAYTIPANPPIITAGQSLYAKWTAVYTAYRFGGWYLDSLLTIPAEFPMRNVKQDLDMYAKWGGAYTVTFNPNGGTVVPYSDTTNIYGKLASLPRPVREDYIFNGWYTAPDGGMKVGTGTVFSANITIYAQWRAISDSYIITFDPNGGTVSPAVVYTEEGKKLSWLPTPEREHCVFLGWYTTPTGGLIEVTTSTVFDANTTVYARWRGYRIGFWWAYCAEGHSCDPPYPVHNLQHIYAGFDGKLASLPTVPNLEGWYTERRGGTRITTDYVFSSDTIVLENLIVTAETYTI

SEQ ID NO: 79301 - protein, 153 aa, Unknown
  Obtained from environmental sample
  misc_feature (1)..(153): Xaa is any amino acid
MKVLDKNGEKLNLMALNFGPSHNATHGCLRYLTALDGETVIASVGEIGYLHRGFEKMAEQGTWQMVLPYTDRLNYCSAILNNIGYCKAVENMLGVEIPERAKVIRVIVSELSRIFDHFVCVAAACVDLGALSIFGISLIQRRKLGAMGKAHRS

SEQ ID NO: 79302 - protein, 106 aa, Unknown
  Obtained from environmental sample
  DOMAIN (39)...(72): Tetratricopeptide repeat
  misc_feature (1)..(106): Xaa is any amino acid
MDKKLEKALKRGHEHYENGNYDGAIADFTAVLEIKSDHYEALFFRGSAYINKEVYDKAITDFSEAIKLNPSNPNCLHARGYAYYRNHEYDKASCRPSPRPSKGGKK

SEQ ID NO: 79303 - protein, 196 aa, Unknown
  Obtained from environmental sample
  misc_feature (1)..(196): Xaa is any amino acid
MEKNLHHGVHGVTRSFDTTTLYSSVKLRDLRGKFLVEKPLKIFILGIVLFSTVIPLNKNYVTYKEQYYRLYHLHYIQYPDDTMENIYWLEKAMNADFCNPLYALALIEDETQWEKYRYLFNMHINLKLIEQYLFLGNKWNKRKAYFYNAPWKDQSLVNEKPRGALLPRGAPYREAAAEWAGKAQEKRFSVIPVSMR

SEQ ID NO: 79304 - protein, 118 aa, Unknown
  Obtained from environmental sample
  misc_feature (1)..(118): Xaa is any amino acid
FIRAIECGEELPRSLNESFPAPELLFFFDIDPQIALERLQSRPALEIYEHLEFQKKVRERYHALLGWYRDAGVRVEVIDASQSVEEAAAEVWRHVSKMPILGYGEEFTPRSTRSYTEF

SEQ ID NO: 79305 - protein, 278 aa, Unknown
  Obtained from environmental sample
  misc_feature (1)..(278): Xaa is any amino acid
MGSAASAANDPDFLEGAAHLQNPKGDIAGEKAPHTTHPADEATQPETPQEETKPETTKPEPTKPEATKPEATKPETPKPETPKPEATKPEATKPETTKPETTKPETPKPEEKAVYISGGKDSSESSGDKESSKTSGAKDSDESSRDKESSNGYGGKDSSESSRGKASGDNDSAAEENKTTVQTETGSPKQTTEKRTSVDTKSSVKKYDTVILIKSFEQELPYFPLPKNLEVGPYSLIFEAVGRTNTLSLTESDIFYLGNVEFRLNDISMYLPGLSDTR

SEQ ID NO: 79306 - protein, 251 aa, Unknown
  Obtained from environmental sample
  DOMAIN (1)...(106): Transglycosylase
  misc_feature (1)..(251): Xaa is any amino acid
MRAGRIVSGASTITMQLARLLKPRSHGWRGKLPEALDALRLEARLSKKQILELWINGIPFGGNIEGLAAASRARFGRTANGLDDARAVLLAVIPRRPGLYDPARSESAAINAALALAKRCRLNLNEAALTEAAAEAEPGKLADEKTPFHAPHFTDRIAAASAKAEGIRQPVHTTLDLDLQLYAEQRLASELTLLANNRVGNGAVLAIDNANGEVLVYIGSVSWFDDAKGGKIDGVRVRNQPGSCLKPFFTR

SEQ ID NO: 79307 - protein, 327 aa, Unknown
  Obtained from environmental sample
  misc_feature (1)..(327): Xaa is any amino acid
MLNFTPKRVEMTNFDAFMGNSDISLNGSLENFIPYVLKGAVINGNLNLKSNNIDLNEFMKPKDSAEKPAEKPDEKPEKEHSSRSVIEVPKNIDFSVKVDIGKLLFDKLNIANVAGALLVRDGKLQMQNLSMNMLEGSAALSGEYNTRNIKEPSVNFNANLSQIDAASAIASFDILQKILPYPRNYAGKVSSTLTLSGILDEHLSPVLDTVASQGRLQTHNLKIQNSELFSTMANLLKNESLRAPTLNNINIRYEIKDGRMTIEPIQMNIEQANLEITGSQGLDMTLDYRVTRQCLLKARRSGKSSNAIDYRPGYQPAVTLSVADMTA

SEQ ID NO: 79308 - protein, 177 aa, Unknown
  Obtained from environmental sample
  DOMAIN (52)...(156): ATP synthase alpha/beta chain, C terminal domain
  misc_feature (1)..(177): Xaa is any amino acid
VTFRPIFPKRIQVRDGQIFLDSDLFNSGFRPAIDVGLSVSRVGGSAQTKAMRKISGRIRLDLAQYREMAAFAQFGSDLDKATQDKLAQGERLMEVLKQPQLSPYPLVEQIAILFLAVEGYLLDVKTENVSTFVKDFLSHLKNQKADLLKGIADTGVVSKEQEDELRLTVQNFKGARK

SEQ ID NO: 79309 - protein, 212 aa, Unknown
  Obtained from environmental sample
  misc_feature (1)..(212): Xaa is any amino acid
MLQFVPEELRTAEIWVEAFKQGDKWIKEIPEELRTAEMWLEALKHEGNWIREIPKGFKTAEMCIEAVKQNVSAFEYVPKEHRTAKLYLEAVKHHNFSILNIPNELRTAELCFEAAKQDSFAFLEIPEKIRTMEFCLEMLKRNHELFKRYIPPELQKVEFWLGAVKIDENAINLCPDKLRTAEFYNKAVKQNAQALKFVEYIFITTEMCLEAV

SEQ ID NO: 79310 - protein, 99 aa, Unknown
  Obtained from environmental sample
  misc_feature (1)..(99): Xaa is any amino acid
MGKYILSLDQGTTSSRAMLFDREQNITAVEQKEFTQIYPREGWVEHDPMEILSTQYSVMTDIITKANIKTSDIAAIGITTSARRQFFGKKEQGSQFYMR

SEQ ID NO: 79311 - protein, 98 aa, Unknown
  Obtained from environmental sample
  misc_feature (1)..(98): Xaa is any amino acid
VRIIELNPLSLEMARQGNEDIKTGSLLWINGNDLYAITIDNAKNQCYLGRFNTNLELQAKSTARVHPDGGVTIQQGKVLTQREDGSALLLDAADLSGK

SEQ ID NO: 79312 - protein, 316 aa, Unknown
  Obtained from environmental sample
  misc_feature (1)..(316): Xaa is any amino acid
VPEAAVIKAKKKGFLFPLFVNIGAFVLLVSAFILLAYFNSNDEQEMRESRSTLGLTERVLIQEIRQETDRQIREKEDQISDVLLKLQAVDAEYKDLQISVESMTAAQKQRAAVLLVMQEEYQRTLFGLNEERAGILEDSRQREADLRAQAEERAKSFSSLAEPGSSELEVAMEELRKLGTEQERANRAEMEMKGFYSLLNFQIETGRLDEASSTIKSVREFLNAPSLSGIRVFEARKQTHLAAIDAMEKVIATSGGVVVIKDAAQEETIAELTAQNAALERSLAAFTATGADQNKIIAEYSAAISRLESSNADQNK

SEQ ID NO: 79313 - protein, 157 aa, Unknown
  Obtained from environmental sample
  misc_feature (1)..(157): Xaa is any amino acid
LSFAIQCGRKMMKKKNGCVVFTLLLLISLIIPTKITASVDTGLDSQPYIDGYKSGFNGDAILCYEIEGDPQWGAWNAGPNPGSTGSGQPPTSTTPPESPTSTTPPESPTPTTPPESPTPTTPPESPTPTTPPESPTPTDPPVPLVPRPLGDKPGGKT

SEQ ID NO: 79314 - protein, 135 aa, Unknown
  Obtained from environmental sample
  DOMAIN (9)...(114): Type IV leader peptidase family
  misc_feature (1)..(135): Xaa is any amino acid
MISGLAVKILFSIFSFVIAVSDLITGAVPRIAFVFAFPVFLVLCLLSGNFNSALIMLAGVLLAFSIFLLAFVISGKRLGLADVWYSALIGLVLGPWLWYTAMFCACIGGIVYILVSGRRKIPVIPLMALGSVAAS

SEQ ID NO: 79315 - protein, 73 aa, Unknown
  Obtained from environmental sample
  misc_feature (1)..(73): Xaa is any amino acid
MNEIKRPIRFFNTTGPCNPYDHYMLPPEDRLVGAQLHRYIRDKLYWVLHAPRQTGKTTFYETGKELGRSDHAF

SEQ ID NO: 79316 - protein, 331 aa, Unknown
  Obtained from environmental sample
  DOMAIN (7)...(139): DEAD/DEAH box helicase
  misc_feature (1)..(331): Xaa is any amino acid
MKALVPLPIPTKALSQDRQSALNELCGGGEDPASGLNLKIATYDGDTPESLRVSARDTGRIIISNPDMLHTGILPNHPKWIKFFSQLKFVVIDEAHAYRGVLGSHVANVIRRLRRVAAFYGARPQFILCSATIGNPRELAEALIGLPVTLVDKNGAPRGEKRIVLYNPPLVDTVQGIRRSAVTESRRWMIALLRAGIKTIMFAHSRVKTEVAASYVNEDLANIFTDNFCIRVEPYRGGLLPNERREIEKGLRDGTIQGVVSTNALELGIDIGGLDASVVAGFPGSFNSFWQQAGRAGRRGGTSVSVFVATASPIDQLLEYTNARDNPGENL

SEQ ID NO: 79317 - protein, 101 aa, Unknown
  Obtained from environmental sample
  DOMAIN (44)...(77): Tetratricopeptide repeat
  misc_feature (1)..(101): Xaa is any amino acid
VSPRTDSAERCLHSQGEYPKALEWYQEALGIFEKVLEKEHPSIAAIYNNIAVAYDNQGVYLNALEWYQKALAIYEKVLGKDHPDTVATYNNIANVNKKHGI

SEQ ID NO: 79318 - protein, 128 aa, Unknown
  Obtained from environmental sample
  misc_feature (1)..(128): Xaa is any amino acid
DDFSNMIKSIASEGCIITNASITNSIVGIRTIMESGSSLNGVVCMGADFYENEAQKAKNAEERIRNVGIGHGVIIKGAIIDKNVRVGEDCRIGIDDMRRTDGNYGHYYIVDGIIVIPKNTILYPGTVI

SEQ ID NO: 79319 - protein, 245 aa, Unknown
  Obtained from environmental sample
  DOMAIN (60)...(214): Insulinase (Peptidase family M16)
  misc_feature (1)..(245): Xaa is any amino acid
MGKTLKRCFAAFSITLFVISLAISCAGSAKIASSGLGKASDLVPFMENARTGVLPSGLRYYLLENSQPEGRAFLTLAVNAGSVLENEEERGLAHFVEHMAFNGTTRFEKSELINYLRSLGMRFGPEINAYTSFDETVYGIEVPVETGSGGQKVVPAMALAVLDDWCHSVTFDPEEVDKERLVVMEEYRARLGAQERINRQIYPVIFKGSPYADRLPIGIPEVIENAPKERLKGFYKKWHRPENMT

SEQ ID NO: 79320 - protein, 303 aa, Unknown
  Obtained from environmental sample
  misc_feature (1)..(303): Xaa is any amino acid
VLKVTPRGIKYGEHRTLTPKQEKIIQNTIIEKYPDELHFDFALWTREAVMDLILKKFYIAMPIRTVGEYLKRWGYTPQKPVKYAYERKEEKVKEWLEKTYKAIKKRAKRLGAVIFWGDETTIKAEDVRGRGYAPQGRTPVVRRTKRRENISMISAITNQGKVMWKLYEGSVNTERFIEFVKHLIKYRRKKVFLIVDNAKPHTGKKLKQWLETNRGRIELFYLPAYSPDLNPDEHINADVKYGVGSKHPKRNKEELRKATEEHMCLLFLSPEKIIQYFLDPTHSYAAIFFYYIAGSVLEGNGVI

SEQ ID NO: 79321 - protein, 320 aa, Unknown
  Obtained from environmental sample
  DOMAIN (161)...(294): SIS domain
  misc_feature (1)..(320): Xaa is any amino acid
GLGGQYGGAAKYVFERLCRFPSIEVELASEFRYRDAVINEKTLVILISQSGETADTIAALREAKSKGAFTLSIVNVVGSTIAKEADICLFTSAGPEIAVATTKAFSAQLVLLYFLAVWFAVKLGKIPKETEQELLSQISTLPEKTENILKQVDSIQMYAASCIGCKSIFFIGRNIDYAITMEGSLKLKEISYIHSEAYAGGELKHGTISLIEEDTLVVAISNCASLYGKIMSNVEQVISRGAKVLLIGNCPAPKSDEKIFHIALPESQDLFSPSLSVIVLQLFAYYVAANKGLDIDKPRNLAKSVTVNRGGLGSFLLQHL

SEQ ID NO: 79322 - protein, 319 aa, Unknown
  Obtained from environmental sample
  DOMAIN (19)...(101): Fibronectin type III domain
  misc_feature (1)..(319): Xaa is any amino acid
VDGATGLNAGTLIIADGTPSTPSNVSIILKTATSLEIGWTSVPRATSYKVFYMTAGMEELTLAGTVTTNSFTHSGLTLNIDDIYYYYVIAVSDKYGESDYSDFKSIVIDKPVAPNSVRATAESAKNINLQWSVVSGATEYKVFYNTTNSSSGSNEISGTYTSASASLTGFSANKTYYFWVKAVNPFGESDLSPSGSAKTPMESNYNLGLYVYESLQPSQTSNGTGWIGLRWNSISYSSVNGIIKFYIYRSAGAPNNFQLVDSSITSIYLDRNLPPNTTYYYYVTFHWYTSNNDYVGTEYMSEIISYTVRSNTPPAIPPH

SEQ ID NO: 79323 - protein, 93 aa, Unknown
  Obtained from environmental sample
  DOMAIN (6)...(77): ATP synthase alpha/beta family, beta-barrel domain
  misc_feature (1)..(93): Xaa is any amino acid
MNKGYITQIIGPVVDVRFEQGQIPLILNALKVKTSGDGLDRVVTLEVLQHIGDNRVRCVAMSAAEGLSRGLEAEDTGRPISVRVGKGVLGRMF

SEQ ID NO: 79324 - protein, 106 aa, Unknown
  Obtained from environmental sample
  misc_feature (1)..(106): Xaa is any amino acid
KYIKSFKHLVPAVYHHHERFDGEGYPDNIKGTAIPLHARIIAIADTFDAMTSSRPYRKALSFRTALSELERNKGMQFDPDITDIFIEILQESPFYFTRFREPEYHL

SEQ ID NO: 79325 - protein, 256 aa, Unknown
  Obtained from environmental sample
  misc_feature (1)..(256): Xaa is any amino acid
MHYKNFITATYAPAGYLNDNSLEQIKADIEKVGRYIRLDKIYLETYRSEILIEREKMEAVKTLFTEKGYTVSGGITTTVKRTLMGSMCFTDPENRKRLGEIAAYTAELFDELILDDFYFTNCRCESCIKAKGERDWAAFRLALMNDISENVIIKNAKAANPKVNCIIKYPNWYDSFQANGYNLEDESKMFDMIYTGTETRDPHYTHQNLPRYLSFFLPRLMEHVKPGKNGGGWYDLLNVRWKTMTAGDSRNQWGKI

SEQ ID NO: 79326 - protein, 322 aa, Unknown
  Obtained from environmental sample
  DOMAIN (145)...(214): RNA polymerase Rpb2, domain 3
  misc_feature (1)..(322): Xaa is any amino acid
YGAGKSFQQLFFDDRRYEIGDFGRYRLNSKVYGNSEQPFAVPSADTMTLTKEDFISVIRYMIGLYNGEEGYSLDDIDHLGNRRIRSVGELVANQISIGITRILRSVRENFSSKERDGVLTPTDLINSRTVNSMVAAFFGSSQLSQFMDQINPLSELTNKRRISALGPGGLSRDRAGLEVRDVHHSHYGRLCPIETPEGANIGLINSLATFSIVNHFGFIETPYRIVGLLPFQDDAGKDYEFPESKWYAGIMKSFFGDSNQQLLTQTEIGKNDVKIAREKLSGKQLEHFDLFCNKSFEFDFGDSITIIKMACCGTRANLSSSK

SEQ ID NO: 79327 - protein, 69 aa, Unknown
  Obtained from environmental sample
  misc_feature (1)..(69): Xaa is any amino acid
MSGIAKKRGAADAPFRQIDRETVYFGFTTAEDGSLPAVQAAHALIAAGITGDDIGALTHSMLEDGSWKG

SEQ ID NO: 79328 - protein, 285 aa, Unknown
  Obtained from environmental sample
  DOMAIN (25)...(140): Response regulator receiver domain
  misc_feature (1)..(285): Xaa is any amino acid
IHRPDEARGDQKRPLGGSRREFNNIRILAVDDDPDILEYFDETPLILGVHCDTAANGDEALDLVGRRGAYHICFVDWKMPGMDGIQLAHELKTRKASVNSFVIMISAAEWSVIEEEAKKAGVDKFMSKPLFQSTIAGIINEYIGDGERGEKPEDDTQSALDSVFTGRRILLAEDVEINREIVMALLEPTQLQIDCAESGAEAVRLFTQAPDKYDLIFMDVQMPGMDGYEATQRIRALNTPRAITIPIVAMTANVFQEDIEKCLNAGMNNHIGKPLNFDEVMEKSA

SEQ ID NO: 79329 - protein, 61 aa, Unknown
  Obtained from environmental sample
  DOMAIN (2)...(60): ThiS family
  misc_feature (1)..(61): Xaa is any amino acid
MTERQSDGLTIAQLVELEKVETPMYVTVSLNEAFVESGDFAKTTLHDGDNVEFLYFMGGGW

SEQ ID NO: 79330 - protein, 67 aa, Unknown
  Obtained from environmental sample
  misc_feature (1)..(67): Xaa is any amino acid
DAYNATILNEGMDCLLEKLGVLETEIFISHLWREPFDYTEWQKKHYAAISVNELNQRAVKYAKKHPI

SEQ ID NO: 79331 - protein, 314 aa, Unknown
  Obtained from environmental sample
  DOMAIN (3)...(314): tRNA synthetases class I (K)
  misc_feature (1)..(314): Xaa is any amino acid
VSRGANYRTSKYADGIRKALENREALKTILDKFRDEDHKIQGEWWPVSVFCEKCNRDETNIDGWDGQWGLSYTCELCGNKETVDLRKTGAVKLVWRVDWPMRWEYEKVDFEPAGKDHHSQGGSFDTARHVCKDVYGWDAPVTFRYDFIGIKGTPGKMSSSKGKVIDLPDVLRVYTPEIARYLFAGTKPNVEFTISFDLDVIKIYEDYDKTERIAWKIESAKDEGTYQWEKRIYELSQVATDSAGKPAMPSVKPYQVPFRHFCNLIQIADGDVEKALAGLGREAVPPEPEQLPALRRRAVCAKYWGRNAPRARDK

SEQ ID NO: 79332 - protein, 251 aa, Unknown
  Obtained from environmental sample
  DOMAIN (1)...(219): Penicillin binding protein transpeptidase domain
  misc_feature (1)..(251): Xaa is any amino acid
MLSCNIGAFHAASMQNDQGFYQSMLDFGFGKRTGAWRPEMEISGFLDKPGSRTWSSRTKQSIAFGQEIAVSALQVLQAAGAIANDGVLVPPKIVSRIVSADGSTEKIWDNGDNQNRRIISPETARKMRQYMADTASVMGTGWRGSIGDINIAIKTGTAQYRDPSSRRGSGYSDTDFISSCIALLPAESPSLVLYVAIIKPRGETLGGRIAAPAIKESRRRNLSLPRHPARQNPLVVPSGHHRHWGKSRCRP

SEQ ID NO: 79333 - protein, 290 aa, Unknown
  Obtained from environmental sample
  DOMAIN (1)...(290): FemAB family
  misc_feature (1)..(290): Xaa is any amino acid
LQKNETTQTLPLWALCRRFAFPLGFGFSFAYAPWGGIPDFFTADERSKALLELAKKLKQFLSKDTAFIRFEPPWHYNDGDENIKNELTMLHSVGFQKAAATVQPPDTVIINLAPSHEEMLASMKPKWRYNVSLAEKKGVKVNVCGAQDIEIFYNLLKETSARDGIAVHGINYYRTLFEVCESQNKKDQFIRLYTAEHEGDIIAAIVVLFRGKDATYLYGASSNEKRNLMSPYALQWKAMKDAKEAGCINYDLFGIPPNEDPNHPMAGLYRFKTGFGGQIIHRTGSWARPI

SEQ ID NO: 79334 - protein, 172 aa, Unknown
  Obtained from environmental sample
  misc_feature (1)..(172): Xaa is any amino acid
MRESSQDRSQTRYEDDITVKVETVVRALTGVEVTIRDPETGEECPDEIHGEFCCRGYNTMKGYYKLPEDTDQCIDEKGWLHSGDRGVKDKDGNFKVTGRIKDMIIRGGENISPKEPEDFLYTMPGIKDVQVVGMHSETYGEEVGAYVKNPPEVRGIVQRGRAGTKAVYKLGN

SEQ ID NO: 79335 - protein, 68 aa, Unknown
  Obtained from environmental sample
  misc_feature (1)..(68): Xaa is any amino acid
MSEYILEIKNLTKEFPGVKALDNVSLKVKKGEIHSLCGENGAGKSTLMSCISGVYRETVTTEKFFTGT

SEQ ID NO: 79336 - protein, 325 aa, Unknown
  Obtained from environmental sample
  misc_feature (1)..(325): Xaa is any amino acid
AEHVKIRYLEKIASVWSTAFQEYITLDAQDAGVNYALISVKTGNDLFFGRIINDSILSIPDSMSFVFKLSMFLTLFLTLYFLTNFKPHPVTLVQNRIKTLRTNLFEELYIKKTGQDRVKWILELEQRRDEIRFELKSRLKIRRSLEKKIDEIIDKAWDELLAVMKSGYDIASLEEIVKTRAVKVEKPKAEGPKTVWDELKELEEIDEAEPIEEIDTIEEAESVDETDEIEEIEEAEELDSVQEEFETLEDADEIEAILTGTRRVTAAEEIKSYTEIQISKGLLKAANEILTKIKKEESKASAQAQGRNRKGLLKARCSADLIIVG

SEQ ID NO: 79337 - protein, 101 aa, Unknown
  Obtained from environmental sample
  misc_feature (1)..(101): Xaa is any amino acid
MEQDSNRLMKEAAGKAAVDALVKSGMKLGLGTGSTAIHAVRRVGELLAHGTLRDISAFATSFQTEIECENLGYLLLAEFKRLAGGLDLTSTAAMKLIPKPL

SEQ ID NO: 79338 - protein, 270 aa, Unknown
  Obtained from environmental sample
  misc_feature (1)..(270): Xaa is any amino acid
VYGGWLSPKLFSIPQSGFINYHPGPLPFLKGIEPDTFIILEGWRRAWGTVHRVSPEFDSGDIIAQTKTIRVSKYATPVQILHTLTDLGIAAIIQAIKNIYNNISIHHGSPRGFTKPEYISDGTSRATIARARRESFIQWENDTNEIINRKLRAFCGQDIHIRLKALIGGKLHFVYDLETYCTGKKYIRSFQAGTLLGYYLCHGKYYRKPIIKTIDGAVILLAEEENGRAESDIPFPKENILAPRKKLYATNRANMKKSILNHQKLCSSEE

SEQ ID NO: 79339 - protein, 193 aa, Unknown
  Obtained from environmental sample
  DOMAIN (15)...(86): Helicase conserved C-terminal domain
  misc_feature (1)..(193): Xaa is any amino acid
LNQTAEKDGLLRGPDCFSLATTVPFRKDVRREVETALASGEVSCVVAPGSLELGIDIGNVDEVILAGSPISTAVALQRVGRSGHAVGMTSRGWLMPFHGIDLLQAAALSGAVDEREIEGTESVANPLAVLAQIIKKKCTETDQNEDELFQTIRGFDVCRNLYREGFDGVCGKAFRQLGRCAGWGTQAGCGPGR

SEQ ID NO: 79340 - protein, 73 aa, Unknown
  Obtained from environmental sample
  misc_feature (1)..(73): Xaa is any amino acid
MYKVTLTKKAEKNRKSLPPVVSKKFVLLLMELKMLGPVRTNWQNYSKLGINKHHCHINYNWVACWEETKIGVK

SEQ ID NO: 79341 - protein, 178 aa, Unknown
  Obtained from environmental sample
  misc_feature (1)..(178): Xaa is any amino acid
VDLVQLSPYLGMDSIEPWLQWADKAGKGAFVIMRTSNKGRRDLEGLTINDESYSPLRLYNVVGNKLSELAASRIGAHGYGAFGAVVGADPQTEEERKEAAAIRAGRPNLFFIIPGYGAQGGAAQDAALLLREGNGGVVNASRSILKAWQNSHNGREAENPIAAQAARAAATKKRDSAS

SEQ ID NO: 79342 - protein, 302 aa, Unknown
  Obtained from environmental sample
  DOMAIN (1)...(301): Bacterial DNA polymerase III alpha subunit
  misc_feature (1)..(302): Xaa is any amino acid
MGKLIDYLVEKYGWNAVCRTVRFSNMTARYVVGRVARVNGFSRSEIDTISALITDDMLKTAAMTASIADMSVLDMSILRNSAVLEGLIHDNSPYKNIFRHAAVLENLKHFPFTLSDCVIIAPGEVVNWAPIFKGPFPYSYQINTQFDKNHIETIGLVKMNFLGLRNLTIVQDTQRLIKKNHGIDIDLCNLSDDDQMALDLFGNGETTGIFQFEADAIKDYLRKLKPSGMEDLMAMAALYRPKNKDHIDMFIDRKHGMEKIEYLHPCLEKILGVTYGVIVYQEQVMRIAQVMENYDGQLAHNP

SEQ ID NO: 79343 - protein, 308 aa, Unknown
  Obtained from environmental sample
  DOMAIN (172)...(208): WD domain, G-beta repeat
  misc_feature (1)..(308): Xaa is any amino acid
EPFLFSGYALAFSPDGKQVFSGDRDRDNPLKLWDVVSGREIRTFPGKYSTPTFSLDGKQFLLRGYPEKTIELWDVASGREIRTFSGRIRDNNFVVFSSDGTKVLSDFGDKMMMLWDLTNGRENRTFSGFSGPIISAAFSRDGKQAISYSGYTEYGEVDIPHYTIKLWDVASGREIRTFSDVDYDSSVAISPDGKQILSSSYNKIKLWDTASGWELKTFSGHTNRVRSVAFSPDGKQIVSGSKDNTVKLWDTASGRELRTFSRGSAYVAFNPDGKQILSCFDDDIVTLWDVASGRELRTFRPRPILYLA

SEQ ID NO: 79344 - protein, 210 aa, Unknown
  Obtained from environmental sample
  DOMAIN (15)...(191): yrdC domain
  misc_feature (1)..(210): Xaa is any amino acid
MPLLKVSDESIRQAAALLVQGGLAAFPTETVYGLGGDAFNPLALARIFEVKGRPRFDPLIVHIAAFETLEKIADLSLLDTPGRKNLAALTKQLWPGPLTLILPKQKAVPDLATSGLPTVAVRFPAHDAARRLIESSTGAVAAPSANPFGYLSPHQGGTRSWKCSAEKVDIILEGRPPVSLAWNPRCWTSAGEQPHILPSWRGDPKNPLKR

SEQ ID NO: 79345 - protein, 165 aa, Unknown
  Obtained from environmental sample
  DOMAIN (3)...(164): Glycosyl hydrolase family 1
  misc_feature (1)..(165): Xaa is any amino acid
MGFRDDFIWGVASASYQVEGAAYEDGKGLSVWDMFCKQPGRIVDGSSGDVACDHYHRYKEDIAIMKELGAKAYRFSISWPRVIPDGDGQVNEQGLDFYERLTDSLLEAGIAPCATLFHCDYPYDLFPQGGWMNPESPNGFLIYPSSLQRLKVNSHCVTFTKPVFL

SEQ ID NO: 79346 - protein, 293 aa, Unknown
  Obtained from environmental sample
  misc_feature (1)..(293): Xaa is any amino acid
MNSMNAIPWQRGKHALFQVMQYWKARRLMTERDSRYIGGPGSTETGQYASAFGMENGQANITTTTDVADAMAYLTGPDAKKDRYVHPVPRNIDGKDTWYFRIMVPIINRRNGEVVGGVGLLCVIDAIQPTVENTIKTREDIAAAVIYSSNGFIMGNYVPERVGKQLLDVDTIYGEHIQAANQAVQKGEDFACSSYSSVLKSNVEITLASFPMGSSGKSWSVMIAATQSYILREVNELTIFTIIIAAIAIVIAVVIVYVVLHTTTQPIVRVADTLKDISEGEGDVTSENNSRAA

SEQ ID NO: 79347 - protein, 73 aa, Unknown
  Obtained from environmental sample
  misc_feature (1)..(73): Xaa is any amino acid
AGGFVQSYGSSLSGDFLDSLIFVSIACATGVFGWNLFVSLVLTNYIVKCLIEALVLPLTYTVVRMLKKGEGLE

SEQ ID NO: 79348 - protein, 108 aa, Unknown
  Obtained from environmental sample
  DOMAIN (20)...(105): FR47-like protein
  misc_feature (1)..(108): Xaa is any amino acid
FFRLSRAGGNLPYNRQGQILAAELDGKMVGKINVNAVSFTRYQVGGVYVSPDFRGMGIASRMATEFITSLINEGMGITLFVKKNNIFARRLYDSIGFKLKSDYRIAYY

SEQ ID NO: 79349 - protein, 197 aa, Unknown
  Obtained from environmental sample
  DOMAIN (5)...(191): PHP domain
  misc_feature (1)..(197): Xaa is any amino acid
VTYLYETHLHTAGVSKCAVSRGADYIAGYKDKGYSGIIVTDHFYNANCALSRSLEWKEWVNRFYDGYEEARNEGERLGLDVFFGWEETFDGCDDYLVYGLDKEWLLAHPEVRKWTRGEQYSAVKAAGGCVVQAHPFRQRYYIKRVVLSTGCVDGVEIANGGNDAEADALAYRYAKKLNKPMLAGSDIHDASMIYTGE

SEQ ID NO: 79350 - protein, 346 aa, Unknown
  Obtained from environmental sample
  DOMAIN (37)...(315): Methyl-accepting chemotaxis protein (MCP) signaling domain
  misc_feature (1)..(346): Xaa is any amino acid
GFNTDQIGRGVVKIGGELSDGAHDLSAIAEATNASMEEVRATITQVTTASEANGTALEQSNAGIEEMSAGANTMAKSATDSAAFISQTTEASNKAVQTVHNVIEGMRDVDKNAKESEAKIRQLVSSVDNVSSFVSVITGIADQTNLLALNAAIEAARAGEVGRGFAVVAEEVRKLAEESARAAQNVNGIIQELQTGAHESIGATTEAGRLLTSTLDHAEHALRELNDALSQMQKANDSIQNIAAVAEEQAASSKEMASSLDSATKASAEVVGIILGINRSADTTTRVMEGVAKHAESMAIHSHTLSELLSTFQLAQHDAPVNRKNVKRQPGSPPGAPPPRPAPLAS

SEQ ID NO: 79351 - protein, 55 aa, Unknown
  Obtained from environmental sample
  misc_feature (1)..(55): Xaa is any amino acid
MFTEAPDKYDLIFMDIQMPEMDGYEATRRIRALDVSKAKTVPIVAMTAHVFRDGC

SEQ ID NO: 79352 - protein, 216 aa, Unknown
  Obtained from environmental sample
  misc_feature (1)..(216): Xaa is any amino acid
MSDIISELVGDDRSSLEKKERVNRARKDFGFFCQYYLPDYFFTDPADYQKILYNVADTRSLSEDTSNSLKPFINERYHSLLKPTEKLARAMFVEPREHGKTVRWSFAYVLWSIVTGKNRYTLLIGPSGDAARENLINIKIELEEDELLLNDFTDLKCNVWRDDRIELKNDTCISAKAPGLPCTAHGSASTVPILSIMTMCLKMMQWTPPHHAIKLH

SEQ ID NO: 79353 - protein, 321 aa, Unknown
  Obtained from environmental sample
  DOMAIN (115)...(183): GHMP kinases N terminal domain
  misc_feature (1)..(321): Xaa is any amino acid
MIFVYKNIHDLYPRVFMIIRSKAPLRLGLAGGGTDIADYYNRFGGNVLNATVDMYAHCTIEPDDSGKVEFIAADLGKQEEYKAEEKLPVSSALPLHCGIYNRIVSDFVKKPLSFKMTTYSDAPAGSGLGSSSTMVVAIIKGFEEWLNLPLGEYDIAALACKIEREDIGLAGGKQDQYAATFGGFNFMEFYENERVIVNPLRLKRWIRNELEASLILFYTGVSRESANIINEQIRHTKKGDVKSIESMHEMKRQSVYMKEALLKGDFKGFSDCLLNGWLAKKNAAASISNPFLDELYQYAIDNGAESAKIQVAGSADSEPRK

SEQ ID NO: 79354 - protein, 339 aa, Unknown
  Obtained from environmental sample
  DOMAIN (87)...(152): His Kinase A (phosphoacceptor) domain
  misc_feature (1)..(339): Xaa is any amino acid
VCHDRLAEPDTNGYDAAKKLKGNHKFKETPIIFLTSRDDAKSEMEGLNIGAVDYIRKPFVGPLLLRRIQTHLSLIEHQIEAEKASRAKGEFLSHMSHEIRTPLNAIIGMINIAVNTDDVEKIKYCLQRAGSASKHLLNIINDILDMSKIEAHKFELSYSEFNFEKMLMDIINVTNVRAEEKNLNFAVILNTNVPSFVIGDDLRFSQVIMNLLNNAIKFTPENGKVVLRVEKIEETGDEITLKTEVADSGIGMTEEQQKRLFTSYVQADSSITKNFGGTGLGLVISKQIVELMNGEIWIESKPNKGSKFIFTSKVKKGTGHRRSAVIRKDQQGRTENSRG

SEQ ID NO: 79355 - protein, 335 aa, Unknown
  Obtained from environmental sample
  DOMAIN (1)...(300): eubacterial secY protein
  misc_feature (1)..(335): Xaa is any amino acid
MGTVIVCMFESLAVTQYAQVISRTWDNLLYISFFQFSVLAILTVTTGTMFLMWIGEQITKRGIGNGVSLLIYAGIVARLPQAVWELIETMRRGDLNPVFVIIVLLMFVTVITLVVFEQQGQRKIPVNYAKRVVGRKMYGAQNTYIPFKINPSGVIPVIFASSILTFPLQIAQTVGGNVPWLAAVATVLSPRGTLYNILYVLLIVFFAYFYTQVSLNPIEIAKQIRENGGSIPGIRTERIEEYLTKILNRIVLPGSLYLALIAVIPTFIQWAFKFPSSISYLMGGTSLLILVGVDLDTMSQIEGLLKMHHHEGLVKPWTTERTELKSSRRSSPGKK

SEQ ID NO: 79356 - protein, 261 aa, Unknown
  Obtained from environmental sample
  DOMAIN (90)...(245): Peptidase family S49
  misc_feature (1)..(261): Xaa is any amino acid
MKLNAKLLVLGAYLLMARPLFAQNIFLELNLNNQKTQNITRSIRPKPALDLFRVIEQAGNDRKIAGIILNISSCQLGQETLWELRNALEKFKAKGKKVCVFISNANLDLYCLATVGDKIVMDDQGVLMLLGYAWGRGYVRHSLEKLGIGVRELRYLKFKSAAETYTRDSMSDADRAQYGEILDDIMGITRDTVTKARSWTNGEFDSIINNEFMFSAQSALAKGLVDRRGRKDAVIEAVKEFQALKRNIFPVRRYGIKLNGE

SEQ ID NO: 79357 - protein, 175 aa, Unknown
  Obtained from environmental sample
  misc_feature (1)..(175): Xaa is any amino acid
MVFAAGRQAGAYTAVPTLTWWFYGSQPNNLSDALRVISDYTQSKIGVRLDIKVVGWADSQQRMRTIVNSGEYYDIMFIDLTDYNNFVNLGAFADITNLLGTTAPQLQRFIPAGLWDGVKVNGKIYAVPTYKDSSKTRFFVWDDTYVKRYNIDIPRVHTLCRHSTAALQEYTKRSH

SEQ ID NO: 79358 - protein, 163 aa, Unknown
  Obtained from environmental sample
  misc_feature (1)..(163): Xaa is any amino acid
MIKPVSVAALPVAENFIIQKNRIENNAGPDCKRVCVVTGTHGDELEGQYVCARLAKILSEKKQKLSGIVDIYPALNPLGIDSVTRGFPMFDLDMNRIFPGSPSGLLAEAAAYDVIYDIDGADMCIDVHSSNIFLREIPQVRVSEQTAAALLPYAKMLNVELAS

SEQ ID NO: 79359 - protein, 95 aa, Unknown
  Obtained from environmental sample
  misc_feature (1)..(95): Xaa is any amino acid
MEMSITTAYEINRLMSRYGVKFGIYKNGEFIEQLFPYDAIPRIISHAEYLLLNNGLIQRVNALNCFLRDIYSGAKIVSDKGVPKKFVYNSKGKPT

SEQ ID NO: 79360 - protein, 213 aa, Unknown
  Obtained from environmental sample
  misc_feature (1)..(213): Xaa is any amino acid
MKVGKEKAGEHRWFWTRKSPTGSYSNGRKNPFPKWKRKLAELTNKLNALNERIKNFADRLPGTGKGEGGKNSKLNFELAKEELEKIEGIPDEHSLSCISGYVPAEDKGKLKVAAAENNWAQAARDPGPDDYVPTKLRNNPLASLINPLTGFLEVTKGYNESDISGWFMLFFATYFGMLLKNALFRRLRPYRREIRIFKGSLEGRQAKLIIKKR

SEQ ID NO: 79361 - protein, 287 aa, Unknown
  Obtained from environmental sample
  DOMAIN (1)...(109): RNA polymerase Rpb1, domain 3
  misc_feature (1)..(287): Xaa is any amino acid
VERKALDREAAIRVKPPKLPIWDKAGNLAKPADDGTIITSAGRLIFNEELPEDLPFINYELKDKELRTLVEYVFKEKGSWTTVQMLDAIKSTGYRYATVFGATIGVDDIVVPREKAEMIDNANKEVESIQKQWRQGQITNEERYNKVVQVWTKTNEDLTNITMKTLESDRDGFNSIYMMANSGARGSRNQIRQLAGMRGLMAKPSGDIIELPIRSNFKEGLSVIEFFISTNGARKGLADTALKTAEAGYLTRRLVDIAQDMVVNEDDWEQLTVLHIRLVPNSDPWRN

SEQ ID NO: 79362 - protein, 74 aa, Unknown
  Obtained from environmental sample
  misc_feature (1)..(74): Xaa is any amino acid
VEWMYCAKEWSRKDGAAGIDGVTVAEYEVGLWEKLQKLVELLKSGDYLAPPVKRVYIPKAGRETEKRPHRDTDV

SEQ ID NO: 79363 - protein, 327 aa, Unknown
  Obtained from environmental sample
  misc_feature (1)..(327): Xaa is any amino acid
MLRLGDNVVWQVQSIEDYLQVLRPYIHQAKKDRRRLVYFQFGDHEPLMKESEPSILYQLDTSEGFELFASKVHTIIEREGLEAFYVFDCLSDLLKSWCSDMMVGNFFRITCPFLYQLDTIAYFALIRGAHTHGTIARIRETTQLLMDVYNVDGKFYIHPLKVWERYSPTMFFPHLIEGGEAVSITSSADTATLFSRVSRSSQPRDYWNITMDHARTILGGDNNSQEGMKKLLIGWIIGKEARITELAVKHFTLGDILDIAEREIGTGFIGGKSVGMLLARKILEKESGDAARNQFEPHDSYYLGSDIFYTYMYKSGWWLGHQSGGKN

SEQ ID NO: 79364 - protein, 105 aa, Unknown
  Obtained from environmental sample
  DOMAIN (13)...(67): Helix-turn-helix
  misc_feature (1)..(105): Xaa is any amino acid
FGHSVHWGAGISVSQKAAGLGITVYKLAREIKVQQTAISQIIKGSRKITVDMALRLSRYFGNSAQFWLNLQNYYDFESEMEKKEYLLNEIGPYNLHAAEKAPVYA

SEQ ID NO: 79365 - protein, 255 aa, Unknown
  Obtained from environmental sample
  DOMAIN (101)...(254): Magnesium chelatase, subunit ChlI
  misc_feature (1)..(255): Xaa is any amino acid
MGELELSGKIRPVRGVLAAIAAGLSEGISEFIVPAENAGEAAILAQKGARFTAAESLQEAVNALFIREEQGALPVSFDTPPDESSVIADTGGAFGIFPDGDFSEVRGQAVYKRALEIAAAGGHNVLVFGPPGAGKTMLARRLTSIMAPLTPDEAVEVTRLYSLAGPFFNNGGRYAQKFIDRLITNAPFRAPHHSASAEGILGGGRNPRPGEISLAHFGVLFLDEAPEFRINVLQALREPRKTGNQTRPICHGPPP

SEQ ID NO: 79366 - protein, 300 aa, Unknown
  Obtained from environmental sample
  DOMAIN (21)...(123): Histidine kinase-, DNA gyrase B-, and HSP90-like ATPase
  misc_feature (1)..(300): Xaa is any amino acid
LPFQGLKGAEAGDLNRCSTTFFPTPIKDTNSGFVDGHISSVREGDQIKVVSTIRDSGIGIHKDVQDKLFKDYYQANLKANYYLEGTGLGLSITKNLVKLMNGTIKFESEYRKGSSFTVEFYQDIVNDDIIGEEAAEHLSRFRFSAQRRSRNQRLLRADMSYATVLIVDDVVSNLDVARGMLKPYKIGVECVTSGKEAINRVLDGKVRYDAIFMDHMMPGMDGIQTTRIIREEISNDYAKTVPIIALTANALLGNDALFLENGFQAYLSKPIDIIRLDQILNQWVRDKQKEKELKPQEIDR

SEQ ID NO: 79367 - protein, 327 aa, Unknown
  Obtained from environmental sample
  DOMAIN (35)...(327): Beta-eliminating lyase
  misc_feature (1)..(327): Xaa is any amino acid
EDNSKWLSREERFCENLKRPRYNLFNLGSDDVYIDLLTGSGTNAMSQEQWAGVMVGDEASAGGRSYFKLVAAGQDIFGYKYIQPVHQGRAAEKVIYGLLLEKGKYSISNMHFDTTRAHVELAGGRAIDCNIKEAEDPAARIPFKGNMDVKRLQELINEHGAKNIGVVIMTITNNSAGGQPVSVANIRETSEICKKNGIKLCIDAARFAENAYFIKRREEGYANKSIKEIVREVFSYGDLFALSAKKDAIINMGGLVGVKEDAALFQGCKERTISFEGFISYGGLSGRDLEALAIGLYEGINEDFLEYRIGQVEYLASLSADLIHSDP

SEQ ID NO: 79368 - protein, 141 aa, Unknown
  Obtained from environmental sample
  misc_feature (1)..(141): Xaa is any amino acid
MHDILVIGAGIAGLTVALKAAESGKSVLLLTKGASPDGSTNYAQGGIASVTSPEDSFESHIADTLEAGDGLCKKRQVEILTKNAPKAIEQLLQWGVNFTTSKDDEKAFDLHLEGGHSFRRNLHTADLPGKKYEGFARRVKH

SEQ ID NO: 79369 - protein, 323 aa, Unknown
  Obtained from environmental sample
  DOMAIN (9)...(224): Amino acid kinase family
  misc_feature (1)..(323): Xaa is any amino acid
MFFKIDYPVTEDRGFPGLVKDLALLAKTGCKVIIVPGVRENIDAVLKQHDINSSYASTQDSPVRVTTSEGISYVEMAAFHVASRIMTFLSGSRVDAIIGNFVRARGLGVINGIDAEYTGVVDKIYTDSLKRVLELGMVPILPCIGWSPSGKPYNVPSDEIALAVSKALGAIKLFIITATEGLNITRLTPKETEDLINTGSNFMRELKLALKASQEGVHRVHIIDGREEGAVLKEIYSNLGAGTMIYTDEYDSIRPLHSKDLPDILRLMEPFMQKGILIRRNPEQIQEKKTDYSVLEIDGSIRACGALHEWGESLVPMLIIDPP

SEQ ID NO: 79370 - protein, 337 aa, Unknown
  Obtained from environmental sample
  DOMAIN (6)...(337): Hsp90 protein
  misc_feature (1)..(337): Xaa is any amino acid
RAPGGTESAEIYLTYDEKEWDDKGEEKGSKTKTDRINSGTAIWRRAKTELKDEDYNEFYKQIGHDSEPPLHYIHTKAEGSLEYSTLFYIPKKAPFDLYNVDYKPGVKLYVKRVFITDDDKELMPVWLRFVRGVIDSEDLPLNVSREILQQNKVLINIKNASVKKLLSEFKQMADNAVSGGDEAKEKWETFVSEFNRPLKEGLYQDFANREAIMELVRFKSTTIEGQDGKPGWTSFADYVSRMKSDQKHIYYITGGDEKTLRSSPLLEAYRAKEIEVLIMDDDIDDIVIPTLHSYRKETVGTDGKTETQTWELKAVNRGGADEELGEKQDKLPKRSKT

SEQ ID NO: 79371 - protein, 92 aa, Unknown
  Obtained from environmental sample
  DOMAIN (8)...(85): Chorismate mutase type II
  misc_feature (1)..(92): Xaa is any amino acid
MDIDKLNEEMDSVDDQLLNLFERRMELAQDIGRQKKELSQPVADSERERKTLYRLCEKAHPELAGYVKVLFSSLFEIGRNRQKAQSPLRFNG

SEQ ID NO: 79372 - protein, 205 aa, Unknown
  Obtained from environmental sample
  misc_feature (1)..(205): Xaa is any amino acid
IDIVAQPREDAVSGRLRDGDSYRNSFPHLYSSDAGEYGLAYSFPGAAKETTLPSIDKIHGDTTSGEGASIKEKFHKVLDRMKITKQERDELLARIERGLVLNEAQLESTSVRYEKLEARGLDYTGKTTIAKQAIETGSLLEITWPGRDGEPNSTIGIPQTIEKKEGENILVLRTSGNSESAARVLKIPIGKISLLRRIKQSIFGE

SEQ ID NO: 79373 - protein, 314 aa, Unknown
  Obtained from environmental sample
  misc_feature (1)..(314): Xaa is any amino acid
VIASFCQKKSKTIAAFIGEQDHKVIAATALLNEPETGDLERFFAGEMTVAELHAVIINLEERLILYRFRDEKCQRLALNPVLEEVLSPFIADTRPLFRSFPIGNGFPLESLDETEAAPQTACQPYYISDPRIMAALFTFIIEEEELFKAEAGTEVKRSSLQETSIPELRKKVLDSAKKTFPDLDFELAVNNLIQMGLFRHTDRYLTPNNEKITEYSELSNAERQEYWTAGLYICFLETEKKAHNGHSSMDNFAFPFSWNRLRLIASFIHRFRSLLDPGRIYPELTLRRLWELLETQTEGMARLWPSFLAVMEKT

SEQ ID NO: 79374 - protein, 297 aa, Unknown
  Obtained from environmental sample
  DOMAIN (14)...(151): ATPase family associated with various cellular activities (AAA)
  misc_feature (1)..(297): Xaa is any amino acid
MVDRLLIGLLTRGHILLEGVPGLAKTLAISTLAKAVDTGFKRIQFTPDLLPADIVGTMVYNQKSGEFVPKKGPIFSNIVLADEINRAPAKVQSALLEAMQECQVTIGDECYKLEEPFLVLATQNPIEQEGTYPLPEAQVDRFMLKLKIVYPSRDEEKEILKRMAAGPVPEVSRVIKVDKLLSARKLVSEIYMDSKVEEYIVNIVFATREPETVGLSDMRSLISYGASPRATLFLTRAARAHAFIRGRGYVTPEDIKSVGMDILRHTVITTYEGETENVTSEQIVQKIFDSLESAVRG

SEQ ID NO: 79375 - protein, 146 aa, Unknown
  Obtained from environmental sample
  misc_feature (1)..(146): Xaa is any amino acid
MKIEVYSPTIRRKEMDAVLTAMVEDQIGPGERARLLLQIAKEQIRFDYALALRSPATALQLALKALELKEGDGVLLSALSPRYYAQTLADLRLTPLFCDVSYTLPCISRESVEKAIASKPDGVEPVARSFTYSWARAGRGVCRRTW

SEQ ID NO: 79376 - protein, 121 aa, Unknown
  Obtained from environmental sample
  misc_feature (1)..(121): Xaa is any amino acid
MAEPAYILLAETGVSDAHEVIRKITLAAEKENISFAAALAKEPDTLKKIGGKLAELGLIAAKAEDLKETLSFFENPERYCGLAAKKARTLAEKYKALMGGENVNESILRRCLCARHNRGKK

SEQ ID NO: 79377 - protein, 327 aa, Unknown
  Obtained from environmental sample
  misc_feature (1)..(327): Xaa is any amino acid
ISGLSARDVMSRIGASKNGKTGELFSLINRQTERTIKTFKEKWDISKIEKLAVAGNTTMQHLFLNVDPSGMGELPFTPVFLEERSMKGEALSLSVEEVIVLPSIAAFIGADITAGLTVLDILNIPGASFFIDIGTNGEMALCNQGTLYCCSTAAGPAFEGAEISCGVGGIKGAISGVKLAEDKTAGLSVTTIGNAPPVGICGSGLVDAVAVMLKQGIIDETGSMDTPNNEFNLADGVSLTGRDIRQFQLAKSAILSGIKILCKNAGLSPSEIKNVFVAGGFGFYIHKQNAVNAGIFPGEFLDQLSVCGNLSLQGAEEFSRPICQWQT

SEQ ID NO: 79378 - protein, 91 aa, Unknown
  Obtained from environmental sample
  misc_feature (1)..(91): Xaa is any amino acid
MAEIRSITKKFGILTAGGDCPGLNAAIRGVCRAAHDRYDMEIVGIANGFRGLIFDDTRILNPIRFFRNFNAGRNYSLVPAWKNHFANLDKD

SEQ ID NO: 79379 - protein, 58 aa, Unknown
  Obtained from environmental sample
  misc_feature (1)..(58): Xaa is any amino acid
MGLSPHEAVLMGDSEMTWETARNAGCYALGVSWGFRSRATLEASGAARIIDKPGELFN

SEQ ID NO: 79380 - protein, 218 aa, Unknown
  Obtained from environmental sample
  DOMAIN (11)...(200): ABC transporter
  misc_feature (1)..(218): Xaa is any amino acid
LDGADLALPPGGVAVFGGRSGCGKSTLLEICAGLVKPRGGAVLWDGEDITGMPRYGLYGRRRSMGYVFQGHALISNHSAFDNIALPLRCGGADLGSETIEKRVRSLMDELGIARSIEKRFPEALSAAQLKCVAVARALATDPTLLILDEPFSGIDPVTAKMIADVLHGKWKRGGMSVLMAAHSFSAWPDHAARRFMLKAGRLGPADEAFAKYAVLRTP

SEQ ID NO: 79381 - protein, 303 aa, Unknown
  Obtained from environmental sample
  DOMAIN (7)...(191): Conserved carboxylase domain
  misc_feature (1)..(303): Xaa is any amino acid
MPIDPGILVHQIPGGMISNFRSQLQMQKALDKLPQVLQEVSQVREDLGYPPLVTPTSQIVGTQAVMNIISGERYKIVPNEVKDYVKGLYGRSPVPIDKGMIKKILGDEKPISYRPADKIAPMLPKATDGVDPALINAEEDILSYVLLPEPALEYFKWRAMPAGERSEIPADAEIRKITGEAAAKSDAGKITQAPVSVAQASSPQSLPLQLPLDGLAAEIIGKIDGLVIEEVVFRKGESTISVKSHAVPQAAFATAGWTLNAAPERVSASVQPSATPPQNAQATAAAPQLAAEGKNGCGGPRRP

SEQ ID NO: 79382 - protein, 299 aa, Unknown
  Obtained from environmental sample
  DOMAIN (1)...(273): Bacterial DNA polymerase III alpha subunit
  misc_feature (1)..(299): Xaa is any amino acid
RTDIPPISTIIDKNDFERYQTRQTPLATAVMGNSAYKNVFRHAAVIDGLVWKPFILSKSVIIAPGEVVNWAPLFKCEQHFEQMGQIMTQFDKNHIEKIGLVKMDFLGLRSLTIVQDTQRLVKKYHGIDIDLCKLPDGDQKALDLFGSGETTGIFQFKSNGMKDYLRKLKPSGIEDLIAMVALYRPGPMDNINMFIDRKHGREKIEYLHPCLEKILGVTYGVIVYREQVMRIAQVMGKFTMGQADILCNAIRKKQTAEMEEAGGKFIEGAVSQGIDKTVAKEVYDLLVMFAGYTFLRAQA

SEQ ID NO: 79383 - protein, 78 aa, Unknown
  Obtained from environmental sample
  DOMAIN (4)...(71): ACT domain
  misc_feature (1)..(78): Xaa is any amino acid
MGMKQISVFLENTTGRLCEVTRTLAKAGINLRAINIADTADWGILRIIVDKTEEAANVLNAAGFTIKMTTVAAVGDRG

SEQ ID NO: 79384 - protein, 141 aa, Unknown
  Obtained from environmental sample
  misc_feature (1)..(141): Xaa is any amino acid
MGKIIGIDLGTTKSCVAVFQRGEPVVIKNAEGELTTPSIVGFTGKGDRIVGAPAKNQMITNPENTVYSIKRLMGRRYSEVSSGMKRVPYRIVEQVDDVRVKIGDQPYTPQEITAFVLQKMKQTAEDTWASPLPKRLLLSPL

SEQ ID NO: 79385 - protein, 247 aa, Unknown
  Obtained from environmental sample
  DOMAIN (9)...(164): Peptidase family S49
  misc_feature (1)..(247): Xaa is any amino acid
LELRNALEKFKAKGKKVCVFISGADLDLYCLATIGDKIVMDDQGVLMLTGYVWGRGYVKHSLEKLGIGAREMRYLKFKSAAETYTRDSMSEADRTQYGEILDDMMQLARDTLYAARSWNTGEFDRIINNEFMFSAKYALARGLVDSTGRKEAVLEAVREISDGNASELFLLYGDAESSLTGSKFPYRPGNAGGLFSKPPVIAVINANGVTDMERGIAARTLSKTIRELSEKRGVKRDVLRINSCAHA

SEQ ID NO: 79386 - protein, 333 aa, Unknown
  Obtained from environmental sample
  DOMAIN (116)...(323): Methyl-accepting chemotaxis protein (MCP) signaling domain
  misc_feature (1)..(333): Xaa is any amino acid
VANNLKDIAEGEGDLTQTIPVHSNDEVGDLAIYFNKTLEKIKNLVVNVKKEAGDLSGIGTDLAANMTETAAAVNEINANIQSIKGRIINQSASVSETHATMEQLTDNIHKMNDHVEDQSAHISQASSAIEEMMANISSVTTTLVNNAVNVKTLKESSEVGRVGLQEVASDIQGIARESEGLLEINAVMENIASQTNLLSMNAAIEAAHAGEAGKGFAVVAGEIRKLAESSGEQSKTIGTVLKKIKGSIDKITKSTENVLSKFEAIDSSVKTVATHEENIRVSMEEQTTGSKQVLSGHSEVNEITRQVKDASRAMPEGAKRVNTEKRPSEKRHR

SEQ ID NO: 79387 - protein, 73 aa, Unknown
  Obtained from environmental sample
  misc_feature (1)..(73): Xaa is any amino acid
VEEEEREDAEAKQETHDPLITRMLKTRTIMLSGEINKDLGEKTIRQVILLEEMGDDPIRIFLIHPEETRTPDT

SEQ ID NO: 79388 - protein, 85 aa, Unknown
  Obtained from environmental sample
  misc_feature (1)..(85): Xaa is any amino acid
EFENAESGLEFRGDPEGFEIAAMTGQYLKLSGEIDGNNVIVYSDELTKPHRVRYAWRKFGPAPLFAKNGLPAMPFRNNRNESPDL

SEQ ID NO: 79389 - protein, 302 aa, Unknown
  Obtained from environmental sample
  DOMAIN (114)...(181): Elongation factor Tu domain 2
  misc_feature (1)..(302): Xaa is any amino acid
VTAAREKLIEAAAEGDDTLMEHYIDKGSLSPEEMKKGLIEALAENKYIPAFAGAALKNSGVVPFIDFIADAGPNPRTAKDTVLDAENKETELPLDPDKPFSALVIKTTYDQFSGKLSWVKVISGKLAADTEAYNVSENKKERIGKIYTCQGKKLEEVRELFAGDVGIITKSATLKTNDTLAATDNSLNFVPLRLPEPVHSVAVNAIAKKDDDKLGEFLVRAAEEDKTFRYNFNGETKETVISGMGELHINIILDKIKTNQKIEIETHIPKVAYRETITKKPAPNIPTKADRGHVSTASAMGI

SEQ ID NO: 79390 - protein, 308 aa, Unknown
  Obtained from environmental sample
  DOMAIN (195)...(306): HD domain
  misc_feature (1)..(308): Xaa is any amino acid
MGKVSGKKFGEKFTALGNFALCSRQALLPEYILSEKKWTGTARLAMKKHWEIGQRNVDALCFKTNIKDFVLYHHERADGAGPFGIREGEGPLEAELISIADSIDAAHHLQKLGQEELPVIRNIIVNETGKFYGKKAAQAMLEILDLPTLLSLKDDVIKKTAAQFMSPWTVDIQAETIFGLAGFVARIIDCKSSFTHKHSTQIANKAWFMGKYYKYDHEALSELYLAASLHDLGKLAIPSEILEKPGKLTNEEFEVIKSHVYLTWELLKDVEGFETICQWASNHHEKDLRQRLPLQEKSATSRILKLAS

SEQ ID NO: 79391 - protein, 229 aa, Unknown
  Obtained from environmental sample
  misc_feature (1)..(229): Xaa is any amino acid
LTTKISKIEDKVLEIFTGSNAVISALVVLLGFFVATLLIILIGKNPLVMYQTLLQVVSGFDLTRGSWNVRYIGEWIVISMPLILCGLSMGFSVRAGLFNIGAEGQYIAGLTAAQLIAVGFVRVTGERVLIHFSIAVLGAMLFGALWGGIAGLLKARYKVSEVVATIMMNYIAFFIHRLVTLNIPGSNTFKTLNFPATATPINPVLSAITNRSGTETTVFGLPIVACRNL

SEQ ID NO: 79392 - protein, 181 aa, Unknown
  Obtained from environmental sample
  misc_feature (1)..(181): Xaa is any amino acid
LVSPIGSNLGTSGINLSDFDAEIKRKAFFAPWYNKLLKNNRVIALGMDFSQTSEYFQKKLKKGLQFIINTEGPWLIHCHAGIDRTGFVCIVLESLMGATLDEIINDYLQSFNSIYNSSIYGEVNKGDSLVVMKLLSAMGDYMPLDDRNLRSIAEHYLITSIKLSPAEIELLKGKLAGIRNK

SEQ ID NO: 79393 - protein, 126 aa, Unknown
  Obtained from environmental sample
  misc_feature (1)..(126): Xaa is any amino acid
PPVYRDAVFGGQLDIRRIEKANLRVLNEGSVTVGLDTEITRELSMEGDIRDLIRGVQNARKEMGLSVTDRIELCLHGVDSLKEAWDNFGKTAAEETLAVKTQWAKTDGQIPIEAGDETWHVKITKS

SEQ ID NO: 79394 - protein, 280 aa, Unknown
  Obtained from environmental sample
  DOMAIN (1)...(233): Alpha amylase, catalytic domain
  misc_feature (1)..(280): Xaa is any amino acid
FFPHHSFPVLERYTDYKAINFDTFAFVERMPKWNTENKAARDYLTGAACYWIKECDIDAWRLDVSDEVSFDFLHAFSSAVRQIKDDFYIIGEMWHDGTQWINANCFDSVMNYPLGFVIQDYFLKDKISLAEFNWRLFLSISRYSKMHTEGAFNLLDSHDTARILTVANGNKQAVRNALTMQLMLPGSPCIYYGTEVGMEGGHKNDDNRRPMVWDEKKQDKDLFKYIQYLIDFRKRNINLINKCSIDFTISEDGNGKWIFKHENKFITLKYIKKILEIETN

SEQ ID NO: 79395 - protein, 202 aa, Unknown
  Obtained from environmental sample
  DOMAIN (1)...(202): recA bacterial DNA recombination protein
  misc_feature (1)..(202): Xaa is any amino acid
AALSTRGCSGLHEFDNIDGLWVSQPDNGEQAMEITESLVRAGAVDVIVVDSVAALTPQSEIEGEMGDAQMGAQARLMSQALRKLTATIGKSRTILIFINQIRMKIGVFFGNPETTTGGNALKFYSSLRLEVRKTETIEVSKDADALPNRVRVKVVKNKVPPPFRKTEIELIFGQGISATGSILDCAVKYDIIKKSGAWYSYN

SEQ ID NO: 79396 - protein, 267 aa, Unknown
  Obtained from environmental sample
  DOMAIN (34)...(117): Mur ligase family, catalytic domain
  misc_feature (1)..(267): Xaa is any amino acid
VVSDGNGILMDFSGLSRSLGAQLLSFGKFQANAGFTSVTIDSRTVRDGSLFAALPGSNCDGHSFVEAAFKNGACAALVERQKLDNYNLVGIAESLGKTLIVVDNSLEGLQKAAGAYLEKFPGLLKIAITGSSGKTTTKEIAAKIIGIEKRVTMNPGNYNSETGLPLSVFNLRPGDEIGVFEMGMNHEGEIAALARVLNPDIALITNIGSAHIGILGSKDAIAKEKKNIFSGIQGEGVALIPQESPYRDYLAEGVRGRVSFYGEKIFA

SEQ ID NO: 79397 - protein, 209 aa, Unknown
  Obtained from environmental sample
  misc_feature (1)..(209): Xaa is any amino acid
LSFIVFRGRKTEKIDADIFGLGVDTGVDHVRNLRTIIQGYLQNAYSYSEKDAALLAEYITIYNAVYRGSWDYFAGRYKTQVIGNLDKSKAGLSIRYDEWPGRTMMLIPLGQGGLSAIDTSTISDGRVVEELRKEDDKGVPQRQDMVNLKEREADQANKNAQNIRPEVKRDENKNAQERQNIEQERQPTKNDQAAGKKPRIKIDINTPDI

SEQ ID NO: 79398 - protein, 174 aa, Unknown
  Obtained from environmental sample
  DOMAIN (29)...(153): Domain of unknown function (DUF477)
  misc_feature (1)..(174): Xaa is any amino acid
MKIKLFLLLMIIAISAPMFGLDRVMDFGGLLSSAEVASLEEMLKTISLTYDFDMVVVTIGQTGNTEPKEFADGFFEKNGYGLGKNRDGCILLIVTERKVFWFSTSGRGKKIFIPSVSKKLEKDVFGSLENGKFYDAFVAYAEDWKRVLVLDSQGRTYHFFYRNNVVLVIISWLV

SEQ ID NO: 79399 - protein, 145 aa, Unknown
  Obtained from environmental sample
  DOMAIN (8)...(72): 2Fe-2S iron-sulfur cluster binding domain
  misc_feature (1)..(145): Xaa is any amino acid
MDNKMINLKINGRPVTVPAGTTILQAARQIAVNIPTLCWHPDLEAWASCGICIVKAENSPKMLRACATAVEEGMSIITHDSEIVEVRKTGIELILSTHPNDCLGCPRNQNCELQRLAAQFSIREKTSHRVLPTCRKITDNVLGLQ

SEQ ID NO: 79400 - protein, 214 aa, Unknown
  Obtained from environmental sample
  misc_feature (1)..(214): Xaa is any amino acid
LKQKEDVLRTVLAECHGKKYPCYGQLFFRKWRTVLVAGFYQGRWNWQAVSAANWLHPQKLVLISNGAGLQDQKIFSLLVESAAGDLALDIWLKLDAGTTQWYQLINRSEIPHDKIIAKIKEFAALAPFTIQTMLCAVDGETPSPDEAQAWENLVIELAAIAVGKIRKIQIYGKARPSPDDPKAQALPVAYLEERAASLKQALSNSTHIPVEIYP

SEQ ID NO: 79401 - protein, 158 aa, Unknown
  Obtained from environmental sample
  misc_feature (1)..(158): Xaa is any amino acid
MSGMDGIEATAPIREWEDEQNETIKENSARGANQSIDRYLRRQTKKIALTANAVVGMREMFIEKGFNDFISKTIDVSKLDEILNRWIPEGKRKEEKEKNEDGKAPLIWIKIHGVDTAPAKNLTGGTPDAYLQVLTLFLKDVTPWMPFQKRCGMRAPIM

SEQ ID NO: 79402 - protein, 100 aa, Unknown
  Obtained from environmental sample
  misc_feature (1)..(100): Xaa is any amino acid
GAATKVANSVNSHYAVGLGVYAVFSRTGPERNKSESVFLQNAIEVPDKPGVMIKNACILNLSGHGSVLTGIRSIVNGTGTGVQAGVKREYIMSYNNGQTK

SEQ ID NO: 79403 - protein, 48 aa, Unknown
  Obtained from environmental sample
  misc_feature (1)..(48): Xaa is any amino acid
MDVKQAIIENNTSLGIELGSTRIKAVLIDDTYAPVAQGSHDWDNQLED

SEQ ID NO: 79404 - protein, 110 aa, Unknown
  Obtained from environmental sample
  misc_feature (1)..(110): Xaa is any amino acid
MNQDTLKLITAKIEKTLEQARVLKSEKTNLETMIADLRENISEKDKTINELKSTNEQLLAEIRSLQEALNERDSKLEESEKALLRAIETLDEVLTKKMQPILGRSDHGKP

SEQ ID NO: 79405 - protein, 179 aa, Unknown
  Obtained from environmental sample
  DOMAIN (19)...(178): Glucokinase
  misc_feature (1)..(179): Xaa is any amino acid
MGAQIKWLNKDAAFDRLVLAGDIGGTNTNLALVGQKNGKLTIIVEAVFPSREITGLTEPIKELLQTTKSERADLVVKQGCICAAGPVENNCCKLTNLNWNIDGNELSKELGLEIRVINDFLGISYGIPTLDVNNPEQIFAFKHTDGSIPEPRLAAKGGNWPKDRPWRTLFNLEWQRLYA

SEQ ID NO: 79406 - protein, 199 aa, Unknown
  Obtained from environmental sample
  DOMAIN (120)...(155): Sel1 repeat
  misc_feature (1)..(199): Xaa is any amino acid
LREYIRKENEQKKYFQAFFEHMRKYRHSGPAVFEQAAKEFNSLYSGDAEAQFKFGVMYINGHGVQRDVDKAIYWYQKAAEQEHVKAQLSLGVIYDKGIGVPQDYAKSAQWFKKAAVQGNADAQFLLGIQYLQGQGVIRDQQKGCDLLRASAEQGDQGAIELYNDVCIAENDVKEKDVEKRLKDEIARLVKSAEDLGRLQ

SEQ ID NO: 79407 - protein, 345 aa, Unknown
  Obtained from environmental sample
  DOMAIN (149)...(221): PDZ domain (Also known as DHR or GLGF)
  misc_feature (1)..(345): Xaa is any amino acid
DRLGMFPVGGYCKMKGEGDYIEAWEDRNKGICREKGSYLAANRAARILVCFAGPFFNLLLAALLLSSLWGVGFQIQTLGNKIILASELTPGEVFPADTAGFMTGDKILEIDGNKISYFHEIQENIAANPNKPLPITVERDGKIIQLQVTPSLEKSSGAGKIGVAFWADPVIESVKEGSPAEKAGLKQGDIITSANGQPLRNSFDLRKVLDQEPGSLVLEYQRNGTEGQAVFNTEDIGEEIGISWALINYHTPALSFPKAVVKGVNESFKTLALSIKSLRLLFMGIDLTQAVSGPVRITYMMGDMAAKGGLRSFVELIALISIALCMMNLLPLPVMTARPSDHVET

SEQ ID NO: 79408 - protein, 146 aa, Unknown
  Obtained from environmental sample
  DOMAIN (4)...(139): lactate/malate dehydrogenase, NAD binding domain
  misc_feature (1)..(146): Xaa is any amino acid
MAKKKIALVGAGQIGGTMALVLAQKQLGDVVLVDVVEGVPQGKALDIMESRLSIGTSAFLAGTNNYNHLARSDVVIVTAGVSPQNQHEPGMTFLKFINGINEKVGRAPQKTAPNAFGIRRTNPLEAKVFSMEKNHRFCFEKNCWLG

SEQ ID NO: 79409 - protein, 143 aa, Unknown
  Obtained from environmental sample
  DOMAIN (1)...(142): Domain of unknown function (DUF323)
  misc_feature (1)..(143): Xaa is any amino acid
VEPKGYRLPTEAEWEYACRAGTTTAFNTGENITTEQANYDGNCPYNNNATGKYREETTPVGSFPANACGLYDMHGNVFEWCWDWYADYSITAQTDPMGASSGAVRVLRGGSWYSPTQNLRSAYRNYDTPFDRISHLGFRPARS

SEQ ID NO: 79410 - protein, 115 aa, Unknown
  Obtained from environmental sample
  misc_feature (1)..(115): Xaa is any amino acid
MKKVLTIIVVIFVVFIGIVVAGPLYVINEGEQAVIVQFGRITNVVSNAGLKVKVPFIDEVVRYPKKIMAWDGEARIVPTAERQFIFVDVVARWRITAPKKLMSRINAVYTVIAAL

SEQ ID NO: 79411 - protein, 184 aa, Unknown
  Obtained from environmental sample
  DOMAIN (1)...(183): Uroporphyrinogen decarboxylase (URO-D)
  misc_feature (1)..(184): Xaa is any amino acid
IIDPRTFLKQLRKNRDAAHKAMDYVTGQITEYALLCADNGADVICIADPTATGEIVGPKFFDEYAVPYLNKLAQAIKTTGKQVIIHICGDVSMVKSGLAKLDCDALSVDSVVNLRKIKDELGGIAVMGNVSTYLLQFGKEDRISETTANLVKQGIDIIAPACGLSTSTPIANIKALTKTVVSGG

SEQ ID NO: 79412 - protein, 71 aa, Unknown
  Obtained from environmental sample
  misc_feature (1)..(71): Xaa is any amino acid
LPANQEVAKENNVPVVSHPPLTRTLYQETEVGDQIPVRYWNVVALVVGKFFSYEQKQARRAAAGETGRMGA

SEQ ID NO: 79413 - protein, 229 aa, Unknown
  Obtained from environmental sample
  DOMAIN (8)...(229): RmuC family
  misc_feature (1)..(229): Xaa is any amino acid
MDRKRVERKFFSHLAKYMRGKAPGYKKKYCKVGRALIKLGAGNFGTLFEIKNIQLEKAIKGLSENRKLRKVKKHSKKEFIVSVKKRIVETAKYINPAEGTFEFAMMYIPAENVIYEVIINDSFTNKDYELLKYAMSKHIIPVSPNSFYAYLMALVFGIKGLKIEQEAKTILGELSQVQDRFTKFFADYEKKGKHISAAANKYSDSEKSAGKLNDQINKITGNKTELITE

SEQ ID NO: 79414 - protein, 145 aa, Unknown
  Obtained from environmental sample
  misc_feature (1)..(145): Xaa is any amino acid
MKAEWINAFILATRDTFSKMLNLHVEASKPYLYSETVNMKDISGMIGLSGTIRGAVVIGFPEASALKAASKFIGEEFKELGPDVSDAVGELVNIIAGYVKKVIQNERFGISPCVIARGPKHMVYMPSGIPNIVYHSVVQKVGILC

SEQ ID NO: 79415 - protein, 77 aa, Unknown
  Obtained from environmental sample
  misc_feature (1)..(77): Xaa is any amino acid
MADKLEQIQTMIYQIRGQKVMLDLDLAVLYQMETKNLNKTVKRNLKRFPADFMFQLADKEWEILRSKARADSVIGRT

SEQ ID NO: 79416 - protein, 237 aa, Unknown
  Obtained from environmental sample
  DOMAIN (1)...(162): NeuB family
  misc_feature (1)..(237): Xaa is any amino acid
MAERPSREDFSQRHKGTQRSQSSAILSTPDTESEDFFDRSLIYLLHCVTSYPAPETDYNLKVLPNLAAVFGVSVGVSDHSSDPELVPALSAAMGASVIEKHFCLSKTDPGLDDPIALPPQEFSQMVRAVRRAVEIGARETLDFYRRERGEELVGQILGSGVKELAPSEKANYHLTNRSIHALRDIQKGEILKRSDYAVLRTEKILRPGLEPCWEKLIEGRMAREFIPAGEGIRFEDI

SEQ ID NO: 79417 - protein, 325 aa, Unknown
  Obtained from environmental sample
  DOMAIN (65)...(315): Phage capsid family
  misc_feature (1)..(325): Xaa is any amino acid
DCCTSGQGDAAGVTGNQKTLRNWLQPYLKSENWTNPKDVSWGEKGFVINKTALGDPMGNMSPNNEQFLINPIYETEIMSDVAKKSVMMNLVRHRPMSGPSIFLPTRDRGGVQLNWLTAYGQKIEGSKPKGAERVELKAYTLAGYIPWFDEFEEDVFVDLGQMFVDEFIETYGQEFDRQCLLADNDPFTGAMMCPDVTKVTIKGNTANDLSWKDFRDAVYKVPAEERKDCAWFLNETVLNHISSIEDTTGRPIWRGPTEAMPGRLDLYPYHEVSILPQIADIGADQTIAIFMNPKRIQHGNRRGIELKKLTRPRSLGIPRPSDHDR

SEQ ID NO: 79418 - protein, 210 aa, Unknown
  Obtained from environmental sample
  DOMAIN (1)...(200): Xylose isomerase-like TIM barrel
  misc_feature (1)..(210): Xaa is any amino acid
LAKALSDVPEAGGITSGYARGIKNIFKERGISIAVLGCYINPVHPDPAIREKHLRRFEEHLRYARDFGCSIVGTETGSCNGDCSFHPDTEKDETIKKLCQSMERLIKTAEKCGAIAAIEAVADQHTVSSIEKMQTVIRRLASPCLKVIYDPVNLIPNAGLGESGIFQTQKDIFEKAFAVFGDEIAAIHAKDFRLATNGKIGTLKAGPPEK

SEQ ID NO: 79419 - protein, 267 aa, Unknown
  Obtained from environmental sample
  misc_feature (1)..(267): Xaa is any amino acid
LEVFLQDKVCDVTLKLICTVYEKANCITRRVVLENNGACLVIRRLLSLSLDMPNTGFNLVTFDGDWAREAHRHDRLLQYGIFVNENRTGASGNKHNPGFLLYENGAAEDHGRVYGFNLVYSGNHFGFAELNSHDLVRAGIGISPHCFEWTLGTGESFETPEAVMTFSGSGFNGLSRNCHSFVNKHIIPEAWQGKERPVLYNSWEPCFFKFNQGKMMRIARLSKKLGMELFVPYDGWFEGRNSDTAGLGDYTPNRHKFRSPGYLLRRS

SEQ ID NO: 79420 - protein, 217 aa, Unknown
  Obtained from environmental sample
  DOMAIN (125)...(208): Ribosomal Proteins L2, C-terminal domain
  misc_feature (1)..(217): Xaa is any amino acid
MGIKSYKPTTPTLRYKQISTKEEVTAEKPYKPLTVGIKRSSGRDNQGHISSRRRGGGHKKKYRIIDFKRKEFMGVSCTVETIEYDPNRSAYIALVKYANGSRSYILAPQGVKVGEKLNSGSGSEYKPGNTMPLKEIPLNALIHNVELKPGHGGQLARSAGTAAELIAKDEKYCQVRLPSGEVRLVLSVFRLPLVNIHIDTTRSFGSAVAALAAIAIV

SEQ ID NO: 79421 - protein, 333 aa, Unknown
  Obtained from environmental sample
  DOMAIN (4)...(64): Rho termination factor, RNA-binding domain
  misc_feature (1)..(333): Xaa is any amino acid
GSPIDQIGRASQRSDDIYVSPSQIKRFYLKTGDTVSGQVRPPKDSERYFALLRVEMINYEDPEECKRKINFDDLTPLFPDKKFDLEYNPKETATRIINLMAPIGKGQRGLIVAPPRTGKTVLLKNLANAILANHKEVHLIVLLIDERPEEVTDMQRSVNAEIISSTFDEPADRHVVVAEMAIERAKRLVEHNRDVVILLDSITRLARAHNTVAPHSGRVLSGGVDSQALYKPKRFFGAARNIDNGGSLTIIATALIETGSRMDEVIFEEFKGTGNMELVLDRKIAERRVFPAIDPFKSGTRKEEMLLSPRELNRMWILRKVMASMSPIEAMEL

SEQ ID NO: 79422 - protein, 331 aa, Unknown
  Obtained from environmental sample
  DOMAIN (218)...(329): RNA polymerase Rpb1, domain 5
  misc_feature (1)..(331): Xaa is any amino acid
DTEAWHKSDPKKHSEQEVFECPVRSVKNEMITTTVGRIIFNRSLPDTIPFVNGLLKKEGLLSLVNRAYKFYGPETTILMLDALKDVGFLWAMKAGVSVGIDDLVVPKTKQELLRAATEEVRGIEHEYYEEGKLDASTRTNRILEVWSKAADQVASDMMKDLELQNDTGHHLNSIFIMADSGARGSKTQIRQVAGMRGLMAKPSGDIIETPIRSNFKEGLTVLEYFTSTHGARKGLADTALKTADSGYLTRKLVDVAQDVIINEDDCNTMDSIEVAAIVNSDGTIRARLRDRIMGRVAAEDVMDPYSKKTITAMGTLITEEWHLVPNLSWGD

SEQ ID NO: 79423 - protein, 264 aa, Unknown
  Obtained from environmental sample
  misc_feature (1)..(264): Xaa is any amino acid
MGKACPEQGRCFVLALRREAAAARILVVNHHLLFADLAARRGGAGYESAAVLPPYSRVVIDEAHTIEKAATSFFSGEFSRIGILHYAGRLYRKRRAKKLGLLVRFCSLLGEGDDSLQTLVALLDDIRKAAGDLDRPGLELCASDGVFRFSPAGRGADGAESALFPPLLALRKKLLAFTARVREIIELLPENDTDDESSTEDPSVWELKAILRRFDGIADICSAFTGYRERPGEVMWIERRGSGGRAAECWPVFTQSPVDLAESL

SEQ ID NO: 79424 - protein, 80 aa, Unknown
  Obtained from environmental sample
  misc_feature (1)..(80): Xaa is any amino acid
MGKKEAVNVQSKNYNTLISQIGDLLQQGRKQAAYAVNNILVQTYWQIGKYIVEYEQGGSKKSEYGSKLLDRFSADLINGR

SEQ ID NO: 79425 - protein, 326 aa, Unknown
  Obtained from environmental sample
  misc_feature (1)..(326): Xaa is any amino acid
DALLADLAMVDIIFLQQKPDKAQDQRFKVVKRYDRNSAWYKKNSMYPESVKAAEDAMRRSMLEIPTYMHAQAYELNKKGDTEGAKKKYAEAIQHYNNFIARYKSEPDWNEYKVHMNMAVIYHELGQFEKEANEFNWMVETDTTRYGRRPQNFGVLITKNDAAYNAVLAMDAAREVALKTKAGGDTAKAYSLPETKAYFKQVERYMAKFGKDTAAPVIAYNAAIIHYNAKQYKIAIEALRKLTVDFPKHKYTLLINRMTAQALLEDDQLDEAQERFEWLYKQYTDKNGQGVRDSNAVTVAKEIETSIAAVLYQRAEKAVKLCRSVLL

SEQ ID NO: 79426 - protein, 89 aa, Unknown
  Obtained from environmental sample
  misc_feature (1)..(89): Xaa is any amino acid
MKPIAELTTEEALGVQYFLMDIDDTLTRQGKLPSSSYSALWKLKEAGLKVIPVTGRPAGWCDLIAREWPVDGVVGENRCAGFWEEPGSV

SEQ ID NO: 79427 - protein, 183 aa, Unknown
  Obtained from environmental sample
  DOMAIN (25)...(133): Peptidase family M23
  misc_feature (1)..(183): Xaa is any amino acid
AANFEVTGKHGTIDPKYVYKNYENDAHFGTDFANGKKGDSINLGISGKVILTAAEEKPGEGNGNWMVAEYGYKFDGSFIGTGIFGEYMHMEKKPGFADGTYLNSNQKIGTVGNTGNSYGAHLHYSIYTLSEKPFSIASLNMILNNNIYETVNSKKAKFYAGTYNKESVKVTYDIENFLNGLKK

SEQ ID NO: 79428 - protein, 329 aa, Unknown
  Obtained from environmental sample
  misc_feature (1)..(329): Xaa is any amino acid
IKYGKGIFNSLLNNLEAAADDLPDNRREGFGLKYRLIDALKSALSVFFFQHPSMLDFQIKMKQKWKRSNLETIMRVQEIPSNVQITTLLDGITPDSVSSVFNKNLHTVDEWGSLKDFRCLDGGVLLALDGVWYFSSEQIHCEHCLHATKDGVTTYYHSALAGTLVKPGNTAVLPVAPEMIRNTDGANSEKDSKKQDCERNAAKRRLKKHAQEYAWLSPTLLGDDLFSNYPFCAEVLECGYSFIFTCKEDSHPWLTETVKNSYLQETSRREWDGRHHLTYTCQWMNGVEIRDNKQTIRVNYFSLSIWNEEKKKKTFYNSWITRPNLSLFW

SEQ ID NO: 79429 - protein, 113 aa, Unknown
  Obtained from environmental sample
  misc_feature (1)..(113): Xaa is any amino acid
LIEQEELQTLIPHRGKMMLLNRVIDYDIEHSIRAEYTVTRDCIFYDPALDGVPAWVGFEFMAQAISTLTGIRKRAKGEKPNIGFILSIPSMRMEIPLFKNGSPVEVRVEETDC

SEQ ID NO: 79430 - protein, 211 aa, Unknown
  Obtained from environmental sample
  misc_feature (1)..(211): Xaa is any amino acid
FVGEVSDEQRIIQRLWIKAHEYRELPPANELRFFCGVDPATGKHDRTAEVPIAVHRKTGIIYVLPPWAKVCSETATVRQLMIAHRLYGYELIAWEDVVFSGIYGDYVQKLAAEENVYLPIKKLSNTLSKDAKARFLSPLIENGVIRFPAEGASDMIDELVNFPKWKFDDQMDGLYLAVKVIPSGSGAPVVERVKITANTSARKIIDMVRRW

SEQ ID NO: 79431 - protein, 290 aa, Unknown
  Obtained from environmental sample
  DOMAIN (98)...(204): TonB-dependent Receptor Plug Domain
  misc_feature (1)..(290): Xaa is any amino acid
VPFVNDATALIRALAIALPLAFAAPSQVLPAGGNIHGDSVIVDKDVNTVISGDDAVDAIIAENPSIINLGDSVIMKDDHDDAIVIDGEFEITVKHRAAAALSPSRRIIKVSEFRGKFADLPSALESVSGVDIRSMGGYGQYAESSIRGGTAKGLRVYLDGVPLNSASGGAVDLSKIPLDKIAEIRVTKSVSGLRQMGAGMGGVIELFTYDEEAGRDIVGVNAEAGSFGYLKEGVVIKSNIGNVIHQHDNNKSISSTKKETRFSHQNNIDASKSDNDYPFVHDNGTGLLHA

SEQ ID NO: 79432 - protein, 279 aa, Unknown
  Obtained from environmental sample
  DOMAIN (2)...(256): ATP-NAD kinase
  misc_feature (1)..(279): Xaa is any amino acid
SHKKDAASVAGEIGRELESQGTETTFFACEGRRTPPPKGRWDIAFSLGGDGTVLYTARILANSGTPILPVHLGTLGFIAGMDRHEWSGVYSQWLAGKIKPSRRCMLEFSIERGGKYAVNNSICLNDVVISSLGIAKLIRLQAKTEVAPGEFVEIGCYRSDGLIIATPTGSTGYSMSSGGPILDPEMEAQIISPICPFALSNRPLVLPSQQTLQITVDRDQRSGVLLTCDGQETFDLEPGDLITIKHAPHYALLVTAGYSSYYKALADKLAWASDGGGHA

SEQ ID NO: 79433 - protein, 158 aa, Unknown
  Obtained from environmental sample
  misc_feature (1)..(158): Xaa is any amino acid
MRVQSWEVSDEFWARVEPLIPPKERDPEKTYKRAPGAGRKEKPPRLVFEGIVRVLRTGCQWKSLSKEVYGSSSSIHQYFMDWERAGFFREIWKAGLAEYDEMEGIAWSWQSIDGAMVKAPMAAEAVGPSPTDRGKKWEQAAPLGDGRGPRCRARPICH

SEQ ID NO: 79434 - protein, 310 aa, Unknown
  Obtained from environmental sample
  DOMAIN (204)...(227): 4Fe-4S binding domain
  misc_feature (1)..(310): Xaa is any amino acid
LLSLLFLDFTGTLHPYFGWIAKKQLVPAILSINIRLIVGLALLALIFGRVYCSVICPLGIFQDCVSNVAGRRKGKNARFSFSPPKTYVRYAILGLFVVAIIFGISAAVSVLDPYAAYGRIASNLFAPIYRLGNNLLALLAESVNSYAFYSTDVWQKGWPTFGVAAVTLIVVGTLAWRNGRTYCNVICPVGAALGFISKVAIFRLMLAPDKCTKCKACERGCKASCIDSEAMAIDGSRCVNCFNCIENCKSGAIKYAREKFAHEKKMPAETNQTNQNGVTRRDLISVVGAMAIAETIHAPLLYVDGGLAKM

SEQ ID NO: 79435 - protein, 191 aa, Unknown
  Obtained from environmental sample
  DOMAIN (1)...(174): Sec-independent protein translocase protein (TatC)
  misc_feature (1)..(191): Xaa is any amino acid
VRPLRLGGHNANLIYTAPAEAVALSVKVALVSGLVAASPYLFWEAWRFVSPGLYKKERAVILPVVLASTLCFLLGIAFCYYTLPMVLKFLTGFAAGQVDPYFKVDEYLGFLTTMCLAFGAAFELPVAAFVLAKMGVIDHRFLIRYARYAVVAIFVVAAVLTPPDVLSQILLALPLWCSMGVGLGHQPGGPI

SEQ ID NO: 79436 - protein, 169 aa, Unknown
  Obtained from environmental sample
  DOMAIN (10)...(85): RNA 2'-O ribose methyltransferase substrate binding
  misc_feature (1)..(169): Xaa is any amino acid
MRNKLTDELAICGMNAVLASAEFHPQEINRLFLREDRLKSFTGVCKQLAERKRPYKICEDEELERVCKSVHHQGVVAMINEPVIEPLSEEDLALWANEKKTGVILDSIGNDHNLGAIARAAAFFDVSFLILNEKDAAFNGEETRLTTSAYRVAEGGCSCRSDTWGEENG

SEQ ID NO: 79437 - protein, 322 aa, Unknown
  Obtained from environmental sample
  misc_feature (1)..(322): Xaa is any amino acid
GCLECGEWNTLVETVLKNENLIKRGSAGKTDDTAQTMPLSAVDPMEGSRIGSGIGELDRVLGGGIMKRSAILVGGEPGIGKSTLILQTAAAVLTKGRVLYVSGEESAGQLRLRADRLGLSADKSVMERIEILCSGNLEEIETVLNKVKPVLVLVDSTQTLYSEQADSAPGGVNQMKFCTFELISWAKEHDAALILTAHVTKEGVISGPKTLEHMVDTVLYFEENDKTAGLNGNADCRFLRASKNRFGSTDEIGIFTMGERGLTPVEDTGRMFLVRREGELPPGVATAAVLEGTRTILVEIQALTIPAKGTISRFCENDRDNG

SEQ ID NO: 79438 - protein, 325 aa, Unknown
  Obtained from environmental sample
  DOMAIN (1)...(88): Response regulator receiver domain
  misc_feature (1)..(325): Xaa is any amino acid
ECFSAEDAAAGIKILEDQKVDIVFLDVLLPKMGGLEALDQIHANWAGLEVVMISGHANIDMAVRAVKGGAFDFLEKPLSLDKVLTVCRNALALRKLREENRKLKKSASLTHKDIVGTSYAINGIRDLVRQAALTDARILITGENGTGKEVVARAIHSGSSRCERPFVGLNCAAIPDTLLESELFGHEKGAFTDAVSSRKGRFEIAGGGTLFLDEIGDMSLSAQAKVLRVIQEQKIERVGGEKTIETDVRLIAASNKDLEKACSQGLFRQDLYFRLNVIPIHLPPLRERKEDITLLLCHFLKEQGIENLRLKTTRRKCLGRSDPWP

SEQ ID NO: 79439 - protein, 255 aa, Unknown
  Obtained from environmental sample
  misc_feature (1)..(255): Xaa is any amino acid
MIKRHILKHLLKVAKYFPAVTILGPRQSGKTTLAKMAFPKLPYTSLENPDVRAFASEDPRSFLAKYPTGAILDEIQRVPSLLSYLQEILDNSKRNGRFVLTGSHQPEIHAEISQSLAGRTGILRLLPLSIAELTSFGIELDRDEYIYNGFMPAVYSKKTPPNLFYSNYYSTYVERDVRQIIQLNNQKSFELFIKLLAGRVGQVVNLNSMAGDIRISSVTLASWLSILEASYIIFRMPCYFNNFGKPLIKVKDLFY

SEQ ID NO: 79440 - protein, 327 aa, Unknown
  Obtained from environmental sample
  misc_feature (1)..(327): Xaa is any amino acid
YAENLQDGLPVRDTPDNNGRRVYRLKAGEIVKILSIAEGSPAIGSTGEPLPGEWYKVLTEDGSTGYCFSYRLRVFEYGSEDFTSSVAVINEQAEDPELEILLSKEWSPESYLTMINSKKINLEELSKHWRFDPGQEIGRARVFVPDIDNTFQYTSIRRDGNRTWRFEGTNLSIQLRGETILAVQFPEGSGSTRTLLFVSLPVSVDDLILQEAARRESLYNRIYSRGPVYTSNNYGTITFKGGGRFSWRNFDLLVPRFIPEDIEGDGTVLLDLFLDSAFEDRYDGAFTLRFANKRAALYCMYSLDNEGFRIEIVPDSSIEEVTIPASR

SEQ ID NO: 79441 - protein, 118 aa, Unknown
  Obtained from environmental sample
  misc_feature (1)..(118): Xaa is any amino acid
MTVIVVGISFALLWLVTTFFIFRHINRLKNDLLNKHSDTEKQPEKSEDIHGEKTYKPFENINSADPSHLLNFIQQEHPQVIALILSHMEPNKASIILQNLPHKTQNDESAIAQGKSPA

SEQ ID NO: 79442 - protein, 173 aa, Unknown
  Obtained from environmental sample
  misc_feature (1)..(173): Xaa is any amino acid
LPVYTNELALYGCGDDSIGSITIGGTVSPAGGNFEEPVTQATKKVVGAFHGLSSERSDARKLPAIHPLDCWSKYKGIIKSEKVGYAHGFMRRGTEVEQMMKVVGEEGTSIEDYIIYLKGDLIDSVYFQQNSFDELDAAVKLEGHQYTFDKLLTIKTIKFIDSDRPEGAARYHF

SEQ ID NO: 79443 - protein, 192 aa, Unknown
  Obtained from environmental sample
  misc_feature (1)..(192): Xaa is any amino acid
MKRTVFLALALFALMAVGVYAQTDADFVVKKSADGKSITITDYKGSATDVNIPARIQNLPVTKIEMGAFSEIEKITSVRIPSGVTSIGDHAFYRCTSLSIITISSTVTTIGNMAFRDCPKLTNVTFGGGIPASGFDDDAFYKLGDIRDKYLAAGGGAGNYTRPAGGTTWTKQAASTAAPAAAAAADAGTAGL

SEQ ID NO: 79444 - protein, 170 aa, Unknown
  Obtained from environmental sample
  DOMAIN (1)...(133): Domain of unknown function (DUF323)
  misc_feature (1)..(170): Xaa is any amino acid
MGAVERTATGLPIEAEWEYACRAGTTTAYNTGANISDNTGWYEANSGGKTHPVGQKPPNAWGLYDMHGNVWEWCWDIYSAYSRGAQTDPVAGGIELYGNSGNRVYRGGNWGDTASDVRSACRGNTIHSHRRAVPPDGMSRFFSGGAPSVPIGYYDLISSGVSFGFRLVRS

SEQ ID NO: 79445 - protein, 300 aa, Unknown
  Obtained from environmental sample
  misc_feature (1)..(300): Xaa is any amino acid
VSWLVREDLKLSAEGNNFEVNRRAAMEAEQTLEKARLLSLAFWRLIGLAESGGAIQEEANYFFTQNQRIAALFYTTRASGAWKNRVFVNGNYFLSRGMDGALADAYCAFNAKALESAAMGQTTLLNASSWFSNAQVSPCLAAIFFPIQGGGGGACVLFSSDDLNESFGMGVNTSYLINADGDIIADADMGRVKNQVNLGEQEIIGRILEGQDRNKQMLAELDGARHYLAYTRLNTAGSVIITTIEYEKVFEGINATTRRNLYLTAAVLFLSICASGFSRKAYPFRIKRWRRRRGHKRRGF

SEQ ID NO: 79446 - protein, 306 aa, Unknown
  Obtained from environmental sample
  DOMAIN (19)...(177): Type III restriction enzyme, res subunit
  misc_feature (1)..(306): Xaa is any amino acid
SRSSNTFIQERNGHWSLENGQLRPYQEYGVRWLDYLREYSMGACLADEMGLGKTIQVIALLRSLNETGVRGNCLILCPKTLVFNWVAELERFAPELPCMVHYGIGRDTAQLETDGFRIILSTYATLRRDIEDFQKINFLYIILDESQNIKNLTSQTTAAVISLKGEHRLALSGTPIENNLGELYSLFRFLNPSFFGSERLFIQRYLHPIQDDKDEDALKDLKARIYPFMLRRLKRDVLKELPAKTEETAYIELEENHLAVYHRRRQEYKQLIDNIIARGEAAKSSFVIFKALGELRRLASVPEADG

SEQ ID NO: 79447 - protein, 138 aa, Unknown
  Obtained from environmental sample
  misc_feature (1)..(138): Xaa is any amino acid
MAAYAYGHTVRMKPYAKEYLLKLRERGVKLAIATSLFPELCGPVLRNNGIDDFFQVICNTNETEHGKSHPDVFLLTAKKLGVKPGGCLVFEDILVAVKSAKGAGMDVCAVYDRKSENDWEEIKEAADYAINDFRDAPL

SEQ ID NO: 79448 - protein, 299 aa, Unknown
  Obtained from environmental sample
  DOMAIN (1)...(290): PEP-utilising enzyme, TIM barrel domain
  misc_feature (1)..(299): Xaa is any amino acid
MQRDDFYGILKVMAGKEVTIRLLDSPLHEFMPHNEDELAGYMAYVSKGKKTKPNKAEILAQIDALHEFNPMLGHRGCRIAVSYPEIYAMQIKAIFEAAYKLRAEGIDARPEIMIPIVMNASELKLIAFGKKIEGANYKGVVDIEDELRAEKKAKPVEYKIGTMIELPAAALGAAEIAKYGSFFSFGTNDLTQTTLGISRDDFTAFMPDYTLFDLIQGNPFSTLDSRVKELIALATARGRLTRPDLVCGLCGEHGANPGNVKFCMEAGLNYVSCSPYSVPIALLAVAQETRPICHAGPKG

SEQ ID NO: 79449 - protein, 245 aa, Unknown
  Obtained from environmental sample
  DOMAIN (45)...(244): Aminotransferase class-III
  misc_feature (1)..(245): Xaa is any amino acid
MPQSAPKLNLSKSMQMYDEAQKLSPGGMMGIRRPYNFIPGEYPIFLERGYGGHIIDVDGNDYIDMLCAYGPIILGYDEGEINDAVIRQMEKGFCFSLVQPIQNELEQKLIDLIPSAEKVILVKTGSDATSVAVRIARGCTDKNTIFRCGYHGWHDWAVEVHGGVPQCVQDLTVEFEYGDLAELEAKLDAHKGDVAGNIITPVGHPLAQPVMAPPPGYLQAVRFMADKHGALLIFDEIRSGFPWAM

SEQ ID NO: 79450 - protein, 295 aa, Unknown
  Obtained from environmental sample
  misc_feature (1)..(295): Xaa is any amino acid
MNALLVLYGGSLSNEAEEVLFNGKNSLEMTIERSRQFPSVGKTVLLAAEGSSFPVYEGIEIDKRASWTVKDLLEALAAHSEGFDLTYFAWADCPFIDPELAKRLVDRHLRYAAEYSYADGWPYGVAPELLSPGTAVILSNILNDNDNGPVERDSLFAVIQKDINAFDIETEISTVDLRCHRLRLCADSKRNLLLLRRFVSALDTAGAAQVPDTAAIERVIAEKPEILRTLPAFYPVQVYGGCPQACAFCPWPKAGASASASAINGGYGGNGAITNGGIIWSRALRSLLEKTPFFR

SEQ ID NO: 79451 - protein, 119 aa, Unknown
  Obtained from environmental sample
  misc_feature (1)..(119): Xaa is any amino acid
MTVSLYIHVPFCSQKCDYCDFYSVPVTPNSNEQTLMDSYIEAVLGDIEDQIKLFNISDIPSVYIGGGTPSVLGPDRITRLLTLLKSWLTNMDSKPVEFTVEAKSGSTDEAFLQACVESG

SEQ ID NO: 79452 - protein, 323 aa, Unknown
  Obtained from environmental sample
  misc_feature (1)..(323): Xaa is any amino acid
EIRTASDLILHYPRDGEDRVNIVPLKAYRSGKVCAVVTVFAREWIGYGGMRTLKIYIEDETTQAVLVCYKRPWLDKQIITGQKYMVSGTFKYRYGELQSRTFEIELASLGTSFGKILPIYPLTAGIIQSKMRAFISSAIKKYVKDLENELPNEIMEKEALLTKTQAVREIHFPTSTGMLERAKKTLIYEELFYMEVMVVRRAIERKSRIKIERADDKNNNENISQLQQQLMERLSFSLTDGQKSAVMEINRDMSSNIPMARLLQGDVGCGKTLVSFLAALRAVENKGQAAIMAPTELLARQHAEKRGATLEPLGQTRPIYLLG

SEQ ID NO: 79453 - protein, 98 aa, Unknown
  Obtained from environmental sample
  misc_feature (1)..(98): Xaa is any amino acid
MIRSAEAAVSAVCFLFQCKAGKHAVKILETVKIIKYAESLGGVESLITYPVLQTHADIPESERKARGIDECLLRLSVGLEAPEDLIADLKQAIGDSNI

SEQ ID NO: 79454 - protein, 64 aa, Unknown
  Obtained from environmental sample
  misc_feature (1)..(64): Xaa is any amino acid
MGIKSYKPTTPTLRYKQISTKEEVTAEKPYKPLTVGIKRSSGRDNQGHFQAAAAWLGQSVLGGT

SEQ ID NO: 79455 - protein, 192 aa, Unknown
  Obtained from environmental sample
  misc_feature (1)..(192): Xaa is any amino acid
MSIKRFLGFGFFLLLFAAAFVFGQSEQRYYKGAILNEEAYSKLPKKAALATRAYEGLPKAFSLKQYAPLPGDQTNYGTCVAWASAYAARTISESVALNRRNQTETTQNVFSPVYVYRNIRPDDPECQRGAQIFDALDLMRDSGAVRMLDIERSMAFPRVDLSITGKAGDIPSAVTSPLFSREDNRNPPLSHG

SEQ ID NO: 79456 - protein, 64 aa, Unknown
  Obtained from environmental sample
  misc_feature (1)..(64): Xaa is any amino acid
GNRFFFVYYGFEVYMNFDIEFDREEDGRWIAEIPEIPGVLAYGVTPLQAGAKAKALALRVLAER

SEQ ID NO: 79457 - protein, 278 aa, Unknown
  Obtained from environmental sample
  DOMAIN (2)...(272): ATP synthase
  misc_feature (1)..(278): Xaa is any amino acid
MASLRDVRLRMRAIEQTLKVTKAMNLISTAKLRKARRMLADTIPYFKRIQKSMFDILSSENNIKSKFFKKPDDSISGRTAIIVITSDKGLAGGYNANVFRRVNELCEKVENPVLILIGGAIAYRYFAHTNYVILENFSFHSQLPTLEHAGEVTEYVTSQFLWGMFDSIHIVYTHMFSMVKLLPTEHQIIPLVKEKIQDDIFEIGGEKRVDLKFEFLPSTEAVFDTLVPQYIKGRYLRGDGRVSRERAKRPHERDGRGSKSAEDMLASRTSAIKPGGEN

SEQ ID NO: 79458 - protein, 170 aa, Unknown
  Obtained from environmental sample
  DOMAIN (13)...(169): Histidinol dehydrogenase
  misc_feature (1)..(170): Xaa is any amino acid
MKIIHSKEFDSYWKNATKRSEDTKTEKSVKKIITEVRAKGDAAVKKFASKFDKSSPQQLEVPLSEAQRALEQLRANDAALVGALELAARHIKCFAEKQKEQFAHFEFEMEPGLVTGQRVIPVTRAAIYVPGGRFPLFSSVLMCMIPRLCARVEEVILSSPPTHGWLPDRK

SEQ ID NO: 79459 - protein, 228 aa, Unknown
  Obtained from environmental sample
  misc_feature (1)..(228): Xaa is any amino acid
MIKQAVIVAAGLGSRLKEKTVSMPKGFLELGGIAIVEWSVQKLLACGIEKIIIGTGYHAEAYDELAKKYPAIQTAFSANFETTSSMATLNVCAPYVTEDFLLLESDLIYDSIGLNVLCNDIHENVILASGATNSGDEVYLEAANGSFLKALSKNKAELSSTYGELVGITKISRPLLSAMCAYYEKKRAELPKLDYEHRNAWQCTNSDLRRESGEYNRIQPSADLIIGP

SEQ ID NO: 79460 - protein, 104 aa, Unknown
  Obtained from environmental sample
  misc_feature (1)..(104): Xaa is any amino acid
GIGTQKPCNYCHSVLNNGAHDSVGGQPTIAPFIDIPTIARACGYTKVHQAQTTKELKEMLAKKNEGLTFIEVKVKKGARKDVGRPKTMPQENKAAFMKFIEEYR

SEQ ID NO: 79461 - protein, 184 aa, Unknown
  Obtained from environmental sample
  misc_feature (1)..(184): Xaa is any amino acid
MGHSAICLAKGGTLTSPLLLRRLAIIPTLKCTLRCKLCSNYMTMYDDPPHVPVEEVMRDIDKIFALIDHAEWLQFVGGELFLRRDMGEVYTHCLRHRKKFDKLILIINATVLPDEQDIEALKHYGQHCQVQISDYGKHSRKLTEIVEIFKANDIPFVAKRYYGEAQHCGGWVDNNHFEIGANPK

SEQ ID NO: 79462 - protein, 203 aa, Unknown
  Obtained from environmental sample
  misc_feature (1)..(203): Xaa is any amino acid
LRDVVQRNNIRNVELLDRISKFVFDNQGNLFSAKKIADYFKSQNRSVDIETVYNYLNALEQAFVVKKVVRFDIKGKEVLKTQEKYFAGDHSLVYSIMGYKDRFISGILENVVMHEMERRGYRVFVGKLNGTEIDFVGEKQNKKIYVQICYQLNSQETISREFSPLELIKDNHPKFVVSMDSFFKDNINGIKHRFVGYFLLEKW

SEQ ID NO: 79463 - protein, 305 aa, Unknown
  Obtained from environmental sample
  DOMAIN (1)...(59): Helicase conserved C-terminal domain
  misc_feature (1)..(305): Xaa is any amino acid
MRSAEKSDDFIYDNKTVMVATNAFGMGIDKSNVSYVIHYNMPKNIESYYQEAGRAGRDGSPADCILLYNGQDVRINQYLITHNEDEEAADEELQAHNLELLKQMTFYAAGHDCLRRRLLAYFGEKSPANCGNCSNCLTEFEETDVTVEAQKIVSCVYRLKQRGRNFGKTMIIDILRGSKNEKLRRLRFDTLSTYAIMPDTSAHRIRLIIDHLIDKGFLLLEEGDYPVVMLGNAERLLKEEDRVLMKLPQEREKASDKKLSKQKSAQIIDTQNGSDEKTPQPSSVRFFDAQNEFDEKTQRQSGVKL

SEQ ID NO: 79464 - protein, 321 aa, Unknown
  Obtained from environmental sample
  misc_feature (1)..(321): Xaa is any amino acid
NHPRVIAEGTGNQPCRVIANTTSSVFESLNAVLTGIKDIREVIDRSDERRRLYSRRTILFVDEVHRWNKAQQDALLPWVENGTVILIGATTENPFFEVNRALVSRSRIFQLKPLETGDLIKAARRTLSDKENGYGKWNVTFEEGALEHLAEIAGGDARSLLNALELAIETSGITDEVSSSWPPPEGADIFVSLEAAEESIQRRALLYDRDGDYHYDTISAFIKSVRGSDPDAALYWLAKMVRAGEDPAFIFRRMIILAMEDVGLADPTVISTVISCAEAFDRIGFPEGNFALSEACLCLATAQTSNTTLAYFDALKEVEKE

SEQ ID NO: 79465 - protein, 296 aa, Unknown
  Obtained from environmental sample
  misc_feature (1)..(296): Xaa is any amino acid
GTPHAQIRPKDGSYTVSVTVKGSSDQSEMKVRTFTFDTQGPKITVNAPIKEKIYLSDPQRSTIETAISTNNIESLKSETITSGNTTTTLEKVYYDLLRYNVKDASSKLSGSFADTYSDVGTQYLYKFNNGSWELGDTIITNAGNLKSKDWEIDLSKKSDGTPRTLNDGMNSLSIRVKDTLSNGYDTGTAPSSENSGGNGFESNINFIFDTISPVLTKVDGLKDTSEGEEPTVKGPPGYFTVTGKVTGTFMVKRLSVSIGGSSESELAGLGQSAVVLQTVDGVTTPLGGNFFIDIFL

SEQ ID NO: 79466 - protein, 149 aa, Unknown
  Obtained from environmental sample
  misc_feature (1)..(149): Xaa is any amino acid
MADTKTGVQRKPILPLLGSSPHIASPVNSRMMMGNMLIAFFFVSVFSVINFGLPSLFNIIVAAAAAAGGEVLFRLATRKDIRAKDLSAGATGLLLALVIPPSLSLRMTALGSIFAIIVAKEFFGWLAANVFNPCPCGRALPPYEFSLPR

SEQ ID NO: 79467 - protein, 109 aa, Unknown
  Obtained from environmental sample
  misc_feature (1)..(109): Xaa is any amino acid
LTEINENETNGGINADVGDDVNDGINTDVNTDADSDNSINVDTGDGVSTDVSDGINADVDTDADVNGGIDTDINTDAGNETDSGVHADIVDGDAQAQSVPGDEGAIDET

SEQ ID NO: 79468 - protein, 317 aa, Unknown
  Obtained from environmental sample
  DOMAIN (152)...(228): Helicase conserved C-terminal domain
  misc_feature (1)..(317): Xaa is any amino acid
MIRSAERHEGRYKLIYVAPERLPTPEFMAFAQSVNISMLAVDEAHCISQWGQDFRPSYTRIPDFIARLSKRPVVSAFTATATPKVRDDILAQLKLRNPQILVAGFDRKNLYFGARKPKNKYDALTAFLKEREGRSGIVYCGTRSYVEILCKRLRTDGYSVSRYHAGLPDKERHDNQDDFIRDRVKIMIATNAFGMGIDKSNVSFVLHLNMPKDIESYYQEAGRAGRDGEPAECILFYSDRDIRMNAWLLENEKESRYPNRETERLLKERSRERMREMISYSTTKECLRGFILKYFGETPPVTCGNCDRCNVVPVTTG

SEQ ID NO: 79469 - protein, 89 aa, Unknown
  Obtained from environmental sample
  misc_feature (1)..(89): Xaa is any amino acid
SIPIRIIDTPGIRRFAIAGLQPSELIFYMREFAPLAGKCSYGLSCSHQTEIGCKIMEAVYAGVIHEDRYESFLRIQDEIAGKNSYPDCD

SEQ ID NO: 79470 - protein, 247 aa, Unknown
  Obtained from environmental sample
  DOMAIN (31)...(234): ABC transporter
  misc_feature (1)..(247): Xaa is any amino acid
IHKRTPTPRTQPENLRGKQALKEISLSYFYGAKIGVIGFNGSGKSSLLKILAGGDSEFAGETSVTPGYTIGYLEQEPRLQEGKTVKEIVSEGVSELVALLSEFDKVSEAFGEPFFYYEKLGAKHVQLPEKIEAADGWNLDSRLELAMEALRCPDGAEVIDHLSGGEKRRVALCRLLLQKPDILLLDEPTNHLDAETVAWLERHLRDYAGTVIAVTHDRYFLDNISGWILELDRGEGIPWKGNYSSWF

SEQ ID NO: 79471 - protein, 266 aa, Unknown
  Obtained from environmental sample
  misc_feature (1)..(266): Xaa is any amino acid
MDEDNSKIRILIIAAVIIAIVALLIFAVTRKEQDFSAKYAGFDLRGASTGRTNTYSRYMERYIDAPAGNRDIPINLFAWTSAQGVSTLDNFENEARVLRTEEISFVEYTIDVEQAGLYFIQMEYFPVESRGIAIERALSINGEIPFLGADRLSFQRVWGDSSNGRFDNQGNEIRSSQVEKPRWEKAWFRDSLGYFAEPYSFYLRQGVNTIRLTGINEPVVIRSPVIKAPVQTQNYRDYISSVNSDKYRNNRSNYLFKIRLKINARS

SEQ ID NO: 79472 - protein, 203 aa, Unknown
  Obtained from environmental sample
  DOMAIN (25)...(198): Prolyl oligopeptidase family
  misc_feature (1)..(203): Xaa is any amino acid
REKPAAPFAIVCPGGRFCICRIAPAKVSPLALAISKKGYNAFVIRYQIAGERFACEDLSAAIAYIFTNSRTLELNTEDYSLWGGSAGGRMVARLSSNGTAFYGEKDYPKPTAAVMLYTGHSDFAVNNPPTFAVLGEMDNIASPAIMEQRVNDMKAAGIDVEFYLYPNVGHGFGLGVGTFAEGWLNNAVRFWEKHIKKKGWRII

SEQ ID NO: 79473 - protein, 309 aa, Unknown
  Obtained from environmental sample
  DOMAIN (108)...(179): HAMP domain
  misc_feature (1)..(309): Xaa is any amino acid
FFSRIIERFVPRYSQHGTVTAHFDTSRIGKDMKETEADMCGPYLYDLLNAVQAGKPYTFSNYIAALKTQMHMFFIPITVGETKNSWSYAIAVMQNTIMAPVYQMMKIAIAISAVVLALLILAAIFLSSSISKPIVNVAGTLKDISQGEGDLTKRIAVRSADEIGDLGRCFNVTMEKIRSLVGSIKYKINGLNHTGFELSTNMGRTSAAVQQITSHLDNMKNLMVKQESGAEEAGKAVGDIKENIDSLKKMIEQQTESVNKSSSAIEEMTANIHSVTQTLVENSKNVSALTEASENGKSGVQTVAQEFRK

SEQ ID NO: 79474 - protein, 236 aa, Unknown
  Obtained from environmental sample
  DOMAIN (41)...(214): Leucyl/phenylalanyl-tRNA protein transferase
  misc_feature (1)..(236): Xaa is any amino acid
VPRFRPGPDLDFPRLDTTEYFQFPDPNECEDSIIAVGGNLSPGMLLSAYEQGIFPWYSPGDPVIWQSPDPRCVIFPEKLHISSSMRKILNGNIFKITYDENFEEVIRNCAKKKRPNQDGTWITDDIIEAYIELHQLGFVHSAEAWQDGVLVGGCYGLLLGKVFCGESMFANVPNASKAAFLTFAELLFERGLAFIDCQIPTKHLISLGGEEMARNDFLVLLKNNLNFSQRDSHKDH

SEQ ID NO: 79475 - protein, 231 aa, Unknown
  Obtained from environmental sample
  DOMAIN (15)...(165): RNA pseudouridylate synthase
  misc_feature (1)..(231): Xaa is any amino acid
MKTQPQFTIIYEDDNIIAVNKAAGISVGGDRWDESKERLDRLVAEAINPPAKIFTVHRIDRDTSGLVVFAKNEETHRRLSIAFEGRDVTKRYIAVVHGRPSWQETACNLPLIPNGNKLHQTIIDKYQGKKSLTRFVLLGSAEHYSVIEALPETGRTHQIRVHAAALGHPVVCDSMYGKGKPVMLSEIKRNWHGDPYDEKPLLARLGLHAAELAVPLREPRTENGGPRCQRD

SEQ ID NO: 79476 - protein, 122 aa, Unknown
  Obtained from environmental sample
  DOMAIN (6)...(120): Protein of unknown function (DUF1538)
  misc_feature (1)..(122): Xaa is any amino acid
MEAFFSVLPITIIVLIVSVFLTSLPSGTILMFLTGAAMLIVGMGFFTLGADMAMMQMGEGIGVHLTKSSKLFIIIIITLTIGLIITVAEPDLQGLAREVPSIPSISLIMTVSIRGRHFSCNR

SEQ ID NO: 79477 - protein, 98 aa, Unknown
  Obtained from environmental sample
  misc_feature (1)..(98): Xaa is any amino acid
MKKLRFLGIIFLAAAISLFISCPMEEEVDTFVAVTNINDVPTTGTVGNELTLTGTVVPPSATNKTIKWSLNTQGGTVNGNKITATAPGTLVVKATIVQ

SEQ ID NO: 79478 - protein, 315 aa, Unknown
  Obtained from environmental sample
  DOMAIN (27)...(243): Reverse transcriptase (RNA-dependent DNA polymerase)
  misc_feature (1)..(315): Xaa is any amino acid
MTVGELNDYLIKHYRELCESIRGGWYNPKPVRQVEIPKPDGGKRLLGIPTVVDRMIQQAVVQVLQPIFEQTFSDSSFGFRPGRNAHQAIERAKKYYEEGHAYVVDLDLEKFFDTVNHDLLMQMVMETVKEKPVTALIRKFLKSGIMVDGLASQREQGTPQGGNLSPLLSNIYLTKFDRMLEERGHKFVRYADDCNIYVKSPRAAERVMESCMKFLERKLRLKVNRKKSATGSPTKLKFLGFSLGQPKEAAGPQIRVHEKPLQRLKDRLKAMTSRRRRGTIEQILEEITRLMNGWLGYYGIADIRQYLERISHSPI

SEQ ID NO: 79479 - protein, 295 aa, Unknown
  Obtained from environmental sample
  misc_feature (1)..(295): Xaa is any amino acid
MGGGATWTVGVADKNPPVIILDYPETMWISPNNDGKADYLEFPISITDERFITEWVFEIIDENGAVARVYRNKENRPETRNVQNLIEMLRSINSGVDVPESMRWDGTLDIGGIAPDGKYFFTVTAKDDNGNTSTVGPYEVNIDNTDPEITVNAFAGEMNIFAPGSGGGRNTLSIIQTGSQEDLWEGGIYNSSGDKVKTFNFIDSQPAPIVWDGTDDSLSIVSDGVYSYRIAATDKAQNSAEASLANIIVNTVRPIVGLAITDAYFSPNGDRIKDTVTLVLTIPVKEGIAVLGTPV

SEQ ID NO: 79480 - protein, 292 aa, Unknown
  Obtained from environmental sample
  DOMAIN (30)...(63): Tetratricopeptide repeat
  misc_feature (1)..(292): Xaa is any amino acid
MGEYAKTERYYLEAAAILEKALGKEHRDYAASLHNLGVLYDQMSDYAKAERYYFEAAAIKEKALGKEHPDYATSLHNLGVVYEEMGDYAKAERYKLEAAAIIEKALGKEHPDYATSAVGLGVLYEKMGDYAKAKRYYLEATAILEKALGKEHPDYALSLNNLGILYCNIGDYAQAERYYLEATAINEKALGKEHPSYAVSLNSLGELYRNIGDYAKAEPYYQEAKTVFEKALGKNHPWYAASLNNLGELYQAKGEYAQAEPYLLETKAIMEKALGKSHPDYAAALTSMVSLY

SEQ ID NO: 79481 - protein, 252 aa, Unknown
  Obtained from environmental sample
  misc_feature (1)..(252): Xaa is any amino acid
LAHYPAEHRERAAIAISFAENVYDTITLRYKIKLPSKVNLVFNNGLFSNGEANPVYNMMQIWLTNWDFKIRGSHSWISDVITHEFSHLASIQNASKTPLPWIQALQISKSDFLNEKKQLAIGAYIPFTIMPLWFAEGTAQFESYRMGFDRWDTHRDMLLRTAFLENKVLPLEFMENFSDQALEGELGPYTQGFDLVRYIAETYGENSIPELWKDMGKLSNWTLSGVLNERFKLLKRNCIKIGGRNRKSVMKK

SEQ ID NO: 79482 - protein, 124 aa, Unknown
  Obtained from environmental sample
  misc_feature (1)..(124): Xaa is any amino acid
MTGTTKIFIHPKFVIGGISPRLYGAFLEPIGTMVNGSMYNPKHPTADAKGFRRDYMDALKESGVPVIRLPGGNFVSGWSWKDSIGPMEKRKTQLTPPGFSITQTRVGLDEYLQSRADFDPMPGP

SEQ ID NO: 79483 - protein, 126 aa, Unknown
  Obtained from environmental sample
  misc_feature (1)..(126): Xaa is any amino acid
MWFGKLSNKPLADLAGEAVRTTDNFNWTFIAILAVVVYIYATEFQRKNFKGIAAGLALYMVHWFYEIMNAVICSATGYALWTVSPQSTSFIILIGVSWELSMMFSIAGVATHKLLPEDPKIKILGV

SEQ ID NO: 79484 - protein, 206 aa, Unknown
  Obtained from environmental sample
  misc_feature (1)..(206): Xaa is any amino acid
LIFSAGCLFSAGNKDAGQAVTPEELDPTLITDAESVMKALYEAFSDKIDKVEYRKNDWAFLMNGVWYYYAKGRLLPERELRKAAKFRPYQFYKYPAELPPQTEATPEEIELYLGWTNQTNTLSRSVSFPGAFWKASTRKETEKQIVDITFLGKNTSVHKGIQPKLAIIEEQILEAAKTDKTIQTWIENLGSAGCYYWRVSLGHQSR

SEQ ID NO: 79485 - protein, 310 aa, Unknown
  Obtained from environmental sample
  DOMAIN (1)...(211): Elongation factor Tu GTP binding domain
  misc_feature (1)..(310): Xaa is any amino acid
MSIRGGRNHFFDTPGSSDFAGNVILSFRAAEFALLMVDGRSGVQIETVKLWRSLDAQKKPRGVFIAKLDNDQTDFNKALTDIKEKFKMEPVPVTIPMGTGGAFKGVIDVLHDKAYLAGGDGVEKECPIPDEFKDASKAARERLIEAAADGDDGLMEQYLEKGTLGPEEMKKGLIKALVDNKYIPAFAGSALKNSGLLPLMDFIANVGPNPRSAKDAVLGGDGKAHEISIDPDKPLSALVIKTTYDQFSGKLSWVKVISGKLAADTEAMNVSENKKERIGKLYTAEGKNWKRSGNCSSATWGLSRSRRRLK

SEQ ID NO: 79486 - protein, 285 aa, Unknown
  Obtained from environmental sample
  DOMAIN (210)...(256): Flagellin hook IN motif
  misc_feature (1)..(285): Xaa is any amino acid
MPSSDLQFYLRRQEERVNNIENQIDTHNRIHRLRDDPLAASHAVRYESYIARLNRFEENTQKAKEHLQNTHDYLYETTSIIQKVRELAVSGANGSWSPDDLKIMAMEVNELLKELVKISNATGPDTRQMFAGDKVFTEPFRLVEGTVEGGDDTVIKRVEYRGSGPSRKVEIGDNMFLDIDLGGDEAFWAEKMQVYSTTDATDYRVQEQGAFYIDGVEINVNIGDTLPSIIAKINESSAPVKAYIDPTSRGIFIEGTNAHLIRMEDKEGGAAVYAIGVLGQSDLEG

SEQ ID NO: 79487 - protein, 148 aa, Unknown
  Obtained from environmental sample
  misc_feature (1)..(148): Xaa is any amino acid
FRCFLNNGFGQGKWQILLRSAAKAGDDVWLAGSPSGLEIGPITVNPPLNLGKELAKIKGIGACIDTSDSIAESLLHISEQSKVRLDVENVILNSAEDFCLLFTARESARDSILKLTKKFPINKIGKAKKGSGIFLSGKKIEVKGWQHF

SEQ ID NO: 79488 - protein, 309 aa, Unknown
  Obtained from environmental sample
  DOMAIN (7)...(141): ATPase family associated with various cellular activities (AAA)
  misc_feature (1)..(309): Xaa is any amino acid
GGRIPKGVLLVGPPGTGKTLLARAVAGEASVNFYSMSGSDFVEMFVGVGASRVRDLFETGKKNAPCILFIDEIDAVGRQRGAGLGGGHDEREQTLNQLLVEMDGFAPNEGVILVAATNRPDVLDKALLRPGRFDRQVVVGLPDLVGREAILRVHLEKRKVPLDKEVNVKDIAKGTPGLAGADLENLVNEAALMAARFGNPTVTQLDFEEARDKLWMGAERKSLLMSEEDRRMTACHEAGHALINLLCKNADPLHKLTIIPRGRALGVTLSLPEKDKVSMSKEAAEDQIAILMAGRLAQMMSRPSIREEN

SEQ ID NO: 79489 - protein, 283 aa, Unknown
  Obtained from environmental sample
  misc_feature (1)..(283): Xaa is any amino acid
VCLSSGLSFRNVFVPAITVGIVISILSFIANDILLPGGYVKFAQLYRRILVSTPALELEANSVKKFKNTVIVTGNVTGNAIDNVLILDKTGDGERRVIMAANAELKDSGKSGLTLDLDRAFVQSSKEIAREDYDYASAGYLRYWVPQEDLIQAMSTVSPREMSSIDVYKEIKVRTLELNERMNEKKNKVSSLALALENNLRAGPNSQDWNRRTNQLAAFQREAQALQSMGQDRGLSLYWLEFYKKFSMPFGAFSFIFLAVALGLMAKRSGQTVGLFWPSAIIR

SEQ ID NO: 79490 - protein, 339 aa, Unknown
  Obtained from environmental sample
  misc_feature (1)..(339): Xaa is any amino acid
RNSTIASFESVLHISGPGILIRSDTVDGKIIKTLVYPYSMKIFNDNITIFIVWVEGNKRARLAKEEEYRGKLTDEQYLKIKNMVSALKREYEEQEVVVYDARTCILEIDNQVRYKHEPCDDNPEFSDPLFPPMPKEILVLFQYLVNLPPVKITKQRQIEYNPPPPLVHQKGTFIDTRDGKTYKTTKIGEQVWIAENLNYEASGSKCHDNKPANCKKYGRLYNWNTAMKACPSGWHLPSREEWEVLTDTIEAIGGAGTAGKYLKSTSGWNSDNGYNGVKYSGNGEDKYDFSALPGGFGKSDGYFSTGDDGHWWSASGYTDKKTAITFRYLVPLGQSVMET

SEQ ID NO: 79491 - protein, 329 aa, Unknown
  Obtained from environmental sample
  DOMAIN (12)...(304): Aldo/keto reductase family
  misc_feature (1)..(329): Xaa is any amino acid
MIETNKVPVIKLASGRVIPSIGMGTFGSDRYSPKEVSAAVSGAIRFGYRFFDCASVYGNEDLIGKVFEEAIQTGSVKREELFITSKVWNDMHGPGKVMTSINKTLADLRLSYVDAYFVHWPFPNYHSPGCDGDSRNPDSVPFSADRFMATWEQMEEIYNRGLTRHLGMSNMTIPKLEAVLPRCKIKPELIEMEQHPSFQQQALFGYCKKNNITVIGYCPIGSPNRPERDKAPGDVADTELPEVVSVAEAHNIHPALVCLKWAVQRGSIPIPFSVHAKNYESNLRAVTEDPLSYSEMELPKKAERNCRLVKGQVFLWPCAKSWEDLWDLK

SEQ ID NO: 79492 - protein, 237 aa, Unknown
  Obtained from environmental sample
  misc_feature (1)..(237): Xaa is any amino acid
MFKYTNPLTRDSELSMRDHYIIKDDGKWYCTGTSNPVWEGPNPGVRLLVSDDCLHWNHHSWLIDATTLPEDCGYNGRFWAPEIHLIKNRYWLTVNSGKVTKDDPKGMKTHSIWLFKSLQITGPYMLVNGPLTKQYNNDATLFEDDDGQIYLYCSGNGLFQARIDLEKGILLDGIEKFMDKLDIGFPEWIRGGIEGPFVIKQNGIYFMFFSTVDSADMKWGCCDLKPLGPFGDHPGKK

SEQ ID NO: 79493 - protein, 81 aa, Unknown
  Obtained from environmental sample
  misc_feature (1)..(81): Xaa is any amino acid
LKASCRFKTDNSTKEKATFSYSPDGINWQCIGSDLNMLWTMTHFTGARFGLFNYALKTAGGYVDFDYFRVVSNIGVKCPKQ

SEQ ID NO: 79494 - protein, 320 aa, Unknown
  Obtained from environmental sample
  DOMAIN (4)...(298): Pyruvate kinase, barrel domain
  misc_feature (1)..(320): Xaa is any amino acid
AGDIRRIKIPVALLLDTKGPEIRTGMVENDGTVTINNGDTVVISTDDCFTTAAGNGAPAHISLSWKEAGEKLKPGHRVLIADGLLELEVTDNAGGIKCRANNTAVIGSKKNVNLIGVHAGLPIMAEQDKKDLEFGISMDLDYVAASFLSFPHEVIEIRKFLEGHSSHMKIIAKIESGEGLENIKEIARLADGVMVARGDLGQQVPIEQIPLAQKHIINTCRRAGKPVITATQMLDSMIHNPRPTRAELTDVANAILDGTDAIMLSGETAQGSYPVEAVKTMHKIACVIEQSDEFRMRMRNFHDECHSEVHNPSANLIIGG

SEQ ID NO: 79495 - protein, 108 aa, Unknown
  Obtained from environmental sample
  misc_feature (1)..(108): Xaa is any amino acid
MILAPIFFIEYMLLKNFQKELAGYMIWLVALLWIIAIAAELSDMFDGMAARHYNLTSDFGRLFDPFADTIMQITAFLCFVIDGILPAFLFIIVLYRESRAESDPMGWG

SEQ ID NO: 79496 - protein, 161 aa, Unknown
  Obtained from environmental sample
  DOMAIN (6)...(128): PIN domain
  misc_feature (1)..(161): Xaa is any amino acid
VKKIKLYLDTSVISYLDAPDTPEKMTDTLCLWEELKSRSDIEIVVSELTLRELNRCQQPKLQFLLEKLNEFDYLLLDISEDDKNLANHYLKNAVLTEKSIDDLMHIAIATLNDCRYIVSWNFQHFVNPKTIHAVWAINKMKNLPEIDIVSPSMMLGGFLNE

SEQ ID NO: 79497 - protein, 326 aa, Unknown
  Obtained from environmental sample
  DOMAIN (100)...(265): ABC transporter
  misc_feature (1)..(326): Xaa is any amino acid
MAETRRSYERYTEQQEEIAKTEALIRRFRYKASKAAFAQELIKRLEKMERIEIPENLKKINITFPPPPHSPRVALAIEGLGKSYGAKKVLHGLDLTIDSGERLVVAGPNGAGKTTLLRILAGNDNDFEGSVKFGSGISAGYFSQDAAEVLNGSEQVLAFMEANAPTALIPKIRDMLGAFLFRGDDVYKPVSVLSGGEKSRLALLYMLLKPLNLLILDEPTNHLDLHSKDVLLETLNQFNGTIIFVSHDRAFMEALSTKTLELSPVADASSRARLFYGGYGYYSSRRGASYLRYADAEGITREDVKDQKEERKKGKETGSMKQRAQN

SEQ ID NO: 79498 - protein, 102 aa, Unknown
  Obtained from environmental sample
  misc_feature (1)..(102): Xaa is any amino acid
MGRSALTRYSFYVTGAGWALWGSGDSDSITLRPDKKSYAPGETAKLMVQSPLPKGSYLLTLEREGILEERIIELDGSALTIDIPIKESYIPIVSAESVHGGP

SEQ ID NO: 79499 - protein, 147 aa, Unknown
  Obtained from environmental sample
  misc_feature (1)..(147): Xaa is any amino acid
MESGKKPGNKLRLADVLVVLFCLSGAAYSINLFRLDLFQTLNGQNKAVIGTVIVKKNIVQRRMSDRVLWDRLIKESPVYSDDIIRVADNSEADLYVGGNDITLNENTLVRLRYDKETGTYKIELSSGNVGLVTAPEGGHVVLNIMDR

SEQ ID NO: 79500 - protein, 303 aa, Unknown
  Obtained from environmental sample
  DOMAIN (50)...(279): Mur ligase middle domain
  misc_feature (1)..(303): Xaa is any amino acid
TPFTTPWDVYNWLSTFINLEKGRQQWNFSLDVMNRLAEIAGHPEKCVPAFHVAGSKGKGSVTGMIAAILEAAGIKTARYASPHVSDFRERITIGDSFLDEETYALAGKELMELAGQVKLKNGEQMSYFELFTMWFFLCARLSNCNAMAVETGMGGRLDATNILDPLVSVITIIELEHTEYLGNTIAAIAAEKAGIIKQGRPLILAEQSIQALDVFREHAERCTSSLLYFPDCGEVKNTRIDKSGTAFDLVFNSETIPGLFVPIPGEVQARNAGLAVLAVKSAFPDIQNQCLYNGLNNSRSRSR

SEQ ID NO: 79501 - protein, 337 aa, Unknown
  Obtained from environmental sample
  DOMAIN (241)...(306): His Kinase A (phosphoacceptor) domain
  misc_feature (1)..(337): Xaa is any amino acid
MMAEVLGYLLFDNHRNAVYSTIFGCFETLPDGHVFIEGLVKDMADWYDPTERSWYKNAIAANGEIATTMIYSDEIYDSPVLIFSRCIHDDQGRRLGAVGLRIEIDAIGESVINTASAQGGYGILISEDLVLFAHPNREFIGKNMREIGDSISVLADKLLGGKEITEYPMTSYKGEDAVAFFRRLPNGWYLGVDFPRLPYYQSVIHLALILSIMGIALASVLSFVLIRVDAARNKSDMENRYKSEFLANMSHEIRTPMNAIIGMTELLANEQLTERQMGFIDDIWVSAHSLLSIINNILDLSKIESGKITLVPVTTIFTCLLTISFPCSSMWRKRGAP

SEQ ID NO: 79502 - protein, 280 aa, Unknown
  Obtained from environmental sample
  DOMAIN (1)...(279): Urocanase
  misc_feature (1)..(280): Xaa is any amino acid
LLTAGLGGMGGAQPLAATFAGAVSLNIECQQTSIDFRLRTRYVDVQAKDVGHAIELIKSHAASKEAISIALLGNAAEVLPELAAKVKTGAVAKPDIVTDQTSAHDLVNGYLPIGWTVEQWKAAQIDPSKHAELKAAAGKSCAVHVQAMLDFKSMGCAVVDYGNNIRQVAKDNGVTNAFDFPGFVPAYIRPLFCEGKGPFRWVALSGDPDDIYKTDAKIKELFPQNKHVHRWLDMAKERISFQGLPARICWLGLGERHVAGLAFNEMVKSQGSAESDPGCP

SEQ ID NO: 79503 - protein, 54 aa, Unknown
  Obtained from environmental sample
  misc_feature (1)..(54): Xaa is any amino acid
MRETAADTAVIQVLPPEEARRIAAGEVIDRPAALIREFLDNAIDAGASDIEVSI

SEQ ID NO: 79504 - protein, 270 aa, Unknown
  Obtained from environmental sample
  misc_feature (1)..(270): Xaa is any amino acid
INELSWSGQFDSIDHFIKSGLRPFIKTLNDIDFQTNLLYKKYDFYSAKITFQHSIRDILIGVISRQYDEIRKLKLQFGKLFDHPYWEDDNKHSANSVYSFNGKDVCGFSLAEACEREKIVISFNHDDFIFVQLFISKDDKKITLDNLFEHGHYTQIAYQRNFITFEEYCRKMFLKSKLNFSKIEAKHGFSLVRKDEENLFYKGLKKFSELSWTQIGDDKGLYFKEYKGGFKNTSEKIYEFRFSEKYRCFGYKKDDNFFVLRFELEHKLGN

SEQ ID NO: 79505 - protein, 307 aa, Unknown
  Obtained from environmental sample
  misc_feature (1)..(307): Xaa is any amino acid
RHSSLPKWPMTALPVRNPLTVPRRKIAHGAVQDCLDKGADYVFLPHFRDMPSYEDEIHANFCPITQGLPYYIEKAFPDIDKKRWLPLVVSFKFGDTKALELFCEMTSRLGIGEEETKAAFKAAMSKQQAYFEAVEKMGREALEEARKADRPVIATLGRPYNAFTPEANMGIPRKFTTRGYSIVPFDILPFHDEGIFPNMYWYYGQQDVKAANLLKKEDNIYLAYITNFSCAPDSFILHYIKWVMGQKPFLVLELDSHTADAGVDTRVEAFLDIIDGYRAKKSELEAERYDNGWRFVSEKTGGGFICG

SEQ ID NO: 79506 - protein, 297 aa, Unknown
  Obtained from environmental sample
  misc_feature (1)..(297): Xaa is any amino acid
VVVYAIMDNEGEKHFGQIYRWDKSEGGFMSLADELRTLPKIPVMDQWVAAVEKGKHIRIKESDYNEEQAAFMSVYGIKSMLLIPIFTHSNLWGAVTFQDHTNDRYFDDGCFDLLRTAARVFSNAIIRAETELTAKKAIESLKRREKMADTLNRAAVIFLSNSKEKFEETMTSGVGEIADVFDLDRFSIWRNYVKPDNLYVSQIYRWDRKSGGTTIPTKGLEDVTYKQFASRWEALLNSGETINSPVKFLPEADMLKSFGSISVFVTPLFFNNSFWGFALLEDRHSERFLKKRASRPI

SEQ ID NO: 79507 - protein, 165 aa, Unknown
  Obtained from environmental sample
  misc_feature (1)..(165): Xaa is any amino acid
MKYINFDKTGAYKKLSEYAKKAFVFRDKLDSKRVGECVVPMAAGLKYSWAAKSVDGETVKLLQELAAEQELIAKYKALLDGEMMNTGEKRKVLHHLSRGQQGNPVVENGKDIGEFYRTELSRFCDFAAAVHGGKYKGSTGKDFTTVVQIGIGGSNLGFRAMVLGA

SEQ ID NO: 79508 - protein, 332 aa, Unknown
  Obtained from environmental sample
  DOMAIN (91)...(280): Peptidase M16 inactive domain
  misc_feature (1)..(332): Xaa is any amino acid
FPGYREHDGQLHRSCPLNKLELWAWLESDRIMNPVFREFYSERSVILEERKQTLESRGGGLGRVNEHFNAMNWVAAPYTWEVIGWPSDISYVTREDANQFYATYYAPNNITAILVGDFKTNDAIALMEKYFERIPGNPRGVPEIYTEEPPRVGQKRMYAVTEAQPSIRINFHAVSAVHKDAPALTILASILGGGGGFGRGGGGGSSSGRLSKSLVLEQGAALSASANFSGMKYGGSFYLSASPTPGKTPEEMEPLLYAEIQKIVENGVTDAELQRAKISRENAMLMMQESNVGIRSALEAAEASGTYHDYLEHNSKFKAVTKEEHQRVAKNT

SEQ ID NO: 79509 - protein, 327 aa, Unknown
  Obtained from environmental sample
  DOMAIN (1)...(326): Carbohydrate phosphorylase
  misc_feature (1)..(327): Xaa is any amino acid
AHNQGAFPEEDVRRAHDLRIRQQYFLVSAVIQDIIRRHKQNGNNIADLGAKTAIHLNGSRCALAIPEMMRLLVDQEGMEWKEAWKMTQSIFSYSSSAVQREHVETWPVYKITQLLPRVMQVIFDINLEHLDLIRARGCNDVDLLRNLSLIEEGEVKRIRFADMAVLGSNSVNGVSAAHTEILKKHLFPNYYSQYPEKFYCKTNGVSHRRWLYCANRPLSALISRPIGDGWVRRPEELSKLEFYAESPEILKGFWNVKSRAKSELCAVLREKVGVALDPAMLFDVNCRPIHTMKRQVLHILYILHSYLKIKKGETLACRRLGQSVMPN

SEQ ID NO: 79510 - protein, 124 aa, Unknown
  Obtained from environmental sample
  misc_feature (1)..(124): Xaa is any amino acid
MIKTILGFGWLIFAMIFLLPFALTALILSIFGLKKPMMHIIYRLAQLWALSLIPVAGCTAEVKGRENIPKKGGVCFVSNHCGFFDIILLVAFCGRPFGFVAKKELAFVPFINIWILGRSDPWGP

SEQ ID NO: 79511 - protein, 316 aa, Unknown
  Obtained from environmental sample
  DOMAIN (147)...(213): His Kinase A (phosphoacceptor) domain
  misc_feature (1)..(316): Xaa is any amino acid
MRDLRELKTAFEQMDESERALSILGNILNSLDAMIYVTVPDTGEILFINDFMREQYKIESDCVGQFGYKVFHEDMEGICDFCPCYQLDKEPESTVVWEEQNSLAGRVYRNTDRYIEWYDGRIVHIQHSVDVTELIAAKEQAERSSRFKSQFLSRMSHEIRTPMNAILGITEIQLQNETLGPAIQEALDRIYNSGYLLLGIINDILDLSKIEAGKLEITPVNYDVASFISDTVHLNIIRYESKPIKFDLQVDENIPATLFGDELRIKQILNNLLSNAFKYTNAGEVSMSVAAEYMQGEKPQVTLVSSCRSVMGGEKK

SEQ ID NO: 79512 - protein, 286 aa, Unknown
  Obtained from environmental sample
  DOMAIN (23)...(110): Divergent AAA domain
  misc_feature (1)..(286): Xaa is any amino acid
VENQKIEWTRQWRDEFLKGLCGLANAQGGTLEIGRGDDGVVVGVDNAKRLLEELPKTIRLTLGVVPSVELLTEGGREYIAVSVEASGTPVSFHGRYYLRSGRTTLELSGGLLNSFMLRKTGKAWDGAAVPPAAVADGGVDGVDGGVCGDVNYADGGVSCMDGGVNDSDDGVKGAVYGINTDVGGADGGVSGANGGVNGSDSGVNTAAGGVFGGVNDFRKTILELMRVIPTISAQRIAAALGTTRRRVESNIHTLNKAGLVDRVGSDKTGHWEVRTGDAPNRRPPDA

SEQ ID NO: 79513 - protein, 129 aa, Unknown
  Obtained from environmental sample
  DOMAIN (8)...(129): Tryptophan synthase alpha chain
  misc_feature (1)..(129): Xaa is any amino acid
MSNIAKAFQNGKAFIGFITGGDPSIEKTKEFAREMIRAGADLIEIGIPFSDPIAEGPVIQEANIRALAAGATVEKLFDLVGGLRKETAVPLVFLNYLNPVFHYGLDTLPTKGQTGYGGFFLNAVKKVGL

SEQ ID NO: 79514 - protein, 146 aa, Unknown
  Obtained from environmental sample
  misc_feature (1)..(146): Xaa is any amino acid
MRIKFKLSIVVIAIMAVVVAGITSLLLWQASKNTLQLSLRSQEHLANGCAEFWKGREDGYIRALTTLANIMADFEDVKPEERRDRYDEMLQSALEEEPAMVVLYTVWKPNALDGMDEQYIERAGAGPNGQYAMAWSKETGSTVKRV

SEQ ID NO: 79515 - protein, 103 aa, Unknown
  Obtained from environmental sample
  misc_feature (1)..(103): Xaa is any amino acid
VCGTSGYEEAAAQGIIAGINAALKIKGKEPFILSRAESYIGVLIDDITGMEWNEPYRMFTSRAEYRLFLRADNSEQRLCEKAHKAGMLSGEGMEKITRKKGPG

SEQ ID NO: 79516 - protein, 155 aa, Unknown
  Obtained from environmental sample
  misc_feature (1)..(155): Xaa is any amino acid
MEKQVYSIVKGYDFSKRRGFYERQSDYLDGVVGDKGIYSTANDLFLFDQALYDYEFISKSLLDLAFTPAKPFDEKHKRDYGLGFRVKLTDEGYVVAYHNGWWKGFRTYFIHDYENQRTLIWLNNRSDVTVAPFMSEILEQSGFSEEEQASLGGGN

SEQ ID NO: 79517 - protein, 221 aa, Unknown
  Obtained from environmental sample
  DOMAIN (118)...(221): SIS domain
  misc_feature (1)..(221): Xaa is any amino acid
VILISQSGETADTIAAMRKAKSKGAVTLSIVNVVGSTIAREADFCLLTTAGPEIAVATTKAFSAQLVLLYVLAVRFAAKLGKISDEAEKELWRQINALPEKVSGLLEKVDAIQMYAANCVGCKSIFFIGRNIDYAISLEGSLKLKEISYIHSEAYAGGELKHGPISLIEEDTLVVAISNYAALYGKIMSNIEQVKSRGAKVLLIGNCPSVKPTTRPNLTLG

SEQ ID NO: 79518 - protein, 223 aa, Unknown
  Obtained from environmental sample
  DOMAIN (1)...(221): Predicted permease
  misc_feature (1)..(223): Xaa is any amino acid
MMVGSLVSVFAKEKIHRVFAALREKKLGIVGIVPASLLGIASPLCMYGTIPIAASFAEKGMEEDWIAAFMMSSILLNPQLLFYSAALGWPALVIRFISCFVCGIVAGICIRFFYKKQPFFSFTVFAAAANRDTDPNILLRLLKNFGRNIRATGLYFLVGIVLSALFQQYVPEEAFARLFGNTRGLGLLMAATVGVPLYVCGGGNHSLIQAWMTKGLSMETAPP

SEQ ID NO: 79519 - protein, 311 aa, Unknown
  Obtained from environmental sample
  DOMAIN (1)...(263): Ammonium Transporter Family
  misc_feature (1)..(311): Xaa is any amino acid
MAERFDFPISGHWIWGGGWLADLGFHDFAGSTAVHMVGGVASMVGAAIVGPRIGKYSKTGEARAIPGHSLTLGALGVFILWFCWFGFNGGSTVAMTSQDDIVSASSIFVTTNLAAATAAVFTMFITWIRYKKPDVSMTLNGALAGLVAITAGCDAVSPFGAFCIGAISAFVIVFGIEFVDKVLKIDDPVGAIGVHGLCGAAGTILTGIFALDGGLAYGGGWAMVGVQTLGVVSVAAWVAVTMSIVFTIIKKQWVCVLHAPKKLRVLILRNTTLRAAMRIYDIPRNSFAAEDLQHCPTGCSGKMCDSRWKQL

SEQ ID NO: 79520 - protein, 151 aa, Unknown
  Obtained from environmental sample
  misc_feature (1)..(151): Xaa is any amino acid
MTAIDSEALLKQMPAILRARAYRLYTQDGRRLIDLWLTGGAAILGHTPPNILREIKNTASRGLYSPFPHFTTERYLKALSKLFPGRSFRLYAAPPPELSVLFSSGEAKLWRPFVNPADPFSATEKAPVLVPVKPVIHIRSDRPGGASRHEL

SEQ ID NO: 79521 - protein, 199 aa, Unknown
  Obtained from environmental sample
  misc_feature (1)..(199): Xaa is any amino acid
VMKEFGGEVIEVRYTKGVNSSALNEAMRSIGTTRDIRLRTLRRLIEIKKPVRIMEAHSGISGLIVEQLEVEKEDGLRSFDGIWSSSLTDSASKGKPDIEAVDLTTRLQDLTNILECTTKPIIFDGDTGGKSEHFVYTVRTLERNGISAVIIEDKIGLKKNSLFGTDVTQELSPIADFCEKISAGKRAQIQKSSDKAPAI

SEQ ID NO: 79522 - protein, 355 aa, Unknown
  Obtained from environmental sample
  DOMAIN (1)...(276): DNA topoisomerase
  misc_feature (1)..(355): Xaa is any amino acid
KKGVSLTRKTKAGGSSSFKEGVRYGRVPAYVLITYMRPGQFRYSKSPHRGRKKIGFVKNFSQGTGLKNPVEYRSARKAQDAHEAIRPTFREYTPDSIKEYLTKDQLRLYTIIWERFVSSQMNNAKSRTVSVDIKVTEGQDEGLFRVSGTKLLEKGFYKAIKVLSSKEENSGSCPTLKTGDKVKAEKFKKEQHFTQGPARYSDASIVRILEEKGIGRPSTYASIISVLLDRYYVTRSNKQLVPTVLGKLINEVLVEHFPLYVDVDFTASMETKLDEVEENKISWPDMIREFWQPFKTTVDDVSKTIESFKGTLDEQTEFICEKCGKPLLKKLGRSGFFLAFSGFPANVEIQNGIPA

SEQ ID NO: 79523 - protein, 80 aa, Unknown
  Obtained from environmental sample
  misc_feature (1)..(80): Xaa is any amino acid
MLNVTQTPQFLRDIKKSDKKHRDIATLKELIEKLVNREPIPEKHKDHPLKGNYSGYRELHITWKPDFLLLYRITEVVPRA

SEQ ID NO: 79524 - protein, 156 aa, Unknown
  Obtained from environmental sample
  misc_feature (1)..(156): Xaa is any amino acid
MKSEKKIWLIEQFAHKTWTVSLSLAQEAARAGQHGKGYAVVAQEACMLADKLFEYAAEIKFEGADDAMLKDIADFVVELKFLSVNAAIEIQRVADISMDFNIPKSMAILTEELRRIASGLNELSVKAYGKNLLPCPGLASFSGSEVRDCFFIYTIS

SEQ ID NO: 79525 - protein, 88 aa, Unknown
  Obtained from environmental sample
  misc_feature (1)..(88): Xaa is any amino acid
LFSLFFDSISKRGYKSKFSKEELKAGISEWRRFMGEGSRAKLYALGGINAGNICELKEVGFDGAAVLGGVWNCADQVAAFKSILSAML

SEQ ID NO: 79526 - protein, 93 aa, Unknown
  Obtained from environmental sample
  DOMAIN (8)...(91): L-fucose isomerase, first N-terminal domain
  misc_feature (1)..(93): Xaa is any amino acid
MTKKRLQGDWPKIGIRPTIDGRMGGVRESLESQTMNMAKSVVDLLTATLKYPDGTPVQCVIADTTIGRVAESAACAEKFKRENVGVPPLRSDL

SEQ ID NO: 79527 - protein, 303 aa, Unknown
  Obtained from environmental sample
  DOMAIN (5)...(172): Domain of unknown function DUF21
  misc_feature (1)..(303): Xaa is any amino acid
IIARNQDAVQADDAEKRGKLRRAKSIRRGMEAVDKPNRYLASCRIWISVLRTLAALLAGFYLEHLIYGAHNAGIPFPIAVAAITAALALAILLFSDLAPGIIVRIAPERITVSLLPLFEALILPMRPLLFLARTAGKGLRPMFKTRQSTMTEDELRNALMEGEKSGIVESKERTMVEGVFYLGDRSLGAFMTHRSEIQWLDINDPPQDIRAKVLEFRAQRCFPVADGTLDAIIGAAYLEDIILDIASDQPAGLRSIMKKALFAPETMPALKAFETFRRGETGYIFVMDEYGGFCRHGLAAGLN

SEQ ID NO: 79528 - protein, 113 aa, Unknown
  Obtained from environmental sample
  misc_feature (1)..(113): Xaa is any amino acid
MGNVKWFEDAQIYHIYALSVAGAPFMNDYAVFEHKFGVIEKWLPHIKGMGFNTVLFSPVLKSRSHGYDVSDYFEIDNRLGTNDEFKSLIKKMHDNGIRVLLNSVFHHSGARFF

SEQ ID NO: 79529 - protein, 189 aa, Unknown
  Obtained from environmental sample
  misc_feature (1)..(189): Xaa is any amino acid
MMRTDIKGMRDYEYLEIWSGNKRLTHAVGDKLAGLAEAHKGRGGYGAFGAVVGCTERDEAAEIRKNFRNLFFLIPGYGAQGGAADDAALFLREGNDGAVHASRSVLKAWEGERKQSAGEVSTVTNSFTAEDARGAASEMRDAIRRATEQREKNLITISLWTTVSIVYSPKLKCEFLQPGGSTILERIHR

SEQ ID NO: 79530 - protein, 82 aa, Unknown
  Obtained from environmental sample
  misc_feature (1)..(82): Xaa is any amino acid
LSDIQETIIAFAYFDLDLYEPTKACLEAILPYLTRGAIIGCDELVYHPFPGETRAFDEVLGINRYKIKRDRNNSLQSYIIYE

SEQ ID NO: 79531 - protein, 313 aa, Unknown
  Obtained from environmental sample
  DOMAIN (129)...(291): Methyl-accepting chemotaxis protein (MCP) signaling domain
  misc_feature (1)..(313): Xaa is any amino acid
MLPPGLWPRPHPQGSGTLKDISEGEGDLTRSISASSKDEVGDLALYFNKTIKKIKNLVLLIKRQAGVLSDIGSDLSSNMTETAAAINQITANIQSIKSRIINQSASVTETNATMEQVIVNINKLNGHVENQSRNVSQVSSAIEEMVANVSSVTNTLVNNSANVTALKEASEVGRTGLQDVATDIQEIARESEGLLEINAVMENIASQTNLLSMNAAIEAAHAGEAGKGFAVVADEIRKLAESSGEQSKTIGTVLKKIAESITKIYQIHRQRTGQIRGDRQWRKYGVGSGKRYPQFPGKTGRREQTIPAGCRQF

SEQ ID NO: 79532 - protein, 131 aa, Unknown
  Obtained from environmental sample
  DOMAIN (4)...(90): ThiS family
  misc_feature (1)..(131): Xaa is any amino acid
LIKVLIPYALRSFTERNAEVELEGGTAGDAINALASAYPALKTHLFTEDGQLRDFINLFVGGANINSLQGLNTPIADNGELMIVPAIAGGSGDHVGDNIDAELTNEEIAPLPPPLCFCREIGVVRTKKILR

SEQ ID NO: 79533 - protein, 329 aa, Unknown
  Obtained from environmental sample
  misc_feature (1)..(329): Xaa is any amino acid
MIASTARVPGVLLDKLERQLTGLRSGSRRGLQERFDGSIGAASVLFPWGGSEQGTPECGMAALLPSLDKKSLSASLMTFGYDPELMSIDPYQGAKGSVREALAKFSCLGGDYRKARLSFQEYFERPRTKESWGKPAAALLGALEAQIRLGIPAIGGKDSMSGNYRSQETELTVPPTLVAFAAGITQASKVRSGALSNEPGNTIILLSQAARDGIDEWDVFKMNMKTLEDLSAANKVRSAYPVGSGGIAVTLAIMAFGNMTGVEAYEPVLSLIDENNYQGSVLVEISGDVPEQEAASQNPWIIAAPCPGRIGFQDCPPGLLKRWGRNFRL

SEQ ID NO: 79534 - protein, 249 aa, Unknown
  Obtained from environmental sample
  DOMAIN (1)...(249): Serpin (serine protease inhibitor)
  misc_feature (1)..(249): Xaa is any amino acid
MLYSLTNLQNKEYKEYYNPLKIANAIFVGNNVTLKKDFAQTFMDYYRGNSINVDFSSRDAVDAVNRWASENTNGLITNLIQKFDPLTVAAIANAIYFSDRWSWEFDPGLTKEGLFHAPGLDTTASFMLREGNAQTYYEDSKVQAMPLRFKTGGGLYIILPKTGGAAQLLSSMTNDYFNEIQRDSVQATGKLLLPRFSIESTIDGLAEALVDLGVPLFDDVTAPLTGGLIEEPLSVFLSDADTRPILTIV

SEQ ID NO: 79535 - protein, 195 aa, Unknown
  Obtained from environmental sample
  misc_feature (1)..(195): Xaa is any amino acid
MKKFVCVFILLFFVSVLAFSQAVTLDNALRNSTTYLNSRIKANTKVVVLNFTSDWPRLSDYIIDELIGYVVNDGTFTVVDRNNLETIRKELNFQLSGEVSDETAQSIGKMLGAQTIINGNITAIGSSYRLRVRAISVESAQIIGMNNVDVAQDSRIAALTGTASATPSVITTTPATTPTAPANETQLSANLKLKG

SEQ ID NO: 79536 - protein, 231 aa, Unknown
  Obtained from environmental sample
  misc_feature (1)..(231): Xaa is any amino acid
MSFHQTGYINPVNDIGPLLLGVDKPGRYCGGEHGRLAKKEAPLQALIAFPDLYELGMSNQALRIIYNGLNRIPGVSCDRAFAPAPDFESLLREKGLPLYGLDTGISLRRLDLLLFTLGYELGITGILAMLDVSGIPLRCDKRGEEDPLVIAGGPAVSNPLPYSAFIDAFWIGEAEAGFFYLTAELLEIKRAGGSRSALFDRLREHPNIWVRGKEKAFRAVDACFATRGDVA

SEQ ID NO: 79537 - protein, 111 aa, Unknown
  Obtained from environmental sample
  DOMAIN (8)...(72): 2Fe-2S iron-sulfur cluster binding domain
  misc_feature (1)..(111): Xaa is any amino acid
MDNKMINLKINGRPVTVPAGTTILKAAREIAVNIPTLCWHPDLEAWASCGICIVKAENSPKMLRACATAVEEGMSIITHDSEIVEVRKTGAGADPLNAPKRLPSAESDLGR

SEQ ID NO: 79538 - protein, 134 aa, Unknown
  Obtained from environmental sample
  DOMAIN (5)...(114): Leucyl/phenylalanyl-tRNA protein transferase
  misc_feature (1)..(134): Xaa is any amino acid
MRDLLFLTLYTVHGDEWLTPPLIAAIKNIRRDKPHGVYPTSFALYQNGKLVAGEFGVISGRVYTSYSGFYDESNAGTVQLILTTRYLQEHGFAFFDLGMPLDYKADLGATDVSPQEFVKFFRSNQELEIVIPDM

SEQ ID NO: 79539 - protein, 202 aa, Unknown
  Obtained from environmental sample
  misc_feature (1)..(202): Xaa is any amino acid
MNVLFFIGNGFDLNIGLKTRFKDVLSFYIKETSDDPVIKSFKESINQNIETWSYFEERIGRYSDDMKKKETPIETFLDFSKCNLDFKKYLKDYLKKEEIKVKYEDKQNIAKIFKKSLLNFTKYLDIDQKIFFDETAETIKYSYICFNYTSVFNNCLDILKKSNIFQLEKRNKTGIFGNIIFAHNDLGNVLHIHGTLDNNMIL

SEQ ID NO: 79540 - protein, 255 aa, Unknown
  Obtained from environmental sample
  DOMAIN (1)...(22): 4Fe-4S binding domain
  misc_feature (1)..(255): Xaa is any amino acid
IDYTRCITCEKCKKVCPSKAISYSKPLSYSKPSKRSMQKETEILSESGAERRNLFAGSAIAALSCATKLRASQGDGGLTNLIDKKVPNRKRPIVPAGAGSFKNFHDRCLGCQLCTSVCPNDVLSNKAFGTTKPNMSYERGYCRPECVKCSEVCPSGAIKPILRAEKSSIQIGCAVWNKELCIINTDKVVCDLCSRKCPNAAIAMIPQSADAPTDAPKIPMIDTNRCIGCGACEHLCPARPYSAIVVEGVEVHRTV

SEQ ID NO: 79541 - protein, 64 aa, Unknown
  Obtained from environmental sample
  DOMAIN (18)...(62): Bacterial regulatory helix-turn-helix proteins, AraC family
  misc_feature (1)..(64): Xaa is any amino acid
MKWAKDLSNYLNRLRVEKALVMLGETDSPINKISADCGFEDQSWFSKVFKSYTGISPYEYRKYG

SEQ ID NO: 79542 - protein, 102 aa, Unknown
  Obtained from environmental sample
  misc_feature (1)..(102): Xaa is any amino acid
MAEKFSVIEALAGTGRTHQIRVHAAALGHPVVCDTMYGKARPVMLSEIKRNWRGDHYEEKPLLSRLGLHAAELAIPMESLNFNAPLPRDMAALINQIKKITC

SEQ ID NO: 79543 - protein, 88 aa, Unknown
  Obtained from environmental sample
  DOMAIN (2)...(83): GrpE
  misc_feature (1)..(88): Xaa is any amino acid
YRESRGLRAGVELIQKQFGDVLRRQGVSEIEIRPGDMFDAHVAEALTTIDTANFHEGSVVDVCEKGYNLGERLLRPAKVVVASGNNPA

SEQ ID NO: 79544 - protein, 122 aa, Unknown
  Obtained from environmental sample
  DOMAIN (1)...(68): PPIC-type PPIASE domain
  misc_feature (1)..(122): Xaa is any amino acid
ANTNGASFESLVSTYSNSPSKGTGGDLGWVEKGLLLKAIEDAAIALKPDEIGGPIETDKDFILIQLIAADLDGVKPFESVKGDIIRKLQEPKAENAKMHYLQSQRLRANIRYIVPKEQIIKG

SEQ ID NO: 79545 - protein, 304 aa, Unknown
  Obtained from environmental sample
  DOMAIN (64)...(211): DEAD/DEAH box helicase
  misc_feature (1)..(304): Xaa is any amino acid
MRLPTWDKPHILYCYEFFPEYIGLPVGCLDGLLAILEHYQIKPELQNKQNHGQSIEIQFTGELRGDQKDAFQKLTANQMGILSASTAFGKTVVALRIIAERKVNTLILVHRKLLADQWIERMNHFLGIPKKDIGYYSGTKKNRTGIIDIAVMQSIVKRDKVEDWVAEYGQIIVDECHHISAASFERIIRKCPACYRLGLSATVIRKDGQHPIVLMNLGEVRYSNTRNSASLFSQKVFPRLTEFNMPTESNMPPAIQDIFHNLYMNEDRNKLIIQDILDAHREGRECLVLSERLEHRNLAIIRGE

SEQ ID NO: 79546 - protein, 131 aa, Unknown
  Obtained from environmental sample
  misc_feature (1)..(131): Xaa is any amino acid
MAIPKEMQGKYNEIAAMIVEFCDKKLGVDYKRLCLGLLEKLCRKRPSPLLSGRTNTWAAGIVYAIGSNNFIFDKTQKIHLTSNELVAPFGVSSSTASGKAAEIKKMFKIDFFIPNGCYGNHRKHPIIWMYR

SEQ ID NO: 79547 - protein, 330 aa, Unknown
  Obtained from environmental sample
  DOMAIN (3)...(105): Response regulator receiver domain
  misc_feature (1)..(330): Xaa is any amino acid
LGPRQIASLENLKRLHVLTANNGKQALEILSGAKILPKIILLDVEMPEMTGKEMFEILKADESFKRIPVIFITAANDSETELLAAGAVDFINKPFTPEIVKLRVRNQISLKNYSDSLEKMVAEKTAEVIKKTEEANKTLNNALQGLANVIEHRDLESGEHVKRTQLFVGALADYLIKSKSPYADQLYEMQPDIIVKSMALHDVGKIAIPDRILLKPGRLDPEEYDIMKTHTTRGKEIIGELGDVNASLYLKHCEDICYGHHERWDGKGYPRSLGGTEIPLVARLAAMADVYDALVCARVYKAAIPYSEAVKMISEGKGHSLILSVVTLCL

SEQ ID NO: 79548 - protein, 168 aa, Unknown
  Obtained from environmental sample
  misc_feature (1)..(168): Xaa is any amino acid
MGRNTAPGIDAYRQTMNPSVKRREDEKEAAHPGKTGEKPPVNNTAGGLIKVSPTPSKPESKTRRVAKFLILIGSERASKILGELDSKQVEDISKEIASIKGVDKEEAESIITEFKSLLSGSYKYLGPSFGGVDTARNMLHAALGEEKGEALLQKTLLNLPQNICSRPI

SEQ ID NO: 79549 - protein, 212 aa, Unknown
  Obtained from environmental sample
  misc_feature (1)..(212): Xaa is any amino acid
ICGLLLLALDQCIETPEDSRLIERIQAQIDQIVCVDCQIKDLSSVSFDRQAAALQAVSYLFKQGFSDIAYLGESDQRVTGFKQAFQERGDNISGLYIDAAADMASGLKAVQKLHKSRGALPRAICAGSDEVAVGILFYLREQKIAVPEETALISIDNIEIAEYTNPQLTSINVQKRAMGYRAVEMIVNRAAGRGENALTLLLPTNLVIRKSS

SEQ ID NO: 79550 - protein, 338 aa, Unknown
  Obtained from environmental sample
  DOMAIN (161)...(335): Histone H1-like nucleoprotein HC2
  misc_feature (1)..(338): Xaa is any amino acid
ALNTGFGPQLRGAYRTYGGSDDEVCGLGETSHAVLRRTALRRVADYALKDYTVKGKFDADRFTGTIIEKYYLHDDFRHLIGINHYNNITWFNKEAFESTLLYGKLFYVLEGDSAYISSEQSSDKPAGKPLPWLQRADYIARIIESLQKAEIASGYQLDKLILLLAKEQSAVIAADKKTAAKKATGGKPAAKEPADKKPTDKKAPAEKQTDKKPAVKKVTAEKPAVKKPADKKAPAEKPADKKPVVKKPADKKAPDKKPAAKKPVVKKPADKKTTGGKPAAKKTTVKKAPDKKPADKKSTVKKPVIKKTTGGKPAAKKPVARETTSRGLVPILILREKQ

SEQ ID NO: 79551 - protein, 322 aa, Unknown
  Obtained from environmental sample
  DOMAIN (17)...(199): Xylose isomerase-like TIM barrel
  misc_feature (1)..(322): Xaa is any amino acid
MMESGPRSLPPKREDLFTLVAKAKKLQKATGVKLLWGTANVFSNPRFMNGAATNPEFGVVALAATQVKAAIDATIELGGQGYTFWGGREGYMSLINTDLKREKENLARFLTMARDYGRKHGFKGPFYIEPKPMEPTKHQYDFDTETVIGFLREWKLDKDFRMNIEANHAELAGHEFAHELETAAVSGFFGSVDANRGDIQNGWDTDQFPNNYYETAMAMYTILKIGGFTTGGLNFDSQIRRNSIDPTDLFVAHIGGMDAFAVGLQIAHRIIEDGKIPSFVKKRYASFTTGDGAKFSKGQMILEQLAEIGKQAGYGKTAHTSG

SEQ ID NO: 79552 - protein, 72 aa, Unknown
  Obtained from environmental sample
  DOMAIN (5)...(71): FlaG protein
  misc_feature (1)..(72): Xaa is any amino acid
LWRVASHVGFGEIGLAFNRKLQFVVDHGSNEVIIKVIDKETDKVIKEIPPEELQRLHSNLKEAIGLLFDEMV

SEQ ID NO: 79553 - protein, 326 aa, Unknown
  Obtained from environmental sample
  DOMAIN (64)...(177): DNA mismatch repair protein, C-terminal domain
  misc_feature (1)..(326): Xaa is any amino acid
IFAQWPARRRFLKSAETENAHVWATLTRLALATPAVRWVVRPARSMELTLPAAQDLKQRIVLLSGERMSRLVPFTDGEAPWRMHGYISPPDLCYRDRNHLYLFVNGRPVRDRLMLSALSSGWDGFFQKGTFPAVVLFLEIPAEAVDVNVHPTKSEVRFREPQRVFPWISRATREAWGAAKGELPSFFAAPSRSFYGGSDAPLEGRPSTTVATDTVAPQQQQGRPYSHYAPYGHQATNREAVKSMWEAFLPISHDRPYETPTATRMAVAEVRDSEAPAQGSIKYLGAFMDTYILAECRTGDASELWIVDQHVAHERVLSRAICHAGP

SEQ ID NO: 79554 - protein, 266 aa, Unknown
  Obtained from environmental sample
  DOMAIN (27)...(177): Bacterial flagellin N-terminus
  misc_feature (1)..(266): Xaa is any amino acid
MRINHNLTAINTHRQMGISELDGSKSMEKLSSGFRINRAGDDAAGLAISEKMRGQVRGLSMASKNSSDTISLIQTAEGALAETHSILQRMRELSVQSANDTNTDKDREELQAEVTQLKAEIDRIGNTTEFNTKKLLEGSATGVRDEIVGTLRVNNNSSVVIDANKEKGMSASIGNDKSWAFDGAYMLVKVNQTPDANGNSVFKAEDYNLIGPDGNVFKFKTYTPNTQIKASGLEANTIIAEGGETRHYRALAVGQTLSAINPGGKR

SEQ ID NO: 79555 - protein, 161 aa, Unknown
  Obtained from environmental sample
  misc_feature (1)..(161): Xaa is any amino acid
MDVRKKSNSKFRFADFLVILLCLSGAVYCINLFRLDLFQTLNGQNKTSIGTVSIKKNIVQRRMSDRVLWDRLIKESPVYSEDIIRVGGNSEADLHVGGNNITLNENTLIRLRYDKETGEFKIELTSGNLGLVTAPEGGNVVLDIMGRQVRKAGSANLSWFS

SEQ ID NO: 79556 - protein, 176 aa, Unknown
  Obtained from environmental sample
  DOMAIN (1)...(127): Adenylate and Guanylate cyclase catalytic domain
  misc_feature (1)..(176): Xaa is any amino acid
TTSGSPQEDAFNCIKAALMMRDMLKKLNKNRKDENMAAPPIQIGCGINTGIVTAGQIGSDLRMEYTVIGDPVNLASRVESLNKPLGTDILITEDTWELVGKYFITEEMPSVTVKGKEKPLRLFAVVNFNFAVLKITPAASEPRTLAEVRKYLGIEAKDVSQADVNAEELKYKIGGK

SEQ ID NO: 79557 - protein, 315 aa, Unknown
  Obtained from environmental sample
  DOMAIN (77)...(277): Sigma-54 factor, core binding domain
  misc_feature (1)..(315): Xaa is any amino acid
MNPQVYQSLKLMELPLVDLREKIEEELEKNPALEVVDDRSTVSLSEDEPQQREIEEYFETSSDSGFIYSGSAGAAASDEHRRFMEGALTRPETLQQHLLWQLQLEPIDDELRSIAAILIQNLDDDGFHKEPPETLFKESELFPVVPPPRLDEAIRLVQTLDPAGCCAANYKESLRAQISLLRDAPDCLECSLDHLDLFEKGKFSAAAKVMDCGEDEARACYKLMKKLSPFPGRRFAATEVRFVIPDIQVARDPNSEKGDFVIILNNEMVPVLGISPFFKKLEPLTTERKIPPAFKAGNFAVKHQGGAYLYNLACH

SEQ ID NO: 79558 - protein, 89 aa, Unknown
  Obtained from environmental sample
  DOMAIN (4)...(89): SUA5 domain
  misc_feature (1)..(89): Xaa is any amino acid
MDQIGTRELRRFASGEGRLYFSPPKTKGILADRTRVLSEAGNVTEAAANFFDCLHELDSLGLDFIRAEEAPDCGLGEAINDRLRRAASN

SEQ ID NO: 79559 - protein, 232 aa, Unknown
  Obtained from environmental sample
  DOMAIN (1)...(123): SPFH domain / Band 7 family
  misc_feature (1)..(232): Xaa is any amino acid
MLTGDLNIVDVEWIIQYRVSDPKAWIFNVNERIATIRDVSRSVINMLVGDRAIMDIMGLERSAIEAEGIAMMNETFRGYGLGIDVIAVKLQNVTPPSGVQQAFEDVNKAMQDRERLINEGQQAYNEEIPKTRGEAERLIQVAQGYATERVNRAHGDVARFNAVYNEYRRSPDVTRQRLYYEMIEEVFKDEKGTALIDRSLKNFLPMMNSHARTEGSNEKNRNHRCYNFCHFY

SEQ ID NO: 79560 - protein, 265 aa, Unknown
  Obtained from environmental sample
  misc_feature (1)..(265): Xaa is any amino acid
MSDLEKLPKGESIPLATIIPLGDKFICKNSEYNELFKFQDNYNFFYKTTWQGKQGIVFGADLYGNKHGIDSDNETNRMTALLYKDNGYFNNFYPYIGYNAINADTQKELKTNGLAIEEVRKSEYTLSAYSPDDMISLYMGRSKVTPVFVTTDLAAHANHLVFDKLLQYCEEEYFFPQLVTVIDKYIELIEQKKGEIPDAVYNSSKLYFQTAQALVALAPKKVVSEEYHTPYVYNESNAAKVLSNYPQQVVKVLKQIITRRDLDIA

SEQ ID NO: 79561 - protein, 294 aa, Unknown
  Obtained from environmental sample
  DOMAIN (1)...(93): Transglycosylase
  misc_feature (1)..(294): Xaa is any amino acid
MGQNSAREQGGKNGLGRKIGEAVNALRLEARFSKNEILEMYLNSLPFGFRTEGAASAARNFFSGDLFMLSPAQIFCLAVIPRRPNLYNPLENPEACVKAAAELQAVFSKNKKLKNAWPLLAEINDEDWKFAASSVRRFAYPFALPHLIRHINAGLTPNRNPPRGEIHLSIDLALQRYIEGLIAGNVDRYYSSRLTNGAAIVIDNENGEILAWVGSADFNNSEAAGQIDGVMALNQPGSAMKPFLYAMAMENGFKPTDVIADIPVNFGESELYIPRNFNNRFNGPILFRAPLCSS

SEQ ID NO: 79562 - protein, 198 aa, Unknown
  Obtained from environmental sample
  DOMAIN (11)...(197): Phosphomethylpyrimidine kinase
  misc_feature (1)..(198): Xaa is any amino acid
MKTALSIAGYDCSGGAGIQADLKTFSAHGVFGMTAVTSVVAENTFRVIEYQNSGPGIIEKQIDAVFEDIPPDAVKVGMLSCGQIMMAVAGKLREWKPRNIVIDPVMYAKNGAPLMEMDAIITLIKEVVPLADVITPNIPEAEKMSGGMAIKTRDAMRAAARRIHAMGSRAVVVKGGHIEGDATDILFNGKEFTNTGSP

SEQ ID NO: 79563 - protein, 253 aa, Unknown
  Obtained from environmental sample
  misc_feature (1)..(253): Xaa is any amino acid
MGDIYCLLYERGYQLLKRQGRLCFITSNKWMRAGYGENIGKFFAENTNPELLIDFAGVKVFKSATVDTNILMFSKVKNRQKTSACVVKKDSIKDLSDFVIHNSTPCSFKTSESWVILSPIEQRIKAKIEAVGTPLKDWDIQINYGIKTGCNEAFIIDGAKKKELIRQDPKSAEIIRPILRGRDIKRYGYEFADLWLINTHNGIKEKGVKPVNINKYPAVKKHLDRYYPELKKRQDQGDTPYNLRNCAYMEDFS

SEQ ID NO: 79564 - protein, 96 aa, Unknown
  Obtained from environmental sample
  DOMAIN (8)...(66): Ribosomal protein L11, N-terminal domain
  misc_feature (1)..(96): Xaa is any amino acid
VAKKVVGQVKLQITGGAATPAPPVGPALGQQGVNIMEFCKAFNAKTKDSAGMTIPVVITVYSDKSFTFITKTPPAAVLIMKELGKISSCHLILGNP

SEQ ID NO: 79565 - protein, 208 aa, Unknown
  Obtained from environmental sample
  DOMAIN (50)...(199): ATP phosphoribosyltransferase
  misc_feature (1)..(208): Xaa is any amino acid
MADKLRLLVPKGRIFDKVADLLTEAGFPVALAERTYRPSLGADWIDAKIMKPQNVGELLELGSHDAGFTGIDWIRESGADIAEVMDLGFDKVKIVAAVPQEFNESDLRAKKLVVATEYVNLAKSWLEKSGYQYRILRTYGATEVFPPDDADMIIDNTSSGQTLKDNGLRIIGVILESSTRFVASPCRSCRSRKKEPSAARPSCGGGNP

SEQ ID NO: 79566 - protein, 229 aa, Unknown
  Obtained from environmental sample
  DOMAIN (15)...(229): Phosphoenolpyruvate carboxykinase
  misc_feature (1)..(229): Xaa is any amino acid
MSCCESPSNHEKLNAWVKEIASLTEPDSIYWCDGTKAEYDEMVQSLIDAGLATPLKKRPNSYLFRSDPSDVARVESRTYIASKSQDDAGPTNNWIDPKELKKEMTALYKGCMHGRTMFVIPFSMGPIGSPIAKIGVELTDSPYVVINMHIMARVGVKVLDVLGTKGEFIPCLHSIGKPLLSCSDDNGKWPCAPLKKNTLLISRRKNIWSYGSRYGWNALLGKNASHLAC

SEQ ID NO: 79567 - protein, 88 aa, Unknown
  Obtained from environmental sample
  misc_feature (1)..(88): Xaa is any amino acid
VRHPEILNPSQEVGLCESIYEACVPLLETFGRLTKDIVPFRKAISLSPALCHMLTDEFLLRRYNDYADKQIAFGEQQLLDAADNPVLN

SEQ ID NO: 79568 - protein, 220 aa, Unknown
  Obtained from environmental sample
  DOMAIN (34)...(168): HD domain
  misc_feature (1)..(220): Xaa is any amino acid
FKAEVDRQTESIRNLQKAIVYSMSDLIEKKDGYTGEHTRRVSEYVAILLREMVRRGYKLTESEIQKIAESSLLHDMGKIAIPDNILLKNGKLTDDEFEAIINHSTTGADSLQNSLQFAKDDDFLKSAFIMAKHHHERWNGSGYPDGKKEDEIPLLARIIAIADVYDALRSKRSYKEPLSREKAKSIILEENGRPFDPELVDVFLAVEPEFHKFCEATRNI

SEQ ID NO: 79569 - protein, 255 aa, Unknown
  Obtained from environmental sample
  misc_feature (1)..(255): Xaa is any amino acid
LFSCTGKPKVKTTENNEQVKENVVEKLDKQAEKIDELAVEEKTPVDLAAASPEKPADTPADMTAEKPAEEPLNEETAQADSDKELIADVSPVKTEPAAQEPAANTPSVSTATSSQTQPPQTQTQPPQTQPSQTQPQTQPPRTQPPQAQTPQQAQTPQSNPPAQRQQTVTPPAQTPPEEKTDSSDTASSGDDSQEQKEPSFFIAGGNSAPAARIESLTPMGNMPHDKEIIFSRNVRATVGQIVENPFPRNGLGLPG

SEQ ID NO: 79570 - protein, 66 aa, Unknown
  Obtained from environmental sample
  misc_feature (1)..(66): Xaa is any amino acid
LKSNSGEFHQVRYSDDAIEAAVRLSAQFISERRFPDKPIDVIDEAGAFACIRAGQAFKSEEAAENA

SEQ ID NO: 79571 - protein, 295 aa, Unknown
  Obtained from environmental sample
  misc_feature (1)..(295): Xaa is any amino acid
MNPDLDKPKGGLWRYARFMLIMKAVIIRLKLPVIKNTYRPAEAAEVKIKVLLNGKAAPNTEVTFMAVDRGVVDLIDYHVPDPAAFFYDPRNFPLGVRGADSRSLLIDPVTYSLSDLQGGDSEDGGKTNDAARLKSRMMNERRDFRSMAVFEPYLLTGADGTATVKFNLPDSLTTYRCTAVAAGLRNFGIKEHDLRVSAPLTAVAALPRKLRWRDTGTVSLILTNLENTAVNAHVSLEGGDNAIIEVDGESSKTVKMLPGVSEEVTFRVAAVGVGEAQLTLPSARRRLGDHPGEQT

SEQ ID NO: 79572 - protein, 224 aa, Unknown
  Obtained from environmental sample
  misc_feature (1)..(224): Xaa is any amino acid
LKQSNPKWQKYWEQNKSFKTAEDRTFPKDKRRYVLDRFPYPSSQGIHLGHPEGYTATDIYCRYLRMNGYNVLHPMGFDAFGLPAENYAIKTGTHPAVTTKANIDCFRLQLKALGFSYDWDREVDTSSVEYYRWTQWIFLKLFEKGLAYEAESPINWCPSCKTGLANEEVKDGLCERCGEKVTRKRIRQWILKITAYAERLLADQNPPAHMYPIKLPKKGDCQAS

SEQ ID NO: 79573 - protein, 233 aa, Unknown
  Obtained from environmental sample
  misc_feature (1)..(233): Xaa is any amino acid
MGIDYEIEQIAAELLNDFQKKREITKQPAKPVIIEIIGKLQHLLFPGIFESVLTDGSVKNKLNVMLEEVSHNLAKQTKLALRYDLRYKEATQEDVDKTAWEKTRQFILKIPLIKDFLEKDIEAAYSGDPSAYSKAEIVISYPGIYAIMVYRIAHELYLLSVPLIPRIMSEYAHSATGIDIHPGAAIGKYLFYRPRHRHCYRVKLLLSEIMEKCIQGVTLGALAHKGRSNLKGS

SEQ ID NO: 79574 - protein, 59 aa, Unknown
  Obtained from environmental sample
  misc_feature (1)..(59): Xaa is any amino acid
MGKVDRGGGGTIALYAPSLGMDVLDCGVPVLSMHSPCEVISKIDIYTTYRGYIAFLKDA

SEQ ID NO: 79575 - protein, 103 aa, Unknown
  Obtained from environmental sample
  misc_feature (1)..(103): Xaa is any amino acid
FFPGLSRDLERGELYGVVCMGADFYETEKQKMHNAEQRIPNVGIGRGSIIKGAIIDKNVCVGEECRIGVDDIKRTDGNYGHYYIVDGIIVIPKNTILYPGTVI

SEQ ID NO: 79576 - protein, 80 aa, Unknown
  Obtained from environmental sample
  misc_feature (1)..(80): Xaa is any amino acid
FFPAYREAYLCREKAAHTLLNTTEPIGKLRGKFVDFQAGELTLPFLATYHPSALLRNEDLKRPAWEDLKLLRTAIEEAVK

SEQ ID NO: 79577 - protein, 259 aa, Unknown
  Obtained from environmental sample
  DOMAIN (131)...(259): DEAD/DEAH box helicase
  misc_feature (1)..(259): Xaa is any amino acid
MAAQWFDLVFDIPANQAFSYRVDEKGEAAVGKRAMVPFGNRGRDSLGYIIAERGAPPEGLSESVIKPIRRVVDAEPIFDERDIDLARWLAAYYLCGIGQAVAAMIPSGRRMVSFGSFFGEEDIAAATLELSVEQQAALDVIVEDSPSMLYLYGITGSGKTEVFLRAAESMLKDGKSVIYLVPEIALTHQMAELIGKRFGQAAAMLHSRMSPGARLTEWSRIRRGEAPNVVGPRSAVFAPVKNLGMIYYDEEHDGSYKSG

SEQ ID NO: 79578 - protein, 58 aa, Unknown
  Obtained from environmental sample
  misc_feature (1)..(58): Xaa is any amino acid
MGEFRTERIGALIQEKIAALIIEGKIKDPRVNPFLSVSRVKVSNDLSGPISANLSMAG

SEQ ID NO: 79579 - protein, 345 aa, Unknown
  Obtained from environmental sample
  misc_feature (1)..(345): Xaa is any amino acid
GSNHGTAVGTSILFFLLLGINYGKPWGEYEEDNYASRLCLGIDRERGGIVMFESDMVEGTEFQIMFRSFDLEYMKPKFELLFDKLNGRKPVFAMYIDCAGRCAGYGGNDLEDALVMQQVVGNRVPVLGIYTGVEIASLAGRPRGLDWTGVFCLFSQDGDETPQDAVMPDDGANGPATRREARGSTPRESTLLDVAHRLCVQNAAKILSLDAHAISLRYELELKRRGFRLISELAVSFRRTDDYEGMFAYVARNINSALNMQKTVVLISDGTGMFVPSVLQGFTMEEKERLTGMPFALPRELMGLTPTVVTGASPPDLFAQLRQKIGLPFFIASLPLWRAKCRRSC

SEQ ID NO: 79580 - protein, 183 aa, Unknown
  Obtained from environmental sample
  misc_feature (1)..(183): Xaa is any amino acid
LQELKEFGIPIELKDAPLKELETIVLQKTGIELDKNLPNLRDLQNFFYEKPTYATISLLPAKQAVHFENVASVVEIPLPKDFPVQKIFSNILQTPPPIVLQQSQQQQSVPQSQSQQPILQTQPQQQPVPQQPQQLPVPQPTSQQPQFIPPPPQPQQQQSIPQPSPQQQPVLQPHSSNRNSFRR

SEQ ID NO: 79581 - protein, 74 aa, Unknown
  Obtained from environmental sample
  misc_feature (1)..(74): Xaa is any amino acid
MESNEYDIAGFSEGIVEKSKIPDKICVKNGDVIIAIASSGVHSNAFSLTRKVFGIDKKPKILQKHFPELGKTLG

SEQ ID NO: 79582 - protein, 173 aa, Unknown
  Obtained from environmental sample
  misc_feature (1)..(173): Xaa is any amino acid
VIEVKKGELIISARKRISYNSGKTPVLTVSTPVLNSLIMAGACNFKTNDKIKADTFSLEISGVDSGHAELDVNSLKADISGVGRFELYGMADKAEIELAGTGELNASSLQVREASIELSGAGTVRIYCSEKLSIEASGAGMVEYKKSPSLILDTTGPNKTKKLISTSQERLTA

SEQ ID NO: 79583 - protein, 334 aa, Unknown
  Obtained from environmental sample
  DOMAIN (233)...(322): Domain of unknown function (DUF814)
  misc_feature (1)..(334): Xaa is any amino acid
TKKGESVRCNAPSTETRRKLRAALISPETTGVNERTRREYAVRDFPGEGSFNKKIDELYAEHGGSLSLEALKEQARRNFEGSIARINAALEKLREKETSFADAERLKVYGDLILSNIGVIKPADKWLETEEDNAVIYNAVIYNDVIRIELDPRLKPQENAAKYYEQYRKAKNGIADVRREIAEGEKELKEVTERLNRLLAETNPLVLAKLVKTGGVARTFAPVSKKEKARPGLTFRRGEWLIIVGRDAAENDILLRRYVKGNDLWLHARDYHGSYVFIKQRAGKTVPLEILLDAGNLAIFYSKGRNNGAGDLFYTQVKYLRRAKDGPKGLSRPI

SEQ ID NO: 79584 - protein, 330 aa, Unknown
  Obtained from environmental sample
  DOMAIN (144)...(330): Divergent polysaccharide deacetylase
  misc_feature (1)..(330): Xaa is any amino acid
KKIVGKTLKNRKKNGFSDPVQAFLLVGALVAVSALISCAVIAVHSSLNKGNAVLQKSESEQPEVVETEILIIPEKPEPQSVEVPTPDVEKKETVSTPNKKQVPPKRLPAVKQTQPVQNNEPVATTVSAVINPKVPVENKGTLVFIIDDAGNNLKELEPFLRIQFPFTIAVLPGLPHSAEAAKRIRESGKEVFLHQPMEAIGGQEPGPGAIYSGMSADEIRAVLSRNIEEIGPIAGMNNHQGSKITMDKEAMQTILAFCNEKGICFIDSRTTADTVVPSVAKQMGIKIAERNVFIDNEQNKNAMLRYISNGLTRAQKKRQCGSAIKPGEKK

SEQ ID NO: 79585 - protein, 306 aa, Unknown
  Obtained from environmental sample
  misc_feature (1)..(306): Xaa is any amino acid
MFVYPMNFFEFLNACNHQLLLQAIQKADCKNPLSDAVHKKAVELLRIFLIIGGMPEVVSAYVNNNDLLSCQRILDDLIISLRSDFTKYKKRVSTSQLSAVFDSITAQMGRKFVYTNMSNDYNSRQIKEGMELLIMSGLVIPVVHSASNGIPLGAEIDGKKKKLLLLDTGVFQRLLGLPLSDLLISNDFSLINKGNIAELFAGLEILKSTSCYEKKNLYYWHRENKSSNAEVDFVIQQGMNIVPIEVKSSSKGAMHSMRLFMEEKQSSFGIRTLSENSANTRHKDVPLSRWGILSLITRGKNFTRTH

SEQ ID NO: 79586 - protein, 318 aa, Unknown
  Obtained from environmental sample
  DOMAIN (1)...(156): CO dehydrogenase/acetyl-CoA synthase complex beta subunit
  misc_feature (1)..(318): Xaa is any amino acid
TNSHKAIDSFCAYSIMDRPMTSCGCFEAMCAYVPECNGVMIVNREYLGETPIGMTFSTLAGSVGGGQQTPGFFGCGKVFLSSRKFLSAEGGFARIVWMPKELKDLLHDDLVRRFNEKGLTGFIDQIADETIALTAENVRAFMEKVKHPALAMEDMAQFAQSEESDAAAAKADVTPAKAVTTGAAEEHVPITGNVDLAAITEQVKASVTKEIITSIIDILSERFLGQAPAAVRTEAQKSPAEPVISASTRISAIKSFALPVESSSSATYTVKLGNAKSEGGTRGRTRVVGGANCMPFHFWEGRDAEQAVIARLAIIREK

SEQ ID NO: 79587 - protein, 120 aa, Unknown
  Obtained from environmental sample
  misc_feature (1)..(120): Xaa is any amino acid
MPETAPTQSSYVDTLQQALIARKDYMEREEMQKLKDELRSFHTSFASLYNIYLKKKLIDEDPYKQEAKINELEVPDSSAFNEQKRIEQMSIRLANYDNPVGLFNQLYQWARLADHRGGKR

SEQ ID NO: 79588 - protein, 233 aa, Unknown
  Obtained from environmental sample
  misc_feature (1)..(233): Xaa is any amino acid
MGTGLLKANLEAFDAIGAGITDQRREGYDKQYEYADAIKGVYGVFFFQHPSMLEYQERLKKKNERSNVQTILRVNKIPNNNQITRLLDDIKSETFAPVFEQGLETAQRHKGLDQYLVLGGRYRLITLDGVWFYQSENVKYGYCLQQQMKDGQTLYYHDMITAALVKPGFQAVLPLVPEFIRNEDGKEKQDCEREAAKRRLKGNAERQDGLILYFWATVYTQVPLGSAIKGGEK

SEQ ID NO: 79589 - protein, 328 aa, Unknown
  Obtained from environmental sample
  misc_feature (1)..(328): Xaa is any amino acid
VFGYADNFVDIEYLNMPLLSELREFKASFANIGDQKANLAAKKIPINDLKLPETEAEPASPEEPASPEEPASPADLMPETTEADTSGGVSGGGIDDLNFADLLNAVPGDLSVPDDIEVQSAAADEAGDSSEQPVDSADSAEKTEDLYFPDELLSNLSEEIEPVPAAADSLDSDSGSNLDNLDNLEKFSFPDLPAEPAPADASAQTDTPVPADEPVPTDIEGALDLSVFDDLGDFGDLGASSSEGETSDVSDSGLPEPQPSPQGEGSPLEEPAAVSEVETPELGDLGLPEPQPSPQGEGSPLREPAAVSEGETPDFSGFDIPERPGGGQ

SEQ ID NO: 79590 - protein, 304 aa, Unknown
  Obtained from environmental sample
  DOMAIN (7)...(30): 4Fe-4S binding domain
  misc_feature (1)..(304): Xaa is any amino acid
MVQGLNYGINHDICIGCGKCINACTHKARIPIDDADRFMDDLKQGEKTIAVAAPAVASFFPDQFLNLNGWLKSLGVEAVFDVSLGAELTVITYLDYVKEKNPRTVIAQPCPAIVSFIELKCPELLPYLAPADSPILHTIKMVKEYYPQYKNHKTAVISPCIAKRREYDETGLGDYNVTMIALKKILDDRKINLSSFPKTEYTGVTAERAAGFPIPGGLLDTAERFEPGIRRRTRKIEGVHSIYPYLEEISKILNTKVKLPLLIDCLNCEKGCMWRPRHGKRREIYGHTEDPVLNDLGHLIMGPP

SEQ ID NO: 79591 - protein, 341 aa, Unknown
  Obtained from environmental sample
  DOMAIN (45)...(223): Integrase core domain
  misc_feature (1)..(341): Xaa is any amino acid
GERVTLQYAWEEYRRDTQTGLSYSQFCSRYRRWRNASGKDVVMVQVREPGKELFVDWMGDTLACVRDSESGKLAKAHFFVAALGDSGYPYAEAFANEKTASWITAHVHAFSYLGGVPRVAVPDNCRTAVSRSNYYDPAINRAYEDMAAYYNIAVIPARVRRPRDKNLVEGSVGWLETWLVEWLRDQGPFDSFRELNRAVRERMAELVQRPFQKRAGSRESVFREIDKPALRPLPPAPYEIAEYQSRRVPDNYHLEYDAFYYSVPYEYYKQDVTMRITTSMIEVYDGHNKRIALHQRRYTGPRYATCTEHMPPHHQFKAMADRLTGRGTAAGPSKLSITRGK

SEQ ID NO: 79592 - protein, 118 aa, Unknown
  Obtained from environmental sample
  misc_feature (1)..(118): Xaa is any amino acid
MADIVRLYVGVFSKFKTPNMKQRRYLLDTTLRDGEQSPGLYFTSEQKIKIAALLDLYGVHQIEAGVPAVSKQEKEDIIKIMENRKNAVISVWSRLVPSDIELAIDTRPDTNHIGIPLN

SEQ ID NO: 79593 - protein, 330 aa, Unknown
  Obtained from environmental sample
  DOMAIN (111)...(182): His Kinase A (phosphoacceptor) domain
  misc_feature (1)..(330): Xaa is any amino acid
MAAIKNQNERFEVVNIWRDNVKTLSSFYYGVFFFPTLLMTMIIAISFTKRVTNPITELTDATRRVAEGDFSMQIMARRGDELGLLIRSFNAMVQDLEKSRAALVKAEKISIWQTMAQQLAHEIKNPLTPIKLSAERVLRRWRNQPEQIGEIIEDSMMAIIQETEGLAVLLNEFKTLAKPMEPSKSLTKIGEAVEEVLGPYRGSYPEVSFNIEQVSNDIAVKIDKLRFSQALANLVINAIDAMDGKGDIEIRTDSIKKREARFCRLSVRDTGKGISKHDGQNVFTPYFTTKETGTGLGLPIVERIINDHGGSVWFNSAEGMEPLGHNPGGN

SEQ ID NO: 79594 - protein, 69 aa, Unknown
  Obtained from environmental sample
  misc_feature (1)..(69): Xaa is any amino acid
MAKVKTNGLIIIVLWLAGIAAAMQFAKFSFAFDFLKNQYNVSPFWIGMSLSVVGLIGLIFGITVSIYSS

SEQ ID NO: 79595 - protein, 182 aa, Unknown
  Obtained from environmental sample
  DOMAIN (3)...(182): AMMECR1
  misc_feature (1)..(182): Xaa is any amino acid
TQRSLLAQARESIAAKLEVRQPSYPQCTDGNSALKKPCGAFVTLHIQDASGNRNLRGCIGRMMANLPMEETVRTMAREAAFGDPRFPPLRKEELARCHIEISALSPMSACPNPRQVKVGVHGLYLIRGGRSGVLLPQVPVEQGWNLDEYLDYICVKAGLPPGSYDAPDAQLYTFTAIVFGEE

SEQ ID NO: 79596 - protein, 319 aa, Unknown
  Obtained from environmental sample
  misc_feature (1)..(319): Xaa is any amino acid
MFRAAFRKTVYGRAGAEEEDAAGRADIDYRKEDFTLRCVLKKGAKPEKALAEIRSAMEEFDQQPFSVYFPKDKSEVLLGLSSLRTFVINGKDREELLERVDAAREAFKAARTEVNFRPRGERPELRLYPNREAAAYLAVAAAQMAETLYTLNEGVVASRLEIEGRPLDVRVTGESASGSDIISRLEKIPLKTAQGKTVYLGSLGRIERREAEASLARLDRGDVIYADIAQGKKTAEAADKTAARFPWFNGADESVFVRYRNLLFLYVFLVIILLYMVIGAQFESFLLPLILMVSIPFSLAGAGPLVLVPAHESIRAPFR

SEQ ID NO: 79597 - protein, 146 aa, Unknown
  Obtained from environmental sample
  DOMAIN (13)...(144): Clp protease
  misc_feature (1)..(146): Xaa is any amino acid
MSSLVPIVVEQTGMGERSYDIFSRLLKDRIVFLDGEINDISADLVVAQLLFLDGQDIDKDINLYINSPGGSVTAALAIYDTIQHLKSDVQNICLGQAASMAALILLPAPWESGTVFRPSGCLFISRGAALRGRRGTSAFHQKKMFV

SEQ ID NO: 79598 - protein, 59 aa, Unknown
  Obtained from environmental sample
  misc_feature (1)..(59): Xaa is any amino acid
IASPIIVFHLAIMLIPAAALWIGCLMSGTLVREFGVVERLSKTAQNELMNIVSCSCLWV

SEQ ID NO: 79599 - protein, 295 aa, Unknown
  Obtained from environmental sample
  DOMAIN (29)...(294): Phage portal protein
  misc_feature (1)..(295): Xaa is any amino acid
MGIFTTLTASKRTEKRSAGIPDFLMGNAAYSRSGIAVNEASVISLSPVASVLMRLSSILGVFPFKTYRKNDDGSLAEIDHPALRLFNVEPNEYLNGQQLKYILMSNFLLHGAGVAEILFQGGFPSALTPIHPTNVQVVNTNGKISYRVTRESGQQAALQPHQLLLFKLFPKADGGWVSPLQTHRAIFEEALALREFSSMVFSQGCNPAGVITGLPEEMTEESRNTLLDTLKGYVGLGKSHQFMILPTGKFERVAAPSTDLQYIETRRFAIAEISRLWNVPLHLLAETDKSTSLGV

SEQ ID NO: 79600 - protein, 235 aa, Unknown
  Obtained from environmental sample
  misc_feature (1)..(235): Xaa is any amino acid
VLFRKRTQYQQIFFREISVEAGESFSFVEDLRNYVKISQAGSFVVQARVYPELFRFGADAAVSAPVALESKRLNLSIWPPLATTAEGIPLEMDVATGAVLVRERLAPDQVIDYMINARQKSQWEKFFLYLDLESLLTQDGPRQRQWIREGEEGRKRMVDQFRQELKNPSTDGISVIPTDYLIEETKYNNTGGTVTVLQKFRNALYTEVKRYTYDVRFKDNVWVITGYTVTNLGTE

SEQ ID NO: 79601 - protein, 256 aa, Unknown
  Obtained from environmental sample
  DOMAIN (6)...(119): Response regulator receiver domain
  misc_feature (1)..(256): Xaa is any amino acid
MPETRKKVIVVEDNPINLKLARNTLMSKYDVFTVPSAAKLFELLEKTMVDIILLDVMMPEMSGYDAIKVLKNNPRTSCIPVIFLTSKSDTNSELEGFVQGAVDFVSKPFSPQLLLKRVDVHGLVESQKKELEHINQNLKRLVEEKTEEIQELQNAILKTMSNLVEYRDDVTGGHVERSEFFLKHLTEEMIKQNVYYDEVKDWDMKLFFKSSQLHDVGKIAIRDNILMKPAKLTEEEFNEMKRHTSFNKKVMKVLAS

SEQ ID NO: 79602 - protein, 101 aa, Unknown
  Obtained from environmental sample
  DOMAIN (7)...(81): Shikimate dehydrogenase substrate binding domain
  misc_feature (1)..(101): Xaa is any amino acid
MKKTFGLLGEKLGHSFSPLIHGYLGEYNYMLYEVSAGNLDSFMTDRRFDGINITIPYKQQVVPYCVTLSHEAQMTGSVNTIIKDSDEALHGTTRTITGCSR

SEQ ID NO: 79603 - protein, 67 aa, Unknown
  Obtained from environmental sample
  misc_feature (1)..(67): Xaa is any amino acid
MASLFDYISWRGDLGFDKAPFNPVDNIVFSQLSYLPMEGIVPGPNEHDHVTIEELAAKYAIIKRGEP

SEQ ID NO: 79604 - protein, 215 aa, Unknown
  Obtained from environmental sample
  misc_feature (1)..(215): Xaa is any amino acid
MLQATLQDADPIADTILGEEKSLSAGVSGEDKTDKKRSGGKTRGTRKPLPNRRSGYTQKSKVGGHSIFIRTGEYDDGSLGEIFLDMHKEGAAFRSLLNSFAIAVSLGLQYGVPLEEYVDAFTFSRFEPNGIVKGHDYVKMATSVIDFIFRDLAISYLKRVDLGQVKPDDLLATGTKTAIRMENGTGHEHNEDGSYQARIKGTKGYVIPGTLHIKK

SEQ ID NO: 79605 - protein, 312 aa, Unknown
  Obtained from environmental sample
  DOMAIN (2)...(310): 4-alpha-glucanotransferase
  misc_feature (1)..(312): Xaa is any amino acid
LTAFGLHPLYLRIEDLEEFKTADNSIKKRIKEAKNKFDKNERFSHYNVLKEKLEICRALYNANAKDIVKNASDGELAKWVEQNSWVKQYAVYRRLKEENEGKSWKEWKEHHTVTAADIENLWKDKNLQEDHLFWVWLQEALDVQFSKAAKAIAEAGIVLEGDLPILINEDSCDVWAHPELFIQELSAGAPPDQYSKDGQNWGFPVYNWEVHEKDNYAWWKSRLAAAGKYYQAYRIDHVLGFFRIWACSRSDYSAALGRYVPYAPITAGDFQKMNYDKSRFRWVTQPHIQSSEIWDTWRGNWGKVLRSGSTGA

SEQ ID NO: 79606 - protein, 177 aa, Unknown
  Obtained from environmental sample
  misc_feature (1)..(177): Xaa is any amino acid
MNLPKLSVTRRVTVTMLILIMVLFGALSFVRLGLDMMPDLEFPILTVATAYSGAAAEDVEQLITRPIEGVVASIKGIDKLTSTSSEGLSTINVTFKWGTDLDVAGQDIRENISRIKTYLPSGINDPMVLKFDMSQMPVLLYGVSGMENPSGAQEVLRRRDSAARERLRARPNLSLGS

SEQ ID NO: 79607 - protein, 307 aa, Unknown
  Obtained from environmental sample
  DOMAIN (210)...(279): Elongation factor Tu domain 2
  misc_feature (1)..(307): Xaa is any amino acid
GVPRGLWRAADYPHRSNLHHARRQGLASAKKFDEIDNAPEEKARGITINTSHVEYQSEKRHYAHVDCPGHADYVKNMVTGAAQMDGAILVVASTDGAMPQTREHILLARQVGVPAIVVFMNKVDMVDDPELLDIVEMEIRDLLSKYEFPGDKTPIIRGSALKALEGDAKYREAIMELMKACDDFIPQPVRDVDKPFLMPIEDVFAITGRGTVATGRIERGKVSLNDKVQRVGFGETKEFVVTGVEMFRKLLDDAQAGDNVGLLLRGAEKTDVERGQVLAAPRLHHPSHQLQGGDLCSDQRRSGLHTN

SEQ ID NO: 79608 - protein, 315 aa, Unknown
  Obtained from environmental sample
  DOMAIN (1)...(222): CO dehydrogenase/acetyl-CoA synthase complex beta subunit
  misc_feature (1)..(315): Xaa is any amino acid
LAERHEAPNHVCVITPERLGLCGAYNWLDGKAAYEIDETGPNQPLRKGECLDPVRGIWSGVNEYVYTNSHKTIDSFCAYSIMDRPMTSCGCFEAICAYVPECNGVMIVNREYLGETPVGMTFSTLAGSVGGGNQTPGFFGCGKVFLTSRKFLSAEGGFARVVWMPKELKDLLREDLLKRFDEKGLTGFIDQIADETIAVAAEDVRAFMEKVKHPALKMQDMAQYAQSAESDAEKAGAVPAKAMATPTKTVTAGAAEESVPIAGNVDIAAITEQVKAQIKLTLPKDRSSIIDLLSELSLAKPRCCKTRSFKQVANL

SEQ ID NO: 79609 - protein, 78 aa, Unknown
  Obtained from environmental sample
  misc_feature (1)..(78): Xaa is any amino acid
VETDNDILAEYIEESREHLSHVEQIFVEIQKTGQVSPGSINDLFRAIHTIKGSAGFLGLTGIGTLTHTRKAFGSLSAD

SEQ ID NO: 79610 - protein, 105 aa, Unknown
  Obtained from environmental sample
  misc_feature (1)..(105): Xaa is any amino acid
MTTYLLKPGELTLKGGNRKFFENALRKNLASLLKGSNAKIISGNGRLFVNCPDGVKGKIEDALGHLMGNSRWAKTRIAEKIPEEVLPPRVRRGNCFGEKGKKTFK

SEQ ID NO: 79611 - protein, 226 aa, Unknown
  Obtained from environmental sample
  misc_feature (1)..(226): Xaa is any amino acid
RSRSQDRKGFQVPQSSCSLIFRAGDCAYGLKHGGKRQRLSRFAPGKHRPARNKNRGKVKPRRRHKHARHYLVAVGDKDKSVKSVSHRHALNRVRDKLPCGQGVPHTLVAHRYPVAYSDYRKDDGRPARHADSVGSGARDVVKVRMARHYFAFRAGNANQRPFKFFVNEAQRFKKRAVGGTGNAFVYGIAFHNFSNALSTASPIALVPTIFSPLFALRLAMSPVLSP

SEQ ID NO: 79612 - protein, 317 aa, Unknown
  Obtained from environmental sample
  DOMAIN (188)...(278): Fibronectin type III domain
  misc_feature (1)..(317): Xaa is any amino acid
MIEYLVDGNSESIVYATSTGRESSEVFTPVTGKGGVFVIGGSFKGMMDEFKIHGVCAGRSSVQKYATAGGRAETTYIDLGGVNSAVVRVDVSGGRTGIKGTRISNEFRENGRFRFSDDSEMSFFIRAGENPWLLNDIKWTSFTPGSNITETIKGRYAQIAVDFYPSSDGETTPYLDEVRIVYQPNEPPLPPTNFTATAVDGGVMLRWKQSPDTSTTAGYLVYYSSVRGELFGSDAFLGPSPIDAGKVTSIMIDGLKNGTLYYFRVASYDLSYDSGSYNIGEFSREVTARPLATLRLTINVKEKTYMQIDTKKLGHSA

SEQ ID NO: 79613 - protein, 111 aa, Unknown
  Obtained from environmental sample
  misc_feature (1)..(111): Xaa is any amino acid
FKRFVEQLANEKGRKEEYLLYPKVEELAPHAIGKLRKIYKGVSANIDFYSGFVYSMLDLPEEIFTPLFAVARISGWGAHRIEELVNAGKIIRPAYKSVAKQRNYTSMQERG

SEQ ID NO: 79614 - protein, 153 aa, Unknown
  Obtained from environmental sample
  DOMAIN (30)...(144): ABC transporter
  misc_feature (1)..(153): Xaa is any amino acid
MITAIEVNELCAGYGTGDVIRNINFKAEKGECLCVLGPNGCGKSTLLKSIARIIDYRGSVLVDGGDISVIPRKRLAQKIALLSQNMQVYFPYTVYETVSMGRYAYSLGFLKNLSVQDKTIINDTLKKLDIWDIKERMIDELSLVPNSDPMREP

SEQ ID NO: 79615 - protein, 175 aa, Unknown
  Obtained from environmental sample
  DOMAIN (2)...(171): FecCD transport family
  misc_feature (1)..(175): Xaa is any amino acid
IFAVLNALLPCERIFSDDLKRIALWQMGSFAMRGWTYIQLLLPFFIIGTAGILRYAKEMDIMSFDDDQAKSAGVETNGLRKRLLVLCALLTGTAVALSGIIGFVDLIAPHAARRIIGSKHRYMIPMSFILGGSLMVITDLIARTIISPSELPVGAITALIGAPFFAWIYFRGRRR

SEQ ID NO: 79616 - protein, 314 aa, Unknown
  Obtained from environmental sample
  misc_feature (1)..(314): Xaa is any amino acid
MYFEAEDMAGELRSYRDGLTYDPRRQQAIDERLALLYKLKRKYCETAVGAPGAAGDAVSVEDAMLAYRAAAETEIEALSNIEENRENLKAGIAALEKEVASRAAALRQKRTAAAGVLGQRISEILKRLGMPNARFSPSVTARTQQAQDGRPTVVCGPWGAEEIEFLISANTGEPLKDLSRIASGGELSRIMLAIKTVLSAADSVEVLIFDEIDSGIGGEVALAVGEYLEKIGERRQIFCVTHLASIAVRAGNHFKVEKRTEEGRTFTGIGPLSADGRRKEIARMLSGDGGEAALAHADDLMPNMKSSPSSGAKP

SEQ ID NO: 79617 - protein, 136 aa, Unknown
  Obtained from environmental sample
  misc_feature (1)..(136): Xaa is any amino acid
MNLCYYAIGSCKAECYELESYNLFEAGITTLEEIEAEKDSDVAFKFYANSKEELNRIAKEFPHLNFECGEEEAKDWDLWWRERQTPLKVSESLWVRPPWINFSAPNSSDVVLALEAKTAFGTGEHSTRAESVIGGT

SEQ ID NO: 79618 - protein, 143 aa, Unknown
  Obtained from environmental sample
  DOMAIN (1)...(142): Bacterial extracellular solute-binding proteins, family 3
  misc_feature (1)..(143): Xaa is any amino acid
MEYFDADGKTPIGFDVEMGKAVAAKMGLEPKFIDTAWDGIFAGVNTNKYDCIMSSVTINEARKKAHNFSKPYIRNTLAIVLPKDTTLNISSPHELAGLRVSYHEETTSDDFMTGACRAGPGVYPLEYDKVKYCLDELKLAGVM

SEQ ID NO: 79619 - protein, 212 aa, Unknown
  Obtained from environmental sample
  misc_feature (1)..(212): Xaa is any amino acid
MLTAEVDFSDVKLSFIRNFPNAYVALEDLTVIGTGEFEGETLVEFKSLSVTVDIMSVIKMDNIRVKSVLLDNPQISAHITENGSANWNIMKPKEEEVTPPDGVPPAEVPSAGVSPDKITPAQDASATTLRIALNKFEIRNASISFRDDSSKMTATANELNFFLHGDMTMDNVDLDMKLDIADVNFRMNDIDLLSNAHVGLFEVSADLILGGP

SEQ ID NO: 79620 - protein, 314 aa, Unknown
  Obtained from environmental sample
  misc_feature (1)..(314): Xaa is any amino acid
MKNQFGTLLGDMKAGAGLFNEIKAFNDKTPFDMGTLTQATNVLIAAKVPLQDLQAQLTKFGDLSQGNSQKMTSYINAFSQAAAKGKADMQVLNTYLHQGVPILDELAKNFHVTTAEVVEMSSQGQISFQDFSKALDGLTASGGQYFGGMELASRSLAAMQEGLKEAVNSLAASFGDMLLPAATDVTGMLTDLTNAINDSPIAKGVLAAAVTLVTGLMTAMAVKAAALAVKTWLAQAAQMGLNASLAVTNPLLWAGIAAAAAATAGYVYYASSQQKAARASEDMAYRQRALNDSMREGSSAVYEFYQAMQGSSDP

SEQ ID NO: 79621 - protein, 347 aa, Unknown
  Obtained from environmental sample
  DOMAIN (175)...(344): Domain of unknown function (DUF323)
  misc_feature (1)..(347): Xaa is any amino acid
GKLEVLDKESELFDLLKTPRRTGQETLLNPAKCKAFWADYTKGEYRKESRLLLQALDAGVQKEIIATAELELCKRQQIRVLHEEHFITAEAAADIVETLALVLKGEQESETSQSTVCSNCGKELQKEWASCPYCATPVMKIQQKSLQPEVPPLPSPIPAAVNISSKTAPPAQTAVPANMVRVEGGTFQMGTVNGGYDDVRPVHTVTVKNFYMGKYEVTQKEWYEIMGNNPSEFKGEKLPVENVSWSDAIDYCNRRSIREGLTPAYSSSGDTITCNWNANGYRLPTEAEWEYAAKGGNGSPGNYTYSGSDNIGDVAWYEGNSGRKTQPVEEGGEQFRNTRANLIRGGT

SEQ ID NO: 79622 - protein, 313 aa, Unknown
  Obtained from environmental sample
  DOMAIN (21)...(148): ATPase family associated with various cellular activities (AAA)
  misc_feature (1)..(313): Xaa is any amino acid
MKKTLAIFIEAARKRNESLDHLFLIGPPGLGKTTLAQVVSHEWGVDFKVTSAPALEKPKDLAGILTTLSEKSVFFIDEIHRLKPAIEEMLYIAMEDYELDWIIGQGPSARTIRIPVQPFTLVGATTKAGNVSSPLISRFGITFRFSFYENEDMEAIVRRSAGILGVAINDDAASLLARSARGTPRVVNRLLRRVRDFAQIKAKGAELLVTREIVEESLKRLEIDSLGLEKYDREILKIIITRYGGGPVGAETLAISIGESVDTLEDYYEPYLIQAGLIQRTPRGRVVTALAYEYLKLPRLGRSADLIMGEEKQ

SEQ ID NO: 79623 - protein, 323 aa, Unknown
  Obtained from environmental sample
  DOMAIN (49)...(243): ATPase family associated with various cellular activities (AAA)
  misc_feature (1)..(323): Xaa is any amino acid
GGGAYMLENFSFDSAADALNAVKREIAKVFIGQKELVEYAFITLLAGGHLLVEGVPGLGKTLLVRALAKALGGDSRRIQFTPDLMPSDITGNIMFDVQAGKFITRKGPVFTNILVADEINRSPAKTQAALFEAMQEFQVSLDGTEYPLPKPFMVLATENPFEHEGTYPLPDAQKDRFLMKLLIDYPAIEEEKEMVSRVLEGGTGAELSLEGVQTVLSPEEFVAIRDTASRVRAAPEVIDYAVRLVSATREGGAIDTGAGPRGSLALIRCARGRALLERRDFVIPDDVKALAVPVLIHRITLSSESERKGRTKYRPLPILTHVG

SEQ ID NO: 79624 - protein, 287 aa, Unknown
  Obtained from environmental sample
  DOMAIN (116)...(273): Peptidase family M20/M25/M40
  misc_feature (1)..(287): Xaa is any amino acid
LGRGGNSDYWKHLIKTSWGRVFQNERENYFHILIIPQSLAVELESELTKRQAISPESGGDGELEKCLFLESWLRAHGITNLERFDAPDDRVKSKIRPNLVATIDGSADNKDMGRLWILSHLDVVPPGEEKLWESDPWTVIRKDDAPGPRVIGRGVEDNQQGLVSSVITALSFVSQGLKPLRTIKLLFAADEEVGSAFGIEWLVNNHGELFNKNDMVLVPDGGDIKGECIEIVEKHIFWVKFVTHGKQAHGSMPDLGANAFLAGADLAVRLHQGLSAKLKRKTPRPST

SEQ ID NO: 79625 - protein, 287 aa, Unknown
  Obtained from environmental sample
  misc_feature (1)..(287): Xaa is any amino acid
VRLLEGILNHDSLDEISNVPSLADIASILTTIKDSNILKHGLLRLAASGNLELALLPSDSESKTLIGVWDLGFFSPLLRILPTVSNFVNIPNLYYVQAGKNSRFEYRLSDKTFYVGPFHNLLFVTDDAYIFESRSAANSGHAKAFSTIKPSDHDAALMLSNEFIRSLLSDQDSGMAIILNNIEFESRVEAGLSIYPKKIEFRFAAPLSSGQTSLSRLLVQRSRVPGMAERIPSTAQYATILSAGTLEELYQTALVFTPGLDEALKTAESASRLVLGLTLSDLLFSWS

SEQ ID NO: 79626 - protein, 336 aa, Unknown
  Obtained from environmental sample
  misc_feature (1)..(336): Xaa is any amino acid
VSHGQIGRDSGGSGFLSEVQKYFGVNLSNYPSPRDVIINGNYALIIREPGVFSPFERQNRYEPPSSLSEEAVLVRLSSGAAISGYRLVPLDISAASADIPLFVAAVSKRNIYELVPEVSGLNQRSPETRWPLAKEYPEVYLPGTQVFSGDACLKFTNYGGEGSFQIGADVVPGSIQVWRGGIMDANFNYNQSTGEVALKGPAGANELIRITYLKRSAETRLGSIASGIGAVYQKEGNPFSAMAAIGVRWNMTDSSFSEEGVSSPGTVGLSAKTAWDFDNLKAQITAGAALDQNDTTGIYRAAGMEGHETVLSFAPETSFFVNPPSSFSVFNRAGLI

SEQ ID NO: 79627 - protein, 71 aa, Unknown
  Obtained from environmental sample
  misc_feature (1)..(71): Xaa is any amino acid
FFIGERRGNDLIARILSDANFALSEEEINGLLSAENFTGRASGQTGEFLSEVRAILEANKEILGVEVRITV

SEQ ID NO: 79628 - protein, 220 aa, Unknown
  Obtained from environmental sample
  DOMAIN (33)...(220): ABC transporter
  misc_feature (1)..(220): Xaa is any amino acid
MPILEARNLTINIRRGKKYYTAVDGIDFKIDAGEIIALAGESGSGKSLTALSIPGLLSARAKIAGGEILYSSDGRTVDLSKIDEKSLRQIRGKEISMIFQEPRQSLNPLMKVGAQITEALELHSHTDDFRREYLPHARASARNVERVFGDMQHGISPNKIPFKNNVTGRTTANRLAMEMLEKLQFPQPEKIMDARPHQLSRGMCQRVMIAIAAICRPRLL

SEQ ID NO: 79629 - protein, 148 aa, Unknown
  Obtained from environmental sample
  misc_feature (1)..(148): Xaa is any amino acid
VFWGLAVASGNIGGRVVVLIFLILIMAGGGLLWLDFLNVIDAKNTIGPIIEFLRPLPVIGRLMPSGAGRTQPLFPDDGDLNLDAERFAIRMEALELRNQEMDKQEQEMQSWMGQIEPMAHELGERQKALEERERSLNAQLSDAEIKIG

SEQ ID NO: 79630 - protein, 307 aa, Unknown
  Obtained from environmental sample
  DOMAIN (90)...(231): Flagellar hook-length control protein
  misc_feature (1)..(307): Xaa is any amino acid
MSKRSQARKKRAELEFTERVFRETDAEFLRNQPLAEKAGSGLVSQGAGRENAPASETRGRKSKERLNIEVRDLRTGEGQKEALAQAGNTVSLKEAIESNLRSLSKAEIEIPVELDLNKGSVDGKAGDSTLNRSFEDALAAQLRGNLSADIVRDAAVIVRNGGEGTIRLSLRPASLGDVKIRLELTENKISGHIIVESNEALRAFERELPVLEKAFRDSGFSETNLEMFLASENSQGEGTFGSREERQEKDFLISAIAASRYETESDQAAMSRSDVPITDERVLSASPGRIPVNLLLARPICHAGAKR

SEQ ID NO: 79631 - protein, 143 aa, Unknown
  Obtained from environmental sample
  misc_feature (1)..(143): Xaa is any amino acid
MNLPQGWTLTTFNTILSYEQPTAYIVKSTEYNDTYKTAVLTAGKSFIIGYTNEKDGIYSDDLHTTISKQKAKDLSSYRLQENDIILARRGEMGRTAPVTEKEVRWLCGTGSMIIRLKTGNLNSLYSLFLSSEAKPAPANQTRG

SEQ ID NO: 79632 - protein, 288 aa, Unknown
  Obtained from environmental sample
  DOMAIN (2)...(118): Beta-ketoacyl synthase, N-terminal domain
  misc_feature (1)..(288): Xaa is any amino acid
MLPLTVPMMIPNEAAGNISMMFGTRGPAFTQVTACASGTDALGQALDVIRAGRCDVVIAGGTEATILPFAVGGFQMLKALSTKRCNEPTKASRPFDADRDGFVIAEGSGILILESEEHAKARGAKILAELAGYGASADAYHITAPDPTGTSGANAVKLAIADAGLKPEDIQYYNAHGTSTEINDPTETKMLKMVFGDHAYKMKVSSTKSMHGHCIAGGGGIEAIACILAIRDGFYPPTINLDNPDPECDLDYVAHKAQYGEIYAAASGSLGFGGHNGVIVFKSTRSRE

SEQ ID NO: 79633 - protein, 131 aa, Unknown
  Obtained from environmental sample
  DOMAIN (4)...(44): UBA/TS-N domain
  misc_feature (1)..(131): Xaa is any amino acid
MAEISAADVKKLREKTGAGMMECKNALVSTEGDFAKAEKLLKEKGLAALDKRAGRATNEGKIFVKTKDDGSVAVLAEMACETDFVARNPDFIALGWAIAEKALEKGYTEPNEKLSGMAADLATKIRQEHGS

SEQ ID NO: 79634 - protein, 98 aa, Unknown
  Obtained from environmental sample
  misc_feature (1)..(98): Xaa is any amino acid
MPQAFTETKTTISEGELTQRMAVVKRFKELLEQQRDRFRSYLDELDRQKLAIGTGSADEITAHVELEERIVEDIFSIQKVIDPLRIMYNARRPVSSGK

SEQ ID NO: 79635 - protein, 231 aa, Unknown
  Obtained from environmental sample
  DOMAIN (2)...(230): Hsp70 protein
  misc_feature (1)..(231): Xaa is any amino acid
LTNPYLIFGDGVFEVKSTSGDTLLGGVDLGLKILEWLISGLKNDTGIALSKNRMALQRLRQASEEAKIQLSTMQTNDINGPLITADQSGPKHLQKSLTRAKFEQMVNDLLERSKEPCIKALRDAGLSAEQIDEVILVGGSTRIPAVQQLVKDLFKKEPNKGVNPDEAVAVGAAIQGGILGGDVNARSCVLHRNSAPLAWAIETTGRRLTRLIPRITTTPTCKSQEGHAPDR

SEQ ID NO: 79636 - protein, 112 aa, Unknown
  Obtained from environmental sample
  misc_feature (1)..(112): Xaa is any amino acid
MKRFLIYLKSRPLGIASVIALIVLYLMMVFAEFIAPYSPVTSFPEQTYHPPNVHFYQGKFQAQEHRLINTVNWKFVRIRDHYSRIELFGKGEPYKLWEIIPMERHLFVSNGM

SEQ ID NO: 79637 - protein, 338 aa, Unknown
  Obtained from environmental sample
  DOMAIN (35)...(161): ATPase family associated with various cellular activities (AAA)
  misc_feature (1)..(338): Xaa is any amino acid
FSPGYGELWRIIGQDHIVGQGRLLRRAIQADRLSSIILYGPPGTGKTSLAAVIANTTRAAFENLNAVLSGVKDIREVIDRADERSRLYSQRTILFVDEVHRWNKAQQDALLPWVENGTVILIGATTENPFFEVNRALVSRSRIFQLKPLGSNELMETVRRTLADKERGYGKWNVKFEEGAVEHLVEIAGGDARSLLNAIELAVETSITPWPPAAGTEIRISMEAAEESIQRRALLYDRDGDYHFDTISAFIKSVRGSDPDAALYWLAKMVRAGEDPKFIFRRMIILASEDVGLADPHALSVVISCAQAFERIAFPEGNFPLSHACLYLATAPKSNTTL

SEQ ID NO: 79638 - protein, 102 aa, Unknown
  Obtained from environmental sample
  misc_feature (1)..(102): Xaa is any amino acid
DGIWSFARGLLEAKIDTGDSLNLVFPGGGKKLTTAIGKLSGHFTDPHGKPFMVQYLGLGVGETVYGLGERFTPFVKTAKALTSGMKTAELPAIRHIRTFPFI

SEQ ID NO: 79639 - protein, 69 aa, Unknown
  Obtained from environmental sample
  misc_feature (1)..(69): Xaa is any amino acid
MEYLQSSQSQSKSASDAGAMALAARSSNMVTPMSIRAAITVVAAAPILMIYPFMQRYFVVGLNVGGVKE

SEQ ID NO: 79640 - protein, 132 aa, Unknown
  Obtained from environmental sample
  misc_feature (1)..(132): Xaa is any amino acid
MRDDLHHAITAALKQGIPVKDICFSGNGEPSLSAFFPEALNLAAKLRKELVPSAKPVLITNGTGLLQPQIFSLLAESTKGEIALDIWLKLDAGTPQWYEKINRCGNAFTELTAKIKEFASCASVTYRQCFAQ

SEQ ID NO: 79641 - protein, 303 aa, Unknown
  Obtained from environmental sample
  DOMAIN (164)...(300): S-adenosylmethionine synthetase, C-terminal domain
  misc_feature (1)..(303): Xaa is any amino acid
AVAEIGYNVRGLGFDAESCGVQISVHRQSPDIAQGVDAGRGLHKEQGAGDQGIMFGYACHETKVYMPLAIYYAHRLVEELTALREKGKIPYLRPDAKTQVTVEYDGLKPKRIDTVVLSTQHDEKVKYATIKEDMIAKVIQKVIPAKFLDDKTVYHINPTGKFVIGGPHGDTGVTGRKIIVDTYGGYGAHGGGAFSGKDPSKVDRSAAYAARWVAKNLVAAGLATHCVIQLSYAIGVAKPISIHVDTYGSGKIPDVEIAGIITKLFDLTPAGIIKRLDLKRPIYRQTARNGIGRESAVQSVMET

SEQ ID NO: 79642 - protein, 317 aa, Unknown
  Obtained from environmental sample
  misc_feature (1)..(317): Xaa is any amino acid
VPFKEALIRSLNVPAVKILSEYGVEDFHFWLKNAGLNGLSRSSESYGLSLILGGGEASLQELVPLYSMLMNEGKRTQLKWLEDSTAEKNEQLLQSITAYHIKEILTSVKRPDFEQYHLQFNNHIPVAWKTGTSYGSRDAWAIGVNEQWTIGVWVGNFAGGSVANLSGSATAAPLLFSLFNNLSDNKKRMWSEFPQDADFEEIEICTLSGYKAKDFCPHKKYILLPINRMQSKTCQFHKEIIISKNTGFEVCSLCWNAEDTLHIIEEHYSPSVRNELRKNGREPKSANFAPSRAASQKKRESLFSIVIPKMAQDFFCQ

SEQ ID NO: 79643 - protein, 261 aa, Unknown
  Obtained from environmental sample
  misc_feature (1)..(261): Xaa is any amino acid
LALKVGGERDSDEDGGDYWEGVGKRLKARRGWSVWRSTSGNGSDRVGFSALPGGHRAAKKDDVFNNAGYYGYWWTATGHTNSYTAASRTMDYDKNGMSEVSSDIRYGFSVRCIQDESPEKVQKRIEAEQKRIAEEQRKIEEARKIMEEEQKRIEKLSTYFTDSRDGKKYRAVEIGGKTWMAENLNYASPNDNGWCYKSSADSCKKYGKLYVWNVARTICPAGWHLPTREEWGEWGQAAGGEKETFGNGTVDWYGAGKKLMF

SEQ ID NO: 79644 - protein, 129 aa, Unknown
  Obtained from environmental sample
  DOMAIN (53)...(104): Translation initiation factor IF-2, N-terminal region
  misc_feature (1)..(129): Xaa is any amino acid
LPEGKSGAKRSFRAKKPTYNRKEKELEMEEKLRQTRKKITYIANPVPKSIEIMENISVSELARKMNLKASDLIQKLMKLGMMVTINQQIDADTATILAAEFGADVKIISLYDETIMTPERTKARILGRF

SEQ ID NO: 79645 - protein, 126 aa, Unknown
  Obtained from environmental sample
  misc_feature (1)..(126): Xaa is any amino acid
VHTVKRGYLQTDGYKGYDSAAKDLPGIIQVGCFAHARRKFFEAAKISSKGRSAEEGIKYIRGLYAIENELRDENVDSGTFLSDRKARAAPVLEKFKAWLLNVKMKFLKVLFWGKRYITALPNGTKW

SEQ ID NO: 79646 - protein, 330 aa, Unknown
  Obtained from environmental sample
  misc_feature (1)..(330): Xaa is any amino acid
MDQIGRGSYAPTGTGESPLAGIAEWVNTTCPKCGGKAQRETNTMPQWAGSCWYYLRYLDPHNDTAFAAQDKINYWLPVDLYVGGAEHAVLHLLYSRFWHKVLYDCGLVNTIEPFQRLINQGMILGEDNQKMSKSRGNVINPDDIIKEYGADAMRVYEMFMGPLEVSKPWNTAGLVGVSRFLERLWMIGNREWGSGIGDRGSLETGVMPSNKPPPVPSPQSPVPSLEQLTKLLHRTIKKVTEDTASLNFNTAISQMMIYSGELARLTEIPRGFWEPLIIMISAYAPHLGEELWEKLGHTEPVSVCRWASYDEPLPMTMNNRGCPGERQNPR

SEQ ID NO: 79647 - protein, 316 aa, Unknown
  Obtained from environmental sample
  DOMAIN (2)...(295): Penicillin binding protein transpeptidase domain
  misc_feature (1)..(316): Xaa is any amino acid
MIESSAARAAEHIRASDEISRMNRPVIWAYEPGSVFKVFTLSALMDSGAITSNSVFTCNGVYVTSRGSHINCLGAHGRVTAREIIIHSCNAGAAYASDQISSGAFFKLLTDFGFGSRTGAGSPGETSGYLLGIEQWSDRSKPTIAMGQEIAVSAYQMLQAASAIANDGVLISPRIVSNIISADGNVTEWKPVERRRILKEETARAMRSYMVDTGSGIGTGWRAAVEDLSLAVKTGTAQLIDPATRRYSETDFIASCIALLPAESPSLILYLAIIKPRGEILGGRIAAPAIREAAESLIDYIGIPRGRYRQIPIRLW

SEQ ID NO: 79648 - protein, 325 aa, Unknown
  Obtained from environmental sample
  misc_feature (1)..(325): Xaa is any amino acid
MGGPLAPLPPETVTVVPPPLLRSLLVSTTPPRHTKLPPRELPSGQGNITAYPGTRAQVTIESNALRGAGIIFGGKDTVALDVKGKTASGAFTVSKSTEYTFYLIDTLGQTSDSLPRFMISVVPDEAPVARILKPGMNKVLSTAQVETLWVEGVDDFGIAKMELKWRRSGDLAGDPPRAQDLSENGSPPLIRKPVVWNIRELSLYPGDSLCYWLWVRDNRLSGGAQTACSDTFWFRMPSFEEIHKAVAMKEQYAQEKLGEVRNRQDNISSSIEKLVKSASGSKELSWDQKRVIDDVKAQLNAQAESLQKAFQALEEGIEAMREDGS

SEQ ID NO: 79649 - protein, 328 aa, Unknown
  Obtained from environmental sample
  DOMAIN (1)...(305): Gamma-glutamyltranspeptidase
  misc_feature (1)..(328): Xaa is any amino acid
YKGELADRMWADSRELGGFFCKEDFSSYDAEWVDPVSINYRGYDVWEIPPNGQGVAALAALNILSNFEFVSRENPDTFHRQWEAMKLAFSDVLAHVTDSRFMKEDYREWLKPEYGKKRASEIGERACMPGPLHPPKEGTVYLATADGDGNMVSYIQSNYKGFGSGVVIRGTGIALQNRGADFSLDASAPNALAPGKKSYHTIIPGFLTKDGKAVGPFGVMGGYMQPQGHVQVITNMLDFGLNPQQALDAPRWQWIEGRKIHVEAGFNPAIARVLAKRGHEVSVSLQTSSFGRGQCIVRLDKRRPSWALLKGARMGALRVCSANLTLAP

SEQ ID NO: 79650 - protein, 224 aa, Unknown
  Obtained from environmental sample
  DOMAIN (1)...(224): Carbon starvation protein CstA
  misc_feature (1)..(224): Xaa is any amino acid
MSGIVILLISIVVLVVGYVTYGSWLAKKWGVDPSRKTPAHELKDGVDYMPAKAPVLLGHHFSSIAGAGPINGPIQAAVFGWVPVLLWILIGGVFFGAVHDFGSLFASIRHKGQSIGAVISENMGKRAKRLFIIFSYLTLLLVVAAFASIVAGTFNGTTADAVQNTTNGTAAMISVLFILIAIVFGFFVYRRNAPLWLSTIIGCAAIVGIIVIGLHVQIYLSMNT

SEQ ID NO: 79651 - protein, 263 aa, Unknown
  Obtained from environmental sample
  DOMAIN (1)...(233): Family 4 glycosyl hydrolase
  misc_feature (1)..(263): Xaa is any amino acid
MLAHWIGAKDEEVTYTCAGINHQAFYIDYRWKGNDAYPLLREAMKDPKIYNEEIVRNEMFMLLDYYPTESSGHNSEYNAWFRKRPDLIEKFCTHGTGWNPGVYAYILNEYLIKKDSWQKEIEDWLNEPNVDLIRGHEYAAYIFNAIFGDKTMFKFNGNVLNKGLIDNLPQGACVEVPVLASPHGFEAIKVGKLPDQLAALVHTSSICEELAVEGALARDPRKVYQAIAFDPLTSAVLGIQEIKEMTKKMSNRTPTRPSDTWGG

SEQ ID NO: 79652 - protein, 58 aa, Unknown
  Obtained from environmental sample
  misc_feature (1)..(58): Xaa is any amino acid
MLLVFALTFGVIGDRLSELLESGVDYVSSIVDEGLTAYGINPVVQSLLINEYSRSGSG

SEQ ID NO: 79653 - protein, 325 aa, Unknown
  Obtained from environmental sample
  DOMAIN (237)...(324): Response regulator receiver domain
  misc_feature (1)..(325): Xaa is any amino acid
MTSIAKSSNDPARKDYCLTKMRGASVHLLGVINDILDMSKIEENKFELSYVEFEFYAMMQRVVNIFEFRFGEKKIKFTMNLTPDLPQRIITDDQRLAQIVTNLLSNAVKFTPEGGSITLSARRLEDKEPNFCTMEIAVTDTGIGIPKEQQGKLFDSFVQVDSSISRKFGGTGLGLAICKRIVELMDGNIRMESEAGKGATFTFTFRAEIGTQASSDEGGAADGAASKTADKLDFTGKRILLVEDVEINREIVITVLQPLGLEITEAEDGQRAFDLFRTNPDAYDLIFMDIHMPGVNGYESTMLIRALTTQKRKPSADLIMGGGNK

SEQ ID NO: 79654 - protein, 145 aa, Unknown
  Obtained from environmental sample
  misc_feature (1)..(145): Xaa is any amino acid
MENFTITVAELIYYIWGGGAILKSLVCHNLQNTTQHGAIGGKTQTTTTTYYNLDVIISVGYRVKSKKGTQFRIWATQVLKNYLLKGYAIRQQIEDIKNISKNHENRLVEVEKKIDVFIKTSALPLEGVFQGAQIFDAYAFACNTK

SEQ ID NO: 79655 - protein, 171 aa, Unknown
  Obtained from environmental sample
  DOMAIN (1)...(164): Asparaginase
  misc_feature (1)..(171): Xaa is any amino acid
KEQRASKVDTEDDKAFDSINTPLPGRIEGKTVTMDNPLLSGTGGVKLDINIRKEVFPLKLTPGINPNIIDEIVLDGYKGIVIEVFGSGGLPAKFHDPVRNAVEKGVSVVAMTQCRNGETDFSHYEVGNNALKAGIIPVSKMTFETAVTKLMWVLGHTTKPEEVEKMMLKDI

SEQ ID NO: 79656 - protein, 149 aa, Unknown
  Obtained from environmental sample
  DOMAIN (20)...(141): Uncharacterised P-loop hydrolase UPF0079
  misc_feature (1)..(149): Xaa is any amino acid
MDSGRIASCLNLIPIPPDDTFSLGQRIASFLTAGSVVALQGELGSGKTYLVKGIAKGLGVTETITSPTYTIISEYNSSPALYHIDAYRLSGDEDFENSGGRETINSGGISLIEWGERIQKSMPKDAITVNIIITGPCSRLIQIEGLEKL

SEQ ID NO: 79657 - protein, 176 aa, Unknown
  Obtained from environmental sample
  misc_feature (1)..(176): Xaa is any amino acid
AHSDHVGSWGSLLLYTYVTKNITTNIISDENMAYLPQIRALLDIYGLPKRMYRITDASAFDRRYSLFNSVRYIRTFHCDDLKSSAILFETNSGLVFYSGDMKDPAPLIEIIKSGKKIDKIYMDSCDDPEPNPFHIRLKEIYEIVPPELRSEVYCMHFNSSKCMDDAISMGFKVVTI

SEQ ID NO: 79658 - protein, 123 aa, Unknown
  Obtained from environmental sample
  misc_feature (1)..(123): Xaa is any amino acid
MAKSNDSEKSRVNPNATSEEKAKALEAARLQIEKQFGAGSLIKLGAHNAASGIEVGPSGSILLDEALGICGYPKGRIIEDFGPESCVKTPLRFTHSLGPKSGGNPAFIAAEHPLNPDNRKNLG

SEQ ID NO: 79659 - protein, 203 aa, Unknown
  Obtained from environmental sample
  misc_feature (1)..(203): Xaa is any amino acid
GFPRVIADAPYRRINAFALGVEKVNPKARIYVKVNYSWFDPMGEAFASRALIAGGCDVIAHHTDTPIPMIEAEKAGIWGIGYSNDMSADAPAAVITSVIWRWSAYYTFLVQSVIDGTFTTVPWYGSLKDKVIDLAPFNKNIPLNPDTFRIIDEERLRIESGAFNVFSGVMDTNNGKSIGREGENLTDDEIRNGMNWYYRTVIR

SEQ ID NO: 79660 - protein, 211 aa, Unknown
  Obtained from environmental sample
  misc_feature (1)..(211): Xaa is any amino acid
MTIREALAEGSASLTAAGIETPGLDSSLLLAEILNTSRSSLIAAGNDDISNALVATFRQLIKRRQSGECAAYILGRKEFYGLEFLVNPSVLVPRPDTETLVEAALKVIGSEGTISNEQGAMSKEHRITNKAEVSKQSFCVLDLCTGSGVIAIALKHTMPELEVWAADISAEALVTAKTNAARLLPPNLSTSSRATSTTHYPPLPHYSLVIP

SEQ ID NO: 79661 - protein, 334 aa, Unknown
  Obtained from environmental sample
  DOMAIN (147)...(299): ABC transporter
  misc_feature (1)..(334): Xaa is any amino acid
MFVKTYEVQSADWACAKCSVLCREIEPRLFSFIDKQGQCPVGKGLGKSYQIEVSKLINPELSINEGAVLASAADGRLIFSQHGMAEYKAIARKTGFSLNTKWKDLPPNAQNAVLEVIVPILQGLWDQWHISLLQKYMLIEPCSECHGERICAAARAVKFHGKGISEISSLSVEASVKFFDELELSEKEKRIGAEIFREIKGRLGFLQAVGLGYLTLSRGSATLSGGEAQRIRLAGHVGAGLQGVLYVLDEPSIGLHARDNERLLALLEKLRAQGNSLIVVEHDEETIKRADCIADIGPGAGSEGGLLVALGNIKDCKKIPPHERVISANLKMVT

SEQ ID NO: 79662 - protein, 255 aa, Unknown
  Obtained from environmental sample
  DOMAIN (89)...(217): ATPase family associated with various cellular activities (AAA)
  misc_feature (1)..(255): Xaa is any amino acid
MCVGMSKDNFKQILEKAALEGEKNFGETVKPRAQKTKEQFIDKSGLLKYVKVEVDINNDVGGLDQLKFWLGRNKKAFEDPEGAKKMGISPAKGILLVGMPGCGKSLTSKAVAAFFGYPLLALDLGTLMGKYLGESEGNLRRAISLAENSSPCVLWVDEIEKAFAGVGGDESGVSQRLLGYLLTWLNDKKSQVFVMATANDVAVLPPEFLRRGRFDEIFYVDFPNERERKAIFRIHIGKVLAKTSKGSADLILAFT

SEQ ID NO: 79663 - protein, 293 aa, Unknown
  Obtained from environmental sample
  misc_feature (1)..(293): Xaa is any amino acid
MAENANLEILSTRAGFNSAVRHIKKTMDIASKTNANLGDIIFELDDEELTSGKTGLLLRMLLVDKLGYKSASTNLSSTVNDLSVLAKEFGKWNGVDLVAAYFHPEMGLLIANPKVAEELAGFGQLNKRELLVVYAGLQGKETDENCQKAADLALRLFEGSRITAPSSLTRGKFTVKKVSKPKKISETQIEKKVKAKTASKGKTPAKRAAAAPAPTVKKAATIVQKSSGGPAKMTPRYAAIVQNELFHNGNVEAWKRIIASLQGKTSKLWKFLFTMNRKEYLTLTRCLNGASKT

SEQ ID NO: 79664 - protein, 98 aa, Unknown
  Obtained from environmental sample
  misc_feature (1)..(98): Xaa is any amino acid
LKTGEISDHRPEDLITRIVNVEYVQNADCPVWKKFVMEIMNYNADLIHFILNDAGWTITGDTSEQTMFILFGTGTNGKSTFLNTIMNLLGDYAIDRPT

SEQ ID NO: 79665 - protein, 131 aa, Unknown
  Obtained from environmental sample
  misc_feature (1)..(131): Xaa is any amino acid
MSVNKIKEIINKCIKETPCEINFYYNEPLKDHTTFKVGGPADCLLSPKGEGFRNFCVNILNTCRAQNVPVFILGGGANIVVSDKGIRGIALDMSGWKNENGTLYFNKGEIIFKSGTNIDEAGDTLCGAGFS

SEQ ID NO: 79666 - protein, 63 aa, Unknown
  Obtained from environmental sample
  misc_feature (1)..(63): Xaa is any amino acid
KPCDFYSKGRNNAKGDLFYTHVKYLRRAKNGPKGLFIPTQEKNLHVKVEEDRLRSLENCKVTQ

SEQ ID NO: 79667 - protein, 86 aa, Unknown
  Obtained from environmental sample
  misc_feature (1)..(86): Xaa is any amino acid
VPLRKRLVARAGARALFEAAAGIKIGETSADGKITLARTSCVGACDIGPVAKIGDEVFGNLTEGKVKELVRSCLAGSLKEVSQCQN

SEQ ID NO: 79668 - protein, 319 aa, Unknown
  Obtained from environmental sample
  DOMAIN (4)...(88): Glycosyltransferase 36 associated family
  misc_feature (1)..(319): Xaa is any amino acid
PGFSPGYREKRFFALAGAKVTTYCGDRAAFLGKYRDYGNPVSVENGKLDNTLNYNLNPCGALHTTFDLAPNETKEFVFLLGQKREAQAKELVSRYEDTSLPEKEIDKLKTYWHSRLANLKVNTPDENFNNMINTWNAYQCFITFVWSRAASLTYCGQRNGYGYRDTVQDIQGIIHLDPDMALEKIKFMVSAQVNHGGALPLVKYSHNPGHEDKPEDESYRKNTGHPSYRADDALWLFPTVWKYVAETGNAALLDEVIPYADKGKDTLFNHLKKAIGFSLNNLRIHGLPAGTHADWNDCLRLEAKGVSVFVALQLYYAFE

SEQ ID NO: 79669 - protein, 256 aa, Unknown
  Obtained from environmental sample
  DOMAIN (128)...(254): Carbamoyl-phosphate synthase L chain, ATP binding domain
  misc_feature (1)..(256): Xaa is any amino acid
VPLNKDIKKTMVIGSGPIVIGQAAEFDYAGTQACRMLREDGIEIVLVNSNPATIMTDKNIADIIYIEPLTLATVKRIIEKERPDSILSGLGGQTGLTLCMQLARDGFLEKMNVRLLGSSPETIDKAEDRKLFKETMQSIGQPVIPSVIAVDVRTAVKFAGKIGYPVIVRPAFTLGGSGGGIAANEAQLREIAANGLSLSPIHQILTEKSITGWKEIEYEVMRDSAGNVITVCSMENFDPVGIHTGDSTRAESDHVK

SEQ ID NO: 79670 - protein, 96 aa, Unknown
  Obtained from environmental sample
  misc_feature (1)..(96): Xaa is any amino acid
MTFFKILFPLTKSGLATLGIYNGVVIWNEFVFAMVLTQSQAARTLPLSIWEYQGQYSINTPLIMSLLVLSSLPVILLYIFGQDKLVKGMMAGAVKG

SEQ ID NO: 79671 - protein, 299 aa, Unknown
  Obtained from environmental sample
  misc_feature (1)..(299): Xaa is any amino acid
MGQKDLAASARDRVRRFIRPGTRSLDLTDTYERQGNFWGYDSDRYALALMLLHSLNPQGDDMTTRLATSLIERQRRGVWNNTASSFWPTLAFGMLGDSESSEWKTANGAPLAVTTSLGGTSLFNAEFKTYGGVPVSFNGHFAEKPVLDLPRDTLLPLRIERSGPGRLYYTASLRYGIPVELAGARDEGISVFVETFDAEGKPVRNGRLRAGKTYTRRVTVSTSRDRAFVALRSPIPSGAEIVDAVFVTSSTVPPSTKNESDDYDSDDWRYYKPGAGAFPYGRRGPLHWDFFRPGESRLN

SEQ ID NO: 79672 - protein, 220 aa, Unknown
  Obtained from environmental sample
  DOMAIN (1)...(50): Domain of unknown function (DUF303)
  misc_feature (1)..(220): Xaa is any amino acid
MGPFNAMIAPILKFPLRGVIWYQGESNDRNPDEYEALFKVMIKDWRNKSSQENLPFLFVQLPIFGSPTENDEAASWAIIREAQSAALSLPVTGMAAGLDLGEWNDLHPSNKKEVGRRLFLAAERVVFKNRNAPASPMCRDVQLRGSRLFLTFDNCSNGLIAHDTPYVSVVANGDQGACRFLIRLPAGIEKHDTLSVDLSLAKNPKRNNTPWAVIPKIGHC

SEQ ID NO: 79673 - protein, 95 aa, Unknown
  Obtained from environmental sample
  misc_feature (1)..(95): Xaa is any amino acid
MNVKKRTQLNNEQQSAAFCEENAVVAAGAGSGKTMVLANRFAWLLTEKGYNVDEILTLTFTKKAAAQMFSRIHALLTEIAERRRRDKGGKGAKGS

SEQ ID NO: 79674 - protein, 125 aa, Unknown
  Obtained from environmental sample
  DOMAIN (2)...(125): Starch synthase catalytic domain
  misc_feature (1)..(125): Xaa is any amino acid
MKVLMVSSEAVPWAKTGGLADMVSALSINLAKLGHEVKIVIPRYYSIDRDKLKLLPGAMGTPMGAGIEEWSAVYCTDMPGTNKKNPVKIYFIDHEIFFGRTAFTEATRIPTLLTIRVVSLFSAGR

SEQ ID NO: 79675 - protein, 333 aa, Unknown
  Obtained from environmental sample
  DOMAIN (271)...(306): RHS Repeat
  misc_feature (1)..(333): Xaa is any amino acid
MAESHWRIWIGEYDHGAGRFIKETGRPGIEKEYKYDAIGRVVEVKSGGEIVERYDYSNRGREVVFTDALGANYTQQKNAFGDFTGEVNRLKDSQRYSYDSEGRMIGSTAYSGKQTKIEYRDSEGITITTYPDGKQSVIERDMLGNIIRVASETGTIRYKYDAGGKLIEQNDESAGEITRYVYNKAGQRIRMQSGNRDIIYIYGKNGELLKVTDNSQRLEVSYEYDVRGRETRRTYGNGIRQETFYDQIGRIILIRETDSRSGLLRAEGYLYDEKGRRSHSVNEEGRVTKYEYDKQSRLSTVLYPWTQARSKPIAGKLKKRGYTLPRLGQRGAL

SEQ ID NO: 79676 - protein, 312 aa, Unknown
  Obtained from environmental sample
  misc_feature (1)..(312): Xaa is any amino acid
MPNIKKSEMPKKLEKTSGNGAERQERTPYHNATFGVVSCLLHKYQQNNDVELRDEHRLSKEPLRIDVVVIKKNRDVELEPIWAKIFREHNLVEYKSPVDKAPTLAVFDKLTGYARIYAAQENVKISDMTVTLICAKTPQKLFKTLTKDFDYKILQKYDGIYYIMEKGGDAEKRLAIQVMVQESELLLQAMDKKPLDEATADKVAESLSAMDEECLDNLGYWFKALSLENLKNILKGMGEDMTKREKVIMEFIESHGLLDRLQWEGIQKGIQEGIQKGIQKGIQKGIQEGRQKGVPRSHNPCSKKGTRCATLK

SEQ ID NO: 79677 - protein, 154 aa, Unknown
  Obtained from environmental sample
  DOMAIN (119)...(142): 4Fe-4S binding domain
  misc_feature (1)..(154): Xaa is any amino acid
ENQIDKHCENGIAFRFANENIDMALSGMGDLKMLEENFKIASRTGHLTEDELLHIKTMMEENKNLAKLYCTGCNYCKPCPAGIDIPYLFEIMNRYRVYDLKEHAKSAYKEMMNGWSWIKSADASKCTACGACEEKCPQKLPIIKQLQETHKTLL

SEQ ID NO: 79678 - protein, 69 aa, Unknown
  Obtained from environmental sample
  DOMAIN (2)...(47): Bacterial flagellin C-terminus
  misc_feature (1)..(69): Xaa is any amino acid
VASQNRLEHVVRGLDIGAENLQASESRIRDTNMANQMVEYVKNQILNQSGTAMLAQANQRSTSVLQLLQ

SEQ ID NO: 79679 - protein, 82 aa, Unknown
  Obtained from environmental sample
  misc_feature (1)..(82): Xaa is any amino acid
VKTITKKKIKVKSSKKPTKKTKIIKTAPKVKKIVSAKKTVKKPVIKVSAANNSAIKLVKKTVVKRATGKTTKKTTVPAKKRL

SEQ ID NO: 79680 - protein, 302 aa, Unknown
  Obtained from environmental sample
  DOMAIN (3)...(143): Protein of unknown function DUF115
  misc_feature (1)..(302): Xaa is any amino acid
MGQNRHDLPPPVPPGQARPFLREIHKRCVTVAVDTSFRFFTDNGIQPDFVLVVDPQFWNSRHLDRCPCGITALIAESAVYPPVLRLPFKNIFLCGSLFPLGSFVEKRVDPKGALGAGGSVSTTAWDFARILGSKEIWIAGLDLAFPGLKTHFRGAVFETRSNAASNRFNPAETWVVRALRDGYPFKAPCAQGGQVLTDRRLSLYAAWFENSFRRYPETRNYAVFQDGLAIAGIQTATTETLLSLPERRAEIDKKLQAAFSQIDGDFNNPEEKQKRAGRYAKAVSALISGLEEVRNAAQKARE

SEQ ID NO: 79681 - protein, 304 aa, Unknown
  Obtained from environmental sample
  DOMAIN (81)...(257): B3/4 domain
  misc_feature (1)..(304): Xaa is any amino acid
IIAVPDDYTVGAPLADYIPYDAVIEIEITPNRGDCLSVVGVAREVSARFGLPFRKPAKRPQARDDDPISAAISVYVEDRGRCPRYMGRLVRNVTIGPSPEWMKRRLALAGLRPINNVVDITNYILIKYGQPMHAFDYDAIEDKKIVVKTAGAMGVSSFTTLDNVERKLTGDDLLICDGKRAVALAGVMGGAGSEIKEHTKNVFLECAFFEQGGIRKTSKRLGLSTDSSYRFERGVDPAQGLADALERAADLMLELAGGSMANGVIDTNPNPFPDKVITDARRPKRNGPEFGATVLQTCPAYPKN

SEQ ID NO: 79682 - protein, 62 aa, Unknown
  Obtained from environmental sample
  misc_feature (1)..(62): Xaa is any amino acid
GYTGILSDLIAEGKSIIMVSSELPEALGMADRIYVMNEGKIKGVLSREEATQEKIMHLALVG

SEQ ID NO: 79683 - protein, 314 aa, Unknown
  Obtained from environmental sample
  misc_feature (1)..(314): Xaa is any amino acid
TVISRRDFRADFQAAKDAIFSEPPVDIVYEKLPDLQDARVFAVEFLPGQCDQRADSCAQCISLANGKERPLIHSSRIYALYGNITDDEFNKIKSWLINPVESREASLEKPQTLIQKYNKPGDVQIIKEFISLSDGALDELRVTMNLAMDTQDILFCRDYFRDKEKRDPSVTEIRVLDTYWSDHCRHTTFLTELDEVEIEDETLRGSYANYLETRAFTGRDSKPITLMDIATIGARALKKRGLLPDLDESEEINACSVKIKADVNGAEKDWLLMFKNETHNHPTEIEPFGGAATCLGGAIRDPLSGRALSRADLS

SEQ ID NO: 79684 - protein, 98 aa, Unknown
  Obtained from environmental sample
  misc_feature (1)..(98): Xaa is any amino acid
MGTKVEEGDTVLLDGKPVLQETQKHYIALNKPPGYICSSGDPQGRPLALSLLPVQKERLYNVGRLDFLSCGLIFFTNEAVLLPPAWTPFCAYCDIRKK

SEQ ID NO: 79685 - protein, 107 aa, Unknown
  Obtained from environmental sample
  misc_feature (1)..(107): Xaa is any amino acid
MCAVFGVGVMLLWNALMPQIFGLPQVSYLQAAGLLLLARLLFGGIDHRHPAHPAHRDAHHRNMLRERWAGMSEAERAAVISRGDPRFWDFMRDRGRPERKPEQGGKV

SEQ ID NO: 79686 - protein, 133 aa, Unknown
  Obtained from environmental sample
  misc_feature (1)..(133): Xaa is any amino acid
MNNTVISVKNLTKRYKRADRAAVDGVSFSVKQGEFFAFLGANGAGKTTTISILTTTLSKTSGEVKIAGFDIDKEARKVREKIGIIFQQPSLDPQLTAEENIRFHACLYGMCGYRPSFNPCRRRTATRSWNWPL

SEQ ID NO: 79687 - protein, 247 aa, Unknown
  Obtained from environmental sample
  DOMAIN (149)...(245): Response regulator receiver domain
  misc_feature (1)..(247): Xaa is any amino acid
VKQIYTNLLTNAVKYTREGSIELSVFCKREGDNVWMDVAVSDTGMGIPKEAIESLFLDYYQVTATSNRNIEGTGLGLSITKRLIEMMDGEIKVESELGKGSKFSFRVRQGFVDEAVLGSDVSNKLRTFCYSDDKKINTRKLIRINLSYARVLVVDDMETNLDVASGILHRYKMQVDCLSNGPAAIDRIREGTPVYNAVFMDHMMPGMDGIETGGQDRRARGHRIGAKKVPRLSPFRADLILGKRKWG

SEQ ID NO: 79688 - protein, 319 aa, Unknown
  Obtained from environmental sample
  DOMAIN (7)...(305): Melibiase
  misc_feature (1)..(319): Xaa is any amino acid
SKGQSVTNFRPGGYVSWYNHYTGIDEKIILSDLKGLLQPDNLIALHYLKKGLPAVFQIDDGWELAVGDWEVNGARFPRGLKYIAEKIDNSGLIPGLWLAPFLQTRRSRIFQERPEWLLSERGRPVKAGWNPNWDGVYYCLDLSREDVMKYLRSLMDRIIDGWGFRYIKLDFLYAGFLSGENGGSRTAERFEEAIALLTERKRNAAALPLVYLGCGLPLGSSYRHLPLSRIGTDTLEKWDWRLAKFIRHEGRPSALLSMRETISRSFMNGTVYMNDPDVVFLRTINCALDETEKECIALVNFLFAGANHGSDNFHTPRPI

SEQ ID NO: 79689 - protein, 214 aa, Unknown
  Obtained from environmental sample
  DOMAIN (1)...(78): Cache domain
  misc_feature (1)..(214): Xaa is any amino acid
VYEDALGSGLVATVSKAVFDKRKNLLGVVALDIMLDNYKKLLMETRILKSGYAFIINNEGKYIFHPDMDTQDFQPTIPQASTGSETAEGFQRMMNGETGFFTVEENGELFFIDERSESRGRAGTDMAERVRTSKDSISFIAFSPISVTGWSVGVTVNEDELLSALGSLSTQLTSLTGEAKKDIERMSGQAIITFIGIFTAVAVMVVFLSFFLPF

SEQ ID NO: 79690 - protein, 120 aa, Unknown
  Obtained from environmental sample
  misc_feature (1)..(120): Xaa is any amino acid
MNTNPTTLLRYTQNRELSWLKFNERVLEEAQDANVPILERLKFVSIFTNNLDEFFMVRVGSLCDLAMEHSSAIDNKSGLTPGETLDVVYNAVRPLYAKRDEVYSENQSQIRRYGICSLDI

SEQ ID NO: 79691 - protein, 306 aa, Unknown
  Obtained from environmental sample
  misc_feature (1)..(306): Xaa is any amino acid
MMSDGALSQDEIDALLSGVDSSSLGGFGGGGSSPAAAAVASPASAGGSFDIDALEKFFSSTTGALSANLAALTGTTVSLVGPEVASSSRDNLLTLIPGMVTVVNTNFTSGFPGEHCFIFSEESAKAIASLMTKETDIQLDEMAMSVIGEVVSQIAGTQITALTDKTGNKSIASASPSAANIPKATAALPAGEFAVMTYGLEMGDGLSHQIWEVLGLSPAVDISNSLSGKSPAKSSGQQMPMGMGGNDMNAGMQMPMGMGGMNMGGYANAKYWRYANADGYGRYEIWAAECQPWSDNVQLCNFPSDA

SEQ ID NO: 79692 - protein, 74 aa, Unknown
  Obtained from environmental sample
  DOMAIN (15)...(74): Ribosomal protein L13
  misc_feature (1)..(74): Xaa is any amino acid
MKTVVVDTASIERRWFVVDASELTLGRLASKAAQVLIGKGKVAYSPNQDHGDYLIVVNADKVRLSGQPCHIQKN

SEQ ID NO: 79693 - protein, 320 aa, Unknown
  Obtained from environmental sample
  DOMAIN (89)...(154): His Kinase A (phosphoacceptor) domain
  misc_feature (1)..(320): Xaa is any amino acid
LSPKYQPCGTRSPKKRVDVCNVAFENGTNRFEWMHQKLSGEPLPVEVTLFRINYKGEHNLAAYIRDLREQKAMELLTKQQAEAEAANRAKSSFLATMSHEMRTPMNAIIGMTVIGKNADTIDRKNYALNKIEGAAQHLLSVINNVLDISKIEANKMTLSPIRFDFEKMLQKVINIINFRVDEKHQRLTVNIDDNIPRFLVGDDYRLTQVILNLLANAVKFSPDSGEIGFDATLAGETDGICELRVTVSDNGIGVSPEQQAKLFSPFEQADSSTSREFGGTGLGLVISKRIVELMDGKIWIESELERVPSSSPSREAVICL

SEQ ID NO: 79694 - protein, 60 aa, Unknown
  Obtained from environmental sample
  misc_feature (1)..(60): Xaa is any amino acid
MAEDALPKGYEPREVEQRRREYWENSRTFTPDPDGPGKPYAIVILPPNSLGRSDLDWGIR

SEQ ID NO: 79695 - protein, 295 aa, Unknown
  Obtained from environmental sample
  DOMAIN (1)...(206): Amino acid kinase family
  misc_feature (1)..(295): Xaa is any amino acid
VKDLALLAKTGFKVIIVPGVRENIDAVLKQHDINSSYASTQDSPVRVTTSEGISYVEMAAFHVASRIMTFLSGSRVDAVIGNFVRARGLGVINGIDAEYTGVVDKIYADSLARVLELGMVPILPCIGWSPSGKPYNVPSDEIAIAVSKALGAIKLFIITATEGLNITRLTPKETEDLINTGSNFMRELKLALKASQEGVHRVHIIDGREEGAVLKEIYSNLGAGTMIYTDEYDSIRPLHSKDLPDILRFMGPLMQKGILIRRNPEQIPGKKDPIFLFLEMTARSAAAERLTNGAS

SEQ ID NO: 79696 - protein, 217 aa, Unknown
  Obtained from environmental sample
  DOMAIN (27)...(214): Glycosyl hydrolase family 3 N terminal domain
  misc_feature (1)..(217): Xaa is any amino acid
MDREARIKDLISKMTLEEKVSQLSHESAAVDRLGIPEYNWWNECLHGVARAGVATVFPQAIALAATFDDELVKQVMDAVSDEARAKNNEAIKQGNRGQYWGLTFWTPNINIFRDPRWGRGQETYGEDPYLTARMGTAVVRGLQGPDLENLKLAACAKHYAVHSRPEKDRHTFNAIVSKKDLWETYLPASRLLSTREVEAVMGAYNRTLDEACCARHL

SEQ ID NO: 79697 - protein, 300 aa, Unknown
  Obtained from environmental sample
  DOMAIN (107)...(289): AMMECR1
  misc_feature (1)..(300): Xaa is any amino acid
MILHGNSLKRSLQSQPQSDARDIDDATISSVVSGNSDGFMEACGETAMRVVMEIAAKRGLAAELIDARTSYETAPEYGDPHRVVGYAAIAFVKSGASDGGTENFNEQEKEYMLKLARETITSAARGGDVRPPPKPKQELSKLTRNYGCFVTLNSHGQLRGCIGNIEPIKPLYKGIADNAINAAFHDPRFPRVKAAELGDIKIEVSVLTKPAPLCAKSPDEILKKLVPFEHGVILKMGSRQSTFLPQVWEQLPDKAMFLEHLAMKAGAGRDDWKRADVWVYRAVHFAEGGVSSPAGHLSDA

SEQ ID NO: 79698 - protein, 318 aa, Unknown
  Obtained from environmental sample
  DOMAIN (2)...(234): Elongation factor Tu GTP binding domain
  misc_feature (1)..(318): Xaa is any amino acid
EDGFMELERERGIPYSSAATYATGNDTTINIIDTPGHVDFTIEVERSLRVLDGAILVLCGVAGVQSQSITVDRQMRRYNVPRIAFVNKCDRAGADPLRVAAQLREKLNHVPCVMQLPIGLEDKLKGVVDLIKMKGFLFEGQSGQDIKEIEIPEDMKAQAAEYRSKMIETLADFNDHIMEAALEGKDISEEVLKETVRKATIDLKITPVFLGSAYKNTGIQKLLDGVTDYLPNPTEVKNIALNIDKNEEPTELESKDDKPLVCYAFKLTDDRYGQLTYIRIYQGSIKKGLAIVNMTTGKKDECRPPVLSSAICLEWEMP

SEQ ID NO: 79699 - protein, 320 aa, Unknown
  Obtained from environmental sample
  misc_feature (1)..(320): Xaa is any amino acid
MMAETCWFYLAPNDYLDAQVYANVVEGSSADFTKSNLNGEFRYNERYTLDGFVNAAGYFNNGTFWRDYDIRFKHSQNITPDRSKTLNGEGSFVSRQNLRQQNGIDETTILDQQANAEMTYYQKIGDNKNVTVKTRQEYNLSTGLVRRQLPDIQFRMSGPLFESDMSGENIEPPFWEKINYSYSNHFNNHSVKAYDSLKGKDTAAYYTGLSDNLRFNYTGTLFNVLNITPSLNIMNNWTAREYISPDDSINNKRSRFAFDPSKSEYGQYYLKYNASLEAATKLYGFWLSRMGQNHRASPYPFGNPLAHLCTETRSQPKIFF

SEQ ID NO: 79700 - protein, 322 aa, Unknown
  Obtained from environmental sample
  DOMAIN (11)...(209): Glutamine amidotransferases class-II
  misc_feature (1)..(322): Xaa is any amino acid
MKADGKLNEECAVFGVSLTCDAAPVTTYNGLLALQHRGQEGAGIAVANNHNLVCHKDVGLVSEVFSGHKIEHIPKGRVAVGHTRYSTTGRNSKENVGPFVTEYLTGRIATAHNGNITNAQAIRDKLSKRGVMFHATSDSEVISALIAYYIKQEKKALPGIIKAADHLRGAFSLIIASSKNKLIAVRDPNGFRPLCLGKNELGYAVASESCALEICGFEFVRDVKPGEIITIKNGVITYESISLSHKEEGRGFCIFEYVYFARPDSVLDGLSIYEARYNMGAILAKEYPVNADVVCGVPDSGLVAASGYSAELGRSVLGGGMG

SEQ ID NO: 79701 - protein, 327 aa, Unknown
  Obtained from environmental sample
  DOMAIN (4)...(152): DEAD/DEAH box helicase
  misc_feature (1)..(327): Xaa is any amino acid
PGVFPDIASPATAYRVNVSPLKALNEDIRRNLLKPLEAIRSRFEQAGLKFPDIKVETRSGDTPQSQRRRFYLHQPSILALTPESLAILLLNPKGRQALSNVKYLILDEIHAVLGNKRGAFLCCQIDRLSLIAGEFQRISLSATIRTPEIAAAFVAGIDQNGQGRKISIVAPAAEKKIELILSFDDRENNIGQIEKYGRRYTSLINYILNRISGRSTILVFTESRRRAERLCYFINQEAGTTLAFTHHGSLSKELRQSVERRLAAGSLFCVVATASLELGIDIGSVDEVVLAGSPGSVSQALQRIGRSGHGVGMVSRGLLFLFHGMDL

SEQ ID NO: 79702 - protein, 111 aa, Unknown
  Obtained from environmental sample
  misc_feature (1)..(111): Xaa is any amino acid
MKRIILKPGEEERVILGHPWVYGNEIDRVLEGKEPAKLVPGECADVESSRKNYLGRALVNPNSKITARLYSPSKEGIDKGFFKRRIREAVLRRASFRNLSRESARLVFAEV

SEQ ID NO: 79703 - protein, 304 aa, Unknown
  Obtained from environmental sample
  misc_feature (1)..(304): Xaa is any amino acid
MVALGEGSQRVIESRITAMGTNLLQIMPRRQINRSGQNTIMRTNAFTKKDIQKLRDESTFAAAVSGVVNSNANVTASEGSAQVQIMGVEPDFSIARNYKINAGVFFDDEDMRLRNRVAVLGRTTAKNLFGDADSALSKQIRIGTVYFTVIGLLESKGAGLGGNDQDDIVIVPMDTAMTRLNNSRNINMIVLSVISKEYMDAALKEARLILCESRGIADEANADFDIMNQADIIDMASATSKTMTTLLAAIAGVSLLVGGIGIMNIMLVSVTERTREIGIRMAVGGRKRGHPLQFLVRNLYVGRP

SEQ ID NO: 79704 - protein, 306 aa, Unknown
  Obtained from environmental sample
  misc_feature (1)..(306): Xaa is any amino acid
LQALAAPASSVDKQLKSNAAALKKNQEEIQKAETKVRELENKESGVLKTIAEIDQGLTQTREQLYVLQKKESSLRTAIKEIEEEITHLQESIDTQKKAIATRLRDLYIHGKREEWELLFNLLKENENPERKLYWVQRLLESDRITIENYLASIEKQREKREQLGTKQKEMAELHENKSKEESKYQNQLLFQTEVLTKVKKDKTTQHRVIEEYKQNQQTLTALIATLEKKRQAELKRQAELKSKSQSQSPTAAKNKVENEVPIAVGPKCTPTSGETISHYGYHENKDLGIRLEHQGTENRGQKEMLL

SEQ ID NO: 79705 - protein, 76 aa, Unknown
  Obtained from environmental sample
  DOMAIN (1)...(72): Prokaryotic transcription elongation factor, GreA/GreB, C-terminal domain
  misc_feature (1)..(76): Xaa is any amino acid
VSFGTVFILHNQARDKKEKYTLLGPWESDPDNNVISYLAPFGKIMMGKTEGEQFSFTSDGEKISYKVENIRPAVIN

SEQ ID NO: 79706 - protein, 333 aa, Unknown
  Obtained from environmental sample
  DOMAIN (176)...(319): GAF domain
  misc_feature (1)..(333): Xaa is any amino acid
RPFAEAVGLDRVVFYRLVNVEGGKRLGQVYRWDKAKGGLMSLAEELKVLPSHPVLDKWISITSQGGCVRSREKDYTEEEAAFTHTYGIKSLFIVPIFTHGEFWGNVSFQDHSKDRYFDKDCADLLHSAACVFSNAIIREEVALGAQEAIKTLKRREKMLDTLNRVAVMFLSRNEKTFEETMTRGVREIADMFDLDRLSLWRNLRRHDAMHVSQIYRWDREAGGTTEPTKGLEDVTYAQLAPRWEKLFASGQSINSPVRLLPEAVMLQSFGCVSAFITPIYINNAVWGFALLEDRHSERFFEEDSIEMMRSGVLLCANTVIRLCRSDHGKGNGG

SEQ ID NO: 79707 - protein, 292 aa, Unknown
  Obtained from environmental sample
  DOMAIN (142)...(257): Response regulator receiver domain
  misc_feature (1)..(292): Xaa is any amino acid
VPHTLIGDSKRLLQIITNLLSNAVKFTPKGGNVRLDARLLTAEDAAHTVQIEVTDSGIGISPENQARLFHSFHQANLHTTREYAKAELGLAISRHLVEIMGGRMWVDSELGLGATVGFTFPAKRGDENENRLLSNNNYWADKRALVVDDAPNTLVYFRGEASRLSISCDVALSGEAALDLIGKNGPYDICFIDWKMPGMNGIETAARLREQGAARPLIVLMISAAEWKLVEDDAKKAGVEYYLQKPLFRSDIIDCLNNCFGPKPAEDAQPQVKKDNFYGFRILLVDDLEINR

SEQ ID NO: 79708 - protein, 260 aa, Unknown
  Obtained from environmental sample
  DOMAIN (18)...(260): tRNA synthetases class I (I, L, M and V)
  misc_feature (1)..(260): Xaa is any amino acid
MKSIELEKSYDPKTFEDRIYALWKESGAFEPQPSLTTCKWSGLEPKDDKGEGTFVVVIPPPNVTGVLHLGHGLNNSLQDIIVRFHRMRGASTLWVPGTDHAGIATQNVVERKLKERGTSRRELGREKFLEETWKVKNEHHAIITKQLEKIGASVDWKRERFTMDEGLSQAVREVFVTLYERNLLYKGNYLVNWCTSCGTALADDEVEHEDTQGKMYHIRYYFTDDKEKYIEIATTRPENMLGDTALGVSPRRRALLCPQR

SEQ ID NO: 79709 - protein, 189 aa, Unknown
  Obtained from environmental sample
  DOMAIN (6)...(170): Protein-L-isoaspartate(D-aspartate) O-methyltransferase (PCMT)
  misc_feature (1)..(189): Xaa is any amino acid
VEEDHQNLRDLMVSEQLGSRNIRSEAVLLAMRQIPRHLFVPDHLQKYAYEDSPLPIGLGQTISQPYIVAYMSEQLQPFKGMKVLEIGTGSGYQSAILSCLGCEVYTVELLEELAIKAEKVFKKLNLSGIEIKCANGYSGWQEEALSMHHCYRRLRTNPRKSHRPIIRRRQNDSASWPPPFSSVPEARNK

SEQ ID NO: 79710 - protein, 329 aa, Unknown
  Obtained from environmental sample
  misc_feature (1)..(329): Xaa is any amino acid
MVFKIDYPVTEDPGFPGLVKDLALLAKTGFKVIIVPGAKENIDAVLKQYNIESNYISVDNFPVRITTKQTIPFVEMAAFDVASKFMTFLTASKVEALIGNFVRARGLGVQNGVDTEHAGIVDKIFKDSLERVLNLSMVPILPCIGWSPSGKPYNVPSAEIALAVSSAMNAEKLFFLSVHDRMQVKNLNIKEELETRADGSLVRLTPRQAELLINSSSVPSQFLSELKLALSASRAGVNRVHLLDAREEGAVLKELFFNLGVGTMVYNDEYDSIRAFHFRDFADILRMMEPFMQKGVLIRRNPEQFREKRADYSSLGNDGLFRACGPFHD

SEQ ID NO: 79711 - protein, 122 aa, Unknown
  Obtained from environmental sample
  misc_feature (1)..(122): Xaa is any amino acid
FFPVIARILFRRKTIYFSGDSGYFIGFKEFGNRWNIDYAIMGAGAYEPRWFMHYAHMNVKEFLMAAEETKAKVSIPMHFGVISLSDEPLLYPLLEIDNAVKQNPEFANNILPLRVGEYTKMN

SEQ ID NO: 79712 - protein, 301 aa, Unknown
  Obtained from environmental sample
  DOMAIN (183)...(297): tRNA synthetases class II core domain (F)
  misc_feature (1)..(301): Xaa is any amino acid
MMAEEERILALVRQKLAGQERLSLSDVAGALGMENKDIGSAFGSLSKLGVLTLDGDKKVTIALPPESLDDPARNPALAQFTVLHGLFKKTAPEDGLLAEASLNDEEKKFISGIAKKRGASDAAFRQIDREIVVFGFSVAQDGSVPAEAAAAALKAAGISGEEIGTLSQQMLETGSWKGKAFRSYNVKTPPTRLTPGRSNPYAKFLENVKDKLASLGFEEFDGPLVETEFWNSDALFMPQFHSARDIHDSYSLTDPAQPGEIAKAKSIEEPWLSTWLMPMKTAEKTAAAAGATLLTVNLLVG

SEQ ID NO: 79713 - protein, 285 aa, Unknown
  Obtained from environmental sample
  DOMAIN (227)...(282): Bacterial flagellin C-terminus
  misc_feature (1)..(285): Xaa is any amino acid
MLSEGSILAKGSFINMINDGVSTNAIRIMVSGNELTMSFDSVNGVLKIGNEIVAPGRSITLDDGTVLTHASNLDSRNVANGVIFVDTGRITLAEDITAIDGNVEGFSVAKDSTLAAKTKIEDGMTLMAGTVITTSDKFYPGSVTMAHEGRSLQFSANAGVALEARYYETAVSESITFIFSRYEPASSNLKDSVMAQIGANSGQTAFISMGDMRAAALNVANIDISSKWGAATAIETVNNALQRVSHQRALLGAMQNRLEHTIKNLDASTENLQALGRSDTWGGTK

SEQ ID NO: 79714 - protein, 138 aa, Unknown
  Obtained from environmental sample
  misc_feature (1)..(138): Xaa is any amino acid
IYYHLLIVSEAVLKAAKEKFLFRKIDNVRVKGKDKPVGIYAVYSGVHGADGKKLRSGETADITSVDSLLINRDTLINYNKGLRVFYLREWKLAQEYFNNALESDKNDYLSKLYLERSAKLSEANVGDDWDGVITFTEK

SEQ ID NO: 79715 - protein, 280 aa, Unknown
  Obtained from environmental sample
  DOMAIN (89)...(202): Response regulator receiver domain
  misc_feature (1)..(280): Xaa is any amino acid
MEANRTTEGAGLGMTITRNLVELMSGQIYIKSSIGEGTTVTVRIPQKTPGIGIRDLIGKEMTESLKQFKLGNVMQLKKSQVKHDYMPYGSVLITDDVETNLYVAKGLMAPYGLKIDLATSGFEAIEKAKNGNVYDIIFMDHMMPKMDGIETTKIIREMGYTQPIVALTANALAGQAEVFLKNGFDEFISKPIDIRQLNAALIKYIRNKQSPETLDAAQKEKEEFDKKQAAAADKGGQQVDPQLAKLFARDAEKAINALDGVLQKNFKTKADIQPFPQSRF

SEQ ID NO: 79716 - protein, 288 aa, Unknown
  Obtained from environmental sample
  DOMAIN (2)...(273): Prokaryotic protein of unknown function (DUF849)
  misc_feature (1)..(288): Xaa is any amino acid
MSNKLMLTCAITGAETTREQQPALPITPEEIAAGALRAWEAGASILHLHVRMDDGTPTQDKAVFKKAIDLVRSKCDIVIETTTGGAVGMTPEERLQPVTLKPEMASLDCGTVNFGDDYIVNTLPIMREFAKAMRDNGVRPTLECFDLGHVYASQMLIKEGLLEEPYHYGLVLNVPGAAKYEVDVLDFMVRKLPKGAFWTAMGIGGKANLDAIYGALSLEGNVRVGFEDNIWYSKGRLAKSNAELVERAARIAKDCGREIARPDDVRSMLKLRKGDATLGRSDHAGGKK

SEQ ID NO: 79717 - protein, 252 aa, Unknown
  Obtained from environmental sample
  DOMAIN (28)...(168): Histidine kinase-, DNA gyrase B-, and HSP90-like ATPase
  misc_feature (1)..(252): Xaa is any amino acid
MALHTTNINTHDIQVLPPQEARRIAAGEVIDRPAALIREFIDNAIDAGASAIEVSIEGGGGKKAEVSDNGSGMDRENLEKCVLPHATSKIRSLDDLDTVETLGFRGEALAAAAAVARLEIISGTENGGATCGGEAWRLEAGPGEERPLHITTASRTRGSTVRALNLYESIPARKKFLKRDGSEAAQCRQAFIDKALAFPEITFRYTQDGRPKDFLPAANQRRSVLPPQRWKLMKENFSTRLAFQARGFPLIS

SEQ ID NO: 79718 - protein, 313 aa, Unknown
  Obtained from environmental sample
  DOMAIN (69)...(274): Phosphoribulokinase / Uridine kinase family
  misc_feature (1)..(313): Xaa is any amino acid
MSPNFHVYNEYKKWGRIVGVRVVGDLNSLIAKRNIRDYIRIAEAHQARKMSEIAEQICGQEETVKTVLLAGPSSSGKTTSAKKLSIELLVLGIMPIAISLDNYYVGTDRTPKDEKGEPDYECLEAMDIPLLNDHLLALYRGVEVTMPVYDFKTGTRLNYGGKKARMDENRRTVLIVEGIHALNDKLTPDIPRETKFKVYVSALTQLNLDDHNRIPTSDNRLLRRMVRDSQFRGKDAAGTIKMWSGVQTGERKHIFPYQNTADAAFIRPLITNFPYLILRRPSVAGGKARSARIRRTLTPLFILENSHPYRPIW

SEQ ID NO: 79719 - protein, 133 aa, Unknown
  Obtained from environmental sample
  misc_feature (1)..(133): Xaa is any amino acid
MNSDVKVLPRKINGVVRAIPSKSQAHRALICAALADKQTTIECESGSDDITATAECLSALGAKIERESDVYIVHPLKREENNAATLPCGESGSTFRFMLPIVGALGRKVFVILKGRLPERPLSPLYEELVRHG

SEQ ID NO: 79720 - protein, 186 aa, Unknown
  Obtained from environmental sample
  misc_feature (1)..(186): Xaa is any amino acid
MNAYWNSRIKNLSPYVPGEQPKDRQFIKLNTNENPYPPSPKVIEALQKSVNDGLRLYPDPECTVFREAIAAHCRVRTEQVFAGNGSDEILAFAFAAFFESGADAQPILFPDISYSFYPVYTRFWDIPYRTIPLNEHFFINTAEYKIPSGAVVLPNPNAPHGMTLPLGDIYHWLIIWKEPKMFLFLM

SEQ ID NO: 79721 - protein, 89 aa, Unknown
  Obtained from environmental sample
  misc_feature (1)..(89): Xaa is any amino acid
GFFPPDDGENGYANIEARLTDIGSRQERAMATWNRLNQEIPNVTAMLARESSVNMVDAATDLGMMDFAHKAALQTAAKILPTTLLDFLR

SEQ ID NO: 79722 - protein, 134 aa, Unknown
  Obtained from environmental sample
  DOMAIN (23)...(134): Glycoprotease family
  misc_feature (1)..(134): Xaa is any amino acid
MKVLGIETSCDECSAAVVEDGEKILSNVIATQIPFHAPWSGVVPEIASRKHTEWIYAVTKEALDKAGLTHTDIEAVSVTSRPGLLGSLLVGLSFAKAFAWARNIPFIAVDHMLAHLYAPRLIAENKPEYPFLGF

SEQ ID NO: 79723 - protein, 279 aa, Unknown
  Obtained from environmental sample
  misc_feature (1)..(279): Xaa is any amino acid
GLLPRIIARSPDSEACDDSQGELFGGPGSDNHIEYYSNIKETDIAIVTGMHSETGIDFSVLQPEILRFYELSVDAFCAVVNAWMSELPVTEQIIRFGKKILASQKTITGNNGSNQRGKIETMRRKAAKIAATDRGDPDAQAVREAAYKVWHEINRLTGLLRFCPDEKGVYTAQCEPDHFVLPALGPHFMERFGETPWTIIDNKRRLSLGCETGQSGAPGRTLIFSANTENQLIFKKGQTGEWENLWKHYHKTINNESRNNPDLQKRFMPTRYWKYLTEV

SEQ ID NO: 79724 - protein, 307 aa, Unknown
  Obtained from environmental sample
  DOMAIN (18)...(153): Pyridine nucleotide-disulphide oxidoreductase
  misc_feature (1)..(307): Xaa is any amino acid
ARLWDSTGVLAVESVPKRLAVIGGGVIGVKFAGLFSALGAEGTAIEMMDEIIPFMDKEQAPLFRRALKGVDFKLGCKVEKIEGAAVHYTDKKGKAEIKEADLVLMAVGRKPVTDTWGADAAGVDYSPKGVAVDDRMRTNIPGIWAAGDATGKSLLAHSAYRMAEVAVADILAGSHSAGNSNQMRYNAVPWAVYGLTEAAGVGITEQEAESKGIAVLKASLPMRVSGRFVAENTLMGQGAVKAIADANDRRILGVHAVGAYASEFIWGGAALIEQEFRIDEVKQLIFPHPTVCELIVSADLYSKGGLG

SEQ ID NO: 79725 - protein, 314 aa, Unknown
  Obtained from environmental sample
  DOMAIN (68)...(104): e3 binding domain
  misc_feature (1)..(314): Xaa is any amino acid
MTFGFKPIAVIGAAGEDWKAAMGENSQETSHEGAKTQREEQIEPPSSLCAANHRFEAPLRDENSEMHISPRARNLAGKEALPLEAVLGTGPGGRIIERDVVSALQNRPPLTAAAKAAGAIEPKVVAVPSIGTGIGGRVTTSDIAFPLHAPHSPIPSEGAITETPIKGIRKVISDRMLKSLSESAQFTINASAQAAKLQEFRMGLKSQGSLAEELGVSKITINDLVLFAVARTLPRFPYMNAHKTGEIITTFERVHLGFAVDTPRGLMVPVIRNANLLSLSRISSEAKRLVTACQNGTANPDELTGSTFSVFNSG

SEQ ID NO: 79726 - protein, 260 aa, Unknown
  Obtained from environmental sample
  DOMAIN (48)...(203): DNA gyrase B
  misc_feature (1)..(260): Xaa is any amino acid
VEFVPDAEIFGEYKFNFEYIEQRLWNYAYLNSGLKLFLGKQKFESKNGLLDLLQSDVGESAVYSIAYCRGKQLEFAFTHTQAYGEAYRSFVNGQFTSDGGTHLSAFREGILKGVNEFYKKNYSGVDVRDGIAGAVAIKLKSPVFESQTKNKLGNTEIRGWIVSEVKSGVVDFLHKNADAARSLESKIVQNEKLRTELNKVKKEAKEAAKRVEIKIPNLKDCKYHARRKRRRQVHHLPYGKVNPPEARSSPRATCTRRRYS

SEQ ID NO: 79727 - protein, 309 aa, Unknown
  Obtained from environmental sample
  DOMAIN (234)...(298): FKBP-type peptidyl-prolyl cis-trans isomerase
  misc_feature (1)..(309): Xaa is any amino acid
GIGGLLITCIAGTVSAAPNDASYGNGWFARINTDKGDIVVQLEFQKTPLTVCNFVALAEGKMNVSGGKRFYDGLVFHRVIDDFMIQGGDPQGNGRGGPGYEFPDEIVPSLKHDGPGVLSMANAGPGTNGSQFFITHVATPWLDGKHTVFGRVVEGQDVVNAIRQGDKIRSITIIRNGPLANQFKADQAAFDALLQKTAGSGNAKRDADIALITTKYPSAVQSPSGVKYIIQKKGTGNKPAPGKTVQVNYRGYFLSGQVFDTSETRGKPLEFPAGVGAVIKGWDGNGYGYASRRKAPLVPILIHDWGEMG

SEQ ID NO: 79728 - protein, 65 aa, Unknown
  Obtained from environmental sample
  misc_feature (1)..(65): Xaa is any amino acid
MKYYEFNKEFAVGADISWYPQMLESGFVFRNQHGQEQDLLLTLKDYGMDSIRLLGEFCPWGKGMR

SEQ ID NO: 79729 - protein, 147 aa, Unknown
  Obtained from environmental sample
  DOMAIN (10)...(126): Metalloenzyme superfamily
  misc_feature (1)..(147): Xaa is any amino acid
ESRHLRLKAGDEHLRSEGQTCEAIKSNKYDAVICNFANCDMVGHTGVYDAIIKAVEAVDECVHDTVEAVLALGGAAIITADHGNAEQTKLPDGSPMTSHTTNPVPLTVIGAGDVKLRDGGTLADIAPTFLKLMGQEQPAEMTGKSLI

SEQ ID NO: 79730 - protein, 277 aa, Unknown
  Obtained from environmental sample
  DOMAIN (41)...(277): BPG-independent PGAM N-terminus (iPGM_N)
  misc_feature (1)..(277): Xaa is any amino acid
MMFNNIAHYPCSKYYILQTRFQVSITKNQNQTQKQKDKAMQKRPVCLIIRDGWGRGNPETSNAIYSARTPFTDAYESGYPTTLVEASGLSVGLPRGYQGNSEVGHLNIGAGRTVYQSLTRIDKSVEDGDFFTNAAFLKAINFAKNSGGNLHLMGLIQEEGVHAVTRHCVALLKLCRDSGLKNVLIHAITDGRDTPPKSALEHLALLQKGIDEMGVGQVATVIGRYYAMDRDNRMDRTELAYHAIVEGRATPANSWREGVESSYAAGENDEFIKRRIL

SEQ ID NO: 79731 - protein, 273 aa, Unknown
  Obtained from environmental sample
  misc_feature (1)..(273): Xaa is any amino acid
LASPWSPPKEWKSNNDLKGNGRLNTKNYQDYANYLKSFALNMYQNGAPIYAISIQNEPNFEASYDGCFWSPADMKNFFSQMGHFTDGVKGYGGGKEIPSVLTMNGESMNNPNINDAALGSPESRAAIDIIGRHTYGERLNRYAKALDHPTDPKEVWMTEHNINSGNTSGYPNDSTWNYVWKILNDIDLSIRLNDESAFIWWAAKRFYGLMGDGQYTTKDGELTPRGYAMSHYAQFARDTYRVGITAKGQIRDGSNISTGNFYSHADSIDRTHG

SEQ ID NO: 79732 - protein, 94 aa, Unknown
  Obtained from environmental sample
  misc_feature (1)..(94): Xaa is any amino acid
MIVNEIETIKIDKKMPKLPVARALWKPFPNLTDAAEAWIISGGTHHSVYSSSLGSDYFRDWAEMSGIEFVLIDRDTKPDRLQDELRRNDAYWAR

SEQ ID NO: 79733 - protein, 195 aa, Unknown
  Obtained from environmental sample
  DOMAIN (9)...(194): Class II Aldolase and Adducin N-terminal domain
  misc_feature (1)..(195): Xaa is any amino acid
MDIYKTLREEAFEANREIKRRGLAIYTWGNASAFDSAKGVFAIKPSGVEYDELKPELMVLVDLEGAVVEGGLKPSSDTKTHLVLYREFKGIRGIAHTHSPYAVAWAQAGKPVPVFGTTHADHCAYEIPCTNFMNPQDVKNNYELETGNLIVNTFKNGNLDCLQITMTLVAGHGPFTWGASAAQSVYHSVILEKSV

SEQ ID NO: 79734 - protein, 184 aa, Unknown
  Obtained from environmental sample
  misc_feature (1)..(184): Xaa is any amino acid
PPFNPDIAVGRSKAQGYTLCLSALFNAAGYDVKGSIKGLEQNPANLLPVIMETACGMRAELQIFGSDYDTPDGTCIRDYIHVSDLATGHAAALEHIIKNNKSLIVNLGSETGYSVKEVLETARRVTGKPIPSKMVDRRPGDPAKMTASSALARELLGWSAKYSDMETLIRTSWEVYKNQVTGNR

SEQ ID NO: 79735 - protein, 125 aa, Unknown
  Obtained from environmental sample
  misc_feature (1)..(125): Xaa is any amino acid
MKKKIFKWIDKSVSLAVELQGELTKRPAVSPDSGGEGELDKCVFLEGWLTSHGITQLERFDAPDKHAKGWVRPNLVATIPGSGKDADGCLWIISHLDVVPPGEESHWESDPWHMVETKDGPLGHR

SEQ ID NO: 79736 - protein, 271 aa, Unknown
  Obtained from environmental sample
  misc_feature (1)..(271): Xaa is any amino acid
MCYTLGGKVGSGKTGEYGRVKVTPVKSSSKLFKNKKDSFTALMSHGDIVTSLPEGFRVTAKSAVCTAACEDKAKKLYAVQFHPETKHTKGGREIIKRFLYDICGASGDYKLGDYIDTQIRQIREKVGDKKVLLALSGGVDSSVCAGLLSKAIPGQLTCIFVDHGLMRLNEGDEIESAFSKRNLNFIRVNAQKRFLAKLEGVTDPEKKRKIIGEEFIRVFEEESAKLGDIPFLAQGTIYPDVVESGGKHGAVIKSHHNGAGSRSSRYQGGKT

SEQ ID NO: 79737 - protein, 303 aa, Unknown
  Obtained from environmental sample
  misc_feature (1)..(303): Xaa is any amino acid
PDPSRIIASARETGEGGRLIGTLPDVTREHYTLEGWYTASTKVEANVTEFTGDATVTARWTPVKYTISYTLGAADAVPPVSANPADYTIETPTFTLNNPTREGYTFAGWTTAGVTTPQPTVTIAQGSFGDKSYTANWTVIVTYTITFDSKGGTSVAARPTYADGKVTPSWWPVVEKGDSAFAGWYLSSTYSGQKLPTEHTFTGNTTVYARWAAPPTIFTIKFNANNGGTLVGDDSYRTGSDSTLASWPENPIPNEGKVFIGWYSASSSGTEVSANYKFPGDLDRVRNREPRGYTTSTPGGRIL

SEQ ID NO: 79738 - protein, 289 aa, Unknown
  Obtained from environmental sample
  DOMAIN (133)...(212): Toprim domain
  misc_feature (1)..(289): Xaa is any amino acid
LKKRGKTRAYYILDRSISEEMIKKFQLVFALSDRDFLHKFLKQKGYSDEFLEKSGLFSAKYKTIPLFSGRLMFPITDRQGKIVAFGGRALPGTVQSDGNEPPKYINSPETEIYKKGQTLFAIDHAKPQMRQTKTVYLAEGYMDVIALHQAEIVNSVAPLGTAFTDEQAAWLRRWVDNVVLIFDTDEAGQKAAYKAIITCRKNGISCSLVNFKEGLESEIDGKEVQKIKDPADILQKFSPQILKKVIKFTINDFEYLISRGRLQYSAADGDINRAIEFMFPFLEGVRFRN

SEQ ID NO: 79739 - protein, 140 aa, Unknown
  Obtained from environmental sample
  misc_feature (1)..(140): Xaa is any amino acid
KVKYDIFATRGWQNAYLTTLAERRERDAEPQYTAAGPHRDDLRFTLGGRAAKGHASQGQCRSFALSLKLASARFIERKRGGGMIFLVDDAVSELDPERTSRVYPLLEGRGQVFIATPRCQAALGGGVLRCAVESGKVKTT

SEQ ID NO: 79740 - protein, 134 aa, Unknown
  Obtained from environmental sample
  DOMAIN (4)...(120): MotA/TolQ/ExbB proton channel family
  misc_feature (1)..(134): Xaa is any amino acid
GIPPALWRESYIQHGSGGEVSPRASVVEMGRLEKSLGLLATVAATSPFIGLFGTVWGIIEAFQRIGATGNANLVTVAVPIAEALVATALGLIAAVPSLMAYNYFLSQLKRWQMELDDYSLEFISLSERNFLEPK

SEQ ID NO: 79741 - protein, 310 aa, Unknown
  Obtained from environmental sample
  DOMAIN (1)...(309): Peptidase C10 family
  misc_feature (1)..(310): Xaa is any amino acid
VLGYSDEGGYDENDLPPNFVAWMDFLQDEIAYAQEQNIPQNEEIQQEWDAFLSGNLPLRKTTAAVAPLIQTKWNQGDDTYPYNNMCPMDGKKRSITGCVATAMAQIMKYYNHPARGIGQSKAYITDKRKISVPSVNLEVNYDWNNMLNKYTRTCEWWQYLTLCLVQTNNWNTQQANAVATLMYHAGVSVKMDYSSGSSGAPSSLVDDALRDNFGYDKSVQLKYRNDKVFSWDAMLKEQIDAGMPVYYDGYNSSDGHAFICDGYDNSGKFHFNCGWGGSKDRYFVTSALNITYFLGIGYTNFNKYQSAIIN

SEQ ID NO: 79742 - protein, 293 aa, Unknown
  Obtained from environmental sample
  DOMAIN (29)...(221): RecF/RecN/SMC N terminal domain
  misc_feature (1)..(293): Xaa is any amino acid
MERIEIPENLKKISISFPPPPHSPRVALTLEGISKSYGERQVLSYLDLTLDAGERLLVAGPNGAGKTTLLRIIAGGDTDYEGLVKYGAGISTGYFSQDAAETISGSQTVEQYIESEAPTHLIPKVRGMLGAFLFRGDDVFKSLSVLSGGEKSRLAMLRMLLKPMNLLILDEPTNHLDLQSKDILLDCLKAFEGTIIFVSHDRGFMEALSTKTLELSIGRLAGEAEPKRRHRLFYGNYAYYLDRIANEESNQRVVGEISASDNLEMKPLKSQPTAVPVIDVSTEPAPKVILGKS

SEQ ID NO: 79743 - protein, 228 aa, Unknown
  Obtained from environmental sample
  misc_feature (1)..(228): Xaa is any amino acid
MDELEMNMGIHNGFGIHYFLIFQSLNQLNKIYTKDHSFLAHARNTIIYAPGTGETESAELVSKICGKESISRTNISYSGGKAQVGYSNKNISAQDQERNLINADEVMKLPLDQLILLCQGLPPYIGKKNVYYEDPVFKARMFPPAFITREEALKAAASTIKKLDKRRWFDREGTYRSTEISDDDIADIFERVGSLFDEPDEMPIPGEPDSPGSGTEDEFSPPPDITNY

SEQ ID NO: 79744 - protein, 168 aa, Unknown
  Obtained from environmental sample
  misc_feature (1)..(168): Xaa is any amino acid
MEIDSVSMQAQTDFSHARGKAILSQIQHLLNTDRNNLLSFNDVKDILKPKNEFYRGNQVVPIKMIVGSEGRYHDFNKYFLPRADHLRHRWQRVDEAHIKDIILPPIQLYEIGGVYFVRDGNHRVSVAKMQGVEFIDAVVTSLATEVNIKPSMTTDEYATRPILSVKGP

SEQ ID NO: 79745 - protein, 264 aa, Unknown
  Obtained from environmental sample
  misc_feature (1)..(264): Xaa is any amino acid
MSKKQKIFLFSAGTALVALIVLGVVFFVKGKKNPGGAGTAITSQSDTKRDNTLKLVERYLEQGEYDRALDLLDRLLIDNPDDNEANELQRRILQADRHKDSDALTEIQRQLLEEQRRQNENFAASLQRAASNDLAASAAEAAAERKAAAEAEAARKKAQEDELAKVSRQLQEQMRKVNDLVADAKAKLNAGDLPAAERIFSDARKAMPENEPRFESQKLADMADAYYEYNSKNPNTANGKTAARKAEELATKPYKDARDIRGET

SEQ ID NO: 79746 - protein, 222 aa, Unknown
  Obtained from environmental sample
  DOMAIN (97)...(219): ABC transporter
  misc_feature (1)..(222): Xaa is any amino acid
MEENQLFQEVNTPADENTSTEENILAGVNTQEKTENPETTAAGIYTDEDQLALFDSEKRKIPEIQEPEIHTLGVSSLRKRFGRKEVVRGVNFSMQNGIVAGLLGPNGAGKTTIFYMIVGFYQPSHGIVTMDDVDITDKPMFRRARLGIAYLPQEASIFRKLTVEQNIMAVLESRKDIDLTQKRKNWKACWTIFTLAAYGSSLGTLFSGGERAAYRNCQGRLP

SEQ ID NO: 79747 - protein, 337 aa, Unknown
  Obtained from environmental sample
  misc_feature (1)..(337): Xaa is any amino acid
MARGLAGSAPLTAIAALPRKLRWRDTGTVSLILTNLENTAVEAGVTLGSDAFADADAVIEIDGETSKTVKVLPGASQEVTFKVAAVSTGLARLTFTLNSPEVNERIIKTLLVDRPSLTETVTTIGNLGPDNPFAEEGFVLPSLVPEGTGNVSVSLSASRLAALKETVRYLLDYPYGCIEQRTARLLPIVAFGEYLDTFDLDSPLRGFSPWNPQRLVEDELAELARFQLADGSFPYWPGGRDGNLFVSIRMAHIAALARAKNMKVPDSLDTRRLLSYIGTASSEDVFSDPFIKGYSLWIRNMYKERIGSEITAFFRRGGRAWGFPRWAFRGAWGAEKG

SEQ ID NO: 79748 - protein, 157 aa, Unknown
  Obtained from environmental sample
  misc_feature (1)..(157): Xaa is any amino acid
MDSYIEAVSGDIADQINLFNVDNIPTVYIGGGTPSVLGAERITRLLSSINKLLTNMRMSPVEFTVEANPESTDGAFLQVCVEGGVSRISLGVQSFCEASRKSVHRTGGRAQLEDALALAARYYPNAFSADLVTGLPFQTEAVIMEDVKHCSLFRSPM

SEQ ID NO: 79749 - protein, 235 aa, Unknown
  Obtained from environmental sample
  DOMAIN (63)...(149): Hpt domain
  misc_feature (1)..(235): Xaa is any amino acid
APIEARVNGVARKAARGSPNNSYSNNTGGSALADPAGVGLAIPGIDIQKGIAMTGGTLSAYKQVLSLFRKDAQDRLPLLQKAPEADLPAFVTQVHALKSASASLGAGAVSAQAAGLETAGKAADMAFIRENLPVFARQLAELVQNIEKALETKESDNPSESSFRAAHSPLFKELAEALEAQKSADIDRLLDELSQKPLDKQTREALEKISDEVLMTEFGNALKIIKEINDDNFNQ

SEQ ID NO: 79750 - protein, 313 aa, Unknown
  Obtained from environmental sample
  misc_feature (1)..(313): Xaa is any amino acid
MFQYASKTPKAKAKKIRALLEKIAALEKTLAETPKPLVQNAPSIVWICAAGDLMLGRGAGDILIDEGARGVFGKTADYFKRSDINMLNLEGVISGSGTSVIKGYNFRFDPLTVPPLKAAGINAVLLANNHAFDFGEPAFLDTLEHLEENRIAVIGAGRNIKAAAAPFIYKKEQLEIRVFGLASYPTESGGRNSASISASAEKAGMLFGQAGADRLKEHFVHKDGVLNVVFFHGGEEWTWKPDANTRSLYSELARSGADLLIGSHPHTVQGFEWLERKPVFWSLGKFVFAGMDGTDGRKKRPVDPAGLFGKKLN

SEQ ID NO: 79751 - protein, 304 aa, Unknown
  Obtained from environmental sample
  misc_feature (1)..(304): Xaa is any amino acid
VYCGKRERSNGVLFPTRFRTKTCDGEELGLTENFVCARKIGAPGTLITITGNIFGISRENSPESVTGVFFSWDYESGAFNPYAVREPEFIEVSETEMGYEHWSAREIKVRLPDGAVSGNLEVRTPHGKSRSFFFDVSGKPGFKNIRDKRGYTITYSVDIRVTDASRPNMLYLWIPKPVNSPSQRNVTLISRSIEPFMENYKGVSLYKLDNLIAGTSQSINLSYRVEVYSVGSVIRPLSIKQEATELSAAHTKSSSLIPSDVPQIKTAANLIVNREQNPYIKAKAIYDWIINNMQISDSETSKSL

SEQ ID NO: 79752 - protein, 309 aa, Unknown
  Obtained from environmental sample
  DOMAIN (2)...(290): Pyridoxal-phosphate dependent enzyme
  misc_feature (1)..(309): Xaa is any amino acid
VGKYFPTGCHKVGASFGCLVPRLVTGQFDATAQKAVWPSTGNYCRGGAFNSKLLAVDSVAILPKGMSRERFDWLKTIATEIIATPGTESNVKEIFDKVNELKATRKDVMIFNQFDELGNYLWHYSVTGPAIAEVFGNMAQSDKGLDFSGACFTSGSAGTLASGDFLKQRYTASRLAVGEALQCPTILNNGFGSHRIEGIGDKHIPWVHNVKNTDMAIAIDDNDCMALLRLFNEETGKAFLVSEAGLSREQADNLALMGISGICNMLCCIKFAKYYELGANDVVATVLTDSVDMYLSRPEELRQKEGLNT

SEQ ID NO: 79753 - protein, 303 aa, Unknown
  Obtained from environmental sample
  misc_feature (1)..(303): Xaa is any amino acid
LAEGRKPIKEKEIAYGKEVSRIEGWGDFDPSIIEEISKTIPIYLYEMPPDAFSRMDKNFQYIKVKSDKSTVRILVPEKMIPGMAPFQLPQKSLSEYREEIEKLNLDLQEINTEIGHFADRRQALLKEMELVEYDIEFESAVAGLNKVEDIPEDFGLCWFTGYVPAEDVSIVKKVASENGWALSVDEPAETDEVVPTKLKNNKFVQLITPITGFLDINPGYREVDISPIFITFFCIFFAMLFGDAAYGLIISTMAIIGIMLALKNKKAVSTPLKMLLLLGALNTLWGVLTCSWFAMDTKYLPDF

SEQ ID NO: 79754 - protein, 213 aa, Unknown
  Obtained from environmental sample
  misc_feature (1)..(213): Xaa is any amino acid
MPANTNLIIKNNTIRINEYVFSDCTGLTGITIPDSVTSIGYSAFNGCTGLTSVTISNNVTSIEDSTFSGCTSLTSITIPDGVTSIKYRAFYGCTSLTNITIPNSVTGIESYAFSGCTGLTGVTVSNSVTAINDSIFSNCTSLTSVNIPNGVTSIGDSAFYRCTSLTSITIPNSVTSIGNYAFSGCTGLTGINIPSGVTNIGSYAFSGCTGLTT

SEQ ID NO: 79755 - protein, 288 aa, Unknown
  Obtained from environmental sample
  DOMAIN (86)...(260): Radical SAM superfamily
  misc_feature (1)..(288): Xaa is any amino acid
MPGLKKKHNRRFTLVVAGCMAQRLGETLKEKYPAVDYVMGTSARSIFPLILEAAEKGEKAALDLTENAVFSFSNSHLEEGQFRSFIPIMHGCDNFCSYCIVPYVRGREVSRDPENIAEEMRLVAERGVREITLLGQNVNSYFWEKDKMNFSALLKFVADTAGKSGIKWIRFLSANPRNFSSETIQVMAENPVFCRHLHLPVQHGSHTVLKAMNRGYTRERYIELVGEIRAAMPGNTLSTDILAGFPGETEEDLEQTLSIMEEIKFLYAYMYHFNPSSKGQKRLIYPAG

SEQ ID NO: 79756 - protein, 194 aa, Unknown
  Obtained from environmental sample
  misc_feature (1)..(194): Xaa is any amino acid
MYQIGRELVLLSEDDEGDAAKAVNALTKLTTRDKVSFVIGSSTSGPTQAMSTLAQSNKVVLVSPSATNINVTKAGDYIFRACFIDPFQGVVGADFAYGTLGSRRAAILYDARADYHAGLADSFTNQFKAIGAQVVADEAYQSGDVDFTARLPALGRKPRWVNPANYTTTCPSRKPLRERGKPGPFPGATLGTPH

SEQ ID NO: 79757 - protein, 62 aa, Unknown
  Obtained from environmental sample
  misc_feature (1)..(62): Xaa is any amino acid
MWCPCGADALYSVAQMPPGIPVAAVGIGNGKNAAYLAASILSISAQGIKEKLQAYRKSLGDE

SEQ ID NO: 79758 - protein, 343 aa, Unknown
  Obtained from environmental sample
  misc_feature (1)..(343): Xaa is any amino acid
GCSPDDGRRRYMIRQTAGQARNDGGVDAGVGIDTDKDGAITVIGAVTAARAEFYGRPKFRVTVEGDGGGTLDAIWFIRNMKIEVGERLMLTGRVTAAKSGRPLMVHPVLEKSADGADHRPILAVYAVREPMREAGINQRLLRYSIEWALGNVNDGGYPRLLPEVIEKKKGFPPLSDCLRQVHLPDALSELGAYKARLKYEELYRLALDLRWSRRKFALPGYAMSPGGLTDRLRAALPFALTESQEAAVRTLHADAARPERMHRLPQGDVRSGKTVTALFAALPALKAGRRWSGLRPRDSGEADGGLPGKIPRPIGDPGRLPLSGRPPEKRPALADNPVETLIS

SEQ ID NO: 79759 - protein, 199 aa, Unknown
  Obtained from environmental sample
  DOMAIN (2)...(121): Oxidoreductase family, NAD-binding Rossmann fold
  misc_feature (1)..(199): Xaa is any amino acid
MLRIGVAGIGKISGVYLDNLTRMFGRRVKLTALCDVIFERAEKAAVDYHVKAYRTLDEMLGADVDIVLNLSQPKYHFDIALASIKAGKHIYNEKPLCTKREEAAELLKAAAEKKVRVGGAPDTFLGAGLQTCRKMIDEGRIGSPVAAAAFMMSHGPEHWQPSPGIFYQQGARPMFDVGPYYLTARVTLLGPAARLSRNA

SEQ ID NO: 79760 - protein, 123 aa, Unknown
  Obtained from environmental sample
  DOMAIN (22)...(122): Sir2 family
  misc_feature (1)..(123): Xaa is any amino acid
MAQYSEIFEKIRSSKHCTALTGAGVSTLSGIRDFRGKNGLYNDLDAEQIFDIDYFEEDPSFYYKASQSLIYNIDEKSPSIVHHVLAELEKRGSLKALITQNIDLLHTKAGSARVIENHGSPKR

SEQ ID NO: 79761 - protein, 308 aa, Unknown
  Obtained from environmental sample
  misc_feature (1)..(308): Xaa is any amino acid
MALRYTQFMEKYGLFEPAWETPPLEDTGKECFIFFPESLTDFSEYKELLAASSHVKTVQVDNGSFATGSESKDSAPFREGDVFFYTNARSEITEAALYIIALHENQNVPWDAISVSIPDTGNYGPYVFREFDNRNIPYIRQSGKPLASYPAGQFFAAVAGCSSESFSFASITALLLNRHLPWKDNEKIQALIQFGIDNNCICSWIEEAPPEEGAPSKKGDGKEKKINVWEDAFENHAKEDASPSSEGASSNSAWLYTFFKKLTFMINAMRYADSFSAIRKHYFAFRGFFFDMENCLDETRPWYFPLVP

SEQ ID NO: 79762 - protein, 298 aa, Unknown
  Obtained from environmental sample
  misc_feature (1)..(298): Xaa is any amino acid
LIENEGSATSVTLSNAEIQANCTKYGRLYEWATAKTACPSGWHLPSDAEWNVLMKFVNPSCSDSNKRDEGDISYCADAGKKLKADSPLWNENGKGTDDYGFAALPGGAGSVYIFAGKVGYWWSATENADNGDYYYFRRMQIGNEDVDRSYVGKTYTFSVRCLQDSQSLPVGGSSSSVTSGNGTSSSSSSKVNSSSSANPVVPSSSSNSEPGNLIISGCPYTTTTSNSLDVHAMSTNPVSVSIYLSTASTAARSGIIRTSNTVTWTGTKVQMAHSHSNQLAFKRRYSLLQSHGSYAYQW

SEQ ID NO: 79763 - protein, 240 aa, Unknown
  Obtained from environmental sample
  misc_feature (1)..(240): Xaa is any amino acid
MDIAVIGAKMLKKRGLLKDLDESEEINAYSVKIKADVDGKEQDWLLMFKNETHNHPTEIEPFGGAATCLGGAIRDPLSGRAFVYQAMRVTGAADPLQNASCAIEGKLPQRKICRTAAAGYSSYGNQIGLATGHVHEIYHSGYAAQRMEIGAVIGAAPSENVIRNTPMPGDVVILLGGRTGRDGIGGATGSSQSHTSMSLETCRADVQKGTRLKSEHFQGFSRTGKARVLINAVTISRAAA

SEQ ID NO: 79764 - protein, 116 aa, Unknown
  Obtained from environmental sample
  DOMAIN (4)...(89): Uncharacterised protein family (UPF0153)
  misc_feature (1)..(116): Xaa is any amino acid
MTVKCQKCNAHCCRHIAIDVDAPDDEESYDNIRWYLLHKNVWVFIDHEDQWLIEFRTPCRLIKSDYKCGDYQNRPLVCKNYPEEDELCEGETNEPAYKELSKTSSSADLIMGKKMG

SEQ ID NO: 79765 - protein, 62 aa, Unknown
  Obtained from environmental sample
  misc_feature (1)..(62): Xaa is any amino acid
MSQPQGLDPNTSDVINDLILDMQSKLEVTSVVVPPDMVSAFKVAERKTLLYKGRIIEIRPGR

SEQ ID NO: 79766 - protein, 300 aa, Unknown
  Obtained from environmental sample
  misc_feature (1)..(300): Xaa is any amino acid
MEKLGRVFQEVICQAGHTPIHPAALPIKGAILAAMGRAPEGLTPTKKWTCAERAFISIPGTVKQIAGIEEAKSANRVNDFFLRIAEGSKVSFPENNVTKCGNIIASAETRDIAIEAAETAARSILIRLDPTDTKTKEFLTTEDTEFHGVSIRKSSLPPCNSKLSNGQQYSAVISTLKEVFPPDAFQLTDELKEALSQIPDFPTTNYPLSTTHYPLPTIQLYPFLAFISSSLKDYMGRTVEEALNAVRLLTGFPLPVTSENAENIVRLGRAFWSAFIRGSYQGAAYYIDNLEKNSADLILG

SEQ ID NO: 79767 - protein, 88 aa, Unknown
  Obtained from environmental sample
  DOMAIN (4)...(84): Staphylococcal nuclease homologue
  misc_feature (1)..(88): Xaa is any amino acid
WSPIDQMAENLLGQDVYLAFDWDLRDRYGRLLAYIYTDSGQCFNAVLIKEGFGHAYLQYPFQFTEEFKALEREARQKGRGLWAVSTEP

SEQ ID NO: 79768 - protein, 139 aa, Unknown
  Obtained from environmental sample
  misc_feature (1)..(139): Xaa is any amino acid
MADSYFETDDITKEYDSRLMWRIMSYLKPYKKVVIITLAALIISTLGELYIPVLLQRIIDDAILQKNIAFLYRGCVMYLIILVFVFGFTFLQTWTSNLMTQGVMKDMRLGLFKKTLSQSTGYLSRHPEEDSANLILVKT

SEQ ID NO: 79769 - protein, 80 aa, Unknown
  Obtained from environmental sample
  misc_feature (1)..(80): Xaa is any amino acid
VRGLDIGASYLIYDLLNEEKKKGVAVLYIGEDLDVLMELCDRLMVIHAGKIMGIADPKTVSKEDIGLMMLGEKAEAAWQA

SEQ ID NO: 79770 - protein, 254 aa, Unknown
  Obtained from environmental sample
  misc_feature (1)..(254): Xaa is any amino acid
LPIQDRAQKGMPLQELSLHYMKTVDLMEPWYSRFLPSAYIAVVVPIIILFAMFFIDKITFIILFFTGLLLPLFLFLIGKIAKQKSEEQWQSFSRLRAFFLESLQGYKTIKIFKKVKERERDLEIAENEFSKKTLAVLKTAFLSALVQEWAGSLSIALVAVGLALRLMNGSTEFSTAFLALLLTPEFYRPIRQFGTAFHTAINAKTAWSHATHPVSYADTPLKAGNLETLKITSTKIFNLRILSTGFAENANGVG

SEQ ID NO: 79771 - protein, 165 aa, Unknown
  Obtained from environmental sample
  misc_feature (1)..(165): Xaa is any amino acid
VSSIISKEHRLAGQGAILLCAFFWSTSGLFIRLVDCHPMVIAGSRSFFAVLFLLALRLFFPFRKSAAGSKAVILRTLIKDAPILGTYGLGYASTMILFVIANKLTASANAIMLQYTAPRVGRAALGGYFCVNVPARNNWAAMAFVRPGNVFCVRGRPPGKLLPGR

SEQ ID NO: 79772 - protein, 174 aa, Unknown
  Obtained from environmental sample
  DOMAIN (84)...(162): Holliday junction DNA helicase ruvB C-terminus
  misc_feature (1)..(174): Xaa is any amino acid
CGFPLTESAEAVFRLRTPDMEAIVRLSAGLLNIKIDNDAVAFLAKSSRGTPRVVNRLLRRMRDYAQHAGSTGITLTVVKEGLTKLEIDALGLEKQDRDILKIIIERYQGGPVGAETLAISIGESVETLEDYYEPYLIQSGLLQRTPRGRMVTSLAYGHLGLTPVNSGSGEVSLF

SEQ ID NO: 79773 - protein, 110 aa, Unknown
  Obtained from environmental sample
  misc_feature (1)..(110): Xaa is any amino acid
VRINLNRNFLPYDKTAPWYTSGLRIGTPAATTLGMGDKEMKEIAAVIKSVLANTKPETVTEGDNAGKPSKAKYQTDAKAAKDAKARIKALLDKFPVYPNLDLETLQKAFS

SEQ ID NO: 79774 - protein, 295 aa, Unknown
  Obtained from environmental sample
  misc_feature (1)..(295): Xaa is any amino acid
MFQGAEGFSNTGIFCTRIATGVLALTVIIAVMNGFQLGFIESILEISSCHIRVEGFISEGSKPFADAGLINELRSVPEVLSVLPFQEINVLLRGRSTSPRGALIRGVPPDALVLDPGLASRLEMEEGFFDLGDPNSIVLGGELARHLLVGAGDEINLLSISGGIREDESGRAYRVAGIFRSGFYEYDLGWAFINIDTAAELAGETARTVLGIKLKNRWQDQKAVEKIKEVIASFDSGASAVSVKSWRDYNRSFFGALRTEKLMMFILVGLIFIVVGLNIFRAQRRSRPICHVRGQ

SEQ ID NO: 79775 - protein, 339 aa, Unknown
  Obtained from environmental sample
  misc_feature (1)..(339): Xaa is any amino acid
FFPNDQIGRARAARADSGSPPTKIETYSDNNIKLPPKGDMERTGYKFGGWNTNSSGTGTNYSVNLSYTVNGNVTLYAKWTAITYTVTVSSIGTNHSGTGDYAAGAEVNIKAGTPLDGQQFKNWTSSSYGVTFADANSAATTFTMPTNVVTVTAIFEATKNMFTDARDGKKYMYVKIGRQRWMAENLNYQTSSGSWCYDNDNSNCGKYGRLYDWTTAKTVCPTGWHLPSREEWTTLVDYAGSYSDPGKKLKSKTDWYSYPGITATDDYGFSALPGGYRRTDDSFYMAGSFNEAGGGGYWWNATEIGSNRAYRRQMSSPRERRGTKTTATRVAGFPWRGLK

SEQ ID NO: 79776 - protein, 324 aa, Unknown
  Obtained from environmental sample
  DOMAIN (2)...(300): Bacterial extracellular solute-binding proteins, family 5 Middle
  misc_feature (1)..(324): Xaa is any amino acid
PRSFSPPDDGTRRGTDISKAYYQKHENDFGTATGGIVATGPFVYEKWTSGQEIILKKNKNYWNKEKLAANIIDTLVFKIIPEDTSRVIALQTGNADFCANLPQDMLDKLSADQNLNFTSVDSFSLTYVALNTQRAPMNDINVRKAISRAMDIPEFQKRIIKNAGKAGTILPFGQALYGDNAAKWQQYLSNTQGYTYDLAVAKQHLARSAYPNGFNCDLIVSENSLANQRALYIQESLKALNINVNIKRMSGDEQDTYQMGGVLDANGKRDYDMLIGGWEADYPDLNAISRSCSPEVRPVKTATMPPAYIIPVVDAIDEKQKDSY

SEQ ID NO: 79777 - protein, 113 aa, Unknown
  Obtained from environmental sample
  misc_feature (1)..(113): Xaa is any amino acid
GVPPGIRSAESGYGGTDKNLDFSPLAQVIGKAKAVILLAGSGSDKLRDLLGGAGLCCLGPFDVLENAANAALELAAPGDRIALSPGCASFGMFLNEFDRGRKWKETIKGIVSG

SEQ ID NO: 79778 - protein, 103 aa, Unknown
  Obtained from environmental sample
  DOMAIN (36)...(103): ParB-like nuclease domain
  misc_feature (1)..(103): Xaa is any amino acid
MGKKSMGLGRGMGEILRDHSADIENFASEKPSEQTTKVPLDLVDANPFQPRKFFNEESLQELAESIKLHGILEPVLLRKKEDRYQIVSGERRIEHSANLSCVT

SEQ ID NO: 79779 - protein, 243 aa, Unknown
  Obtained from environmental sample
  DOMAIN (1)...(243): Iron-containing alcohol dehydrogenase
  misc_feature (1)..(243): Xaa is any amino acid
MLVTSPGRVKSGTTSKITDALEKAGVPYAIYSEVEANPSVRTVEKIFELYCRESCDSFIALGGGSPIDAAKAAAARTVRKRKSVNQLGGLLKVLKKLPLFIAVPTTAGTGSETTIAAIITDTETSHKYAIMDLCLIPKFAILDPELCIGLPPDITAVTGMDALTHAVEAYLCWTYGTRESIAFALDAVKTIFEYLPRAYKNGTDIEARQAMLMASYQAGFAFTTAGVGNGHAIAPHAWGALQH

SEQ ID NO: 79780 - protein, 340 aa, Unknown
  Obtained from environmental sample
  DOMAIN (59)...(202): Cell envelope-related transcriptional attenuator domain
  misc_feature (1)..(340): Xaa is any amino acid
VFPGYEGAPFRWIDIFLIILGVAVAVYTLRSNPIEDALAADRVINILFVIEEDKSPLSTYVLMYYPATRRAAIFDIPGDLGLLITKINRVDRIDKVYDSARIGNYENEIGKLLGIEINFSIVFSKENLISLVDLLEGVEIFIPTSVSYRDNDTLILFPSGITILDGDKAAVYASYRLPDEDNEMIVFRRQRFFMGLLDRIVNMNNNFKNPDAAKLYYSLFKTNMNRRTLVQLLDEFVSLDAYRTNIQSVGGNLREVSGQMLIIPHWDGNLVKEVVRQTLGSLTRRTEKSGQRSSTVEIQNGTAVTGLAGRTAEMLRTFGYDIIFPSKRGSARYEKTVGNY

SEQ ID NO: 79781 - protein, 275 aa, Unknown
  Obtained from environmental sample
  DOMAIN (103)...(261): CobB/CobQ-like glutamine amidotransferase domain
  misc_feature (1)..(275): Xaa is any amino acid
MYQIGRGSQGRKDGRLYDLRIRPSSAQAFKPHIIKNYGGDTVRQPRCLRYYIKAPRYGRMGIKVRIKVWVLSMIKVIDYKAGNAPSVMHAITSLGYKAEFARQGNELADATHILLPGVGSAGATMESLRELNIIAALENAVFNKKTFFLGICVGLQILFQHSEEDDADCLGWLKGKVIKFDASKVRVPQMGWNKVSFTESPINNKNAHEGYFYFVNSYHAQPENKEDLWGTADYNGQFTAAVHRDNIYATQFHVEKSGKAGLAILDGFLSLGKGG

SEQ ID NO: 79782 - protein, 267 aa, Unknown
  Obtained from environmental sample
  DOMAIN (11)...(250): metallopeptidase family M24
  misc_feature (1)..(267): Xaa is any amino acid
VVRLKNEKQIEGIRKSCRMLSAMYRELIPQVKPGLETIEIDRWVHNWIKKAGGKPAFLGEGSKKNPFPASICISINNEVIHGIPSRRKIVSGDLVSLDCGITLDGYISDQAITLEAGKVSPEAHKLSIVARECLYEGIRFARSGNRLLQISRAVYDHARASGFGVVSQFCGHGVGFSLHEDPQISNIPKGANPRLSAGMVLAIEPMVNAGTGDVVVLNDGWTVVTSDKRLSAHWEHTIALFSDHTELLTEPVCGKLVPICTCGRKWG

SEQ ID NO: 79783 - protein, 311 aa, Unknown
  Obtained from environmental sample
  DOMAIN (1)...(311): Phosphoenolpyruvate carboxykinase
  misc_feature (1)..(311): Xaa is any amino acid
MYVIPFSMGPVGSNIAKIGVQITDSPYVVVNMHIMTRVGTKVLDILGGDGFYVPCFHSVGKPLAPGEADNGKWPCAPLEHKYISHFPETREIWSYGSGYGGNALLGKKCLALRIASVLARDEGWLAEHMLILKITNPKGEFKYVTGAFPSMCGKTNLAMLIPALPGWKAETIGDDIAWMKFGEDGRLYAINPEAGFFGVAPGTNNESNFNAMESIKQNTIFTNCGLTEDGDVWWEQIGHGAPGKEIIDWKGQAKPAPQTDKSPKGEEIAHPNARFTAPARQCPVIAPEWEDPRRAISASFSGSRPKTSPGE

SEQ ID NO: 79784 - protein, 75 aa, Unknown
  Obtained from environmental sample
  misc_feature (1)..(75): Xaa is any amino acid
MVDTCGGEFEAKTPYFYSIQNGTENEALPFIQKSVKQRIVVLGSGPIRIGQGIEFDYACVHCVWTLKAWDTNYRD

SEQ ID NO: 79785 - protein, 292 aa, Unknown
  Obtained from environmental sample
  DOMAIN (38)...(268): Peptidase family U32
  misc_feature (1)..(292): Xaa is any amino acid
MRSANFTYPRFEAALRSLRRMGKKTYVTVNTVFEQREADRMYQLLKYLSSLGPDALIVQDFGVLAMVNSEFPKLKIHASTQMNIASGRGANALSRHGVSRVVLARELCLEELKSIRADTNVEMEVFTHGALCVSASGLCLFSSYLGGKSANRGMCTQACRRMYNHGEESGTAQQSGFYFSPADLQLLEQLPDLAAIGINALKIEGRMKSADYVGTVTSAYRLVLDAIAENVATGGENIATSIVRAQDILRGDFARKQTKFYFFSNTQSPVPEATLSPPHSLLPTPQSPIDCL

SEQ ID NO: 79786 - protein, 47 aa, Unknown
  Obtained from environmental sample
  misc_feature (1)..(47): Xaa is any amino acid
GTKLQRDIIPALKGAGDVRYPVYVGMIFMWGVGVTLAYVLGIAMDGD

SEQ ID NO: 79787 - protein, 167 aa, Unknown
  Obtained from environmental sample
  DOMAIN (103)...(155): Sigma-70, region 4
  misc_feature (1)..(167): Xaa is any amino acid
RFFRICGIDSVTGAADLIKIDKAGKMIEKQNSPEEEIDEIADLLNMDKNHIKEIVNISKEILSLDNKSNSQVQPLLELIEDKQYQSPEKHAEYVCMKDDLNDMLDTLNKDEAEIIRCHYGLGRQEMSLNEIGACYNLSKERIRQIEEKAIARLRNPKRAEQLRGYVA

SEQ ID NO: 79788 - protein, 152 aa, Unknown
  Obtained from environmental sample
  DOMAIN (29)...(119): Rare lipoprotein A (RlpA)-like double-psi beta-barrel
  misc_feature (1)..(152): Xaa is any amino acid
MKKYILALFILLFVVVFSAAQTANDGSFRQEGIASWYGKEFEGKPTANGEIFDPSLFTAAHPTLPFGTILTVTNKQNMKQVTIRVNDRGPFVAARIIDLSMAAAETLDMITSGTASVIIEKAINTVLGPVLGPALGNETPILLVSARCDTRL

SEQ ID NO: 79789 - protein, 303 aa, Unknown
  Obtained from environmental sample
  DOMAIN (1)...(106): Biotin carboxylase C-terminal domain
  misc_feature (1)..(303): Xaa is any amino acid
NGENPQRRFWPPKPGTHPPVKSPPGGPGGAPGIQTFGPGTISPPHYDSAGALLITYGQDWPKILGIMKRALSEYIVGGLKTTIPFFLRLLDMPEFRRGEFTTRFVGRRPELLEYRDLASEAVRLARLAAEISVLGYNPFVGLGAYRTADTPRLPRFELVLPPLGAEVLNAPSPYARGDRRALLDQLRDSKRVHLVDTTCRDVTQSNSGNRFRLAEDALVGPYLDNCGFLALETGGGAHFHVALLANMTYPFTEAARWNEFAPKTLKQVLVRSTNLLGYRPQPANLMEKTRGYNRPPLPPGPLF

SEQ ID NO: 79790 - protein, 298 aa, Unknown
  Obtained from environmental sample
  DOMAIN (53)...(69): KWG Leptospira
  misc_feature (1)..(298): Xaa is any amino acid
LGDFDPGGLAPAQKEPDGLFGLVNRKGVWAVPPRFERVFGFNGGLAPAQEDGLFGFINRSGQWVIKPAFGNVDDFETRLGRAPAEQSGAWGLIDSGGNWVVGPEHLLLLNAGNGAPGPIQVFAGNGRWGLMDENGRWLMEPILTASPYFAANGFSEARVGSLYGFIDRFGHWMVEPAFQQVGPYRRVPMVPPALSPSEERPEPSAPAEERTTTFSIDSGPVEKVSAETAKPKDLKKPGLSAAPPEVKAAPPGRVRPGPPPGEPFRKETGLTLFVGLGNSSAPGPGLGAENAHPPPWAE

SEQ ID NO: 79791 - protein, 328 aa, Unknown
  Obtained from environmental sample
  DOMAIN (14)...(196): Integrase core domain
  misc_feature (1)..(328): Xaa is any amino acid
GVKAAAGKDVVMVQQRERGRELFVDWMEDTLEMRFGQRERKTCKGAFFCGYGWDSGYPVVLAYPNEKSESWIQAHVETFKRLGGLPLVVVPDNCKTAVSKANFYDPQLNKAYYDLSLYYNIAVIPARVRAPRDKGQVESSVGWLETWLLGWLKGSGPLVRQFSSFAELNAAIKSRLAELVKRPFQKRAGSRESVFLELDRPALRPLPAQPYESPSYVERRVPNNYHVEHAGFYYSVPHQYYKQQVTVKATYSVIEVYAQRLNRIAIHERRYTGSRYATERSHMPPAHQAQQDAKMFDGKRFRNWASAIGVNTFYSSTALGHHPEKIRG

SEQ ID NO: 79792 - protein, 130 aa, Unknown
  Obtained from environmental sample
  DOMAIN (41)...(123): HipA-like C-terminal domain
  misc_feature (1)..(130): Xaa is any amino acid
MKLAKDILPDVPEIELLEAEGRPYLEITRYDRNVNNRTVQRIHQEDFCQALGIVSGKKYQTGGGVKIKDCYKIINEFSENRLSDIIRFTEWIIFNYLIGNTDAHAKNLSLLHSDSGINCPSLAITGGKCP

SEQ ID NO: 79793 - protein, 118 aa, Unknown
  Obtained from environmental sample
  misc_feature (1)..(118): Xaa is any amino acid
GFSPGYRENGGGAEEIIRHAMEEQAEGSNQLLQGTTNLNGITQQVKAGSEEMLEGSQEVIRESRNLEKATQEITGGMNEMASGADQMNIAVNNVNEMTQKNRDAIDILIKEVSRFKVE

SEQ ID NO: 79794 - protein, 136 aa, Unknown
  Obtained from environmental sample
  DOMAIN (17)...(131): Response regulator receiver domain
  misc_feature (1)..(136): Xaa is any amino acid
VKQETEKFNDTVGTEKQKIMIVDDDTIHLEMVKAVLSSEYEVSCAKSGKEALGLFYQGLVPHLILLDLVMPGIDGWDTYSRIKAISGLHDTPIAFFTASSDPKDMQHAREMGAVDYIKKPYDKDDLLRRIGRIIKK

SEQ ID NO: 79795 - protein, 216 aa, Unknown
  Obtained from environmental sample
  DOMAIN (18)...(165): Calcineurin-like phosphoesterase
  misc_feature (1)..(216): Xaa is any amino acid
MKQSNWKSVLRLEKNKNGRDFVCGDIHGCFSYLEERLIEIGFNKNSDRLFCVGDLIDRGPESRMAVDYLEMSWFYSVLGNHEEMLIKSLCNRYYRDNHIKNGGKWVYKETLSYKTKLLKAVDKLPLIIQVEDAIIAHAVLAAVHSLEDIEIDPYNYLETVLWQRERIPTPTYSGKFQKFMSNLYFVTEPTVLGEYKQLLAPGTLFLNTWKGKKWGS

SEQ ID NO: 79796 - protein, 202 aa, Unknown
  Obtained from environmental sample
  misc_feature (1)..(202): Xaa is any amino acid
MENQLGDESVYLRIMELENGLLQHTDTTNAYRMLVEHGKDIRYNDAWKKWIVWNGKYWEMDGGYLIHDKGLQIIRGIYRELLKTADYRERIDIEKHAMQSESARRRKALVEVASWIPELNVKTDDLDKDPWLFNVRNGTIDLRTGEIREHNQGDLITRIANVDYDPDASCPIWKKFIMGNYELQCGVNSLIQTLAIIGKKTG

SEQ ID NO: 79797 - protein, 252 aa, Unknown
  Obtained from environmental sample
  DOMAIN (30)...(184): Alanine dehydrogenase/PNT, C-terminal domain
  misc_feature (1)..(252): Xaa is any amino acid
MRDGKGQLPCLKRMSQMPGRLAIQEGAKYLEKPMGGRGVVLSGVPGVPHAEIVVLGAGVVGANAVKVAVGIGAHVTVVDIDVDKLEYLEDIYGSKISTLYSTPENIAEILPKADLVIGAVLIPGSSTPKLVQNKHLPTMKKGSVIVDVAIDQGGCTEASRVTYHDDPVYVQDGVVFYCVGNMPGAVSYTSTNALGNSTLRYGLSMAKLGVEAALKKDSGLLEGLNVYKGLLTYQGVAEAHGLQYTAAAEVIK

SEQ ID NO: 79798 - protein, 144 aa, Unknown
  Obtained from environmental sample
  misc_feature (1)..(144): Xaa is any amino acid
MKQPDMNGYTVQTHAFIAGPAIQELLWAFPNRLKDFDSSIQIALMQRDSPFHGLEGMKHMESTITPKIFDKSIADVHITVKTEDAYATARRLALEEGLFVGISSGANVYAAMEWAKTLPAGSRVATILCDNGYRYLSQPLWKEI

SEQ ID NO: 79799 - protein, 83 aa, Unknown
  Obtained from environmental sample
  misc_feature (1)..(83): Xaa is any amino acid
GRQGGEPLNQVKKANVKYWEMGNEFYGDWHANPCTREEYGNRAREFAKQMKAVDPSIVVTPVWMLEGEWNKKTLSSSKTWLTV

SEQ ID NO: 79800 - protein, 168 aa, Unknown
  Obtained from environmental sample
  DOMAIN (1)...(153): GGDEF domain
  misc_feature (1)..(168): Xaa is any amino acid
SHPPSLYETVEIELATAVYLNVPCCLAIMDIDHFKKFNDTHGHVAGDEALRHAVKVVSSRLRKNDFMGRYGGEEFVLFFYYANKETGLKILDRLRVNLSESPVYLEKGLIEIHASFGLVEIDVERAVEKGYIHKLIRDADSALYAAKLSGRNKVVVFSQEMDSGYYEI

SEQ ID NO: 79801 - protein, 313 aa, Unknown
  Obtained from environmental sample
  DOMAIN (158)...(217): TGS domain
  misc_feature (1)..(313): Xaa is any amino acid
MGLRYKGQVKAHLQHIRKNENRGCKIDELYDIFAIRIIVNQVTDCYTALGYVHNLWMPLYSRFKDYIAVPKPNLYQSLHTTVIGPEGKLVEVQIRTKDMNETAEHGMAAHWAYKFNLKHEELEKNMDWVGKITKMQNEIPNSTEFLGFLHESLLPEDSYAWTPQGKKITLPSGATILDFAFAVHTDLGLHCLGARAGGSVLGLDADIPIGETIQVLHSDSQEPQENWLSIAKTPKAQNSIRQWLRKTITTQSEFLGRKIWQRELQGLKISRENYPKESDICHAFKVQNISSFYESSGQKRSCRASVLGGGGLG

SEQ ID NO: 79802 - protein, 183 aa, Unknown
  Obtained from environmental sample
  DOMAIN (2)...(174): DUF218 domain
  misc_feature (1)..(183): Xaa is any amino acid
IKPRLIASLAGFEGQAPPRYYVETNMDANRIFGAVRIWRQGLVSKIVLTGGLLEWTTDEAVPEAVSMFDLLSEHFGVDSADVILEGAAQNTKENAWYTREALNEAGLELDVILVTSAYHMPRAVAVFEKAGFTVTPAPIGYFADSNFSRKPLRWLPAAASLFESTIALREYFGMVVYRAMGWI

SEQ ID NO: 79803 - protein, 281 aa, Unknown
  Obtained from environmental sample
  misc_feature (1)..(281): Xaa is any amino acid
VRTAQILDMVLPPYSVVQNLAAMGGGGGYDELARNLNPFKRKQNVPVAYWSGIIDSGPEVKELRYRVPDYFNGTLRVMAVAVSDSTVGAGEDRSLVRGTFIISPNAPMMAAPGDEFELSLTVTNNQKGAGENGKVRVRAIPSEHLSIVGKSEFDLQISEGKDQTLNIPVKAVGPLGSAQIRFVASNNGETSELSAYMSVRPASPYRVSLYSGAIRNKSAEVGIDRTLYEEFHTREVSLSYLRVGMAKGLSFFLDHFPYGCSEQIPAPLSPSCIPSFFKKLG

SEQ ID NO: 79804 - protein, 220 aa, Unknown
  Obtained from environmental sample
  DOMAIN (39)...(208): Transglycosylase
  misc_feature (1)..(220): Xaa is any amino acid
MIRLRPGLYIPCGLCLALVLFLVFNAVFLDILSGVSFSRAYFDRGGRLLNIFLTTDDKYRLRTNLADFPPELIEAALLQEDRYFYGHIGLNPMAMLKAGWETYIKKNRRMGASTITMQLARLRHNLYTKNLPGKIAQSFTAIFFEACYSKQEILEAYLNMVPCGGNIEGFSAAAWYYFDKDVKELSLSEILSLVVIPRKPRINALRERTGSMNILAYPGL

SEQ ID NO: 79805 - protein, 74 aa, Unknown
  Obtained from environmental sample
  misc_feature (1)..(74): Xaa is any amino acid
LPERKRILILGAGVMQGPALRIACEMGLETIAIDADPRALCVPLAERFEKIDLTDREGIEKLARSLFETAAWRV

SEQ ID NO: 79806 - protein, 327 aa, Unknown
  Obtained from environmental sample
  DOMAIN (180)...(251): HAMP domain
  misc_feature (1)..(327): Xaa is any amino acid
MIASMVVADAMIIMNGPNAKVVNMSDPVPIKNMGKDTYAVTIYVPIINKRLNEVVGVVIGRLDIGMIQPLVEATIKNLEEVTSAVIYTSNGFILGNYLPEFVGRKIDEETQYGKQLEDVKTAIKNAKEWEGIEFDPELKTNMVMAIANIPIGSSPITWSVMIGSTETYILRDVNELRNFVIILAGIALVVAVVIIYLVLGNTTAPIVKVSDTLKDISEGEGDLTRTIAVSSNDEVGDLALYFNKTIKKIKDLVLVIKKQAATLSDIGNDLSANMTETAAAINEITSNIQSIKTRVISQSASVTETTPLWNRVSPTLTSLNDNVEKPD

SEQ ID NO: 79807 - protein, 283 aa, Unknown
  Obtained from environmental sample
  misc_feature (1)..(283): Xaa is any amino acid
MIGGQSWRVAGQWIEWEFDVPENGMYRISVKGRQNYNRGFVSNRTVMINGEIPVQELSSVPFNYSNKWSLTTLGDKSGAYYFPLEAGMNTIRVQAAMGGMGEMLNVMEESVFRLNAIYRKILVLTGPEPDIYRDYLVDVVYPEIIQAMELESRILFKLVDDLTKYSGERSAQAAVALTLARQLELFVKRPDKIPRTLVNFKTNISSLGDSLLALSQSQLDIDYIVVSAAQSKLPKVNENFLRFGFPRNTAPSLRRSLLITITSANFHPKRTKVVKVWNLSRTP

SEQ ID NO: 79808 - protein, 126 aa, Unknown
  Obtained from environmental sample
  misc_feature (1)..(126): Xaa is any amino acid
GIIESGSAEDLLTYVEMEEKIVADIFSIQKVIDPLEEMYYSVISKQNAGKTAVRTETPDEVSGLKTSLEKLKSEAVVRSTKNKELLSKRILELRQEIKTLRNNPYAARGRRSFGESNSASLVDLKG

SEQ ID NO: 79809 - protein, 76 aa, Unknown
  Obtained from environmental sample
  misc_feature (1)..(76): Xaa is any amino acid
MGTARGVVKKARTSEFVNAKTRDVIAINLDDGDRLVSALLTNGSDEVVLFPEEDKLCAPMRITYGRWDARLAGLPV

SEQ ID NO: 79810 - protein, 191 aa, Unknown
  Obtained from environmental sample
  DOMAIN (2)...(190): Protein of unknown function (DUF1015)
  misc_feature (1)..(191): Xaa is any amino acid
GKSKAQPRHKGNEEYTRFLAILFPSTQLKILDYNRLVKDLSGHSPEDFLKALEEMCDIEQLPELAAPQKAKQFSLYLKGAWYSCTFHDKHHSKKDPLRNLDVSILQNLVLKPLLKINNPRTSDRIDFVGGIRGLGELQARVDSGEWAVAFAMYPTSLEELMNIADAEEIMPPKSTWFEPKLRDGLLVHLLD

SEQ ID NO: 79811 - protein, 85 aa, Unknown
  Obtained from environmental sample
  DOMAIN (6)...(79): Endoribonuclease L-PSP
  misc_feature (1)..(85): Xaa is any amino acid
MKVISTDSAPKAIGPYSQAIVTDGLLFASGQIPLSPETGDVVSGGIKEQAEQVMQNIAAVLKAAGSDFTKVKIGSAALSWGGEEG

SEQ ID NO: 79812 - protein, 136 aa, Unknown
  Obtained from environmental sample
  DOMAIN (3)...(136): Ketopantoate hydroxymethyltransferase
  misc_feature (1)..(136): Xaa is any amino acid
MARKKSLFDLYDMKRKGEKIAWLTSYDYPTAAFAEAAGLDMILVGDSLGMCVYGYNGTLPVTMEQCLVHCEAVRRGAPNTFVVGDMPFLSYQQSDAVAVENAGRFLKEAEVDAVKLEGGVRVAELSGPLAIIRGLF

SEQ ID NO: 79813 - protein, 319 aa, Unknown
  Obtained from environmental sample
  DOMAIN (2)...(167): ABC transporter
  misc_feature (1)..(319): Xaa is any amino acid
GGKRLLVPGPNGAGKTTLLRIISGEDTDYEGLVKYGAGISAGYFSQDAAENLSGSQTVEQYIESEAPTYLVPKVRGMLGAFLFRGDDVFKSLSVLSGGEKSRLAMLRMLLKPMNLLILDEPTNHLDLQSKDILLDCLKAFEGTIIFVSHDRGFMEALSTKTLELSIGKLAGEAEPKRRHRLFYGNYAYYLDRVAKEEAGEPSVSDIPEIKPQKTQAPAERREQEKQKQALVRRLERQEAETLSAMEKLETEKKRLEEELGKPAVYSSGEKARAVKLALDETAAALEAKSREWESIAGEMEKARNSVRKYSISRDNPGVI

SEQ ID NO: 79814 - protein, 290 aa, Unknown
  Obtained from environmental sample
  DOMAIN (3)...(264): Glycosyl hydrolase family 57
  misc_feature (1)..(290): Xaa is any amino acid
LICFGNLAAAPGRLDRLENDHVPFCLGLAVSPILMFLLGDEHLLNKYMLYTDKQIEFGKQEIERTEDNAEMNKLAQAYCDELLEKRIAFTERYEKNILKAFDFYRRKGKVEILASSATNAFLPFIGHNAETLQAQMEIPVAGYRRYFINSPQGFWLPALGWTSAIEPYLRAYNFTYTIVDSHGLLYGKPLPEKGSFFPVKTPNGTLVLARDFYAVREIEKISSDEIYMDNTRDAGYELPPEMVSRFLSAEGERHQTGYKYWARAYNFGGGRSADILHPQRAARKVNEHAR

SEQ ID NO: 79815 - protein, 124 aa, Unknown
  Obtained from environmental sample
  misc_feature (1)..(124): Xaa is any amino acid
MKEILFWVLPPAIGALIGYVTNAVAIKMLFRPLREIRLFGIRLPFTPGILPRERHKLADSIGRMVEQELFTPTVLRERLARPDVRVNVENVIGKYTDQMLEKPLSAWLKIRVILGQSVMGGGRG

SEQ ID NO: 79816 - protein, 146 aa, Unknown
  Obtained from environmental sample
  misc_feature (1)..(146): Xaa is any amino acid
MASNLTQIQNMIYEIRGHKVMLDRDLAELYEVEVKRLNEAAKRNIKRFPADFMFQLTQNEWKILRSQFATAKINVSKVRYPPYVFTEHGVLMLSNVLNSTKAINMSIQIIRVFDKFKKYAMKQTSKDDQITELHTTFMLHIENTGH

SEQ ID NO: 79817 - protein, 167 aa, Unknown
  Obtained from environmental sample
  misc_feature (1)..(167): Xaa is any amino acid
MNTKNARIRSTKAKSAKVKGARAKPSGPGYFGRFGGTFAPETLMPALAEVREAYGRFREDERWQAEYGRLLSTYCGRATPLYEAVNLGRRLGGQSRIFLKREDLNHTGAHKITNALGQALLARFMGKERLIAETGAGQHGVATATAAALWGWSATSSRPSIRGGKSR

SEQ ID NO: 79818 - protein, 109 aa, Unknown
  Obtained from environmental sample
  misc_feature (1)..(109): Xaa is any amino acid
LKNKAAFFVALRYLWGRANEGGRYLRGAAAGIAVSLVPIIVTLIVADGMIRGITDRYLELGTGHLQVFEMFSSEKKDGDKEDIIEKIKAYDGVKGGGRKWPRPICHELT

SEQ ID NO: 79819 - protein, 219 aa, Unknown
  Obtained from environmental sample
  DOMAIN (25)...(211): ABC transporter
  misc_feature (1)..(219): Xaa is any amino acid
GRKKYVSGAETLHILKGINFQIEEGMSAAIQGQSGSGKSTLLNILGGLDRADGGSVFIGNDEITSLSEKEMPVYRSKRVGFIFQFHYLLKDFTALENIMIPAYIAGMKEKDAMDRARTLLADVNLEDRGGHFPSQLSGGERQRIAVARSMVNDPALILADEPTGNLDPVNSDIVSELLYAAAQKRGKTLIVVTHDEKAAARASVRLVLENGQLSQGHII

SEQ ID NO: 79820 - protein, 234 aa, Unknown
  Obtained from environmental sample
  misc_feature (1)..(234): Xaa is any amino acid
MMARDDPVHSPFITPKQRPKNQADIEIAAFLAAIIAWGRRDLIIRSARRMFAMMEQGPQAYVLNKSQKRVTLYKRASARGSCLHRTFFEDDLDYFCKGFRHCYAKYGTLEKLFASQPDVWQGIKLFREEMAAGNNGLYTTHIANPDANSACKRINMALRWLVRKGPVDMGLWKSIKPSSLYIPLDVHVARNARNIGLLERKSNDKKAVMEITEKLRQFCPEDPVKYDFVLFSLH

SEQ ID NO: 79821 - protein, 283 aa, Unknown
  Obtained from environmental sample
  DOMAIN (20)...(133): Response regulator receiver domain
  misc_feature (1)..(283): Xaa is any amino acid
MANDGLKAQGLGGAEAKDKPLILVVDDDPVICCVLAGALNRAGFDAEIFQDAAQALESLNELEPDVAVVDWVMPDFDGLNLVDILKARVRNLMTILITSHVAHEAVEEARRSGRVDAVLPKPFNLADFLNMVSSCVNSRQWASAPPVAPEGVGGGVLTGWLALDGREAYFEHVLDSLIDAVMMVDRVGRIIYYNNGARRMFCFREQSAGSLSLKELCPDDNPLSDLFAHFFGLHPPVQEQSEGFFVRTDGTRFYTIFSASLFQAGNHGSAVLLVVKDVTASHL

SEQ ID NO: 79822 - protein, 101 aa, Unknown
  Obtained from environmental sample
  misc_feature (1)..(101): Xaa is any amino acid
MRVEYINPFVEAAYSVLKEVLNAEVKRGEIYLKPTSMSIMGVAALVGLAGDVEGRVLFDMTKDSALFVAGRMNGEEFANLDELAKATIQEWLSAINPGGEA

SEQ ID NO: 79823 - protein, 98 aa, Unknown
  Obtained from environmental sample
  misc_feature (1)..(98): Xaa is any amino acid
ALLKFYKQNGYKFEINWFNEKKALRKKLLSEVFLNDITEHFADALEQNDTLAKCKSLDAIHIATALDISEKYGRSEVCICSFDKNMLKIAKELGFETN

SEQ ID NO: 79824 - protein, 182 aa, Unknown
  Obtained from environmental sample
  misc_feature (1)..(182): Xaa is any amino acid
MQFGVLTTQLREIENQYREKVKDLFDSLPAYLESIQDGKSVKDIRKEITENYGDMFTMFDPFETSFKASIAKFRSTSQNLGRITGELQEGVMRIRMVPISQIFSRFPRLVRDLSKSLNKKINLVIEGEDTELDKSVIEDLLDPIMHSVRNSIDHGIESRGIKKAAGKTERGMVLLKAANEGN

SEQ ID NO: 79825 - protein, 131 aa, Unknown
  Obtained from environmental sample
  misc_feature (1)..(131): Xaa is any amino acid
FPLRRWRLFRDAISGLPDPESATAKRVPNHEPRLGARAYPGHTGSLLDEPSKTLKAGDHGVPGGENTVVMDNGEIRYYTVRESARIQTFPDDYVFHGPWTENMRQLGNAVPVRLAAVIGESVKKQLDAVGR

SEQ ID NO: 79826 - protein, 314 aa, Unknown
  Obtained from environmental sample
  misc_feature (1)..(314): Xaa is any amino acid
FPHDRSAEAYVVTHAAFLGIVFSGKYLGIDPSIKTSLFLAALSFGMLVGTFVYVAGDGLVSKTLLAHNFTRYPLDCREKRQEAKSWIVPIAAILVTLCFTYSVTMLGIHKAGGTLDAMRGSAMSSICIPLVVFFISITALALTLKKNTGALYNSVVAQLENLSSEQKDLTKRISICSVDELGTIAGMVNDFCEYLGDGIKNIKNEANILSGIGNDLATNMNDTAAAVNEITANVQNIKMRITNQSASVSETHATMEQLVVNINKLNDHVENQGDDISRVSASIEEMVANIDSVTGTLVSNADHVKTLQEASEVG

SEQ ID NO: 79827 - protein, 295 aa, Unknown
  Obtained from environmental sample
  DOMAIN (162)...(282): Miro-like protein
  misc_feature (1)..(295): Xaa is any amino acid
VAADTIILGKPLTLVDTGGFKLDRDSDSPEGELEKVVVERTMAILEKADLILLLFEAGELSLEDEEFIELLRPYQEKLLAVVNKTEGGRREAEAWNLLSYGFEKVYMISAEHGDNVQELEKAIASRFDGYASLSTTEQAGEPGTDEPYTRLPYETAAKAPIRVAILGKPNTGKSTLSNRLTSSSASIVSEIPGTTRDVIEGAFTWKNRDFQVLDTAGIRRKSRVNEKIEYYSVNRAIKTIDEADLVFLVIDAQDGLTDQDKKIVALAYDQGRGIILILNKWDTIPAVKNVFAATC

SEQ ID NO: 79828 - protein, 329 aa, Unknown
  Obtained from environmental sample
  DOMAIN (56)...(238): Glycosyl transferase family 2
  misc_feature (1)..(329): Xaa is any amino acid
MAESPAFIMKGAFRALSSKYELDFKNLILKIRGLDASMSTTNNMITDKKDKDILISIVIVNYKVPYCLIEALNSLRLAALYDRCEVIVIDNASGDGSREIVASKFEEAQWIQLKTNIGFGKACNIGVEAARGEYLLFLNPDTVISANTLSDAVEFMETHPKAGLMGPKILNPDGTLQLSCRRSIPTPAVAFYYFAGLSYLFPKSKRFGRYHLTYMDEDKTALVDVISRSFMFMQQALFHEIGGFDKRFFMYGEDIDLCYRITHAEREVWYYPQIKIVHHKGKSSSKRKIRSRFYFYEAMIIFFRKVPHAIGKWSSPWWSKMAGGSFFQV

SEQ ID NO: 79829 - protein, 184 aa, Unknown
  Obtained from environmental sample
  misc_feature (1)..(184): Xaa is any amino acid
AARRFHAGAFVFSKSTTLGDIRDKYLPAGGGAGTYTRLDTNSTTWRKQGTSTAAAPAYDGTRGLEFTLTRDGKGYSVKAGGTFPVTENTLVIPATYNNLPVTTISQKGFDGCPKISSVTIPASVTEIQLGAFMQCPELKSVTFGGANTVFYDNAFPDGDLSQKYKAGKAGTYTRPANGKTWTKK

SEQ ID NO: 79830 - protein, 63 aa, Unknown
  Obtained from environmental sample
  misc_feature (1)..(63): Xaa is any amino acid
EFFRVIKGLTATGTTVLLVEQNAYKALDAPSRAYILETGEIVKSGLTADLMKDEAVKAAYLGG

SEQ ID NO: 79831 - protein, 113 aa, Unknown
  Obtained from environmental sample
  misc_feature (1)..(113): Xaa is any amino acid
MKLNILEYGKMLAEHNISIIYNGPLWSEGIDDLAEFLQKRLDMDDMPLSESQAVFSVFVEQMNNMLMYSAKKEKHEHPGTTTSGIFVLGSVDKSYYVQTGNVIISADSDLGGP

SEQ ID NO: 79832 - protein, 105 aa, Unknown
  Obtained from environmental sample
  DOMAIN (12)...(103): L-fucose isomerase, first N-terminal domain
  misc_feature (1)..(105): Xaa is any amino acid
MEGKMAVNRFKGEYPKIGLRPTIDGRQGALRVRESLEQQTMNMAKAAKALLEKNLRYSNGESVQVVIADTTIGRVAEAAACAAKFRREGVDILVPLGRSDQWGTQ

SEQ ID NO: 79833 - protein, 319 aa, Unknown
  Obtained from environmental sample
  DOMAIN (206)...(318): Acetohydroxy acid isomeroreductase, catalytic domain
  misc_feature (1)..(319): Xaa is any amino acid
MMAEAVIDFGGKKEKVVTRKEFTVAKARAALKGEVIAIIGYGVQGPAQALNLRDNGFKNVIIGQSKKYKKDWDRAVKDGWVPGKTLFEVEEAAERGTIIKMLVADAAQRVIWPSIKKHLTKGKALYFSHGFSIVYKDQTKVIPPKDIDVIMVAPKGSGTSVRRNFINGVGINSSYAVFQNATRRAEERCLALGIGIGSGYLFPTTFEKEVFSDLTGERGTLMGALAGIMEAQYEVLRKNGHTPSEAFNETVEELTQSLIRLVDENGMDWMYSNCSSTAQRGALDWKPKSRKATLPVFKELYAFVKSGAQDEPVISACGS

SEQ ID NO: 79834 - protein, 273 aa, Unknown
  Obtained from environmental sample
  DOMAIN (9)...(272): DegT/DnrJ/EryC1/StrS aminotransferase family
  misc_feature (1)..(273): Xaa is any amino acid
MWRVQLHKINYDDREYQAIREVIDSGWLTISQKTYEFEAACSTFLGHDTQCLAVSNCTAALHMALLVLGIGEGDEVITPSLTFIADQNVTRMAGAENVLADITSMEDWSMDCDDIEARISPKTKAVMIVHYAGYACDMERIAALCKKRNLLLIEDCAHTPGADYKGRPLGTFGDIGAFSFFGNKNIAAGEGGMVVTRNPELFAKLKHLRSHGMSVQSFDRYKGRASSYDVESPGLNYRIHEIASALGLVQLQKLEDANIDEKLGQSVHGGKKK

SEQ ID NO: 79835 - protein, 286 aa, Unknown
  Obtained from environmental sample
  DOMAIN (221)...(254): Tetratricopeptide repeat
  misc_feature (1)..(286): Xaa is any amino acid
MYRNAENLRKSGTSPGGVARFQAIVAEFREGRVAEKGWFEAGVCFEEMHDLDKAAAIFEQLTDRFPKGTLRESAYIRAAENYKKGGKFDRAAQIYLTAANQIPKAEFAIPSLSSASECYQKLNQFDMAGKMFELIYERYANDPKTPQALYNAGLIFEKGKHYNDAIKVYDQLASRYPNSEFAAEAFFSIGLCYEKLEEFGKMANSFSDYAEKYTADRYKQVQALVKAGDAYFNMQNYKESETNYNKAVKIYEQHSKTSDIDVANVAQAYFRVGEISANLILGGGNG

SEQ ID NO: 79836 - protein, 308 aa, Unknown
  Obtained from environmental sample
  misc_feature (1)..(308): Xaa is any amino acid
MAEDAAPTSVTLGSLYYDQGRDDFGRASERYADALKQYDKTGRGTPPTPPIPDYSKSLKMYWQLTREYPTFPKLPEAFFQMSQNYLVAGHLDTTRLILEQLTQRFPNSPRVSAAQFRLGELAFMDNNFNKAYEHFKKVKQNEVDIVSWEMNHYRLAECAYNIGDFDKAVEYFNGYVEACDANKYTKKEFREMALEYMAISFSDMPNGVEEAIKFFKKNSGKPYEAQVIYMVGAKNRDHGQWDAAIQALEGALKKYPMYKEAPARPVSALIECFVVKKEHEKANKERESLVDDYGEGSRWYTGNLKDRK

SEQ ID NO: 79837 - protein, 322 aa, Unknown
  Obtained from environmental sample
  DOMAIN (226)...(315): CarD-like/TRCF domain
  misc_feature (1)..(322): Xaa is any amino acid
EQCCVPHPNREISELCLRQKTLFPVPQSLFPNHSILDYLGDEGTLVLVDRERLDNAQESISREYHGWYMRSRRDGESREFPLPERLLLNFKELIERHGEVKGRKIISFLSIKNEARPGCCRVSIPCEPSRSFFGNINYMKDEFAALHASGWHIAVAAESPVQAERIESMLVPHKSLSIIASPLSSGFSLPEIKLMVIQENEIFGRRKRPPRSLKTVRSSPIDTFVELNPGDYVVHVNHGIGLFKGIERINTLGFERDYIQLEYAGDETVFVPVEQLNMVQRYIGNEGNAPRLDTIGSKSWENRAKAGEARADFCAMGGGGWG

SEQ ID NO: 79838 - protein, 60 aa, Unknown
  Obtained from environmental sample
  misc_feature (1)..(60): Xaa is any amino acid
DLQERLKITVILITHQMKVIREICHEVAVMEEGRIVETGTVVSVFETPKTQAAREMFHAQ

SEQ ID NO: 79839 - protein, 256 aa, Unknown
  Obtained from environmental sample
  DOMAIN (142)...(256): Transketolase, C-terminal domain
  misc_feature (1)..(256): Xaa is any amino acid
MAAVMNGIASHGGVLAVCGTFFTFSDYMKPAMRMAALMELPVKYVWSHDNFRVGEDGPTHQPIEHETQVRLLERMANPHGRRSMLVLRPADAAETTEAWRLALENMNGPTALLLSRQALADLPAKPGSPSRAVDAKGVKFGAYAVVECENPELVFVANGAEVIACMEAAAAIKKERGIGVRVISAISEGLFKEQPQEYKDKLIPFGVPVLAFTAGLPVNFKDIVRPFGKVIGLERFGASAPFKVLEEEIGYTTEAL

SEQ ID NO: 79840 - protein, 124 aa, Unknown
  Obtained from environmental sample
  misc_feature (1)..(124): Xaa is any amino acid
MAAPYSMISEPDVLLVNLSGGINANVALYNGARSIDITEPSPEMIRLLRDDPSISRFTGNLLDEDKINVIRGEGRSYCANNEGSYDLIELSLVDSVGLTDSGGYAVHEDLSTVGGLKAAITGGN

SEQ ID NO: 79841 - protein, 95 aa, Unknown
  Obtained from environmental sample
  DOMAIN (5)...(94): DNA polymerase III beta subunit, C-terminal domain
  misc_feature (1)..(95): Xaa is any amino acid
LSRGVDKSTGYLGLKPGIMEIYSEEGEIGEGREEIPCKYDGEEVSFALNYQYLEEPFKVMNCDEICINFTGPSKAITIVPVPKTDYFHIVMPMQS

SEQ ID NO: 79842 - protein, 216 aa, Unknown
  Obtained from environmental sample
  DOMAIN (2)...(204): RecF/RecN/SMC N terminal domain
  misc_feature (1)..(216): Xaa is any amino acid
VVISSLRTTAFRNISDAVVETATKNIFLVGENGQGKTNFLEALYFCSYASSFRGARDSDIVQNEKKDFSASITTASQPSEKNVLGEVLVKFDKGKKTVFIDGKKAEDRKDLLSIVPCVVFCHEDMEFVAGSPERCRWFFDQALSLYDPVYLDDLRGYRKVLKSRNSVLRDYRQGYNTNPEALLDALDQQGALYGFRLMEKRETAARLFFHSFAQLF

SEQ ID NO: 79843 - protein, 177 aa, Unknown
  Obtained from environmental sample
  DOMAIN (15)...(177): Amino acid kinase family
  misc_feature (1)..(177): Xaa is any amino acid
VTGEPLFRKELKDVRTLAVKTGSRILTAAGHERRVGQLAADISALRESGVRVVLVSSGAIAHGMKALGLDKRPTEIPMQQACAGIGQNRLMAIYQERFSEHGTLIGQVLLTWDDLRSKKRYLNLRNTLFKLLDCGAVPIVNENDSVSVEEICFGNNDTLGAQIAMLSTLGHHPGGKK

SEQ ID NO: 79844 - protein, 303 aa, Unknown
  Obtained from environmental sample
  DOMAIN (16)...(199): ABC transporter
  misc_feature (1)..(303): Xaa is any amino acid
LIWQFVWAGGGNHFSQILSGETEHDKGEVSVGKGERIAVLKQDHFAYEEFPALETVVMGFQKLHDIRKEREAIYAKEDFSEEDGIRASELEADFAELGGWEAEAQAGQLLSGLGLDEEDHGKLMAELDESKKVRVLLAQALFGNPDILLLDEPTNGLDLESISWLEEFLIDFPNTVIVVSHDRHFLNSVCTHVCDIDYRRITPYSGNYDFWYQMSQILLRQAREPLKKRENKARELKGIIPAFHDQGQPRARQAYNPGKKMAGKNFTLGTMVALSPSYEKFSRKVRLFQTPQAVENCGQPTVV

SEQ ID NO: 79845 - protein, 65 aa, Unknown
  Obtained from environmental sample
  misc_feature (1)..(65): Xaa is any amino acid
VDERQSPVGALGEEAMTDFYNGKRVFVTGHTGFKGAWLCRFLAKMGARVTGYALERLLSRRSSSR

SEQ ID NO: 79846 - protein, 215 aa, Unknown
  Obtained from environmental sample
  DOMAIN (2)...(102): Flagellar motor switch protein FliM
  misc_feature (1)..(215): Xaa is any amino acid
FFPLLDGGGRGEQSQHELTDIEQSVMEGIIVRILANMREAWTTVIDLRPRLGQIDTNPQFAQIVPPTEMVILVTLETKVGDVEGMMNFCIPYITIEPIVGKLSAQFWYSSVRRNATSENLTVLKEKLATVDVNVVAEIGKIDIPVRDVLSLQAGDVIRLYNTRVEEPYFLNIGNKPKFLCRPGLIGRKLAVQITKKIAELEENDFEELVNDEGVM

SEQ ID NO: 79847 - protein, 279 aa, Unknown
  Obtained from environmental sample
  misc_feature (1)..(279): Xaa is any amino acid
MHEALIGTIHSVCLRLLQTWPFETGVHFNTAMIEDDNEGADAALRTSMRTDWEDAGSGLPQGLKAMEEKGVKLEKDKHIKLITKTALKIMGGDGAELDDAQAGGLTLDEAINKINNAADAELEDLTQKLLYAFINRAAKKLAARYDAYKRENGLVSYDDMLRLMRNAVYSRDGEILKRLRKKLRYGIIDEFQDTSPVQWDIFQKIFLEDADETNIYIVGDPKQSIYSFQGADINSYISAKNAITAQKGTVYSLKDKLPVNTGNDRRLQRHPLRRYGSWF

SEQ ID NO: 79848 - protein, 251 aa, Unknown
  Obtained from environmental sample
  misc_feature (1)..(251): Xaa is any amino acid
MALDGKRVITSTYRDAEGKLVFYVFVPMDVFGYSSGSEAPAILGATVSGLYFNTLVAKLMMWDTGRITIVDEKGKVIADEHNTWVEGQVNFLELAENDRRYAEFAGVIDRMVSKGDNNIGTARYSLKGMEGGNLDNVIAFMPIASPERWAISVSTAIGDSAYYTVMGMIGVSGLIFLVLGMVAAAVASGYIAQPFELLKEAAKAKTAFIANMSHDLRTPLDAIVSLFTLTRTIKDLPADVGDHQKRSMNPA

SEQ ID NO: 79849 - protein, 76 aa, Unknown
  Obtained from environmental sample
  misc_feature (1)..(76): Xaa is any amino acid
MARRLPFSENLSFAKQIKSLADDDFLDIWEETQRLEQLMRAEWDAALELAPEYERLIVLELQYRTGMRGTEQNPME

SEQ ID NO: 79850 - protein, 68 aa, Unknown
  Obtained from environmental sample
  misc_feature (1)..(68): Xaa is any amino acid
MDFSGIEKVIISVKGQNAIIDSDVASIYGVLTKEVNQAVKNNPDKFPSDYIVKADRDELVKNFDRFKN

SEQ ID NO: 79851 - protein, 174 aa, Unknown
  Obtained from environmental sample
  misc_feature (1)..(174): Xaa is any amino acid
LAWIGDKLVNRNLHDRILRQRNFRFNRNLGLNGNLWLNRNLGFNRNFRLNGNLGLNRNLKLNGNLGLNRNFGLNGNFGLNRNLGFNRNFRLNGNLGLNRNLKLNGNLGLNRNLKLNGNLGLNRNFGLNRNLGFNRNLKLNRNFGLNRNLGFNRNLKFNRNLGSTVSRDHPGENP

SEQ ID NO: 79852 - protein, 263 aa, Unknown
  Obtained from environmental sample
  misc_feature (1)..(263): Xaa is any amino acid
MTDWPRETGDTYYFIYSSIASNELCYATSKNPVKDYVYGGVIISNADVHIDTYKPADKPMGCGGNNHGSIIEVKGKWYIFYHRHTNGNEFSRQGCIEPIEIRADGSIPQVETTSCGPNGKPLIGKGEYPAYIACNIFSVDNNRQLERQWPLHNQSLPKISQDGKDGDEEAGFATNIFDNHGIGFKYFDCKGIKKIKIKTRGYNNGVIQVKTKWDGEPLAQIKIEYSNIWMEYSSDINIPDGKNALYFIYKGSLYASIASFTLE

SEQ ID NO: 79853 - protein, 334 aa, Unknown
  Obtained from environmental sample
  DOMAIN (197)...(334): MatE
  misc_feature (1)..(334): Xaa is any amino acid
GINGLRRVDATYSISGFVFGFIYGLTDGFAVITAQRVGAGEAEGIRRSVAAGLTLCFFASILITVLLLPFCRVFLSLMRTPAEIMDDAYGYVFITLAGSFIGIFSNMLAGIIRAGGDSFTPTVFFLVGIVSNIFLDILCVVVFHWGVRGAAIASVFSQFISCVLFLLFRIRRFSRFFPQRQDWLAGRRDFGVHLSLGISMGLLHSIVEAGNILVQAAVNGLGAVTIAAVSAAQRVRGLNMMPLFALSRAMTTYTAQNYGAGKMDRVNKGIFQACLISLGLGIFMATVNQFTGAPIAALFLKDSPEAVALAHRFILYTGYTVFIVGLGRSVSKCP

SEQ ID NO: 79854 - protein, 288 aa, Unknown
  Obtained from environmental sample
  DOMAIN (82)...(194): Carbohydrate binding module (family 6)
  misc_feature (1)..(288): Xaa is any amino acid
GINTGYREGCSHISATAASGYTFVNWTVSGSGTFANANFASTSVTVNGNITVTANFSNGNPGNGNPGSGNPTPVRGDTVKVEAENYSSKVGDGMKTEAGAIGWIENGYSATYNINIGKAGSATMQFMIATEVQSNFTVKVNGTNVGTISQGSTGSWSTFKIVQLGNAVNLRQGTNTIVLEFGSAVNVDYFLLIGDIKGTTSVRRAAAKEGAGHSIALKPVRNGFSALLPANHGYTSYKLIDVLGREIRSGKIGADAHDLNIIGLQQSVFFLRLEGKGKTPTALKVVTN

SEQ ID NO: 79855 - protein, 319 aa, Unknown
  Obtained from environmental sample
  DOMAIN (129)...(253): B12 binding domain
  misc_feature (1)..(319): Xaa is any amino acid
VNGSPNAAERLLELAKKIAAAAPAASNSSSTPHSSFLIPNSPEVRIVHAMLRGIDDFIETDALELLNQQKTALEIIEGPLMDGMKEVGKRFDEGTIYLPHVIRSARVMKKAAAALEPYMGEVNSANNAPKVILATVKGDVHDIGKNIVGIVLACNGYQVIDLGVMVPAEQILDAAEKEQAAVIGLSGLIAPSLDEMAHIAKEMEKRRMKIPLLVGGAAANLVHTSLRLAPEYSGPVVYVPNAGKSAETVRALLSDSQRPRFLRELEKTYQDAAQRHEEIQSRLEIISLELARANRVPPAIYKPVAPKTAGSAESVHDLT

SEQ ID NO: 79856 - protein, 326 aa, Unknown
  Obtained from environmental sample
  misc_feature (1)..(326): Xaa is any amino acid
AGAEDAQNARIQLKYAKISFEAPEAAESAAIKMAKEKSIELFEQDAEFWRAAIEINALTLFFVPDEYKTEELCELAVIRNGNALIYVPPEMKNYELCRKAVYNNAYTLRHVDDELKTRELCRMAVKSTGSALEYVPRKFITPELCAAAVKNSEWALEFVPEEMKTPELCAEALKKDSRLLKFVPETQKTKELCLLAVSSNEFEDLRLFVSGLHCALAYVPEALLTKELCLDAVLKESESLEFVPEKFKTPELFLTVARKKHWALEIVPDDLKTYELCLAAVKVYGPSLKYVPENYKTKEILDAALEENGCALELFPTLAITRKKSR

SEQ ID NO: 79857 - protein, 67 aa, Unknown
  Obtained from environmental sample
  misc_feature (1)..(67): Xaa is any amino acid
LRNSSSAPDTAGTGMKRYRDIKLYDEDSQDLEKQMQEILEQRRIEAEFAAEAAKAAEMMPVEDADED

SEQ ID NO: 79858 - protein, 300 aa, Unknown
  Obtained from environmental sample
  DOMAIN (1)...(246): Branched-chain amino acid transport system / permease component
  misc_feature (1)..(300): Xaa is any amino acid
MAMSVNMIVGITGQLSLGQAGFLAIGAYSCIFFNFDVGLPLPLAALCAVLVTTLAGFLIGFPVLKLTGDYLAIVTLGFGEIIRVVFINLKSLTGGPNGRTFPTPIVMNGELAFILTTITLIVILALLQNFLRSSYGRAIKACREDEIAANANGITIFRYKMLGFVIAAFIAGIGGCVYAMVVGFVKPDMAQFLRSIDFLIYVVLGGMGSMTGSILSAYVLTYLQEFLRFLQDYRLLIYPVILILVMLFRPKGLLGMKEFSIVGFVDKLIAIRNKKLRHESSDKGIKGINPRPLSITGGTG

SEQ ID NO: 79859 - protein, 302 aa, Unknown
  Obtained from environmental sample
  DOMAIN (40)...(302): Receptor family ligand binding region
  misc_feature (1)..(302): Xaa is any amino acid
PPISPPNDQIGRARASKGSDSVSIGAIFPLSGSVAFYGNESRDGAQLAIDEINAAGGLLGKKLVLLSEDDEGDAAKAVNAFTKLTTRDKVSFVIGSSTSGPTQAMSTLAQNSKVVLVSPSATNINVTKAGDYIFRACFIDPFQGVVGADFAYGTLGSRRAAILYDAGADYNAGLADSFRNQFKAIGGQVVADEAYQSGDVDFNAQITRIKTANPDVVYLPNYYNDVSLQAKQLRDQGITCALVGGDGWDSLTDNAGDEILNGFWSSGFASDTTDPLGVAFVKAFNAKYNGLAHSLPLSATIR

SEQ ID NO: 79860 - protein, 254 aa, Unknown
  Obtained from environmental sample
  DOMAIN (1)...(250): Methylenetetrahydrofolate reductase
  misc_feature (1)..(254): Xaa is any amino acid
VRETAALRRSFISITYGAGGGTSDYTENLRVEAQKQGIPALAHLTCVSSDRKTIMGVLSKLAADKIENILALRGDIPNGQEFPNDAQYHHACELMKEIQNAGDFCIGGACYPEGHPESESLEKDIESLKIKVDCGCRFLTTQMFFDNGILYNFLYRLLNHKIEVPVIAGIMPVINGKQIARICKISGTVLPPRFRAIVDKFSGDSAAMSQAGIAYATEQIIDLIANDVRHIHIYTMNKPDIAAKIMNNLSEIFK

SEQ ID NO: 79861 - protein, 144 aa, Unknown
  Obtained from environmental sample
  DOMAIN (28)...(140): ABC transporter
  misc_feature (1)..(144): Xaa is any amino acid
MLEVKNLSAGYGGSADVIRNINLKAERGESLCILGPNGSGKSTLLKSIARIIDYRGCVLMNGEDISAVSRKELAKKLALLSQSTQVFFPYTVYETVSLGRYAYSQGFLKNLSAEDREVIEDILKKLDIGTTKTARPICHGGKIG

SEQ ID NO: 79862 - protein, 64 aa, Unknown
  Obtained from environmental sample
  misc_feature (1)..(64): Xaa is any amino acid
MAALFYEHSRIVVVEGPLIGLEGRIIKVDKRKGRAKIKLDLYNDSFSIDLAFEVIGSLDNDKGR

SEQ ID NO: 79863 - protein, 332 aa, Unknown
  Obtained from environmental sample
  misc_feature (1)..(332): Xaa is any amino acid
TYEIFPEDRYDPDCPRRGDVRPRSAALVFENKYDCIAVDISPVFQDDLAEAVDELPLISALIAYCQEIYGGLGNAYGSVGIDVDKEDDEDDDLPFCYYIPIDPCDAMIEGVRQARQRRVPFRCVGTPTLRPPIPMLSMPDEYSVEKIGFDAYSLLCRKAVKDMFQGGEVGVVNNDNDQLRSQLKSIFTLCGETINADMNIVADNLHKLCRQFDNILAIVHISRFDAVMKRFNDESIRRDDTDAASVEQPYAIIRRYINPDHLYFALSELPFVAAKSQLERQNPFATPMDPTDAVKDLFIDTRENYYDNRNRRSTVARRIQAALGHHPEKKKP

SEQ ID NO: 79864 - protein, 288 aa, Unknown
  Obtained from environmental sample
  misc_feature (1)..(288): Xaa is any amino acid
MPGEIADLLREYAANSRGKIRFFQKDPAKAELLQAVEDLGIEPQQIQLAEQNEITVATVYSGILIEYLDREMVIPVVFSLDTLEYDLSSRIRSLVRNVEREIGVIVGDSYSQWESEYGLLNEELAFSGFRVRLIKAGDYIPSSLPALFVFGGVEDLDEDQLLPIDNYILGGGNVLFALDGVFVDTRRGFEARKMQDRGLLAMLANYGVVVPGALVNDVLALSLTFQTHSRNGTVIQTMRYPQWLGLPEQMGNPDHSLLPVFWGWIYIGQALFDLIPRRRFCGCSFCPV

SEQ ID NO: 79865 - protein, 188 aa, Unknown
  Obtained from environmental sample
  DOMAIN (75)...(104): Helix-hairpin-helix motif
  misc_feature (1)..(188): Xaa is any amino acid
YRRDPWAVLVFTILSLRTKDEVTLVASKRLLEKAGNPNALSAIKEEQLAKLIYPVGFYRNKASSLKKIASILITQYDGEVPSSKEALLALPGVGRKTANLVLTEAFNLDGLCVDIHVHRISNRCGWLESKNPEETEMILRVILPLHYWKRINYLLVLYGQKLCRPVSPFCSQCVIKKHCSRNGVGKSR

SEQ ID NO: 79866 - protein, 286 aa, Unknown
  Obtained from environmental sample
  DOMAIN (7)...(232): AICARFT/IMPCHase bienzyme
  misc_feature (1)..(286): Xaa is any amino acid
MEQLHGKELGYNNIRDFDLAWKAVARFGFDADGTLPAGKNDVSQFIPTVNDTVKACCAAIKHNTPCGIALGDTLIEAYDKTFACDPVSIFGGIIACNTVVDSKVAEKLGELFLEIVAAPGFDDDALEILKKKKNLRILKLKNAPKETHEYVAVDGGFLAQQSDRRLFEKWEVVTKAAPDACDIPDMIFGMRAVTFAKSNAIMIVKDQAATGIGCGQVNRIWPTVQSLERSAAVLKAENSPWKNSEPARVLASDAFFPKTDIVEAAAAAEIKSIYSLGRFRHVGGVG

SEQ ID NO: 79867 - protein, 234 aa, Unknown
  Obtained from environmental sample
  misc_feature (1)..(234): Xaa is any amino acid
MIPLYKLEKLPRTQKLRKIAKIFTMAETRLSSLLAGSLLASGLPASNLQVNSLPTSNLQASSLMAGKSGDVFNGQETAFFVDAAKLLAEDGLLSVDAKKAIIESMGVFQAAITAPISDFSMFLRALNNVKHILLAETGKDQADWDFTGSDGRLDPKKRQVFEGMWVYMEDIRSPFNVGAMFRTAESFGVEKIILSPLLREPRHKRAERTAMGCVDIIPWDGKSFFPPLETRHQY

SEQ ID NO: 79868 - protein, 136 aa, Unknown
  Obtained from environmental sample
  misc_feature (1)..(136): Xaa is any amino acid
MPANSPNAYIFLGPELGKKQDETDSIKQKLPDAEITTFYAGETPVSTIADTIQNNSLFSEKLLIIIKNAEAIKKKDEIELLVSCIDNLDKNTTIIMLSDELKLAAALDDAVPKNNRKIFYEMLKRKKILAITRGER

SEQ ID NO: 79869 - protein, 127 aa, Unknown
  Obtained from environmental sample
  misc_feature (1)..(127): Xaa is any amino acid
MALQSSFTREQAWNLFLKFNKDPFHIQHALTVEGVMRWYAKELGFGDEADFWAIVGMLHDIDFGEYPEEHCVKARQLLTDAGANEELIHAVCSHGWGMTGAKESRNISWKSCSMPRMSLPASFGQSR

SEQ ID NO: 79870 - protein, 270 aa, Unknown
  Obtained from environmental sample
  DOMAIN (3)...(224): D-isomer specific 2-hydroxyacid dehydrogenase, catalytic domain
  misc_feature (1)..(270): Xaa is any amino acid
VKIIVLDGYTENPGDLSWGEFEKFGELKVYDRTSLTDPKESIARIGDAEVVYVNKTPLSAEVINACPSIKFVGVLATGYNIVDVNAAKAKGIPVCNIPTYGTAAVGQFAIALLLEICHHIGHHDKAVHEGRWENNVDWCFWDFPLIELAGKTIGIIGFGRIGQTTGMIAKALNMKVIAFDSVPTDSGKQIAEYVSLDTLLAESDVVALHCPLFPETQGIINKANIAKMKNGVIILNNSRGPLGGGARPGPMPFTVARYMRRALMSFPRKQ

SEQ ID NO: 79871 - protein, 238 aa, Unknown
  Obtained from environmental sample
  misc_feature (1)..(238): Xaa is any amino acid
DGKLVGREFGAKVGRIYSSISGYHEKSNSGTVQMILTAQYLEKTGYAFWDLGMVMDYKKTFGAKVRNLEDFMILWRKYSIQTIGSNSEFEKYPIQKQNLTEEQLLWLLRNAYKYFYIDDLQEYLLDDFHYVSQNIFGEITTKEQYLEYLKSELKTIQEADPPENEFYMEMFYDSHSNKPYLYMKQIENDVLFAAEVKDGKLARIDLYAPESFSIKRKSDMEILNKEEQASLQHNDSGV

SEQ ID NO: 79872 - protein, 310 aa, Unknown
  Obtained from environmental sample
  misc_feature (1)..(310): Xaa is any amino acid
VSREAGRCTVRKAYQQTLIAAANNGWKIGSEQSAYVHAREIHAALKLYVKGGSRALDNMFYIARDLTGLRPFQIVVGDQHRFDFWVTDDQGVYFRPECYLWLDMRTRLVYGIAFDRNYNTRTVLRALKEGVKRFGKFESTYNDNGSGEKSAVADYTIEQLQNYGMKFCDEGDLYRTETGAYVVEGADGKMVNVARSRVEWKKQNRRIYANVKNAKTKPIERFFSTLEQILRDMITPGLVIDAAGNAATEEESSRRLQWQKDNGYILPFEDFVFRVFEAIDFYERREHGTLKRSPMAELEHAVKVEAGGGK

SEQ ID NO: 79873 - protein, 197 aa, Unknown
  Obtained from environmental sample
  misc_feature (1)..(197): Xaa is any amino acid
MNYFQKSERLYNSAVLNDGAGISESEMREVAEWPLDQAVSLFAAADQARRDFFGGAVDPCAIMSVKSGGCGEDCAFCSQSAHNRADVALHGLCSSEEIVSRCREAWSKGLPFCAVSSGRRLNAAEFQTLCEALSECGDGGEKHASLGILDDSEFAALRDAGVVCYHHHLETSRGYFGKIVTTHGYDDRVATVRRARA

SEQ ID NO: 79874 - protein, 87 aa, Unknown
  Obtained from environmental sample
  DOMAIN (5)...(65): Bacterial flagellin C-terminus
  misc_feature (1)..(87): Xaa is any amino acid
DGTPDVALKRINKQRADLGATQNRLEHTVRGLQVGAENLQASESRIRDADMANETVSYTKNMILNQAGTAMLAQANQKGQSVLQLLQ

SEQ ID NO: 79875 - protein, 166 aa, Unknown
  Obtained from environmental sample
  DOMAIN (1)...(104): GTPase of unknown function
  misc_feature (1)..(166): Xaa is any amino acid
MNTVLQEQISIATSLPQTTRRNIRGIYTSPDMQLVFIDTPGMHKGRHALNDVMREQAVSAVSSGMDLVCYLVDLSRDFGDEERDCAECVTELSVPVLIVFNKIDICENPDARITSFLSTYKQFEKSPYIKLSATAPKSKDIFLTAVDPLIPPGLCTSTASPSPTRV

SEQ ID NO: 79876 - protein, 144 aa, Unknown
  Obtained from environmental sample
  misc_feature (1)..(144): Xaa is any amino acid
DGNIFKAFGVSISESVKWREELCEPRRYLSEDPRLRSALEQLGSRFALGVVTNNPVSIAQRTLRVLGVEDMFRAIIGLDTCGVSKPHVEPLTRAAALCGSSIESCVSVGDRYEIDIALPLELGMGGILVDGVEDVYQLPEILVK

SEQ ID NO: 79877 - protein, 169 aa, Unknown
  Obtained from environmental sample
  misc_feature (1)..(169): Xaa is any amino acid
VHLLYLTALPVWRMALFPSAPALPCITIPNSVTIIGQSAFSECTSLTSVTIPNSVTDIWESAFYGCTSLTGVTIPNSITSIGDCIFPDCTNLTSVIIPSSVTGIGRNAFSGCTGLTSVTFAGTIPVNNFNTYEPFPGDLRAKFYATNSTNGTPGTYTRQRDDGTWTRQP

SEQ ID NO: 79878 - protein, 102 aa, Unknown
  Obtained from environmental sample
  misc_feature (1)..(102): Xaa is any amino acid
MEAIANKKIIEMESEAARDALLRFETIWNWVECGIVIIDAGTRQIIDINPVAARMYGGERTDIIGKGCYEIFYSANRDSCPLIDFNQEVTSERIILRIAGES

SEQ ID NO: 79879 - protein, 102 aa, Unknown
  Obtained from environmental sample
  DOMAIN (34)...(102): Ribosomal protein L7/L12 C-terminal domain
  misc_feature (1)..(102): Xaa is any amino acid
GVKTPDDPTSSLAVAAVGGAGGGAAAPAAEEKTEFNVILKAYDDAKKIAVIKEVRAVTGLGLKEAKDLVEGAPKPLKEGATKEEAAKIKDAVTAAGGTVEIQ

SEQ ID NO: 79880 - protein, 160 aa, Unknown
  Obtained from environmental sample
  DOMAIN (15)...(160): Aminotransferase class-III
  misc_feature (1)..(160): Xaa is any amino acid
MNDAFMDTYHRLPVIFAKGEGAWLTDINGKKYLDFCSGIAVNCLGHAYPPLVKAISEQAAKLNHTCNYFLSDTTMAFAEKLVAACAGAGMKKVFLANSGAEANEGACKVARKYSFAKYGPGRHTIVTLRGSFHGRTITTLPPTGQDESTRLGHHPGGKWG

SEQ ID NO: 79881 - protein, 319 aa, Unknown
  Obtained from environmental sample
  misc_feature (1)..(319): Xaa is any amino acid
VDQIGRADVTVASMKITPMDTVSGTPEKTHYFVGGTPENKINSSSSLNLNTGYYQVMFSLSNGQHNTGREEYLHIYKNMDSRFEYTFTQDHFTVYSVTNGADSGPGSLRHAIENAASNSTIMIENDVKTILLKGRIDIRKNLTIAGNGVTITRDPSWTTIDGDSQLLYIRSSMSAITVTISRVHFKDGRASTNVAGVFLWDGSVVLESCIFSGNQSTSGAIFNRGTILSVKGCTFYENSASDAGGAISNLGNITLTGHLFYGNTAARLLPVIDSTYGTVSSAGYNVVDVPLGTASNQSGWAAHTTDKTISSILISSLSF

SEQ ID NO: 79882 - protein, 127 aa, Unknown
  Obtained from environmental sample
  DOMAIN (28)...(121): FKBP-type peptidyl-prolyl cis-trans isomerase
  misc_feature (1)..(127): Xaa is any amino acid
KNIRRKDKSEDDVVSTASGLQYKVLAEGSGQAAKDGDTVSVHYTGTLIDGLKFDSSVDKNQPLTVVLSDGQLIQGWIEMLRLMKKGGKVKVWIPSNLGYGEMGKPPFIAGNSLLIFEMELLDIKPAK

SEQ ID NO: 79883 - protein, 299 aa, Unknown
  Obtained from environmental sample
  DOMAIN (184)...(250): ACT domain
  misc_feature (1)..(299): Xaa is any amino acid
MNAKASDAFDVGFISDSNYTQAELAKDSWELIPQKILPLIKGNVIPVITGFIAKDEKGNITTLGRGGSDLTATMVAAACRAEEIQVWKDVDGILTADPRIVKKAKPVQNITYEEASELAYYGAQVLHPRAMLPCMKTGTPVLVKNSYNVEAPGTRIEHSQPAGAKSKPVHAITSRRNITLVDIVSTRMLGQYGFLAEVFSLFARYNISIDMVATSEVSVSLTLDTNYDLTEIKKELSKIAHVDIKTGKAIVSIIGNVKRSSEILVRAFRLCQFIGVTVQMISQGASKVNITRPICHGGT

SEQ ID NO: 79884 - protein, 139 aa, Unknown
  Obtained from environmental sample
  misc_feature (1)..(139): Xaa is any amino acid
MEDQAEKLREIMRQKKNSSGKLDEQSDGASGRMSQAREGRKTRIITVTSGKGGVGKTNLSVNMALAFARLGRKVIIMDADLGLANVNVMFNMIPKYNLYHVMKKQKTIREIMVETEYGISIVAGASGFPRCQYSRYPCF

SEQ ID NO: 79885 - protein, 304 aa, Unknown
  Obtained from environmental sample
  DOMAIN (1)...(273): FHIPEP family
  misc_feature (1)..(304): Xaa is any amino acid
GYPRIRWPSRPRQEQERIGYFLCIIPGTVTEELPGDKTVDPAFGLPAQWISENRRDDAERAGYTVVDPPSIIATHLTEIIRRHAAEILGLQDTQSILDTLRKEYPAVVDEVMRPELKIPVVKIQRILHGLLKERVSIRNMVTILEAVAEYAPLSSNVQFLTEKVRQALGSQICHQYTDDNHKLRVLTIAPELEQKIIESKYETSSGMVCAWEPQVQTAWIKAVTKSAQAVRSRGYQPVILCSEQARFLVKNSTDRELPELAVISVQEITPDIIPEAVGIIRLEAPFREGAPSKESASSREGGGE

SEQ ID NO: 79886 - protein, 49 aa, Unknown
  Obtained from environmental sample
  misc_feature (1)..(49): Xaa is any amino acid
MDFNEKFSLKGKVAWVTGASYGIGFAIAQAFHKAGAGIVFNDNGQEQVG

SEQ ID NO: 79887 - protein, 175 aa, Unknown
  Obtained from environmental sample
  DOMAIN (3)...(109): Histidine kinase-, DNA gyrase B-, and HSP90-like ATPase
  misc_feature (1)..(175): Xaa is any amino acid
VHFTLADLVTDIAQNGCESGATLVELEIAEDAVKKKFRFLVRDNGKGMTKEQLAEAIDPFVTDGVKHPHRKVGLGLPFLIQTAEQSGGGWDVKSEKGKGTTATAWFDMGNFDTPPVGDLPGMFRTVLMFNGPDEIIIRRSGRQEGKEPLEYEFSKTELEEALGGFETPGALCDAD

SEQ ID NO: 79888 - protein, 138 aa, Unknown
  Obtained from environmental sample
  misc_feature (1)..(138): Xaa is any amino acid
MLNFKKHLQYAKERGADEAEIFYINGREESAEVRDQKIEKVESAGDRGLSVRIIARKRAGFAYTSSLDEADILKSIDMAITNARYAEADKHTSPPPRKIIRPKPLRNYSVAAAKLTLTQLADLAKKPKRRLTLTTGRF

SEQ ID NO: 79889 - protein, 125 aa, Unknown
  Obtained from environmental sample
  DOMAIN (1)...(125): NLPA lipoprotein
  misc_feature (1)..(125): Xaa is any amino acid
LRGFCWGTGLITLKAGVGLTATPRDITGNPKNFEFRELEAAQLPRSLQDVDAATINGNYALGAGLNPVKDSLLIEGADSPYVNIVVVQKGKENDPRIIALKNALLSKKVKDYIDSRYGGGVVSIF

SEQ ID NO: 79890 - protein, 292 aa, Unknown
  Obtained from environmental sample
  misc_feature (1)..(292): Xaa is any amino acid
GPSDRSPDQERKTFLPYWVNTPEETEYRNRLADYQISFLLNNDILAYYGHPGSRNMGILGRYPIEELDRLLTALAAEYEAANGGRKVRKAFYLIYGTVWPKGEIGIINNNILMKYIEYGMKNDILIFIDHQIGRYDPIDSLKRMLPYLRYPNVHLALDPEWRTKSPMADIGSVRADEINIAQQVMEDYIIENNIPGERMLVIHQFNHVMIQNRAEVRSNFNRVRLIHCADGFGSPNIKRNSYAYNALASNMPIKAFKLFYNFGIPGAGYDNPLMSPKDVYNLNPRPYIIMYQ

SEQ ID NO: 79891 - protein, 81 aa, Unknown
  Obtained from environmental sample
  misc_feature (1)..(81): Xaa is any amino acid
VFEYVLANGVIVSPGKKVHTGDLGVKGEKIVSLGGIVKIDLKGKSFVYPSLINTHDHLQGNYRPPVGPKKGHFYLTWLPWD

SEQ ID NO: 79892 - protein, 301 aa, Unknown
  Obtained from environmental sample
  DOMAIN (95)...(201): TonB-dependent Receptor Plug Domain
  misc_feature (1)..(301): Xaa is any amino acid
AREVEILSEDADLSLPLEGAVIRSWDGRQYACGRDGKAKVIVPEERQVVIQAAYPGYENGRLVITTGNSSYKISLRLSGVMEGRELVIEAERPGTGETRTGRSVAVSGREITQTAEIGVVEDVMNSIKLLPGVGYSGFFDAQPSIRGGFPGDMNASLDGYYIMNPYHWGGGFSIFDPRMVESAQLSHGVFSTRYGHTISGLLEITSKKPSPADIEFELGVNSSAANFNLSFPFSSTGNKGGILIMGRVTYYDPVIWLMQALGDSFRDIGLFTQEQEDLLNAIREAPYISKTRHSADLIMSR

SEQ ID NO: 79893 - protein, 234 aa, Unknown
  Obtained from environmental sample
  DOMAIN (1)...(48): S4 domain
  misc_feature (1)..(234): Xaa is any amino acid
MRLNRYLASCGLGSRRAMDTLIASGRVQINGLPLEGPGQPVDPARDTVTLDGRALSLPAEKIVLAFHKPVGVLTTMDDPEGRPTVADYLSDFPFRVFPVGRLDMDSAGLLLFTNDGKLAHRLAHPRYGVEKEYRVLVAGRITPGSIRALEEGVELEEGVTSPARVRIPDARISSSAGRNILHIVLHEGWKREVRRMCAAVGLEVLELTPLRYGSVRLDDLAPGAFRRLDEPEYA

SEQ ID NO: 79894 - protein, 273 aa, Unknown
  Obtained from environmental sample
  DOMAIN (2)...(229): ABC 3 transport family
  misc_feature (1)..(273): Xaa is any amino acid
MIGDGLSHVGFGTLAIAVPLGLSPLKVSIPLVMLAAFLLLRIRESSKMQGDAAIAIISCSSLAIGVIIISLTVGMNTDVCNYMFGSILAIKQGEVYLCVVISAVILFLFIFFYNKIFSVIFDENYAKASGTNIEFYNVLLALLTAVIIVIGMRIMGAMLISSLIIFPALTSMRLLKTFKSVVICSAFLSVICFFTGIVISFAYNVPTGASIVAVNLISFLVFCLISFFKRKKSYYENFHFASFKAFALLPPRNGASESQILLPSQKQAFCAPG

SEQ ID NO: 79895 - protein, 272 aa, Unknown
  Obtained from environmental sample
  DOMAIN (32)...(272): FHIPEP family
  misc_feature (1)..(272): Xaa is any amino acid
MADARQAQAGGGLLKPRFGNINDLFIGVGVIVVIVMMIIPLPTFLLDALIALNVIFSLLVLLIVLYSEKPTEFSLFPTVLLITTVFGLALNVSSTRLILSKGEKFNGRMIRAFSDFVVGGSTGNDGIVIGFIIFIIIIAVQVIVITKGATRISEVAARFTLDGMPVRYMAIDTEYSSGSITEEEAQRRKAEIQKESQFYGSMDGASKFISGNVKIGVFIVAIDVIGGIIIGSVLRDEPIANAIPNYIRFCIGDGLVSQLPLGRCCTWGGGNA

SEQ ID NO: 79896 - protein, 114 aa, Unknown
  Obtained from environmental sample
  DOMAIN (5)...(114): Rnf-Nqr subunit, membrane protein
  misc_feature (1)..(114): Xaa is any amino acid
MTDSLTGIVQISIAAVLIQNFVLARFLGLCPFFGVSKKLSSATGMGMAVVFVMTVASMITWWINKAILIDMGVEYLRTIVFILVIASLVQLLEMVLQKFTPRAARPSDPGGGGW

SEQ ID NO: 79897 - protein, 225 aa, Unknown
  Obtained from environmental sample
  DOMAIN (11)...(214): 3-beta hydroxysteroid dehydrogenase/isomerase family
  misc_feature (1)..(225): Xaa is any amino acid
MTDFYKGKRVLVTGSTGFKGAWLCRVLAKIGAETVGYALEPPTTPSLFEQIGIARGLYRSALCDIEDFDALSGVMIETKPQIVIHLAAQPLVRASYQNPRRTYATNVMGTVNVLEAVKNSDTVRSFVNVTTDKVYENKEWLWGYREDETLCGGDPYSNSKSCSELVTYSYRKSFFSGANDKRRAAIFTARSGNVIGGGDYAQDRIIPDCVRPPRRQNIAIKNRTP

SEQ ID NO: 79898 - protein, 227 aa, Unknown
  Obtained from environmental sample
  DOMAIN (51)...(192): ATPase family associated with various cellular activities (AAA)
  misc_feature (1)..(227): Xaa is any amino acid
MTTNINTSNDAQTAKDLATAVSAIKSEIGRRVVGQTEVVDDLLACFLAGGHCLLTGVPGLAKTMLVQSLARCLDLGFNRIQFTPDLMPSDITGSEILMEDRASGRREFRFVQGPVFSNIVLADEINRTPPKTQSALLQAMQEQEVTSSGTTHALPRPFWVLATQNPIEQGGTYPLPEAQQDRFMFSIEVGLPRNGPPELLDRPANAGPTTCNVGNCGPVGLSREPNN

SEQ ID NO: 79899 - protein, 96 aa, Unknown
  Obtained from environmental sample
  misc_feature (1)..(96): Xaa is any amino acid
ISDTRFRPPRGSLAPAPLNQRQADALGYQYALLFKVLEQYARYIDHVIIWGIAGWSWQDSYVVFNEKRQANQGYYGIMDPDRFIKGHSYLDSFFSP

SEQ ID NO: 79900 - protein, 99 aa, Unknown
  Obtained from environmental sample
  DOMAIN (3)...(88): Plasmid stabilisation system protein
  misc_feature (1)..(99): Xaa is any amino acid
VEIQFIPEAEKDYKSLDGSIKKLVNEKIDNLRNDAYIGEELGNKNNIDLTGFYKIYVAKKKYRIIYRIVKDVIEIIEIWGIGKRDKMEIIKLGRICPWG

SEQ ID NO: 79901 - protein, 91 aa, Unknown
  Obtained from environmental sample
  misc_feature (1)..(91): Xaa is any amino acid
MDKNVIYSIKSLYRESMNIIGYTFGSGEHSCCVVGALRGNEIQQMAICAQLIDTLKRLEEKRMHSKWQKHNDNSRVQITIPEIARDHGGKK

SEQ ID NO: 79902 - protein, 325 aa, Unknown
  Obtained from environmental sample
  DOMAIN (36)...(172): ATPase family associated with various cellular activities (AAA)
  misc_feature (1)..(325): Xaa is any amino acid
ILDPPKDSIGRESPRNHPPSEEKFLRELHVSQGSIICLVGPPGVGKTSVGRSIARALGKQFFRFSVGGMRDEAEIKGHRRTYIGAMPGKIIQGLKIVKTKDPVFMIDEIDKMGASYQGDPASALLEVLDPEQNSAFRDHYLDLPFDISHVFFIVTANTLDTIPQPLVDRMEIIQLPGYIDTEKLEIAKRYLVPKSLEKNGLKKNQVKYTKDSLLHIANAYAREAGVRNFEKNLDKIHRKLAMQIVESEEAGNNAVVSTDTVSPDAAPKEARNIQFTIDKKLIEKHLGKPLFPESGIKTAERPGMSVGLAWTSMGGDTLVIEATSV

SEQ ID NO: 79903 - protein, 129 aa, Unknown
  Obtained from environmental sample
  DOMAIN (30)...(128): Respiratory-chain NADH dehydrogenase 51 Kd subunit
  misc_feature (1)..(129): Xaa is any amino acid
MANTNKQFRVVLRNCGVIDPERIDEYIARDGYIGLEKVLFEWTPDQIIEEMKKSGLRGRGGAGFPTWLTWDLARKAVGDQKFVICNADEGDPGAYMDRSTKEGDPASVIEGMDNRGVRAIRFPFGEFGH

SEQ ID NO: 79904 - protein, 309 aa, Unknown
  Obtained from environmental sample
  DOMAIN (2)...(262): Aldo/keto reductase family
  misc_feature (1)..(309): Xaa is any amino acid
DEKTIFDEEKSIALSHRAVEIGVNYFDTAPFYCDKLSEIILGKALKGGKREKVFLSTKNPIENASGDDYEKRLETSLKKMDTSYIDFYHFWGISLNSFINQVKAKDGPLDRAIKLKAQGVIRHISFSFHDGSAGAKEGDNLVEVLKMGEGILETVLCQYNLMDRNKEKGIALAHDMGMGTVVMGPVGGGRLGKPSKAILDLLPGKFTSSAELALRFVLANNNVNIALSGVSSIEQLEENARVADNIAPLSDAELAQIETMMKENERLAGLYCTGCKYCMPCPEGIGIPDIFTIMNITGLVPICHAGKNG

SEQ ID NO: 79905 - protein, 300 aa, Unknown
  Obtained from environmental sample
  DOMAIN (8)...(213): DNA methylase
  misc_feature (1)..(300): Xaa is any amino acid
MQLENVLYRPNNTKVDGVDDEWDKFDSFNEYDDFCIAWLKECRRILKDTGTIWVIGSYHNIFRVGNIMLNLGYWILNDVTWYKTNPMPNFMGTRFTNATETLLWCSKRKESKKYTFNHKTMKKYNGDKQMTSVWQIGLCIGEERLKGEDGKKAHSTQKPEELLKRVILSSTKQGDVVLDPFFGTGTTGAVAQKLKRNYIGIERESEYIKLAEKRIAHIKGYFEEADWVEEEKEKQIRVPFETLVKEKFIQVGGPLHTKKTYSATAFVLSDGSVAYHYTKGSIHRNGAVIHRLNRVTAGNF

SEQ ID NO: 79906 - protein, 151 aa, Unknown
  Obtained from environmental sample
  DOMAIN (1)...(141): NADH-ubiquinone/plastoquinone oxidoreductase chain 6
  misc_feature (1)..(151): Xaa is any amino acid
MGGMALVLNMLSLAGIYTFVHSIFLGVLQFLVYAGAVMMLIVFVIMVLNGARETMLPRMDRLGASSVFAVLCGGLLLLSAVFKANLQENPEAVTGSVAMISEHLCDTSYRISMNMPGGYFILFEIVGFILLSAMVGAVFLVKRKKLTGKDE

SEQ ID NO: 79907 - protein, 79 aa, Unknown
  Obtained from environmental sample
  misc_feature (1)..(79): Xaa is any amino acid
MTPTTIAAGVAHLQALREDGCIWSWGQKEDGLFGNGSNINWNAPAQVGKDSDWTAVSAGDSHAMAIKADGSLGHGASAI

SEQ ID NO: 79908 - protein, 98 aa, Unknown
  Obtained from environmental sample
  misc_feature (1)..(98): Xaa is any amino acid
MKEQGPESRQILEGIGNVNEITRQVKNGSNKMLEGAKEVIQESNNLEKVTQEIASGMNEMASGADQINVAVNHVNEISAKNREGIDTLTKEVSRFKVE

SEQ ID NO: 79909 - protein, 117 aa, Unknown
  Obtained from environmental sample
  misc_feature (1)..(117): Xaa is any amino acid
MVKVKAAEKRQYIGKDIQDVMDLPDLIDIQLNSYERFLQREKIKKGEKPAVQGLQEVFDTTFPIKSPNEDMRLEFEYYTFDEDNIKVTELECKQKGLTFAVPAKALVPILYMGGGLG

SEQ ID NO: 79910 - protein, 93 aa, Unknown
  Obtained from environmental sample
  misc_feature (1)..(93): Xaa is any amino acid
MKRGKKYKESAKKYNPVNNYELVEALTLVKSMAYAKFDETVDISVKLNLKKSQSVRDTVVLPHQFRGEKKVLVFCKPEKRKGSPGSRSGVCRR

SEQ ID NO: 79911 - protein, 109 aa, Unknown
  Obtained from environmental sample
  misc_feature (1)..(109): Xaa is any amino acid
MRSIPESIIESARIDGYGDFYIFTRIILPLCLPVLATIGLFVAVGAWNAWFDTMIYNSSNVKLHTLQYKLMEYLPFSQSHGKVSPQMRVAMGIGRPRAAAGGSSMGNSP

SEQ ID NO: 79912 - protein, 319 aa, Unknown
  Obtained from environmental sample
  DOMAIN (15)...(263): Bacterial export proteins, family 1
  misc_feature (1)..(319): Xaa is any amino acid
MMRGSQARTAPLLSSEAVPQVAKIALAGFATFAVLPNAGVFAVELSAAGAAGVRGVGAVNLPGAGALSDLRYEPFSFRFLLLLVGEGIIGIIIGFYLTLIFATFSTAGQFFSLQMGLGASETFDPLAQIENPLMGQYFNLVSMLVFLFVGGFRQLFLGGFWRSVQSLNIAMLVEGRDHVIGMMASGLARMFLDAMVISLPILGTLFLTSLATGLISKAAPQINILSEGFPIAILTAYLLLFATLPFLLETFSEVINAGFANIQRLYTMIGQQIGGRIIDIRNEELRIRNKELTSHSLFSLLIPHSSLICSGSPNAPNKK

SEQ ID NO: 79913 - protein, 248 aa, Unknown
  Obtained from environmental sample
  DOMAIN (10)...(212): CobQ/CobB/MinD/ParA nucleotide binding domain
  misc_feature (1)..(248): Xaa is any amino acid
MSLKDIKKIIAIASGKGGVGKSTVAANLAMATALEGKSVGILDADLYGPSMGLMFGLNSDVVPAFSHGVKVASLAQLFPTEKANAWRGPRAAALINNLLNFVKWGNLDVLFIDMPPGTGDVQLSIIQGCKLSGAIMVSTPQKVALADCVKGIDLFKELNVPILGLIENMSSFICNKCEKEHFIFGKDGAKKLAERMEIPFLGQIPIEASLMEGGENGLPAVLANPNCTGARYWRNSGEVFRDNGGQTP

SEQ ID NO: 79914 - protein, 317 aa, Unknown
  Obtained from environmental sample
  DOMAIN (1)...(309): Glycosyl Hydrolase Family 88
  misc_feature (1)..(317): Xaa is any amino acid
GFFSPVIDETTLCTGKRRGRRKRLDEALEGFDNLHHDVGFMWLHTAAADYRLSGSADSRRRALHAANILAGRYNPVGKFIRAWNGEGQAGWIIIDTIMNLPLLYWASKETGDPRYSQIAQCHADTAMNLIARPDGSCNHIAVLSPETGQLLETPAGQGYAPGSSWSRGQSWAVYGFALSFRHSAQMKYLDAAKRTAHYVISNLALNNWLPLVDFRSPPQPLKYDSTAAMITACGLLEIAEHAGEHERALYVGSALNILKTCEKTFANWETETDGVIGGGTAAYHGSPKDTDVHIIYGDYFFYEAILRLLEKDFLTGK

SEQ ID NO: 79915 - protein, 80 aa, Unknown
  Obtained from environmental sample
  misc_feature (1)..(80): Xaa is any amino acid
MAITKEVLDELLKECKGPDDFYGPEGLVKQLNKALIERMMQAELTEQIGYEKSEAGEKPSGNRRNGKSSKTSAIIPGAKP

SEQ ID NO: 79916 - protein, 330 aa, Unknown
  Obtained from environmental sample
  misc_feature (1)..(330): Xaa is any amino acid
FPFIASNVRDSLRPGEAAIEFVSFRVYDKKWTDTVQYAALVLRPGMDAPAWVPLCEETQLKNILNEVEGKGYNDDYKTKLIYDTNGDKLYSMVWKPLEQELENVTTIYYSPSGLFHKLAFGALPTGDDEEVDFENFDPEDFEYEGVNRLADKYDLNLVSSTREVVRLSRGQTPAAPSSAVLYGNLDYDADAETMRKAAQPYRNNNGSASNLPEWLVFGWGRGWNILPTTREEVLAIQGYLNRKNVPTTLYLGSAGNEESFKALDGRKTGLIHLATNSFFYADVERKHEEREQARRNIRSAENPMLHSGNILAGANNAWTNRRVEAWKTAS

SEQ ID NO: 79917 - protein, 301 aa, Unknown
  Obtained from environmental sample
  DOMAIN (33)...(219): Pyruvate ferredoxin/flavodoxin oxidoreductase
  misc_feature (1)..(301): Xaa is any amino acid
VGIKDDVSTQSLEIDENFRWEKKLFQTMFYGLGADGTVGANKNSIKIIGEYTENYTQGYFVYDSKKSGSGTTSHLRFGSEPIHAPYLIEPNQADFIACHHTPHLHQVNMLRYAKPGAVFLINTQHSADTAWDTFPKEVQKQIIDKKLKVFVIDGYKVAHDTGMGRRINTIMQTCFFAISGILPKEEAISHIKDSIKKSYLKKGEEVVKKNWEAVDHTLAHLSEVKVPDSVSATSGFRPALIGTNDEFLNSVTAKIIEGYGDELPVSKIPADGTYPTATSKYEKRDLAWKFLLEYRSLAITE

SEQ ID NO: 79918 - protein, 312 aa, Unknown
  Obtained from environmental sample
  misc_feature (1)..(312): Xaa is any amino acid
LIRSAERRWPAAVGGVLVGFMTKEEAQQAVADMIAVLYPPNMHQTIMNSFSLAPNANDPAYWENIRKGLAMQQASAATQGAPQGDWRVEPSDGGVAAGGGVVITEYKGKDTAVQIPSQIDGKPVVGIGEKVFSRKGISSVTIPDGVASIGAKAFADNQLSSVTIPDSVTAIGEEAFVRSQLSSVNIGGGVTTIGKAAFALNQLSEMKIPFSVASIGAEAFRKNQLASLSLGGGVVTIGDQAFAGNQLTEITIPNSVKTIGRDAFADNQLAKVVIMQPDIANVAIAGSSPFWKAEVLTEEAYAFERDEGANYT

SEQ ID NO: 79919 - protein, 99 aa, Unknown
  Obtained from environmental sample
  misc_feature (1)..(99): Xaa is any amino acid
MGLDMQTRKKICARIYRRYQKAGKKDKAKILDEYAPMLEYNRDYLAHLLADWGKTVYAPCDGKPVKYIAKPPLKARDKAPKSKKQGGLKSTIQPSSRFF

SEQ ID NO: 79920 - protein, 68 aa, Unknown
  Obtained from environmental sample
  DOMAIN (35)...(57): MORN repeat
  misc_feature (1)..(68): Xaa is any amino acid
MAYLKETLEDWSFFEGNLEDGTGNGKITYTDGTVYEGDFVNGEYHGKGKLTEANRTVYEGDLETARPI

SEQ ID NO: 79921 - protein, 323 aa, Unknown
  Obtained from environmental sample
  misc_feature (1)..(323): Xaa is any amino acid
MMAERYILLRAQCTSGSATSVPIVGNALIKVNIQPPAPVWGVTAGPGSSYTFPILTPGYTQQPYRTVTLSNSGNQPTGNLTVSLTGTNSASFEFESAVNTVSSIAVGQSATIMVRPKTGLAAGNHNAAINVSGGNNISASYPISVTVSNQRPPSYIAVTSDVHWDRSTSSTTSGQTQIFESWMTKLKTHYPNNLDYMLFGGDNGSAYTTGVTHWNNIAELIPIADSFVTSGFIRNSNIFITGNHEYQNTAGGALLDNLDKPLTLSGSSFTTVRSVAERLNYNKHFQAVPNANDTTTDLCIYAFGTRPKKTPVSSFPGFPAGGH

SEQ ID NO: 79922 - protein, 128 aa, Unknown
  Obtained from environmental sample
  DOMAIN (67)...(128): MoeZ/MoeB domain
  misc_feature (1)..(128): Xaa is any amino acid
LVNVVTHTEMLQAKNALKLFANYDIMPTEQIFSDALPVNDACVFSGKINVYGSVFQFDGQATVFGAKDGPCYRCLYPSPPPPGLVPSCAEGGVMGVLPGIIGTIQAAETIKLIVGGSADLIHGWGFGG

SEQ ID NO: 79923 - protein, 194 aa, Unknown
  Obtained from environmental sample
  DOMAIN (6)...(29): 4Fe-4S binding domain
  misc_feature (1)..(194): Xaa is any amino acid
MAQEKVLINPDLCIGCGNCISVCHHEARLLVDDTASFFSDLKRGDKIIAVVAPAVASVFPGEHLTLNGYLTSLGVEAFFDVSLGAELTVVSYLTHIKLKNPRMVIAQPCPAIVTFIEILPPWNKYLTFEPGESPMVSTRKNEPGRIFPLTETQKIARLFPPGTPTPGNFPKTGNGEKTRLKGPPRKKFFRGQNF

SEQ ID NO: 79924 - protein, 198 aa, Unknown
  Obtained from environmental sample
  DOMAIN (1)...(152): Adenylate and Guanylate cyclase catalytic domain
  misc_feature (1)..(198): Xaa is any amino acid
MNRNGIVDKYIGDAIMAFWGAPVKHDDDALQAVLSGLDMMEAVKVFNENQLKLGKPEFHIGIGINYGTVTVGNIGSERKMDYTVIGDMVNLASRMEGLNKTYHSEILISETLHDALNKSGESGEASQIFYRLLDTVAVKGKTRGIKIYTAKKAPGETEAKAWNYHNKGMELYYKRDFTAAAKFSRLPITCPRSCHQPG

SEQ ID NO: 79925 - protein, 57 aa, Unknown
  Obtained from environmental sample
  misc_feature (1)..(57): Xaa is any amino acid
MQGKNAPKGKNMGHAGAIVAADGTGSAENKEKALRAAGVHIAESTTHIVEILKSLNL

SEQ ID NO: 79926 - protein, 326 aa, Unknown
  Obtained from environmental sample
  misc_feature (1)..(326): Xaa is any amino acid
KPGEKLERLEPVWHLEDTGEVPFVFDIGLFHGATKKFYDDAEAEVKWSEELHKSREGVYDYGLPNIKPNQGIGIVAAAFGCEQTVNDEADPWIKAIIREENADDVHKLEIPDPEKNAVFQKAWKRIESLQSVSSLPLRMLNVPSPLVTASMIWDYTSFIEALLIFPDEVHVLMEKVTEATILYIKEQFRRIKNLFSVGHESICPVPRFAGVRLSDDTAALLSPALYREFGVKYNNKIAKEFGGVMIHSCGDVQNVVSAMMEIEGLKGLDFTIPQVMNWKAVKDAAAGKTLLCLRHRYWDHPQDASVDLLEYSKSLVPILSLGGKMP

SEQ ID NO: 79927 - protein, 250 aa, Unknown
  Obtained from environmental sample
  misc_feature (1)..(250): Xaa is any amino acid
LRYAAEYSYADGWPYGIAPELLSPGTAAILSKILKNDDNGPVERDSLFSVIQKDINAFDIETEISSVDLRCHRLRLCADSKRNLLLLRRFTQNGVPDTAAIERIIAEKPEILRTLPAFFPVQVYGGCTQACAFCPWPKTGNNTANSSITERRDYMEAGRFDSLLEKIVSFSGDAVIDLSLWGELSLHPQKMELIEMVLRRPELDLIIETSGIGWKDNELDKCAALAQTAWGEGFPSRKNKFGLSWIGSLD

SEQ ID NO: 79928 - protein, 284 aa, Unknown
  Obtained from environmental sample
  misc_feature (1)..(284): Xaa is any amino acid
VVPHAAFLEIVFLGNYLRIDPSIKGLLFLALLSFGMLVGTFIYVAGDGMVSRTLLAHNFTGYPSDCRERRQEAKAWIIPMAAVMVTLLFTCSVTMLGIHQAGGTLDALKGTTVSSMLIPLIVFFVCILCMALTLKKNTGMSYNSVIAQLENLSSEQKDLTKRISICSVDELGTIAGMVNAFCEHLSGGIGTIKYKINGLNHTSFELSANMGKTSTAVQQITANLDNMENIMIKQESGAEEAGKAVTDIKINIDNLKKMIEEQTDSVTDRFRHEEMTSCQSVIDF

SEQ ID NO: 79929 - protein, 312 aa, Unknown
  Obtained from environmental sample
  misc_feature (1)..(312): Xaa is any amino acid
VNLKASITLFIILLIFSGSPVKIQAQNAFPRIEPDAKALDYYRLGAQSGYSWTELAEISLWASGDASLSGMDKIKATVKAVNEAIGSDLSEKEKADFILNYMHKNILKNYSLYQTRLDTLLSNGRYNCVSSAVFYTILCKSAGINTSGVMTKDHAFAMVHINGQNFDVETTNPYGFDPGNRKEFHDSSGKTTGFAYVPPQNYRDRQTITQIELVSLILNNRVGELERTNNFSASVPIAVDRAALLLGNSYNNTADVSQSDFLFTDPRKDIMDRLFNYGASLLEATQKKTVFAGAVFAFLCYPTQTDGRSFFQ

SEQ ID NO: 79930 - protein, 184 aa, Unknown
  Obtained from environmental sample
  misc_feature (1)..(184): Xaa is any amino acid
MHGVKFFSGDAIPLEMHKVRMVQRLHLKPIEERVQNMQGAGFNTFLLRNRDVFLDMLSDSGVNAMSENQYAAMMQADDSYAGSETFYRLEKALQDVFQSKYFLPAHHGRACENIIAQTFVKSGSVALMNFHFTTAKAHITLNGRSVEDLINDDGLKVTSSKPFKGDIDIPQPHQGHTQAWTRKN

SEQ ID NO: 79931 - protein, 128 aa, Unknown
  Obtained from environmental sample
  misc_feature (1)..(128): Xaa is any amino acid
VVWQVQSIEDYLHVLRPYIRQAKQDRRRLVYFRFGNHEPLMADNEPSVVYQLDKSEGFELFALKVHDIIDREGLKAFYVFDCLSDLLTSWSSDMMVGNFFRITCPFLFYLDTLAYFGNIRGLPPPWKQ

SEQ ID NO: 79932 - protein, 274 aa, Unknown
  Obtained from environmental sample
  DOMAIN (6)...(93): GAD domain
  misc_feature (1)..(274): Xaa is any amino acid
GFTPGYREGGRAIPVRDVSGRPRAFYDRMVEFAQSVGSQGLAYLIWNEEGAKGPIAKFLDANSMAALTEALGAKPGDAAFFVCNDESAANKIAGEIRVKLGKELDIVEKGAFRFCWITYFPMFEYNEELKKIDFSHNPFSMPQGGLAALTEKDPLEILAYQYDIVCNGIELSSGAIRNHRPDIMYKAFEIAGYGKEEVDARFGAMINALSYGAPPHGGIAPGVDRIIMLLADEPNIREVIAFPMNQKAQDLMMKAPAEPTEKQLKELHIRVVDI

SEQ ID NO: 79933 - protein, 320 aa, Unknown
  Obtained from environmental sample
  misc_feature (1)..(320): Xaa is any amino acid
EDVSRAIVKAAKELTPKITFIINFPNWYESYQETGYNPEKQKDIFDGIYTETETRNPKYEQQHLQRYLSYSIVRYLENVSPLRNGGGWIDPFGLSDDISGWIEQAEFTLFAKAREMMLFNFFAIVNSGFLPPLTPRFDRLNSIIKQCGKPKGVRLYEPYNADGEDQVVNYLGMTGIPFEPSPDFGSADSAVFLPASAAKDEQIMQKLEEFVRSGNTAIITAGFLKECIDRGLKDMTSVRPTGRTVRGNEYWVEPYGERRLVSGSAEAIQIEALDYKTNASWCEIAMMTSYNSFPLLTLDFYGKGNLYISTLGRSDHRGAK

SEQ ID NO: 79934 - protein, 282 aa, Unknown
  Obtained from environmental sample
  DOMAIN (1)...(231): Glycosyl hydrolase family 10
  misc_feature (1)..(282): Xaa is any amino acid
VVPEVLKHRNLKKTAGGATPRCWGFKGVIDKWDVINEVVIMPIFDKYDNAVTRICKELGRVRMVKEVFAAAKETNPAASLLINDFDLSTKYEILIDGCLQAGVPIDAIGLQTHQHQGYMGLERLEEILDRYSHFGLPLHFTENTILSGHLMPQDIVDLNDYQIPEWPSTPEGEERQARELVEMYERLFSHPSVEAITNWDAKDGYWLGAPSGLLRKDNSPKPAYHALMAKIKGEWWTTETLRSDEKGEIAFEGFRGDYEALVRNKGIPFTLGKSQEQIELRD

SEQ ID NO: 79935 - protein, 212 aa, Unknown
  Obtained from environmental sample
  misc_feature (1)..(212): Xaa is any amino acid
MYADSGSGVTVPPQGDLSKNGHTFDGWNTRSNGTGTNYGVGQSYVATSNVTLYAKWTALSYTVTFNGNGATNAAPTAMSAIYGDSIMLPSMTRTGYTFGGWYENSGGTGTGYIGGSSYTVTKTTILYAKWTVIPYTVTFDGNGATSGVPAAKDTHYGDNITLPSMTRNRIYIRAGGMKTAKVREPDTPLIHLITLQKMLSYTQSGRLLKLGL

SEQ ID NO: 79936 - protein, 279 aa, Unknown
  Obtained from environmental sample
  DOMAIN (115)...(235): PAS fold
  misc_feature (1)..(279): Xaa is any amino acid
LEARVAAVADAYDAMTSDRPHRLALSHADAMAEIKRLSGSQFDPRIAGKFIQMVEEGGMDRDSLVAVPNNSMAPTPEFTLYEHRVYGWGPSGDGCAETDRLEDAMASDAFLESIFNNTPALYAIIDEDLKIIFASDSLAAVAGKSPEEMLSCKCFDIFGSGMGMRCFQHECGDAHCIVAKALATGERQQTPMETDACGQKLYFDSFAVPLELDGADGGKIKCCMKIAFDRTREKSAQHAVEGEFRQLVGRVPALADAHAPEASARVREIERKARNFSDY

SEQ ID NO: 79937 - protein, 283 aa, Unknown
  Obtained from environmental sample
  DOMAIN (1)...(282): Receptor family ligand binding region
  misc_feature (1)..(283): Xaa is any amino acid
MQRLVDRDKVNVVLGSWGSSLSMSGGEVSRGKVPAIGLSCTNPLVTAGNDWYFRVCFIDPFQGTVMASYAFNDLKARTAVIVQEISNDYSVGLAKFFVDTFVQLTGNPNAILATVNYNTGDQDFSAQLTTVRAQNPDVIFAPGNYTESALVIKQARELGINTPIIGGDTWETPEFIDVGGDRVNGSVFSTFFAAEFAGTPQAKTFLEEYTKQYNKEPAAVTALGYDGYLVALDSIKRAGSTDPANIRDAIAKTANFIGATGTTTLDATAMPQERLHQRCGETQ

SEQ ID NO: 79938 - protein, 194 aa, Unknown
  Obtained from environmental sample
  DOMAIN (101)...(172): Bacterial flagellin C-terminus
  misc_feature (1)..(194): Xaa is any amino acid
VLEEVNSLLTRAIELTEQAKTGTISDTNRQALDLEFQNIITSIADIGLNTKFNQQSVFNVPYNPVVSVGDYTPVSIFTGDIATGPNDTLGLNSPTDNIRTVAAATAVRPILYDAIQSVSLIRASIGANQQQLTSVAESLGIQVENFTAAYSQIRDANMADEVINLTKFQILNQSGTSALGQANQAAQLVLQLLR

SEQ ID NO: 79939 - protein, 192 aa, Unknown
  Obtained from environmental sample
  misc_feature (1)..(192): Xaa is any amino acid
TRAGSLSVKGVHIVSSQGQVSVDLKSKSYIYPSLINTHDHLQGNYRPPVGPKAGNYYLTWQPWDNDLKASELFKERSNLSREDLYALSGYKCLFSGVTTVNDHFPQKFNRGILPTLPIRAFLEYGLAHECSSYDLKWGDRIEIEHERAVKNKWAFITHLCEGFDEESMHGVQTLGKLKILDRPLPSCPVDRF

SEQ ID NO: 79940 - protein, 86 aa, Unknown
  Obtained from environmental sample
  misc_feature (1)..(86): Xaa is any amino acid
VNEVLVKVVKNAPRAALPQYETRGAAGMDLRALLDADISIPPLARVKIPTGLKLEIPEGYEGQVRPRSGLAIKKGLPFLFARHDRF

SEQ ID NO: 79941 - protein, 190 aa, Unknown
  Obtained from environmental sample
  misc_feature (1)..(190): Xaa is any amino acid
MKVLFIGGTGTISTAISKWVLEKGWELYLLNRGNRNRELEAANKAGKLIEITCDIRTEDEAAISAKIKKALADCGSKAFDVVADFIAFTPAHVEKDFRIFNGLCKQYFFISSASAYQKPLSSYLITESTPLANPLWQYSRDKIACEDFLMQRYRDCGFPVTIVRPSHTYQEKKRPSGSTWREREAGKSLK

SEQ ID NO: 79942 - protein, 92 aa, Unknown
  Obtained from environmental sample
  misc_feature (1)..(92): Xaa is any amino acid
SAFFEGWFKNSVLKKLPKGYTVIMDNATFHRKKELRKIARGKARLLFLPPYSPDYNPIEKSWANMKRFLRNNPGDFRSVVSGIYNYFGFIES

SEQ ID NO: 79943 - protein, 144 aa, Unknown
  Obtained from environmental sample
  misc_feature (1)..(144): Xaa is any amino acid
MARTKAKAKPVPVESGSKGISETELSQRVAVLKRFKELLKTQRDRFQAYLTALDKQKDVIQSGNTDDLLRHVELEEKIVADIFSIQKVIDPLEEMYQAISVKDPVKGSSKSSAKETGEKRSDQPEGSPLTDLKTESHFTFQKET

SEQ ID NO: 79944 - protein, 297 aa, Unknown
  Obtained from environmental sample
  misc_feature (1)..(297): Xaa is any amino acid
VRISEESKDTLALLSFLVNHRDEVAFRRMVNKPSRGVGLATVERIVEEAAKEEHNGNLAFAAQSLANHLSAKARAGVDAFLKAIKAGKAALSPSQENYDDSEASGPAAENPLAASGTKNFIPPSAGTLRAGVGLSACVINLVNKSGIAEYHLTRDELTGNQRLGNLQEVANAASLYEASEAGLLEFLEHIELDRSIEDASDGGENAVTLITLHNTKGLEFRRVIITGVEQGIFPRQDKSGEELEEERALFYVGATRAMDELFLAPALTGGCSAGLCPWSPPFFLGEINQKGLRNNRL

SEQ ID NO: 79945 - protein, 303 aa, Unknown
  Obtained from environmental sample
  DOMAIN (60)...(297): Penicillin binding protein transpeptidase domain
  misc_feature (1)..(303): Xaa is any amino acid
FSKTDWPRPKRTKALNRYTKTINPVLDLAALTFGIPEIRTLTGQGFANLKTSTEQNVVEGTLISIENDTGYITAIVGGSKYDESNQLIRATQGNLQPGSAFKPLYYSAAIDSRKFTPATVISDLPIVFYNEDGTPYMPLNFLGKWNGSVLVFDALAQSMNVASIRVLDGIGFDAAIDRASSLLGYTDPDDIRRRFPRVYPLGLGIISTSPLKMARAFSIFANLGREVTPIAIRSVEDRNGRIILDIEREVRQEQRRKGNAVQVISPQNAFVMTSMLRKTVGRLGGTPLHPHAGDQNHIQRFQR

SEQ ID NO: 79946 - protein, 63 aa, Unknown
  Obtained from environmental sample
  misc_feature (1)..(63): Xaa is any amino acid
MKRRVRAIAFSGIEQAIISIKGQNVIIDSDVAKIYGVENREVNQAIKNNYDKFPAGLYVETDQ

SEQ ID NO: 79947 - protein, 94 aa, Unknown
  Obtained from environmental sample
  misc_feature (1)..(94): Xaa is any amino acid
MTDRPRYEQAHQIAEEQGIIDQYRVLDGGVLLALDGTWTFSDHCLHVTNKNKTVYYHSMMAVAIVKPSSSIVLPLEPEFIRNEDGSEKQNCERF

SEQ ID NO: 79948 - protein, 120 aa, Unknown
  Obtained from environmental sample
  misc_feature (1)..(120): Xaa is any amino acid
MKRTVFLSLALFALMAVGVYAQTEADFEARKTSDGQSIEIIGYKGKATTVNIPARIQNLPVTMIIIGPKPNITSVTIPSGITRIVDTAFQDAPNLPALPYPTPFPGLEGSAFNGLHQPKK

SEQ ID NO: 79949 - protein, 197 aa, Unknown
  Obtained from environmental sample
  DOMAIN (1)...(184): Penicillin binding protein transpeptidase domain
  misc_feature (1)..(197): Xaa is any amino acid
MIRDSVFAGSSVMCRGVMRYGNRDWHCHLRSGHGRVNLVTALGQSCNIYFMTVGRDYVGAERIVSYARDFGYGEATGIDIPGEFSGFIPTPQWKERRYHEKWVLGDTMNMSIGQGYTLVTPLQMSNLVSMIVNNGKSYKPYILKEVRDPATDSIEKVFFAEILYEKKKYKPPPFNKTVTPKIIRDCSPARGNPTVSR

SEQ ID NO: 79950 - protein, 308 aa, Unknown
  Obtained from environmental sample
  misc_feature (1)..(308): Xaa is any amino acid
GNRESGEGIFNPEDLTVSLNFSLDPDRDSVERRFSLTGNNGKVKGKFLWEGRRVTFVPAAPLEKNNDYNLLLSAEAHDTNGLSMDFAFERKFTTRPGTQRPELISFSPSMYAKIDDLKTEVRLYFSLPVPLSALYDNVSFNPSISGAWRQEEEGRLAIFTPSVPWAKNKRYEMRYSTSFTDNKGMNIGNDFKSIFITGTDKEIPELLQANRMTKDGGLIPLERDVTGFTSAAENYTENKGWEKEDRLFLVFSKPVDSASVKNCVNTEDASSVYMETAAGFNNEFVFYLEHAPVYDSPFVFKINPASKT

SEQ ID NO: 79951 - protein, 131 aa, Unknown
  Obtained from environmental sample
  misc_feature (1)..(131): Xaa is any amino acid
GPTGEGSPLDPQPSPTGEGSPLDPQPSPTGEGSPLDPQPSPTGEGSPLDPSENKVYQNIRTVLVFPNQDTMPKGGFGNLIALPLQKNARDKNHSLFLDGDMTPYIDQWAFLASIKRLDMNNSSYTYLWYGM

SEQ ID NO: 79952 - protein, 265 aa, Unknown
  Obtained from environmental sample
  DOMAIN (168)...(258): Type III restriction enzyme, res subunit
  misc_feature (1)..(265): Xaa is any amino acid
PAGFSRIIARHIAGAIHTYRITPLSLWNAASAGLAAADIVKILAEYSRYQIPSGIIESFSDTISRYGKIKMIAAADFAATGGDAAADSGYELSLKIEDPAVSAEIAAIKSLEKYVIKTAQGFALRLVDRGSVKRELIKQGWPVQDQAPLVKGDDLDIILRNESLSGRPFAPRDYQIEAARAVLGDGGPGSGYGVVALPCGSGKTIVGMVIMSLLKTNTLILTTNVAAVHQWNEELLDKNQISPRTECRKFRRLKILGRPVTLPPY

SEQ ID NO: 79953 - protein, 124 aa, Unknown
  Obtained from environmental sample
  DOMAIN (8)...(114): Thiamin pyrophosphokinase, catalytic domain
  misc_feature (1)..(124): Xaa is any amino acid
LLGIVFTGGESPSSEIIRRLLNGKEILVIAADSGLITAEESGFKPAFVIGDMDSLDDESRLSAYPPERVIRYPHDKDYTDTELAFSLALEKGLRGHLADRRRRRQDRPSFAIASCRSDPWGGET

SEQ ID NO: 79954 - protein, 115 aa, Unknown
  Obtained from environmental sample
  misc_feature (1)..(115): Xaa is any amino acid
MPNRNPCLANLKAGYLFPEIAKRRREYAAAHPEVKIISLGVGNTTEPVLPYIDAGLVEGARQLGTVKGYSGYQDEGLLSLREKISMVFYGGQFSADEIFISDGAKCTRANLSMAK

SEQ ID NO: 79955 - protein, 58 aa, Unknown
  Obtained from environmental sample
  misc_feature (1)..(58): Xaa is any amino acid
MVLVSRMHWSFKARNWAEFPVAQKWFAIGEAGAHIKYLIMNGSIEYENVSGIFNFHCR

SEQ ID NO: 79956 - protein, 247 aa, Unknown
  Obtained from environmental sample
  DOMAIN (44)...(158): Response regulator receiver domain
  misc_feature (1)..(247): Xaa is any amino acid
VIGGKIWIESEPGKGSTFIFKIQAKRGAEEKRGLLAPDINLKNVRILIVDDDPDILAYFLDITQRYGALCETAASGEEALKLIDKNGGYHIYFIDWKMPGMDGIELAHEIKARVSENSIVTMISAGEWSTISEDAKAAGVDKFLPKPLFPSAIAEIIDECLGDDKQQAEETQFTDIDGIFEGRRILLAEDVDINREIVQALLEPTKLDIDCAENGLECRPGMFSEAPDKYDMIVMSARPILYMGGGL

SEQ ID NO: 79957 - protein, 196 aa, Unknown
  Obtained from environmental sample
  DOMAIN (178)...(196): SEC-C motif
  misc_feature (1)..(196): Xaa is any amino acid
SEAKFGYQLTLDQSEARNPESLEKKIIADLEKDMNDKEALIGPDYLNMIIRDSYLHAIDNKWLDHLENMEALREAVYLRHYAQKNPLTEYKVEGFQIFDTMVDDIRLEIASRLHLVRINVAPAGDGAPRRGGRTITSQSASHSSMASFGAGAQDRSPMGAASRPEGATVVRSQPKVGRNDPCPCGSGRKFKHCHGK

SEQ ID NO: 79958 - protein, 283 aa, Unknown
  Obtained from environmental sample
  misc_feature (1)..(283): Xaa is any amino acid
MNTNNYRAKFLDAAITQATYQGKIWGVPVNNVAVGTIFYNKEIFNKYRLAVPATISELETVCDTLKKNNIFPFALANKTQWTGSMYYMCLATRRGGIQPFIKAVDGSGTFLDPAFIYAGEKIQEWVKKGYFITGFNGLDWDAGQARATIYRGEAAMVLMGSWFNMQALNESPIFHAKMGFFKFPRDEQGSGNPDTAFGTIGDNFYHVSASSKNQAKAFELITCLIDDVAVKDAIDDGRIPPVKGVKLTDPIFIELFNRINRLLIYSSGMINRCHLKCPRVIKF

SEQ ID NO: 79959 - protein, 217 aa, Unknown
  Obtained from environmental sample
  DOMAIN (1)...(192): Gamma-glutamyltranspeptidase
  misc_feature (1)..(217): Xaa is any amino acid
MAQPEYGKKRASEIGEKACMPGPLRPPKEGTVYLATADGDGNMVSYIQSNYMGFGSGVVIRGTGIALQNRGVDFSLDPLAPNALAPGKKSYHTIIPGFLTKDGKAVGPFGVMGGYMQPQGHVQVITNMLDFGLNPQQALDAPRWQWIEGRKIQVEPGFNSEIARALANRGARGKRFPSIHQLRQGAMYRPPGKRCPLWVLQKDALIGNNTCVVNKKK

SEQ ID NO: 79960 - protein, 217 aa, Unknown
  Obtained from environmental sample
  DOMAIN (13)...(176): Uncharacterized protein family UPF0007
  misc_feature (1)..(217): Xaa is any amino acid
MSLSNYIGDNDSIAAVICAAGSSARMGGAKKEYLPLPGASVTVLGAAVSAFTVIPEIRIIVIVVPEEPGTGETAARNALSSAGIAQPLRFVTGGSTRRASVFNALRALAADAPNYVLIHDGARPWISPALIERGIKGVKQYRAVIPLLPPEGNPQGNGICPLTASFGGSPIFYQTTGKKGGFIETAPKPPRRFPFPGNLSPAQEKRAAGKGGAGNLT

SEQ ID NO: 79961 - protein, 177 aa, Unknown
  Obtained from environmental sample
  DOMAIN (4)...(174): haloacid dehalogenase-like hydrolase
  misc_feature (1)..(177): Xaa is any amino acid
MKAFKAYIFDLDGTLLDSMGVWGQVDSDFLAKRGIAVPPDYMDAISSMTFHETAAYTIKRFSLTDNIEDLMREWNDMAAYAYAHTVRMKPHAKEFLITLRDSGAKLAIATSLSAELCAPVLRNNGIDNFFDVICRTDDVGYGKSHPDVFLLTAQKIGVCHRTACIDSADLIHGGGNG

SEQ ID NO: 79962 - protein, 86 aa, Unknown
  Obtained from environmental sample
  misc_feature (1)..(86): Xaa is any amino acid
LEWARCSQQIPKKTQIVQLWMNCGVYAKKSNFPLVAFGGINKTNIPQFAGTGIDGIAVVSAIVSQEDASEAARELITLIKNTIGKK

SEQ ID NO: 79963 - protein, 289 aa, Unknown
  Obtained from environmental sample
  misc_feature (1)..(289): Xaa is any amino acid
MMAELVRSCRLVPRFCHRAYEKGVIFSNLTPFSHDFYRKFGYEIACNRNKISIWAGDLSETKSYGEFIHILPGDDTSLLAEVHSAYIENINHGIHRDYWPDNRAWKRFTSDDPCATGIYIYLWKDETGKARSYIKYQDLFEDGEHNMSVLELAFIDKKGLYGALGIVGGLSAQFKHFKWLMPTFIDPFDFIGDAWSIEQEIRPRDMTRVVNVKSALELMRRPCGEGEYIIEVEDKNISANSGKIPCTIRRGRGKVSMTKKDAELSCHIPTFNQLVPGYRNLENPALSRG

SEQ ID NO: 79964 - protein, 299 aa, Unknown
  Obtained from environmental sample
  DOMAIN (103)...(299): Na+-transporting methylmalonyl-CoA/oxaloacetate decarboxylase, beta subunit
  misc_feature (1)..(299): Xaa is any amino acid
MLTRKKDPVFIVKVCMLMLMGAFVFSFVSTAFNARAQAQSVASSEDLPSFRNMNGIIPNSSNIPPVKFLTFLTNIGRTTGIYAFVTHITDSETPAGFPITVYGWQELIMVLVGFLVIYLGAAKGFEPLLLVPIGFGVVFANIPNAGMGSPGVWNEAEHIFEHQGFLSVIYNAGVGNEFFPLLIFVGIGAMTDFGPLIANPKTALLGAAAQFGVFATLFFISVANFLPHVAFNLKEACSVAIIGGADGPTTIYIAAKLAPHLLATVAVAAYSYMALVPLIQPPIMRALTQNRLCRSVMAK

SEQ ID NO: 79965 - protein, 299 aa, Unknown
  Obtained from environmental sample
  DOMAIN (180)...(299): Domain of unknown function (DUF323)
  misc_feature (1)..(299): Xaa is any amino acid
VFTHTDLVPDPIAFTADTGHINKTYGDVFTNAIAAGYLGSGVITYSSSDKTVATVDGSGQVTIHKVGSTVISAEKAADTVYAPSQKDYTLAVEPRPVTITGLSVADKQYDGTTTATVTGTAVIDGLIAGDDVSVVVGTAEFADALAGNGKTVVFSGWSLTGADAENYSLSAKPTATANIEFLSMVQIPAGTFMMGSPASEPNRQSNETQHSVTLTKSFYMGKYQVTQAQYQAVMGTGEDRTTTTYGKGDNYPVYYVNWYDAIVFCNKLSMMEGLNPVYSIGGSTDPAVWINNTEKHTNS

SEQ ID NO: 79966 - protein, 192 aa, Unknown
  Obtained from environmental sample
  misc_feature (1)..(192): Xaa is any amino acid
GGVPHYRRAEPDLGLGRWLPAFMFFWGLMSLASFGFPGTNGFVGEFLVIVAAFGVTTEIGGINVPILGLLTAPGAMLAAAYALKVTLKLAWGQPSSAKDKGWPDLRGREWAYLLLPAVFVIYLGLAPGGVLSTIDPTIAATVKTFQSSGRPRLKRLGFSVPSGLENSPEPERPHPPPGKLKREPKEPWVKFF

SEQ ID NO: 79967 - protein, 57 aa, Unknown
  Obtained from environmental sample
  misc_feature (1)..(57): Xaa is any amino acid
MTRKGKLIERFLTKPADFTFDELVTLLRQVGYTQTRSGQTSGSRVAFPTTKAITSAA

SEQ ID NO: 79968 - protein, 214 aa, Unknown
  Obtained from environmental sample
  DOMAIN (1)...(196): Nucleotidyl transferase
  misc_feature (1)..(214): Xaa is any amino acid
MSLERALRVVPENDGRVIVVSGKAHMPFVITACSSLSKADKKRLVLIPEPEAKNTAPAIACAIAYAGITGGRDRTMLVLTSDHIIKPLDVFLKNSGTAAQYAEQDKLVVFGISPSGPETGYGYIEAEPGLAGDVYAVAAFHEKPDRKTAEKFLASKNISGIRVCFASAVNFWRKNTAVWRRSLSAPLKNFKLLIKKPILKQKVCALLKTLGRPK

SEQ ID NO: 79969 - protein, 307 aa, Unknown
  Obtained from environmental sample
  DOMAIN (46)...(111): His Kinase A (phosphoacceptor) domain
  misc_feature (1)..(307): Xaa is any amino acid
ELFLQKSYPPWQALLIVLGIVFGSVLSFVFIRVDAAKTNSDIESKRKSAFLANMSHEIRTPMNAIIGMITLGKSAQDAERKDYCFTKIEDASNHLLGVINDILDMSKIEANKFELSNDEFHFEKMLRRVVNVVNFRIDEKRQNFSMHLDQSIPRTLIGDDQRLAQVIANLLGNAIKFTPEQGKIVLATRLASEENGVCTVQISVTDTGIGISPEQQTKLFRSFEQAESSTTRKYGGTGLGLAISKNIVEMMGGKIWIQSEPGKGSTFTFTFQAKRGSGGRTGLLSEDVDLNNVRMWLVPSDTWGGEI

SEQ ID NO: 79970 - protein, 214 aa, Unknown
  Obtained from environmental sample
  DOMAIN (67)...(214): Glycosyl hydrolase family 3 C terminal domain
  misc_feature (1)..(214): Xaa is any amino acid
MPGLGDYNDKKIVEAVKSGAVDESILNKTALRLVELILKSQENLKDNYQYDKAAHHALASKVALESAVLLKNDGDVLPVKQGQSLAVIGAFAKTPRYQGAGSSKIVSNKLDNAYDAFKAAGVSFDYAQGYVGVNPDAALIEEAVKVAKGKDKVVIFAGLPDEYESEGFDRASFDMPPSHNKLIEAVAAVNPNVPLFYCLAHRRLLGHLIMGGGR

SEQ ID NO: 79971 - protein, 159 aa, Unknown
  Obtained from environmental sample
  misc_feature (1)..(159): Xaa is any amino acid
MKNKPPYARILAGGLAVPKEPLSPKNDFVFKLLFGEPTRLNIQKAFLQAVLDLPAEEYAHLVIVDPHLHRESPDDKLGVLDVKIHTTTGQVIDVEIQVKPHRHIWERILFYAARLTTEQMKAGLSYKEIKKAVSIIIVDGDITPKEPEPRAINPGGKKG

SEQ ID NO: 79972 - protein, 66 aa, Unknown
  Obtained from environmental sample
  misc_feature (1)..(66): Xaa is any amino acid
MPIGVINQKTPAVRVIPVRGKKAGEKVHFGGLLGWSKIMPVADYEEAGAFIDLGGRIPGPIHSLKN

SEQ ID NO: 79973 - protein, 237 aa, Unknown
  Obtained from environmental sample
  misc_feature (1)..(237): Xaa is any amino acid
VQQAGGALKFVPDAQKTEAVCLAAVQKDMNVLQNIPDALKTEAVCLAAVQQDGWMLEHVPEALKTEAVCLVAVKNGRYDTALRFVPEAHKTKALCLAAVKRNGYALEYVPYALITEALCLVAVKQAGGALKFVPDALKTEAVCIAAVQQDGWMLEHVPEALKTEALCLIAVQQYGGRLTDVPDALKTKAVCLAAVQQDGWALNYVPEALKTEAVCIAALKQDKDAIKYSAILSLCKP

SEQ ID NO: 79974 - protein, 303 aa, Unknown
  Obtained from environmental sample
  misc_feature (1)..(303): Xaa is any amino acid
GFIKNNFSSSVTLFLELVSLIQIDISNFVPTYNRWLETVKPSIAIDGDMAKKGGIIDGDFYLADLLSTENVSLKDRLLIVLQSNHYKFAKGQDEYGISLFGEIQFKDNQKAYNEFWRKYKRPPLETYWDYIIERRDLLVPQDIRERKGSFFTPQIWVQKSQEYLAKVFGINWQDEYYVWDCAAGTGNLLVGLINKYNIWASTLDNQDVGVMRDRIKNGATLLENHVFQFDFLNDEFDKLPEGLKQIIDDPEKRKKLIVYINPPYAEVSSKNITGKVGVNLSKIHEKYSMLLGTLVPNLMRRLK

SEQ ID NO: 79975 - protein, 262 aa, Unknown
  Obtained from environmental sample
  DOMAIN (2)...(104): Histidine kinase-, DNA gyrase B-, and HSP90-like ATPase
  misc_feature (1)..(262): Xaa is any amino acid
MTNAIKLTPDNGLVQLNAQKVEEKDDKVTIRIEIVNNGIGLSPEQQEKLLSDYDQADLTIAKQSGNTGSGLAISKRNIELMQGKIWIESQGGKGAKFIFTLNMKKGENSAVSATTDGIAEDTSAPLSAIKAFDLQLQGYAILAAEDMDFHREVLSMYLKKTGVAIDYTENGRQAVEKFKANPEKYCLILMDIRMPEMNGDEATKLIRALDFKKAKEIPIIAMTADAFKEDVEQCMSAGMNDHISKPVVPKILYAKLKQHLGV

SEQ ID NO: 79976 - protein, 105 aa, Unknown
  Obtained from environmental sample
  misc_feature (1)..(105): Xaa is any amino acid
VAKKKKKELGGASSEWLTTYSDMVTLMLCFFVALFNPDDVDPTQLQALISNFTNLGLGAQSGGNTLSAGKSADLGNTINSLPAMESGRSLGTSLQRAVILFHPGS

SEQ ID NO: 79977 - protein, 123 aa, Unknown
  Obtained from environmental sample
  misc_feature (1)..(123): Xaa is any amino acid
GIFSPDFIIGVDEIVVFIPWEQKQINAIFDIEIKELSRRLAEQNYSLKVSGAAKRVLVEKGWDQKFGGRHVRRTIQKELESPLSDLILEDCWEEGAVFTVDAKKGSIKIKGKNPVMTEVVFAD

SEQ ID NO: 79978 - protein, 103 aa, Unknown
  Obtained from environmental sample
  DOMAIN (2)...(103): Ribosomal L18p/L5e family
  misc_feature (1)..(103): Xaa is any amino acid
GGAPDYREHGAEAEDDGDAEHRRLSAQIIDDDKGHTLASISTLEKDLRGVKATVAGAAQLGELFGKRLLEKNIKSVVFDRNGYLYHGIVKALADGTRKAGIQF

SEQ ID NO: 79979 - protein, 68 aa, Unknown
  Obtained from environmental sample
  misc_feature (1)..(68): Xaa is any amino acid
MVLTREEEGKIRGQVNGKIRDKLTALCGTLKDELQKTALSLSDVKKWLEGQTIKKVIVVPDKLVNIVI

SEQ ID NO: 79980 - protein, 181 aa, Unknown
  Obtained from environmental sample
  misc_feature (1)..(181): Xaa is any amino acid
MKKRGFNPYLPSWEYIPDGEPYVFNGRVYIYGSHDKFNGHVYCPNDYVCWSAPEDDLSDWRYEGVIYPKTNDPFNKDGHMCLYAPDVTRGPDGRYYLFYVFDKVNVVSVAVCKSPAGKFKIHGYVHYPDGTMLGKREGDQPQFDSGVFTKGDKTYLFSGFCGRDDKTRKRRYGGKPGKRIC

SEQ ID NO: 79981 - protein, 302 aa, Unknown
  Obtained from environmental sample
  misc_feature (1)..(302): Xaa is any amino acid
MIRWPSRIGMGMVPRGEVSFIIAGIGLSSGVLSQSMFGAGVMMVLACAVVSPPIVSALFSSPKKGVRKELYVRQTVSTPIAVPTHELTGLLELRLVQAFRAEGFFIHAISLDGHNSVYHLRKNAIHITLHTGYNSLEFESDKKDVILVKAITHETLLHINNAVAGVKDLIKPEKMLEDMTDSKPRTDSKFKDALSPFCIIPSLKAGSKQEVVEKLVGMLHEHRLINKEHDHALKAVKDRQPSMNTRMQQRLPMPQAQTKPRQKNKPLPERPVPPPGKINFNFPGTGKPPQKKYPILKTGPPR

SEQ ID NO: 79982 - protein, 317 aa, Unknown
  Obtained from environmental sample
  misc_feature (1)..(317): Xaa is any amino acid
MMAERFFFGMIFGDAAYGTILCLIAIIFILKTSKKGTPLIFKFLLLMSISNLTWGILTCSWFGFDVSAVPQVLQNLSLPLIVNTSDSPGWLAAYNANNFWIRFGLVSAYDNVDAMGKGITANLMLFCFSVALTQLCVAHIKGVIANIKSKSPRVLAELGQLGMLIGMYFVVLSLVVFNTGFGGVKSWQFGFLFGGFALNFVFGNYEGSVLKSFLTSCANILTNVLGITNVFSDIMSYIRLWAVGLAGASIASTVDGFAGSMVSHLAFFVFGVVLFLFGHSFNMVLNVLSVLVHGVRLNTLEFSYTWGLPVRFSYSPL

SEQ ID NO: 79983 - protein, 289 aa, Unknown
  Obtained from environmental sample
  DOMAIN (118)...(289): metallopeptidase family M24
  misc_feature (1)..(289): Xaa is any amino acid
FSHDRSAERHEPEVRGSPLAHKSLLVPWDIILAKAYAKADVIVPYNEFDRAPKKAIKGAVERLNIPAGSKIEIPPVTPYPVFLDFVAELQDFDIICRNRSTMNHAMDLRTVKDAEEIAIIRKAAVFTNKIIDLLEKKVRSGKIKTESDAVMLIELESRKLGCDGAAFEILAAGQDRSFGIHAFPAWTDAPFGGKGLSILDFGVRYCGYNTDVTMTFVREPSPQQLTMVNMVEKAYKAAVDSITDGYDTMATAIRVDELLAKSRKRMVHGLRHGIGLDVHECPFLRSRMK

SEQ ID NO: 79984 - protein, 222 aa, Unknown
  Obtained from environmental sample
  DOMAIN (1)...(214): 2-nitropropane dioxygenase
  misc_feature (1)..(222): Xaa is any amino acid
MTIGDLEIAIPIVQGGMGVGISLSGLASAVANVGGVGVIAGAMIGMREPDIATNPLEANLRALRTEITRARELTRGVLGVNLMVALTTFSEMTRTAIENRIDIIFSGAGLPLDMPRHLLALCEEKKEEFKTKLVPIVSSARAAGIISKKWLARFDRLPDAFVVEGPKAGGHLGFKPEDIDSPDHALERLVPEVTACVKEFEDKKGRAIPVIAAGGVYSGRDI

SEQ ID NO: 79985 - protein, 298 aa, Unknown
  Obtained from environmental sample
  DOMAIN (1)...(296): Alpha amylase, catalytic domain
  misc_feature (1)..(298): Xaa is any amino acid
MDLVLNHTSDLHPWFLESRSSATNPKRNWYIWKPPKDNIKGIKPNNWKTNFGKKAWRYDHKTKEYYYHSFFWQQPDLNWRNPEVKRAMFDIMRHWLDLGIDGFRLDVINLLYKDSELRDNEIGFFKKSKIYNRNQPEVYDLLRDFRKLLDSYPEKTSVGEIYAPPPGNTDLAVSFLGSGTDMLHLVFDFSLVFTLWKASSYYKIITNYYEKLPATGWPSFFLSNHDIGRSVRRLLWERNKYAKAKLHAVLLLTLKGTPFIYYGEEIGMENAIIPKRHIRDLYGNFSIHFSEGATARVR

SEQ ID NO: 79986 - protein, 80 aa, Unknown
  Obtained from environmental sample
  misc_feature (1)..(80): Xaa is any amino acid
MSVLNISARELDFKELNKMVRAAKSDVRIDECYGQRFIGSALSGRTITINGTPGNALGAYLDGGVIEGTARPDPPHCDNL

SEQ ID NO: 79987 - protein, 74 aa, Unknown
  Obtained from environmental sample
  misc_feature (1)..(74): Xaa is any amino acid
LYVILEGDLNPETILPLIREMLEWIIAFEGTIPGASAKECGNWQEQNLEMAKWEARRYAALLEKAGRENFIYPA

SEQ ID NO: 79988 - protein, 228 aa, Unknown
  Obtained from environmental sample
  DOMAIN (3)...(220): LytB protein
  misc_feature (1)..(228): Xaa is any amino acid
MIIIRAKVLGFCMGVRRAVELACNQADSPAGKVYTLGPLIHNPQALEDLQQRGVTILDEANLPEKLSGDTVIIRAHGISPQTEAELRKRGAVVVDATCPKVKASQLKAASLAKQGYRLFLAGEESHAEIAGIRGYAQDGWIHGNHAGHSKQFLRIMSSAAEAETAAKLLSEDPEFHSDPVKTGASCTNYHFRRGIPCYWRGNLAVFSHAGDNSKPACRILIHGGGGGW

SEQ ID NO: 79989 - protein, 298 aa, Unknown
  Obtained from environmental sample
  DOMAIN (1)...(297): Glycosyl hydrolase family 9
  misc_feature (1)..(298): Xaa is any amino acid
MGSLDLCHFADNDGGEKEGSRPIAKNPNDGVMASFAAATLAVMSKIYREYDAAYADTCLNHAKLAYAYASSKKNVSAGAANGGYYGAHKDPQTVFVLAASEMYMATGEGEATYKNAIDISQVKTHWHVLDYANSHDLVAYAAAKALPTNKDSLLKLAYEEFVKKYTDPNNIESEKVTKLGGGWGQLRYAGNTAFSVALYSLAKNTTEYDQFIYDQIDYILGKNNAKRSFITGFCEGCNGSPKLVHHRNVFLRDDNPDDNAKAPMTIPERNKYFGYLVGGTRNSSSYTEEPSDYTPTEG

SEQ ID NO: 79990 - protein, 90 aa, Unknown
  Obtained from environmental sample
  DOMAIN (6)...(89): Elongation factor Tu C-terminal domain
  misc_feature (1)..(90): Xaa is any amino acid
GFFPRYRELRDEGGRPPRFFSNYRPQFYFRTTDVTGTIKLAEGVEMIMPGDNAQIEVELIAPVAMEKAMRFAIREGGRTVGSGVVTAIIE

SEQ ID NO: 79991 - protein, 267 aa, Unknown
  Obtained from environmental sample
  DOMAIN (29)...(264): DNA polymerase family B, exonuclease domain
  misc_feature (1)..(267): Xaa is any amino acid
MPNPTIDCFLLTAHYRDAGNRFEITLWGAADSGERVRVSVDGFRPMFFCLRSTPAGETAAAAERRTLPMRSLDMRDIDCLYFDTHAAMQRTAGSLRAAGYPVYESDVNPLQRYLMERMVSGSMRIDGARERIGGFTGFKNPRIRGCEFIPDLRVMSIDIDTDGDGENERITEAACVEDGATYLSVIGGGTELPATKPVVERSRNAPPQIRNCKDEHQLITDLMKHIAARDPDVLTGLDVAGRTLRLLQERCAKLNLRFQIGREGGTR

SEQ ID NO: 79992 - protein, 172 aa, Unknown
  Obtained from environmental sample
  DOMAIN (3)...(167): Glucose inhibited division protein
  misc_feature (1)..(172): Xaa is any amino acid
LVIRHVLDSLRPLGIISRKCNLSRVADVGSGAGLPGIPLAIALPDSEFTLIERKGRRSGFLRDTLAALANKNYRLSNVSVEEQEMEKVKPHRFTMVTFRAFKPLDPKILKKLFRLCVDGGVLAAYKGRQSKVEAEMAELERQMPNQTIRWELIPCPVPMLDEERHVLLINNK

SEQ ID NO: 79993 - protein, 98 aa, Unknown
  Obtained from environmental sample
  misc_feature (1)..(98): Xaa is any amino acid
MSTAKLLRNRKLGAKVTRALKERYFEAWYFDEPVEALAKILSLIPPEHTVSWGGSQTLGELGVTERVALEGYKVIDRDKAADRQERLSYRRLGRSVMS

SEQ ID NO: 79994 - protein, 215 aa, Unknown
  Obtained from environmental sample
  DOMAIN (10)...(152): Phosphoribosyl transferase domain
  misc_feature (1)..(215): Xaa is any amino acid
LEYVYFARPDSVIDGLSVYNARYNRGVALAKEYPVEADVVCGVPDSGLNAAYGYSAQSNIPLITGFVKNRYIGRSFIYPTQTQRDSAVRLKLNPLTAGIRGKKIVLVDDSIVRGTTSEKIVKSLKNAGAKEVHMRISSPPFRYSCHYGTDIDSEENLIANKMSLDEICHKIGADSLGYINIDGLKKACGGCSLDFCTACFTGNGNVERAKKNVFE

SEQ ID NO: 79995 - protein, 84 aa, Unknown
  Obtained from environmental sample
  misc_feature (1)..(84): Xaa is any amino acid
MEPPKPFIKWAGGKSQLLTQFERYYPTDLKKGTINKYVEPFLGGGAIYFSISEKYKIKTACLSDLNRDLILTLNNSCHSVMGGK

SEQ ID NO: 79996 - protein, 173 aa, Unknown
  Obtained from environmental sample
  misc_feature (1)..(173): Xaa is any amino acid
MITANGYGLPDPKEIEQWALPYFPEFQEKKINNEDPQKAYSPVVTPSTNIATRGSEGTLFKSSPLGTGGFDVNRIRGDFPILNERVAEGKHLVWLDNGATTHKPNAVIDRISYFYRHENSNVHRGAHELAARSTDAYEAARETIAKFLGSPSKTISCLCAGQQKRLTLRRTLM

SEQ ID NO: 79997 - protein, 226 aa, Unknown
  Obtained from environmental sample
  DOMAIN (13)...(214): ABC transporter
  misc_feature (1)..(226): Xaa is any amino acid
MIRSAEVPRGSGGGHGAGKSTLMKVIAGKLQADSGDRSVQKGCRVSYLPQSGIVHKGKTLREEAETAYESILQLIARTEELGRELEKTTGDSSRTRSLLEEHHRLLSEVENSGYYRRDAVISQVLLGLGFSESDADRDTGEFSGGWQMRIALAKILLENPDIMLLDEPTNYLDIEARTWLESWLSSFSGGCLLVSHDRYFLDVTVNEVYEIFQGNLKRYVGNYSAY

SEQ ID NO: 79998 - protein, 146 aa, Unknown
  Obtained from environmental sample
  misc_feature (1)..(146): Xaa is any amino acid
LIAEVECSSLSARRSGRFHEELRSIEEEIFENLNIPFRVVDTCTGDLGAPAYRKWDLEAWMPGRNGGEWGEVTSTSNCTDYQARRLNIRFKDDDGKNKFVHMLNGTAIAISRAIIALLENFQQADGSVRIPRALVPYCGFDVIKRK

SEQ ID NO: 79999 - protein, 317 aa, Unknown
  Obtained from environmental sample
  misc_feature (1)..(317): Xaa is any amino acid
LAPHVSDRHEAVLRDQTDWELLGPGAGDDYPTTYYTTTETRRAEQAVVDYAQRDRGQYGRAITADKMDEHMARIAAEGTQLSTGQYKTVKMVCTARDRMSIVQGDAGTGKTFAMTTAKTILAAEGITVRGFAPTGKAAEELNAVGVKSMTIHSYLESPNAQAEAGTGEVWLVDEAGMIGSRRLDDFLKKAAEKQARVILIGDINQFQSVEQGHIFQSLQDMRVVRKTEIKEVKRQKTKYTQNIVKAIKDDDFDTAFRELDQQNALKEIAERDDRIEYIVHEYIEDAENKTKSVVLTANNAQRDEINRQIRAKLARTG

SEQ ID NO: 80000 - protein, 162 aa, Unknown
  Obtained from environmental sample
  misc_feature (1)..(162): Xaa is any amino acid
GFPKHRFGRDDVLERYCLAIRKYSINRVIRATGDNPFVFVDAAVSINDEASSLNTDYAGFTNLPYGAGVESVSALALLRACDEARLTPEREHVCPYLYNHPELFSVYRPVAPSCWHYPDIRVTVDTQEDYNRAVELYHALENTPNRYHGNTIIKKYAEIFGK

SEQ ID NO: 80001 - protein, 66 aa, Unknown
  Obtained from environmental sample
  misc_feature (1)..(66): Xaa is any amino acid
VIASSKVYGDALHIAVATVIGVDVLVSWNFKHIVNLDKIKSFNSVNLREGYCVLEIRTPREVIENE

SEQ ID NO: 80002 - protein, 304 aa, Unknown
  Obtained from environmental sample
  misc_feature (1)..(304): Xaa is any amino acid
LGLASDDEFIEALKRAIDIELVNDNAAAGAVLPEKTPAVAGQTETAPAQKAPPATGQTALSEKAASDGSYENEYLRESARLAELAEKAFDEGDYDASAKYAEEAALSAKQSDVYVAITTAKHYIEQAVSSGVSTRFSPEYREAENWYSQSLSARDKEEWDTAIASAKMVVELLEGLDASGPAIPQPQPGVLPATYTVREWAVSKDCFWNIAGFPWVYGDPHKWRVLYNANKSKLPNPNNPHRIEPGTVLDIPSIKGEVRQGAWETGRNYQPLKKKLRWHLNTGRWLHSYLRVGALKLFAVCYAP

SEQ ID NO: 80003 - protein, 93 aa, Unknown
  Obtained from environmental sample
  misc_feature (1)..(93): Xaa is any amino acid
MLIREALAQGSADLKYAGIKTPGLDASLLLAHILNTNRTQLIAKGTDRISEKKCAEFCELIERRANGEGTAYIIRKKEFRGLEVGSKTVPYFV

SEQ ID NO: 80004 - protein, 277 aa, Unknown
  Obtained from environmental sample
  misc_feature (1)..(277): Xaa is any amino acid
LIDPDTAIIRELGVFRNASSVRITGAEMDINGNVLLADFKTGEVAVMTRIDDMASGLFVEITKILSDDFPNVTVELEVTDRLRRPVTGLDQRNFLLSEGGYAVSQQSFITSYFNSTNLDLSVLFERSPATLSLRDDFATALRDISAAGKIVSIISAGEQPVKENPTTAAGATPEAKLTTVARGTAASYSARWRFDLGLRLAATDLLPGEKKRAVVFVGAGVATGASGSLGAFDQYSLSELAAYLSSNNVVFYAVIVGGGSAGADVRSRPICRGGGIA

SEQ ID NO: 80005 - protein, 120 aa, Unknown
  Obtained from environmental sample
  DOMAIN (2)...(120): RecF/RecN/SMC N terminal domain
  misc_feature (1)..(120): Xaa is any amino acid
LFLKSLDIFGFKSFPDKTRVEFAAGITALLGPNGCGKSNVVDAIKWALGEQASKALRAEKMEDVIFNGTEHRKPLNVAEVILTLGNDTGLLPLDVPEIEVKRTLFRSGEKRYFVHSGPVK

SEQ ID NO: 80006 - protein, 314 aa, Unknown
  Obtained from environmental sample
  DOMAIN (1)...(314): Aconitase family (aconitate hydratase)
  misc_feature (1)..(314): Xaa is any amino acid
LVPHDRSDRFKDFFDIGRNGVCHAIFPEKGFVRPGFTIIMGDSHTCTHGAFGAFAAGVGTTDLEVGILKGVCAFGKPETLRINLLGELPKGVSPKDVILAIISKISVSGASGKIMELRGPVISAMSMEGRMTICNMAVEAGATSGVCMPDMTTVDYLWPFIGPVGDKTYSSKEEALKDFSKWTSDDDAEYSGVVDIDCAKLEPLATVGYKPDEVKPLRELEGTKIDQVYIGSCTNGRIEDLRAAAAVLRGRKIADTVRAIIAPATTDIYAQALKEGLIQTFLDSRCCVTKATCGSCLGMSHGVLARGEGCASTT

SEQ ID NO: 80007 - protein, 112 aa, Unknown
  Obtained from environmental sample
  misc_feature (1)..(112): Xaa is any amino acid
FFPGYREDLDSGRQALLQAVGHCRRQGKTKGVKIYTVKRALSQTEASAWTAHNQGMLLFYKRSFRAAAEKFKEAYRLLDKDPNAENLFHRCVEYATNPPPEDWDGVEVMKTK

SEQ ID NO: 80008 - protein, 284 aa, Unknown
  Obtained from environmental sample
  DOMAIN (114)...(268): Anticodon-binding domain
  misc_feature (1)..(284): Xaa is any amino acid
VLAAALFKKPAFRNCIVSGMVLASDGKKMSKLLKNYTDPVDVINAYGADAVRLFLVHSALIKADDLRYSDEGVREVLKSIIIPLWNAYSFFVTYANIDGITAEGAPDRPGNPLDQWILSEAENMAEKVGSALDAYDLSRAIDPILEFMDFLNNWYIRRSRRRFWRAVEKEGNDIDKTEAYGTLYEVLKKLITVAAPFMPFTTDAIWQNLRKEGDPESVHLSDFPKPRESRRDRSLGIRMASVQRAVSMGRALRSQYNIKVPPAPAYGGTRYAQPRRAKRPSGNG

SEQ ID NO: 80009 - protein, 102 aa, Unknown
  Obtained from environmental sample
  DOMAIN (25)...(102): Phosphoribosyl transferase domain
  misc_feature (1)..(102): Xaa is any amino acid
MSNLNLDDYIRKVPDFPRKGILFYDITSILANPAAFQYCVDSMVSIYKDKSIDAVAAIEARGFLFAAPFAIVMKIPLIPIRKKGKLPGIPIQELGQSVSGEP

SEQ ID NO: 80010 - protein, 225 aa, Unknown
  Obtained from environmental sample
  DOMAIN (10)...(207): Adenylate and Guanylate cyclase catalytic domain
  misc_feature (1)..(225): Xaa is any amino acid
MRGQIKPGGLPKHGTILFSDIRDFTEKSETFTKTFGADASDKIVNWLNHYFSKMVECVEKTNGIIDKFIGDAVMAHWGTAYTSGKPAQDALNCIMAALMMRKALYEMNRKRKKDDPSNPSIHIGCGINTGIVTAGQIGSDRRMEYTVIGDPVNLASRIEALNKPLGTDILISEDTYNLVNKFIIVEEMPSVTVKGKEKPVRIFALINLVESEKGPSCRSDQWGNQ

SEQ ID NO: 80011 - protein, 267 aa, Unknown
  Obtained from environmental sample
  DOMAIN (1)...(158): Secretory protein of YscJ/FliF family
  misc_feature (1)..(267): Xaa is any amino acid
MRLNQEGVRVTVSPAGVIQVADQDTARRMRGILIREDLIPQGTDPWAIFDRDRWTITDFERNVNLRRAITQMVVDHIRALDDVDNANVTIVVPEDRLFASEQNPVSASVIITPKPGSDILQNRKKIEGIQKLLKFAIEGLKDENIVITDQTGLVLNDFTGLAESDRLSLIDRQTKMIRQYEAQYRAKILATLQKTYTEDRGRDLDIKITMDMSKKAVATEEYFPITYKPRNSGGLHMTTQSFFHPFRALQPTLKTYGGRPGLLPRKA

SEQ ID NO: 80012 - protein, 201 aa, Unknown
  Obtained from environmental sample
  DOMAIN (27)...(162): Bacterial flagellin N-terminus
  misc_feature (1)..(201): Xaa is any amino acid
MVINHNMSAIYANRTLGVTQLDVTKSMEKLSSGERINRAGDDASGLAVSEKLRGQIRGLNQAERNIQNGVAFIQVTEGYLQETQDILHRIRELSVQSANGIYTQEDRMQIQVEVSQLVDEVNRVASHAQFNGMNLLTGAFATNSAVGRVMQFQVGGNMDQNNRSLSVHDSAVFRIAVRSNESEFLTLPMLNRQTRNRYDRH

SEQ ID NO: 80013 - protein, 261 aa, Unknown
  Obtained from environmental sample
  misc_feature (1)..(261): Xaa is any amino acid
MAVLRYRSKQYEEAIRLSDMSIAKNRQNTGAWYLKGLSLIRLNRREEAITVLSTALSVSEEEEFIRAILEDTLITSTPLEDPRRARWASWHFANAKNYRTRNLTDQALFEYRRGLRLNPFAQDRRDYAEALRVTGYPSRYLEELLFLKEQGKTDTPLNDAIEAYGSLLSNALFKQWNVNPVELAERHWKVAVFSLEGQSSFVHADAGEVAASVIKDLLNHDRNITPANLHYARAHFRQPSRRQGKAARIFHACIRDRERKG

SEQ ID NO: 80014 - protein, 113 aa, Unknown
  Obtained from environmental sample
  misc_feature (1)..(113): Xaa is any amino acid
FFSPFIAQPGPGGIGERARMKSNISGTSVTVGGVVFGNVLASERLIVLATGLVMGDIITRRIQAEEGCLIHGRVRVCQSEEVWNRAISEYKDVAGLRESLGLHSSVPGYVRHG

SEQ ID NO: 80015 - protein, 253 aa, Unknown
  Obtained from environmental sample
  misc_feature (1)..(253): Xaa is any amino acid
MAKASSTSATGTGTTTGKKKGAKEYTGRQKAAIFLVTIGSEISAEIFKFLREDEIETLTFEIARLETIEPEQKDAILQEFQELMMANQFISTGGIDFARELLEKSLGSQKAIDIINRLTSSLQVRPFDFIRRTDPAHLLNFIQQEHPQTIALILAYLEPNKASIILQNLPHEVQSDVARRIATMDRTSPEVLREVERVLEKKLSTLSSEDYSAAGGVESIVEILNLVDRASEKQIIEARKRKTRARRSVCGKM

SEQ ID NO: 80016 - protein, 309 aa, Unknown
  Obtained from environmental sample
  DOMAIN (1)...(308): L-arabinose isomerase
  misc_feature (1)..(309): Xaa is any amino acid
MRLPRKVVAGFWQDKDFRRRMDVWMRAAAARKDGMDSTVMRFGDNMREVAVTEGDKVEAQIRFGWQVNTWGIGDLAARYAKINDAQADKLAEEYASKYELAHDLKQGGKARSAMLEQAKIEIALKEMLEMENAGAFTTTFQDLHGLPQLPGLACQRLMEQGYGFGAEGDWKQSMLTRAAKVMASGLSGGVSFMEDYTYHFEPGKEAALGAHMLEICPSIADGKPRIEVHPLGIGGKADPARMVFDAAPCSAVLATLIDLGTRFRMIVNEIETVKIENAMPKLPVARALWKPFPIKRSGKLVPNLYLGKP

SEQ ID NO: 80017 - protein, 123 aa, Unknown
  Obtained from environmental sample
  misc_feature (1)..(123): Xaa is any amino acid
MSKFICTSAIDGAVAFVAQAVNKLEEAVKQKGLDCPVGFPDTNYFLPVIYSFTGKKMKTLADLKNILEEAKALLPARPAENVWLPYLGSALDARVAALFACEVIEACKYLIGPYPVRRIWLGA

SEQ ID NO: 80018 - protein, 304 aa, Unknown
  Obtained from environmental sample
  misc_feature (1)..(304): Xaa is any amino acid
VTQRLYRKLDENGYVTEKAGEQLFCEQCGRFLADRYVRGICPQCGYGEARGDQCESCGKLLDPTELKESRCATCGKEPRPKATSHLYIDLPRIKGRLEEWIKEASARGEWANNAVQMTSAWIRDGLHERAITRDLKWGIPVPRPGYENKVFYVWFDACIGYLSITGSLAEDAGKDWKAYLDYWWKSPEETELFQFIGKDNIPFHTVIFPSTLLGSGEQWTMLHHMSSSEYLNYESGKFSKTRGVGVFGTDVMETGIPVDVWRFYIFYNRPGKADALFTWKDFQEEVNGELIGNLGNPGEPDAVL

SEQ ID NO: 80019 - protein, 162 aa, Unknown
  Obtained from environmental sample
  DOMAIN (4)...(160): Porphobilinogen deaminase, dipyromethane cofactor binding domain
  misc_feature (1)..(162): Xaa is any amino acid
MKRIIRVGSRDSVLAIKQAQIVMDAVKKNDFSIEFELVKIKTTGDKLLDKSLDSVGGKGLFIKELEKALADLCIDIAVHSYKDMPCEEADDLPIVALSDRESPFDTLVLPQGNDSIDTLKPVGSSSFTRTIQFFKLYEGLEVKQYAETCRLVCRNWDMVNMA

SEQ ID NO: 80020 - protein, 136 aa, Unknown
  Obtained from environmental sample
  misc_feature (1)..(136): Xaa is any amino acid
MIYKTFGKTGIKVSALGFGAMRLPMKEVNGKKIVDDDLAVPLMQQAFDMGINYVDTAPLYNESQSEISVGKALKGYRDKVYLSTKNPIEDNDGDHWMQRLENSLKKLDTDYIDLYHFWGINLNGFKGWQGLKYGPL

SEQ ID NO: 80021 - protein, 278 aa, Unknown
  Obtained from environmental sample
  misc_feature (1)..(278): Xaa is any amino acid
MEIFKRISGKGHTLFLITHTLERLELCDRLVYIQAGRMLFSGAPGDICGRFNASSVAQVYEMSNAGAIGAGAGPAAGAAAEPVFAASASAQELPRRDWAAPLRHPVKALRFFFRQSLALAARYAKVYVRDRRNMLLLMAQTPLITLLLGFVYKTSALQFPVSFYFCLAVTGIWVGGLDAVREVASELPLLAREARCGMNRWAYIIARIAVAAALSAAQALLFAASAAVIFKQLEFSWPLLVLLYAAVFSGNLLGLAVSACSGGGGGDLGHLIVGGEIG

SEQ ID NO: 80022 - protein, 309 aa, Unknown
  Obtained from environmental sample
  misc_feature (1)..(309): Xaa is any amino acid
AAVQQFEWRFMYVREACGTPEFYLAAVQQHGWALRHVREACGTREMCHAAVQQNGQALQFVREALRTPEMCLVALQQNRLALRHMPEVLRTPEVCLAVVQQNGQALQFVPEALRTPEICLAALQQNRLALRYVPEALRTLEMCLAAVQQNGQALRFVPEALRTPEMYLAAVQQDGQALRFVPEALRTPEMCLAAVLQDGYALEYVPEALRSADFNNTPSACLEMIRKKCSNIQFVPESILTEEFCIDAIEANAEVIQYLPVALRTEKVCHAVIDADWILRLKQSPPQIDSWNSVSNSKTRPICTWGGKW

SEQ ID NO: 80023 - protein, 308 aa, Unknown
  Obtained from environmental sample
  misc_feature (1)..(308): Xaa is any amino acid
LTEKAHSDFQAAREIDQSPLAKVNLAQAYQISGRLEEARLYALDCLKAGDQSWMAYYGIDPVRYKRDLHEILYKTYSGLAKAERFQPWRTIGGVIRSAVKLLSYRFYYAVHHKLYQKYSLASGDAYDIREANGHPPLDQYIQYYNAFETYPRRSLVYLRKARDFETVVIPASWGSYYLEESVLLKDTGLAAQALDALDPVWERDLISYCYREFALTGSWTYAEELFALNRGALLQAGISLPLEINIYYDDGVKKNREKTFIKALSKAGFVRTTHAAKVVSATPAAPPRFRLDITINGSLSTDFTVICE

SEQ ID NO: 80024 - protein, 156 aa, Unknown
  Obtained from environmental sample
  misc_feature (1)..(156): Xaa is any amino acid
MPDFSHTVNEQISQPVRLDRYVSETLRLLSRSQIKARSLTAKVNGKDVKNSRLVKQGDLLELRWQDSPPVNIIPQDIPLEIIYEDDNCVVVNKAHGMVVHPGAGNRQDTLANALYFRRLNRGGKISDTETKHMRPGIVHRLDKDTSGNNIAAYNEK

SEQ ID NO: 80025 - protein, 314 aa, Unknown
  Obtained from environmental sample
  DOMAIN (7)...(312): Phosphomannose isomerase type I
  misc_feature (1)..(314): Xaa is any amino acid
MSIARPLDSSHLQEKIWGGSALREKLNKNTPAGRPIGESWEISGWGDSQTVVSAGEYMGLTLGELFALSPTDLIGTDTAKGQNNSFPLLFKFIDARENLSIQVHPNSEQAQVRGWGERGKTEAWYVVDASPGAQIALGFNRGDVTREEAAEAAESGRFESLLNFVPARRGDALFIPAGTVHAILGGVLIYEVQEESNTTLRLYDWNRRCPAGHLRELHIADALDIINFNEDRALKPKPIAVDKNETFIYDTLCANKKFLLSRYSFSKPGEIGMETINGFTGISHTAGFMEVHANGHTVLMGLGQTVLIPSGLET

SEQ ID NO: 80026 - protein, 300 aa, Unknown
  Obtained from environmental sample
  DOMAIN (10)...(300): IMP dehydrogenase / GMP reductase domain
  misc_feature (1)..(300): Xaa is any amino acid
MAKIIDEVSRTFSEYLLIPRLSCVDHQPGSVSLRTPVTRFKRRGAEEEGGGVERDPRFKWWADKARFSLNLPFVSASMQSVSGPEMAIALARLGGLAFIYCSQTIEAQAAMVGKVKAHKAGFVPSDSNLRPDATLADAVALSKRTGHSTIPITDNGSGNGLFLGILTDKDYWEFDDDLSLPVRDFMTKAENVKLAYVGISLHEANKRLREYKKECLPILDSKEHGHLHSLVFKMDYVDHINNPSELLDKQKRFAVGAAINTHDYQERVPALVEAGADVLCIDASDGYSEVQREPALWVRE

SEQ ID NO: 80027 - protein, 302 aa, Unknown
  Obtained from environmental sample
  misc_feature (1)..(302): Xaa is any amino acid
LLPWLNEQDILRFLDAYFSTDKSDKLKKFVTTNHNIQIIQDFSAGSNATTMLAMNDTGTFYRKYAFGNDGEKLYIQFKWLREHTDMLPLPVIIHHQYDDGYFVYDMEYHAMATDLFNFIHYTSSDRSWFILEKALDCLHNNLHTRNVRPADLEQVRQYINDKVFANIKKIETAKELRALLEYDTLVINGEQYHNLNYLKKWLNSDFLIHIFSKDICTDIHGDFTIENLIYLETNHGYPFYFIDPNPGGVHDTFSLDYAKLLQSLHGGYEFLTHTNKVQVKRNEDQFIGIESKQYADLYTNTK

SEQ ID NO: 80028 - protein, 263 aa, Unknown
  Obtained from environmental sample
  DOMAIN (8)...(250): Uncharacterized protein family UPF0007
  misc_feature (1)..(263): Xaa is any amino acid
MQTAETSIATIICAAGSSRRMGGGKKEYLRLPCISRESSFLPSPLTVLGAAVSAFASLPQIKLIVITVPPGEENKARSCLPKELQSETERVYFVSGGKTRRASVHNALLFLAGHKPSHVLIHDGARPWIDRGLIEKIIEATILYEAAIPALPLVETPKELDSSAVEVKLIKRHLRRENLCAVQTPQGFAFPEILAAHGKAAKKEEQESFEYTDDAEVWGEFAGTVAVIPGITENRKITYPEDIDPWQMTKLRAIRGGSALERS

SEQ ID NO: 80029 - protein, 84 aa, Unknown
  Obtained from environmental sample
  misc_feature (1)..(84): Xaa is any amino acid
MNLACIHTHTVFCDGKDDIETFCRAAYEKGLRSLGFSAHAPIFAKTGLRTDWHLADERLDEYLDSVRSAKKRWEGKLPFTSGWK

SEQ ID NO: 80030 - protein, 170 aa, Unknown
  Obtained from environmental sample
  DOMAIN (19)...(83): ATP synthase alpha/beta family, beta-barrel domain
  misc_feature (1)..(170): Xaa is any amino acid
MSKLEEIARVRIADVRGRIVKIIGLVIECEGPNAGIGELCVIEQNGKAICNAEVVGFRETRTLIMPLGPLEGIRPGMSVVAKGDTLSAPVGEELLGRVIDGMGNPMDGLGEVKYKERRSIYATPPSAMERTRIKEPMFTGIRAIDGFLTLAEGKNGYFAGSGVGKASLWG

SEQ ID NO: 80031 - protein, 55 aa, Unknown
  Obtained from environmental sample
  misc_feature (1)..(55): Xaa is any amino acid
MSKRYKLDIDPDALISDITVGMQQRVEILKMLYRENEILILTSLPRFLPLRKLRS

SEQ ID NO: 80032 - protein, 93 aa, Unknown
  Obtained from environmental sample
  misc_feature (1)..(93): Xaa is any amino acid
MLAYRHSFALQSKTQKILYISVQGIGQHIKTILSDSELVREATIKKFFIVQNEGEREVRREVEHYNWQMIIADGNDLFTNAGSISAEIAKVMQ

SEQ ID NO: 80033 - protein, 130 aa, Unknown
  Obtained from environmental sample
  misc_feature (1)..(130): Xaa is any amino acid
MPIKPELLEELNNRRKEAKLGGGADKIEKRHAKGQLSARERVETLFDKNSFQERGLHVDQAKPINKRLPGDGVITGIGNVEGRPVSVFSQDFTISGGSLSQMHAQKISDLQDQASNSVSHSGLGHQTEKK

SEQ ID NO: 80034 - protein, 65 aa, Unknown
  Obtained from environmental sample
  misc_feature (1)..(65): Xaa is any amino acid
FSFSFDGRDDRRLRLTVQNKRELGWKQTINFEEGLSRTVDWYLANREWIDSIRSGEYKKWIEENY

SEQ ID NO: 80035 - protein, 224 aa, Unknown
  Obtained from environmental sample
  DOMAIN (2)...(223): Nucleotidyl transferase
  misc_feature (1)..(224): Xaa is any amino acid
MKVVLLAGGLGTRLSEETDLRPKPMVEIGGHPILWHIMKTYSYWGFNEFVILTGYKSHIIKDYFINYYTRYSDMTIDMATNSVELHNIRNEQWKVTLLYTGPNTQTGGRLLRAKEYLCKERFMLTYGDGVSDVNVSELVKNHEKSGKTVTLTTVKPSGRFGSVEISDNGAVKSFKEKPDGDGAWINGGFFVMEPGVFDYLTDGDATILETITLEELAKADPLQH

SEQ ID NO: 80036 - protein, 127 aa, Unknown
  Obtained from environmental sample
  DOMAIN (44)...(115): HD domain
  misc_feature (1)..(127): Xaa is any amino acid
MVPSEVAQSLIDINPKLDRALIEKTVAFVMEAHEGQLRKSGEPYIKHPIEVAKILANLRMDSVVVASGLLHDVVEDTVHSIKDIQENFGMEIAEMVDSVTQNSDIQKGADRTAKTFKNFWLMFQNAR

SEQ ID NO: 80037 - protein, 307 aa, Unknown
  Obtained from environmental sample
  misc_feature (1)..(307): Xaa is any amino acid
LKVFSAGEFSYTQLQDFIVNLEERFILYRFREENIARIALNPVLGQILAPCTADTSSLFPAVENPAPAETNAILQNEILNDRIIAALLSFVCREEQFFKAEGVIRKRILEAGKICFGNMDLQFIFGSFQILGLFYANGDRLVPDKKRFEEFGMLSAKERGEYCAAALIVYEEMKPPSPILPPLFRSRIREVANFIHTFLDALELGQKYHEKTLTRLAEVLKAKTGIVIYGNPEDALEKTGLLVSSAPGIKQLGVIAQNTQSKQNAPEAKEPVIAVDSGFSVIVYPEICYKDAIKLPLHSADLSWGDT

SEQ ID NO: 80038 - protein, 296 aa, Unknown
  Obtained from environmental sample
  DOMAIN (112)...(145): Tetratricopeptide repeat
  misc_feature (1)..(296): Xaa is any amino acid
MLPKWKTDVWRLHYQLGYAYMEQNELTSARASFERSMAAKKENPAARALLAFVLNRMGETDKAVDQWEKSVTEDGSNSAIHVNLGLSYESKGQYDKALESYKKAQSLNPSDKAVYINLGNAYQGLGRTAEAFDAFTRGLESNKRELAAYDIFLLSRKRGDADRAEKMYALLKKEFPSSAHCARVSAEMDLVKGDTAKALAAYESIKEKDAHDWFAVARAGAALGQKAKAENALAKVPDDGVWKRDKSVVRARLAFNGGDYKGAYQAYKEAVNASGKDGAADADALPPVGSVMGGDC

SEQ ID NO: 80039 - protein, 140 aa, Unknown
  Obtained from environmental sample
  misc_feature (1)..(140): Xaa is any amino acid
MEIDQEMEQIAAELLSDFQKKRDMAKQPVKSIIVDIIGKLQHLLFPGIFESVLTGGGSVKSKLNVMLEEVFHDLAAQTRLALRYDLRYKDTGQDDVDKTAWGITRQFILKIPQIKGFLGKRYEAAYSGDPPRTARSKLSS

SEQ ID NO: 80040 - protein, 197 aa, Unknown
  Obtained from environmental sample
  DOMAIN (32)...(195): ABC transporter
  misc_feature (1)..(197): Xaa is any amino acid
MLKPPLLKVENLVVNYGAIRALRGISFEVGEGEIITLIGANGAGKSTTLHAISNIIKKTSGTVIFDQRDISSVPPDSIVASGLVQVPEGRRIFANLSVRDNLEMGAYSRRSVTKAEKQEIKKDMEKVFDIFPRLKERIRQVAGTLSGGEQQMLAMGRALMARPRLLLLDEPSMGLAPILSMRFSVQLGQSVIGGGNR

SEQ ID NO: 80041 - protein, 130 aa, Unknown
  Obtained from environmental sample
  DOMAIN (2)...(101): ABC transporter
  misc_feature (1)..(130): Xaa is any amino acid
DENPGAGTSFTFQIEKKKDELARILAYGEQRKLEIARAIASNPSLLLLDEPAAGMNPQETEDLMKVIRFIRNEFHLTILLIEHDMRLVMGICERLIVLDYGRTIAAGSPEEIRRNPAVIKAYLGTEAANA

SEQ ID NO: 80042 - protein, 86 aa, Unknown
  Obtained from environmental sample
  misc_feature (1)..(86): Xaa is any amino acid
MASKARFQFAALGYDTMMLVIDGMKAAGSFEPAAVKDAIAKINGPYVTGNIRYDSDRNPIKGAAILEIVKQDGKLVNAYKTTVNPK

SEQ ID NO: 80043 - protein, 166 aa, Unknown
  Obtained from environmental sample
  DOMAIN (5)...(166): DeoC/LacD family aldolase
  misc_feature (1)..(166): Xaa is any amino acid
LLDSEILSRVDHTLLKMTASWAEIKTLCDEAVRYKTASVCIPPAYVKPVFNEYGNSLVICTVTGFPLGYTYTSVKANETGIALENGAGEIDMVINVGDVKNGNYDLVLDEIKSIKKVCGKKILKVIIETCYLGEEEKITLCGIVTEAGADFIKTSKARPSTGGGKK

SEQ ID NO: 80044 - protein, 159 aa, Unknown
  Obtained from environmental sample
  DOMAIN (96)...(155): Iron hydrogenase small subunit
  misc_feature (1)..(159): Xaa is any amino acid
FAAPISCQYKGLSDCVLKPVRGLRGVKAAEIDFGAPIPNGAGTKIRIAVAHQMGNIAAVLDQIREARTAGKEPPYHFIEVMACRGGCVAGGGQPYGAIDEVRSKRAKGLYLDDEKSQYRCSHQNPFINQVYKEFLDEPNGHKAHQLLHTKYTERKLYIQ

SEQ ID NO: 80045 - protein, 230 aa, Unknown
  Obtained from environmental sample
  DOMAIN (205)...(228): 4Fe-4S binding domain
  misc_feature (1)..(230): Xaa is any amino acid
GPPRQIGRGGHQGGRIQGVQTGGPSGGILTDKSLDLPIDFDTLTANGSMMGSGGMIVMDEDDCVVDVARFYMDFCVDESCGKCSPCRIGTTQILNLLDKITNGNGEESDLDKLEEIGTAMTKASLCMLGGSAANPTLSTIKNFRDEYLEHIHDKKCRAGKCKKMLRFAIDAEKCIGCGMCAKKCPAGCIKALDPAKYPNKKKPPYAIDQGACVKCGECLKNCKFSAITRS

SEQ ID NO: 80046 - protein, 163 aa, Unknown
  Obtained from environmental sample
  DOMAIN (100)...(133): Tetratricopeptide repeat
  misc_feature (1)..(163): Xaa is any amino acid
MSQNKNQKRGSGIIYAASSFLLSLLPLLLMTTGNAVAQGQMELELDLDASPEKALSSAIMKVAEDAFQLNLKGLDALERKDNGAALDLFNQAITVFPQYTDAINNRGVALYRRGDVAGAQRAWEEAVRRDPHYHVAYYNIGLMYLHSKKPEEAKRQFQLAVEQ

SEQ ID NO: 80047 - protein, 312 aa, Unknown
  Obtained from environmental sample
  misc_feature (1)..(312): Xaa is any amino acid
VRQKANTGYRFWQQYYPFISDFAWKVRGGTFAPWSWTLGAGSDYISMIAYYMASPLNLLAVLAPHAYLREALTVILILKIGLAGLFMGMFVRYTFMQSGRESDRLLALPVFASLYALCGFTLGYYWNIMWFDSFALLPLVIQGLIAIMRESKYRLYTVTLALAVMLNYYIGFYICVFVVITFLNQCVILNLKGRDILRKLAMVAACSVLAIGLTAACTFPAFISLQNTAAVANKFPSAITWFNNYAKVLGNLVAFIKPTTKEGLPNLYCGMVSVLFIGAFIHSPKIPLREKIVNAATVIFCLSTRPICHWGT

SEQ ID NO: 80048 - protein, 187 aa, Unknown
  Obtained from environmental sample
  misc_feature (1)..(187): Xaa is any amino acid
MKRFFILLFFIPVLSFADPMYSPTWGFYIDLPEGYEYVDGDAKDRFSFKGPGGAMFDIAVYYGRYANLHELMNDVNKSIGNKGDVDYYRYNNRQTAITELIFGDYHGWAIAVELDKKNGQQPMFLALAYGLSAIKDLEIFHVSALDSICPSQEERRYPGPVIDYSYPRGGQKKVTIAAGNINVMIRE

SEQ ID NO: 80049 - protein, 88 aa, Unknown
  Obtained from environmental sample
  DOMAIN (1)...(70): SirA-like protein
  misc_feature (1)..(88): Xaa is any amino acid
MTTLNMLGKLCPIPVVEAKKALLQGQDVTVLVDNSIAVQNLEKMAAGLGYGFSYEQKGEAEYAVTIIVKNSGAGPASCQVMRPEAMPP

SEQ ID NO: 80050 - protein, 130 aa, Unknown
  Obtained from environmental sample
  DOMAIN (13)...(128): Uncharacterised protein family UPF0047
  misc_feature (1)..(130): Xaa is any amino acid
DDYRLSTARRADFYNVTHKVREAIAQSGVVDGIAVVYCPHTTAGITINENADPDVVHDLLIGLDKAFPDRPEFRHAEGNSAAHLKASAVGSSATVIIKDGKPLLGTWQGIFFCEFDPPRERTYFVKVIGK

SEQ ID NO: 80051 - protein, 313 aa, Unknown
  Obtained from environmental sample
  misc_feature (1)..(313): Xaa is any amino acid
MSLTPAGFSRHGRGFTDNYDQYSAKIASGRVLGQSMQGWQFMYGADMANRDRGQNIRTMAPLPIVWDANTTPRYRSIPTPNLLRGMGISVSAKDPIRIIRFVNDLLAEDVQRTINWGIEGQHWQWNAQKIPYRTPQQRTNWLNDQWQEQNRLRLLDDVFPKIQGSFSDGFPSDLSYYFPEREAMILPEDLELYKAYGVNSTNELMDKNPPPNAPWFPTWSMAPPPDGSPAQIALQRCEQTMKQRLPQMILAPPADFERLWAAYVTEMNNNGLAAYEAFMQDSLNQRLKDWGIRKYTALIRGRHNRLRFFSSHD

SEQ ID NO: 80052 - protein, 183 aa, Unknown
  Obtained from environmental sample
  DOMAIN (3)...(96): RimM N-terminal domain
  misc_feature (1)..(183): Xaa is any amino acid
MFLLGRLAKVQGLKGEFLLDQATESPELIPDSEKLFLAPPSEDLSSSDDSPQGSMAVSVRGYRWHKGRPCLAFNQIKDRTAAEPYKDWSLWASRWQAELAEGESFRRDWIGCRVFAGEEFIGEVAGLEPSPAGYDMVKVKDMRPGRSGLRDVPYIQAWFNLDLATRGYALTHLMGCWSFDRLI

SEQ ID NO: 80053 - protein, 206 aa, Unknown
  Obtained from environmental sample
  DOMAIN (35)...(129): HD domain
  misc_feature (1)..(206): Xaa is any amino acid
MTKEQMLQISGMHLAPYIQVATMLIGKSRRAGGNMFRHQIDTLGILIDYGYIDAVLLKASIVHDILEDVPNFNHNILLSVDADSRDVYELVKEVSRRNGESKPEFLIRIRESGSHNAQILKVADRISNMISLGFVNNLDFVERYINETETYVLPIANQVSQYMVTELWRLIKIRRIILKGSINTLKVRKKLTVPVSIKVHRKMQQT

SEQ ID NO: 80054 - protein, 306 aa, Unknown
  Obtained from environmental sample
  misc_feature (1)..(306): Xaa is any amino acid
MRLLFSGIGIVVYTSLCAYIGARLFAFIRYFMPGAKAFVYWPAFILLCYAFAFAGFIRTPYLRFLQHIGAYWMAVFIYLLLLLPLFDLLRLGLFLFRRNVLTPRFTVAGIGAMLCLCAVIIAYGSLHARSIRTVQYALRLAGQGNGLRIALISDLHIGSSVGQRHIAKVVNVINKTEPDIVCIAGDIFDGHLETVRNLPGIAEEFRRIRAPLGIYTCLGNHDVDRMFPFGGGTERIEAFLREAGVTLLQDEVAAIGDNMYIAGRRDARPIGMKAGRKTAAELCAARISGRPPKTGAPPLKGAPALL

SEQ ID NO: 80055 - protein, 115 aa, Unknown
  Obtained from environmental sample
  DOMAIN (31)...(111): Ribose/Galactose Isomerase
  misc_feature (1)..(115): Xaa is any amino acid
MRRRGLGQGGRLPCLGQGAVGQNSRGEYARGVLFCGTGVGASIAANRRKGVRAALCFTPEMGSLSRAHNDANVLVLGARTTPVDTSLKILDAWLNGPFEGGRHQKRIDMLDEEDR

SEQ ID NO: 80056 - protein, 302 aa, Unknown
  Obtained from environmental sample
  DOMAIN (3)...(284): DctM-like transporters
  misc_feature (1)..(302): Xaa is any amino acid
SYAGITGHPIRYDAGSRNSACGSLLYRDLPDGAFEAKKLGLRGLPKESIPHFGRLLITKGFLFIPIIVLIGMMTLGFTPAFAACFGILAAFLVSFIRKETRFTKATLVDALAGGSRNTIGVAVACAMAGIVVGIVTLTGIGQTLIGALIGVVNNPFFLSTGTSLLVALFITMIACLILGMGVPTTANYVIMATITAPMVLRTGRELGIVVPLIAAHMFVFYFGIIADITPPVALAAYAGSAIAKSNPIKTGLTASRLAITAFIIPYIFVFNPTMLWVGASPLNVIQIIITSFIGMFGLAAGN

SEQ ID NO: 80057 - protein, 111 aa, Unknown
  Obtained from environmental sample
  misc_feature (1)..(111): Xaa is any amino acid
PFFRLSQSESPAATLIRSYPFYTQYPVPAASYKGQNAAVKTVAVKATFIVSSKLSENTVYNLTKALFESKAQIEAAHVKGSELSFAYAVGGISVPFHPGAERYLKEVGALK

SEQ ID NO: 80058 - protein, 317 aa, Unknown
  Obtained from environmental sample
  misc_feature (1)..(317): Xaa is any amino acid
MLARPLEKAKRYKDYHDALKAIETAFESRRYAVLTGAILERGSSIAEAQSRREALRASIASAESRVEKMNLDALEKENELGAASRSVAEAGEGIAAIDRDLSVAAERVSNLKAAVARLDGEAAQLDRESEEASQLKTQIEKSVVERETLLRESSERAAGAGEELSAFDAHLSAKRREADEIGRNQIELINSLGEAKNRQSVANGALNAALDGKSRNEREIAALEARYEEYEDAAEACRRQLEEVNSANSGLMDARAALVGRIEAEEERYHGLVDKEKSLEARISSHKSQRKFFEGSTRLPRVPGPGCGRCFTPVLPG

SEQ ID NO: 80059 - protein, 116 aa, Unknown
  Obtained from environmental sample
  DOMAIN (7)...(96): Bacterial DNA-binding protein
  misc_feature (1)..(116): Xaa is any amino acid
MATAAKLRRVGLAKHLVDRLGYTKKDATLLVNTFFRSMTEALLSGEGVELRGFGSFRVRNRASRIGRNPRNGQPVHVPAKQVVYFKIGKEIREKLVTVKEGGDGQVPREADAQADE

SEQ ID NO: 80060 - protein, 255 aa, Unknown
  Obtained from environmental sample
  DOMAIN (1)...(166): Peptidase M16 inactive domain
  misc_feature (1)..(255): Xaa is any amino acid
VFLAGNIPTEKQLSFLNEQFFSKIDGGKECAPVNKTERWKEPKEFTVPCPAEGEAKSTIFLSWLCSDVTEIEEGFALGVLTEILLGHDGSPLTRKLIESGYGEDITPVSGLETEIREALFVVGLKGVSGDAQQMGQKVEKLIMDELKRLAAEGIPPEEIEAAVLSVEFGQREIRRSSGPFSLVWMRRALRTWLHGCKPWEGLLILPLLTKIKENISSDQRYFEKLIKKYYLDNPHRALVISEQKKNSCKNRMKNF

SEQ ID NO: 80061 - protein, 298 aa, Unknown
  Obtained from environmental sample
  DOMAIN (51)...(290): Glycosyl hydrolases family 18
  misc_feature (1)..(298): Xaa is any amino acid
VPPLTPSVPADAPAPAAENEISEAEEEEEEEEEFYVELPPPNSTLPVSVFPEIWTYVVADRESALRPGLPISDVGYFGAEIDSYGNLVDVPNRTRLRNFSGRVHLVVGCNGRALTHFVLKPGSDERKKLIADLINATRNYDGLQIDFENVGARDGEPYLSFLKELRAGIGNKMLTVALAARTRKIADDVYDYEKILPVVDRILVMAYDEHWSTSAPGPIASLAWCGRIAEYSLRVIGKEKLIMAIPFYGRGWRTPNHSSAYIFTTVERIIKENNGKTIRRENGIPAFDYNATISVKVY

SEQ ID NO: 80062 - protein, 118 aa, Unknown
  Obtained from environmental sample
  misc_feature (1)..(118): Xaa is any amino acid
MGKIIGIDLGTTNSCVAVLEGGEPVVIQNSEGGRTTPSIVGFTSKGERVVGAPAKNQMITNPENTVYSIKRFMGRRFSEVSNEMKLVPYRVAEQGDDVRVDIDGQKYHRTEFRLLSQK

SEQ ID NO: 80063 - protein, 317 aa, Unknown
  Obtained from environmental sample
  DOMAIN (8)...(55): Regulator of chromosome condensation (RCC1)
  misc_feature (1)..(317): Xaa is any amino acid
MTDRPRAGGSLWAWGYNYVGQLGLGDDTDRDAPVRVGYDGDWKSVSAGAYYTLALRADGSLWAWGQNTYGQLGLGDSGSDTNRNAPTRVGNDSEWKSVSAGYGHTLAIRADGSLWAWGDNWNGQLGLGDSGFYTARNTPIRVGYDSDWKSVSAGAGAYHTLALRADGSLWAWGNNTSGQLGIGTSDYDAHPIPVRVGTDTNWAVVSAGGSHTLALKSDGSLWAWGRNEYGQLGLGDTTQRNKPTRVGASNDWAAVSAGHLHTLALRADGSLWAWGYNRNGQLDGTAWSSTPRQVGAPNGLSAAPLDVAQHTTPSDTG

SEQ ID NO: 80064 - protein, 95 aa, Unknown
  Obtained from environmental sample
  misc_feature (1)..(95): Xaa is any amino acid
MISFIIGVAALVVGYLIYGKIAEKIFAIKPEQQTPAMRLNDGVDFVPMAPWKTTLIQLLNIAGTGPIFGAIAGALFGPAAFAWMYWSSRSPGGNR

SEQ ID NO: 80065 - protein, 106 aa, Unknown
  Obtained from environmental sample
  DOMAIN (6)...(69): 2Fe-2S iron-sulfur cluster binding domain
  misc_feature (1)..(106): Xaa is any amino acid
MKNQTVIIDQTAVPIEGERNLLELCRKAGIELPTFCYHSEISVYGACRMCMVEVEGKGILPACSTKAEDGMVIHTNTKQIRNIRKVIIELLLASHGQDLGQSVFDF

SEQ ID NO: 80066 - protein, 216 aa, Unknown
  Obtained from environmental sample
  misc_feature (1)..(216): Xaa is any amino acid
MADSYFETDDITKEYDSRLMRRIMSYLKPYKKVVIITLAALIISTLGELYIPVLLQRIIDDAILKKNIAFLYRGCVMYLVILVFVFGFTFLQTWTSNLMTQGVMKDMRLGLFKKTLSQSTGYLSRHPVGRIVTRLTSDVQTMDEFFTTVLVAFLKDIAIMIGVIVTMFVLSPNMAIVVLITLPPVLVVTFISRVRARDAFRKQRTASSKCTRILPK

SEQ ID NO: 80067 - protein, 176 aa, Unknown
  Obtained from environmental sample
  misc_feature (1)..(176): Xaa is any amino acid
LSGNISTLVISGTKAKGFSDSLIPEMVMKARCWGCRVILDVRGIDLFNGLSVGANLIKPNLYEFISTFAPELLSEKNADIVKKKVGEIWAELYKRHPSCALVLTRGAEPLWYAEKGKLAEYAFESVEPLNTTGSGDAFTAGLAAALEEGASLAGAVAEGARCGALNAALLKPGVIR

SEQ ID NO: 80068 - protein, 65 aa, Unknown
  Obtained from environmental sample
  misc_feature (1)..(65): Xaa is any amino acid
VISAGMRKVLAGRTSFVIAHRLSTIRDADRIFVLSNGRLVEEGSHEELVERGGIYSGLYRLQYED

SEQ ID NO: 80069 - protein, 223 aa, Unknown
  Obtained from environmental sample
  misc_feature (1)..(223): Xaa is any amino acid
MGDFLSELVGNDRSSLEQKKRVDRARKDFGFFCRYYLHDYFFTDPADYQKILYDVADTRSLSKETSSRLKPFINERYHSLLKPTEHLAGAMFVEPREHGKTVRWSFAYVLWSIVTGKNRYALLIGASGDAARENLINIKIELEENELLLEDFKELKGDIWRDDRVELKNEPAYRPKGSGASMRGTRFRQYRPRPYNLDDVLKDDAVGFAVPRDKNFRWVKPGW

SEQ ID NO: 80070 - protein, 312 aa, Unknown
  Obtained from environmental sample
  DOMAIN (45)...(209): Radical SAM superfamily
  misc_feature (1)..(312): Xaa is any amino acid
LTDLDYLTLLSPAASAPETLELMARHARDITKNRFGNVILLFTPLYVSNICDNRCLYCSFAHQNKIKRRHLSVDEVRSEAAGIAATGLRHILMLTGESRRAAPVDYLAECVSALREHFSSISIEVYPLDEVEYSELVGAGADGLTVYQETYDMAVYASLHDGGPKANFEYRLLAPERGCAAGMRSATVGALLGLANPLRDAFFSGLHARYIAERYPSVEVSASFPRIRPQAGEFEPEFCVDDKTFVRYMTAFRLFMPAAGITVSTRESAALRDAVLPLGPTKMSAGVSTAVGQGSGRPSDAQFEIADRRSVD

SEQ ID NO: 80071 - protein, 333 aa, Unknown
  Obtained from environmental sample
  DOMAIN (285)...(318): Tetratricopeptide repeat
  misc_feature (1)..(333): Xaa is any amino acid
DSDCRQAKMETALRRFAGRLGPKAVAALFGPANGGSLFGFIADGLNSGFVMTEPGIKYLYAEELLAYAATSFRETEGQGNLVLRPIEDFSLIDPFINTGELKFQAMSSGMLRIDQVDKTPVPLAFGDTMIRVLPAGRYIIDLTYRNGYKETRTVELRKKESRWVIFSYTVPYLAGDFSALYGQGGRLPGGINISELNPASYQRVNREAMESMGMAPYYVAFLGGEKYYRDGDYDKAIAEYNRCISLKADYPEAYASRGNAYRRKGDVSRAIEDYTRAISLRSSYAEVYNYRGFLFARRGELRRAVEDYTQAIRYKSDYADAYSSGLAITGGKP

SEQ ID NO: 80072 - protein, 315 aa, Unknown
  Obtained from environmental sample
  DOMAIN (152)...(298): Histidine kinase-, DNA gyrase B-, and HSP90-like ATPase
  misc_feature (1)..(315): Xaa is any amino acid
KQKADSGKHEDINSESIRISPERINKIIHNMAALQSLEIAATNIARDTEAINTETKQFSKLMSAELPWNSSLIHEFRSLELLISKLGSYVKNYAIDAGNDIRGAYDSIISLRMLPLSTVLESYPRQVFSIASDLGKKVKIKIEGAENEIDKNLIESLSEVFLHMIRNSIDHGIESPQERLAAGKNETGLLTINCVRESGNMKVTISDDGKGIDIEGIRNKIVEKGIVSKENAVDLEEGELINYIFQSGFSTAEKLSSVSGRGVGMDAVRSNIERMKGSIAIQTKVGEGTTFTISVPLSLAALMARAEFCPMKGPL

SEQ ID NO: 80073 - protein, 97 aa, Unknown
  Obtained from environmental sample
  misc_feature (1)..(97): Xaa is any amino acid
MQKVDLKISSMSLANLRAKPVRTVCLFVVVAILAFTLFGGSILALNLRQGLNTMTKRFGADLMVVPEGSSDKAQALLLRGDNGYFYFDADIVDKSPG

SEQ ID NO: 80074 - protein, 249 aa, Unknown
  Obtained from environmental sample
  misc_feature (1)..(249): Xaa is any amino acid
MNAIVYSERMEKIKEGMARAGIDAFFVSPSSNLFYLSGCALGPDERLFLLVLPVKGEPFLLANLLYKEQVKIIQVNDQVYWKDGEDPFSLLKAEIEKRNIALNKIALEPQIPALFSLPLGKTFPSACFELGSSLIDPLRQCKDETELDLIRKACKESDRALGVLTEKGDYWIGKTESIFLSELSAEISRNGVYDFDASVQAGANAAIPHYATGNAVIERGNACSAISGAVSRRTIRTAQGLFTSATGSE

SEQ ID NO: 80075 - protein, 87 aa, Unknown
  Obtained from environmental sample
  misc_feature (1)..(87): Xaa is any amino acid
MSNYKLDTLLVDRGSKKIYLDGDKVIKLMGEEYPAPDVLSEAHNLATVGETALKVPSLVEVTKIDGKWAVVWEYVRGQPRPICTGFP

SEQ ID NO: 80076 - protein, 63 aa, Unknown
  Obtained from environmental sample
  misc_feature (1)..(63): Xaa is any amino acid
VADCSELGIPAQKLDEAFTQNEKLWLSSGSSFGKGERGFERMNVACPRSVLQNALERLRDVKI

SEQ ID NO: 80077 - protein, 81 aa, Unknown
  Obtained from environmental sample
  DOMAIN (18)...(75): Bacterial regulatory proteins, luxR family
  misc_feature (1)..(81): Xaa is any amino acid
GRSHVIAEYTQVSRVSDNIAITPRESDILDDLPQGLSRSEIASSRGLSINTVKMVINSLYFKLGAQNLADLIRIATKRKMI

SEQ ID NO: 80078 - protein, 194 aa, Unknown
  Obtained from environmental sample
  DOMAIN (32)...(194): YjeF-related protein N-terminus
  misc_feature (1)..(194): Xaa is any amino acid
LRVLNDFSSVRSYSLLSAEDSRTLDKEAQYEWGFNVFSLIETAGRFSAEIFVRHFGELLKNNSKISVFSGTGNNGADAMVMLRSWILSGLVEASNCTLVVSRLPKSGETSPWTEMLKSLEKMKVPVFAWNGETGKKLIRNSDIIIDGVAGTGISGPLRDAAVEMVNAVNTQKNKKPFVVSVDIPSANSDEWKPG

SEQ ID NO: 80079 - protein, 286 aa, Unknown
  Obtained from environmental sample
  misc_feature (1)..(286): Xaa is any amino acid
VKTVTETVGGAQGLLDISFALQSCFEETLNDQQKTFLQMLRCIESNLPLLYRPYAGTGRRPYQYLPFLRSQWAKNYFQIATTTMLIERLKADPNLRLLCGFGKVPGQASFSRAYSYLAAADIQPGTLERFAKEAFKDKVVYHVNRDSTAINARETVKKGRGKSGRKQPKKRGRPPKSEGKREKQPSEMELQIESDPRDSLKKLDTACSFGCKKNSQGNISFWKGYKLHLDVSDSGFPITACVTAANVHDSRLCIPMEKMTEPRVVFLYSLMDPAYDAQTIADFIRS

SEQ ID NO: 80080 - protein, 334 aa, Unknown
  Obtained from environmental sample
  DOMAIN (228)...(297): HAMP domain
  misc_feature (1)..(334): Xaa is any amino acid
EKSKGQNSARAYDINETLVIGYLNGFKEAVGGGFWFEPYADREDKYHSNFYAFFDKSAGKIRFDDTFDSDEYDYHSKSWYRELHDGIKQSYQVMWTKPYVDDSGSFSLMTTAGAGIYNQKNELIGVSTIDWEIDKVINELTAIKPTKNSFVLLCVPEQDYIISGTRAGIVSGASIKSLPWDINADSFTLDGVQYLRFGRYMDNGWLLSVQIPKTEIFTEVEEQNNRFSLLIALSVAVMIGLAYYLISKFINVPIKRLTQDVSRLALGNLDTPIEIDSNDELGLLAHAFNKMTGDLKKSIEENARERAEKKRMAPNLAWRRLYRPVCFPYFPAFT

SEQ ID NO: 80081 - protein, 57 aa, Unknown
  Obtained from environmental sample
  misc_feature (1)..(57): Xaa is any amino acid
LKIKVEGMNLYYDAFQALINVNLDVMENEITAFIGSSGCGKSTLLKSLNRMNDLVES

SEQ ID NO: 80082 - protein, 323 aa, Unknown
  Obtained from environmental sample
  misc_feature (1)..(323): Xaa is any amino acid
VQSRYNYRIQQQNNFATPPTRPDYTFEGWNTKADGSGTVFNAGTPVTANIEVHAKWKAVAPKVVTLTFNANGGSAPSPATRQMTVGSPYGTLPNVTRAGYTFDGWYNAASGGAKIDPSGPFSGNVTTIYAHWTAASGITVTFDSRGGSEPNPASKAVTFGSNYSLPAVTRPGYKFDGWFTAASGGTKVDGATKVSNTANHTLYARWTANSITVAFNANGGVAPSPANKALTFDSPYGTLPNVTRAGYKFDGWYTAATGGTKVEGATKVSSAGNHTLYARWTGNTVTVTFHRNGANCDAIPAVTATLHSKITLPAPPNRRHYTF

SEQ ID NO: 80083 - protein, 105 aa, Unknown
  Obtained from environmental sample
  misc_feature (1)..(105): Xaa is any amino acid
MAAALELEEQGFTCALIDREDHLGGILMQCIHNGFGLHEFSEELTGPEFAERFIERVIRSKIAVYLDTTVTRFSQDNSSPQFKEYTAYPQQRGKNKTRAVLPARA

SEQ ID NO: 80084 - protein, 152 aa, Unknown
  Obtained from environmental sample
  DOMAIN (27)...(148): Bacterial flagellin N-terminus
  misc_feature (1)..(152): Xaa is any amino acid
MVINHNMSAMFAHRTMQGAMIDGEKSIQKLASGERINRAGDDASGLAVSEKMRSQIRGLMQAGRNVQNGISFLQTAEGYMEETSQIFNRIRELAVQSANGIYSTEDRMMMHVEVSPLVDEVDRIAKPCQLNGMNLLTRRFGKCRTRMRGTKI

SEQ ID NO: 80085 - protein, 259 aa, Unknown
  Obtained from environmental sample
  DOMAIN (1)...(257): UvrD/REP helicase
  misc_feature (1)..(259): Xaa is any amino acid
MVDEFQDTSLTQYRLMRLLAGADEENADCNVCVVGDDDQSIYSWRGADYRNIVQFEKDFPRVKEIKLEQNYRSTSTILDAANGVISHNTNRKEKNLWSPVSGGKPIELVCPDNESDEADFIASKIRELQFTETRRYHDFGVLTRTNSLGRNIEEAFLADNIPYKVSGGTSFFQRKEIKDIISYLKVIANPQDDISLLRIINTPPRGIGRTTVAALNELAKKNKSNIWDAVSRLNLARQSGQQQFSRTKKPSADLINDCS

SEQ ID NO: 80086 - protein, 132 aa, Unknown
  Obtained from environmental sample
  DOMAIN (4)...(130): Porphobilinogen deaminase, dipyromethane cofactor binding domain
  misc_feature (1)..(132): Xaa is any amino acid
MKRIIRIGSRDSALAIKQAQIVIDAVKKNDSSIEFELVKIKTTGDKLLDKSPDTVGGKGLFIKELEKALADLCIDIAVHSYKDMPCEEADNLPIIALSERESPFDALVLPRGSDGTDKLLVPLVPILILRFF

SEQ ID NO: 80087 - protein, 82 aa, Unknown
  Obtained from environmental sample
  misc_feature (1)..(82): Xaa is any amino acid
MGRYPREENAMAMLDATAMAFTVPEFEALAMANTRIIMKMLKVFSNQLRKIHKQVSSLMAKEEQNPEAGLLAGGIHLKPRQI

SEQ ID NO: 80088 - protein, 220 aa, Unknown
  Obtained from environmental sample
  misc_feature (1)..(220): Xaa is any amino acid
MDMPLISDTDEPIIPCLYLATIGINWEIYLNGTLIKREMHLVDGYIMEEHYERNVIIPINNNLLQKGENVLVFRIVGDPTDYTTGFTYQSPYYIADYDYITSKHNEIAQIILISILALLGIYHFLFFAIFRENRYSLLCGFYFLCIGLYYLWRTHWIHQIIPNTAVVMKLEYFTIYFSIPAFMAYTDKLLHGRYFIATKIYGVFCVILAITICFFHGLRE

SEQ ID NO: 80089 - protein, 227 aa, Unknown
  Obtained from environmental sample
  DOMAIN (2)...(164): Transposase IS66 family
  misc_feature (1)..(227): Xaa is any amino acid
VRIAPVEPSIIPRSIASPSLLATIFTQKFEMHLPYYRQEKQFEQIGAAISRQDMSNWQQQTHEKLGPLFAMLKETVKSGPVMQMDESEVQVISDIKSGEEDRSDTQKSYMWLARGGPVGKKVIWYEYHRTRAAYNAIEFLQGYRGYLQTDGYKGYDSAAKDLPGIIQVGCFAHARRKFFEAAKISCKSRSAEGGIKYIRSLYEIENELRDMNMGHGIFLSKRRPARG

SEQ ID NO: 80090 - protein, 60 aa, Unknown
  Obtained from environmental sample
  DOMAIN (14)...(60): Bacterial regulatory proteins, tetR family
  misc_feature (1)..(60): Xaa is any amino acid
MAVPVEHDKRQKKILEKALTVFEEEGFENATYQKIADKCGITRTILYLYFKNKKEILSTV

SEQ ID NO: 80091 - protein, 100 aa, Unknown
  Obtained from environmental sample
  misc_feature (1)..(100): Xaa is any amino acid
MKITETAVALCAVGAEKVVSNELKKLADKDKTPCIKVEDSLYGRVRFQADKKGLYKSLIGLRAADRVLLEIASFKATDFDALFEGTAAPKWETLVPKGMG

SEQ ID NO: 80092 - protein, 158 aa, Unknown
  Obtained from environmental sample
  misc_feature (1)..(158): Xaa is any amino acid
IKKRTLDLTTRMNEKRNRVSSLAFAYENSLRAGPNCQEWNRKTNQLTAFQREAQTLQAMSKDRGLSLYWLEFYKKFSMPFGAFSFIFLAVALGLMAKRSGQTVGFIFGLIISVIYWALLLGGQTMGIRLNTSPFWSMWLPNILALSIGLVLTVIKVTR

SEQ ID NO: 80093 - protein, 109 aa, Unknown
  Obtained from environmental sample
  misc_feature (1)..(109): Xaa is any amino acid
MKRVFNFSPGPSMLPLAVLEKAAAEMCDANGSGQSVMEMSHRSQDFKPIIEKAEALLRQLMGIPANYKVLFLQGGASLQFSMIPLNLARAGKKPCILIQASGRNRSLKE

SEQ ID NO: 80094 - protein, 267 aa, Unknown
  Obtained from environmental sample
  DOMAIN (207)...(267): Toprim domain
  misc_feature (1)..(267): Xaa is any amino acid
MGFYYCFGCGKGGDVFKFVQEMEGLDFREALETLAETVGVELPRYERRESSGEGSRGGGASKTDLLGVNALAAEYFQKRVRDNPRAVDYFKSRGLSAETVKEFGLGYAPDGWRGLIDYLNGKNITPQRVVECGLAVSKDGGSPYDRFRDRVIFPICDLSGRVIAFAGRGMDADAQPKYLNSPESALYKKSGVLYGLHKARDGIREHGYIIIVEGYMDYLTLYHAGIRNAAAASGTAFTEEHAHLIKRFTLKATLVFDGDRAGLSVAQ

SEQ ID NO: 80095 - protein, 68 aa, Unknown
  Obtained from environmental sample
  misc_feature (1)..(68): Xaa is any amino acid
VDKIAKKGYSRELGARNTSRVIEEKIKSFLVDEVLFGRLSEGGSAVVDWQDGEYLMNIEGAALEASLV

SEQ ID NO: 80096 - protein, 128 aa, Unknown
  Obtained from environmental sample
  misc_feature (1)..(128): Xaa is any amino acid
MALNKEQKEWLEKISYDPEELKEVPKELLTEKFCLAAVQDDYRALEYVPDVLKTEAVCMAAVKQNPSAIEFIPDAKKTETLCLALVKLDGYMLEHVPDTLQTETVCMAVIREDAFMLQNIPDEKKTGA

SEQ ID NO: 80097 - protein, 258 aa, Unknown
  Obtained from environmental sample
  DOMAIN (210)...(243): Tetratricopeptide repeat
  misc_feature (1)..(258): Xaa is any amino acid
DSDVALWSRSEELLTPRGLYKLFKQCVKITVMRFFVSVAVVFLLMSLPATAQSPDGTDLKPLSAIENYNRGRELENLGRTSEANAHYNEAVRQCLEEVNANTATRLSYTILTWTLQRQKRYNEVISWGERGLKTFPDEYRIVETMGEAFFYLDDYPRSLAYMQRYTNALPHGDRVSVAYFFAGEIYRLTQKYRHADIAYTAALRLEPNLALWWYRLGSVREEIGDKTQAIEAYQQVLRINPNHNEAKSGLARLQNNEQ

SEQ ID NO: 80098 - protein, 88 aa, Unknown
  Obtained from environmental sample
  misc_feature (1)..(88): Xaa is any amino acid
MSHHIPDPNKSVTLTIDGQSVTVPEGTKILEAARKANAFIPTLCDHPDLCRRAVCRICVVECDGKGKLLAACVNDVWGGVSVVTNNSA

SEQ ID NO: 80099 - protein, 182 aa, Unknown
  Obtained from environmental sample
  misc_feature (1)..(182): Xaa is any amino acid
MSGILILADDLTGANDTAIQFVKRGFTTLVVINADSANAGLFGSYNVVSVNSGSRGLNADEAYSVVHRIAKHFEAASFVYKKVDSVLRGNPGQELAAVMDALEINLALAAPSFPANRSVIDNGVLSNGTDTTLVFANGSGKETKNIPLDKIRKGADEVTAFINSIESIEGTQVFVADSVRMM

SEQ ID NO: 80100 - protein, 174 aa, Unknown
  Obtained from environmental sample
  misc_feature (1)..(174): Xaa is any amino acid
MFLRELLPPVTVLKGAGSSAAGNLARLGITNIAALLCHYPRDWEDRSRTVPLKDWHTSQVCAEVQIMAKDWFGFGRMRTLKIYVEDESARACLVCFNRPFLEKQFPVGMRARLFGHFYYKYGEIQSSSFELEPLGSAHGPILPVYPLTAGLSQGLLRKYVKQAVSRYAAKLEES

SEQ ID NO: 80101 - protein, 319 aa, Unknown
  Obtained from environmental sample
  misc_feature (1)..(319): Xaa is any amino acid
DNKIIIGQKYDFSFQTSHDSTVSYHFERPRLNDLFLEAVRYPLVVVCAGAGYGKTTAVHDFLKGYDARKAWIQLSERDNVGGRFWESYTHSVSKTSKTLAEAISNLGFPDTREKIHHYKALVNETALVEKRVLVIDDYHCIEDKSVLRFMEEGFFRNMLQGSTVIVISRSISHLNVAGMTYRDQIFNINESDLRFTENELNQYFRRMGISFQTDSLREIMQDTEGWAFAINLIARSCQKAPGYSGYVRSAMKQNIFRLLEMEIWNSLSEQLQNFLVRLSLIDHLSVDLLNQLAGKEEEFAAERKSKALPRPICLGGGNP

SEQ ID NO: 80102 - protein, 317 aa, Unknown
  Obtained from environmental sample
  misc_feature (1)..(317): Xaa is any amino acid
GFPPPVIGEKLRADLQDQIFNISESDLCFTENELSQYFRRIGVSFQPDGLREIMQDTEGWAFAINLIARSSQKAPGYGGYVRNAMKQNIFRLLETEIWDGLPEQMQVFLTRLSLIDHLSVDLIAGLASGDEGLISGMEKQSAYIRLDSYINAYLIHPLFLEFLGTKQELLTEEQKRETYAISGDWCARNGFKIDAISYHEKTGNYQAILQILAGLTTQIPRDIAKYAAVILDRAPDDEFDKVEFLADMHLRTYICQGFLQKSLELVKYYEAKFLTLPEHDIIKKRTMTRLYICWTYIRCLMSVTDDIFDFDTYIEKA

SEQ ID NO: 80103 - protein, 60 aa, Unknown
  Obtained from environmental sample
  misc_feature (1)..(60): Xaa is any amino acid
MRKFEVVSPFKPAGDQGEAIAALAAGIKAGDKYQVLQGVTGSGKTFTMAKIISANLSSVF

SEQ ID NO: 80104 - protein, 313 aa, Unknown
  Obtained from environmental sample
  DOMAIN (100)...(139): SWIM zinc finger
  misc_feature (1)..(313): Xaa is any amino acid
MKFTPWGSWFIDVLNSYGLEGRLDRGRTYANTGKVLSLKLEAGRAVAKVKGKYRPYYQVEIIFPPLKEAELVYKMIEEDPLLLAHIASGELPETFLQKLKQRNISLIPRHWREMKKSCTCPDEYGDPCKHLAALYFIIAREIDTDPHLLFRLRGMDLAARFGKSAVQRILPPFTISHSVSDNIDKKESTALIVRPSPPVLEEIPNCVNLITALLPSAPSFSKRDFAVVMAEFYHRAAHYKIWESAEAQPETEHNFSRSIWIIHCPEPAPGAKVFLDAQDIDGNIRRFTPCDALNTLCAFRRKTEHRPTVFFFI

SEQ ID NO: 80105 - protein, 274 aa, Unknown
  Obtained from environmental sample
  misc_feature (1)..(274): Xaa is any amino acid
MDDYTIDKERRMKGNYRFSALIIAALIAIPAGYGQSQSSGSEMSVEESYLQEAVDLMIVRETSKQDSIEQKLISLAFISDLIGQGNTSDEIRLVLERLSFEGTNVQARERGRLKNDYPEVRRQAVRLLGSFNSDEAKATLLRVCVTDNEPLVLQEAVRSLGQIGIDKDGEVVSTIVWVTNKFTNTINPDNLLALAAIDAIQKIARNNNGVREDAFNLLIQISEGPYSPPITEKSRQTIMDIRNLIAVNAQAKTQQGHQKGDREKRGSGPGFFFS

SEQ ID NO: 80106 - protein, 118 aa, Unknown
  Obtained from environmental sample
  misc_feature (1)..(118): Xaa is any amino acid
MNIEVYDSGAYLLHGTQIVRDAGAASVPELKEVSKDEARKGTIAYGILEAHDASRCEQENLRLKFDSLTSHDITYVGILQTARASGMEKFPVPLGMTNCHNSLCAVGGTINRTITCSP

SEQ ID NO: 80107 - protein, 144 aa, Unknown
  Obtained from environmental sample
  misc_feature (1)..(144): Xaa is any amino acid
MRIQDALIKLLMIQPFYGALASVLSIQESDSVKKKEMSLLPSPSLKYNKKWYEELQDAQALGVLMHELLHLLLLHALRQGGREPLLWAICCDMAVNDHIPGEMLPDDAVTTEQIELIVKCKLERIESAEYYYHKLSGLPEKSIS

SEQ ID NO: 80108 - protein, 225 aa, Unknown
  Obtained from environmental sample
  DOMAIN (20)...(140): FAD binding domain
  misc_feature (1)..(225): Xaa is any amino acid
LISQKVSLKKYSTFKIGGPAKFFAEPKSIAEIRELLMFCKKNNERFFILGNGSNVLFSDKGFNGLVIKVGKHLASGKSLHDVIQTAASKGLGGMEKLDGIPGTIGGAIFMNASAHGQQISDCIKSVVSVTTYGGIVTRTNEECRFSYRNSVFRMLDEIIISAEYDLVPMPREIINKNRKEVLAWRREKQPLKYPNAGSIFKNPTSNLPLTDSHLSAGYLKRFLWA

SEQ ID NO: 80109 - protein, 58 aa, Unknown
  Obtained from environmental sample
  DOMAIN (1)...(58): 6,7-dimethyl-8-ribityllumazine synthase
  misc_feature (1)..(58): Xaa is any amino acid
VSQGIAKIGLDEGLPIIFGVLTTDTIEQAVERAGTKAGNKGWDAALAALEMADLFTKI

SEQ ID NO: 80110 - protein, 319 aa, Unknown
  Obtained from environmental sample
  DOMAIN (159)...(318): Binding-protein-dependent transport system inner membrane component
  misc_feature (1)..(319): Xaa is any amino acid
MYQIRPSGTRYCCLFSYKAECPFFSSTAKDIRLVVQRINEFSVNGVTYIDHNTFIDIPRNTENIVIRFLNGDKEEVLNILVNNEEKNPEKKLSFTYNGDVKITYPESYVYTASWRATIAALEKKVHVILAEPPYNIFSFLGGVEWHPTRDKIFGVFPMIAGTLLASFGAILLGVPIALLCALFMAEFLKPKPASVVRAGVELLAGIPSVVYGFFGLMVIVPFVRETFNVPSGNTLLSAIIVLALMILPTVITIAETSLRAVPLSVKEASLSLGASKMQTAWRVVLPHANSGVLPEYSGHLAGCWRNYGSYTCGGEIAST

SEQ ID NO: 80111 - protein, 79 aa, Unknown
  Obtained from environmental sample
  misc_feature (1)..(79): Xaa is any amino acid
MSDLKIDVKNLDLYYGEFQALKNINFSIKQQDVAALIGPSGCGKSTFIRILNRMNDLIPSCRITGEVCSTALDHPGGQI

SEQ ID NO: 80112 - protein, 315 aa, Unknown
  Obtained from environmental sample
  DOMAIN (157)...(308): HD domain
  misc_feature (1)..(315): Xaa is any amino acid
EITEKITIKYSQNDTIQKNMPPGQKMIYKIFSVQINEKSISGYCAYKRTLINIPDMYNIPPEMPYKFLSDFDVITGYKTVSTLTIPLIATDQRLMGVIQVINAKDKDGNIIPFSSDDELILMHFATNATMVLQRAYITRAMILRMIKMAELRDPKETGTHVNRVAGYAIEIYDRWAYHHKVPIEEKDKFMDSLKISSMLHDVGKVAISDTILKKPARFTPEEYQIMQNHTIYGARLFYDTNSPVDILARDIALTHHENWDGTGYPGWIDPHTGKVERTNDEGKPLGRKGEEIPLGGRIVAIADVLTRLLVDKRGK

SEQ ID NO: 80113 - protein, 319 aa, Unknown
  Obtained from environmental sample
  misc_feature (1)..(319): Xaa is any amino acid
VLFGTVWILFSKNILNDKWAKILMVACVSIDMLVFAAGQHVTRRDGADVVFNRAQSTMESIKNMGKDEIFRVNLRQYIAEPGVKLGNNTNLMMTPRNQGYVSAVETMEGYNQFRLKYAVLPLDGSKFNTMLDLMNVRYYLDPSSKDGGDAAVLRNETCLPRAKLFYKAVVVDGVNGNNSDGTDSLIINYMNSPKYDHRNEVVVTDPSLSKFSGGAGTGSVKIVKRDFNRIELDVNTDKEAILWLSEIWYPAWKATVNGKKVDVLRANYSFRAVTVPAGASKVVFKFDSTLFNIGALISLLTLLSALTYLARRNLNTGKP

SEQ ID NO: 80114 - protein, 284 aa, Unknown
  Obtained from environmental sample
  DOMAIN (147)...(259): Response regulator receiver domain
  misc_feature (1)..(284): Xaa is any amino acid
MIDREWLLAITELNLTGKINQMGNGKLNEYVRLLISFTENFPEHEEKIKAALEEKDYSSLTKSLLAVRDIMEEIHADELAQDCIKHINRLDSIKHEKLEAYIAYLLKSLSILSIDIQMHILQKQNVEQGLPSETKPLKNDEGSQKEKSILAVDDTAFFLTVLKKALRDVNCRLNCETSGYNALRFLTRHNPDLFLLDIDMPEMNGYELAAKIRQRGQKAPIVFLTGNSKSEYVLRAIEARAADFIVKPINKKTCFSKSASTYSFLKNLFTEREQMSIGNTRYKY

SEQ ID NO: 80115 - protein, 215 aa, Unknown
  Obtained from environmental sample
  misc_feature (1)..(215): Xaa is any amino acid
DSCFKGSPGRAYIEKIRKDSATGHHKLYIPKILPELKKIDHESYVKFTERVETLRPRLIMNMVDDPKNADVAMKIRRSCEEYLDLKIEHLGIIYRDMIQDTALASRLPVTLYKPQSILSQAIYRIADKILQSPEDSYTPNDKQIDESFQEAELEAEIDFDSKMDYVEDLLHSGAMSHGDLIETVKSQQLEISKLRKELNFIKQKLTRAAAQGYKV

SEQ ID NO: 80116 - protein, 193 aa, Unknown
  Obtained from environmental sample
  DOMAIN (116)...(192): Mur ligase family, glutamate ligase domain
  misc_feature (1)..(193): Xaa is any amino acid
MGAYLDAKLRIFEGQAPSDLCVAPASAGFMQGFSPLGQKALFGWGDVGGMGAWCDDGGDIRVRDHKGTATRLLNRSELIIPGDHNVENALAALLLAMHGGASLEAMADGLKTYPGLAHRLALAGEKNGVRAYNDSKGTNVDATLVAIRALPGPLVLMLGGEDKGSSYAPLRSALEGKLRQLVFGDASPSPGGK

SEQ ID NO: 80117 - protein, 258 aa, Unknown
  Obtained from environmental sample
  misc_feature (1)..(258): Xaa is any amino acid
LTPLNTGNLTVGPKNIPFIVDPIPTQTYTGSEIKPAIIVRDDTTILMPDDYTEAYSNNTNVGTATVTITGAGNYAGSSGSATFTITPRVITFNVEPIPAQTYTGSEIRPEVTVKDGTKELTLTTDYTVTYGNNTNTGDASVTIAGAGNYAGSTGKADFTINKAAGATVGTPELDTRTHDSIVIKPVSAPGTGQSVVYAINTSDTAPATGWQATTTFSNLKQGTTYYIFARSVGNANYETGAASGSLAVTTLDQASFTL

SEQ ID NO: 80118 - protein, 83 aa, Unknown
  Obtained from environmental sample
  misc_feature (1)..(83): Xaa is any amino acid
MKPQMLFGAVMAIVGAFNNGAIGVALSGATPTPQYSGQLITNHIDDYGFLRYEMGYAAAVSVALLCIVWVFSKLAYTFFGERD

SEQ ID NO: 80119 - protein, 237 aa, Unknown
  Obtained from environmental sample
  misc_feature (1)..(237): Xaa is any amino acid
GVTSIGLFAFYGCSGLPGDLVIPDGVTSIEGAAFYGCSGLTGDLVIPDGVTSIWDLAFAECVGLTGDLVIPDGVTSIGFGAFAECSGLTGDLVIPGSVISIGGKAFEYCRGLTGDLVIPGSVTSIEYMAFYGCSGLTSVTIRNGVTSIGWAAFDICSGLTSVTIPNSVTSIGREAFFRCYKLASVNFYGTIPASDFSTDNSFPGNLRTKFYATNPTNGTPGTYTTANPGSSAVWEKQ

SEQ ID NO: 80120 - protein, 323 aa, Unknown
  Obtained from environmental sample
  DOMAIN (123)...(248): Signal transducing histidine kinase, homodimeric domain
  misc_feature (1)..(323): Xaa is any amino acid
MAEIASSKPRSEIQKYVVLPDVSLSADVFDVSKPGPAKLLTSAGTAAPKPAPQAAPKPAAPAPQARPAAPTPVPQAAPQATSVPQAAPAPQAKPAAAAAPAPAGGGAASSASEDAKKAGKEAGSILRVDSKRIDDLLNLVSETVITKATFNQISSQFGEIQGQLHAIEGQYREKIKSLFDGLPEYLEGIQEGKSVKDIRKEINEKYGDIFSLFDGFETSLKTTVGKFRSNSQNLGRISGELQEGVMRIRMVPISQNFSRFPRLVRDLSKTLNKKINLVIEGEDTELDKSVIEDLLDPKCTRCGNRWITVLNPQRFPKAQGKPK

SEQ ID NO: 80121 - protein, 216 aa, Unknown
  Obtained from environmental sample
  DOMAIN (141)...(216): FliG C-terminal domain
  misc_feature (1)..(216): Xaa is any amino acid
MNEKEFIEQYGAFIKKALSLAELARREGLLSLTADPEKVSERDIFEYGLSFVIDGIDSCIIEKILNNIIAQEKDEYARVYKTIQKEAVMEIQQGVNPKLLYNILNSLTAISLKDDEAYNSMNAGKAKEKDEAFDKEMAAILKALDEQIASQPKNEANKDQPFTFDDIIRLDDRCVQHILRNVDSHDLVVALKTASQAVQGKIFKNMSRNYATMLKE

SEQ ID NO: 80122 - protein, 295 aa, Unknown
  Obtained from environmental sample
  DOMAIN (35)...(290): tRNA synthetases class II (D, K and N)
  misc_feature (1)..(295): Xaa is any amino acid
MVTTKTGEKTVSVKSFTFLSKTLRPLPEKHHGLTDPELRLRRRYLDLITSQESRERFVCRTKIIRTIRNFLDDNGFTEIDTPVLTNKATGALARPFVTHNNALDIDVYLRIAPETYLKRAIAGGFDRVYEFARSFRNEGVDASHLPDFTLLEYYAAYWNYVDNMAFTEKLMKHLLTVIKGGLKLTYENTEIDFGGDWPRISFRDLILRDCGIDIDKLATKEELQKELDNRGIKFETDVNVAKAGRGTLIDLLYKKSLPFRALINPDFHHPSPARPVAARSQQRDNPKSRRSDSRD

SEQ ID NO: 80123 - protein, 224 aa, Unknown
  Obtained from environmental sample
  DOMAIN (14)...(103): Cyclic nucleotide-binding domain
  misc_feature (1)..(224): Xaa is any amino acid
MDQDMGLGAFSRFTRVFESDEIIFSEYEPGDTFYVIQSGRVKLLKNEGDSERSLDILQPPDMFGEMAILEGSPRSATAIAVDEVKALEFNAQNFELLMTGNPQIGVNLLRIFAKRILDSKRRFTILTLPTPQLKIADVFLMLDETMPDINRKTDAREFQTTIEDVAHWAGVSVSEAREILHTFVVQNRLEMYATRMVVKNINDFARMSPRGETGSCQSVHGKTK

SEQ ID NO: 80124 - protein, 247 aa, Unknown
  Obtained from environmental sample
  misc_feature (1)..(247): Xaa is any amino acid
MAKVTNEDRQLYSEKIKPYKAMIQSLLKREEEVLLEIRKDSRKASLKRLALVEDMLSLVANFMIISGISQSMLKLRSEEALNDGRKSLYKAVIYFEEVVSPLVDAPFSDYEERLEEISAMDAQKRYNLIRKTGLALQLLESAYGDNTKWRWAFVELEGRFAAVAKNIMNLKTAVANTDPSSPDYEPTMYHLRLMKKLLMQAADRYREKYELSTNRNDDFKDGDTFSQCPSPHSRALGDGLAITGGKP

SEQ ID NO: 80125 - protein, 164 aa, Unknown
  Obtained from environmental sample
  misc_feature (1)..(164): Xaa is any amino acid
MYQIALKELRAGHVLARSIYRDTGEIMLSNGFRMTPDVSTKLAAIGIDRIWVQEEGLEDLESEDLVPEATINQSVLLLRKTVLDFRSQIGLIKNNPEEPVPTPQEILSKPDAIKEALNIAAFRKVAAEIYQEIKKADPTLLHITGTRSLGNFYEQQSINVPYLP

SEQ ID NO: 80126 - protein, 246 aa, Unknown
  Obtained from environmental sample
  misc_feature (1)..(246): Xaa is any amino acid
MARKPALGRGLDALIPGGDFSYEKGTEAVEADINLSSDIDVGADIAPLPEQLVVSDQLEPQPSPEGDDISDEAALSALTSINYAPVEPEPEPSLEGEDSLIEPEPSLEGEDSLIEPEPSLEGESSPIEVPVEPEVSVEPEVSVEPEPEPSPEGEGSPLEVSVEPEVSVELEVPVESEVSVEPEPEPSPEGEGSPLEVSVESEVPVESEVSVSGEGGDLPLSRDVVVQIAVDKLVLLSSQPRKNFDE

SEQ ID NO: 80127 - protein, 301 aa, Unknown
  Obtained from environmental sample
  misc_feature (1)..(301): Xaa is any amino acid
ADKASMTGLEGKLYLSVGGATKTAATGLPSPYTPNGNVPLYALWSDEAAKYTVTFDGNGNTGGTVPTAVTQATADEEITLPGAGNLVKTNSTFKGWSSDGKAPALAEGAKYKPLSNTTLKAVWETAGGGGGNPNEPNPGDFTSNATNAEIMYLENAAVAAYQFNIPAGHTYGDYEAVSVDYLVDSTWFNKPLRHARMYGALDPNTFMTDSNGTVYAPFSIYNEGQNGIIAAPGNGGAVSNGDTAWQGKLGATAADAWFTVKYKLDASEKNSSYNVARDKPDEDATGTFYLLSISANLTSET

SEQ ID NO: 80128 - protein, 135 aa, Unknown
  Obtained from environmental sample
  misc_feature (1)..(135): Xaa is any amino acid
MVVFVFFPDAVKYLQGFVYAGFLNKNSLEPALKGRIFLKVFAVFGKRSRPYALYVAAGKARFKHIGSVDSAFRSTGADYSMYLIDEQDNIPGLRDFPGDFLYPFLKFAPVLGSGDYEPMSRKDLGGICTWERKKR

SEQ ID NO: 80129 - protein, 282 aa, Unknown
  Obtained from environmental sample
  DOMAIN (84)...(229): Resolvase, N terminal domain
  misc_feature (1)..(282): Xaa is any amino acid
AVPYLKYLREIRDSRHGGCSKAGGIEGDIAGGGMIEFYGLEINNASVRVIKPYAHWSVGLTIRYPKTMAGIYGIPWKEELLLATYGYVRVSSVDQNEDRQMLAMLELKIPAEYIFMDKQSGKDFNRPSYQSLLTKVSPGDLIYIKSIDRLGRNYEEIQNQWRILTKERGIDIAVIDMPLLDTRNGRDLVGTFLADIVLQILSFVAQSERENIRKRQAEGIKAARSRGIHLGRPVKKPPDNFNELANLWIRRKLTTKELIQQTGLKETSLYRRLREYQAARSK

SEQ ID NO: 80130 - protein, 333 aa, Unknown
  Obtained from environmental sample
  DOMAIN (85)...(333): Branched-chain amino acid transport system / permease component
  misc_feature (1)..(333): Xaa is any amino acid
GIFLPAYRDLLAGAASRKQHENYFSKGITLLNNALTPSVINMLSSVVAILVGLIAGFIILLLSNASQAAQGFGAILASGFSNMNQLGQVLYFATPIIMTGLSVGFSSRTGLFNIGAAGQFITGAYAAVLVGIKCDFLPGHLHWIAALIAAVLAGALWGAIPGFFKAVFNVNEVIACIMMNYIGTYLVNFLVTKTVFDSLRNQSMRLPETANLPKMGMNYIFRDGYNVSSANSGFFIAILFALLIYIILEKTTFGYELKACGFNREAARYAGINEKKSIILSMTIAGALAGLGGALLYMAGSGKGITVVDVLAQERLYGIPVALFGQNNPLGII

SEQ ID NO: 80131 - protein, 310 aa, Unknown
  Obtained from environmental sample
  misc_feature (1)..(310): Xaa is any amino acid
APFPAFGIQKNGNALLCVMKEGASYAGVRADVSGRNSSWNSVYPRFTMVHGAIIDITGRSDRSVYLYERSLPAGESATLRYTPCVGNGYSGMAKEYRSWLTCRYPSLGTRKEDGVPVAIELVGAVNKTRHRLGIPFDLPLKLTSYKESAGMIENFAQWGWKNVRIKLTGWFNRSVDHSVPNKIKLIRELGSKKDFKNLVSAAEKNGYAVFPDVDFMYMRDVKLFGGFSLYRDAARYVNRKRVEKYPYSFVWFGERARWGKLSYLTRPAYMMSLIDNFNRKMSALGLRNFAFRNMGAKLAGDYHEKRLVSP

SEQ ID NO: 80132 - protein, 313 aa, Unknown
  Obtained from environmental sample
  DOMAIN (141)...(255): Response regulator receiver domain
  misc_feature (1)..(313): Xaa is any amino acid
LIRLAERPRQRLAQVVANLLSNAVKFTPEKGSINLDALFIGEENGLCTIQVSVSDTGIGIKKEQQKRLFKSFQQAESSTTRKYGGTGLGLAISKSIVEMMGGKIWVQSEPAEGTTFTFTIQVTRGAEDKQKRLLDVNLSDIRVMAVDDDPEILIYFLDIMQRYGISCETAASGEKALELIEQNGGYHIYFIDWKMPGMDGIQLAREIKARKPENSVVTMISAVEWSVIFEKAKAAGVDKFLSKPLFPSAIVEVINECLGVGKQRAEETHETDINGIFAGRRILLAEDVEINPRIVQALFEPTQLEIDCAEHGE

SEQ ID NO: 80133 - protein, 226 aa, Unknown
  Obtained from environmental sample
  misc_feature (1)..(226): Xaa is any amino acid
MDRFGRGVVDCNQESLRLFEISNKQEYIDRFYDLMPAYQPDGKTLEDGIGFVKKAFEEGYCRFEWTHQKLNGELIPCEITLIRVKYKDGNIVVGYTRDLREQKAMLAEIYKEGEKSRTMAHWYNSILNAIPLPISVTDADTKWTFINAAVEKILGITLEDAIRKPCNNWGADICYTPDCGIACAKRGLHKHIFQGEIHHIRSMLRLLKDWTGTRWGNSKWCGNYQP

SEQ ID NO: 80134 - protein, 97 aa, Unknown
  Obtained from environmental sample
  misc_feature (1)..(97): Xaa is any amino acid
MQDLAFEKDICGTVELYDINYGDAKTNEIIGNKLMEKHNSGGWKFHANPSLHDALSESNFVIISILPGDFKRWLLMFTPRKNTVFINLSGIRRERAE

SEQ ID NO: 80135 - protein, 290 aa, Unknown
  Obtained from environmental sample
  DOMAIN (33)...(287): Aminotransferase class I and II
  misc_feature (1)..(290): Xaa is any amino acid
LKIINKSTKLDNVCYDIRGPVLKEAKRLEDEGCRVTKLNIGNPAAFGFNAPEEIIHDIVRNMQNAQGYGDSHGLFAACKAVMQDFQLKGVMDVSVDDIFIGNGVSELIVMAMQALLNTDDEVLIPMPDYPLWTAAVTLAGGRAVHYLCDEGADWNPDLDDIRSKLSSRTRAIVVINPNNPTGAVYDRSILEGIANIARENNLIVCADEIYSRITYDQVEHIPMSTIAPDILTVSFDGLSKAWRAAGFRAGWLVLSGDKKNATSYIEGLEMLASMRLCANIPPVATTGGKP

SEQ ID NO: 80136 - protein, 308 aa, Unknown
  Obtained from environmental sample
  DOMAIN (1)...(225): CTP synthase N-terminus
  misc_feature (1)..(308): Xaa is any amino acid
VEHGEVFVLDDGGEVDMDFGHYERFLNINGKSEWSLTMGKVFSTLIDSERQGVYAGTTIQFIPHVADVIKNHLFKIASKENADILLVEIGGTVGDLENEFYIEAARQLFNIVGPDNCIFAHLTYVPIPNGTHEQKSKPTQMSVRGLNERGIYPDIIIGRCSESLTPKIKEKIALYGNIPSKNVISGLDMESVYEIPLSYQEEGILDIIFKKLKIVGVSSPRMDEWKRLVEVCKRKYEDPKKTLNVALCGKYMQLEDSYASIREALIHAAANLNVACKLKMLDTEFLNKPEGKDVWNTSADLIHGGGKE

SEQ ID NO: 80137 - protein, 193 aa, Unknown
  Obtained from environmental sample
  misc_feature (1)..(193): Xaa is any amino acid
MGIEVAMITGDNKKTAHAIAAQVGIDRVLAEVLPQDKSAEVKKLQVMPIENCRGEKRKLFSKAMNRRFVAMVGDGINDAPALVQADVGIAIGSGTDVAMESADIVLMRSDLIDVPTAINLSKRTIRNIKQNLFWAFGYNVLGIPIAAGLLYLFGGPLLNPVFAAAAMSLSSVSVLTNALRLKRFKGDPQSMMD

SEQ ID NO: 80138 - protein, 86 aa, Unknown
  Obtained from environmental sample
  misc_feature (1)..(86): Xaa is any amino acid
MSITKKRLEEIKAFKNTDFSDCPEMTDEQLSQLKPSHYRNMANYKPIKKTVNVRLDADVIEWLQSAGRDYQTRMNALLSICHGKKS

SEQ ID NO: 80139 - protein, 306 aa, Unknown
  Obtained from environmental sample
  DOMAIN (2)...(120): Bacterial flagellin N-terminus
  misc_feature (1)..(306): Xaa is any amino acid
VAISERMRAQIRGLTMASKNAQDAISMIQTAEGALAETQSILQRIRELAVQSANDTNTDSDRSELQAEVKQLLTEINRIGNTTEFNTKKLLEGSAKGVSDEIKGTSRVNNNSSLVLDNSKIAKMGEAVAGDKSWEFDGAYSLVRTGKKKEGEFNAEDFMLVGPNGAQYKFATLAEGGVDVGVSVPGAIIFAEKNIGAGDTYIQFSSNTGVALAADYKSMAVGDSVTFIFSRYQAPSSNLADSFMVQIGANSGQTAFISIGDMRAQAIGVANIDISTKWGAATAIETGTTPYNRFSPRADFVLGGQK

SEQ ID NO: 80140 - protein, 244 aa, Unknown
  Obtained from environmental sample
  DOMAIN (44)...(221): Magnesium chelatase, subunit ChlI
  misc_feature (1)..(244): Xaa is any amino acid
LFAAATLAEVFHALLVRAEIGELPSSSPANTSAGDLQGEIWAGDFSEVQGQQRYKRALEIAAAGGHNLLVFGPPGSGKTMLARRFPSIMPPLLPEEAVEVTRLHSLARRISGEESGLIRQPPFRSPHHSASTEGVLGGGRNIRPGEITLAHFGTLFLDEAPEFRSPVLQSLREPLEDKVVTIVRAESNHKLPADFQLILAANSCPCGRLGAVFPAVDELETACPVDNGCLCSPLGRRDKPEGSP

SEQ ID NO: 80141 - protein, 291 aa, Unknown
  Obtained from environmental sample
  DOMAIN (1)...(71): Toprim domain
  misc_feature (1)..(291): Xaa is any amino acid
MDYLTLYQAGIRNAAAASGTAFTEEHANLIKRFASKATLVFDGDRAGLSAAQRAALVLAPFDLQVSILALPGDDDPDSFVKRDGAEAFLSLLEKARPAADFLIDRLVSESDGSPYGKSRAMDELMPYAYALSDEVVRQDFLDMIAQRLRIDRRLVANRFGGGAPYRAPAADGARPDVSQDSDGVLTLGKLEEDFLSIVINVPALIVSARRYLSPEILTDPVAENIYSIVLRTYDRDGSLEGLIEACGSDPRLRDFVSMLSVKQVRLEHIEGELIRKISLLRRKYFSRGWPT

SEQ ID NO: 80142 - protein, 315 aa, Unknown
  Obtained from environmental sample
  misc_feature (1)..(315): Xaa is any amino acid
MARGQTGHMAVIIVGDFDSAYLERTLTEHFHDLWPESGSFSRPIYDLSAQKEGNFQTLILTDSELPRSSIYLYWKQKTEKRRQDLADYRESVIDYLASIMLYLRFQEEIEKSETPYIYGGAGWADYGYSSRFYALVAQAKTNSVWASLKELFLVKESLSRYGFTQSETDIAKAALISDMEQTVAEKDRQNSNNYINAFTQHFLTGESVPDVEWELNAIELLLPGITLEEINERVRGYFLGNDLTVIISAPDIEQASLPTDSEVKLMAAEALRAEITPPAESDIRPELLDSAPDPRPILSETTDSGTRGDPLEAWQ

SEQ ID NO: 80143 - protein, 60 aa, Unknown
  Obtained from environmental sample
  DOMAIN (29)...(52): 4Fe-4S binding domain
  misc_feature (1)..(60): Xaa is any amino acid
MYRLAEARVSCKVLEADSELNSSGCHPSKAAQVEKCIACGNCYEVCPDVCIEVYEIEGAA

SEQ ID NO: 80144 - protein, 157 aa, Unknown
  Obtained from environmental sample
  DOMAIN (1)...(63): DNA mismatch endonuclease Vsr
  misc_feature (1)..(157): Xaa is any amino acid
MSRIRSNGTSIEVLLCKALWREGIRYRKNLRTLPGKPDIVITKHKIAVFCDGEFWHGKNWESQKSKIKENRDYWVPKIERNIARDNANEKKLIHMGWVVLRFWGKEIKKDLNGCVNEIKEAIYEKTNGVDNIDYNSMIDLYAAESDPSRANLISGEP

SEQ ID NO: 80145 - protein, 299 aa, Unknown
  Obtained from environmental sample
  misc_feature (1)..(299): Xaa is any amino acid
SIFFPKYQIRPSPREKNAGHPQEAINILSELIVRYPDSTQIKKERAFCYYENHDLSRALSSIDEILQTDPKEGEILLLKSAILLEQGQYSQSNAALDSYASINSNNRTYLFLRARIQAEGNRNRDSALNYLRSILRVNEDDAEALVYAAGLLMESQRAEDQTEGREMLERLKKTSSSSVEVLSLSVKDAIQRERWQEAQGYLNRILAVRRTAQDLTDAYNVERGLGNNARALTFARELYDRDNSNHEYAAIYISALINSGRKDEASRILETALFRRQAVKLKANIIICAAVYRPIRKTF

SEQ ID NO: 80146 - protein, 248 aa, Unknown
  Obtained from environmental sample
  misc_feature (1)..(248): Xaa is any amino acid
MASKSAERAAMGSKPSSSGDSAELPLSVTAMAHGKKAAKSAEGETKSAAAELQTHGQTQSKAKNAVADGEAAELPVSVMESTEKKPAEKKAHGSHAGSAKAAAKAAAKSVANAVGAAIDAASAKAETAAANKAADDAFVAKLKQTVEVGGLIKNISGKSSGNSAAKSAAEKSAASANSSLSSNSSVNGIESNADADLSVDNGDEREAGGTGAVDTSSSRSTAAKHADKAETPAVSQDERLEVIRQISE

SEQ ID NO: 80147 - protein, 168 aa, Unknown
  Obtained from environmental sample
  misc_feature (1)..(168): Xaa is any amino acid
MFLELIYPLFRFFTPLYVFVYLTFRGAFAALTTLLICYIFGGKIIELIRKLKIGQSIREDGPQTHLPKSGTPTMGGIFIILSVVIAMLFWQDLHNRAVWITMGAFIAFGAIGFFDDFLKFSKRNSAGLPAWAKLALQFVVAITVVLIIYFRGDERLVPNSVRWGGGNA

SEQ ID NO: 80148 - protein, 291 aa, Unknown
  Obtained from environmental sample
  misc_feature (1)..(291): Xaa is any amino acid
VEFAAPGDLLRYRIKKDHKTWAEAEIVEILEPSPERTEPLCPLYGRCGGCNLQHLDYEAQIEAKTAILRETFSRIGGISQNEIRLRKAAPFEYRNRMQFHNTTGSHPGLKERKSDRLVVIEDCPIADDGIRKALREGKLLPPPGKERFSVFSGKKTFLCEGGTDKGLVSVLGRELATDVRVFFQSNIAMLELLIVDLIAAASNSDMALPLADIYCGVGTFASFLGAELQGNPGFSEIDLVEENKNALTLARENMPPDKKINYYAVSDTDWSKIQKKGRAWARADFDPMGKP

SEQ ID NO: 80149 - protein, 177 aa, Unknown
  Obtained from environmental sample
  DOMAIN (1)...(165): Phosphomethylpyrimidine kinase
  misc_feature (1)..(177): Xaa is any amino acid
DYVLDPVMFVRGAGEALNPELNDAVAEKLLPLREIATPNILEAEQLSRIKEISTIEQMKEAARIIHGKGARHLFLKGGAKLKETMEAASPKAMDLFYDGKNFELFEEDLIETTWTHGAGCTTSAAIAAGLACGLSVRDAVILAKKFITASLKAGFALNKWVGPGNPSAWRKEKLFPN

SEQ ID NO: 80150 - protein, 321 aa, Unknown
  Obtained from environmental sample
  DOMAIN (30)...(321): Bacterial extracellular solute-binding protein
  misc_feature (1)..(321): Xaa is any amino acid
MMAERHEIVKMYLKNLKKSICHIERIDIIIIITLLILTITAFIIKLPVKKEAESKQVNLYMSLNGEELFGKELMETLVSEFEKKNPDIRLIFADSDTDIEPDVLFFIEGDYSALIAADALTELNSFTNYESGARQMAIPLVSFMDMLFYNIDILTAAGFDHPPKNRDEFIAYARKVSRGNYGAAGYALSLSQNDRQALSRDIFSWIWAAGGSFWPEEEVTPTITRAITNDISFFGVLNREGILAPDVFETTGDKRVEAFINGTTAMMIASTRTIPYLRARMGDDTFGITTIPDPGSGGKYSIGISSTYAGISAATAKPDKA

SEQ ID NO: 80151 - protein, 283 aa, Unknown
  Obtained from environmental sample
  misc_feature (1)..(283): Xaa is any amino acid
SRKGDNGRVDHESSTSRRERREAAFHFIIAAGGDGTSLEVMTSFSRLGEKQREDFAVLRLPMGTANDGADSFDLGEALDLIIEPPALQKQRAVRLKTASGKGPFHAFNILSVGLDAFVTNMTNKMKDKLPGDSYKLWVDIAALLYDKIYKVGVMDVHSFDEQGNEIQTLEEKLLLIAMGESGRRCYGSQQWILPDDRNVCAIKQMPLYKKLALKGLLSSGNHAGRDEAIFWNAARIEFQSQYPLLAQMDGEAVLLKENDFPAVIELTEPLINILGKKDRRPWA

SEQ ID NO: 80152 - protein, 175 aa, Unknown
  Obtained from environmental sample
  misc_feature (1)..(175): Xaa is any amino acid
MLLFALSFASCASMASKASVKKPEHPNSIMGKGNVGAEKLALFLLQSNSQIDKDYVRKLAGIYIEEAAFEGVNHDVAFSQMCLETGFLNFGGLVQPEWYNFCGLGSIGPEQPGLVFPDPRTGVRAHIQHLKGYATEAPLKGELVDPRYRYVKKGLKSPHRRACGYLGGGQAYAVR

SEQ ID NO: 80153 - protein, 257 aa, Unknown
  Obtained from environmental sample
  DOMAIN (1)...(94): Bacterial flagellin N-terminus
  misc_feature (1)..(257): Xaa is any amino acid
MIQTAEGALAETQDILQRMRELSVQSANDTNTDADRAELQAEVTQLRYEIDRIANTTEFNTRKLLEGSAKGVADEVQGTARYNNNSRITIDSIKSNAMMESVKTDKSWAFDGAYMLIKTNQTFNGGDPVYDPSDYKLVGPDGTIYSFRSMSADTKIKASELEPGTILADGGAVNLIEKKGVALSSVITAPGDLLVIGEHITDHELSTIGQGSILTSGSSFTMVANTGNKNNLAGSTRTRHIEYDSEGVMKIITNPGI

SEQ ID NO: 80154 - protein, 230 aa, Unknown
  Obtained from environmental sample
  DOMAIN (14)...(225): Isochorismatase family
  misc_feature (1)..(230): Xaa is any amino acid
GLPPGYRRVFDTTYNITSTLLLIIDVQNDFCPGGALAVQDGDGVIAPLNRLSAAFASAGGRVALTQDWHPAGHASFASSHSGKNPGDIIDLDNVQGQVLWPDHCVQGTKGVAFHDELDLDPACLIIRKGFRKGLDSYSAFFENDRCTATGLEGGIKQMNIQTVIMGGLATDYCVFYSAMDCRRLGFKTIVVSDAVRGVDYPAGSVEKAIAQMRDAGIIFSDSAKLLGEMR

SEQ ID NO: 80155 - protein, 89 aa, Unknown
  Obtained from environmental sample
  misc_feature (1)..(89): Xaa is any amino acid
MTAVHSLSHSALCTDFYSLTMAQGYWKQNLSRRAIFEMFFRWQPFGGGYAIFAGLGTLLDSLVSLSFSDEDIGYLQSLNFFEDAFVEYL

SEQ ID NO: 80156 - protein, 290 aa, Unknown
  Obtained from environmental sample
  DOMAIN (100)...(252): Type III restriction enzyme, res subunit
  misc_feature (1)..(290): Xaa is any amino acid
LNALQEFEWQIAIGDEVIDIEEFKKLVKQKQELIRFRDGFIKIDTEEFERLLKKVNGTKPELNDFLKAHFSGDSILSFDARKIIDNLFREQNLPVPTSLIAELRPYQKRGYNWVCSLLFSGFGCILADDMGLGKTVQSIAALLRLREDGHLDKGCLVVAPASLLSNWEKELQRFAPSLLVSRFHGPNRVINRKFDVFLTTYQTAVRDVEKLKDVAFSVLLVDEAHLMKNAETRISRAVNCCNPSTALRFPERPWKTAGRLRSLFDFSSPGILETRRPFQNSTAFHRNNAK

SEQ ID NO: 80157 - protein, 321 aa, Unknown
  Obtained from environmental sample
  misc_feature (1)..(321): Xaa is any amino acid
ASRLAEFLSRDNVDPSVLAFVSMTYRALRQNANAVNTAQRLRNLVRMTARGADITDPLEKHRYSYGYYGGTVEQLALTLQFFAEQYPGDDINTRLLFSLLESKRSGRGYWESTAVTIRVLSAVDALIRAENLTNLDVNGTVTLAGMELLKGAFKGLGAKPVTETFDFTGPVLSGLPRDSMQSLNFTRRGKGNIYYTVSLRYAIPFELQSFRDEGIGVFMSLYDINTNEEIKGTALQNGKTYRARVRVSTNRDRTYLALRVPVPSGAEILDATFVTTASYGDKGGISENGQSPWMGSWLSHPVYYGEALVPNSVRWGGGNAG

SEQ ID NO: 80158 - protein, 283 aa, Unknown
  Obtained from environmental sample
  DOMAIN (31)...(281): ABC transporter transmembrane region
  misc_feature (1)..(283): Xaa is any amino acid
MSSSDNEPTKKSSVREFRSLFPYFRKYSLSYAVGFFFLIVVDAAQVIIPQFIRQAVDIASSGVFEIRKVIIPCAIMVGLMGIVSLGRFFWRYFIHGSSRRIETELRKKLFDHLLSLSYDYYQKNKIGDLMARATNDLDAVRESIGMGLVALVDGTVMAAAILVIIFVQDTRTAAYAVIPLPLITILILLFSGVVGKRFQRAQETYSALSDAVQETFSGIRVVKSFVKEWWFIKKFADTNDDYRDANMELVKLFGIFFPFITFLSELTVLIVLWGSPTSRKKNP

SEQ ID NO: 80159 - protein, 48 aa, Unknown
  Obtained from environmental sample
  misc_feature (1)..(48): Xaa is any amino acid
VKGPDGSHKTLEESGYPDYVLLFHDSDEIGPIMLAKVAKHTGLTPNDL

SEQ ID NO: 80160 - protein, 136 aa, Unknown
  Obtained from environmental sample
  misc_feature (1)..(136): Xaa is any amino acid
MDNRIHFFSHKDVIPSKIQSEKLGIRGRQANEFAELGFPILPGFILDTDIASDIKPDEIEKDVLDMVDQCAAIVGKKFGDKENPMLLKVVISSNLAITTYPTLHNFGLAKPTIDGFCQMGRQGFCRPRSYLPYKRY

SEQ ID NO: 80161 - protein, 305 aa, Unknown
  Obtained from environmental sample
  misc_feature (1)..(305): Xaa is any amino acid
MEEKNLKKTESIENPLDLLAQIILSFCAERDWNEDELFKTIRGFYVYRNLSREGYDGVVRMLSGSYEDTRLRDLKRRLFRDEETKTLSAAPGTLPLLYTSSGVITSRGLYSLRLAPGTEGAGTKIGELDEEFVWERRLGDIFDFGNRSWRITAIGSEAVEAIPISTGADYAPFWTGEGFYRSPVISRRILEILEGYYPKGWTSLKAERMLDNFSDEAKKELEDFLFSQWSLQKGIPFPGPSFIPIEIIDDPDRGDAYLIIFHSFKGGAINFPLSLALARDLEAQFNMRVDGAANDNLGRICHEGT

SEQ ID NO: 80162 - protein, 308 aa, Unknown
  Obtained from environmental sample
  misc_feature (1)..(308): Xaa is any amino acid
KADIAAYSGISNIRGNVDVNNRQSIIDNSRGANNSGGVGINTNNSAKPIDNSADMVINTNSVNAKSINTSGINTNGVNPPDNQNIRGDLGVGINNRQGAVDNTRAVNNSGGGGINTNSSTRPVDNSVGVGINARGINTSGINFTDNPNIRGDIGMGVNARNINTQSINTSAINPTDNQNIRGDLGVGINNRQGTVDNTRSVNINTAGATSSVDVPAIKENCLSVVDALQSSAAPILREIAQRGETSAGSAASLIELVRDTVSSLDEALRPLVRSERPVPPEFYERVTVGAGHRISAEAKNALFSQIGS

SEQ ID NO: 80163 - protein, 152 aa, Unknown
  Obtained from environmental sample
  misc_feature (1)..(152): Xaa is any amino acid
MSESKSSAASHELNALGKAQAYQLADITKTPPQYGSLTPRWLTRFLEFKGLSSGIYRVNRVKEGETPLDALCSSEKKGLEIPQGYVDYEKKPRQYASHSISTIINVDTAVEDVYSPLPTTDTEQLPLAIESWKERQESQIIHMTTRVAQKPR

SEQ ID NO: 80164 - protein, 88 aa, Unknown
  Obtained from environmental sample
  DOMAIN (3)...(82): ABC transporter
  misc_feature (1)..(88): Xaa is any amino acid
MVGEGGIQLSGGQQQRIGIARALYDDPDVLVLDEATSALDTGTEQKIMDEIYNVSVNKTLIVIAHRLSTVERCDRRIRIENGKIVLSK

SEQ ID NO: 80165 - protein, 98 aa, Unknown
  Obtained from environmental sample
  misc_feature (1)..(98): Xaa is any amino acid
LILPSQYYEENLYPLQDGVMSILQHSGTDFFLTGGTALSRAYYNHRYSDDLDFFVNQSQTYNDQLNKVLALLQENGYNWGYHNEYTRAKNFTTLKVRK

SEQ ID NO: 80166 - protein, 233 aa, Unknown
  Obtained from environmental sample
  DOMAIN (5)...(233): Transketolase, thiamine diphosphate binding domain
  misc_feature (1)..(233): Xaa is any amino acid
MDTKALEKVALSIRSLSMDAIEKANSGHPGVCMGAAELGAILYGELLRHDPSDSKWPNRDRFILSAGHGSMFLYSVLYLSGYKTITMDSLKSFRQVGSPAAGHPEYGMAEGIEMTTGPLGQGFASAVGMAIAETMLACRFNTPGHTIVDHYTYVLAGDGCFQEGVTGEASSLAGHLGLGKLIVFYDSNKITIDGATDLSFTEDVAKRYEAYGWQVLHGVMYDFDEIAKLTGQA

SEQ ID NO: 80167 - protein, 230 aa, Unknown
  Obtained from environmental sample
  misc_feature (1)..(230): Xaa is any amino acid
MLIQNRGFPASEESNETLSHEWQHLMNLAGTVIRGNSTDLWIDEGLSVTAEWVYLGEHSERLIWYNENGNGNQVKGLIDKGNNFFVWGNREEENQYAVLDDYSTVYLFFQWLRLQSDKEIYCKISASDDYDYNAVINAFNDTVTDNQYGDWETMLKDWLAANYFNNSTGRYGYKDEKDLKNIKIHYAPGGSKTINLFPGEGVYSMVKESTPIPTSSKNIYYASADLSWVK

SEQ ID NO: 80168 - protein, 146 aa, Unknown
  Obtained from environmental sample
  DOMAIN (5)...(95): CAAX amino terminal protease family
  misc_feature (1)..(146): Xaa is any amino acid
MIASYFRISIAIVPAFVEELLFRGVILNGFKENYSHKKAIIVSSLLFGIVHLNPWQFVTASLFGIVSAWVCLKMKSLTLSIYMHLFNNTAVVFARESRDIIIIKGFNSGSSVHTFQPLWFDALGIILASIGIILFLGEIENATSTP

SEQ ID NO: 80169 - protein, 87 aa, Unknown
  Obtained from environmental sample
  misc_feature (1)..(87): Xaa is any amino acid
VDVRWAAKNKEVHYGYKNHVKIDKKSKIITKYRTTGAEVHDSQELKNLIEEGKDRRIYGDSAYTGKEVQSCIPETVLNRIHEKRVSQ

SEQ ID NO: 80170 - protein, 87 aa, Unknown
  Obtained from environmental sample
  misc_feature (1)..(87): Xaa is any amino acid
MSLEVRLMDTDFLIIGGGTAGCYAALTFCEHSYARVLIVEKANIQRSGCLAAGVNALNAYIGPGKTPQDYVDYARGDASADAVIGWP

SEQ ID NO: 80171 - protein, 82 aa, Unknown
  Obtained from environmental sample
  misc_feature (1)..(82): Xaa is any amino acid
MGHFRVSLKIAQRIIDDGVFPNFVKDRYASFSSGDGAKFSKGELTLKQLAKIGTDAGYGKTGITSGKQEYLENVLNSYLLGL

SEQ ID NO: 80172 - protein, 293 aa, Unknown
  Obtained from environmental sample
  DOMAIN (23)...(92): tRNA synthetase B5 domain
  misc_feature (1)..(293): Xaa is any amino acid
MLELPGGSVAFGVIDTDPNPFPDKVVTVRPSRTKRILGAEFPADNMVFSLNALGIKSVKNSEELVTCNVPHYRHDIAEEIDLIEEVGRQYGYDNIPGAESADVRLVRQPSTAETNRDTARFALCYFGLNEIMTNSMVSESKRKLLTPLSTPPSETQSKRPTEPVKILNPLNPDMAEMRTSMALSLLDTAAYNLNRKNANNRLFEIGKVFEPDEKSGLAIERDILAIAVEGDYVPQSWGNQKLENSFFVLKGIIEAFAAHCGWGAAKFERLVTACPLYGPESAGITLRTALGGI

SEQ ID NO: 80173 - protein, 236 aa, Unknown
  Obtained from environmental sample
  misc_feature (1)..(236): Xaa is any amino acid
GLPPDIARVDTPSREQAIRIINSLISARSKTRGKDKEGEERVEYIADRLGIVKEDVIRVIGLLREEKILADAKDLSVYIKKRERINRSKTILDTHINIEKFLFSYLDENERKYNIKEMNEALAAEYAGTSIRQLGTILNYYAIKHLVKRTREYKNYVTLKPYFSMAEMRSRSNKRFEIAKVVIEYLVSKIQTSRMRRGPRMSKLTFRYLKLKMNFTRTCLARKRRSTKSKMPCNIY

SEQ ID NO: 80174 - protein, 213 aa, Unknown
  Obtained from environmental sample
  misc_feature (1)..(213): Xaa is any amino acid
MLLAGLLVGCAPKTVPLPAESANECERLVAMTERVYCGKSLEEAAAAATRLFELTGGGYVVTRTADGLTARRGWSPVAPDKDAPRDGSDTWILTAKEVSECRNGSAAVPGVKLSVYHIPELYAQGLIPTECSALPAFKPVVSRFTTTPAVYDLFFSRMDHLLGKNVPWQSCASHNENVRDNVHYSDQFSGVELPGTSRRPVRPGARTTFRTAG

SEQ ID NO: 80175 - protein, 85 aa, Unknown
  Obtained from environmental sample
  misc_feature (1)..(85): Xaa is any amino acid
MHLTIPELKETLDRLYLEVNKPDFIPFDPVQFPRRYKSVCDKEIAAFLSATIAWGRRDMILKSAEKMFRFGLKPTRISADLSCGA

SEQ ID NO: 80176 - protein, 239 aa, Unknown
  Obtained from environmental sample
  DOMAIN (3)...(235): Isocitrate/isopropylmalate dehydrogenase
  misc_feature (1)..(239): Xaa is any amino acid
GRNRARSKSGGFSGRGVVQGFTNYDDSIRSFARACFIYALAEKLPVWFAAKDTISKTYDGRFKAIFNEVYETEYKEKCAAAGIQYFYTLIDDAVARVVKGEGGFLWACKNYDGDVQSDMIASAAGSLAMMTSVLVSPSGVFEYEAAHGTVQQHYYRWQKGEKTSTNPTALIFAWSGALAKRAELDGLKDLADFAKRLEAAVLNVIEDGIMTGDLAKLSDPPPEKVLNSWDFIDAIADRL

SEQ ID NO: 80177 - protein, 276 aa, Unknown
  Obtained from environmental sample
  DOMAIN (129)...(272): Integrase core domain
  misc_feature (1)..(276): Xaa is any amino acid
VYAPCDGKPVKYTAKPPLKDRDKAPKSKKTGRPEKYGKPFATVLLGLWEFFDFQCGKLLAPLLKGMAGFLVQEFNLSEDMRALLLSVSPATIDRKLRNQKKRCRLKGIHTTKPGTLLKSQIPIRVCFDRDERRPGFFELDTVSHCGPNAKGQFCQTLTVTDVGSGWTEECALLNNAHRWVKEQIESTRDSLPFPMLGIDSDNGGEFINHQLLDWCLQNNVKFTRGRPYRKNDNCFVEQKNGDVVRKTVGYGRFEGENAFNALDEVTSADLSRGGDW

SEQ ID NO: 80178 - protein, 52 aa, Unknown
  Obtained from environmental sample
  misc_feature (1)..(52): Xaa is any amino acid
MQNLIMTLSPVEKTGPHLQFLAKVSLLFKASEKRKEILEAKTPEEILKILAE

SEQ ID NO: 80179 - protein, 110 aa, Unknown
  Obtained from environmental sample
  misc_feature (1)..(110): Xaa is any amino acid
GFPRLSRRNRRISDYTAHGELLAYSEYEYDPSGNQTKWNFYNADGELYFTVEYEYDSGGNRTKWSQYTANGELSGYAECSYDSKGNIIKMSDYDADGELYSYTVFLYKII

SEQ ID NO: 80180 - protein, 145 aa, Unknown
  Obtained from environmental sample
  misc_feature (1)..(145): Xaa is any amino acid
VSEALTPSVIEAGIKNAKPWSEYDLLAAQGFARQRADWLVGMNLSRFMSVGNPPPPFTVGRVQTAVLASIAGRNNEVKNFTAVPYKKLEASIKSKDGVSIKAYLENPKTGSASFFECDWPYLIDALGNCKNKGFSADLSWGGGLG

SEQ ID NO: 80181 - protein, 263 aa, Unknown
  Obtained from environmental sample
  misc_feature (1)..(263): Xaa is any amino acid
MKKTIFYLILISCIAVCGFSQTDLQPAAIVNLTKNEPITVKQLRTEVERMEKTRGRVLTKNERLQLLDVMINEKLVIQAAEKEKIVISENEVNAQIQQLRNVLAQQLGRQPTDAEFNQAIENESGMGLAAFREQLRKQMIVQKYLLAKKEPLLKSIKEPTEAEIIEQYNLAKAQFVRPETIRFSMIQVPYGPDSASRAKARDLANSLLKEIGSNPSKFDEVVTRSYAPNSGFIAGDGGFLPRNHEALNIVGQDFIHTAFSLKQ

SEQ ID NO: 80182 - protein, 248 aa, Unknown
  Obtained from environmental sample
  misc_feature (1)..(248): Xaa is any amino acid
MMTEAVCLAAVQEDSSALEFVPEAQKTEALCLAAVQKEGRALEYVPDEKKTEAVCLAAVQQDSGALEYVPEALMTEALCLVAVQDNGYTLQYIPDALMTEAVCLAAVQENGYTLQYIPEALKTEAVCLDAVQNDWRALEYVPDAKKTEALCLDAVQQDYKALEYVPDALKTEALCLDAVQQQGRALEFIPDAKKTEALCLAAVQQNGWALEFVPEALKTEALCLAAVQQTGTALECVPDLGRSDLDRG

SEQ ID NO: 80183 - protein, 316 aa, Unknown
  Obtained from environmental sample
  misc_feature (1)..(316): Xaa is any amino acid
MGNDVGLDPALPGGWTLEEAIDKINTAAESELETMKQTLIYAFITRAAKILAARYDAYKRENGLVSYDDMLRLMRNAVYSSDGGILRQLRQRLRYGIIDEFQDTSPIQWSIFQKIFLGNEDGAKIYIVGDPKQSIYSFQGADINSYISAKNAITAQNGTVYSLKNNFRSLPEMIDGYNAILCDDTESWFTPDGGDRDISYSKATAACPPPQRGAPPRPLTCKAVQVVTLTEKSVADNRKIMAETTCDAIKKLIGMTISIPNGLNWEELTLDYCDFAVITETNDFANPFIEAFMKQGIPFVKLKWPGSADLIIGGGL

SEQ ID NO: 80184 - protein, 47 aa, Unknown
  Obtained from environmental sample
  misc_feature (1)..(47): Xaa is any amino acid
GFPPGLWTARSIEVELIAPVAMEKAMRFAIREGGRTVGSGAVTAIIE

SEQ ID NO: 80185 - protein, 116 aa, Unknown
  Obtained from environmental sample
  misc_feature (1)..(116): Xaa is any amino acid
MEAGSRWAIHPFDLQTLFTQLTKVAKTQSDQREGAALHQAIQGAQLQRKTEDQIKAVNQAQNMGEDGAEKVKDRGAQAHNGNGKGKKQEDEKPQQEEAKAAVIHDPSLGRNIDISL

SEQ ID NO: 80186 - protein, 249 aa, Unknown
  Obtained from environmental sample
  misc_feature (1)..(249): Xaa is any amino acid
MAKNLLDLYRDTPIHDAALNLLENISAPLQSEENAEWFRDRIVIPKTASAIADEKVWEGIVGGMRENRVITFQYRSAASENSDSKEAPKLDTRRVRPYQLLFDRSDWFLFAFDENREDMRMFTIARIYDVVITGNKFTIPRNFDYRSLEGASYFGVYSGGKVYHFIIEIKGDTRWIRERVWAEDQRIEKIQGGIKFSFTSNQFEKVLEWILHIGPNARPLAPKNLIERGKQLSGNGSVSADSSSRGGMG

SEQ ID NO: 80187 - protein, 197 aa, Unknown
  Obtained from environmental sample
  DOMAIN (23)...(194): ABC transporter
  misc_feature (1)..(197): Xaa is any amino acid
MLTVDIQKKLGAFSLNVSFNAAEGVTGILGASGCGKSMTLRCIAGIEKPDQGRITLDDAVLFDSEQGINLKPQERKVGYLFQNYALFPNMTVEKNILCGLYHEKDRTKRQQMLDDTIYLLKLEGLEKHMPSQLSGGQQQRAALARILVNKPRLLMLDEPFSALDSHLRGQLRIQMKNFSAITAARHDGDAYRDGAYI

SEQ ID NO: 80188 - protein, 166 aa, Unknown
  Obtained from environmental sample
  DOMAIN (4)...(146): Glycosyltransferase family 28 N-terminal domain
  misc_feature (1)..(166): Xaa is any amino acid
MVNIAFTGGGTGGHIYPGLAVAQELKRILDGGEFRLFWIGSAAGMDRSLVEEAGLDFYGIPSGKLRRYFSLRTIPDFFRVVARFFAARKILKREHACLLFSKGGFVSVPPCAAAASLGIPVFTHESDFSPGLATRINARFCARTGGKIFTAFEDTARFLPRPMRDR

SEQ ID NO: 80189 - protein, 156 aa, Unknown
  Obtained from environmental sample
  misc_feature (1)..(156): Xaa is any amino acid
WFFKIRFGRGGIVGLLHDIDFEMFPDQHCIKAPELLRAGGVSEESIRAVCSHGYGLTSVDAKPEHLMEKILYAADELTGLIWAVAIIRPSKSVMDMEVKSVKKKFKTPAFAAGCSRPVIEKGAEVLGWELDTLIEKTILAMRSCEAEVNAALADLK

SEQ ID NO: 80190 - protein, 271 aa, Unknown
  Obtained from environmental sample
  DOMAIN (139)...(270): ATP synthase alpha/beta family, nucleotide-binding domain
  misc_feature (1)..(271): Xaa is any amino acid
MANVGSIIQVVGPVVDVSFSATGGTESIPGILNALEVITDRRSDGDRKVVLEVLQHIGDNRVRCVAMEATEGLSRGMEVSDTGHAIQVPVGDEILGRMFNVTGKSIDDKGSFTAKQYASIHRSAPDFADQKPATEVFETGIKVIDLIAPYAKGGKIGLFGGAGVGKTVLIMELIRNIATEHSGYSVFSGVGERSREGADLWKEMNESGVIDKTALVFGQMNEPPGARMRVALAGLTMAEYFRDKEGQDVLLLSTTYSAYSGGSQSSRGKIP

SEQ ID NO: 80191 - protein, 263 aa, Unknown
  Obtained from environmental sample
  misc_feature (1)..(263): Xaa is any amino acid
MFKIQGEHALYRSDPSLYAIYDRSSGATDPASVAKIKLNMIGGQSWRVAGQWIEWDFFVPEDGMYRFTIKGRQNYNRGFVSNRMVMIDGQVPCEELTAVPFTYSNKWKLTTFRDDQGDMLFPLERGQHSFRLQAAMGGMGEMLSVMEESIFRLNGIYRKILVLTGTEPDIYRDYRVDVVYPEIITAMALESKILYKLVDDLTAYSGERSAHAATSLTLARQLGMFVRRPDKIPRTMVNFKFNISALGDSLLALPSPSLMLITL

SEQ ID NO: 80192 - protein, 160 aa, Unknown
  Obtained from environmental sample
  misc_feature (1)..(160): Xaa is any amino acid
MLKQISIKNLALIAGAEISFSNGFWAITGETGAGKSVFLSALKLLCGAKASSEQIRNGEECAVLKGIFNIEKLSDAKEFLQEREIDFEDGELEIQREIFANGKSKARINGVISSTRDLQELGEKLVQMHGQSEQTLVKDIRAQQKFIDAYCGNEELLQKC

SEQ ID NO: 80193 - protein, 260 aa, Unknown
  Obtained from environmental sample
  DOMAIN (9)...(260): Cys/Met metabolism PLP-dependent enzyme
  misc_feature (1)..(260): Xaa is any amino acid
MENRNYRFETIQIHAGQEKPDPTTDARAVPIYQTTSYVFPNSKSAADRFALTEAGNIYTRIMNPTWDVFEKRMAALENGAAALATSSGAAAITYAVLNIARSGDHIVSDNQLYGGTYNLFANTFKDLGIDVSFVDGGNPTSFENAIKPNTKALFFETIGNPNASIVDIEAVVAIAHRHGIPVIVDSTFATPYLLRPIDYGVDIVVHSATKFIGGHGTSIGGVIVDGGHFDWAQNDKFPGLSRPNPRYHDIVFTDAVGEWA

SEQ ID NO: 80194 - protein, 305 aa, Unknown
  Obtained from environmental sample
  misc_feature (1)..(305): Xaa is any amino acid
MLNLTFAPSADILAPLTKDRILGAWRDPFDPPTVVVPNPAVGKWLSVRLAEDPSVGCVANARMLTLERFLWDALGADPDMALIDAEHLSQIICALLDEGTLGDDLYKPLSDYLYVDGNLTSGVNRSIDPIKRVQLSAHIARQFLEYEYNRPSVWSEEASRWGRHGIDAKWLLGKEYFEGRENEAWQMDLYRRSRDCVAKSASPRYTTLPHLYRRRRDERAKEKRPWCDAGSNRQIILFGVSKISHFHRNTLVEISQSDGVDMHVFLTNPCAEFWETWTRADVRARRADGGQRLALRGRRNNAGNR

SEQ ID NO: 80195 - protein, 214 aa, Unknown
  Obtained from environmental sample
  misc_feature (1)..(214): Xaa is any amino acid
MREGSVITGNTGGGVSVYEGTFTMSGGEISGNTASSSSGGGVYVGGGTFTMSGGAISGNTASYYGGGVYVGSGTFTMSGGEISGNTGSSSGGGVYVGSGTFTMSGGEISGNTARDYGGGVYVDSGTFTMSGGEISGNTASSSYGGGGVYVGSGTFTKIGGGTIYGFTNGDAKSNVVKNSSGVVQNNRGHAVYGSSPPSKPRGTTAGLLGKMDSK

SEQ ID NO: 80196 - protein, 274 aa, Unknown
  Obtained from environmental sample
  DOMAIN (214)...(270): Elongation factor Tu C-terminal domain
  misc_feature (1)..(274): Xaa is any amino acid
MITGAAQMDGAILVVSAPDSVMPQTREHIILARQVGVPNMIVFLNKIDLVDDAELLELVKEEIKDVLSQNGFPGDKTPIIEGSAFKAMSELAEGKPSEETTKCIEGLLEAMDAYFPDPVRDSDKPFLMPIEDVFTISGRGTVVTGKVDRGILKLNEEIEIVGIKPTKTTVVTGIEMFNKLLDEAQAGDNVGTLLRGIDKKEVERGQVLAKPKTITPHKVFKGQIYCLSKEEGGRHSPFFTGYRPQFYFRTTDINRKRKIAGGQRNGHARRLHRD

SEQ ID NO: 80197 - protein, 162 aa, Unknown
  Obtained from environmental sample
  misc_feature (1)..(162): Xaa is any amino acid
GGLAQRVAVLKRFKTLLSQQRERFKSYLDLLDKQQNVIESGSAEDLLTYVEIEEKIVADIFSIQKVIDPLEEMYNSLVTDHTAHISIKMENGGQEEVPTLKASLENLKNEAVIRSTKNKELLSKRMLELRQEIKTLRNNPYAASGRSAYSNSNKASLVDVQG

SEQ ID NO: 80198 - protein, 277 aa, Unknown
  Obtained from environmental sample
  misc_feature (1)..(277): Xaa is any amino acid
MAAAFRKNKGRIDVREGFAIVTFSWLATTFIGAIPFFTFLSAHSGASPFAVWTDAMFETMSGLTTMGATVIADVESLPRSILFWRILTHWIGGMGIVTLALALFPAFGVVAYQMFRGETTGPTKERLRPRLAQTAVILWGVYAFFTLLETVLLMAGDMPFFDAVCHSFSTMATGGFSTRNASVASFDSAYIEWVIIAFMILGGTNFFIHYRIIFHNDWETLKRNREFRLFAAILVAASALCVIFILTQGLHSSDWVQNNFKSPNAESRPRAPPKPPP

SEQ ID NO: 80199 - protein, 60 aa, Unknown
  Obtained from environmental sample
  misc_feature (1)..(60): Xaa is any amino acid
EPLRVQGENRAPGPEIFAETAHGQMDAQNLEDVMHRFVHGGFHVLVSTTIIENGIDIPQC

SEQ ID NO: 80200 - protein, 290 aa, Unknown
  Obtained from environmental sample
  DOMAIN (173)...(223): Flagellin hook IN motif
  misc_feature (1)..(290): Xaa is any amino acid
LSFRQIAEGRYAVFKINVTVDKRDPDEFMVHTNGIVLVQGRIGRQFDLALNLETGYSDVVWSDTRNKLEFLNNDHNGSLGALVDLRDYTINTEIQALDNMTMNFVGLVNEVHEKAYGINGETGLKFFNEHPFVTNVNGSYDRNGDGDDDSSYIFRVSGTNILESRAQVGLEGVITLSAFGGDRRIPYYPTDTVADIITRINNSGAEVTARLNRDGYLTMKATPSDDWQNPDFVIRHIEDSGRFLEGYAGLLRASGPDGAFDWARPDAVAALRGGPTDWEVAPIAHPFRLG

SEQ ID NO: 80201 - protein, 309 aa, Unknown
  Obtained from environmental sample
  misc_feature (1)..(309): Xaa is any amino acid
MALDWKAFVNFGGKDEISGAVDKARKTTEKASKGMGDGLRETGKHADSLREKIGSIGDIARGVAIGNLITKGVTMAAGAVKNLVLSVDEFAQRADNARMSAMKIGLSAEGFQKLSYAAASAGVSADKLQAGFNSLNKNLGSGGLVKFLADTDKALLSQVKSAKSNTEIFSIMADAISKENDIAKRAALGASAFGKSWAELYPMLSQSAEGIQKIADSEKMLSALNVNIESGGLVKYLESTDKALLSQVKSAKTSKDALYALADAVKAEGDVRKRTAHDNAAFGNRARSLRPCLCRGPRALKKQRTKFRI

SEQ ID NO: 80202 - protein, 310 aa, Unknown
  Obtained from environmental sample
  DOMAIN (23)...(202): DHH family
  misc_feature (1)..(310): Xaa is any amino acid
MRYLHNPFEMPGMEDAVERILAAKEEGEKVLVFGDSDVDGITGTVLLTEYLAGMGMDVTWRIPGGEDPYGLSIKAVEEFAAAYGTLIITVDCGISCVNEIRRAGELSVDVIVTDHHEPQEQLPQALAIINPKLKDADLSTPPYPFKDLSGCGVAYKLVSALRFARKSELYGQPVCLLNTRPVNNAWIVEAAKMRNLAVIGTITETIIPGMVPISDTRLPAFLEGQQILVWDAPQQKRTLAKLFGNSVEVGMLDIAPEIGKEIPQVAGQSLIRIQELFSIAKYSDREFNDLDVLISLFLFVCAQTGEDRRH

SEQ ID NO: 80203 - protein, 92 aa, Unknown
  Obtained from environmental sample
  misc_feature (1)..(92): Xaa is any amino acid
MNKTTLKKDQKLNSGFIILDTVELEELKAQGIWAKHEKTGVEVFHVLNDDDENLFSFSFRTFPEEYTGVAHILEHSVLCGSERYPLKTRLLF

SEQ ID NO: 80204 - protein, 275 aa, Unknown
  Obtained from environmental sample
  DOMAIN (202)...(274): Peptidase family M41
  misc_feature (1)..(275): Xaa is any amino acid
MGARIPKGVLLVGMPGTGKTLMARSVAGEAGVAFFHMSGSDFVEMFVGVGASRVRDLFEQGRKNAPCIIFIDELDAVGRTRGAGYGGGHDEREQTLNQLLVEMDGFDSKDGVIILAATNRPDVLDPALLRPGRFDRQVVIAMPDIKEREAILQIHASKIQMDKTIDLTRIARATPGMSGADIANLVNEAALFAARKDKNEVQMSDFEEARDKVLMGVARKTLVVSDKERRMTAIHEAGHALLHYFLKNGGSSSQGYHYSARARARADRSSWGGLG

SEQ ID NO: 80205 - protein, 296 aa, Unknown
  Obtained from environmental sample
  misc_feature (1)..(296): Xaa is any amino acid
LAGFIKPLFFYPTAGLFFAPPGLKEKVPGAGIGPLEGILPLWRIPPGKSTNKVCPYGLPWANEYRGRPLLLYGHTPVREAQMINKTIGIDTGCVFGGRLTAYRYPEREIVQVNAKHEYYAPVKPFLNKESVGSDDMLNIDDVLGQKNLNTRLRRSIRINAENSAAALELMSRFAADPHWLVYLPPTMSPCETSKLPAYLEYPSEAFDYYKTRGVGKVVCEQKHMGSRSVVVLCKDPETAAKRFGVADNSFGIIYTRTGRRFFDDAETEMALLARFQKVLCESRSGDSRRFAWGGMG

SEQ ID NO: 80206 - protein, 111 aa, Unknown
  Obtained from environmental sample
  misc_feature (1)..(111): Xaa is any amino acid
VYRLNDWDIIDDGRTAEDALQNGNRLLTGNGYLGRRGVVDEAEAADMPATILSGLYDRQSDLWREPVNSPDPLYTLVSAADLSLRVGDEHTIFHEQALNFRYGIYSRRTSW

SEQ ID NO: 80207 - protein, 211 aa, Unknown
  Obtained from environmental sample
  misc_feature (1)..(211): Xaa is any amino acid
MTMMGMILGAVLNVILDYIFIMVFEWGVEGAAWATIISQFASFVFLFSFISSKKAVVRLNPRVFKPDFSIIKQIMAFGSAQFLLQFLMSTVQLLTNTSVGWYGADALGVDNGGDVALSGMNIVGSILMLILMPVFGINQGAQPILGYNYGARNFKRVLRAYIGAIAAATIICVFGVAVIQFFSVQLVRIFAPKGSDAIMMFAPRAMRIVMI

SEQ ID NO: 80208 - protein, 176 aa, Unknown
  Obtained from environmental sample
  DOMAIN (124)...(159): Sel1 repeat
  misc_feature (1)..(176): Xaa is any amino acid
RKALEYYQKSAKQGYAPALCNLGWCFESGSGIDQDIEKAVACYQKSAEQGYAPAQGNLGFCCENGNGVPKDEKKAFEWYKLAANQGNVFAQYNLGACYEFGKGIEADIGKAIEWYRKSAEHGYAPAQNCLGVCYEHGNGVTRNPLVAFEWYNYAAAQGYSAAQKNLDHIKNALKKK

SEQ ID NO: 80209 - protein, 189 aa, Unknown
  Obtained from environmental sample
  DOMAIN (8)...(31): Prokaryotic N-terminal methylation motif
  misc_feature (1)..(189): Xaa is any amino acid
MSRFFKKQGFTLIELMVVIVIIGVLASLAIPRFTEASSKAKIAEAPRVLASYESGYLAALAETATPSALNADDLIFEAPTDSKWFTYTVKQSGADECSGVANGAIGKFASGGSLKTAYIASGSGSGNFKHTSSDAAQAKKMGPKFLWSGGLEFLKLMFMVKSTLCAIKARTNPQTVCPFVRFKNLIEFW

SEQ ID NO: 80210 - protein, 126 aa, Unknown
  Obtained from environmental sample
  DOMAIN (64)...(98): Tetratricopeptide repeat
  misc_feature (1)..(126): Xaa is any amino acid
PQHDRSAEIRRHDRAIADYTKAVKIDPKNAIAYNNRGYAYDNKGDYDRAIADYTKAIQIDPNYASAYHNRGFVYHYNKGDYDRAIADYTQAIRSNPSHADAYYNRGIAYPSVLSETGFKMIEPYGF

SEQ ID NO: 80211 - protein, 228 aa, Unknown
  Obtained from environmental sample
  DOMAIN (57)...(90): Tetratricopeptide repeat
  misc_feature (1)..(228): Xaa is any amino acid
MAKRYSEARDSFQSATKINPRFEPSWYNLGGTLRALNRTDDALAAYRQAVEIKADYSAAHREIGRLLLTKGDTQGAIKSFTSALQYNPNDVNTMCELGAAYSQANNYAEAENIFTKALKINAADPQTNYNMAVVKLELKKNTEALNFAKLAVDASPSNAVYIYTLGLACEAMGATEQAVASYKKPRLWTPNICAPEIILAVFILPAEIMLKPFHGLTKHTRLILPTLK

SEQ ID NO: 80212 - protein, 300 aa, Unknown
  Obtained from environmental sample
  misc_feature (1)..(300): Xaa is any amino acid
MEDPLKGIRRSARSPFEKKTDEETRKRDTQDKLVPPVLNQRFDAPRFGSNTFSIDYRLNPQSTSTLNFDSRRWKDNTEIDWGDISNIRSNFRVDPNINLNLSHSEGLYSTSFAFTGDGFWTQYSYLNEDAEEYLTDPYPRQKIANDRLKESRSSFFTTSYVSSTTIRPFFQNAIFGQSNLAYNLRGIAVKSKFVEKDMTAVPSQDRTDFLESWAENPEWEMEYAAWEKEKITAHSLSANITASIMDKTHSFTMTAELPPRDASLNWNTALNIWITRTTASWGMQRPGRGGAMEAERPLIS

SEQ ID NO: 80213 - protein, 134 aa, Unknown
  Obtained from environmental sample
  misc_feature (1)..(134): Xaa is any amino acid
MFPFGGQGGPKMPDFKGFGGWKFLLVYIVILIIGMSLFNYVFLNKMNPAIDFSEFKTRITTGEIKRVELTESYFIGFTNPDKKESSRAIQRSYGSSQDKVYRTVSILTEDFLKFLDENNISTERSRNWRSVCLL

SEQ ID NO: 80214 - protein, 194 aa, Unknown
  Obtained from environmental sample
  DOMAIN (83)...(188): Response regulator receiver domain
  misc_feature (1)..(194): Xaa is any amino acid
MGGGSGLGLSIVKRIVERHAGAVWVRARGADEGAFPGSTFHVSLPLHSEISWDDDESNLSESRLQEADNIDMDALNDEELEKPVILFIDQDKESTALASTVIENVYDILVVENGEQGLITALNQKPSLILIDSHLPGLDGYTMCRILRSLDETKNIPIAIFSAGVRDDEIQKGFSCGADDFESNRAARDNGGES

SEQ ID NO: 80215 - protein, 314 aa, Unknown
  Obtained from environmental sample
  misc_feature (1)..(314): Xaa is any amino acid
LIARGVNVKSEDAPDFRPFIFVLLVFCGVSLLPAAEAGIDFSIRYFDKRVYYLESDPIFIQVTITNNSPFTYRFKLADERAFSVDFDVRTNSNRVVEAADILVRKRSQSQQVYFREVSVEPGESFSFVEDLNNYATLTQSGNYVVQAKIYPDLYHTVRSESSGVWSYGASGISPGATLAAAGKPLESNRLALNVRPRLIRGPDGIPLELDVETNAVLVREKLPPDEVIRYMLTARQKSQWEKYFLYLDLEAMLSRDAYRRRQYTAESEEGRQRMIARYRQDLQNSVIDGDISLVPMKFIIERTTHNGQTGTVTV

SEQ ID NO: 80216 - protein, 182 aa, Unknown
  Obtained from environmental sample
  misc_feature (1)..(182): Xaa is any amino acid
VKTTPKTSVDNRNSLNFERPRLNQLFAEAVKYPVVVVCAGAGYGKTCAVHDFAQEYHATTFWLQLSERDNTGARFWESYIHTLTKINAPLTKALTKLGFPDTKDKLNHYLTLLSDLVEKKRRIIVMDDFHCIEEPSVIKFIEECILFKMPPGTSVFIISAYAFRDIKTSSRADLILDGGGWG

SEQ ID NO: 80217 - protein, 87 aa, Unknown
  Obtained from environmental sample
  misc_feature (1)..(87): Xaa is any amino acid
VRNKIYELYALEQLAEGNSCVHRLNPLAKLLAAAVFIITVVSFNRFSFGRLIPFVFYPAILMVLSQTPYSMLNKRYLIALPFCLFGG

SEQ ID NO: 80218 - protein, 243 aa, Unknown
  Obtained from environmental sample
  DOMAIN (7)...(240): Pyridoxal-phosphate dependent enzyme
  misc_feature (1)..(243): Xaa is any amino acid
MKIANNITELIGNTPLVRICKINPYEAEIVAKLEMFNPLSSVKDRIGLAMIEDAEKRGVLKAGDVLIEPTSGNTGIGLAYVCAVKGYRLILTMPETMSIERRKILSALGAEIVLTKAYDGMEGAVNKAKELAASMPNAFIPQQFDNPANPEIHRRTTAQDILRDTDGKVDIFVAGVGTGGTLTGVGEVLRNIILMLKSLPLNHSNHRCLLAVKRAAPNPGNGAGLSRDSEPDLKMKFSGNPED

SEQ ID NO: 80219 - protein, 55 aa, Unknown
  Obtained from environmental sample
  misc_feature (1)..(55): Xaa is any amino acid
MKDNITHIQNMIYEIRGQKVMFDRDLADLYGVEVKRLNESVRRNTKRFPQKLYFH

SEQ ID NO: 80220 - protein, 228 aa, Unknown
  Obtained from environmental sample
  misc_feature (1)..(228): Xaa is any amino acid
LQERQEGQGRSLTDEDRENAVNSALEVLNNRIDRFGLTEPVIRRQGPDQIYLEIPGSADPERINDIIMGKGSLAFHMVDSEATDAFNSYYLANPARTFDNDGNIINPTIVPADVMVLGVYQKDRYGLDEQMRNADGSLRYAALKKEVGLDGNHIRSAVVERNTLDGKPEVTFMLDSEGGEIFYRLTSANVGKPMAIVLDNRVKSTATIQSAIRDAVRLKGFGLDEANK

SEQ ID NO: 80221 - protein, 92 aa, Unknown
  Obtained from environmental sample
  misc_feature (1)..(92): Xaa is any amino acid
LSLINIKTDLNEPQFRAVTTIEGPVLIIAGAGSGKTRVITYRIAYMLERGIPQHSILALTFTNKAAKEMETRVKELTGKKLQSLLSALLAIT

SEQ ID NO: 80222 - protein, 327 aa, Unknown
  Obtained from environmental sample
  misc_feature (1)..(327): Xaa is any amino acid
MIRSAERISDSEIATAAEMLVSDLQKLVQEKDKQQSQKYINSLTDYYLKGGNYADVEWELNAVLRMLPHIKAKDINAVIKDYFASDDIQVFIFAPDSEQDSLPDEARIKQMIAESKGMKIAAPRSKIVEGGLLSSVPERGKVVSESIDAETGAVIWDLSNGSRVILKSTKNKNDEIVMHAMALGGTSSAALEDDVSASLAIEMTQVSGLGPWSRPELTIKLAGKQVSISQFVYSYYRGFRGSSNTVDLKTFFEMIYLGFTDQRIDNEAVQAMLDQYRTSLALTSEDPHAVFSYEIHRTIYSGHPHFNRWNWTIFQKRYDTPLALSAV

SEQ ID NO: 80223 - protein, 285 aa, Unknown
  Obtained from environmental sample
  misc_feature (1)..(285): Xaa is any amino acid
MIQYNYLDINNQASRTGLVYAASKGIPVFIMEPLLGGRLANPKSLPNKALQIMNAADPSLSPAARALRWIWNHKEVTLLLSGMSTQDQMDENIGLAERVAAPGVLSESELGVIDSVIKIVNESNKIPCTGCGYCIPCPAGVNIPGCFASYNDSYKNGRFATLKPYVMATAALTTKRGLASSCRSCGKCETHCPQSIKIIKSLKTVASRLEPFWFTAGISAVRGSRGFRAKKGAEPETYPVCQLTYFPGQYEIIGFEIKREAFPPEIDEGQKPSLAEKNRGPLPRK

SEQ ID NO: 80224 - protein, 170 aa, Unknown
  Obtained from environmental sample
  misc_feature (1)..(170): Xaa is any amino acid
MSNEKLALLGDEAIALGAIHAGVSAAYGYPGTPSTEILQYLIDEYAKNQSGPVASWCSNEKTALEAALGVSFAGRRALVTMKHVGLNVASDPFINAALLKIKGGLVVAVADDPGMHSSQNEQDSRFYASFAMVSCLEPRNQQEAYDMVREAFDVSECFNVPVLLRLATRL

SEQ ID NO: 80225 - protein, 281 aa, Unknown
  Obtained from environmental sample
  DOMAIN (17)...(88): HAMP domain
  misc_feature (1)..(281): Xaa is any amino acid
VEKQEVEETLSQIITVMILIGFICFVIAIIIAVIVGKSIAKPLVYMVEALKGITQGEGDLTQTITVQSKDETGDLAAYFNKLMSVLRKPIGEAKSITKLLVSVSEELSSVSGLLAKGSEETLRQSNIATNTTEQMSVNINAMASGAEESSVSAEEVAGAVVEVATNINAMASGAEEASVSADEVASAVAKVGTNINAMANGAEKASESADEVASAAEQMSANMNTVAIAIEQMSASITKYPAMLGSSQSCSDALPDLASDEAMSKLVRLPRGRQVTDLIKK

SEQ ID NO: 80226 - protein, 118 aa, Unknown
  Obtained from environmental sample
  DOMAIN (6)...(118): Endoribonuclease L-PSP
  misc_feature (1)..(118): Xaa is any amino acid
MEIVQTHAAPAAIGPYSQGIAVGGLLFTAGQIPLDPATMKIVEGGIEEQTAQVLKNLDAILGQAKTSWDKVAKTTVYLTDLNDFATFNSIYEQHLKGAKPARSTVQVAALPRGSPIIR

SEQ ID NO: 80227 - protein, 326 aa, Unknown
  Obtained from environmental sample
  DOMAIN (126)...(196): HAMP domain
  misc_feature (1)..(326): Xaa is any amino acid
AFTVLGDIRPTPGTRIFILTKQENLVALQAEEEKDLEKLFEQSVDDHGNTAYNVASISAFQDDAIRYLLQKTLESGSQSGLIKYRNQNYMSSLIPVTIGDGLELFISIFIPENDIVGGVRQNMRNVTIFSVFILLIVLIVSTFFSQAIAKPMQSLSEQMSRIKSFDLDSQVAIRTNLVEIGEMQDSFENMRNGLKSFRRYVPADLVAQLINQSITADLGGEQRDLTVFFSDIAKFTSIAEKMNPDRLVLDLCVYFETISKTISENKGTIDKYIGDSVMAFWGAPVPMEDHAEKACRSAIMIRDNLHTLFRQGRIRENIRFNPLGHQ

SEQ ID NO: 80228 - protein, 326 aa, Unknown
  Obtained from environmental sample
  DOMAIN (4)...(254): SNF2 family N-terminal domain
  misc_feature (1)..(326): Xaa is any amino acid
GPPRQIGRALAAQAAAESTSGPPSLLVCPTSLLGNWEREIKHFAPTLPFFVHHGNNRQDLPKQFDPHALVLTTYGVVRREEEAFSARQWGMVVVDEAQAIKNSSSAQSKSVRRLHAPFKLALTGTPIENRLTELWSIMAFALPGYLHYEATFKERFSTPIEKYRDPDAAAELRARVGPFVLRRLKTDKSIIHDLPEKQEMKIFTQLTREQANLYQARVQQMEKDLAESSGIERRGRILALLTHLKQICNHPSHFLKEPGPYKGRSGKMERLTDMLEEIIANQERALIFTQFKEMGDHLQSHLNNVFGFETPFLHGGSSREQRDEMV

SEQ ID NO: 80229 - protein, 298 aa, Unknown
  Obtained from environmental sample
  misc_feature (1)..(298): Xaa is any amino acid
MQQGEVVNYAIRKAVLDISKLSGYNDVIKDFSPSVIVPFTFLGGVYGLPETQYFHVMYYRKDILEELDIELPDTWEDLINILPIIQKNNMNVGIPSVATSVQANIDFSNFLAHLFQRGGRLYNEEGSRTLLSNETAIEAFDVYTKFYTHYKTPVIYDFVNRFRTGEMPVAFADYTWFNTLEVFAPEIRGLWGFARMPGLKKSDGTIDRSVSTGTLASMILSSAKRPELAWEFLKWWVSAETQLMFGRELESIMGAAARYPTANYEAFKGFHGVLNKWQCLMNRGHATVVCRKYPEAIL

SEQ ID NO: 80230 - protein, 235 aa, Unknown
  Obtained from environmental sample
  misc_feature (1)..(235): Xaa is any amino acid
VSTPTITKSLTADFVLYPHLEKVMGRRDEDPAVTRAALEEAMASDAFLESIFNNTPAFYTIVDESFNILFASDNLAAVTGRPSKELLSYKCFDMMDKGIGMHCLRRDGGNLDCPATKAFATGERQYAPMEKDLRGQKLYFDSFVVPLELDGADGGKVKCCLEIMFDRTRDKNAQRMFEDDLKQLIGKMRAMVEDAIPETTPGVREIIREANSFGEYLENVKADLSSLVPTMEGLG

SEQ ID NO: 80231 - protein, 117 aa, Unknown
  Obtained from environmental sample
  DOMAIN (16)...(98): Nucleotidyltransferase domain
  misc_feature (1)..(117): Xaa is any amino acid
MAVDFEAVNELCKRYADNVRRSMPVDQVVLFGSYAKGIADEGSDVDICFFLKSYGGRKRFDIMADLFSLMRGYNDAYLQPIVFQTSKIITTTPFLKKFSARPWSTLKNGRRPSGPVP

SEQ ID NO: 80232 - protein, 322 aa, Unknown
  Obtained from environmental sample
  DOMAIN (225)...(322): L-fucose isomerase, C-terminal domain
  misc_feature (1)..(322): Xaa is any amino acid
LPAFGIYGRDVQDASHTEIPSDVKEKLLRFSRAAMSVAIMRGKSYLSVGAVCMGIAGSIVSTDFFEDYLGMRCEGVDEVEIIRRMSEGIYDKGEYEKALSWAKANCKEGEDACNRKELQKPRAEKDKDWEFIVKMTLIVRDLMVGNPKLKEMGFGEEALGHNALAAGFQGQRQWTDFYPNGDFTEAIMNSSFDWTGVRQPFVLATENDALNGTAMLFGYLLTNTAQIFADVRTYWSPEAVERVTGKKLTGRAANGIIHLINSGAASLDGSGRQSDKDGNPVIKPFWEISEAEAKACLDATTWVPANREYFRGGGFSSKFLNR

SEQ ID NO: 80233 - protein, 240 aa, Unknown
  Obtained from environmental sample
  DOMAIN (56)...(238): ATPase family associated with various cellular activities (AAA)
  misc_feature (1)..(240): Xaa is any amino acid
MTTHNQQNQQQEPTALERFSRDLTEAARRGKLDPVIGRDDEIRRMIQILSRRTKNNPVLIGDPGVGKTAIAEGLALRIVRGDVPEGLKSKSVVSLDMGALIAGAKFRGEFEERLKAVLHEVTERGDIVLFIDELHTVVGAGAAEGAVDAGNMLKPMLARGELRTIGATTLDEYRKYIEKDKALERRFQTVLIDQPSVGDTISILRGLRERYELHHGVQIKDSALIAAATLSSAIKPGGPP

SEQ ID NO: 80234 - protein, 184 aa, Unknown
  Obtained from environmental sample
  misc_feature (1)..(184): Xaa is any amino acid
MKYSNPANLAVVACPGGEIFADEVIAHLKKLYRHHSERLAADLAKRYGLTVEKAVEQINFINEIVSPGSHIHSIHSVKNPYHVPRFKIPVKFTCFPNGEVKAEIMESIRGQDVYIFQDVENHYPVIFSGSEKRKILSINHHLMTLFCTIDAAAAGGGPENNPGNPQIPECQTAQGKGRKGFAPA

SEQ ID NO: 80235 - protein, 178 aa, Unknown
  Obtained from environmental sample
  DOMAIN (1)...(176): DeoC/LacD family aldolase
  misc_feature (1)..(178): Xaa is any amino acid
VLPRSFVKPVFAEFGKDLVICTVVGFPLGYTYTVVKVNETGIALENGVSEIDMVINAGDVKNGNYDLVLEEIRAIKKVCGEKLLKVIIETCYLTEEEKIRACDIVTEAGADFIKTSTGFGTAGATIADVKLFKKHIGPQVKVKAAGGIKIREDLEAFIQAGADRIGTSSAVKLLTREK

SEQ ID NO: 80236 - protein, 63 aa, Unknown
  Obtained from environmental sample
  misc_feature (1)..(63): Xaa is any amino acid
MADIGILASLDPVALDKACVDLVYAAKDSKDLKERIESRNGLLTIDHAEKIGLGSKAYRMIKL

SEQ ID NO: 80237 - protein, 156 aa, Unknown
  Obtained from environmental sample
  misc_feature (1)..(156): Xaa is any amino acid
METTESTSLLYRDIIGVQTPWAITGVEKDEQKRKITVKIEHARENTIPCPACGGETKVYDHRIRVLRYLDTCQYETFLEVSIPRVKCKEDGVQQIEIPFAEKRSRFTSRFEMAVLVWLESSPISKVADNFNLSWDEADRINAKAVPRGLGPRGQRK

SEQ ID NO: 80238 - protein, 165 aa, Unknown
  Obtained from environmental sample
  misc_feature (1)..(165): Xaa is any amino acid
MLFIRSVRKLLARFNPVLWEDEPKAGKISSLVNSLEEDLDDLAFLTGQSPVDSDSVTKLAEEIIKGSFKLQSEGMSETIPIGQIRRAAFWSRLAPASGGKCLVIENAHRMQEEARNSLLKLLGGSPRLPDCGTERLKGAQSESDYPVKAQALRLSTPATLKANRK

SEQ ID NO: 80239 - protein, 315 aa, Unknown
  Obtained from environmental sample
  DOMAIN (4)...(236): tRNA synthetases class II (A)
  misc_feature (1)..(315): Xaa is any amino acid
LYKLTPGCDRADGRRFPKIDQRRDYMKEVIKSEEERFGATLEQGIEKFGTMVTGAQSGGGKTLVGADVFALYDTYGFPMDLTRLMAAEKGLNVDEAGYDKLMERQRERARDARKGEGSNGLTPEGWTELRPLSGTEFLGYDNDSAEVNVCRYKKIEDVDGEGANAYLLILDKTPFYAESGGQTGDKGAIVTSCGVNITGKDTVKWNDSVVHRVEANGVLTDKDLRAPMAATIDAKLRMATRRNHTATHLLQAALRKVLGGHVQQSGSRVDPSGLRFDFTHFKGLDEEEIAKVETIVNQWIMDNYSANLVLKGEMP

SEQ ID NO: 80240 - protein, 313 aa, Unknown
  Obtained from environmental sample
  misc_feature (1)..(313): Xaa is any amino acid
VPELFDYIKDVADEDKTKGQFFLTGSQSLNLMQNVSESLAGRAGVIKLLGLSMREIAGSGFREPFLPDFEQREKTENAGFEYEKIAACVHKGFFPELYETPCDLRDITDFYSSYFQTYIEKDVKGILNIQNEAVFIKFVKCVASLTGEMLNLSTIAETCGKDVKTVGAWLSVLESCGLVYLLEPYYNNFNKRLIKTPKLYFLDTGLACWLLGWNTPEQLINGAMWGHIFETFVFGEILKSYYNDGIVKPPLYYYRDKDKNEIDILINSGDFLCPIEIKTTSDPTKSMVRAFRLCDNIPEQKQGTAALICLVKN

SEQ ID NO: 80241 - protein, 308 aa, Unknown
  Obtained from environmental sample
  misc_feature (1)..(308): Xaa is any amino acid
KRKWTEEFCLANRAGKIGGRLNTSPEPRKTEAGLLAAVQKDDYALQYVPDAQKTEAVCLAALQKDGDALQYIPEAMKTEAVCLAIVQKDYHAFILLPDAQKTEAVCLAAVQKSGWVLEYVPEAQKTEAVCLAAVQQDCWALKFVPEAQKTDAMCLAAVQKNSQVLQYVPDAQKTEAMCLAAVQKDSQVLQYVPDTQKTEAMCLAAVQQNGRVLECVPEARKTEAVCLAAVQKEGHVLEYVPEARKTEAVCLAAVQKSGFALQFVPEARKTEAVCLAAVQKEGYALQYVPDAQKTEAMCLAAVQKDGRA

SEQ ID NO: 80242 - protein, 167 aa, Unknown
  Obtained from environmental sample
  DOMAIN (1)...(152): Transposase DDE domain
  misc_feature (1)..(167): Xaa is any amino acid
VQQKKHGSCIFGAKSHIGVDACTGLVHSVEVTPANVHDVVVAHKLIRPDDKTAKGDSGYVGLENREDMRHDPFLSQVKCEIVKRPSFWKKKGLGKIAEEFDRNDERRLISKRQKVEYVFHVVKDIFRFKKLPYKGIAKNMERLQVAFANANLYMLAIAGRRFCPVFG

SEQ ID NO: 80243 - protein, 57 aa, Unknown
  Obtained from environmental sample
  misc_feature (1)..(57): Xaa is any amino acid
LRGADHYETVGSNGFGYDPLFVPNGFDRTMAQLTSEEKNGISHRGAALRGLYAVMKA

SEQ ID NO: 80244 - protein, 197 aa, Unknown
  Obtained from environmental sample
  misc_feature (1)..(197): Xaa is any amino acid
MIFKLNIKEGNYAEWLKAELRQRFNYSCVESVQTFRAAERALTREGQVKHSKTRHEKDDRSAVGDRRNWILGFDNREKLALFQQQAQELAAAISDLDKKINALSEQDDLNRKRALQCQTLVNMQWQEIDALPIIERISAIEKQIREMRDGNKVLREISERINMQKPIVKRAEEDLHEAQVEHDKTFDKLRDSQDHLQ

SEQ ID NO: 80245 - protein, 85 aa, Unknown
  Obtained from environmental sample
  misc_feature (1)..(85): Xaa is any amino acid
MINQRKYITNLVLVALFASLISAGAFITVPIGPVPFVLQNFFTLLSGLVLGPFLGTSAVALFIIAGVIGLPVFSNNGSPMGIARL

SEQ ID NO: 80246 - protein, 211 aa, Unknown
  Obtained from environmental sample
  misc_feature (1)..(211): Xaa is any amino acid
AAGDNRYCTRDPELGHHFHAGSQGSKLSPRAHTLEFWAIFHALLEKAELKKIYRDVFADAPELTALTETIRKKYLQENGSLVKEMGKHLLKAHELCAAIGVRFEDYVDRVLRIPRTAANMAIKMFEYDLNPQTGADNMRFLAGIRDADERKAAETALLKNKSPDSVKTAIRQKAKDEDPVLMLEREKIRLERTIQTLSKRLEEVKKELGQK

SEQ ID NO: 80247 - protein, 190 aa, Unknown
  Obtained from environmental sample
  DOMAIN (27)...(173): TruB family pseudouridylate synthase (N terminal domain)
  misc_feature (1)..(190): Xaa is any amino acid
MNPHPDGLLLLHKPPGLTSFDALRDIKRTLGTGKVGHTGTLDKFAEGLLLVLVGRALKLSQWFTHCDKQYEGTICFGAETETLDPEGAFLANAPIPSREDVEKAIPRFLGEIEQAPPAYSAIHIDGERASALARRGETPEMRKRPVTIFRLELLSWEPPYAKIFVHCSRRDLPFARWPGARPSCLHLVLP

SEQ ID NO: 80248 - protein, 75 aa, Unknown
  Obtained from environmental sample
  DOMAIN (19)...(64): Bacterial regulatory proteins, tetR family
  misc_feature (1)..(75): Xaa is any amino acid
MPRKKEAFEVMRETTRQKIETAALSLFARKGLSVTVDEIAKTAALSKGLLYSHYPVKEALITELVRQAVVISGTR

SEQ ID NO: 80249 - protein, 316 aa, Unknown
  Obtained from environmental sample
  misc_feature (1)..(316): Xaa is any amino acid
LYIAGDIAKPLGATVNMMNELGRGHLDVRLNLNRNDEIGVMAKAVDMFADDMQNVVIDTMKKISAGDLSVKIEPKDDKDEISYALKKTVESLSVVVGTMKKISVGDLSVQIVPKNDKDEISNALKRTVESLHGLIIDDGGRVFNAAANKDLSQRLTCEYQGEFARMKDNINTVMQNLNDALNQVTVTVSQVSSASNELSHSAQNFAECSSEQASSLEEVSSTLESMSSMTKQNADNSNQAMVLASEAVWPQRRGHRYEAYGGGYKSDKTVGGQYRLDHSDDRRPSVSDQLLALTRRLRRAAPEKSARGLPLWPRGS

SEQ ID NO: 80250 - protein, 123 aa, Unknown
  Obtained from environmental sample
  misc_feature (1)..(123): Xaa is any amino acid
MKKVVVTGMGLVSPIGKSVEEFCESLKAGKSGIGPITQFDTTDFDVKIAGEIKDFDPGLWMDKKEARKMARFTQLAVAAAAQALTDAGLMGEANAEGKRPVKSNPDRTGMFSNLGHSVMKGGM

SEQ ID NO: 80251 - protein, 238 aa, Unknown
  Obtained from environmental sample
  misc_feature (1)..(238): Xaa is any amino acid
MVLRAALGDKIPPSYLYQQLRRLEQGDEEVDVSQYSTAWDDEAYNTVSGQSSNNSLRLSDDFMKAVLNDEDWQLKSRTVGDTVKIVKARKLWSDIAKTSWQCADPGLQYHTTINDWHTCPAGGEIRASNPCSEYMFLDDTACNLASINLAALYDKRKKEFNVDGYLHAIDIWTTILEISVVMAQFPSSRIAELSYNTALWGWGTPILERSLWIWGLPTISIRDASGPRGFSGLLSGEA

SEQ ID NO: 80252 - protein, 244 aa, Unknown
  Obtained from environmental sample
  DOMAIN (136)...(230): Anticodon binding domain
  misc_feature (1)..(244): Xaa is any amino acid
LPVIIDHTVTAMNDAVTGALSKDLHYKHAAYGRDFQGWTIDGQQSVDIRTVKAGDCCSQCGGELYTKMGNELGHIFKLGYKYTRSMNVTYLDENGKTQMPTMGCYGIGVDRTLASVIEEHHDDAGIIWPASVAPYHVIIVPIKYDGKVKESADMLAQELAQKGIEVLLDDRNERPGVKFNDADLTGIPWRVVIGDKGLALPVPQAEIKKRSEKENRMIDLDKAAAELAEKYAKNLRFICKSLFL

SEQ ID NO: 80253 - protein, 302 aa, Unknown
  Obtained from environmental sample
  misc_feature (1)..(302): Xaa is any amino acid
VFYDIDLKAGDLCFAIEYLPGQYDQRADSAEQCIELITGVRPRVRSAIVYILSPGEFPISDAAFEAVKKYLINPVDSREAAERPQTIEETEINPDDVPVLTGFITANDTELGAMADQYGLAMALEDLIFCRKWFSSINREPTLAELRVLDTYWSDHCRHTTFNTILEKIETGEGPFAPALKNAIALYESLREELYGSDNTMLSAHPSSLWDMAVIGAKVLGKRRVADHVDASKEINAWTVKINAKFANAQTNPGFWCSTTRPSTPPSENQPFGGRGDLVLAGRIGNPLSGGAFFPRAKKVPG

SEQ ID NO: 80254 - protein, 94 aa, Unknown
  Obtained from environmental sample
  misc_feature (1)..(94): Xaa is any amino acid
MEPWQYDDFRIPSTDDKTRRSFENIPPEEIASAAKHILSQQIGLLREDLEREISRLFGFARYTETMQKPVRAGIEMAIKRQWAAMDGDRVIFLP

SEQ ID NO: 80255 - protein, 168 aa, Unknown
  Obtained from environmental sample
  misc_feature (1)..(168): Xaa is any amino acid
LTCPGRAPLQKPFEQFCHYRLLGLQYGVPLKEYVDAFTFSRFEPNGLVQGHDYVKMATSVIDYVFRDLAISYLKRSDLGQVKPEDLVATAMKSETETPDQKGRGEKNSAGFRPNSVTVPAVKPVKQQPQGGGTPSPLGKRSQGISVFISRGPAADSSRGNGKLLSAGK

SEQ ID NO: 80256 - protein, 132 aa, Unknown
  Obtained from environmental sample
  DOMAIN (27)...(130): Respiratory-chain NADH dehydrogenase 51 Kd subunit
  misc_feature (1)..(132): Xaa is any amino acid
MSKLVNILTEGADRADPLSVSEYEKAGGFTALKKAIASSPEEIIAEVKKAKLLGRGGAAYPAGSKWEHLLHIPETPKYIVCNADEGEPGTFKDRLIMDKLPLKLLEGIIIAGVVLRRKPEHYSGESRISGKR

SEQ ID NO: 80257 - protein, 171 aa, Unknown
  Obtained from environmental sample
  misc_feature (1)..(171): Xaa is any amino acid
MKKLPEKALFIIFFALAFSQFPKNALLHAQGIDGTDLDTVRAREEFRIGVQAYYRFSYNEAILSFERALSYRPGEPLILDWLGKAYYRSGIENTAFRAWQAAAAAYGFSSGQGMLISSRMETLRNRRILFPVANDEVRYVESGRYPGKTGDMVYYCQPTSVLALMTVLPGW

SEQ ID NO: 80258 - protein, 331 aa, Unknown
  Obtained from environmental sample
  misc_feature (1)..(331): Xaa is any amino acid
AGKPGIGYEKAPLPINPLIFVAKSILQKSLAICNMKLIVKAKIEQRRRRASSFYLQIASDHDPMSDLYDSFSNMKKKAVYRKITEIIKGTDMIFVDEIQYLEGKHKTLSLMLEITKFMEPINKPIVMTSQKIDIDKTKLVPELAERLENFEYIKIPLPDAEDRIKMLEDFLKKENLSLENPRLVVAWAKNTEKYPLKCLLNKLNRLVCEAESGVVTERTMEQIFETKDFAEKILDVISEHFKIDLKTLMNEERKFAYERSIAMYFIKNSNRGMDFYEVGKKLGRSEATARIACDGIGRILNGSKELFNKRKSAQIYQIRKTRPSDLDWVLG

SEQ ID NO: 80259 - protein, 255 aa, Unknown
  Obtained from environmental sample
  DOMAIN (51)...(255): DNA topoisomerase
  misc_feature (1)..(255): Xaa is any amino acid
VLLACDNDREGEAIAWHVRNAITAKTEKVPIERISFNEITPQAVNEAVLNPRGIDEDKVSAQKARRVLDRLVGYNLSPLLWKKVKNGLSAGRVQSVALRLICEREKEVDNFIPEEYWTLEADFKSGKSIYSSQLVLWNGNKPDLKSEAEVKSIIERIQNSDFLVSDVRETDKTIRPKAPFTTSQLQQTAANRLGFTSRKTMQVAQQLYEGVGIGASRVGLITYMRTDSVRISNTAIEDVRNWLAKNFPNELPKNR

SEQ ID NO: 80260 - protein, 293 aa, Unknown
  Obtained from environmental sample
  DOMAIN (3)...(290): tRNA synthetases class II (A)
  misc_feature (1)..(293): Xaa is any amino acid
MGYRKNRYHPERKIIGLRYRNFCSNNRGCEAAVGYKYGTDSEKDRSLRIICDHTRASTFILGDPKAVSPSNVGAGYVLRRLIRRAVRHGRKLAGKEIVPLLSPIAAVIIDKFKGPYPELTENKAYITKELNEEEERFMETLQKGEHEFEKLLPDLLKDPKKIMDGRLAFKLYDTYGFPIELTEELAAEKGMKINRVEFDEAFKKHQELSRVGGEQVFKGGLQDHSEIVTKYHTATHLLQKALKIVLGDHVAQKGSNLTAERLRFDFSHNAPMTGEESKGTGISAASFPDWENG

SEQ ID NO: 80261 - protein, 156 aa, Unknown
  Obtained from environmental sample
  misc_feature (1)..(156): Xaa is any amino acid
MENQLGDESVYLRIMELENGLLQHTDTTNAYRMLVEHGKDIRYNDAWKKWIVWNGKYCEMDGGYLIHDKGLQIIRGIYRELLKTAHYRERIDIEKHAMQSESAGGGSPCGVASWIPEPDGKTDELDKDPWLINVPKGTIDLATRQMKQHTPSHLFP

SEQ ID NO: 80262 - protein, 324 aa, Unknown
  Obtained from environmental sample
  DOMAIN (70)...(248): Integrase core domain
  misc_feature (1)..(324): Xaa is any amino acid
GFPGLSRERHWPAFGITDEIAEKLTKISPASIDRYLKKDKQALRLKGKSLTKPLDSLKSRIPIRTFYTSEERKKPGFWQIDTVHHCGQATTGQYLHTLTATDIASGWIELCSLLNNAQKWTFEALARIKTAALIPILEFHSDNGSEFINNATETWCKANAIPFTRSRDHKKNDNCFVEQKNGAVVREYVGYDRLEGIHEQALLAAVYQPLIPLLNFFMPTQKLKSKTRVGSKEIKVYDEPISPFQRLIESAEVSQQTKDSLEAQIALYNPVELQHNVNKAITRLRQRLAQPTALYQGGVALVHFPYEVMRNFRNIFYLSNPSFR

SEQ ID NO: 80263 - protein, 257 aa, Unknown
  Obtained from environmental sample
  misc_feature (1)..(257): Xaa is any amino acid
IEPMTADERTIALMLISQLGSMDSFRKGKELILFDRGYPSFELIKELKERGIRFVMRARKKFSTAIDGLGYGDHRIKLEQGGEKMPVRVLKFRLKGGEEETLITDIEDKKLGIKAFKALYFKRWPIETKYNQIKNRLEIENFSGRLVDNIRQDFYATMVLTNLTSDFAGEAQIEVEEEQSGKGKKYRYKVNMNYAIGVLKDRLIITLCEEDMEKRREMFDEITEMLKKRIIPIRPNRSFPRNTPRNVKFHYNQKSNC

SEQ ID NO: 80264 - protein, 292 aa, Unknown
  Obtained from environmental sample
  misc_feature (1)..(292): Xaa is any amino acid
VAKFNSYISQNLILVHKVARSKAVTDWFADETNQAKKNAAHTEMLDSTGMLQSPLLYIGIQKSLNEYAVKEGTRLEDFAPHGWLDPSVAHNEWYYNCVNSPNDYTLNIDVDKVTRTRLLWINYKVAEGGNVLGVFCAGLPFEKVLHALFDRYDTSNVKGYVIDRNGVVQMDSTLSVFSEEDHKNIPEAASDPAFASAIESYLKNIEGYFVSNEILQLIKLKKGPYQYASIEPIVGSHWSVVTFFNNKSLFSIWRLLPLLIFMMSAFVLYSLIENISIRRMYSADSAMVGFWG

SEQ ID NO: 80265 - protein, 114 aa, Unknown
  Obtained from environmental sample
  misc_feature (1)..(114): Xaa is any amino acid
SRSSFFLLNLALLVLSCLMDIFSAILVGLPLIIPLGHVYGIDPVHLGIIFIVNLEVGFLTPPVGMNLFLASYRFKRPFTEICRFVLPFLVVQLAVVLLVTYVPALSTALTGLFR

SEQ ID NO: 80266 - protein, 288 aa, Unknown
  Obtained from environmental sample
  DOMAIN (2)...(79): Cache domain
  misc_feature (1)..(288): Xaa is any amino acid
MDPYEYNVGGKTILMTSICIPIRSDGKVLGVMGFDLPLTNIQEISQTQKPFPDSVTAVFSNNGTVTACFDPSRIGKNMRDTEADMAGKYLNDFVNAVKAGNPFTFTNYIAPMKTDMTIFTVPITVGSTKTPLSYATAIMRNTIMAPIYEMLEITIMISAIVLLLLVLAALFLSKSISKPIVMVAENLKDIAEGEGDLTHLIVINSNDEIGDLAHYFNETLEKLRNLVKNVKKESSALSEIGNELAINMNNTATAVNQITANIQSIKGRVTNQSASVSSSAILSRVGGC

SEQ ID NO: 80267 - protein, 204 aa, Unknown
  Obtained from environmental sample
  DOMAIN (7)...(196): Domain of unknown function DUF
  misc_feature (1)..(204): Xaa is any amino acid
MYPLLSLPIAYLLGSIPTAVWVARIYKKIDIREYGSKNAGLTNVFRVLGWKPALPVIAVDLAKGFFAPFIAMRLNAADGNPEVYTWLPVASGMLVVLGHSFTCLARFKGGKGVLTTLGVFLALQPVLALTCFAFWGLLFAATKYVSVASIGGLCFAFRAFSGFFCIRVGGHEYLRSSFISTCADFCIGKHKAKWLGFIPAQKRI

SEQ ID NO: 80268 - protein, 179 aa, Unknown
  Obtained from environmental sample
  DOMAIN (1)...(179): Dihydrouridine synthase (Dus)
  misc_feature (1)..(179): Xaa is any amino acid
MLDSTNRHFRYFARILTKQTLLYTEMVSTGAILHNNPAKFLEYNEVEHPVALQLGGSSPRDLAKCAKIGEDFGYDEINLNCGCPSERVQSGSFGACLMKESNLVAECIAAMQNAVKVPVSIKTRIGIDNDDSWEFFLNFVESVAQAGLQNWIIHARKAWLSGLSPKKTHNTTVELRMGF

SEQ ID NO: 80269 - protein, 322 aa, Unknown
  Obtained from environmental sample
  DOMAIN (159)...(225): His Kinase A (phosphoacceptor) domain
  misc_feature (1)..(322): Xaa is any amino acid
MAEVLCIALTFTKFFRARPIILLMALVAYLNFGTAIVTATADASVVSPYMGGFLFVLMIPVFAPFPLISKFIITFIPVVLLFVLGSVRGIPFFKPPISYATNDTLCTFIMTMILSYAQNTLRFNAWRQQVTLKFLVQQDQERITTISDLANKAEAASKSKSDFLARMSHEIRTPMNAVIGISELAMREKEVPQSTYNLLVTIRQAGQNLLSIINDILDFSKIESGMMKIIPANYHFPSLIKDVVNIIGIKASNSMLDFQVSVDKRIPDTLFGDEVRIRQIFLNILSNACQYTTGRLRIAHRDWQTDGRQDVVITFEVPNRGG

SEQ ID NO: 80270 - protein, 121 aa, Unknown
  Obtained from environmental sample
  misc_feature (1)..(121): Xaa is any amino acid
MRARRYILDTTLRDGEQTPGICFTREQKLKIAALLEESGVHQIEAGVPAASKEEKEIIIKIIENRKNAVISVWGRLVPSDITHAVDCKPDDHTYKRARIRYAHTNKAKKDKDFGHHPGGPA

SEQ ID NO: 80271 - protein, 113 aa, Unknown
  Obtained from environmental sample
  DOMAIN (46)...(78): Ankyrin repeat
  misc_feature (1)..(113): Xaa is any amino acid
MSKGANCSEQTRKEGLQLIAASDNGDIEAVKSILKKDVYIHAQDMEGRCALVAAAYKNHLEIVDLLIAAGADVNMKDNTLQSAYLISTSDGFTELLEENSDALGQSVLAEKKK

SEQ ID NO: 80272 - protein, 272 aa, Unknown
  Obtained from environmental sample
  misc_feature (1)..(272): Xaa is any amino acid
MADDSCISIRRSEFTEDEAALLGPRNVMSILFVPVFTEGVFWGVVTFQDNTRERDFDEDCIAMLRSTARICVSTIIRAEKTRSTEQALKVISRHETIKDILNKVSVIFLSRNEEKVEDTMAAGVRLIADMAGIDRLILCRNHIATNSLLVSEVYRWDRASGGSTELTAALIGIPYARLIPDWEGLLSDGKHINGPSNLMSESAAKTLLSFGVLTAAVIPIHINNAFWGLALFGDTRNERYFEDDIIEMMRSASFLFANAFIRGRGGLRRAYR

SEQ ID NO: 80273 - protein, 303 aa, Unknown
  Obtained from environmental sample
  misc_feature (1)..(303): Xaa is any amino acid
DAYWAGMNKNALANVERERLHAAIAAYKKGLGLWNILKMIGLSLAVVAVLVALFIFVSRMFNNVIDRKITDNREKWFKGIRFRNIEILTSEKLTSAALFVSKAMRYAIYAVLLYAALPMIFAIFPATRHIAKLLFSWIADPVFSMGESLIAYLPNLLRIAVIIIVMRYILKFMRYVAAEIETGRLAIPGFYPDWARATFNILRIFIYAFTVVLIFPLLPNSDSSIFKGVSVFIGVLFSIGSSSVISNMMAGIVITYMRSFKIGDRIKVGDVYGDVVEKTLFVVRIQTIKKEVILVPNLTMGTQ

SEQ ID NO: 80274 - protein, 313 aa, Unknown
  Obtained from environmental sample
  misc_feature (1)..(313): Xaa is any amino acid
ARRVFASLNALCGFAIGYYWNIMWFDSFALFPLVMLGVIALMRESKYRLYTASLALSVILNYYIGFFICVCAAITFLNQCVILKINHRDFLRKLALIAACSGLAIGLTAVLTVPAFFSLRDTYTAASKFPSGITWFSSYASVLGNFIAFTPPTTKEGLPNLYCGMISVLLMGMFIRSPKIPFREKITHLVTVIFLLLSCNMNVLDYIWNAFHYVNMIPFRFSFLLSFTMASMAYRTFLLKETMNRRDMLAMGICAAFFMLMAVIGSQKKEFIIGNAGLCVLYFVIWDISAEKKTGKIMTALTMVLGRSDPGEP

SEQ ID NO: 80275 - protein, 206 aa, Unknown
  Obtained from environmental sample
  misc_feature (1)..(206): Xaa is any amino acid
MVISGIPEKKIFSVLVLCILILISCDIKYYNDYDSRFAWHDDVRFPALTAPLGESYSFIVISDTQIKNKKYADRFAVIKSILTADDRFIVIAGDITDDGTEEQLQCFLDTCAFIGIPCYPVIGNHDIRTERGKHWKELIGSTVYRIDSSDTSLFFLDNAHGAFGYEQLEWFERELTTAGKNTSVLTHVKFFIESSPPDHDHITDIR

SEQ ID NO: 80276 - protein, 324 aa, Unknown
  Obtained from environmental sample
  misc_feature (1)..(324): Xaa is any amino acid
GRIAGVSVDAAAETRFRRDALNGLTRIELQNTYAGRADISKEEFLTLARDCVSGELTAPSAAWRGVTFAPLRASMTLPHRAVFVMGLCAAEFPGTNEAPSWDLLPSKRIVGDSDRVRDNRFAFLELIHAAKERLILSYRARDMQKDEELQPSSVVSELEEYLIGQGVVDGAGNSRKCSARREIPWVVHETLNKAKEAGRKHGSWDKEQRILAAESVKERVRHRHDLSVNRDLPPRADTPIKTTDIWALKKFLSNPFEYRLSMTLGTRDDDDAGDMTATDEPLDSGYKISTLKKPGVDKNIERPFHDRSRRIDTRRNLYLRGAKK

SEQ ID NO: 80277 - protein, 216 aa, Unknown
  Obtained from environmental sample
  misc_feature (1)..(216): Xaa is any amino acid
FPGLCGSRNADPGSSEALALLLQEFTVNPRPGWVREDRTIDPRVANELSRLCSGNSFLRRHYRHEDHEVITKMHDEKKRVLKLLTHNKIPLSFYYTPGENWENTRHFRYIRIFKLLVPELALGKSTAEISRFLGTVLNPDLDNTVRKDYPTPSNTIKKIMADFATLKLVGCINGERGNAGDEIWEITQHGKDVFSTYRITQLERAMEKKPDEETNS

SEQ ID NO: 80278 - protein, 300 aa, Unknown
  Obtained from environmental sample
  DOMAIN (32)...(245): Methyl-accepting chemotaxis protein (MCP) signaling domain
  misc_feature (1)..(300): Xaa is any amino acid
GAPKVRFGRDGQLTVNINKLNEHVENQSTHVAQASSAIEQMMANIGSVTNTLVNNAANVNTLKEASEVGRAGLQDVATDIQEIARESEGLLEINSVMENIASQTNLLSMNAAIEAAHAGEAGKGFAVVADEIRKLAVNSSEQSKTIGTVLKKIKGSIDKIIKSTENVLNKFEAIDSSVKTVADQEENIRNSMEEQTTGSKQVLQGVSEVNEITQKVKTASQQMLDGAKEVIQESLSLDKATQEITGGMNEMASGAGQVNNAVNHVNEISGKNREGIEILMREVSGLKCSNETLRIKDPHE

SEQ ID NO: 80279 - protein, 305 aa, Unknown
  Obtained from environmental sample
  DOMAIN (116)...(263): Glycosyl hydrolases family 2, sugar binding domain
  misc_feature (1)..(305): Xaa is any amino acid
MRRVKDDFPEEWDVPNPLIRQFSVPQECEFSGPRQRLSGGHWTKACADTLEEFSATAWFFAGQIFKTYNYPIGIILAAWGGTPAEAWMSADALAAFPEKIALGKKFADTAFKDSLIREKQAFVETWNNELAAADSGLKQSWQKPETDISAWDEIFLPGNFARADSAGKNGLDGFCGVIWLCREFEVSESFAAVNKTRDAKIWLGTIVDADIVYINGVEVGNTGYRYPPRKYVIPAGVMRKGKNRVVIRVVCCNGEGGITPDKPFRIFSQGDDLKSIELSGSWEYRVGVKTGSRPEEFFLHRQPTG

SEQ ID NO: 80280 - protein, 268 aa, Unknown
  Obtained from environmental sample
  DOMAIN (1)...(78): Bacterial flagellin N-terminus
  misc_feature (1)..(268): Xaa is any amino acid
MRELSVQSANDTNTDADRSELQAEVTQLRYEIDRIANTTEFNTKKLLEGSAKGVADEVVGTQRLNNNSRVALDSTKTKAMMAAVSNDKNWVFDGAYMLIKTNQTFQDGDATYCPSDYKLVGPDGTVYGFKELSADTKVKSTELEAGTIVADGGAVTKVKTVGAISAAFTTDPGQIVLGNAIGSHELANVTAGSILTSGSEFTILAGKSVNLVKSVTGVSNIEYTTEGELTLNITAGLDLVIEARKSARLDDGTIIKNKRRRHVNVQSG

SEQ ID NO: 80281 - protein, 226 aa, Unknown
  Obtained from environmental sample
  misc_feature (1)..(226): Xaa is any amino acid
VRAPGLWEPSQPGTTRGNYAIQANRTVILSVINTTQYRSITDGTYGGIFASNYVKNITFDNVKFSRFDAHMGVYNTTILNSELGHQGCSIIGGGLLRIENTSASGGTNFIYFRDDYGSTWEGEVIIRNCSFKPSSWSNAQILHTNNDGAWNFGYPCSMPSTVTIDGFTVNDAGVNYSGVYLVGGASSNGSYGFTLTKTIYLSRFVSSKPYRFQNTYLQNNIKVVNN

SEQ ID NO: 80282 - protein, 311 aa, Unknown
  Obtained from environmental sample
  DOMAIN (197)...(262): His Kinase A (phosphoacceptor) domain
  misc_feature (1)..(311): Xaa is any amino acid
VFGMFFPYILNILYTTEIQRFIPYDITPLGFFITVMLFAITSYKSQLLNIKALTMNNIYAIIKDAILVFNEHNRIMDANPAALSAFSGFSFDSGQSTLEKFFTYLHGQNAKCTPDDLFEPLKKGNTERNGEIKLYRSDGQIKTFMVTLKTIMVRKKPTGCILIMSDVSVYHSMISEINIQNARLAELRREAEAASMAKGAFLANMSHEIRTPLNAVIGMALIAGKNAETPKTLSAIKEIETASVHLLGLLNNVLDMSKIESGKFELINESFSLKNAMDEVVRLITLRCAEKNIRLDTNLKNLGHHPQRENP

SEQ ID NO: 80283 - protein, 308 aa, Unknown
  Obtained from environmental sample
  DOMAIN (49)...(177): PA14 domain
  misc_feature (1)..(308): Xaa is any amino acid
MNGVRLSHWVEQVATVSHDTAFKNIVIRDSLPFTLTNSTTGMYQFSRRGNNGFFWIDGRGFGNEWVSEGSANHNFAFTMEMEFPFDAKSGMTFNFTGDDDVWVFIDNKLVLDIGGIHSEESASFQLSNVLPPSEMGKRHTLRVFYAERHSTGSNILIQTNIVAPPAGVGISTKDNTGSGGMVGNSIDKSADTTITLYSVVRNEDGTVRVPNTEYDCNNVTWTINGVVIGTGCSIQVKDSVARAEGVKIKVTYREPDARELKGATNYNVKGPGRRSRFPIKGRPGYPRPATYPFGGKGSDKFLYFRGLS

SEQ ID NO: 80284 - protein, 88 aa, Unknown
  Obtained from environmental sample
  misc_feature (1)..(88): Xaa is any amino acid
EVPASNTAKYKIIYHANTDTSGFPPIDNNEYTSGSYATVLDKNTLEKTGHEFNGWNTKTDASGDHYNVGDQIEIKNINIFLYAVWEQS

SEQ ID NO: 80285 - protein, 110 aa, Unknown
  Obtained from environmental sample
  misc_feature (1)..(110): Xaa is any amino acid
VRTGYRNFYAYSAVCPATGEGFTLVLPRVCTALMQVFLDQMAEHLGGRGCVLVMDRAGWRVSADLRVPPNIRVVLPPPHSPELNPVERWGSGQAARDRNRLFLPLKSGEG

SEQ ID NO: 80286 - protein, 274 aa, Unknown
  Obtained from environmental sample
  misc_feature (1)..(274): Xaa is any amino acid
MAGGIAGLNQSGATVEYCYNTGNVTASTSNVGGIVGSNSGSTVRYCVSLGARVTGGNNTCRVVGVMSGTTTLTNNKARADMKVGVSGSEAIPTINIGANEREGADVSLGTAQNSVFSSFFTTTIWTLGSNLIVGGNLPILQMNTQSPAPTLPATYTAPGTAANPFLVTNEADLRKVGTGTDGWTLSAHYKQTANITMTGGNFPPIGNNPTTFTGSYDGDGKTITGLTITGTTNYLGLFQTIGATGTVENMTVTGTITPNGNTSFTAGLPGQTKA

SEQ ID NO: 80287 - protein, 71 aa, Unknown
  Obtained from environmental sample
  misc_feature (1)..(71): Xaa is any amino acid
MKEAQMIGIIGAMEDEVSLLLGAMGTPQKTKIGEFEFHEGKLEGKDIVLLRCGIGKVSAAVAASANLTMGN

SEQ ID NO: 80288 - protein, 316 aa, Unknown
  Obtained from environmental sample
  misc_feature (1)..(316): Xaa is any amino acid
LALGDNNLIWGEYEKEHLEDAREAYAKLIERFGRTDPLLERMLKYFIRTDNLGQVLALQNHFMSSAKRVISAATLAEMGGYFLDKRLEKVRGVPNEYLDLIGGIREILLRAVKQDPMLPESYYHLARYYNYFENSTDERLTLEVAVRAFESAKEESPKRIGYHINALRRYAEVLINSREFFPAEESLIKGINVYQNGLSRRLLTRSPEYGKLYADLGDLEFFVKNGDMQTALDYYNYSEQNGWAPPEIQYRMGAAHYQLRQWGPALERFFTAFREMPFNRKILYALGNVSYMRGNYFAAPGLLSCRILTHGERKIK

SEQ ID NO: 80289 - protein, 183 aa, Unknown
  Obtained from environmental sample
  DOMAIN (10)...(183): Elongation factor Tu GTP binding domain
  misc_feature (1)..(183): Xaa is any amino acid
MAKEKFERTKPHCNIGTIGHVDHGKTTLTAAICTTLAAKGLASAKKFDEIDNAPEEKARGITINTSHVEYQSEARHYAHVDCPGHADYVKNMVTGAAQMDGAILVVAATDGPMPQTREHILLARQVGVPAIVVFMNKVDMVDDPEILDLVEMEIRDLLKQYEFPGDKTPIIRGSALKALEAIR

SEQ ID NO: 80290 - protein, 318 aa, Unknown
  Obtained from environmental sample
  misc_feature (1)..(318): Xaa is any amino acid
KPAWTPCKLRRTRRPSRRQRKRRRRAVQAQRIATQTKLAAEQNPQDAQLQQAAAQAHEAAKKAQRIADKARLSIAQTQLAASETRQEQESREAKELADFLKSLPPIPPKAKIIDLDEARAIAEIEALQEKRLAESKAQAEARRKEAEAKNKFNYGYREIYGSLMEELRKIVKTDGNLDAFDGIEFPEDMPEGSDERRGGEKAVADLLEMFDGYAKVINQMGEDLMNRIRKGENILKHYLTVPEDVNQGTWLYAEVSKSILNIQNFHRSYQATRWDFYQRMVALARALKPGQELTPPPPSCDPQREPDRYLGQSDQWET

SEQ ID NO: 80291 - protein, 131 aa, Unknown
  Obtained from environmental sample
  misc_feature (1)..(131): Xaa is any amino acid
MMAEPPGYGGFCAFCPNEKGVYIAQCEPDHFVLPALGPHFMERFGETPWAIIDNKRRLSLCCETGQTGASGGTLVFSANTENQFSFDKGRTGEWENLWKHYHKTINNESRNNPDLQKRFMPTRYWKYLTEL

SEQ ID NO: 80292 - protein, 324 aa, Unknown
  Obtained from environmental sample
  DOMAIN (1)...(320): Bacterial protein of unknown function (DUF853)
  misc_feature (1)..(324): Xaa is any amino acid
GPPNDQIGRVCCDNAKELSATYGNIPTQSVGTIQRNLLTLASNGGDIFFGEPALDMRDWLGCEESGRGYINILDCVKLFQNPQLYSTFLLWMLSGLYEMMPEVGDLEKPKMVFFFDEAHILFNDAPKALLQKIEQVARLIRSKGVGIYFITQSPSDIPDTVLSQLGNKIQHALRAYTPKDQKAVKAAAASFRSNPDFSSEQVLGELSTGEALISVLDEQGAPQIVQRAFMLPPKSYIGPAEPERISGLIKSCALYSKYKDAIDRESAYEVLQEQKKQADVQSADAQSGSPLRRSKPGQSARREQRTQKGQQSGKTGYLKRDDAI

SEQ ID NO: 80293 - protein, 293 aa, Unknown
  Obtained from environmental sample
  DOMAIN (73)...(281): Methyl-accepting chemotaxis protein (MCP) signaling domain
  misc_feature (1)..(293): Xaa is any amino acid
LFITIKEQAGSLHDVGNNLAGNMTETAAAVNQITANIRSIKQRVINQSASVTETHATMEQVVANIDKLNGHVENQSNNISQASSAIEEMVANIHSVTETLVKNATNVNTLKEASEVGRTGLQEVADDIQEIARESEGLLEINSVMENIASQTNLLSMNAAIEAAHAGESGKGFAVVADEIRKLAESSGEQSRTIGIVLKKIKNSIDKITHSTDNVLTKFEAIDSSVRIVAEQEGNIRSAMEEQETGSRQILEGIGNVNEITRHVKNGSNKMLEGSKEVYRKAQPKSCDIRRKP

SEQ ID NO: 80294 - protein, 150 aa, Unknown
  Obtained from environmental sample
  misc_feature (1)..(150): Xaa is any amino acid
MKLKLIYPKWNKLPGQTTFNLPPHGPVVFAAALPDYVEVTFTDENVQNLDFDEDCDLVAVSMMLSTQVKRGWAIADEYRKRGKQVIFGGIAVMLHAEETIQHADSVFLGEAETRMDQVIADWKEAICGSVHFMPQQRRLNHRACPRDLYK

SEQ ID NO: 80295 - protein, 311 aa, Unknown
  Obtained from environmental sample
  misc_feature (1)..(311): Xaa is any amino acid
GFSPGYGGPVSLESPALFEQTNIITELLPEEVGGFTEIFKNRVVIPHNGSLSDLRHVLHHEFVHAFIFGMIYGGNILRATGAHVPLWFNEGLAELLSSGWERQADMFMLDRSLNSTVPPPSSALDGYLAYKGGQSFLYYLHSTGGDSLFNRMLLEFRLTRSAETAIERIYAKNMEDLGKDWQSELRRIYWPEVGRRANPEAQASLISAKERSRANVHPRLSPDGGRVAFFSDKYDYTRIIVADTAGKELRRIGGEHSLGSSFESFRHFNGAIAWSPDGKRLAFIAKKGEQDEVRIVDAATGRRYAPSRRRY

SEQ ID NO: 80296 - protein, 115 aa, Unknown
  Obtained from environmental sample
  misc_feature (1)..(115): Xaa is any amino acid
MKWDIVKLGDMCDIARGGSPRPISQYITTNENGINWIKIGDATPNTKYITNIKEKIKPEGISASRMVHSGDFILFNSMSFGRPYILKGDGCIHDGWLVLSNISPDLDKDNLYHVL

SEQ ID NO: 80297 - protein, 255 aa, Unknown
  Obtained from environmental sample
  DOMAIN (1)...(255): Glycosyl hydrolases family 2, TIM barrel domain
  misc_feature (1)..(255): Xaa is any amino acid
LIKGVNRHEHDEKTGKTLSTEGMMKDIVLLKTHNFNAVRTCHYPDDERWYELCDRYGIYLLDEANIEHHCFYSQLCWDTAWTYAYARRIQRMVERDKNHPSVIIWSLGNESGDGANHNMGAAWIRRYDPFRPVSYEGAVRLKRNQGRISLDSLNHSKNLTDIVCPMYSEIETITDFVKYIEDHRPLIMIEYSHAMGNSNGSLSDYWKAIESHHGLQGGFIWEWIDHGLEAFHSDAKEYWKYGGDLGDLPSELRFC

SEQ ID NO: 80298 - protein, 174 aa, Unknown
  Obtained from environmental sample
  DOMAIN (18)...(174): tRNA synthetases class I (I, L, M and V)
  misc_feature (1)..(174): Xaa is any amino acid
MAEDALPKGYEPHETERRWREYWENSRAFTPDPDGPGEPYAIVIPPPNVTGALHIGHALNITLQDVLCRFARQKGKKVLWLPGTDHAGIATQNVVERALALEGKGRHDLGREAFVERVWQWKKEFGGRILSQIRRLGASVDWTRERFTMDEGLSHAVRRVFVTCIRRAIFIRAN

SEQ ID NO: 80299 - protein, 148 aa, Unknown
  Obtained from environmental sample
  misc_feature (1)..(148): Xaa is any amino acid
MGKIKRTDLVGGHMQEFLMLVPFFIGFVTFTVYPIFWALRWVLYDYSGLGKPFFVGLDNFARAFFRDKEFWRSVSNTFYLAFMKLIIELPLALLIAFFVNNKVKGSSVLRVIYFLPTVFSIAVVGLIFIILFSAYNGIVNAALMGIGS

SEQ ID NO: 80300 - protein, 99 aa, Unknown
  Obtained from environmental sample
  DOMAIN (15)...(98): Competence-damaged protein
  misc_feature (1)..(99): Xaa is any amino acid
MPETTPSFYEIETKAHETARHLVESLSRKRLTLALAESCTAGLVADLLAQSSGASAVLWGSFVCYTPEAKERMLGLDGSFLEQYGLVSRETARASAINP

SEQ ID NO: 80301 - protein, 319 aa, Unknown
  Obtained from environmental sample
  DOMAIN (75)...(134): KH domain
  misc_feature (1)..(319): Xaa is any amino acid
EEQRYRRSLSVFRVNFRRSQSVNIQDLENEAKHDAQSLITKIEQEANVTAEKKARDILVTTIHRLSTEVTGETTVTTVTLPNDEMKGRIIGREGRNIRTLETLTGADIIIDDTPEAVVISCFDPVRREIAKIALEKLILDGRIHPARIEEIVIKVSKEISQKIFEEGEKVLFDMGIHNIKQDAIRALGRLYFRTSYGQNVLQHSKEVAIIAGMLAAEVGANRELAKRAALLHDIGKGNESDSDLNHAEIGMDMARKMGEDPRIINAIGSHHNDIEPTCIEAVIVQIADAISAARPGARKETLDNYIKRLSCQSDQWETK

SEQ ID NO: 80302 - protein, 312 aa, Unknown
  Obtained from environmental sample
  misc_feature (1)..(312): Xaa is any amino acid
MGCQKKDQQALQSGVAGAPQYHIGIATETVSQAEDDFRGAEELIRRYGAVAQGGMVQHVTYPDSFMDQQETTITQITTLATDPLMKAIVVMNSVPGTAEAFRRIRERRPDIMLFAGEPHEDPLVIQGAADLAISCDFINRGYTIPWAAKQLGADTFVHISFPRHMSYESLGLRRQIFEAACADLGMRFVFVTAPDPTSDVGVAGAQQYILEQTPQWINQYGKNSVFFCTNDAHTEPLLRQLIEYGGMFVEADLPSPLMGYPGALGVDLSAEAGNFQPFSKKLRSGYRQGGAGKSVHGLFPMDLLLQQGLGEF

SEQ ID NO: 80303 - protein, 301 aa, Unknown
  Obtained from environmental sample
  DOMAIN (44)...(110): His Kinase A (phosphoacceptor) domain
  misc_feature (1)..(301): Xaa is any amino acid
MNRVYRNTDPYIEWSDGRNVMIQHMVDVTELIAAKEQAIQANKDKSSFLAKMSHEIRTPMNAILGITEIQLENETLQPDTQKAFGEIYNSGYLLMGIINDILDLSKIEAGKFELSPATYDVPSLINDTVHLNVMRYDSKPIEFKLFVDENIPSTLYGDELRIKQILNNLFSNAFKYTDEGEVSFLVAAEYEPQENAPQVTLVFRVSDTGQGMSAEQLDKLFDEYTRFNTEANRATVGSGLGMSITKHLVRMMDGEISVESEPGKGSTFTVRLPQTIIGEGVLGKVMAENLKQFHLGKGGAR

SEQ ID NO: 80304 - protein, 314 aa, Unknown
  Obtained from environmental sample
  misc_feature (1)..(314): Xaa is any amino acid
GAPNDQIGRDKGEYITVFYEKEENAAHDVFLLTNTEGGRISSTLGFESPQNISLYIYDNQKTFQTKKYGFIVAFLGLDWYIGDNRGTNVLLTSPANPGKVHDYGNNKYASIHEIVHAHNYLLNKNMPKWVDEGVCLYLTNGNPPNDLYSRQRTPMINEIRSNNPVKFEKIGGYDFAHTYIEYLDNTFGWNKVLVFLRENNYENVFRQTKVEIYNNWVEYLKNNYRAIVITSVPDGAILVTTFSGTNTQGHNFSIKAYEYTFNPDDYYPTGEFTGGYYQYEAGKTYIIFDQTGEGRLAIGGQTYDGRTRYAAYVE

SEQ ID NO: 80305 - protein, 90 aa, Unknown
  Obtained from environmental sample
  DOMAIN (14)...(71): TM2 domain
  misc_feature (1)..(90): Xaa is any amino acid
MSSDSEKVIETEKSSLGWAKLFFLSLFLGIFGVDRFYARKKISAILKLITLFVSVAWWGGGILIWWIIDLFIIANGKFTDALERKCTRPI

SEQ ID NO: 80306 - protein, 126 aa, Unknown
  Obtained from environmental sample
  misc_feature (1)..(126): Xaa is any amino acid
LTIPTGIPTRRHQGFKGVGWRDSPIQRDAGGGAQSKCGPKCSRRAQTYFPFQGSADATLNSALDYELSVLKYYADPLLRVIKPGMTEYAEAVRLLAFLENFIPIPPQYVPGTSILREFIGGSEFKY

SEQ ID NO: 80307 - protein, 277 aa, Unknown
  Obtained from environmental sample
  misc_feature (1)..(277): Xaa is any amino acid
VYIKSNINKVWVVGLPEGWHGGKNQMDKIEIPFSRFELVGSKRKAKMRAEAFSKYALSYAENLQDGLPIRDAPDNNGRRIYRLKMGEIIKILSVTEGSPAIGSTGEPLPGEWYKVLTEDGSTGYCFSYRLRVFEYGGGEFAASVAVVNEQTEDPELDTLLSKTWSPESYLTMINSKRIDLEDMSRHWRFDPGQETGLARIFIPDIDNSYLYTGIRPDRNRAWRFEGTNLSMQLRAQTTLGLQFLEGNGLTRTLLFGPLPVSVDILSYGKPPNGKNVQ

SEQ ID NO: 80308 - protein, 320 aa, Unknown
  Obtained from environmental sample
  DOMAIN (142)...(221): Toprim domain
  misc_feature (1)..(320): Xaa is any amino acid
MAERYHKLAAEFYYQCLKSSKPAIDYFKSRGLSAETVKEFGLGYAPWSGLIDYLAGKGVPSQKIAECGLAVVKDDGTVYDRFRNRVIFPLCDLNGRVIAFAGRGLDADAQPKYLNSSESVLYKKSGVLYGLHKARDSVREQGYIIIVEGYMDYLTLYQAGVRNAAAVSGTAFTDDHAHLIKRFATKAALVFDGDRAGLSAAQRAAVILAPLGLQASILALPGDDDPDSFVKREGADAFRGLLANARPAADFLIDKSISEFDDGSAHGKSRAMDELMPYALALSDEVVREDFFGQPRAKPAYRSAALARRDSLISGIPRHV

SEQ ID NO: 80309 - protein, 291 aa, Unknown
  Obtained from environmental sample
  misc_feature (1)..(291): Xaa is any amino acid
VIRSFMARLVFHNAKVYLERESFAQAVLIHDDRIAATGTNEEIISKAQGAEKIDASGGLLLPGFNDSHMHLYSFGRNRHRIQANGVTSIDELVARGRDLIDRIKPPEGSFVAGTGWNQDMFTGEKRFPNRHDIDRISTEHAVVIFRVCGHTLCCNTLAMKMAGITRDSVHTESGRIELDENGEPLGIFGAGTALNKIRDMVPPYSQEQIEEQLLYAAQHALKNGITSVGSRDIIEDNYQSIVDAYIKLFTEHDLHLRVNLQCTIEKDAVLTNLSNAAGSQGLQWAILSAIT

SEQ ID NO: 80310 - protein, 228 aa, Unknown
  Obtained from environmental sample
  misc_feature (1)..(228): Xaa is any amino acid
MTRQETAYYALEALKKAGAGKAACKMSTGRKDEFNVEANKFSLLRTLFNNELSIKAIKDGRKGVIVINKLDKDSVDEAVANCIAMTASALPDDAEDIAEKGENKSFDQTCGGPNMDKLFSRTKEFLDQIGQTGSEFPKIVLEGLVSDFNSAETTYVNSNGVEFNSSSEKYDMQTMFSAKDGGKSSSFNGYFARIASLDTPFMELGMQRQLLDESSSPLTAHGGRKVVG

SEQ ID NO: 80311 - protein, 319 aa, Unknown
  Obtained from environmental sample
  misc_feature (1)..(319): Xaa is any amino acid
LSDEYMDTIAACVEKARDEKMLACLYDEDRWPSGAAGGIVTKDPKYRIRHLLLTRKPYGSTEVNAPQKHSRADSGRCENGELIACFDVVLDKKGDLESYSVIGEKDSAYGFKLYAYAETALPSPWFNNQTYVNTLDKDGIREFIRLTHDAFNKSFGKDFGGVIPAIFTDEPQFTRMGTLNFAREEKDVTLPWTTDIEDTFKATYNGESLIGALPELLWDLSEGKVSTIRYHYHDHVAERFTAAFADQCGDWCGEHGIMLTGHMMEEPTLESQSAALGDAMRSYRSFQFPGIDMLCDRREYTTAKQAQSAARHSANLSWP

SEQ ID NO: 80312 - protein, 183 aa, Unknown
  Obtained from environmental sample
  DOMAIN (12)...(95): Hpt domain
  misc_feature (1)..(183): Xaa is any amino acid
LSAPVDYAANPRLLKFFCQDAEAAIATLRETVKNSDAKLFTITVHAMKSALANVGESEASELAAALESVGRSGDMGYISENIDEFIQTLESLVDKFSGEGSADAGDSDVAEDKDYLAEQLQIVRSACDNYDDDTANAALDRLKERRWKPSTSESLEKIRDALFVYSDFEGVAEQCKALQESKS

SEQ ID NO: 80313 - protein, 260 aa, Unknown
  Obtained from environmental sample
  misc_feature (1)..(260): Xaa is any amino acid
MLEIKRIKLETYVKSEITIVRKMGDSPLIRDYFIHPSDENLRKQAFKEIASYRGAFDHKSVFWVNDVDKIFHIDDTAPYTVDPKSPDNYWYWMTLYRTESYNININYNPDIDKIRLWVNAPVFNDNQKPIGMVGTGLDLSEFVHALFDDVDDRMEFYFFNGDGEITGARDIELISTKMKIEDKMTAVNGGILAVAQSLMPGEARALAMPNGNLVISTIPQLTWYSIVSMPESIQDYKTSMTALFLVGAVVILPIFVIFNV

SEQ ID NO: 80314 - protein, 268 aa, Unknown
  Obtained from environmental sample
  misc_feature (1)..(268): Xaa is any amino acid
LDSYAKLAAGAMQTSLLFDETRSALQKIDALERYQENVFNSMTNMIITTDPNGQIYYFNEPAAEVMGLGHDDLGRNLIDVFKKSITSKTLDTIVKSLESGNEIIGLEGIYNNGEKEMDYSLNVTPLKTPRGRKEGLTLLFSNQTRENELKQTVHQVSEEKRIIKNAFSRILSQKVIDQIIADPSQLKLGGEKRKMTAIFTDIQRFSTISSELHVQYGEDGPKTLVNLLNLYLTEMSNVVLENRGTIDKYERDAIIAFFGAPAWMEDTL

SEQ ID NO: 80315 - protein, 94 aa, Unknown
  Obtained from environmental sample
  misc_feature (1)..(94): Xaa is any amino acid
MKKIIALLIGLSVTAICFAQSDPVEGYWISVDDKTNKVTAGWLIYQENGKLCGKILSLADKPKGTIASKAKESYKDFPISGKVNQISANLSWGT

SEQ ID NO: 80316 - protein, 323 aa, Unknown
  Obtained from environmental sample
  DOMAIN (1)...(214): Cellulase (glycosyl hydrolase family 5)
  misc_feature (1)..(323): Xaa is any amino acid
LAEDWGQGYLTGGKEANRQRVVTVVDAAIAKGIYVIIDWHSHNAHTHTNDAKAFFEEMARLYKDVPNVLYEIYNEPTGTTAAAWTNDIRPYAQTVVNAIRAIDDKNVIIIGTPNWCASPEIATTEAAAVDGVNLVYTVHFYSAYNPHKEPLRTKVKTSLNTHNKAVFVSEFGVCMNTGKEPLDLAEATTWLNFLDENNVSWVNWSVTYKDEGASALKPAVRKYDGNWTPDDLTTSGAYIRGKMIEAYNREENSTATFVTDLVIPNTPKTTESAAIAPAAVPSTAFSVRPIPAEQTSREVKFFCRESRYGRIAYNLQCFREGRE

SEQ ID NO: 80317 - protein, 71 aa, Unknown
  Obtained from environmental sample
  misc_feature (1)..(71): Xaa is any amino acid
ERRRRLEPEERARREEAVRQEALLHAEEEGMDVSISVEERTRLELQESVMNMAKEHPEDAAQLIRTWLLEE

SEQ ID NO: 80318 - protein, 175 aa, Unknown
  Obtained from environmental sample
  DOMAIN (1)...(115): Dihydrodipicolinate reductase, N-terminus
  misc_feature (1)..(175): Xaa is any amino acid
MKIAIIGYGKMGKMVEQTALDQGHTVTAIVDPVSQESNPPSGAKMFPGIAAAGDLCGADAAIEFTQPGTALANIKALAEKKIPSVIGTTGWYDQLDEARRLVEQAGAALIWASNFSLGVNIFYRVAWHAAQLADSFSEYDVGGFESHHNKKLDSPSGTAKTLVKGALGRSDPWGP

SEQ ID NO: 80319 - protein, 81 aa, Unknown
  Obtained from environmental sample
  misc_feature (1)..(81): Xaa is any amino acid
MSKYWNSRVRNISPYIPGEQPRDRKFIKLNTNENPYPPSPKVIQAIHETANERLRLYPDPQCTSLREAVAQRYGVKSARPI

SEQ ID NO: 80320 - protein, 144 aa, Unknown
  Obtained from environmental sample
  DOMAIN (2)...(143): Protein-L-isoaspartate(D-aspartate) O-methyltransferase (PCMT)
  misc_feature (1)..(144): Xaa is any amino acid
MVSEQLKARNIKSEAVLQAMRSVPRHLFVPENLQKHAYDDSPLPIGLGQTISQPYIVAYMSEYLQPYKGMKVLEIGTGSGYQSAILSYLGCEVFTVELLKELADRAEKIFKALNLSNIKTKCANGYSGWHEESPFDAAIITAAR

SEQ ID NO: 80321 - protein, 272 aa, Unknown
  Obtained from environmental sample
  misc_feature (1)..(272): Xaa is any amino acid
MPLLLPRVFGAEGLLAGKYMSLNKKRYAAVVRSLTISTILLIMGGAFAENLHSAFVLAFPEIRYTSAVTVGVNLYRIVESADAESSIIEKVTAALDSFKDPLAAAVMFNPNYTAELSPDVFTADYRKYVSGENTVKANVISFDDGMYRKILELADAKYGEAVLFNRWNYKSGNKVTLFAPFNFTEGLLTVYSPDGVREQFEIGGELTEFPIELTTILNVNVPLNIIVPKSGNPTRAVWFYDTADAEGLSAFTPRNYKAKARRFSRDNPGEKP

SEQ ID NO: 80322 - protein, 127 aa, Unknown
  Obtained from environmental sample
  misc_feature (1)..(127): Xaa is any amino acid
MIQVYIGSCTNGRIEDFRAAAAVLRGKKIADTVRAIISPATTDIYVQALKEGLIQIFIDSGCCVTNATCGACLGMSNGVLAEGEVCASTTNRNFYGRMGKGGMVHLMSPASAAASAIAGSIAVGGQS

SEQ ID NO: 80323 - protein, 129 aa, Unknown
  Obtained from environmental sample
  misc_feature (1)..(129): Xaa is any amino acid
VNTVLLRQSIRNASEISFSRSGGPGGQNVNKLNTKVTLRLRLSDIDGLSDAELERARELLANRISSEDEIVINSDEERSQRTNLERAYFRLEALFTAAARLPKHRRPTKPSKQAREQRLHSANLSMIFP

SEQ ID NO: 80324 - protein, 253 aa, Unknown
  Obtained from environmental sample
  DOMAIN (128)...(226): GTPase of unknown function
  misc_feature (1)..(253): Xaa is any amino acid
MDALKSAGFRDALPGEFTFRAFVNGKLDLTKAESVMELVSAKTEIGRRRAVSRLSGSLEKEIGEIKNLLVQVLSGAEIYLDYSEDEVGADVDEDAGKLPYHNIALEVLLRLKKLSASWQIERIYQEGVTVVIAGRPNAGKSSLFNALLKEDRSIVTEIPGTTRDWIEAWVSIDGIPVRLVDTAGLRESADSVEKIGVDRSRKLLQEADIVLYLIERRLTGITWRRQEILLTVRETGGEASNLVRLCPWIWVCG

SEQ ID NO: 80325 - protein, 295 aa, Unknown
  Obtained from environmental sample
  DOMAIN (66)...(284): Mur ligase middle domain
  misc_feature (1)..(295): Xaa is any amino acid
LSGLHTNGSLFIEDAISRGALCVVHETEDIKKTQGIVYIKVKNSRFAMSPVTASFYNFPSRRLYVTGVTGTEGKSTTVYLIWQLLTIMGKKAGFFSTVQRSSGGDAIWNSEHQTTPEAPVVQRLLWEMADNGCEYAVVEASSHGLSPKTNRLGDINFCSAVFTNVTHEHLEFHGTWEQYREDKANLFRALDIHSPINSSGFKPFGVINADDKSAGFFAQAAKCKSFTFSRNGNDADIIAETIENSAQGNSYSVFIKQLNEHIEIKDNLPGSFNIRNVLAACLTVSNLLKRALREI

SEQ ID NO: 80326 - protein, 135 aa, Unknown
  Obtained from environmental sample
  misc_feature (1)..(135): Xaa is any amino acid
MKIAMDMLCRVFSNALDIIEKEQIGATDYHSMRVASLCSAMGKKLGFDDDTLSALCICALFHDNALTEYHLYKNKGGQYEENIILHCEKGQSNVSWLPFKKDIGGFVLYHHECENGNGPLKSLGRLLYLNWGDAG

SEQ ID NO: 80327 - protein, 313 aa, Unknown
  Obtained from environmental sample
  DOMAIN (1)...(161): Protein of unknown function DUF115
  misc_feature (1)..(313): Xaa is any amino acid
AVFAGLAGNVSGGDAASGDPLPVFLAAAGPGLDKVSSLLPEIRKRCVIVAVDTSLRFLSRNGIEPDFALVIDPQFWNSRHLDRCLSGNTRLIIESAVYPVVLRLPFKRMYLCGSLFPLGKFIEERVDPKGALATGGSVATSAWDFSRQLGARQIWIAGLDLAFPGNKTHYRGAQFEEKTLAESWRLWPLESWLTKAMRDGISCNGSALGGGTVVSDRRLSLYAAWFENCFSQYPEIKNFSLSEGGLAIAGLEVADRDAFLALPDRRKEIDARLETAGARIETEFFDPHETQRRSQRYDKAVAELSADLINGAP

SEQ ID NO: 80328 - protein, 329 aa, Unknown
  Obtained from environmental sample
  DOMAIN (145)...(317): Peptidase M16 inactive domain
  misc_feature (1)..(329): Xaa is any amino acid
MTERDCYVRYGKGGTVNASDNEFISANLASEMLAASGLGPYSRIELVNRLAGKQVSNSFWASSYYRGFQGSSTSKDIKTLFEMIYMFFTKIKLDDRAVAAMLDQYKTTLAHQEDDPDNYFSRELRKIISGNHPRFKPLELADLSKVSTEQAFSFINRCINPADYTFVFTGNLKLNEMKDLAAGFIASIPNAPSMNTWVDPRITRPADIEKKLYKGKEDRCTVYLGWFAPSQTAFDESKNQTAAILSEYLDILLTDEIREKLSGVYSISAGSSVSAIPKGEARLEIYFQCNRARVNELITAVLERITAVSAKPAKSGYVLINQRRRILRS

SEQ ID NO: 80329 - protein, 115 aa, Unknown
  Obtained from environmental sample
  misc_feature (1)..(115): Xaa is any amino acid
MSAELYITRLSAWAPGVENQCEWDEWAQSKREISCGTQAPAIPFTDSMFRRRLSQITKMTVQVVHDLLPVKEDTKMFFVSFRGRLSRQYQIKQMLIEEKSLMPAAFSLSVFNAAA

SEQ ID NO: 80330 - protein, 94 aa, Unknown
  Obtained from environmental sample
  misc_feature (1)..(94): Xaa is any amino acid
MGIERLPSGKLSVNKIVLAVAMNAYNALKMLGQKSIEKEGRKKLKRKRLGKVIRDLICVAGKLVKHGRELIFKMNQKDQMLPVFLRLNAALDCS

SEQ ID NO: 80331 - protein, 89 aa, Unknown
  Obtained from environmental sample
  misc_feature (1)..(89): Xaa is any amino acid
SDGSDTAIKSADIALMNNTFSNIPFVIKLAQKTKNIIYQNIVLAFSVSIIMIFLSGAGIITPIMGAFFHNIGAFLVLINSGRVLSRLQV

SEQ ID NO: 80332 - protein, 58 aa, Unknown
  Obtained from environmental sample
  misc_feature (1)..(58): Xaa is any amino acid
MSKFIVVGERIHCISSAIRAAMEKMDSGPIIQRAKDQIAAGASYLDVNIGPAKKTARR

SEQ ID NO: 80333 - protein, 312 aa, Unknown
  Obtained from environmental sample
  misc_feature (1)..(312): Xaa is any amino acid
IKAFFRDAIFGQSSIAYNLRGIAVRSKFVEKDLSTITNQSDRIDLLSPGAENPEWDLEWADWDKEKISAHSLTATLSASVMEKTQTFQMIADLPPRDAKLSWNTGINIWITSTNASWGIQLPEKREEWKLDPFNFRESVNFGSYGSLSFNMTMDTEGWDSPETGVMERRVSSITTSLNLSKWGVTAAYSASRMLGYEYLIGTGTADTGWFQRPDSAENMILRSRDFSLSYSKNIAMKELWNKNIDFTVNTRASLNINLQQYTSSNFNFSLGFTLGINRFLSMSIAAESSNSRIYQYFHDWPGFDDAPIARPI

SEQ ID NO: 80334 - protein, 178 aa, Unknown
  Obtained from environmental sample
  misc_feature (1)..(178): Xaa is any amino acid
MLGLKSKIREVYAHPLRRDFVDQLLHELGKPAWIVDNPVVGGLTPGVIQKLAPNLAGSGLINTMLNLLNSEPDTPDNKSVAPRPAWWKEAVFYQIYPRSFGNCGTSCVLRGILSKLDYLRDLGVDAVWLSPVYDSPNDDNGYDIRDYYKIQPEFGTMDDMDALINGFSAESVLGRVFR

SEQ ID NO: 80335 - protein, 98 aa, Unknown
  Obtained from environmental sample
  DOMAIN (1)...(98): Thiamine pyrophosphate enzyme, central domain
  misc_feature (1)..(98): Xaa is any amino acid
MIKEARRPLLYAGGGVISSGAEEELVALAEKLNAPVALSLMGIGAIPKDHRLCTGLIGMHGTVASNKATQKTDLLIAIGARFSDRVQARRKCSRIPRK

SEQ ID NO: 80336 - protein, 62 aa, Unknown
  Obtained from environmental sample
  misc_feature (1)..(62): Xaa is any amino acid
MPKSAQYRSGSLIYFQGDPADKIYILSSGKVSLVYQDIETGADRKNSVQLGEFFRVKSALGR

SEQ ID NO: 80337 - protein, 260 aa, Unknown
  Obtained from environmental sample
  DOMAIN (14)...(256): Acyl-ACP thioesterase
  misc_feature (1)..(260): Xaa is any amino acid
VKCNPANPKESGFVNIWQETFPVRFGAIDRSDRLTLDAIFQFFQEAAICHAENLNVGREDMLRTGQIWILSRMSVIVKRRPKYFENITVRTWPRGGEKLFAIRDYDIRDKDDIPVVCARSGWIVLDVEKRRPIRPQSIMDSVPQNEGENALSPEDGAIAALEERANLQKTAERKALYTDIDFNGHVNNIRYIQWIEDAVEPQFLESADRMRLDINYLNEILGGENIDIMSANIDDSSCAEAFALKARKRKMTNARPSCPG

SEQ ID NO: 80338 - protein, 288 aa, Unknown
  Obtained from environmental sample
  DOMAIN (1)...(288): Polyphosphate kinase
  misc_feature (1)..(288): Xaa is any amino acid
MVRVAAIKRSGEDAESQALRPPELLDRICQKVRSIVSRQYEALVEEIFPDLARGGLTLRRPNEWTDSQRNYLESFFAREVFPLLTPLRVEETEDLPSIDGYSLYAGFFMKAETALDIGPPAEDCISIIRIPQAPDQVIFLPREKEDHEDEDMGQVYWALLEDLVETWGSYLYPGYKVFESLIFKVNRDADFSVDEQRDEDFIEAMEEVLESRGRSMAVRMVYSPGSEKIRDCLAHRLSLAGKDLFELKGPLALKKIYDSIRGYDHLREKPWKNTPTQPLPRIRVFGIA

SEQ ID NO: 80339 - protein, 306 aa, Unknown
  Obtained from environmental sample
  DOMAIN (175)...(306): DEAD/DEAH box helicase
  misc_feature (1)..(306): Xaa is any amino acid
LVEVKRSRIWGVAVEIKAESAVAGKVRLKEIIDIKEGHWADSNRSLLKLYEWIARYYQCPVGRVFRPVVGKAIINKKAKTVTVYRYVGAEDNGNGIDTDNARPVLKDNHRIALEKIRGCPEPLSAAQIGARFGVTASALASLCKKGYLSKEIKTVLRDADELSYPSVDGEKIALSPGQRDCVERVAASFSAPDKPFLLYGITGSGKTHVYTELAKLALAAGRGVIILVPEISLTPQTISRFRVAIRDSVAVIHSPMFDGERRDSLQEIVTGRRRVLGRRAQRPLCPMKDVGLNTLGQGHDGSYSRA

SEQ ID NO: 80340 - protein, 285 aa, Unknown
  Obtained from environmental sample
  misc_feature (1)..(285): Xaa is any amino acid
MRTFHIGGVATKASEADHITLKYPVYIREVIGTHITLDNGHLLFTRRGHAIVNKVMKEFKIERGDKLVAGDGKKINRGDVIIHRGGQDITSPEIAYAMILKNNDEEMLYLIGPEQKIEIRNGSDFQVKIGTVVDAEKKIATFDPFSDPIIAEKGGTVKFEDIILGTTLKEEIDEDTGNIEKRITEFQHESKQPRIVIKDDSDNEVASYFMPGGAYLLVDEGEKIRAGRTIAKTLKESRRAMDITSGLPRVSELFEARKPKSPAVLAPVSGTVYFRGIVKGQPKVG

SEQ ID NO: 80341 - protein, 267 aa, Unknown
  Obtained from environmental sample
  misc_feature (1)..(267): Xaa is any amino acid
MRNIEIKGARVHNLKNIDVTIPRNSLTVITGLSGSGKSSLAFDTLYSESQRRYVESLSSYARQFLGLMEKPDVDRIDGLSPAISIEQKTSGHNPRSTVGTITEIHDYMRLLFARVGTPTCHKCGRVIARQSVQEITDRILSLDAGAKFQILAPVVSNRKGAYKELLVKLQKSGYVRARVDGVIYNIDDDIRIDQNKKHNIEVVIDRLVNSTSVKARLTESIETALSVSAEETVIVDVVGKEELLFSSASPARSAESAATSPPPRCSR

SEQ ID NO: 80342 - protein, 102 aa, Unknown
  Obtained from environmental sample
  misc_feature (1)..(102): Xaa is any amino acid
DLQAFSRHFESELKRALDTEKQKPALELTQTNPLHFPIQGERDYRDVQIRRVLDYASTYNNNGNNVDPEQEFMSAVENQMTLEMLYQAASFEFSQVNQVLRQ

SEQ ID NO: 80343 - protein, 312 aa, Unknown
  Obtained from environmental sample
  misc_feature (1)..(312): Xaa is any amino acid
GYTKGVAAVAGGVSGFAGVADTKPPVIDIKYPQTAYFSPNHDGKADLLEILLSITDQNYVVSWSVEIKDENGDVARVIENKEQRFERLNMKEFFKRLFTSKKQIDIPPAIIWDGMRGTGEAPVDGKYTFIITATDNLGNTAVTPVYETVIRNRLPVITINPIPDAQKIFDPKGSSGGAQGGNRTVTITPKGSEEDAWESVIYNPTGQKIKTFETQSGEPKPIVWDGRTDSGQIAPDGVYIFRIGTTDKAQNSASAELTNIILDSREAGAFLTTSVSAIAPSKNQTSNMVNFTNRLLINDGVNNSCRICTWGT

SEQ ID NO: 80344 - protein, 316 aa, Unknown
  Obtained from environmental sample
  DOMAIN (1)...(169): ROK family
  misc_feature (1)..(316): Xaa is any amino acid
ESGICGDVTRVPTEAHSGGQRVMANILSLIEKLSGGGAEPFVGVGIGTPGFVDSDGVVLGGAENLPGWKGMQIYAPVTERFGLKVSAANDVTSVALAELKFGAGRGVQNIVCFALGTGVGGGIVTNGRLYTGSHGMAGEIGHIVVETGGEQCTCGQRGCVERYASATGIVNMAVEMAMAETDESKWTAFAKLVRKNPGEITSKLVYEHVAKADALALRVHNRACDMLGRAVGIMINTFSPDRVVLGGGVMMAGSVVTEAVKSYAARHCWPAIFERCEIVPARMGEDAGVMGAGALAIEEFASTQEKSRADSDPSVK

SEQ ID NO: 80345 - protein, 88 aa, Unknown
  Obtained from environmental sample
  misc_feature (1)..(88): Xaa is any amino acid
MEIAEFREIVFANYRQAGRKLPWHFADPWGVMVSEFMLQQTQVERVVPYWENWMKLWPQPKALADDSMENDPARLVPRAECCAMNVPQ

SEQ ID NO: 80346 - protein, 316 aa, Unknown
  Obtained from environmental sample
  misc_feature (1)..(316): Xaa is any amino acid
MGYPSIRSAESDAARNSASGERILSHEAAAITVNMLERNPAPDDLRIKTVRSAPVAYKTGTSIGFKDAWSIAIFDRYVLCVWLGNFSGEGNSAFIGRLSAAPLSFSIIDAMLAEIPNEKLFARRPRPPEVKEVQVCAVSGDIPSDDCPQLKETLFIPGVSPISRCRIHRKVYIDTRTGYRTNETEGPYIRGEVREFWPSDILEIFEAAGLPRFSPPPYPPNSAEGGPASSGFPPSIISPLANTTYIIRPGLQADSKFNQMVLLAATDQDASELFWFANASFLGRAKPRERFVWSLDSVFGIFCSRHLGRSSEIGAR

SEQ ID NO: 80347 - protein, 92 aa, Unknown
  Obtained from environmental sample
  DOMAIN (1)...(65): Ribosomal protein S3, N-terminal domain
  misc_feature (1)..(92): Xaa is any amino acid
MGQKVNPTGLRIGINKTWGSRWYVDPKEYADTLHEDLKLRRLIMEMPEIKGGDIAELELSGIPKKSRYHPYRPARLIIGVRGQYRKDSPGLQ

SEQ ID NO: 80348 - protein, 59 aa, Unknown
  Obtained from environmental sample
  misc_feature (1)..(59): Xaa is any amino acid
GSIPIGFGDCGEKRLGISVLGDVHEAFMKSTIPFRVDVLDYNAVSEKFQKLIDAKYEVI

SEQ ID NO: 80349 - protein, 230 aa, Unknown
  Obtained from environmental sample
  DOMAIN (154)...(229): Histidine kinase-, DNA gyrase B-, and HSP90-like ATPase
  misc_feature (1)..(230): Xaa is any amino acid
MYDTWGTMLGIVGSTDDVTAAVGLQRALEAAVEDAKIANRAKSIFLANMSHEIRTPMNAIMGITEIQLQDKTLEARTRDAFRSIHTASDLLLGIINDMLDMSKIEAGKLELVPAAYEVASLISDAAQLNMIRRGSKPIEFEVRVEEDTPAAVVGDALRVKHILNNILSNAFKYTQTGVVTLSVSHESAGAEACAPGEASAPQASGVTLVFSVRDTGPGMTAEQVSQAVDE

SEQ ID NO: 80350 - protein, 302 aa, Unknown
  Obtained from environmental sample
  DOMAIN (96)...(261): MatE
  misc_feature (1)..(302): Xaa is any amino acid
MAALFQGILNSLHIFTPSELAPILLNIVTILCAYTLSPFTKNPARAMAYGILIGGFLEAAIQFPFVLKNGQRFFFTGIKKAFANPGTRKVLRLIGPTIIGMAAYQLNDLVSTALAGNAGEGIVSSLQYSLRLQELILGVFAVSIGTVLLPNLAEYAKSSQWKNFNDRLASAMDIIALITVPITFFSLAQGEILIRLLFQNRSFDENSVKLTLSAFTFHMPGLLFIALNRILAPAFYAQSDSKSPTFAGIISFAANITLAAVLVRDYRGAGIALALSVASVVNTVMLLSLKKLGHLIEHFFFL

SEQ ID NO: 80351 - protein, 235 aa, Unknown
  Obtained from environmental sample
  misc_feature (1)..(235): Xaa is any amino acid
MAAYAGANLYLGKRIFQSVYALYPKSSAAIFAIAYAAIAVLAIAANFATVSTFPPAVKDALRWSGGLWMGFFLYALMLFLASDAVIIIGRLIKIIPSPVPQNIRLYAGLTVITLTAALIVYGITNANKIMIASYNVRVHNKTLSGGMKIVMAADLHLGAAGSEKRLPKIIDAINNQKPDLVCFAGDIFNDNYYAVSDPERGSELFKSLKATYGVYACPGHHDPRRARRRWQTSWS

SEQ ID NO: 80352 - protein, 106 aa, Unknown
  Obtained from environmental sample
  misc_feature (1)..(106): Xaa is any amino acid
MRIVFKNFRIVDSVREFFGTLVVENGLIHDVVELGNAIDGDVVIDGRRFGEIVVLMPAFIDLHAHFREPGFPEKETLESAFAAGAAGGFATVVCMANTKPVTDTVE

SEQ ID NO: 80353 - protein, 316 aa, Unknown
  Obtained from environmental sample
  misc_feature (1)..(316): Xaa is any amino acid
EYGVVRTFAPGEQREGGTGLFEDNIVNDTNIKKKPRQVKQTTVSPAKSRKTLPQTSGFSLDADQLTAVSSGLRKGIIIAGPGTGKTAVLAVKIARVISEGAPPASVLALSFTVKAAAELRDRVLSLTRKPKEEKPEAENPVIVTFHSLCASILREQYAAAGLPPDFKILSSAERDGILAKICAMAGSKALSPKRLGEYIEKQKRYFLLPGEKSKDLGRILPASLVSFIPEDNSGDNDAAVANAVANAYAEYRKQLNFLGAVDYDGIIAGTVRLLAMKEDILKYYCQKFGFIFVDEYQDINLPNTPYPVSANLSSVN

SEQ ID NO: 80354 - protein, 288 aa, Unknown
  Obtained from environmental sample
  DOMAIN (11)...(283): Glycoprotease family
  misc_feature (1)..(288): Xaa is any amino acid
MRRGGGETRKKVLSNIIATQIPFHKPFNGVVPEIASRKHTEWIYDVVKEALDKALLKPGDIDAVAVTNKPGLLGSLIVGLSFAKAFAWARDIPLIAVDHMLAHLYASQLNTASSNGNEAPAYPFLGLLVSGGHSIICRADAFDEITVLGATIDDAAGEAFDKVAKHYNFGYPGGLVIDRMAQKGDSGAFRFPLPSLHKGALPRGSEHRCDVSYSGLKNAVINQLDIFRVKKDATPEDIAASFQKTAVEILLRALLNAAQDSGLTDIAAGGGVAANSYLALGHLIMKFP

SEQ ID NO: 80355 - protein, 246 aa, Unknown
  Obtained from environmental sample
  misc_feature (1)..(246): Xaa is any amino acid
MPFAPVNTKERVVIAITGGEPTLREDLPDCGRKLREYGFDWGMVTNGSYYTRSLHSRLLSSGLGSVTVSLDGFEAAHNWLRGNAHSFNKAVNAIDIIASSRLTYDIVTCVNQRNIGGLESFKDFLIKHNVKAWRLFTISPIGRALENPELRLSPEQLKWLMDFIVRSRADSRIKVYFSCEAYTGDYEGKICDGYFFCHAGVNIGFILYDGSISACPNINRHFIQETFTRIILGTYGTIASRYARSA

SEQ ID NO: 80356 - protein, 237 aa, Unknown
  Obtained from environmental sample
  DOMAIN (2)...(101): FtsH Extracellular
  misc_feature (1)..(237): Xaa is any amino acid
MAAQDPVYRTVPINDPDIIKLMDEKGVAYYADAREGSAILNIIFSWVLPIAFFLLLFRFVMKRLGTMGGNVLSVGQNRAVIVAEGDIATRFNDVAGVDEAQEELVEVVDFLKNPKKYTDIGGKIPKGVLLVGPPGTGKTLLARAVAGEAGVVFFRMSGADFVQMFVGVGAPRVRDLFQHARDKAPCIIFYDEVDALGKKPNQHVARGNHEREQTLNPAFGRMDGLTRQAALSSWLQQ

SEQ ID NO: 80357 - protein, 110 aa, Unknown
  Obtained from environmental sample
  DOMAIN (1)...(110): D-alanyl-D-alanine carboxypeptidase
  misc_feature (1)..(110): Xaa is any amino acid
LSKAAVLIDVHTGALLYSRNPNEEIPPASLTKLMTMHIAMSEIDARRASWDEIIPVTVQSWARSQPPRLSLMFLAPGQTVTLRELMLGMPIPSENDAAVAVALRFAPTDG

SEQ ID NO: 80358 - protein, 81 aa, Unknown
  Obtained from environmental sample
  DOMAIN (3)...(80): Bacterial DNA-binding protein
  misc_feature (1)..(81): Xaa is any amino acid
MPITKNDLINETAILCGITRDDVRIAIEQFFNSVKDSIKEGKSLELRGFGTFSPKTCNPRVGRNLQTGELIPLATGRSMNF

SEQ ID NO: 80359 - protein, 254 aa, Unknown
  Obtained from environmental sample
  misc_feature (1)..(254): Xaa is any amino acid
MNGRVIDPVSGIDGPRTVALDGGVVKSVIDRPFVRSLCGELFPADGADGAEALFRNKKPLTPDELFPDYDEDDVEVIDAAGLWVVPGLMDMHVHLREPGREDKETIATGAQAAAAGGFTAVACMPNTSPVLDEASKIRYVIQRGENCPCRIYPIGAITKSLEGEELAPVGEMVKAGAVAVSDDGKPVAKANVMRNALNYSKSFGIPVICHSEEPTLSAKGHMNEGLTSTRLGVRGIPVSPRPSPFSAIIRGGEG

SEQ ID NO: 80360 - protein, 186 aa, Unknown
  Obtained from environmental sample
  DOMAIN (16)...(149): Integral membrane protein DUF6
  misc_feature (1)..(186): Xaa is any amino acid
MSERRKALAAIIACVLFWGFSFISIKITVAVFPPMSQGFLRFAIALVFLFFMKQKLAPRENLKARDIPLLLGAGLFGVTFYFFCENNGIALVTASEASIAIGSIPVLTMLADSLSMKFTRNTNNHLPRIGVRQWIGAFISIAGVWLVAGVSFALSGSVLGYIYMAGAAIFWVVYSLLTRPSLTRCS

SEQ ID NO: 80361 - protein, 293 aa, Unknown
  Obtained from environmental sample
  DOMAIN (188)...(292): Thiamine pyrophosphate enzyme, central domain
  misc_feature (1)..(293): Xaa is any amino acid
MRLNGAQITIETLLAHGIDTVFGYPGGAVLTLYDELEKSAGKIRHILTAHEQGAVHAADGYARVSGKTGVVIATSGPGATNLVTGIANAYLDSVPLLAITGNVALSLLGKDSFQEVDIVGVTQPVVKHSFVVHSVDKLEFILNEAFRIANSGRRGPVLVDIPKSVQSDECEYTGIPPSSEKEQPLSFDIEQIAAAIKGCKRPFIYSGGGVVASGAENELQKLSEKLSAPIGFSMMGLTALPYDYPMNLGMCGMHGRYASSIAQSECDVMIALGVRFSDRADGYTDSFGQGRII

SEQ ID NO: 80362 - protein, 202 aa, Unknown
  Obtained from environmental sample
  DOMAIN (4)...(162): GTP1/OBG
  misc_feature (1)..(202): Xaa is any amino acid
MEKFADEAIIEVSSGSGGNGCVAFRREKYIPKGGPSGGDGGRGGDVVFTVRRNVRTLAHLRHKHTFKAKNGQDGRGAGCYGKNGEDIVIPLPPGSIVREAETGALVRDFSEEARDKDDFVFLKGGNGGWGNIHFKSPVNQAPRKALPGQPGQTVQLKIELHIMADIGLVGFPTPVNPACSTVSPMPGQKSPHILLPQKSPTL

SEQ ID NO: 80363 - protein, 319 aa, Unknown
  Obtained from environmental sample
  misc_feature (1)..(319): Xaa is any amino acid
DGGLTWQNAIVKDAGHGELPLNTAIYTDKVYTANIIAEDTCGVTSYSNAMINIDNNPPNVVITSPYSGQYVGTNMSIIGRVADNIELKSLSFMVINVINPNDRLVVEVEELHPTIFETVNLENFKAGEYIVRVISKDLADNETIVSRKVFYDPNDIDAQIGIYSPLPGEEHTGPVYVAGLVKGTSLPETVMLKLDGEEFQELPVDRYGVFRYDLSEEEMKTKGPHKIIAYYKTEKGRTISSANHTVYYSHFGPILLIDSHRDGDVITNRPWLRGRAMFIWPPHPDGREYTRAETSQFAVAKIEVSYDNGRTSCQSDHEL

SEQ ID NO: 80364 - protein, 313 aa, Unknown
  Obtained from environmental sample
  DOMAIN (135)...(300): MatE
  misc_feature (1)..(313): Xaa is any amino acid
ELIGILTTNNAAQTQIVTVGSDYLRIVSWAFIPMAISMAIATSFREIAKPKIPLIISAATTVINTIGNWILIYGNLGAPRLEVKGAAYATMIARCVEVAAFLVYAAVSNAPFFANIKRLFLIHKKLIIEIFGKSAMIFASEISWVASETLMIAMYNRRGGAEVVAGMSAGWTIANIFFLLFGGLWTVSYVLVGGALGGGKLDEAKNRAGWLKWGGFTAGLVFAIPGFFITSALVPLVFHNLSADARANCLGLVFVILVYLPLWCYLNVQFAVSRAGGDTAMGMYTDVSVNTFLFAPGSVLLSLFTNLPPVPRP

SEQ ID NO: 80365 - protein, 73 aa, Unknown
  Obtained from environmental sample
  misc_feature (1)..(73): Xaa is any amino acid
MPRKKKYRNVSIFVSSTFKDMQAERDALRDHVLPEVNEFAEKYGCVVEIIDLRWGVDTAKFRGGSADLIIGET

SEQ ID NO: 80366 - protein, 124 aa, Unknown
  Obtained from environmental sample
  misc_feature (1)..(124): Xaa is any amino acid
PKLTPGYREGRGLTDAAVDVNIYARRRDAFTAILDEAGIEYAVPEGAFYLFCKVPSKKEGAKEPCGSVEPGDDSAFVNHLKQHLILGVPGTGFGKPGWLRFAYCVDERNIRASAAAFKRAMEEW

SEQ ID NO: 80367 - protein, 299 aa, Unknown
  Obtained from environmental sample
  DOMAIN (25)...(261): Methyl-accepting chemotaxis protein (MCP) signaling domain
  misc_feature (1)..(299): Xaa is any amino acid
MGSNSARAKMSKQEKNASEAEKAVEAIKDSIESLNKMIESQAESINTSSSAVEQMTANIHSVTKTLIENSKNVANLSEASENGKTGVQTVAEMIREIAKDSEGLLEINAVMDNIASQTNLLSMNAAIEAAHAGEAGKGFAVVADEIRKLAESSSGQSKTTATMLKKIKASIDSITVSSNEVLSRFEVIDSGVKTVSQHELNIRNAMEEQEVGGKQILDSMERLKELSVSVKKGAEGMMDSGDHLNKQTRELITSSTEVVNGMNEIVNGAMQEIKTAVTLVDEMSAENTRDFDELKVESS

SEQ ID NO: 80368 - protein, 184 aa, Unknown
  Obtained from environmental sample
  DOMAIN (4)...(183): Queuosine biosynthesis protein
  misc_feature (1)..(184): Xaa is any amino acid
MVNELPEILCGPELCGKDGGLPLLVFNDSKVRKARLVGTALHTGAQAEFLLVEKMGNSEWRVLVPRAKRRRSGSRYAFFNAEGAEIAQAEIIDEQGEFRILRFDCPIDDAWLDRYGHIPLPPYIKREDAPADADRYQTVYAAVTGFSAASTAGLDFTRALLERLAAAGVESVFLTLHVGLGTFM

SEQ ID NO: 80369 - protein, 69 aa, Unknown
  Obtained from environmental sample
  misc_feature (1)..(69): Xaa is any amino acid
MPDMDGWDTYGRIKAISGLHDTPTAFFTSSSDPKDIQHAKEMGAVDYIRKPFEADELIHRIGKILTRKP

SEQ ID NO: 80370 - protein, 180 aa, Unknown
  Obtained from environmental sample
  misc_feature (1)..(180): Xaa is any amino acid
MQIFQKSNLNERRTSIKRKFIVFSSVLFLAIVLLGSGAFLLSMRQIVRNSTAVDLSQEVEIERIKLESSVNAEIAIALKMADSPLIQEYFINPGDPNIEKIAFREIAGYRRAFAANSVFWVNDQDKRFYSDDSFVYVVDTSDPHNYWYLMTLNETEKYNFNINYHPDLDKTDLWINASGF

SEQ ID NO: 80371 - protein, 248 aa, Unknown
  Obtained from environmental sample
  DOMAIN (41)...(246): Competence protein
  misc_feature (1)..(248): Xaa is any amino acid
LHITKAAPSLERFRTGLRLGLTDRFLNSSGEGKWAGLALALLLGIRDNLDTGFAALYRDAGCSYILALSGMHLAILVSLISFLLKKPLGLRLAAIAGAVIIIAYCFIVGPLPSLNRAALMYLLGVVAVLGMLKRDMLSLLCMAFLLQLILAPASGFSLSFILSYLALAGILVIGKAINGAFMGKIPALLLQPLSAFVGAFLATAGVSAWFFNDLPPVGILAGLVLAPLASLFMVLSIAWLCLNLTSRS

SEQ ID NO: 80372 - protein, 112 aa, Unknown
  Obtained from environmental sample
  misc_feature (1)..(112): Xaa is any amino acid
VWGGSTRQADNLGHSHRGDAHHKGVVEEAGKRCGFELRWEGSEADEIGVNGKTGKTVVKVNPKFYRPAEVEKLIGNPEKAVRELSWKVKVSFKELCAMMMDADIGRAKKGTL

SEQ ID NO: 80373 - protein, 330 aa, Unknown
  Obtained from environmental sample
  misc_feature (1)..(330): Xaa is any amino acid
MAELWPTYFLSVGFFAAMLTAQSGEHISITAVQYIRNEKVKRILEYISTLVGIFILSILALDCVSFIKYGLMGKSVGFLTDRVFAATMPLGYAVIALRFAFKFKSVRGRVLAFAAILLGVAAGLPAIAKLIWGFYPPQPFFSWVDSLYDLAWFIRFPAILFLIAAALTGMPIFAAIGGIALIMLQSAGLEPEAAPIQIFSALTDTDIIAIPLFTLTGFFLSESKAGERLVRTFRYFFSWLPGGMIIATVIICAFFTSFTGASGVTILALGGILYTILTEHKYTERFSIGLLTFTGGIGLMFPPSLPIILVASTSNTILHFMDIPSHTASF

SEQ ID NO: 80374 - protein, 97 aa, Unknown
  Obtained from environmental sample
  DOMAIN (6)...(68): ATP synthase alpha/beta family, beta-barrel domain
  misc_feature (1)..(97): Xaa is any amino acid
VLEGKVRRISGPTIRATGLGEAGLFDVVEVGEKRIIGEIVRLEGEEAVVQVYEDPYRAANPRPRRFPRGGLFRGCSAPDWMATIIDGLPRPPGITGP

SEQ ID NO: 80375 - protein, 206 aa, Unknown
  Obtained from environmental sample
  misc_feature (1)..(206): Xaa is any amino acid
MPSSKSAATAGGVATFGGVYIFLGPEIGKKQDEIEQIKKKLSASGVYEETVFYAGETPIINIVNTIQNHSLFAQSRLFIIKNAEQIKKKDETDAVASCMKELEEGATLILVSDEFKISSGLENACPKENRRIFYEMFEREKSAWVRSFFQRAGLGIDPSGVDAILELVENNTDAMQRECSSLFFSCPKTPGNRARYRTMAFPQPRR

SEQ ID NO: 80376 - protein, 280 aa, Unknown
  Obtained from environmental sample
  DOMAIN (16)...(236): Methyl-accepting chemotaxis protein (MCP) signaling domain
  misc_feature (1)..(280): Xaa is any amino acid
MEQLTVNIHKLNTHVEKQSSQVSRASSAIEQMMANINSVTGTLINNAVNVKTLREASEVGHKGLQDVAKDIQEIAHESEGLMEINAVMENIASQTNLLSMNAAIEAAHAGESGKGFSVVAGEIRKLAESSTEQSKTIGNVLKKIKESIDKITKSTENVLGKFEAIDSSVKIVADQEENIRNAMEEQSTGSKQVLEGISEVNELTGQVKTASKQMLDGAKEVIQESSHLEKVTHEITGGMNDMAISAEHINKAVDHVKGMSGKNSTSINDFMREVSRFKVD

SEQ ID NO: 80377 - protein, 193 aa, Unknown
  Obtained from environmental sample
  DOMAIN (3)...(126): TrkA-N domain
  misc_feature (1)..(193): Xaa is any amino acid
LRIIIVGAGRTGTQLAKYLIQEKHDVSLIESNEERARHASNRLDCLVLHDEGNSLSSLEEAGVKKADALVCVTDSDEVNMLICGLAASRHPEMLKIARVRNDEYVRLNQNTIQQPAILGIDSSVHPDVEAARAILRAISHGALGNILSFAGTSYELWSHNIAERSVFDGLCLRDTVLVSRRQSCNPVGKRKRF

SEQ ID NO: 80378 - protein, 332 aa, Unknown
  Obtained from environmental sample
  DOMAIN (1)...(332): Aldehyde oxidase and xanthine dehydrogenase, molybdopterin binding domain
  misc_feature (1)..(332): Xaa is any amino acid
GIPPRLIARSIRTATQWPYHVKRAAARALKIDPFYVAVEPTALNIHMDGKLWYPSLIACHAAIGTYITKKPVRLILTREEDFLYTPKRFSANINIASEINENGSINAANIDISVNLGAYEVNGNEILDQVCLGAIGLYNFPNLSLKAKAYCTNIPPQGPFTGFGLAQGHFAMERHISLIADMANQDPAEIRENNIDPQIMLSHAKQKHITHGKNLIKSTIKMGDYNHKWASYELLRKSRKGKKPESGENPRGIGIAVGFQGSGLLYPCEDNGSYSVGVTLTKDSCLEIKNSITSSEDIPDLGESRHGNHVHRNGNGSYNRFHAPNAVLMGVQ

SEQ ID NO: 80379 - protein, 284 aa, Unknown
  Obtained from environmental sample
  misc_feature (1)..(284): Xaa is any amino acid
MLIDYDEAMTFLDDYFETDYEKFLNKYFKGKSNEIDRNITSKKFNQLFGELSPVQLEIIKDQDSKYIVVAAGPGSGKTKLLTHKLASLYMMEDVKHEQMLMLTFSRAAATEFKKRLMALIGNAAHFIQIMTFHSYCFDLLGKVGSIEKLGDIIKLTVEKINAGEVELTKLTKTVLVIDEAQDMSEAEYSLVKSLMKENDNLRVIAVGDDDQNIFEFRGSNSAHFESLLSELEAKKYELVDNYRSNANIVEFVNQFAEDIKHRFKTISIKSKKSENGISAFVNIF

SEQ ID NO: 80380 - protein, 184 aa, Unknown
  Obtained from environmental sample
  DOMAIN (1)...(180): Asp/Glu/Hydantoin racemase
  misc_feature (1)..(184): Xaa is any amino acid
MLGVFDSGFGGLTILKELVKVLPNYDFVYLGDNARAPYGNRSFDRIYRYSLQAVSYLFSMGCPLVILACNTASAKALRTIQQKDLQEIAPHNRVLGIIRPLAEEIGKFTKTGCVGILGTEGTIASKSYLLEIAKFWPDLHIEQEACPMLVPLVENALLEHSASEIFVREYTQKICKRVAHKRGG

SEQ ID NO: 80381 - protein, 249 aa, Unknown
  Obtained from environmental sample
  misc_feature (1)..(249): Xaa is any amino acid
MIKKIYYLLILLIISAPALAAAQTSPSTLKPRGLLLRSASQKDIVETARNHQWSIDFAKSGVDTLLVIAIRVEFEPDTSALTTGNGRFGLKGDTKELKYYNAGNVYKYDGLPHDSLYFDHQLTALKNYYAKASRGGLVLDYSIYPTGGGEVGYRVANPMTHYSPGWKRKEESIDEYWDRKTRGLITFVRDAVKAANDGGGSPFQGLYRDGKGILREAATDRRAVILILHAGALYMTDGGSGGTADSSSD

SEQ ID NO: 80382 - protein, 232 aa, Unknown
  Obtained from environmental sample
  DOMAIN (132)...(214): Cache domain
  misc_feature (1)..(232): Xaa is any amino acid
MKLSVKISLLVGIVLLASTVALLFVVGLKVSGAMEESCLNFLASEADTDAKFLKSMVDGQLDILGEVAGRARTRTMDPNTVPTTLKPDVPRLKALDMAMVTPEGNTYFVRGNPLNVKDQSYFKRAMAGERNIEMVVIDGKLVAIFAVPIKKNDEANAPVIGVLLAHKDGASAISNLVTELKSLYKSGFPFLIDQEGTIIAHRNKDMVNKQFNPIKEAAKNLSLKPLAKIDLP

SEQ ID NO: 80383 - protein, 190 aa, Unknown
  Obtained from environmental sample
  DOMAIN (1)...(188): Pyruvate kinase, barrel domain
  misc_feature (1)..(190): Xaa is any amino acid
MNVARLNFSHGDHDSHRASIERVRRVSAELGIPVALLLDTKGPEIRTGMVPNDGKVTIKDGDQVLISTDDCFTTAAGNGAPARISLSWKEAEAKLQRGHRILVADGLLELEVIDTSGGIKCRANNTAVIGSKKNVNLIGIHARLPIMGEQDKKDIEFGISMDLDYIAASFLSFPYEVTEIRKFLKAARPI

SEQ ID NO: 80384 - protein, 209 aa, Unknown
  Obtained from environmental sample
  DOMAIN (1)...(206): Cys/Met metabolism PLP-dependent enzyme
  misc_feature (1)..(209): Xaa is any amino acid
MVRLARGQFDWARNDKFPGLSKPNPSYHGAVFSQVAGNLAYVIKARTTLLRDTGAAISPFNAFLLLQGLETLSLRVERHVANALKVIEFLKSHPQVEAVNHPSLQGHRDHKLYARYFPNGAGSIFTFLLKGGAEKAKRFSEELKLFSLLANVADVKSLVIHPASTTHSQMSEEELLEGGIKPNTIRLSVGTEHIDDIIGDLKHGFEAVS

SEQ ID NO: 80385 - protein, 208 aa, Unknown
  Obtained from environmental sample
  misc_feature (1)..(208): Xaa is any amino acid
LRSREKEGKLLLDRGLTPEKLAMVTSGINLMNLNRLAAESFEENKPISLDFMRMKKKEIIETEAAGLLEFMETSFNLSHVSGHDFVKKRFKNAAKAIKMGRPDVLPMGYLIAGPVGTGKSFMVNAFAGEIGIPMVKFRNFRTKWQGETEANLEKALNILTAMAPVGVMIDEADAFLGDRDQEGGFPHEQPRICADCRFMGKHRIPGKN

SEQ ID NO: 80386 - protein, 145 aa, Unknown
  Obtained from environmental sample
  DOMAIN (2)...(144): YgbB family
  misc_feature (1)..(145): Xaa is any amino acid
MLRVGLGRDLHRLVKGRRFLLGGIEIPSKRGELGHSDGDALAHAVCDAILGAASLDDIGGLFPPSDKAWKDADSMELLHRAFAAVKEAGWRLVNLDCVVSCEEPKILPFRDSIRKSLAQSLECSVDSVFEKAKPAKAWGPLEKAK

SEQ ID NO: 80387 - protein, 153 aa, Unknown
  Obtained from environmental sample
  misc_feature (1)..(153): Xaa is any amino acid
MNKKRLFDWWRRGSAFVWLSGSTLALSLLMVAGLVLLLAVKGLGFFWPSDICELQLNDGAIVLGQQEAHEKAAHSHPDRVQVKVANRDFFGQDYRWINESDIQSRTRPKDVVYLDRLGYGAFIGRLARVEENGAIIPQGADALSKARRWLPNP

SEQ ID NO: 80388 - protein, 302 aa, Unknown
  Obtained from environmental sample
  misc_feature (1)..(302): Xaa is any amino acid
MMTACFSGGARGDRAMAERYALWAKNTLEMGLWSEAHSGLERAADFADVSSDIGYLLALTRLHENKSRAGVLEALNIALLVDHWVIYNAELARFEKADTLIALRLYPEALQELSLVRRGPKWAVLTLKALANYRLPDFRQNMREALDLYPRESEPVRIFLNFLSNEEAAGRNPEWEDLDILETVTRRLPILVQDDPELAWMASPFIRDVAEARRLVMAYRAVNKPSPKSIPISLKLGVISEETALNELFSPQANLDIALLDKTWELFRSEDTLGMFKKHLASYTGIITEDSDRDGIPETTPM

SEQ ID NO: 80389 - protein, 185 aa, Unknown
  Obtained from environmental sample
  misc_feature (1)..(185): Xaa is any amino acid
MAGLKPNRSWTSVFGTRITFPEGIILNIEGYYKYIFNRLYVPIRFGLEEFDIRTQSDGEGRVWGIDLMLQKLQSRYWDGWLTYSFSWARYRDPSSNNANMGISGGTRGNDWYYPNFHRFHNLNLVVNYRPGQKFNFYTRFGLASGSQLSRRLTDRPVTYPVFMYDNDPRNFQLVQRYEWPVQREE

SEQ ID NO: 80390 - protein, 78 aa, Unknown
  Obtained from environmental sample
  DOMAIN (29)...(75): MazG nucleotide pyrophosphohydrolase domain
  misc_feature (1)..(78): Xaa is any amino acid
MTAQEAFKELYDIVVRLRGPGGCPWDIEQTPSSLRGSLVEETYECLEAIDEKDSAHIAEELGDYFTLGRFCTWGGEKR

SEQ ID NO: 80391 - protein, 183 aa, Unknown
  Obtained from environmental sample
  DOMAIN (14)...(183): Glycosyl hydrolase family 3 N terminal domain
  misc_feature (1)..(183): Xaa is any amino acid
MTLEEKVSQLSHESAAVDRLGIPEYNWWNECLHGVARAGVATVFPQAIALAATFDDELVKQVMDAVSDEARAKNNEAIKQNNRGQYWGLTFWTPNINIFRDPRWGRGQETYGEDPCLTARMGTAVVRRLQGPDPEHLKLAACRKHYAVHSGPGKDRHTFNAIVSKKTCGKLTARLQSACRRGS

SEQ ID NO: 80392 - protein, 95 aa, Unknown
  Obtained from environmental sample
  misc_feature (1)..(95): Xaa is any amino acid
MVSLEQVKLLESRVTNVIDYVKNKNAENAKLKEKLDSYQKRIDELEVLVHQFKENQGRIEDGILSALDKLNQFEDALESKLSTESKLPVGSTPDA

SEQ ID NO: 80393 - protein, 300 aa, Unknown
  Obtained from environmental sample
  misc_feature (1)..(300): Xaa is any amino acid
MPEETRYVKLSANKTVSRLLVLTKEIQGITPFQLPEKSMSSFIKETDEIKLEIEELDAKLKNFASRRPALIKEMEIVEKDLEFETALVNMEKVENIPAEMGLSYLTGYAPCDDIAGLKAAAGANGWALSMIDPEDTDDAVPTKLKNAKIVNLLNPITGFLGITPGYREVDISPWFLFFFCIFFGMIFGDAAYGLILSLIAIIGIIKTAKKGVPQALQMLLLLGIFNTAWGVLTCTWFGVEVNKVPKELQDISLSFFSTAKTDEALVSQNLQIFCFSLGLLQLTIAHIKGSRPICHAEEKK

SEQ ID NO: 80394 - protein, 143 aa, Unknown
  Obtained from environmental sample
  DOMAIN (6)...(119): Response regulator receiver domain
  misc_feature (1)..(143): Xaa is any amino acid
MGNERKKIIAVDDNVENLTALKNTLKNNYETYPCPSAQKMFTILEHIQPDLILLDVEMPEMNGYEAAEKLKSSDKYKTIPFIFLTSLEDEESKKKGLDLGAVDLYANPSSPRLCFNGWKRWLIKSGGWVIIYRLPPGQCLYFR

SEQ ID NO: 80395 - protein, 211 aa, Unknown
  Obtained from environmental sample
  DOMAIN (7)...(211): Cys/Met metabolism PLP-dependent enzyme
  misc_feature (1)..(211): Xaa is any amino acid
MKNRKFETLQLHAGQEKPDPTTDSRAVPIYATTSYVFKDCAQAAGRFALTEGGNIYTRLMNPTSDVFEQRIAALEGGVGALATSSGAAAVTYAIQNIATAGHNIVSDKRIYGGTYNLFAHTLPDLGITTTFVDGSDPKNFEKAINEKTRALFVESLGNPHSTIVDLDALAAIAHKNGIPLIVDIPFRPQFVRPIDTVQMWLCIPPQIHKRS

SEQ ID NO: 80396 - protein, 206 aa, Unknown
  Obtained from environmental sample
  DOMAIN (7)...(204): Thiazole biosynthesis protein ThiG
  misc_feature (1)..(206): Xaa is any amino acid
MSVISDLLVLGERSFSSRFILGSGKYSLTLIKAAVENAGAQMITVALRRANVGGKENILEYIPPGITILPNTSGARNAEEAVKIARFARELCGEPFIKIEVIRDTRYLLPDNYETIKATEILAKEGFVVMPYMFPDLMAARDLVNAGAACVMPLAAPIGSHRGLCGRDFIPILIDEITLPIIIDAGIRETFPGPAKVMKMGAARCH

SEQ ID NO: 80397 - protein, 108 aa, Unknown
  Obtained from environmental sample
  misc_feature (1)..(108): Xaa is any amino acid
VCKIFAAYGFKDKKIVWYVFRNAMLPQITGLALSLGTLMGGNLVAEIVFSYPGVGMTVYTAIRGQDYPLISGCTLIITVMVLAANFIVDIICGIIDPRVRMTTQEEGA

SEQ ID NO: 80398 - protein, 189 aa, Unknown
  Obtained from environmental sample
  DOMAIN (143)...(176): Tetratricopeptide repeat
  misc_feature (1)..(189): Xaa is any amino acid
ATGAGIPRPKTRASEANAYYNEAVRICLEKVSRNTATRETYTVLTWTWQRQRKYADVVTWGERGLRIYADEYRIVETMGEAYFYLGNYERSLLYMQRYANALPQGERVATAFFFIGEIHRLSRRYHHADIAYTTALRFEPSIALWWYRLATVREQIGDRRSAIDAYQQSIRLNPNYSDAREGLARLQNN

SEQ ID NO: 80399 - protein, 78 aa, Unknown
  Obtained from environmental sample
  DOMAIN (18)...(78): Protein of unknown function (DUF1287)
  misc_feature (1)..(78): Xaa is any amino acid
MKKLILFLFIISSNLFGQNPSLVEAAKNIIDPSIEYDPAYIRIKYPMGDVDPKTGVCTDVVIKAYRGIGLDLQKEVHR

SEQ ID NO: 80400 - protein, 245 aa, Unknown
  Obtained from environmental sample
  misc_feature (1)..(245): Xaa is any amino acid
MGLDWKALVSFSGSDQISGAVDKARKNTEKAGKGMGDSLKETGKHADSLRDKIGGIGDIAKGVAIGNLITKGVTMAAGAVKNLVLSVDEFAQRADNARMSAMKIGLSAEGFQKLSYAATSAGVSADKLQAGFNSLNKNLGSGGLVKFLADTDKALLSQVKSAKNNTEVFNIMADAISKENDIAKRAALGASAFGKSWAELYPLLSAGAEGIRKAGDAIPNLINDREIAGGELWDFTIGELKAHIQ

SEQ ID NO: 80401 - protein, 103 aa, Unknown
  Obtained from environmental sample
  DOMAIN (10)...(33): 4Fe-4S binding domain
  misc_feature (1)..(103): Xaa is any amino acid
MAITSLTPVIRIDEEQCINCYACIVICPVKYCMDGSRDKLQINHDICIGCGDCINACTHKARTLIDDTGRFMDDLKQNKKIIAVAPRLSVRFFPINSPTKRLA

SEQ ID NO: 80402 - protein, 310 aa, Unknown
  Obtained from environmental sample
  DOMAIN (1)...(137): Type I 3-dehydroquinase
  misc_feature (1)..(310): Xaa is any amino acid
ADSRFNFAYVDIEEDFKVPSLEEAARTFGTRIIRSCHDLEGTLTDIPAKMKSMKHAGDEIIKIAVAVKSTRDVLNVFSASGSFANQDKILICMGHYGVYSRILAEKFGSFLTYSSALSESVIPGAPGQLDVKELSELYHFRRITKKTKVYGVMGNPLKSSVSPWFFNTIFNLEETDAVYAPFPVTDVGDFMELAKEIDIQGLSVTVPFKETVLQYIGEKSAIVQSIEACNTLYRKDDIWVGDNTDYAGFSSSLLNFLDRKNLKRLKVTILGAGGVARAVAAEVFNMGGKAPDFKSHRYSADLIHGVGGYG

SEQ ID NO: 80403 - protein, 113 aa, Unknown
  Obtained from environmental sample
  misc_feature (1)..(113): Xaa is any amino acid
MISLSGLTLTEIEELLPTLPRFRAAQIFKWIAKGVNSLEEMTNIPVSLRGELSADFRLYSSKVDSVHEDGETRKYVLSLEDGAKIESVLLNDGKNRLTACLPLVPFCHAEGNQ

SEQ ID NO: 80404 - protein, 300 aa, Unknown
  Obtained from environmental sample
  DOMAIN (136)...(300): RNA polymerase Rpb1, domain 5
  misc_feature (1)..(300): Xaa is any amino acid
MLDAIKATGYRYATVFGATIGIDDIVVPKEKTEMIEKANKEVEAIQTQWRKGIMTQEERYNKVVEVWTRTNEDLTNIMMKTLEADRDGFNSVYMMANSGARGSRNQIRQLAGMRGLMAKPSGDIIELPIRSNFKEGLSVIEFFISTNGARKGLADTALKTAEAGYLTRRLVDIAQDVVVNEDDCGTINGISYSAIKDGEDIVEPLSDRIVGRYTLERVKHPITGELIIDVNEEITESIAAAIDAAGVDSVMIRTVLTCEAKHGVCRTCYGRNLATNRAVDIGEAVGTIAAQSIGQPGTQL

SEQ ID NO: 80405 - protein, 220 aa, Unknown
  Obtained from environmental sample
  misc_feature (1)..(220): Xaa is any amino acid
TLLPGNAAEIPASAFTRRDFYEQALKWAIRQGQVRGKQAILNIYEFDEDKAERDLKFKKFTEYSLEWLDFIVNNRAKRQTKHDFDIVFGKIANDDVGETVQAVVDGLMPLDFALQKLKFMQANNQYAFCTEKALSYIKFSDAKNAGQKMPHGTIRAATLKTIIPLIMEHFNCGENEALKKFYESHIGACYADDNTGLYGQSAYYVADLFFEECRDKDIKS

SEQ ID NO: 80406 - protein, 255 aa, Unknown
  Obtained from environmental sample
  DOMAIN (56)...(139): Cache domain
  misc_feature (1)..(255): Xaa is any amino acid
MLRQITVVDRGIATTTIAGESGYVIAMDAYPWPWTDYDPKLFHWYQGAKDTGDLYWTDLYEDHRGRGPVLTCAVPFYDHSKGNRILKGVARSTVLLSDFSRIIESTEAGKSGRLFILNREGIKIYSSEGAAIEMGEGGAVTGENFLESQNSRLRSLGRSMILGASGMTELEMDGLPVYVAYAPIQTLGWSLGVAVSVQEVSAMAMLIEHQIWKLQITRKPEWTGIFSFRGHIALLLVITLLGIAVIAVRFTLSFQ

SEQ ID NO: 80407 - protein, 195 aa, Unknown
  Obtained from environmental sample
  misc_feature (1)..(195): Xaa is any amino acid
MQDTQGYWDNVYTKQQRIAQAAEKYSGESLTNVAQYIDVEWMYCAYEWTRKDGAAGIDGVTTAEYEVGLWERLGNLVELLKSGEYRAPPVKRVYIPKAGSESEKRPIGIPTFEDKILQRAIVMALEPILEKEFYDFSYGFRPGKSAHHALERIWKESMGMNGGYVIDMDINKYFDTIDHKLWREMLSRRVSDGVI

SEQ ID NO: 80408 - protein, 153 aa, Unknown
  Obtained from environmental sample
  misc_feature (1)..(153): Xaa is any amino acid
LEYAKEQLSEGKNLAAFLAAVRAHNLKPLSFDDALLFLRKAVDVRQRRTAAFFLSVIEGIGGGAQIPQELKTYAQGRDTPTDMVKGVATVLVERGVKIPQGRGVPRHVLGSAFFVDATGLLITNYHVNSSEVDPSYKGYPRMDIRMGESGRRP

SEQ ID NO: 80409 - protein, 83 aa, Unknown
  Obtained from environmental sample
  misc_feature (1)..(83): Xaa is any amino acid
MARDLSATRKERDAAIAKIRDPEVTRFKGLGEISPSEFGQFIGGDMRLVEVNVKSAKNITETLEFYMGKNTPERRDFIMENLI

SEQ ID NO: 80410 - protein, 115 aa, Unknown
  Obtained from environmental sample
  DOMAIN (10)...(115): Patatin-like phospholipase
  misc_feature (1)..(115): Xaa is any amino acid
MKTNKSGWALVLSGGGAMGLAHIGVLKGMEEAGFPRPSLVAGTSMGAIVGGLYAIGMSPAELERFVLDEFNIAEYLDSFVFKIEGPFGKIIQPGQALALLCRHRGIESRAAGSLI

SEQ ID NO: 80411 - protein, 84 aa, Unknown
  Obtained from environmental sample
  misc_feature (1)..(84): Xaa is any amino acid
VLTEYEAVDSWAALKNRWILIPKTERPNRTRIEKTFTQRLYAATELRALLFEVGFAGVELYGGWDEREYDQDAEILIAVGRKDG

SEQ ID NO: 80412 - protein, 305 aa, Unknown
  Obtained from environmental sample
  DOMAIN (65)...(172): Toprim domain
  misc_feature (1)..(305): Xaa is any amino acid
GFFRVRFGRGASAEAKKVIEKIVEAATAREAARKARELTRRKSALDISSLPGKLADCQERDPAKSEIFIVEGDSAGGSAKQGRNRANQAILPLRGKILNVERARFDRVIGSEMIGTLIMALGCGIGETEFDLEKIRYHKIIIMTDADVDGAHIRTLLLTFFYRQMPEVINRGYLYIAQPPLYKVKRGQSEAYMKDDAALENYLVDIIAGEAVLETNTGTRVAHADLRELINSARKILKLSEPLLKFAPHKVVENAALAGLFDEGADLEACAKRACARMDLFEGEHQRAGSRCALGNVRFFENCPA

SEQ ID NO: 80413 - protein, 262 aa, Unknown
  Obtained from environmental sample
  DOMAIN (2)...(228): Aldo/keto reductase family
  misc_feature (1)..(262): Xaa is any amino acid
IFPGLSRPYYVGRHKPWNNFIDTAAGYADSEEKIGEAIQGIKREDLVIASKSPARDKKTFTENLDLSLKRLGLDYIDIYQLHNVSSEAQKETVFDPDGAMEGLEEAVKAGKVRFPAFSSHSIPLAIEIMKSKKFASVQLPFNYIDREAAEEAIPLAKELDMGFIAMKPMGGGLLPDAALSFRFFRQYENIVPDPGFEKIEEVREIAGIVERRETLSEEDKKEIEKQRLELGPSWCHRCAYCQPCPREIHISTAFDMKSFIKR

SEQ ID NO: 80414 - protein, 171 aa, Unknown
  Obtained from environmental sample
  DOMAIN (1)...(144): ABC transporter
  misc_feature (1)..(171): Xaa is any amino acid
VRAFPRGSEIFSVVFQDLALFPHLTQGGNIAYGLFIKGVPKKERRIIVEQTLEIVRLQGYAQRRIDTLSGGERQRVAIARALASNPRLLLLDEPFSSLDAPLRKTLRRDFLEIRAHSKAPCIFITHDQEEALMLGDKVALMKDGRIVETAVGEEILSSPKTEFAKDFFNKE

SEQ ID NO: 80415 - protein, 150 aa, Unknown
  Obtained from environmental sample
  DOMAIN (6)...(149): Dihydroorotate dehydrogenase
  misc_feature (1)..(150): Xaa is any amino acid
VGANVDLSVRIGNGTLANPVGVASGTFGYGGEYEGLVDFSDIGAIYTKAVTLEPRGGNVPPRLVETPSGILNSIGLANVGVEKFISDKLPYLRTLPCAVVVNVAGATEDEYRRVVERLESGCIDSIDTAVSGYSAMRKTSSVPTSTTAAY

SEQ ID NO: 80416 - protein, 84 aa, Unknown
  Obtained from environmental sample
  misc_feature (1)..(84): Xaa is any amino acid
MVRLAEQKSLTVPPEAIGSDALGSTVYLYKGGKAKLARIEIGTRFVDKVEVLSGVNAGDTVLCAGASPVRDGGAVEISRMRATK

SEQ ID NO: 80417 - protein, 120 aa, Unknown
  Obtained from environmental sample
  misc_feature (1)..(120): Xaa is any amino acid
MHILLTGAAGFIGFHLAQRLLSEGRGVVGLDNLNDYYSVRLKRDRLALLEQHAAFIFLQADVADETRLNELFRAQGFSHVVHLAAQAGVRYSIENPQSYIRSNLGGLRHISGAWRPYRVR

SEQ ID NO: 80418 - protein, 87 aa, Unknown
  Obtained from environmental sample
  DOMAIN (1)...(87): Ribosomal protein L15 amino terminal region
  misc_feature (1)..(87): Xaa is any amino acid
MHDFNLHAPAGANKKKRIVGRGQGSGRGTTAGKGNKGQQSRSGGKTYIGFEGGQMPLYRTLAHRGFSHYPFQKEWETVNLWRNPGSI

SEQ ID NO: 80419 - protein, 278 aa, Unknown
  Obtained from environmental sample
  DOMAIN (8)...(194): Trypsin
  misc_feature (1)..(278): Xaa is any amino acid
TLDIATRERARHRDQEREFRSQGLGSGIIVRQKDKTYYAITNHHVVDNTTEIRVATKSGKEYPAKLVGKDERKDLAMISFETSDSYPLAVLADSDAVRVGDWAIAMGNPLGEQFSFSVTMGIVSALGRTGGPGGNINDFIQTDAPINMGNSGGALVNIRGEVIGINTWIASNATGGGNVGLGFAIPINNAKRSIDEFISSGTISYGWLGVSLIEPGKETAAALGIEGKRGAMASQVFLGSPADKGGICPGDFITHVDGKEVRGVNPLTLTVGDLKPGD

SEQ ID NO: 80420 - protein, 109 aa, Unknown
  Obtained from environmental sample
  misc_feature (1)..(109): Xaa is any amino acid
MSAPVIELRGIKREYRMESKGASPTDAVVVRALRGVDFSAEAGEFVSVMGPSGSGKSTLMNILGCLDKPTAGTYTLDGIETSKSDSDTFAYIRNAENWLWSRPICHEGG

SEQ ID NO: 80421 - protein, 208 aa, Unknown
  Obtained from environmental sample
  misc_feature (1)..(208): Xaa is any amino acid
IFSGEVESLRMIPVVSNNVVSYTVMVKVENQDGALMPGMTCAVDFIVEHSENVLMVSNAALRYQPTSLSAEKIAEMVFNVSLENMDEEQRKAAQKAREEARARTQAAGQNAQQNAGITGLLAGGGQPMRMMGGSRSGGRQRPGQGPGQGDRPDRNGEETIVMRNLWYINDEGKLEVMRVRTGISSGSFTAIYSREDMEGKQVILREKI

SEQ ID NO: 80422 - protein, 127 aa, Unknown
  Obtained from environmental sample
  misc_feature (1)..(127): Xaa is any amino acid
MATETLIDRPIYIERLKTLCGQTGIVKIITGARRCGKSKLFSLFQTYLQTNNKVLDSQIIDINLEDPLQTREIGLELNNKKMLVAYNKLLDFVLCEFPSKHTTLCFIDEMQLLERWQQAANALRFED

SEQ ID NO: 80423 - protein, 181 aa, Unknown
  Obtained from environmental sample
  misc_feature (1)..(181): Xaa is any amino acid
MSIKTGRETLRQTGVHHRRRQPELPCPLLPLRFVRGVIDSEDLPLNVSREILQQNKVLINIKNASVKKLIAEFKQMADNAVSGGDEAKTKWETFVSEFNRPLQEGLYQDFANREALMELVRFQSTAVAGQDGKPGWDSFARYVSRMKSGPEAPLLPKQAGDQKNPGPPPRFLESPTPPKKN

SEQ ID NO: 80424 - protein, 56 aa, Unknown
  Obtained from environmental sample
  misc_feature (1)..(56): Xaa is any amino acid
MEQIGFFDEHNRLWELSRLGDPLEKLNEYIAWENIRETLNEALHKEHKGLGRRPAV

SEQ ID NO: 80425 - protein, 286 aa, Unknown
  Obtained from environmental sample
  misc_feature (1)..(286): Xaa is any amino acid
MGKFARFGLTLLLTTATIVGAVAGEPSFGIFTDTRDGQTYRMVKIGEQTWMAKNLNYQTDSGSWCYEDKTDNCKKYGKLYDWKTATTVCPKGWKLPSREEWDSLVATAGGKEVAGKTLKAKSGLNNRVWWYAYNHNSTDDFGFSALPGGRGSDGGRFAADARASGYWWTATEYSDATEYSSGNAYFRTMSYNGDGVYENIPFKDNGYSVRCVAVEISDNNDRSKLKNKPSDINPNEDGGIIMLGARKKDRQKCTPPPPDEFGHSKVRGHCYCYHAHRSRARIQNVI

SEQ ID NO: 80426 - protein, 172 aa, Unknown
  Obtained from environmental sample
  DOMAIN (15)...(172): Class II Aldolase and Adducin N-terminal domain
  misc_feature (1)..(172): Xaa is any amino acid
MVYPMVYPGDSQARELILEIGRRMYTKQYVAANDGNITCKTGPDTIWATPTGVSKGFMKEEELVKMSLDGKVLQQGKLAPSSEIKMHLRIYNENPGIQAVCHAHPPFATSFAIAGISLDKAIYPEALVNLGVVPVTNYETPGSQGVPDPWLPIAGIITPASCHHGALTWGAI

SEQ ID NO: 80427 - protein, 204 aa, Unknown
  Obtained from environmental sample
  misc_feature (1)..(204): Xaa is any amino acid
VRYASENTLYLTLKSLKIDLSGAPGIGDILNGLKGAELEILTPTTIKGRIMGVEYRQSPASQQYPYSMPANEAWLSLFTSQGIRVIAIKDIISFRFSDEKINADLERALDLIMASRDESARNLLVTLNGTGSRSVSLSYVIPTPVWKVSYRLDISGKEPFLQGWAIVDNDSDADWNGVKLSLVTGKAGLVHPKALPALQGFHVP

SEQ ID NO: 80428 - protein, 314 aa, Unknown
  Obtained from environmental sample
  DOMAIN (62)...(252): Radical SAM superfamily
  misc_feature (1)..(314): Xaa is any amino acid
MGQDLHEKISILSGAAKYDASCATSGSDGFKGKGGKKFGTSLPMGVCHSWTQDGRCVSLLKVLYSNVCKYDCAYCVNRASADIKRSSFTVQELVDLTCEFYRRNYIEGLFLSSGIFADPDIVMEKLIETAKTLRTVSGYGGYIHLKLIPGTGEKMIREAGKWADRLSVNIELPTEKSLKCLAPEKSGKVILGAMNDFSGISREVEEDRFSPKFLQQGKTKAPYFAPAGQSTQLIVGATGEDDRQIINLTSSLYNKFSLKRVYYYAFIHPGSFTQEEKLVDPRLPESVSSSACSGTPVVSARMAFAFLPFLLRRN

SEQ ID NO: 80429 - protein, 287 aa, Unknown
  Obtained from environmental sample
  misc_feature (1)..(287): Xaa is any amino acid
LFVGVTLKNAFKSAALLAATLLAAQSFAALPELKVTTRNNAAINAQSANQKGAGNCQSTNTYVHKYVAMQLTLTDPAKPANNITVTDYKDSIRGRGNSTWAVDKKPYRLKFGEHKSMFGSNKHKSWALLANWYDPTFTLNAVAFELGRRLGLPGTPKYYFVDFYLNGTYKGIYQITDLVQVNKGRVEVDTAAGWLVEFDYHCPSDANDIDFNTDYPNNPQDARLHTNIKSPEDLPNKNGYQFVKNEVNALTTAMFNKQGFPTNGYRDLIDLESMAKYTMIQLFMDNF

SEQ ID NO: 80430 - protein, 250 aa, Unknown
  Obtained from environmental sample
  DOMAIN (7)...(238): Basic membrane protein
  misc_feature (1)..(250): Xaa is any amino acid
DWVPNPFFREIWGQTGGGCFPSQKFIITEAAYKGNRQICPYLYNQYEQALFLGYLAGLVTTSGMSNANSAKRVGFIAAQEYPMLNRQMVPGFIDGARRVDPNIELDFRVIGNWYDASKASELASGMINAGVDVFTSIAGGAAQGLIRTIKERGAYSVNFNTNDYSQAPGFIVGCGKMEQKKLVKEILTDALAGKINYGNSKTVGVKEGYIDFISDDPGYRDNVPADIQKKFGSFMDDFRAGRIEYTVPAL

SEQ ID NO: 80431 - protein, 286 aa, Unknown
  Obtained from environmental sample
  DOMAIN (157)...(286): Glyceraldehyde 3-phosphate dehydrogenase, C-terminal domain
  misc_feature (1)..(286): Xaa is any amino acid
MAIKVGITFSGRIGRLVFRAAMEKTSHIEIVGINDLIDVDYMAYMLKYDSTHGRFNGTAEAKDGKLVVNGKAIRVTAEKDPANLKWGDVGAEYVVESTGLFLTKDKAEAHIKAGAKRVVMSAPSKDDTPMFVVGVNHKTYKKEMTIVSNASCTTNCLAPVAKVLNDNWGIEMGLMSTIHATTATQKTVDGPSHKDWRGGRGAGQNIIPSSTGAAKAVGKVIPELNGKLTGMAFRVPTPDVSVVDLTALLKKPAKYDEIKKAMKAASESGDLKGVCSADLILEGGNG

SEQ ID NO: 80432 - protein, 260 aa, Unknown
  Obtained from environmental sample
  DOMAIN (207)...(260): Magnesium chelatase, subunit ChlI
  misc_feature (1)..(260): Xaa is any amino acid
MHVLAFTPQGSEGIIIRVEADIRRGIPGIDITGLAEGAVREAKERVRASFRNSGFAFPQDRILINLAPAWLRKEDASLDLPIAVSVMAAAGMVAVPDKLMVLGELELSGRVRPVRGALAALSSAITNGISEFIVPLENSSEAAVLSGIRYFAAATLAEVFHALLVRSESGELPANNTTTVSADIPPGKACPSSENSVEGKGTFWAGDFSEVQGQKRYKRALEIVAVGGHNLLVFGPPGSGKTMLARRNPSILSPLEAEEV

SEQ ID NO: 80433 - protein, 185 aa, Unknown
  Obtained from environmental sample
  DOMAIN (1)...(180): Amino acid kinase family
  misc_feature (1)..(185): Xaa is any amino acid
MVTVISLGGSIVAPDKVDVQFLKDFTALIRTFLEADSDRRFIFVVGGGGPARHWINAYREINAQSKDEEADWIGIMATRLNAQLVKAAMGELCVQDVVTNPGQVDPLTGRVLVAAGWKPGFSTDYDAVLLAERFQADAVINLSNIEKVYTADPKADPKTRPIDKISWADSAPRAARANLSWGAPR

SEQ ID NO: 80434 - protein, 125 aa, Unknown
  Obtained from environmental sample
  misc_feature (1)..(125): Xaa is any amino acid
KSTLYSRRQRTDNRQSQTIRHYGTEIWIDDFGWLPVDPVLGAGAVSDSYINKEIDYLNFYFGNTDSQRITFSRGELNLSQMESRGRLVSHTQSYSLQNIWEEASGGLESYSSLWGDIIIRGTYVQ

SEQ ID NO: 80435 - protein, 92 aa, Unknown
  Obtained from environmental sample
  misc_feature (1)..(92): Xaa is any amino acid
MSVETIAETLLEKLKNIAQTETVIGEPIHSGESTVIPVSRVSVGMGMGGHSGKSDVASSGGGLRIDPVAFLVLRGDDGRVLPVEKGHSALSK

SEQ ID NO: 80436 - protein, 95 aa, Unknown
  Obtained from environmental sample
  misc_feature (1)..(95): Xaa is any amino acid
MGAKKRFIDPLTDLGELLLKVEKPGRYTGGEYGRLLKRDSPCVTESALSTVIAFPDLYEIGMSNQALKILYNRLNGIEGIFCDRSLPRLQILRSF

SEQ ID NO: 80437 - protein, 263 aa, Unknown
  Obtained from environmental sample
  misc_feature (1)..(263): Xaa is any amino acid
LGFTISAYHYPPPFQIHHANAFTLDGESVIPKNELSYILGNPPFLGARIMSKEQKAEVNTVFDGMKDNSNLDYVTCWYKKAAQYIQDTNIEVAFVSTNSICQGEQVPILWPELMNKHGIKINFAHQTFKWSNEARGKAAVYCVIIGFALADRDVKKIYQYATVTGEPMETLVKLINAYLVDAPLLFIQKRSKPLCNVSEMVFGSMPNDGGNFLLSAEETKQIIEKEPYLTEIIRPFLGADEFINNIPRYVLVKESAIIGGGNP

SEQ ID NO: 80438 - protein, 332 aa, Unknown
  Obtained from environmental sample
  misc_feature (1)..(332): Xaa is any amino acid
MKYFRNWPQVLGISWKDFIGLGRVYPTDERETFCMTVLALKMAAYANGVAKLHGVVSREMWKGLWPGVPLNEVPIGHVTNGVHPRTWISSGMLDLVDRYFGPQFEDRPTELTVWERMDRISDEELWRTHERRRERLVAFVRERIRNQYKRTGAVERRIRQAEDVLSPYALTLCFARRFATYKRGNLLLRDPERLLKLVRDNDRPIQLVFAGKAHPHDMPGKELIREIIHFADKYDVTSRIVFVENYDITVAKYLTSGGDVWLNTPRRPMEASGTSGMKAAMNGVLNCSILRRWWDEAYTPEVSWAIGQGEHIRMKSFRMILKSKRYMIFWKE

SEQ ID NO: 80439 - protein, 130 aa, Unknown
  Obtained from environmental sample
  misc_feature (1)..(130): Xaa is any amino acid
MYDIAIIGLGPAGATFARLLNPKYKVIAVDRKNQNINKCCGGLLSPDAQKMLAQFDICLPNNILADPQIFSVKTMDFDNKIEKFYQRFYINMNRAKFDNFLISFIPPKYEICTDSGCTKNEKEKASFIWK

SEQ ID NO: 80440 - protein, 114 aa, Unknown
  Obtained from environmental sample
  misc_feature (1)..(114): Xaa is any amino acid
VTSNNHRGGRRYAPYAFTEQGVSMLSSVINSERAIEVNINIMRAFVKLRHYVLSKSDTNEQITELKKLLMVYIENTDYKLSKHDKTIEQIIIALNNLIEQPPKTKRLVLIHETP

SEQ ID NO: 80441 - protein, 249 aa, Unknown
  Obtained from environmental sample
  misc_feature (1)..(249): Xaa is any amino acid
GFDDSLSKPIETLMLRKILKNWLPPEKQTEKKEEIQMNNIQEGKVEQPNIFKDIVIDGIDLKKGQEMFPQNKYLDVLRAWCMHTPALLDKLRSLADGQLGDEDIGEYTIAVHGLKGSSYGICSQSVGKKAEALEAASRRKDIEFVKANNKILLEEATALHQNLEKLLASAAAHSGAKPSAKSPDPELLKLFLDACKQFKSSLMEEILEKIDKFQYESGGDLVQWLREQMDNLEYDAMEQRLTEELGIKA

SEQ ID NO: 80442 - protein, 168 aa, Unknown
  Obtained from environmental sample
  DOMAIN (3)...(145): Peptidase C26
  misc_feature (1)..(168): Xaa is any amino acid
LPAVTRGNTTYRTWGICLGMQIAVIEFSRNICGLDRANSSEVDETSPHRVIDLMPGQAGMLGSGGTMRLGAYPCKITQGTLMHRLYDTEEISERHRHRFEFNNNYREALTGKGLVISGTSPDNNLVEAVELPDHRFFIGVQFHPEFKSRPNKPHPLFLGLVKAAFNIV

SEQ ID NO: 80443 - protein, 66 aa, Unknown
  Obtained from environmental sample
  misc_feature (1)..(66): Xaa is any amino acid
ETSQWIDSEDVTNETVGEVLRETEGMIIPGGFAERGIEGKIIACRYAREHDVPYLGNLSWHADCGD

SEQ ID NO: 80444 - protein, 291 aa, Unknown
  Obtained from environmental sample
  DOMAIN (3)...(282): FemAB family
  misc_feature (1)..(291): Xaa is any amino acid
LLFAAVSPSHWVFGFSFAYAPWGGIPDFFTADERPKALLELAKKLKQFLSKDTAFIRFEPPWHYNDGDENLKNELIMLHSVGFQKAAATVQPPDTVIINLAPSHEEMLASMKPKWRYNVSLAEKKGVKVNMCGAQDIEIFYNLLKETSARDGIAVHGINYYRTLFEVCESQNKKDQFIRLYTAEHEGDIIAAIVVLFRGKDATYLYGASSNEKRNLMSPYVLQWKAMKDAKEAGCINYDLFGIPPNEDPNHPMAGLYRFKTGFGGQIIHRTGSWDYPIKNARPICLGGGNG

SEQ ID NO: 80445 - protein, 159 aa, Unknown
  Obtained from environmental sample
  DOMAIN (27)...(150): Bacterial flagellin N-terminus
  misc_feature (1)..(159): Xaa is any amino acid
MIINHNLSAMFADRSLKVTDVNLTKGMEKLSSGIRINRAGDDASGLAVSEKLRSQIRGLNQASTNASNGISFIQVTEGYLQETQDIVQRIRELAVQAANGIYTAEDRLYIQIEVSALVDEIDRIASHAQFNGMNLLTGRFARIDGMNIVTRSMWLPHWC

SEQ ID NO: 80446 - protein, 328 aa, Unknown
  Obtained from environmental sample
  DOMAIN (2)...(151): Transketolase, pyridine binding domain
  misc_feature (1)..(328): Xaa is any amino acid
GGAGKFATGAAVFAVYRGWTKSFPYNGFSNSPFSEEAHVGAGWVTFFGRQSGCRTYVCDFMGRAGDEIFNQASKCQSMSAGLLKMPLVVRVSVGNKYGAQHSQDWSAMTAHIPGLKSYFPATPYDAKGMLNLALRGTDPVIFFESQLLYDIGEQFEKSGVPEGYYEVPEGEPAIRRQGNDLTIATVGAALYIAMNAAKKLENQFGLSTEVIDLRFINPLNYEKIIESVKKTGKLLLASDAAERGSFLHTVASNVQTMAFDYLDAPVAVTGSRNWITPAAEMEHLYFPQVDWIIDAVHERILPLPGYNPVTVQTTGDMMREKPAGTRPI

SEQ ID NO: 80447 - protein, 317 aa, Unknown
  Obtained from environmental sample
  misc_feature (1)..(317): Xaa is any amino acid
MPKSILVHPEEVRKPQILKLKDIPVNQYKSDFRKESGLYGTQRLVQIWHDMVVIREFESMLNTFKTQGTWNGIEYHHKGPAHLSMGQEASSVGQCVNLDTDDYIFGSHRSHGEILAKCFSAVWQFTQNAEGEKRLEAVMKNFLNGETLGIAEKIPYNSIRDLAEHFVLYGTLGEIFARKAGFNRGLGGSMHAFFSPFGSMPNNAIVGGSADIAAGSALYKRINHKPGDRYRQYRRRLNGLRPGLGSDDVIRHGSIPHPLARKWWRNSRDSLLFPLTLLPDGPANIGRNKGYRFLARIGAGVNSHKCPGSGWTVINLL

SEQ ID NO: 80448 - protein, 91 aa, Unknown
  Obtained from environmental sample
  misc_feature (1)..(91): Xaa is any amino acid
MVRNNICLNSHPLGCAATVLRQIDYAKKALQPASGAKPRLALIIGCSNGYGLSSRIAAAFGYGAVTVGISKEKAASENHTATPGFYTTWLL

SEQ ID NO: 80449 - protein, 56 aa, Unknown
  Obtained from environmental sample
  misc_feature (1)..(56): Xaa is any amino acid
MGKMYYDSDCNLALLKDKTVAIVRYGSQGHAHAQNLRDSGVKVVIGLYEGSKSAKT

SEQ ID NO: 80450 - protein, 67 aa, Unknown
  Obtained from environmental sample
  misc_feature (1)..(67): Xaa is any amino acid
MNTQRQTPALAGSAQRNDYFELLYAQGMDGMQTGRSSGNLGNRKERWWFPSNGKKYKTICLGILLFG

SEQ ID NO: 80451 - protein, 150 aa, Unknown
  Obtained from environmental sample
  misc_feature (1)..(150): Xaa is any amino acid
AHNRRGGGGGAASFFIYIKNKRRAPGGDYKKKKKKFIFFSPPPPPTKKKKGGGRGPFFFSLPPQKKGGEGGGGFFSPPQKKKKRSFFFWEKISPGVFFRGVSPFGVFLGEGFGEISGNYPFPPKKGFRGGPKHPPFRFKIKGNKNFSRPL

SEQ ID NO: 80452 - protein, 305 aa, Unknown
  Obtained from environmental sample
  DOMAIN (117)...(301): ABC transporter
  misc_feature (1)..(305): Xaa is any amino acid
VVLEKGQIISDSKPEELLAKDILRKTGIREPLYISALSYAGVKVDTEMASRLLGSLKINSRPLEDWDKNLAARQTAPRLQYINAVESSGLEVNNLHFRYTEQGEPALKGISFSVEPGECIGLVGKNGSGKSTTAKCICGFVRPDSGTISFNGKDLAELSIMERAEKIGYVMQNPNQMISFPMIYDETAFGLRTRGIAEKEIKDRVHEALQVCGLYPFRNWPVNVLSYGQKKRLTIASILVMRSSFLILDEPTAGQDYRHYTEFMEFLTGLNRGQGISLNLITHDMHLMLEYTTRAVVLSEGFCIA

SEQ ID NO: 80453 - protein, 52 aa, Unknown
  Obtained from environmental sample
  misc_feature (1)..(52): Xaa is any amino acid
MVSSELEELRSICGRIAIINEGKVAGILDAHEDPKDFGLLMASLTPEREGTR

SEQ ID NO: 80454 - protein, 129 aa, Unknown
  Obtained from environmental sample
  misc_feature (1)..(129): Xaa is any amino acid
MRVISWNVNGIRSVEKKGFASWVKNESADMVCIQETKARPDQLSPELLEIQDKNGKPYHAYWACAKRPGYSGVGIYSKTEPLNIKNLGIEEFDDEGRVLQAEYKDFTLISVFFQIPRMTRADLSWGGGW

SEQ ID NO: 80455 - protein, 71 aa, Unknown
  Obtained from environmental sample
  misc_feature (1)..(71): Xaa is any amino acid
NVIFKRAEIIHDAPLYIVDMLDMTMPYIQAMPRMLRIQERVEIVFIDYIGGILSENKQLARYEFISDVSRS

SEQ ID NO: 80456 - protein, 302 aa, Unknown
  Obtained from environmental sample
  DOMAIN (1)...(302): UvrD/REP helicase
  misc_feature (1)..(302): Xaa is any amino acid
MAGRACLIDERAAGAMLRTFHSFGAWFLRRNGGCIGLDSNFVIYDDDDMISLLATIMQGSPKADVKKAAYHISRAKDYFLSPDDPGLAAIDGKKKFRELYARYEERLAHTGNVDFGDLIKKPVEILRREPQVAQRLRERFSVIMVDEYQDANVAQFELLKELCGPDTYVCVVGDDDQSIYRFRGAEVKNILQFPDRFAGTEIIRLESNYRSAAPILKVASSVVDHNYGRLGKTLRAERGGGKQPVLAFLPDQDEEVNFCASLIENAVKPKITPRPMPQRAMPQRPNTRIGRYCTGLTPITRL

SEQ ID NO: 80457 - protein, 99 aa, Unknown
  Obtained from environmental sample
  misc_feature (1)..(99): Xaa is any amino acid
MGEAYFYLGNYERSLLYMQRYANALPQGERVSTAFFFIGEIHRLSRRYHHADIAYTTALRFEPNIALWWYRLATVREQIGDRRSAIDATSLGRSDLGGS

SEQ ID NO: 80458 - protein, 82 aa, Unknown
  Obtained from environmental sample
  misc_feature (1)..(82): Xaa is any amino acid
MIDIRSDTVTQPTTAMRKAMAEAEVGDDVYGDDPTVNRLEILGAQMLGKKPPFSCPPVPLGSMALFTGAQGEPNDPGENCHI

SEQ ID NO: 80459 - protein, 195 aa, Unknown
  Obtained from environmental sample
  misc_feature (1)..(195): Xaa is any amino acid
MNKKTVLCILILIMVYASCSQKYDSENDFQINPMLDGVSAEIANYSGKKIIVNIPPMILEMPIVRIGDDAFMRKEMDCVIIPEGVTSVGNRAFAYSSLESVNIPAGLTMIGESAFAFCEKLDTYIIIPDSVKTIDKKSFANCKKMPGITIPASVTYIGEYAFHGWNYPQTINIIGLKVRMKPTMHGMPHLGQSDM

SEQ ID NO: 80460 - protein, 301 aa, Unknown
  Obtained from environmental sample
  misc_feature (1)..(301): Xaa is any amino acid
MDQIGTRKLSVVLLVLLVAGSLFAGGGGDKGGGGKTLIGIAMPETHVQRWVKDGASLKAEAIKRGYDAKDQYGNADQAQQNQQIQSFLTQGAKALVVGCINDGVGSVIAEANKDKVVVVAYDRIIPNSADYDYFITFNNFKVGVLQAQSIVDGLNLNAATAAAPKQITLFAGSPTDGNAFFFFDGAMSVLNPFIDKGVLKVVGPYPKTSADTANFQRIATENWQAPIAKTRMENLLNNDAKSVTLDAILAPNDTLARAILEACKADAKYKTKLPVISGQDAEFDSAMSIKNGEQYSTVFKD

SEQ ID NO: 80461 - protein, 154 aa, Unknown
  Obtained from environmental sample
  misc_feature (1)..(154): Xaa is any amino acid
NCGYLQTLDIGDLKPPMPKSRFSARFQDTLPKADLCVVSWGFDAAMTRIAVSEMRKHGFKIACLYPRLLFPFVNGHYMELLNFCPRIAVVESNYTGQLASLIRMNTEINPISVKKYNGEPFAPEEIEAELCGIINMEKFISDMSNANNDGAVKT

SEQ ID NO: 80462 - protein, 310 aa, Unknown
  Obtained from environmental sample
  DOMAIN (218)...(310): Protein export membrane protein
  misc_feature (1)..(310): Xaa is any amino acid
MTDRHEFNLFIPAAIFSVLLTASGVVSYFLIHFNLGVDFQAGLIQEVQFAPTAFSLTWSGRGNATVSFDRSGLHIINMGVGIESRTLDFPFSEHETVGSLVQALGEVEGMEVKSSIPEETSSQWLVRSAQGNSQLGSEPYLVHYLDPQSQEIPIAKVREALVSLGQSVSAQPLGQKRDRHFMIRLQDKEKEMEKETSTADGNVSTDVTAAAAARITRILENYFGTGEVLVLRSDYVGSRFSKNLTDQAGILIACTLLLVLIYASIRFKPQYAIGAVLGIIHDCLVITSFVVWTRMGINTTTIAAILTILG

SEQ ID NO: 80463 - protein, 165 aa, Unknown
  Obtained from environmental sample
  DOMAIN (1)...(164): Glycosyl hydrolase family 10
  misc_feature (1)..(165): Xaa is any amino acid
ELYLTDYTLTFPRWGKLGEFLRLVDYFIANDAPIDGVGFQTHISFDFDPSNISRAIDLVYAKTRKDGTHLMSQVTELDMGLYKNDTEPELSGAELSTRLTKQATLYRQLFDIFNEKYDAGKLDMVLLWGTDDGHSWVGTSKGRKNYPLLFDRNYQPKEAFLELVR

SEQ ID NO: 80464 - protein, 135 aa, Unknown
  Obtained from environmental sample
  DOMAIN (15)...(134): tRNA synthetases class I (C) catalytic domain
  misc_feature (1)..(135): Xaa is any amino acid
MSFTFYNTLGREKQAFKPLQEGKVGFYGCGPTVYNYAHIGNLRAYVLHDILVRSLRHAGYEVNHVMNITDVGHLSDDADDGEDKMVKSAEERGKSVLEIADFYTKAFFNDTDRMNITRPSIVARQLSICGSALIR

SEQ ID NO: 80465 - protein, 90 aa, Unknown
  Obtained from environmental sample
  misc_feature (1)..(90): Xaa is any amino acid
MEEAIQAYHQITAESMFRESMRLYELARHNEASALRHAREEGEAKGKAEGKAEGKAEEALEIARKMKNAGRPLDEITEFTGLPAESIEKM

SEQ ID NO: 80466 - protein, 127 aa, Unknown
  Obtained from environmental sample
  misc_feature (1)..(127): Xaa is any amino acid
LENSNVANLNVPSSMLHTAGNKILNERDEEVRLVGVNICSLEWKSDGDNVLSSVYEVFANWNCNLVRLPLSQDRWFGKVSDYSTPNPPDGSAQYQKIVDDAVKLALSFGKYIELDLHWSNAGEWGKT

SEQ ID NO: 80467 - protein, 334 aa, Unknown
  Obtained from environmental sample
  DOMAIN (105)...(208): Glycosyl hydrolases family 2, immunoglobulin-like beta-sandwich domain
  misc_feature (1)..(334): Xaa is any amino acid
FEGSRLVYPGLFAIFRKLSGERLLLRFEGAAYRTTIFLNGKFIGTHDGASTPFNVDISDVVETENRIVVVVDARRIHTRIPMENTDWFNYGGIYRDVYLVRVPPVFIKDWFVRLAPDGTYSTILADITVASAGGSQTNAIAFANGTACLEIQELSIKQEIAIKDGKGQAKISAKPELWSLENPKLYDVSVSFSSSDQSDLVNDRIGFREIKANGREISLNGKKIFLRGVCVHEDHFALGKTTTEEIIRQTIRDLKAMNGIYLRLAHYPHDARFARIADEEGVLLWEEVPVYWAVAFDNPGTYADAENQLSELVLRDRNRASVIICRGTKLAITW

SEQ ID NO: 80468 - protein, 244 aa, Unknown
  Obtained from environmental sample
  DOMAIN (195)...(241): LysM domain
  misc_feature (1)..(244): Xaa is any amino acid
VPDFDLGSKSRGYDSLEKDVEKDDEHKFPWLIMGLATLFVALVIGALWFSFLGGKEVFFKDSAPPPLAYQETQQINEPVVQPPTPPPQMPPPVRQEPPPQTPPAARQEPPTPPPQTPPAARQEPPTPPPQTPPAARQEPPTPPPQTPPAARQDPPVIKAPAAPPSARPTSQRVRPMAPVMSYKIPAVIPKNGVVYQIQWGDTLWDISYAFYRNPWFYQRIAKDNKISNPDKILAGSNVRIYPRR

SEQ ID NO: 80469 - protein, 200 aa, Unknown
  Obtained from environmental sample
  DOMAIN (1)...(198): Histidinol dehydrogenase
  misc_feature (1)..(200): Xaa is any amino acid
PFSPGLSARYSIRIFAIGGAQAIAALALGTESVPRVDVIAGPGNKFVAAAKRILFGEVGIDFIAGPTDVLVIADDKDSNIEKTADLIAADMLGQAEHDPDARARALVPNKELAEKILAAIERRIKSLPTERTARASLNAGGLIIVYNTKEEAIRIANTIAPEHLELQTVNAESWIPKLKNTARFLSAVFAPKSSGRYQRE

SEQ ID NO: 80470 - protein, 280 aa, Unknown
  Obtained from environmental sample
  DOMAIN (2)...(139): Homoserine dehydrogenase, NAD binding domain
  misc_feature (1)..(280): Xaa is any amino acid
VGTGNIGGTLLDQIAETKEKLDRNMIKINIIGVANYDKMIFSQEGLEPKKTKNLVNEGGKGTVPFVISDFIEKMISYNLPNTCFCDCTASDDIAASYDKILVNSIPIVTPNKKANSGKLVYYKKLISYSRERGIPYLYETTVGAGLPVISTIRDLYLSGDKIVRIEAVPSGTLSFIFNNFDGSKPFSALVREAKAKGYTEPDPRDDLNAMDAARKALILAREIGASLEIFDVKIEPILPPACLKRKNVEPFSKNLKKLMIILRNARKEAGKNKNYATSQL

SEQ ID NO: 80471 - protein, 140 aa, Unknown
  Obtained from environmental sample
  misc_feature (1)..(140): Xaa is any amino acid
MKNNFADKVIIQALLCATLLLVLVTGCDSCDGSGGEDKVPENPGSLAIMTWNVQALFDGIDNGTEYDDYRESAGWTQEKYKGRLNVIAAAIGGLERKPDLIAMQELESPMVVVDLAAALSKHGYGWTYLPISADSDLGLA

SEQ ID NO: 80472 - protein, 210 aa, Unknown
  Obtained from environmental sample
  DOMAIN (57)...(203): Transglycosylase
  misc_feature (1)..(210): Xaa is any amino acid
MGIHSNSAISTWLVRFLAALTVILAGLIGLGLGLSLAETTNIRNQENFFDFAPALPTKILDIEGNLITEFSADEKRALVSLNDLPRHLIYAVLAREDYDFYNHKGFSVRGIARAVVGKLIGKDLGGGSTITQQIAGTLYTDRREYSLTRTIKELWWAFQMERRFTKNEILEISPYQIIMGPGVYGVESGSQYFFRHSAKENYPRGIGAVG

SEQ ID NO: 80473 - protein, 270 aa, Unknown
  Obtained from environmental sample
  misc_feature (1)..(270): Xaa is any amino acid
LFWKGGPLTFNPTLIRVFAQRLGLKDSDIILPRKAELFIAYGTALAINENFLEQESGYDRNFSPEAALTSLAMYREIVLGNTTLQNVSYFLNEAEKENFHARHKMQVINHEISAQRGETLRVYLGIDAGSTTTKFVLIDEDENVIDSFYNPNKGEPLKVIKQALLDMHAKYTAAGVNLDIIALGTTGYGELLFDKALGADYHTVETVAHAAAAQKYIPDVSFILDIGGQDMKAISVSNGIVTNIIVNEAFPRAAVLFGNIAKPLAITGGN

SEQ ID NO: 80474 - protein, 267 aa, Unknown
  Obtained from environmental sample
  misc_feature (1)..(267): Xaa is any amino acid
MNIKDSAQRFKEFWNDFKKEKSGLVGLGILALAVLIVIFEPVFLPFKDVNNNWRNITYWENNPAAAAPVWTNLFSKQKSASSRHFSDPEISEADDPDYGLVAVYTFDYEYKFDRPPLDLILKATANGRVLMNIYIERPDGETISLGRVYKEGLENDPVRFSADTDARAMVYEFASWFASSSSISRSGGRSAIRPTNVIFSETGLNMLEERLPLKGNYKYIAKIPMQLLADANNYIVDPSLYITGRVSGALGTDTPKRGYFFWRYCGA

SEQ ID NO: 80475 - protein, 316 aa, Unknown
  Obtained from environmental sample
  misc_feature (1)..(316): Xaa is any amino acid
PDFPPDDRESSDFAALVLSLIWGIGFEFQTFDNRIVLMSELNSENKYPADEAGFKTGDRIIEVNGKKTSYFHELKENIAINPEKLLPVTVDREGEKTTLFVRPNLDKSTGMGIIGVSFWADTVIDDIVPGSDAAIAGLLPGDRITGVNETPVVNTIEFSRALETGSATAAISYTRGGVDGKVEIVLSESSGNDLGIIWPRVTYKTPPLSPPAAVAKGVSESWKTLVISLRSLSLLFKGIKLTEAVSGPVRITYMVGDIATEGFGRSFVTGLRSLADFLALISIALCVTNLLPLPVLDGGMIIMAAVEWVRRKPIHP

SEQ ID NO: 80476 - protein, 86 aa, Unknown
  Obtained from environmental sample
  misc_feature (1)..(86): Xaa is any amino acid
MLQGRESEGAGIIMSELELRLLTDYKDNHNTLSIEGYIKASGFDALKKAAAMKSEDVISEISKAKLLGRGGAAIRPEKMLGHHPGG

SEQ ID NO: 80477 - protein, 74 aa, Unknown
  Obtained from environmental sample
  misc_feature (1)..(74): Xaa is any amino acid
MIMIDEFQDNHALQRDLIYLLAKNSGRPEKGLPSPKNLKNTRWFFWGDQKTSDLTPFRGENWAVFRNLGGALGN

SEQ ID NO: 80478 - protein, 323 aa, Unknown
  Obtained from environmental sample
  misc_feature (1)..(323): Xaa is any amino acid
VGPGDRGANDSGSLLEEGIYTGVLSVNYLNGYTATALSPPFNLRTTPPSAKIESEFTAFSPNYGGVQSEMIIKQEGSKEELWTGEIRRANAPASEKAVRSFRFNGIPLKELRWDGHGESGTFAADGEYTYELYAVDQAGNTGRSNTLRFRMSTVDTPVMISSDIRAFSPNGDRVKDTINLNPQIQVKEGIVTYKVEIQDNAGRTIRTFDGRGMPPAAISWDGRTAENAQAPEGMYKARLELRYEQGNQPSAVSLPFELDITPPKGSASAPYTAFSPNGKRATIPFTVKTEANDEWEAAIVGANGKQIKTWSWKSAAPEVVWNG

SEQ ID NO: 80479 - protein, 57 aa, Unknown
  Obtained from environmental sample
  misc_feature (1)..(57): Xaa is any amino acid
MPISGLCGNFVCTIKMQGDTDGLDLETPRRFAMIPDSEVVHLYHNKHELTWIMSNEQ

SEQ ID NO: 80480 - protein, 196 aa, Unknown
  Obtained from environmental sample
  misc_feature (1)..(196): Xaa is any amino acid
MEQLGYADSELAFPYLALVIKFLKHYPADLMELETPSPGAWLVGIAAKIMGMKVLSHYRTDVPSYTRSLVKEAWMRRYVLGLIRIFYQNTAPVISPCEAYRTILETEIKVKPEHIKVLPRGIPLENFSPELRKQNSTHSTFLYRGRISAEKIFAFLEECGKKSARKIKCKTYFLLRRWYLNLEKNMEEYSTCPLWG

SEQ ID NO: 80481 - protein, 310 aa, Unknown
  Obtained from environmental sample
  DOMAIN (1)...(97): Semialdehyde dehydrogenase, NAD binding domain
  misc_feature (1)..(310): Xaa is any amino acid
DFTPDDETADLPQEAVALDADCVFSCLPHAASAELLLPIIDRGIKVIDLSADFRLRDANVYKEWYCDDKHPAHAAPHLLERAVFGLCEHYRDQIAGASIIANPGCYVTSILLPLLPLYKGGVKIEWVIADSKSGVSGAGRGLKQNTHFPEANENFSAYSIGHKHRHTPEIEQELSAAAGRPITITFSPHLLPVNRGILSTIYLKTEISAAECGAIVKKFYSGSDFVRIRESSDLPQISYVVHTNYCDIAFTGGGGGQPVIAVSALDNLVKGASGQALQNMNIMFGIKETIGAFEVVSINRFNNYDGIFVR

SEQ ID NO: 80482 - protein, 146 aa, Unknown
  Obtained from environmental sample
  misc_feature (1)..(146): Xaa is any amino acid
MDEKARKAAEKAAEKAAREAEKAAREAQKNAPKVHRVEVSLDNGRSYKSAKGGEKWKFRLETGELTPGPLPIVVKATFSDETVAVRRIILTVDTRPPVVNVMAPPENSSHRDTVLTYGSAKDDYDMDTGKSACAPGQLSLHNRGKI

SEQ ID NO: 80483 - protein, 307 aa, Unknown
  Obtained from environmental sample
  DOMAIN (21)...(135): Response regulator receiver domain
  misc_feature (1)..(307): Xaa is any amino acid
MKRGEDEKHKLGERPINKNDIRILVVDDSKVILDYFRVVARKLGVYCDTAMTGEEAISLVERDNNYHLYFLDFQMPDMDGLQVSHAIKPLVSEDSEVIMMTANEWTTDAEEAKNAGVHKFLSKPLFPPVIEGVIDEYISAKNQENTNERNLEVVYEGRKILLVEDMEINREILLALLEPTLLEVDCAENGLQAVSMFAEAPEKYDMIFMDVQMPEMDGYEATQRIRALEVPSAKNVPIVAMTANVFREDIEKCLQAGMNDHIGKPLDFNVVLEKLRTYLPARAYCLSPARFHCDCRSAAAIIREKKP

SEQ ID NO: 80484 - protein, 180 aa, Unknown
  Obtained from environmental sample
  misc_feature (1)..(180): Xaa is any amino acid
GGERNYFFFSPPTKKKGGGFFFFFFFFPPPPGRGGGGGGFFFFFWGGGEKKKTKRKNIFFFFFFCGEKKKKKKKFSPLFVFSPPCFEKKNFLKKIYFFFGKNPPREGGPQKNPFFLLFFPGGGFAGFFCGGDLPPLFIEKPVFPKTKKRFSPKTGIPKKGGGFTGFWGIPARFWPSKSFK

SEQ ID NO: 80485 - protein, 212 aa, Unknown
  Obtained from environmental sample
  misc_feature (1)..(212): Xaa is any amino acid
MDCIKGEMTEKQSFIIAQGTQPIKGEDGRVEFCFNIDPSPAPTIAEDGSADYKNIDIVNLVNNGTVLAKLYPAQKGTPGKNVYGNAVAALNGIPARLPVGANTAIPTDNPNSLIAVSDGIASYDDTSVNVSPGYVISGDVDFKTGNIKYDNSIMINGDIKSGFKVECGGNLQVKGIIEDCPDTVKGDILCQSASSAPAREPITATATSTLNS

SEQ ID NO: 80486 - protein, 275 aa, Unknown
  Obtained from environmental sample
  DOMAIN (19)...(229): metallopeptidase family M24
  misc_feature (1)..(275): Xaa is any amino acid
MDLRAAKMRRRLRFTAKPAILTNKIIDLLEKRARTGRIKTEADAVMLIELEARKLGCDGAAFEILAAGQDRSFGIHAFPAWTDAPFGGQGLSILDFGVRYCGYNTDVTLTFVREPSSQQLKMVNLVERAYKAAVDSVAAGDDTRSTAILVDELLAKSRKRLVHGLGQRIGLDVHEYPFLRNRHEITWGLQPGMIFSNRAGAVRPVAWRAAAWKKIFLIHQKWGLKILTHFPEKSGLGFPRGKKEGGGKGEKRPRRARGSPFLGQGAKKKRRLNLG

SEQ ID NO: 80487 - protein, 181 aa, Unknown
  Obtained from environmental sample
  DOMAIN (75)...(176): Peptidase family M20/M25/M40
  misc_feature (1)..(181): Xaa is any amino acid
MMDKRTLKNRIAEIAPDIIGLRRAIHRRPELSGREFGTARLVREALSAWGVPAQYHLDKTAVSAKIVSGKGPTVVLRADMDALPIQEENNVPFASVSAGVMHACGHDMHTAILLGAARILHESKGLWKGTLLCLFQPSEEEEPGGAFGLIKAGVFPSKAAAVFGLHVSADHKCLGRSDMPG

SEQ ID NO: 80488 - protein, 90 aa, Unknown
  Obtained from environmental sample
  misc_feature (1)..(90): Xaa is any amino acid
FSRYRESGTEKITIPSYIVKPENEISVAEGSKSMTVIKDALREFGKSGVMPWLSLDPDAMKGKFLASPRRSDVTDLGDIKEQMIIELYSK

SEQ ID NO: 80489 - protein, 213 aa, Unknown
  Obtained from environmental sample
  DOMAIN (25)...(206): RNA polymerase Rpb3/Rpb11 dimerisation domain
  misc_feature (1)..(213): Xaa is any amino acid
MARKNLMAGIKRPKSFTFEHGELSQNYGMFIASPFEPGFGTTVGNTLRRVLLSSIQGYAITAVKIESIDANDNTHNVSSEFETIPNIVEDTLEVINNLKQIRLRLPQDAEQDVLLYEWTGRHEIKSDDFARPGQVDVLSTGQHIMTLMDNANIRFEIQIDLGRGYVPSEVNERYIEVINTIPVDAIFSPVRKVKFNVESTRVGQRNDYDKLVL

SEQ ID NO: 80490 - protein, 307 aa, Unknown
  Obtained from environmental sample
  DOMAIN (1)...(179): Pyruvate phosphate dikinase, PEP/pyruvate binding domain
  misc_feature (1)..(307): Xaa is any amino acid
VRQSTGKDFPQAPKDQLWGAINAVFGSWMNERAIKYRQLNDIRGLKGTAVNVQSMVFGNFGDDSGTGVCFSRDPSTGINEFYGEYLMNAQGEDVVAGIRTPEKIATLAKRNPVIYQQLVGIKNKLEKHFRDMQDLEFTVQQGKLFLLQTRNGKRAGTAAVKCAVDMVAEGLIDKKTAIMRVTPGHLDQLLHPMIDPAAGKQAVSITKGLNASPGAASGRIVFSAKDAEAWQAKGEKVLLVRKETSPEDIGGMVASQGILTSTGGMTSHAAVVARGMGTPCVARAKGVFGAGRYSGYRRQNIQGKAIG

SEQ ID NO: 80491 - protein, 170 aa, Unknown
  Obtained from environmental sample
  DOMAIN (43)...(167): Response regulator receiver domain
  misc_feature (1)..(170): Xaa is any amino acid
LIKSFSKPLFPSSIADVINECLGVDRKKIEEAGVDINGIFADKRILLAEDVEINREIVQALLEPTQLEIDFAENGTEAVRKFNEAPDKYDLIFMDVQMPEMDGYEATRRIRAIEADLNKDKPEPVRVPIVAMTANVFREDIQKCLDAGMDSHVGKPLDFDEVINRLRNYW

SEQ ID NO: 80492 - protein, 300 aa, Unknown
  Obtained from environmental sample
  DOMAIN (121)...(298): Trypsin
  misc_feature (1)..(300): Xaa is any amino acid
PRAKVRIGRGKRWDDAASYSRSLSCIEPQYQSAEPDFILSLAKEKLEEKDNLSAFLAAVHAHELRPLTFEDAALFLDRAVQVKQRRTAAYFLAAAEKTGSAARIPASAAEYARGSDSVAAMINGVATVIVDKGIKIERGVGYADKVLGSAFFIDSTGLLITNYHVIASEVDPKYEGYSRMYIRMGDSSSPRFPARVIGYDKALDLALIKTEYKSEFIFSIVDKVVPQVGDTVIAIGSPVGLEKTVTSGIVSSLSRRLLQIGDVYQIDAAVNPGNSGGPVLDASGRLVGIVFAGADQFQGA

SEQ ID NO: 80493 - protein, 193 aa, Unknown
  Obtained from environmental sample
  DOMAIN (5)...(161): von Willebrand factor type A domain
  misc_feature (1)..(193): Xaa is any amino acid
MPAPDMNGIIGFPAGKNLIIEFAQKRLPDNIGFTAVGRDASFLSPPTTDRDALYSRLEMLRIGEMGDGTALGTGLAAAAYHLDKSNAKRKIAVLITDGENNAGAIHPEAAAAMLHEIGISLWVIGIGSAGEVPIDYLDPFTKIRRTGRFDSRFNIESLRHLSLAGGGTFIYAPTAGSLPPPSAARPSCKGGKP

SEQ ID NO: 80494 - protein, 218 aa, Unknown
  Obtained from environmental sample
  DOMAIN (22)...(68): Bacterial regulatory proteins, tetR family
  misc_feature (1)..(218): Xaa is any amino acid
GSPRYQIGRENSKEPEIRKSEILDTAEKLFFTKGYEETTINDILEAVKIAKGTFYYYFKSKEDVLDGIVKRQIDAGLKKAQAIAADPQLGAEEKLLSVFMAQKLKKPVKKNILPIIHKPANALLHQKIISEYVLRLSPILTDIVQEGIAKKDFNTPYPKEITEILLTAGLVIFDTAYFRWTQEEQMRRISAFIYTMERLTGAKPGSMAQLSGMFTINH

SEQ ID NO: 80495 - protein, 172 aa, Unknown
  Obtained from environmental sample
  DOMAIN (1)...(156): Conserved carboxylase domain
  misc_feature (1)..(172): Xaa is any amino acid
MLSNLESQLKEQGASDKIDDVLKEIAVVQKDSGYPPLVTPTSQIVGTQAVFNVLFGRYNKLSGEFQDLVAGQYGACPAPKNPDVVKKALEALKMEKEITHRPGDDIPSEYSKLETKPKNFRHKLSKHEDVLPTPCSRSRSRLLKNPQTVCCFKPKPRDLASPGRDSRPLLIN

SEQ ID NO: 80496 - protein, 109 aa, Unknown
  Obtained from environmental sample
  misc_feature (1)..(109): Xaa is any amino acid
MRNYEKNIFTTRLIFAGFGVLLLFLFACTAQKASGESSSGSSSLKQASGDSALGDGLFARITTSRGDIVLRLEYQKVPMTVCNFVALAEGKMTAAGGKPFYDGLLAISK

SEQ ID NO: 80497 - protein, 261 aa, Unknown
  Obtained from environmental sample
  DOMAIN (1)...(93): Toprim domain
  misc_feature (1)..(261): Xaa is any amino acid
VERAQDVRVIEESREFRGLFHILGGLIAPLEGVNPGDLAIAQLLGRVRDEGVREVILALNPTIEGDTTALYIQKFLKEKLLSGQLEISRLASGLPVGGDLEYADRLTLSRSLRGRITDVLDLFGNPPGFRTGPIGLKGGQNIFQEVWILGFFHEPDCLGVGKHEKLGLKSVNGFPLPWPLTPAKPNENRFVYKKRLNQFLVGNIPFARAKLLVPPNNPGEGNPPPGTEPPCFNFGFNPPPQNPPRHLKGETPFWGEPPLYW

SEQ ID NO: 80498 - protein, 287 aa, Unknown
  Obtained from environmental sample
  misc_feature (1)..(287): Xaa is any amino acid
MKGAPYRYRLETSVQDAARQKIFRARLCFGSSSFFFTLAARLDSGTIKTAVTDDTATPPAYFLSAGQPATLSWALVSPNGDGMQNQAGDWSIQLVRHEWKQARQQGAGGRINLVWERVEEIAAQRNVKITTGNNSGVFNFTPDKSGLWELRLSGRDQKQRIAATRSRFYVTGAGWVRWDSDDVDTITLNTDRQSYAPGQTAKIMVRSPLEKGKYLLTLERENVISQKIIELNGSALTIDIPIEESYVPIIYAALSSYTVRSAAVQNSYYEPDLDKPKGGFSALRRFL

SEQ ID NO: 80499 - protein, 208 aa, Unknown
  Obtained from environmental sample
  misc_feature (1)..(208): Xaa is any amino acid
MALKKKRPFTLVVAGCMAERLGEQLKKDYAVDYVMGTSARSLFPLILESVEKGSVFTETAEKPIFSFSYFHRDSSSPFRSFVPIMHGCNNFCSYCIVPYVRGRELSRDPKAILEEIRLLGSRGVKEIPFWAKRTFLLWEDGEDSVLTSPPFAPIASDLAERTIKWVRFCPAIPKTVRELISVLAENSVFCGIINLCVQNGSKPNSPPR

SEQ ID NO: 80500 - protein, 143 aa, Unknown
  Obtained from environmental sample
  misc_feature (1)..(143): Xaa is any amino acid
LAKDINSIENHREREKGVLVYPVYSRRSGGLSVGINLFPDQKCCPFDCPYCEVFPFSTKAVFSLKQMEDELRSVIADAGERNIPVKDICFSGNGEPSLSPDFPKALGLAVRIRRELVPSAKLVLITNGAGFGSEILAISGGKN

SEQ ID NO: 80501 - protein, 301 aa, Unknown
  Obtained from environmental sample
  DOMAIN (15)...(296): ABC transporter transmembrane region
  misc_feature (1)..(301): Xaa is any amino acid
LRILIKYLKPFTLLLFLAVMILFLQVFCDLSLPNLMSRLVNSILAQSAAQNAPETSAEDSNIIRLGLQMLIIALAGGAAAVSVSFLSTRIAAGIARDLRFAVFQKVESFSSREFDTFSTASLITRCTNDINQVQGIFIMGIRMICYAPIMGIGGIIMAVNHAPGMSWIIVLAVVVLICLVIALVSLVMPKFKMIQNLVDRMNRIARETLNGLMVIRAFGAQDHEKKRFDGVNRELTKTSLFVNQMMILHMPLMQFIMNSAIIPDIWTGAHRIAAAAMGVGDMMAFIQYTMQNNFFVPLLFM

SEQ ID NO: 80502 - protein, 259 aa, Unknown
  Obtained from environmental sample
  misc_feature (1)..(259): Xaa is any amino acid
MRKLYNYPWLIVAVIAVITVFFSFQLPRAKLDNNNLRFVPLDDPALETSRRIDEMFGSSFFILIGLQRQYGTVFDREFIDRIQEYSAVVENIPYVKEVTSLVSAEYICSKEDSIVVEKLVGENFSGTASEIAELKRRLLSWDMYERALFSDDFTATQILIPLSITTEEAGTSEVSEAFMRIRDLARESFADYASVYVTGMPVITATVNEAMSADLKLMMPLVVIVVLAVLFSPSGRLPRYAAPVDGGDRRRLVGRRDAP

SEQ ID NO: 80503 - protein, 212 aa, Unknown
  Obtained from environmental sample
  misc_feature (1)..(212): Xaa is any amino acid
MDGDANLMGYLPWRPARDIIDWSVPGESIFSRKKPLAENTIKRIAAGIEKYWGGFAEPFLAVLYGTNNSHPLDRPLSTITGSGAHHALIEPFLLPNEGYYRGNQPRSIDDPISTITASRGFGALIEPFPLFVDYNGNGSATPVKEPLRTITTKDRFALLEPFVLKHRAYSAGDRVHHLGEPFSNVVTKAEHCLVEHGVHLEYQVRMLKNHEL

SEQ ID NO: 80504 - protein, 166 aa, Unknown
  Obtained from environmental sample
  misc_feature (1)..(166): Xaa is any amino acid
LESDLKYFCRGFEHCYAKYSSLEKLFAGTENTWEGIALFREEMAKGNKGQYSKHISNPGKADEETGVNESKGSACKRLNLALRWLVRKGPVDLGLWKSIKPASLFIPLDVHVARTARKLGLLERKSNDKKTVIELTEKLRMYCAEDPVKYDFALFGMGVGAMNNEQ

SEQ ID NO: 80505 - protein, 301 aa, Unknown
  Obtained from environmental sample
  DOMAIN (204)...(301): MutS domain V
  misc_feature (1)..(301): Xaa is any amino acid
MPDDMLGEIQSNTHGNTYSNTKSNTPACGELASVIFRVIDKEGKLRDLPELRQIRQRISRLKSALDTCVSRYLTNEETRHMLQSTLPSQRDGRTVLAVKANFRGRIRGIVHEVSSTGQTVFIEPEDVVEKNNDILVETRNLEAEIKKILLNLTKQISEHSEEIKSFHLTVLKMEVLMAKARYSLETAGYFTPGCFTPGYFTPGYFTPSDGSAFALVQARHPLLENAVPIDLSMGSESTRALIITGPNTGGKTVVLKTVGLLAMMNQIGLCLPATGGSDLPVFDNIFADIGDEQSISQSLST

SEQ ID NO: 80506 - protein, 122 aa, Unknown
  Obtained from environmental sample
  DOMAIN (1)...(119): Starch synthase catalytic domain
  misc_feature (1)..(122): Xaa is any amino acid
MVASEAVPFAKTGGLADMVSALSLSLAALGHDVRIVLPRYYGVDRGKLKLLPGALGVPLGWGEEWSALYTTTLSGPGEKNPVNVYLIDHEIHFGQDGIYRGSSEPDFLDQFPAFTFLSRAAV

SEQ ID NO: 80507 - protein, 253 aa, Unknown
  Obtained from environmental sample
  DOMAIN (52)...(174): Response regulator receiver domain
  misc_feature (1)..(253): Xaa is any amino acid
MVEWGTETFIPNVRSVSLPVQSLSIANVLNGKADSKGYTENSNAVRFSCPHARLLVVDDIATNLKVAEGLLAPYRAVIDICLNGLQAIEMAQQHHYDLILMDHMMPEMDGIEATVAIRTWEKEQQKKDSGYRQVPIIALTANAILGMREMFIENGFTDFLAKPIDVSKLDEILDKWIPEEKKEQGKEGTRDQGSGNGDRNSNYDSASDLYLNNSKSQSQGPQSPSPPIPRSPLFLSPGVDTGKRHLHEPAELY

SEQ ID NO: 80508 - protein, 224 aa, Unknown
  Obtained from environmental sample
  DOMAIN (70)...(218): Integrase core domain
  misc_feature (1)..(224): Xaa is any amino acid
MRQQMAYISRWPAFGITAEIAEKLTKISPASIDRYLKKDKVALRLKGKSLTKPLDSLISRIPIRTFYTSEERKKPGFWQIDTVHHCGQATQGQYLHTLTATDVASGWIELCSLLNNAQKWTFEALSLIKTSALLPVLEFHSDNGSEFINNATELRCKDNRIPFTRSRDHQKNDNCFVEQKNGAVVRGYVGYDRLEGIREQALLAAVYKPLGPLLNSLCLPRNSE

SEQ ID NO: 80509 - protein, 315 aa, Unknown
  Obtained from environmental sample
  DOMAIN (168)...(305): HD domain
  misc_feature (1)..(315): Xaa is any amino acid
EKRLVILVDDIPANLRIGKNVLAEKYAVATAPSAEKMFRLLKNNNPAMILLDVDMPEMNGHEAIKILKSKPQTKDIPVIFLTARTDSDDELAGLSLGAIDYIVKPFQPPLLLKRIEVHLLVEAQRKELQYFNENLLKMVEEKTESILELQNAMLKTIAELVECRDDITGGHIERTQRGIKILLEELEKSGVYRDETEGWDMSLLLQSCQLHDVGKISIDDRILKKPGRLSDEEFEEMKKHAIFGEQIIEKIEALAKESDFLNYAKIFAASHHEKWDGTGYPRGLKEHEIPLLGRIMAIADVYDALFSSADLSWGT

SEQ ID NO: 80510 - protein, 128 aa, Unknown
  Obtained from environmental sample
  DOMAIN (1)...(127): 5-keto 4-deoxyuronate isomerase
  misc_feature (1)..(128): Xaa is any amino acid
MEIRYAEHPDDAKHYNTKTMREHFLFENVFIKDEINLCYTHVDRMVFGGAFPAEKALRLEGGKDFGSEVFLDRRELGIICIAGNGKISVDGTEYAMKKGDGLYVGKGIKDLVFSAADKNDPPQFYPCS

SEQ ID NO: 80511 - protein, 60 aa, Unknown
  Obtained from environmental sample
  misc_feature (1)..(60): Xaa is any amino acid
AEWDGFDVVRRFRGGEYHIAVRNAKHLCKGIAKILINGEKNDIIPIIEKGQICQVEVILG

SEQ ID NO: 80512 - protein, 216 aa, Unknown
  Obtained from environmental sample
  misc_feature (1)..(216): Xaa is any amino acid
MQFNTDKWSTYEDIDWNDSKSILTSVSGNTNLNFRIDHSTGLFSNTISFSGNGTWRDYSYLNEEVYTDPKTGVVDKKKMETDRQQQYALTNYMSSYSYNGTVKPFISDPLFAQTNFQYSFRGTLVKSKRYTDGDGPELTPEWGAWVKEQRTDGEDILGLNSHRLTANLSAKLFDKDQNISFSSELPPLDGLYTSMPHSGHGYHKHLLIFVWKNWNC

SEQ ID NO: 80513 - protein, 53 aa, Unknown
  Obtained from environmental sample
  misc_feature (1)..(53): Xaa is any amino acid
ASIGMEQQSVSLSRKENTVLQVRGRHDPCIVPRAVPCVEAAAAIALYDAYLDR

SEQ ID NO: 80514 - protein, 155 aa, Unknown
  Obtained from environmental sample
  misc_feature (1)..(155): Xaa is any amino acid
MGKTLTQKIFDTHTADQPFEGIFVLRLDRVFCHEITTPMAIDDLVSKKLDKVFDPSKIKAVIDHVTPAKDSQTALQGKTLRDWTRRHNIKDFFDIGRNGVCHAIFPEKGFVRTGFTIIMGDSHTCTHGAFGAFAAGVEPPILRELLGDSVMNGFV

SEQ ID NO: 80515 - protein, 69 aa, Unknown
  Obtained from environmental sample
  misc_feature (1)..(69): Xaa is any amino acid
AKTGLASVAFPNISTGVYGYPKDKAAAVAVETVRKTLSETPDIQRVLFVCFDEENYRFYEKLLQETKSK

SEQ ID NO: 80516 - protein, 304 aa, Unknown
  Obtained from environmental sample
  DOMAIN (90)...(231): Histidine kinase-, DNA gyrase B-, and HSP90-like ATPase
  misc_feature (1)..(304): Xaa is any amino acid
MAVKTKKTVKQSPVKGGVAGKGILARGIAKSGDAKGRVKETPRAVATKGNIAAKGSPGVYDESKVKTLSSLEHIRARTGMYIGRLGDGSNPDDGIYVLLKEVIDNGIDEFIMGNGKNIEVAIKDGDKPGAASVKVRDYGRGIPLGKLVECVSVINTGAKFNDEVFQFSVGLNGVGTKAVNALSVYFRVVAMRNGEFAEAIFERGKLKSERKGKLKDKQKDGTYVEFTPDPDIFKDYLFNLEFIEQRMQNYAYLNAGMTLSFNGSILFHSGACTICCTRRPAKTTSTPWATTGGNIRPTDSLSLP

SEQ ID NO: 80517 - protein, 209 aa, Unknown
  Obtained from environmental sample
  misc_feature (1)..(209): Xaa is any amino acid
MKCESVDWRSTDTFKDVTPEEWHDWHWQLKHTINGIEELETVLPLTDEEWDNITKCLKKFRMQITPYYAALMDTEDPHCPVRLQSVPRILELHDDISESSDPLDEDVDSPVPGLTHRYPDRVLLLITNMCSMNCRHCTRRTLVGDTDVHMSEYNLQMAIEYIEKTPTIRDVLLSGGNPFVLADNVLESIIKPILAIKHVEIIQIAQRRR

SEQ ID NO: 80518 - protein, 85 aa, Unknown
  Obtained from environmental sample
  misc_feature (1)..(85): Xaa is any amino acid
MTDYSALFTDFYSLTMAQGYWKNNRDERVVFEMFFRHQPFSGGYSIFAGLGTLLGRLSNFHFSEDDIAYLKSWAFLKRFYRYLKT

SEQ ID NO: 80519 - protein, 319 aa, Unknown
  Obtained from environmental sample
  DOMAIN (1)...(257): ABC transporter transmembrane region
  misc_feature (1)..(319): Xaa is any amino acid
MIRWHEGQAIIDIVIVKGDTSPLIRLLIIMMIVQLARLGLNYLQIILMEIASTDVMTRLRRDMYQTVQWQDYKFLSRFPTGNLMTRMTQDMDSLRHTVAWVSYQFIGAIALFAATFIFYLFLNWRLALCLVGITPFILFISSRFVKKIRPRFQLLREKLTNLGTAVTENIDGNRVVKAFAREEYEKEKVEKQNAEFRDINCENALITAKYQPLLETASQLLMVIMIVVGGFFLIKEWMTPGEYMAFSSLTWALSMPMWMLGPLLADLQRYTSAGQMIREVVESPKGISDISGAKPLTARPAGKIEFRDIRLTINETLFL

SEQ ID NO: 80520 - protein, 73 aa, Unknown
  Obtained from environmental sample
  DOMAIN (4)...(61): Ribosomal L29 protein
  misc_feature (1)..(73): Xaa is any amino acid
MVKANEIRELSPEEIVKKVDSLEEEFFNLRFQAKMGQLTNPIQLRTIKRDIARAKTILNEKTRPLGRSDHRLT

SEQ ID NO: 80521 - protein, 102 aa, Unknown
  Obtained from environmental sample
  DOMAIN (2)...(98): Thioredoxin
  misc_feature (1)..(102): Xaa is any amino acid
MPAIHFTEDAFKKAIQSSQPVLVDFWAPWCGPCKALGPTIDSLSELYQGKAVVAKINIDDVPELAVALEVSSIPTGKIFKNGAEIESFTGAFHRANTRRFWR

SEQ ID NO: 80522 - protein, 303 aa, Unknown
  Obtained from environmental sample
  DOMAIN (148)...(287): Flagellar hook-length control protein
  misc_feature (1)..(303): Xaa is any amino acid
GSPKDRFGTRADLRLRSRESVKTETISAELVQDEGRNQSLTANSAAMAAEESAENIQVTTEKARNRLNSAVAGAKNKSNAAENTVGTAAEYQQAGAQKAVSGEKDGRNKLEEARNKRRGVNIEVRDFRSDGTVTEGVARDGGVQLRTSAETRLSGENNSKDIVLELRLPDQGREAASATTAWEAKAGQAFEDLLARELHQNFNNDIVRHASVALRDGNEGTIRLALKPDSLGNVKIHLEMAENKITGQIVVESKEALRAFEREISSLENAFPRSGFEGANLEMSLAADGRGAEQQWQETEASQ

SEQ ID NO: 80523 - protein, 89 aa, Unknown
  Obtained from environmental sample
  misc_feature (1)..(89): Xaa is any amino acid
VEDALTEIYDSLKWLGLNGTEGPVVGGKYGPYVQSERLDIYGRMADQLIGSGHAYRCFCTSERLAEVRAEQEKSGGATGYDKRCRARAI

SEQ ID NO: 80524 - protein, 148 aa, Unknown
  Obtained from environmental sample
  DOMAIN (1)...(148): Chromate transporter
  misc_feature (1)..(148): Xaa is any amino acid
MILLQLLKSFLIIGVGAYGGGLVTIPMIEHQAVTVNGWITASELSELIAVAQMTPGPIGVNAATYTGYRVAGIAGASAATLGFVIPSLVLCLTLVYVLSKFGNAPWLEALKKSVQPAVAGLIAAAVLTYGKAALTDVWTAGIAVVAFV

SEQ ID NO: 80525 - protein, 287 aa, Unknown
  Obtained from environmental sample
  misc_feature (1)..(287): Xaa is any amino acid
MYQMARGGSPAIRKAKLIAAEKAHESALPASLQSPKIKTDKSAAVIGAGPAGIAAAVFLRRAGVPVTVYEKRDKAFGIVRYVIPSFRISDEAIDRDYLMAEKLGVEFKFNQPDNFSIDELRKKHGFVVIACGAWKEGSNVVKQGQEKIIDALRFLEDSKKTNCGLDLGKRVAVIGGGDVAMDCARAAKRNKSVESVTIVYRRTREFMPSQYEEQELALADGVQIKELLAPETWSDGVLGCEVMQLGDFDSSRRRGIEGMGIKESLHFDTVIGAVGARVDTEAFTRTT

SEQ ID NO: 80526 - protein, 150 aa, Unknown
  Obtained from environmental sample
  misc_feature (1)..(150): Xaa is any amino acid
MKKGIAFLTLVVFTLFFITNQVFSQRGGRAQEVIEVRLASPLPRNSDWGRLLDRISGEWSRVTDNQVRLRVIHDGLEGGEGKMLSSLNSDNIQAAVFTSAVLSEICPPVMTLSIPFIIKNNAELDVVLKDVLPASDDQITKPINLLSFPV

SEQ ID NO: 80527 - protein, 129 aa, Unknown
  Obtained from environmental sample
  misc_feature (1)..(129): Xaa is any amino acid
MKVVLLAGGLGTRLSEETDLRPKPMVEIGGHPILWHIMKTYSYWGFNEFVILTGYKSHIIKDYFINYYTRYSDLTIDMATNSVELPNIRNGQWRVTLLYTGSDTQTGGRLLRAKNICVRTLYVKLMRRG

SEQ ID NO: 80528 - protein, 311 aa, Unknown
  Obtained from environmental sample
  misc_feature (1)..(311): Xaa is any amino acid
MAVPSPSNLGLRLDLPEGYEYAEGNNQDRYSFQGPNGAMFDLVVYNGVYPDVEQMANDISRRLGSSGETALFEYEGKTAALLDLHFRNFSGWGLCLELAKNPGGSKTPFLCALAYSPSSGADMDLYHISALDSIAPSDLEARRPGPVMEFSYPRGETVEIPIKGMTLSALIRENDAEAAQALVDREFALLRYYENAPNWQQAWIRFYRAIYRDSWDRLINALFRLEREWNTDAKLDGRAFAGKALAFVQGFSYERDLEGSDFVNLVTALSEGRGDCDSRSMLWAMILEQADIPSAMMVSRNHSHAMGLADV

SEQ ID NO: 80529 - protein, 290 aa, Unknown
  Obtained from environmental sample
  misc_feature (1)..(290): Xaa is any amino acid
MADPAVHIFNGKLFIYPSHDRESGIGENDNGDHFDMKDYHAFSLEDPDNGQVKDHGVILDVKDIPWAGRQLWDSDVACKNGKYYLYFSLKDKNDSFRLGVAVADRPEGPFKAQGDPIRGSYSIDPCVFEEKGEYYIYFGGLWGGQLQRYKDNKALETGGTFPANNEPAICARVAKLSADMLQFAEEPRPVVILGKDGKPLTAGENEKRFFEASWMHKYNGKYYFSYSTGDTHFLCYATGDNPYGPFTYQGVILTPVVRWTTHHSIVGYKGKWYLFHHDSVPFGGRTWLPI

SEQ ID NO: 80530 - protein, 256 aa, Unknown
  Obtained from environmental sample
  DOMAIN (118)...(194): Domain of Unknown Function (DUF349)
  misc_feature (1)..(256): Xaa is any amino acid
LIKEIEELANAPVVLENRAKAFAMLEQWKAAGYMPALKIQEFWPRFKAGLDKVMDSVSPLLKEQEQSQEENLKVKEDICAQIETLAAAEGEWSEQLRKVQELQLKWKNTGFVPKTQNHVIWERYQAAINSFFKKQEAYKKRNLEQISERIAAREKLCEEAEALSTSTDWKNTPKVFTKLSASWKAAGSVPTEEYEKLLERFKKASDTFFERRNSFFENARKGREGVCQKIEALHFEASNPESIAALEAIEGEWEAL

SEQ ID NO: 80531 - protein, 311 aa, Unknown
  Obtained from environmental sample
  DOMAIN (155)...(269): Response regulator receiver domain
  misc_feature (1)..(311): Xaa is any amino acid
GGQKFTVRIDSAIPKTLIADDQRLSQVVTNLWSNAIKFTPEDGAISLDARYMGEKDGACIIQISVSDTGIGISAEQQKHLFRSFQQAESSTTRKYGGTGLGLAICKSIVEMMGGKIWIESEPGKGSTFTFDIEAQRGTAKEKHGLLAPEVNWSNVRIMAVDDDPDTLTYFRDITTGLGVSCDTALSGEDALKLVDKTGDYHIYFIDWKMPNMDGIQLVRELKARTKEPSVVIMNSAADWSTVEEEAKGIGVDKFLTKPLFPSTVADIINECIGLVQPQTEEEQTDITGIFAGRRILLVEDGRSTVKSSRPI

SEQ ID NO: 80532 - protein, 180 aa, Unknown
  Obtained from environmental sample
  DOMAIN (28)...(150): D-Tyr-tRNA(Tyr) deacylase
  misc_feature (1)..(180): Xaa is any amino acid
VKAVVQRVIDASVSVEGVVKGSVSRGLLVYLGVAHNDNEFDADWLSEKIAYLRIFDDEDGKMNLSLKDIAADDNKAGLLAVSQFTLLADARKGRRPSWNGAAAPEKAKQLYEYFIGAVRKTGLVCECGEFQAHMMVKYTNDGPVTIVLDTELITKPVKLYSKARAACRIADPIGGGENYW

SEQ ID NO: 80533 - protein, 294 aa, Unknown
  Obtained from environmental sample
  DOMAIN (108)...(257): Poly A polymerase family
  misc_feature (1)..(294): Xaa is any amino acid
MRYRYSTGENGKPVKKAIIYTRDEHGINFADVDGEAIDIIKKLKNSGFDSYIVGGAVRDLILGKKPKDFDIVSAASPTRIKKIFRNSRIIGRRFRLVHVYFGERIFEVATFRSLKDGHTSNTFGTIEDDVLRRDFTMNALFYDPEQQIVVDYVNGMKDIKNKQVKNIINLSDIFTDDPVRMIRAVKYAAATGFSIPLNLKMKITSQSNLLKTISPSRLTEEIFKIINSDKPGVIVDMLDKTGLYSYLQPQAAELMRKNAHFRKSYLQTMTALKGRENQRGQAISHFFAIILKAR

SEQ ID NO: 80534 - protein, 194 aa, Unknown
  Obtained from environmental sample
  misc_feature (1)..(194): Xaa is any amino acid
VEAREEWQSSQSAVDAARTYWLDETGVNCGMTRLYGRAMAGGRVYEYVPDVRFERTSLVGALGLGGVVAPLAYKGSLDGEFFAAYVKKRLAPAMKRGDTLILDNLSAHKVKGALRPLAEKGVKVVFLPVYSQDFNPIEHAWSKVKACLRKLKARTADELLPAMSVALDSVTPEDCRGGSGTAISRPSDHGGVLG

SEQ ID NO: 80535 - protein, 61 aa, Unknown
  Obtained from environmental sample
  misc_feature (1)..(61): Xaa is any amino acid
LFLNGFKVQSKLLVMYHVRVEEEFSAAHFLSRYKGKCEKLHGHNYKVRLWLAEISSAARPI

SEQ ID NO: 80536 - protein, 314 aa, Unknown
  Obtained from environmental sample
  DOMAIN (1)...(108): ATP synthase alpha/beta family, nucleotide-binding domain
  misc_feature (1)..(314): Xaa is any amino acid
LHDQMAREMGGALRELSGRMEEMPAEEGFPAYLPTRLAEFYERAGRVSTLSGAEGSVSIIGAVSPPGGDFSEPVTQHTKRFIRCFWALDRDLANARHYPAISWTDSYSEYAEEVRPWWERVNAIWAVVRNQCLELLKSDQKLTEIVRLIGPDALPDEQKLVLVTSDIIKDGYLQQNSFDEVDMYCVPAKQIRLLELIMEFHDRAKTCIKLGAPLTKISVLGLKEGLSRLKSTIKNDNLGEFDTFAAKMRSQLEELERSYRSREVSVVSRFRILNKPDKKKGCSHEQPFLSAFPTSYLKKNVNKRNLRIKARKNM

SEQ ID NO: 80537 - protein, 134 aa, Unknown
  Obtained from environmental sample
  DOMAIN (33)...(126): Rhodanese-like domain
  misc_feature (1)..(134): Xaa is any amino acid
VCGKNPSIHELFDYEQLAGLKKNQESKPIDTITAIELKKRLDNGDKIQFIDIREPHERAIVKFPNAIIMPLGQLERRIDELDPSIDAVFLCKIGQRSILGIRALQEAGYKGKLMNLQDGLNAWARDVDNSMPVY

SEQ ID NO: 80538 - protein, 288 aa, Unknown
  Obtained from environmental sample
  misc_feature (1)..(288): Xaa is any amino acid
LGFDQNLAPRVLNSGLLEAYRPKGAEKIFKELVLSADFRITPFDYSYFAIVYDSQAVNPPPQSLEDLTSAQFKQKLILIDPRTSSPGLGFFAWVKEIYGANWQDYWQRLKPSILTVAGGWSSAYGLFTRGEAPLVLSYTTSPGYHLEYEGTERYKAAIFTDGHAMQIEAAGLLKTAKNKDNAKAFLDFMISPDFQNIIPLTNWMYTVIDIPLPDSFRINPKSDKPLLPSPVSESDLNEWAALMINSPPEKIDKENCRLHTGPAAGTGGGFFFYTFIRRQFWVAHPRFY

SEQ ID NO: 80539 - protein, 65 aa, Unknown
  Obtained from environmental sample
  DOMAIN (42)...(64): MORN repeat
  misc_feature (1)..(65): Xaa is any amino acid
MAGEFMETGKLTLLDGSVYEGELTNGIAHGKGKITFPDCAVYEGDLVDGKTHGIGKLTSANGSII

SEQ ID NO: 80540 - protein, 99 aa, Unknown
  Obtained from environmental sample
  misc_feature (1)..(99): Xaa is any amino acid
LDIDYVNQQQESGIFIGNKSYWNRGYGKEALSLLVDYGSKALNFHNIMLKVYAFNKGGIKCYEKIGFKQIGKRREALHRNLEKHDIIYMDILPNEFYEK

SEQ ID NO: 80541 - protein, 95 aa, Unknown
  Obtained from environmental sample
  DOMAIN (4)...(68): 2Fe-2S iron-sulfur cluster binding domain
  misc_feature (1)..(95): Xaa is any amino acid
MINLTINGKAIEVEPGTTILQAAEMVNIKIPTLCYSPDLAPWSSCGICIVRLAGSPKMVRACCTACEPNMNIITHDPEIITVRRTVLELILSIIK

SEQ ID NO: 80542 - protein, 90 aa, Unknown
  Obtained from environmental sample
  misc_feature (1)..(90): Xaa is any amino acid
VLSPLPGGLFGFVGLPGFVGLLGLLGLFGLLGLGLEGLPGLLGVLGCEGCSSLPFPVVIGAGVAFDCAPAGICGLWVASPKASGFTALPF

SEQ ID NO: 80543 - protein, 209 aa, Unknown
  Obtained from environmental sample
  DOMAIN (125)...(209): Ribosomal Proteins L2, C-terminal domain
  misc_feature (1)..(209): Xaa is any amino acid
MGIKSYKPTTPTLRYKQISTKEEVTAEKPYKPLTVGIKRSSGRDNQGHISSRRRGGGHKKKYRIIDFKRKEFMGIPCTVETIEYDPNRSAYIALVKYANGSRAYILAPNGVKVGEKLNSGSGSEYKVGNTMPLKEIPLNALIHNVELKPGHGGQLARSAGTSAELIAKDEQYCQVRLPSGEVRLVLSVCLATIGQISHIDHNNEVSGSA

SEQ ID NO: 80544 - protein, 306 aa, Unknown
  Obtained from environmental sample
  DOMAIN (5)...(287): Phosphofructokinase
  misc_feature (1)..(306): Xaa is any amino acid
EAAQAPGGHNVIAGIFDGLKKGNPSSKLYGFLGGPSGLINNKAIELRGEIIDEYRNTGGFDIIGSGRTKIETPEQFASSLETAKQLNLSALVVIGGDDSNTNAALLAEYFAEKGTHIQVIGCPKTIDGDLKNEYIETSFGFDTACKTYSELIGNIQRDAKSAKKYWHFIKLMGRSASHIALECALQTQPNICLISEEIEEKKISLDQIVEDICASIARRAENRENFGVILIPEGLIEFIPDIKKLIEELNDVIALNGGEISKLTSLIDQLYWLSHEITPESYKLLHSLPPDISRELLMSSSCRSDP

SEQ ID NO: 80545 - protein, 307 aa, Unknown
  Obtained from environmental sample
  DOMAIN (1)...(305): Protein of unknown function (DUF1015)
  misc_feature (1)..(307): Xaa is any amino acid
IKAFRGTRFTLDKPDDLGSYCAPPYDMLDDAMVDALYAKHPNNVVRITQNKRAAADTANKDRHVRAAEFLNKWIGDTVITRDTDDSIYIYRQQFSVPGEDGKPVDRERIGFCSALKLVGLDEGVVLPHEYTLSGPKQDRYELMETTLANTGQIFGLASDDDGKLYGQIRLIMSSSPLVGIFKDENDAVHSLYKCSDNALIGQTAELMKTRTILIADGHHRYETALRFYRDTKDEAFSHVMMTIVSMADPGLIIRPFHRLVRKTNQGRSVGNMLEELAKYFDVVPIGKASADGVYKARRLVPNLYLGK

SEQ ID NO: 80546 - protein, 305 aa, Unknown
  Obtained from environmental sample
  DOMAIN (3)...(279): SecA DEAD-like domain
  misc_feature (1)..(305): Xaa is any amino acid
VTVTDILQARDTDWMRPIFSYVGLAVGTILSNMENEQRKENYACDITYGTNNEFGFDYLRDNMHRSMESRVQRGHSYCIVDEIDSILIDEARTPLIISGAAEDDTFKYAEVDKLLGSLKEVEKKADGEYPDETQGETVSGDYKINEKNKNISFTNQGLANIEEVLKKRNLIQGAIVDEENFEYIHYFTQALKAHLLFHIDVDYVVEDGEVQIVDEFTGRILHGRRYSDGLHQAIEAKERIKIAQRNRTLATITFQNYFRLYKKISGMTGTADTEAVEFNKIYNLDVVGFLQICRSPARPILTLGD

SEQ ID NO: 80547 - protein, 187 aa, Unknown
  Obtained from environmental sample
  DOMAIN (49)...(186): Thiamine pyrophosphate enzyme, C-terminal TPP binding domain
  misc_feature (1)..(187): Xaa is any amino acid
MGDTPQNRYLNGQAPSWCPGCSYFAVLSALTEYFEERGFAEDGVCVVSGIGCSSRLPLFLNTHGMHTLHGRPLPAAIGARLARPDIPVIVATGDGDLLSIGAAHFVHAARKNFDITVICMDNRMYAMTKNQSSPTSPIGYNGSLTPYGKLSVPLNIAELAISCGASMVSRSCAYDKGHGRKYTDQPP

SEQ ID NO: 80548 - protein, 220 aa, Unknown
  Obtained from environmental sample
  misc_feature (1)..(220): Xaa is any amino acid
QQSTGPTTQNSPDDFDIANSALGGVRLTNYKGTRTDVVIPNSIDGQRVTEIGFRSFAFALGNSPIDCTGLVAIDSVVLPSNLIEIGGDAFKYQPLTSISFPASVRTIGEASFLGNKFTSVVIPNGVKLVGQFAFTDSATLTTVTIPASLTAYAEFSSNYPTPTAGFANAFRYGDGAVTRITLPANVDPSNLRSTALRDAYVGNGRKAGTYVWTGRIWRVE

SEQ ID NO: 80549 - protein, 108 aa, Unknown
  Obtained from environmental sample
  DOMAIN (25)...(97): Protein of unknown function (DUF994)
  misc_feature (1)..(108): Xaa is any amino acid
LSKHNAPERDVLNGCLRYLQARQIYHWRNNVGAVQIRPGKYVSFGKKGSSDILGILPRGRLLAVECKAPDGRLSPEQKHFLESVRELGALALGIKEGWWELDEKLPEE

SEQ ID NO: 80550 - protein, 216 aa, Unknown
  Obtained from environmental sample
  misc_feature (1)..(216): Xaa is any amino acid
MKNKIIFFTLLAGAALALYAQDFGFGSDEDAGKELSGSSITVKVGGEIAMEFSPYTHDFDKQTISFWDMVSGSLNFKATGENVEAYAAFNLNADAISELWEEDTRLGELNYTPLIIDEAFLRGYIGSVTIEAGLRKLTWGKADSFGPLDVINPLDYTDLRNMTDIQAVKIARPLFHVSWDMDGFSKLKGFLFLFYGHRLPKRPLDARAIRDHERNA

SEQ ID NO: 80551 - protein, 69 aa, Unknown
  Obtained from environmental sample
  misc_feature (1)..(69): Xaa is any amino acid
MSNSGDSIALLGDEAVALGAIHAGLSAAYGYPGTPSTEILEYLIEESKESGFIAKWCSNEKTSRRLVPI

SEQ ID NO: 80552 - protein, 322 aa, Unknown
  Obtained from environmental sample
  DOMAIN (107)...(145): RHS Repeat
  misc_feature (1)..(322): Xaa is any amino acid
AIAIQPRARGSVHRRGRERFYPAEERFGELTSEVNRLADSQRYNYDGEGRVTANTAYSGKQTKVEYRDSEGITITTYSDGKQSLIERDMLGNIVRATNETGTIRYKYDAGGKLIEQSDEGAGEITYYVYNKSGQRIRMQSGNRDILYRYGKNGELLKVTDNSQRLEVSYEYDSMGREIRRVYGNGVRQETLYDQIGRIILIRETDSRGNLLRAEGYVYDEKGRRSHSVDEEGRVTKYEYDKQSRLSTVLYPWTKEKADADRREAEEAGLYFTADKGNGERYSFSASEQTALREILNKAGPMRGNAVASSQMLGRSDPWGPPW

SEQ ID NO: 80553 - protein, 261 aa, Unknown
  Obtained from environmental sample
  misc_feature (1)..(261): Xaa is any amino acid
MVFYGSMIMEGVIAMIWAAVTMAHFKYVGVESAVSAPVVVTKSSVEYMGWVGGILAVFGVVACPITSGDTAFRSARLTIADIFKFDQKPIKNRLSVALPLFAIGVILVLFSISSTQNFNIIWRYFSWSNQTLATIALWAASAYLAKTGKLYWFTLLPAAFMTVVVTSYFFTANECLGPLMTKITGSPATTYSIGIIIGLILSATLLALFIPFIGIKQKGIIKEIAISALRVMILTQPSAGERDLPKLGDVWELLGFDWRYD

SEQ ID NO: 80554 - protein, 93 aa, Unknown
  Obtained from environmental sample
  misc_feature (1)..(93): Xaa is any amino acid
MKVAIIHYWLVNMRGGEKVLKSLLEIFPDADIFTHVYNPKAVSSLIKDRRVITSRVNRLPFANKLYQLYMPLMPNALNDFNPASYDLVISANQ

SEQ ID NO: 80555 - protein, 166 aa, Unknown
  Obtained from environmental sample
  misc_feature (1)..(166): Xaa is any amino acid
LKLPDDIQNIIKRKYQSKHKEWLKATVLNNNSQVLWPLEINLDIPAEQDAFCQQDAVKTWISAWKSWRGKGDIIWTERHWRSLGVQTVPQRLILNEPADVVSWIGESEAWSRVVERLKTLIQRWPILIDVLPKYYRVLADFDDANFIDNRDVIRYARRSDHGGKRG

SEQ ID NO: 80556 - protein, 300 aa, Unknown
  Obtained from environmental sample
  DOMAIN (3)...(188): Amidohydrolase family
  misc_feature (1)..(300): Xaa is any amino acid
MAPAIPQLIEELLRKPQAVGLAEVMVEPILAKSGESEAMLKLAAELGKTAEGHAPELYGAALNAYSGAGVRSDHESTNRAEALEKARHGIRVLMREGSAAADLLPCLDIITKDHVDPRYCSMVSDDIDMLHIFEKGHLDHKVRMAVSNGVDPVTAVQMITINPAESLKVDGTRGSITPGKAADIVLLSSLEQCTVESVIAKGEIVVEQRKTVFNKPSFNYAACMLNTVHLKKPLAAADMVIPFSGASKAKVHLIGAKGTTLLTDRLEAELPVVNGFIAVDTKRDILHIACVERYGKNGGI

SEQ ID NO: 80557 - protein, 99 aa, Unknown
  Obtained from environmental sample
  DOMAIN (23)...(98): Ribosome recycling factor
  misc_feature (1)..(99): Xaa is any amino acid
MSETQTAAQQAAAEERMKKTLANLKDGFSALRTGRASAALFDKIRVDAYGEKSPINQVANISTPEARLIVIQPWDKALIGEIEKAIRSSELSLNPLNDG

SEQ ID NO: 80558 - protein, 312 aa, Unknown
  Obtained from environmental sample
  misc_feature (1)..(312): Xaa is any amino acid
DGWTLKYVPDALKTESLCLTAVQGDGHALEYVPDAHKTEAVCLAAVRQTHYALSFVPDAKKTEALCLIAVQEDGHELEYVPDAKKTEAVCLAAVRQTHYALEFVPDAKKTEEICLIAVEQYGIALEYIPDAKKTEAVCLAAVKERGSALGFVPDALKTGAVCLAAVQEDGRALEYIPDAKKTEAVCLAAVIQDESAQVYIPDDLKGKVKAALENAFSTEALCLAAVQQNGRALQYVPENFKTEAVCFAAVQQAHSSALEFVPENLKTADLCFEAVKHIGYYKQVDGALRFVPEELRGEVLHRLNTHIRTRPI

SEQ ID NO: 80559 - protein, 74 aa, Unknown
  Obtained from environmental sample
  misc_feature (1)..(74): Xaa is any amino acid
MARIKKTDNTQGRFIAVNLQEQLLPETFEWTIDYLINKMDMSLFEEKYNNDVTGAAAYPPRVLLKIILYCYSRE

SEQ ID NO: 80560 - protein, 97 aa, Unknown
  Obtained from environmental sample
  misc_feature (1)..(97): Xaa is any amino acid
YQESDRLAAVSAVLRALGADADETARGLVIRGGKTFKGGQVSSRGDHRIAMSAAIAATICAGPVVIQDAQAVNKSYPGFFDDLRSLGGTVDIMSNEE

SEQ ID NO: 80561 - protein, 59 aa, Unknown
  Obtained from environmental sample
  misc_feature (1)..(59): Xaa is any amino acid
MTDRPRYRGGHDMEFVKMAADIVTVLHEGKVLTEGVFSDVLADKTVQAVYLGRGGERNA

SEQ ID NO: 80562 - protein, 118 aa, Unknown
  Obtained from environmental sample
  misc_feature (1)..(118): Xaa is any amino acid
MDGKDIRQSVPDVHVDVPRLRAGNVGLQVFAAYVPASTDGDQAFAYANERLDAIDAFARSDDRLTLVETAAELRECLTTDKVGVMLAVENGVAIENSLEKLQQLRRRKVRILTLVHSG

SEQ ID NO: 80563 - protein, 301 aa, Unknown
  Obtained from environmental sample
  DOMAIN (131)...(301): Glycosyl hydrolase family 3 N terminal domain
  misc_feature (1)..(301): Xaa is any amino acid
MASPGFLTPPNTLFMANMRLILISIICLLLLPSCSKREVVNQENNTVNEPKKQITADEIFEKWQRATDIAASLDDRLLAAQVLISGIEGKGSLTSNTVSLLSEFPTGGIMLFKYNLDTDNDSIRALINQTAALVNGESGISPFIAVDHEGGTVNRFRRGTADLPDASSYWELSLKQDKQTSLNKIKNDSFKAGKDLKDLGINVNFAPVAEYLNDENRVFLSRRSYGPDPLFTANAAQSFIIGMEQAGIFCVIKHFPGIAGSDPHYAASVITRTRLNWTSWFFLLRQLLIISLGGGAGNGFT

SEQ ID NO: 80564 - protein, 78 aa, Unknown
  Obtained from environmental sample
  misc_feature (1)..(78): Xaa is any amino acid
LKGSDVVIKDISKFFGDFRALNNVSLEIKKGEFFSLLGPSGCGKTTLLRIIAGFESPDKGELTLDGNDGFSANLTMIN

SEQ ID NO: 80565 - protein, 215 aa, Unknown
  Obtained from environmental sample
  misc_feature (1)..(215): Xaa is any amino acid
MRGILRFASLSMALWIFLPFALFAGGGRQIETKTADGIEIWQTEFDVAGRKPGTWNVIINAKDAAGNIGVGGPYNIKVSPTAGLPEAHVVYPRPDMVVRSDIVEIVGTAESRYGLQQIILSMDGGPYVPLEGLEYWDYHIPAEEIGEGKHTVRVKAVDALGVEGLESRVDFILDNLPPIIELINHEVGDIISGGIVTIKGKVIEANGLQSLSISK

SEQ ID NO: 80566 - protein, 60 aa, Unknown
  Obtained from environmental sample
  misc_feature (1)..(60): Xaa is any amino acid
VSIDQLLQYLTSAMSLGSLYALIAIGYTMVYGILRLINFAHGDLFMLGRLNALQLKLQFS

SEQ ID NO: 80567 - protein, 281 aa, Unknown
  Obtained from environmental sample
  misc_feature (1)..(281): Xaa is any amino acid
LGAIDLGGESQDGTLSSSLGPDTGFGADDSSLDSTAFDTAAFDTGATDNQSADTSDFNEGFDLGGESSDFTPKTADDDFSSDTLPDIDFPGGDDSGFNTDLSGGDDSGQDVGFDSTLPDIDFSSADSTAGADATAGDSGAVHDYGDLGADFTSDSVEFDTGDGGSESADQEQHDMGFSNEAFGDDSFSLSGLDDILNKSKASEPKPPPPKKGLFGRKKPIEEEKKEEENIDEISLSQENVDSLLHTLSSYPLNLKVICEELIAEQARAALPRTAAISGKKK

SEQ ID NO: 80568 - protein, 307 aa, Unknown
  Obtained from environmental sample
  misc_feature (1)..(307): Xaa is any amino acid
ASGASILISQNFGADNSAPAGRVAQGSVMLLGVFSVLLSATLCLGASLAIGFFKLDPKVHAFAMEYFVIYSAGSVFVALSMILATIIRSYGHSRGPMLVNVVAMAINVCGNYLFIFRGFGDTIRGLAGINVSVIQGVALSTVASQIAAAVILYDMMRHRKDIVLEKGGLFKVPSAVYRRILAVGVPTAGENLSYNLGQIMIMRMVSALGTDAMAAFVYAVTVLRFVFITSISIGSAVQIKVGYYVGAAMSEIAQRKVYRYFLAGTAISTALVLTVKLLQFPIMDTFTHNPEIQTMAYGLAITRGGNP

SEQ ID NO: 80569 - protein, 106 aa, Unknown
  Obtained from environmental sample
  misc_feature (1)..(106): Xaa is any amino acid
MIEELSVRNFALIDSLNLSFEKGFTVLSGETGAGKSIIVGSLSFLFGAKADSDVIRSGSEEASVSAVVTVDDKNRDALQWLSQREIEPEESRLNPGSADLSCRGES

SEQ ID NO: 80570 - protein, 311 aa, Unknown
  Obtained from environmental sample
  DOMAIN (13)...(114): Homoserine dehydrogenase, NAD binding domain
  misc_feature (1)..(311): Xaa is any amino acid
GGPRSESAEGQMIFSLDGLDPVKTKEMLNKKGKVAGTEEYKLDSFIEKMTSFNLPNSCFCDCTASEEIASVYEKILRRSIPIVTPNKKANSGSLDYYRRLTSYSRERGIPYLYETTVGAGLPVISTIHDLFLSGDRIIRIEAVPSGTLSFIFNNFDGKKPFSALVREAKAKGYTEPDPRDDLNAMDAARKALILAREIGLSLEFSAVKIEPILPPSCLKAKDIDSFFSELEKADGVFEKRRAQEAAKGNALRYVVVIESGKAKLSLRGEPEGSPFRSLVDSDNIVVITPERLFKTPKWLLRGRGARNPRLP

SEQ ID NO: 80571 - protein, 81 aa, Unknown
  Obtained from environmental sample
  misc_feature (1)..(81): Xaa is any amino acid
GPPRLSQSSAELKTRNDGISVIPTDYLIEMTQYNNFEGTVTVLEKFKNSFFTEVKRYTYYMRFRDNVWTITNYSVTNLGTE
